(19) United States
(12) Patent Application Publication
(10) Pub. No.: US 2024/0226339 A1
(43) Pub. Date: Jul. 11, 2024

(54) Materials and Methods for Treatment of Hemoglobinopathies

(71) Applicant: Vertex Pharmaceuticals Incorporated, Boston, MA (US)

(72) Inventors: Chad Albert Cowan, Cambridge, MA (US); Ante Sven Lundberg, Cambridge, MA (US); Tirtha Chakraborty, Cambridge, MA (US); Michelle I-Ching Lin, Cambridge, MA (US); Bibhu Prasad Mishra, Wakefield, MA (US); Elizabeth Paik, Cambridge, MA (US); Andrew Kernytsky, Cambridge, MA (US); Todd Douglass Borland, Cambridge, MA (US)

(73) Assignee: Vertex Pharmaceuticals Incorporated, Boston, MA (US)

(21) Appl. No.: 18/612,729

(22) Filed: Mar. 21, 2024

Related U.S. Application Data
(62) Division of application No. 17/591,563, filed on Feb. 2, 2022, now abandoned.
Application No. 17/591,563 is a continuation of application No. 16/094,408, filed on Oct. 17, 2018, now abandoned.
(60) Provisional application No. 62/429,428, filed on Dec. 2, 2016.
(60) Provisional application No. 62/382,522, filed on Sep. 1, 2016.
(60) Provisional application No. 62/324,024, filed on Apr. 18, 2016.

(51) Int. Cl. A61K 48/00; A61K 31/395; A61K 38/46; A61P 7/00; C12N 9/22; C12N 15/10; C12N 15/113

(52) U.S. Cl. CPC A61K 48/0066; A61K 31/395; A61K 38/465; A61K 48/0008; A61K 48/0058; A61K 48/0075; A61P 7/00; C12N 9/22; C12N 15/102; C12N 15/113; C12N 2310/20; C12N 2310/315; C12N 2510/00

(57) ABSTRACT

Materials and methods for treating a patient with a hemoglobinopathy, both ex vivo and in vivo, and materials and methods for deleting modulating or inactivating a transcriptional control sequence of a BCL11A gene in a cell by genome editing.

### FIELD

[0001] The present application provides materials and methods for treating patients with hemoglobinopathies, both ex vivo and in vivo. In addition, the present application provides materials and methods for deleting, modulating, or inactivating a transcriptional control sequence of a B-cell lymphoma 11A (BCL11A) gene in a cell by genome editing.

### RELATED APPLICATIONS

[0002] This application is a continuation of U.S. application Ser. No. 16/094,408, filed Oct. 17, 2018, which is a national stage filing under 35 U.S.C. § 371 of International Patent Application No. PCT/IB2017/000577, filed Apr. 18, 2017, which claims the benefit of U.S. Provisional Application No. 62/324,024 filed Apr. 18, 2016; U.S. Provisional Application No. 62/382,522 filed Sep. 1, 2016; and U.S. Provisional Application No. 62/429,428 filed Dec. 2, 2016, the contents of each of which are incorporated herein by reference in their entirety.

### INCORPORATION BY REFERENCE OF SEQUENCE LISTING

[0003] This application contains a Sequence Listing which has been submitted in ASCII format via EFS-Web and is hereby incorporated by reference in its entirety. Said ASCI copy, created on Feb. 2, 2022, named C154270016US05-SEQ-MSB, is 14,446,677 bytes in size.

### BACKGROUND

[0004] Hemoglobinopathies include anemias of genetic origin, which result in decreased production and/or increased destruction of red blood cells. These disorders also include genetic defects, which result in the production of abnormal hemoglobins with an associated inability to maintain oxygen concentration. Many of these disorders are referred to as β-hemoglobinopathies because of their failure to produce normal β-globin protein in sufficient amounts or failure to produce normal β-globin protein entirely. For example, β-thalassemias result from a partial or complete defect in the expression of the β-globin gene, leading to deficient or absent adult hemogloblin (HbA). Sickle cell anemia results from a point mutation in the β-globin structural gene, leading to the production of an abnormal hemoglobin (HbS) (Atweh, Semin. Hematol. 38(4):367-73 (2001)). Hemoglobinopathies result in a reduction in the oxygen carrying capacity of the blood, which can lead to symptoms such as weariness, dizziness, and shortness of breath, particularly when exercising.

[0005] For patients diagnosed with a hemoglobinopathy, currently only a few Symptomatic treatments are available, such as a blood transfusion, to increase blood oxygen levels.

[0006] Genome engineering refers to the strategies and techniques for the targeted, specific modification of the genetic information (genome) of living organisms. Genome engineering is a very active field of research because of the wide range of possible applications, particularly in the areas of human health; the correction of a gene carrying a harmful mutation, for example, or to explore the function of a gene. Early technologies developed to insert a transgene into a living cell were often limited by the random nature of the insertion of the new sequence into the genome. Random insertions into the genome may result in disrupting normal regulation of neighboring genes leading to severe unwanted effects. Furthermore, random integration technologies offer little reproducibility, as there is no guarantee that the sequence would be inserted at the same place in two different cells. Recent genome engineering strategies, such as ZFNs, TALENs, HEs and MegaTALs, enable a specific area of the DNA to be modified, thereby increasing the precision of the correction or insertion compared to early technologies. These newer platforms offer a much larger degree of reproducibility, but still have their limitations.

[0007] Despite efforts from researchers and medical professionals worldwide who have been trying to address hemoglobinopathies, there still remains a critical need for developing safe and effective treatments for hemoglobinopathies.

### SUMMARY

[0008] The present disclosure presents an approach to address the genetic basis of hemoglobinopathies. By using genome engineering tools to create permanent changes to the genome that can delete, modulate, or inactivate a transcriptional control sequence of the BCL11A gene with a single treatment, the resulting therapy may ameliorate the effects of hemoglobinopathies.

[0009] Provided herein are cellular, ex vivo and in vivo methods for creating permanent changes to the genome by deleting, modulating, or inactivating a transcriptional control sequence of the BCL11A gene, which can be used to treat hemoglobinopathies. Also provided herein are components, kits, and compositions for performing such methods. Also provided are cells produced by such methods. Examples of hemoglobinopathies can be sickle cell anemia and thalassemia (α, β, δ, γ, and combinations thereof).

[0010] Provided herein is a method for editing a B-cell lymphoma 11A (BCL11A) gene in a human cell by genome editing, the method comprising the step of introducing into the human cell one or more deoxyribonucleic acid (DNA) endonucleases to effect one or more single-strand breaks (SSBs) or double-strand breaks (DSBs), within or near the BCL11A gene or other DNA sequence that encodes a regulatory element of the BCL11A gene, that results in a permanent deletion, modulation, or inactivation of a transcriptional control sequence of the BCL11A gene. The transcriptional control sequence can be located within a second intron of the BCL11A gene. The transcriptional control sequence can be located within a +58 DNA hypersensitive site (DHS) of the BCL11A gene.

[0011] Also provided herein is an ex vivo method for treating a patient (e.g., a human) with a hemoglobinopathy, the method comprising the steps of: creating a patient specific induced pluripotent stem cell (IPSC); editing within or near a BCL11A gene or other DNA sequence that encodes a regulatory element of the BCL11A gene of the iPSC; differentiating the genome-edited iPSC into a hematopoietic progenitor cell; and implanting the hematopoietic progenitor cell into the patient.

[0012] The step of creating a patient specific induced pluripotent stem cell (IPSC) can comprise: isolating a somatic cell from the patient; and introducing a set of pluripotency-associated genes into the somatic cell to induce the somatic cell to become a pluripotent stem cell. The somatic cell can be a fibroblast. The set of pluripotency-associated genes can be one or more of the genes selected from the group consisting of OCT4, SOX2, KLF4, Lin28, NANOG and cMYC.

[0013] The step of editing within or near a BCL11A gene or other DNA sequence that encodes a regulatory element of the BCL11A gene of the IPSC can comprise introducing into the IPSC one or more deoxyribonucleic acid (DNA) endonucleases to effect one or more single-strand breaks (SSBs) or double-strand breaks (DSBs) within or near the BCL11A gene or other DNA sequence that encodes a regulatory element of the BCL11A gene that results in a permanent deletion, modulation, or inactivation of a transcriptional control sequence of the BCL11A gene.

[0014] The step of differentiating the genome-edited IPSC into a hematopoietic progenitor cell can comprise one or more of the following: treatment with a combination of small molecules, delivery of transcription factors (e.g., master transcription factors), or delivery of mRNA encoding transcription factors (e.g., master transcription factors).

[0015] The step of implanting the hematopoietic progenitor cell into the patient can comprise implanting the hematopoietic progenitor cell into the patient by transplantation, local injection, systemic infusion, or combinations thereof.

[0016] Also provided herein is an ex vivo method for treating a patient (e.g., a human) with a hemoglobinopathy, the method comprising the steps of: isolating a mesenchymal stem cell from the patient; editing within or near a BCL11A gene or other DNA sequence that encodes a regulatory element of the BCL11A gene of the mesenchymal stem cell; differentiating the genome-edited mesenchymal stem cell into a hematopoietic progenitor cell; and implanting the hematopoietic progenitor cell into the patient.

[0017] The mesenchymal stem cell can be isolated from the patient's bone marrow or peripheral blood. The step of isolating a mesenchymal stem cell from the patient can comprise aspiration of bone marrow and isolation of mesenchymal cells using density gradient centrifugation media.

[0018] The step of editing within or near the BCL11A gene or other DNA sequence that encodes a regulatory element of the BCL11A gene of the mesenchymal stem cell can comprise introducing into the mesenchymal stem cell one or more deoxyribonucleic acid (DNA) endonucleases to effect one or more single-strand breaks (SSBs) or double-strand breaks (DSBs) within or near the BCL11A gene or other DNA sequence that encodes a regulatory element of the BCL11A gene that results in a permanent deletion, modulation, or inactivation of a transcriptional control sequence of the BCL11A gene.

[0019] The step of differentiating the genome-edited mesenchymal stem cell into a hematopoietic progenitor cell can comprise one or more of the following: treatment with a combination of small molecules, delivery of transcription factors (e.g., master transcription factors) or delivery of mRNA encoding transcription factors (e.g., master transcription factors).

[0020] The step of implanting the hematopoietic progenitor cell into the patient can comprise implanting the hematopoietic progenitor cell into the patient by transplantation, local injection, systemic infusion, or combinations thereof.

[0021] Also provided herein is an ex vivo method for treating a patient (e.g., a human) with a hemoglobinopathy, the method comprising the steps of: isolating a hematopoietic progenitor cell from the patient; editing within or near a BCL11A gene or other DNA sequence that encodes a regulatory element of the BCL11A gene of the hematopoietic progenitor cell; and implanting the genome-edited hematopoietic progenitor cell into the patient.

[0022] The method can further comprise treating the patient with granulocyte colony stimulating factor (GCSF) prior to the step of isolating a hematopoietic progenitor cell from the patient. The step of treating the patient with granulocyte colony stimulating factor (GCSF) can be performed in combination with Plerixaflor.

[0023] The step of isolating a hematopoietic progenitor cell from the patient can comprise isolating CD34+ cells.

[0024] The step of editing within or near a BCL11A gene or other DNA sequence that encodes a regulatory element of the BCL11A gene of the hematopoietic progenitor cell can comprise introducing into the hematopoietic progenitor cell one or more deoxyribonucleic acid (DNA) endonucleases to effect one or more single-strand breaks (SSBs) or double-strand breaks (DSBs) within or near the BCL11A gene or other DNA sequence that encodes a regulatory element of the BCL11A gene that results in a permanent deletion, modulation, or inactivation of a transcriptional control sequence of the BCL11A gene.

[0025] The step of implanting the genome-edited hematopoietic progenitor cell into the patient can comprise implanting the genome-edited hematopoietic progenitor cell into the patient by transplantation, local injection, systemic infusion, or combinations thereof.

[0026] Also provided herein is an in vivo method for treating a patient (e.g., a human) with a hemoglobinopathy, the method comprising the step of editing a BCL11A gene in a cell of the patient.

[0027] The step of editing a BCL11A gene in a cell of the patient can comprise introducing into the cell one or more deoxyribonucleic acid (DNA) endonucleases to effect one or more single-strand breaks (SSBs) or double-strand breaks (DSBs) within or near the BCL11A gene or other DNA sequence that encodes a regulatory element of the BCL11A gene that results in a permanent deletion, modulation, or inactivation of a transcriptional control of the BCL11A gene. The cell can be a bone marrow cell, a hematopoietic progenitor cell, a CD34+ cell, or combinations thereof.

[0028] The one or more DNA endonucleases can be a Cas1, Cas1B, Cas2, Cas3, Cas4, Cas5, Cas6, Cas7, Cas8, Cas9 (also known as Csn1 and Csx12), Cas100, Csy1, Csy2, Csy3, Cse1, Cse2, Csc1, Csc2, Csa5, Csn2, Csm2, Csm3, Csm4, Csm5, Csm6, Cmr1, Cmr3, Cmr4, Cmr5, Cmr6, Csb1, Csb2, Csb3, Csx17, Csx14, Csx10, Csx16, CsaX, Csx3, Csx1, Csx15, Csf1, Csf2, Csf3, Csf4, or Cpf1 endonuclease; a homolog thereof, a recombination of the naturally occurring molecule thereof, codon-optimized thereof, or modified versions thereof, and combinations thereof.

[0029] The method can comprise introducing into the cell one or more polynucleotides encoding the one or more DNA endonucleases. The method can comprise introducing into the cell one or more ribonucleic acids (RNAs) encoding the one or more DNA endonucleases. The one or more polynucleotides or one or more RNAs can be one or more modified polynucleotides or one or more modified RNAs. The one or more DNA endonucleases can be one or more proteins or polypeptides. The one or more proteins or polypeptides can be flanked at the N-terminus, the C-terminus, or both the N-terminus and C-terminus by one or more nuclear localization signals (NLSs). The one or more proteins or polypeptides can be flanked by two NLSs, one NLS located at the N-terminus and the second NLS located at the C-terminus. The one or more NLSs can be a SV40 NLS.

[0030] The method can further comprise introducing into the cell one or more guide ribonucleic acids (gRNAs). The one or more gRNAs can be single-molecule guide RNA (sgRNAs). The one or more gRNAs or one or more sgRNAs can be one or more modified gRNAs, one or more modified sgRNAs, or combinations thereof. The one or more modified sgRNAs can comprise three 2′-O-methyl-phosphorothioate residues at or near each of its 5′ and 3′ ends. The modified sgRNA can be the nucleic acid sequence of SEQ ID NO: 71,959. The one or more DNA endonucleases can be pre-complexed with one or more gRNAs, one or more sgRNAs, or combinations thereof to form one or more ribonucleoproteins (RNPs). The weight ratio of sgRNA to DNA endonuclease in the RNP can be 1:1. The sgRNA can comprise the nucleic acid sequence of SEQ ID NO: 71,959, the DNA endonuclease can be a S. pyogenes Cas9 comprising a N-terminus SV40 NLS and a C-terminus SV40 NLS, and the weight ratio of sgRNA to DNA endonuclease can be 1:1.

[0031] The method can further comprise introducing into the cell a polynucleotide donor template comprising a wild-type BCL11A gene or cDNA comprising a modified transcriptional control sequence.

[0032] The method can further comprise introducing into the cell one guide ribonucleic acid (gRNA) and a polynucleotide donor template comprising a wild-type BCL11A gene or cDNA comprising a modified transcriptional control sequence. The one or more DNA endonucleases can be one or more Cas9 or Cpf1 endonucleases that effect one single-strand break (SSB) or double-strand break (DSB) at a locus within or near the BCL11A gene or other DNA sequence that encodes a regulatory element of the BCL11A gene that facilitates insertion of a new sequence from the polynucleotide donor template into the chromosomal DNA at the locus that results in a permanent insertion, modulation, or inactivation of the transcriptional control sequence of the chromosomal DNA proximal to the locus. The gRNA can comprise a spacer sequence that is complementary to a segment of the locus. Proximal can mean nucleotides both upstream and downstream of the locus.

[0033] The method can further comprise introducing into the cell one or more guide ribonucleic acid (gRNAs) and a polynucleotide donor template comprising a wild-type BCL11A gene or cDNA comprising a modified transcriptional control sequence. The one or more DNA endonucleases can be one or more Cas9 or Cpf1 endonucleases that effect or create a pair of single-strand breaks (SSBs) and/or double-strand breaks (DSBs), the first break at a 5′ locus and the second break at a 3′ locus, within or near the BCL11A gene or other DNA sequence that encodes a regulatory element of the BCL11A gene, that facilitates insertion of a new sequence from the polynucleotide donor template into the chromosomal DNA between the 5′ locus and the 3′ locus that results in a permanent insertion, modulation, or inactivation of the transcriptional control sequence of the chromosomal DNA between the 5′ locus and the 3′ locus. One guide RNA can create a pair of SSBs or DSBs. The one guide RNA can comprise a spacer sequence that is complementary to either the 5′ locus or the 3′ locus. Alternatively, the method may comprise a first guide RNA and a second guide RNA. The first guide RNA can comprise a spacer sequence that is complementary to a segment of the 5′ locus and the second guide RNA can comprise a spacer sequence that is complementary to a segment of the 3′ locus. The donor template can be either single or double stranded. The modified transcriptional control sequence can be located within a second intron of the BCL11A gene. The modified transcriptional control sequence can be located within a +58 DNA hypersensitive site (DHS) of the BCL11A gene.

[0034] The one or two gRNAs can be one or two single-molecule guide RNA (sgRNAs). The one or two gRNAs or one or two sgRNAs can be one or two modified gRNAs or one or two modified sgRNAs. The one modified sgRNA can comprise three 2′-O-methyl-phosphorothioate residues at or near each of its 5′ and 3′ ends. The one modified sgRNA can be the nucleic acid sequence of SEQ ID NO: 71,959. The one or more Cas9 endonucleases can be pre-complexed with one or two gRNAs or one or two sgRNAs to form one or more ribonucleoproteins (RNPs). The one or more Cas9 endonuclease can be flanked at the N-terminus, the C-terminus, or both the N-terminus and C-terminus by one or more nuclear localization signals (NLSs). The one or more Cas9 endonucleases can be flanked by two NLSs, one NLS located at the N-terminus and the second NLS located at the C-terminus. The one or more NLSs can be a SV40 NLS. The weight ratio of sgRNA to Cas9 endonuclease in the RNP can be 1:1. The one sgRNA can comprise the nucleic acid sequence of SEQ ID NO: 71,959, the Cas9 endonuclease can be a S. pyogenes Cas9 comprising a N-terminus SV40 NLS and a C-terminus SV40 NLS, and the weight ratio of sgRNA to Cas9 endonuclease can be 1:1. The insertion can be by homology directed repair (HDR).

[0035] The SSB, DSB, 5′ locus, and/or 3′ locus can be located within a second intron of the BCL11A gene. The SSB, DSB, 5′ locus, and/or 3′ locus can be located within a +58 DNA hypersensitive site (DHS) of the BCL11A gene.

[0036] The method can further comprise introducing into the cell one or more guide ribonucleic acids (gRNAs). The one or more DNA endonucleases can be one or more Cas9 or Cpf1 endonucleases that effect or create a pair of single-strand breaks (SSBs) or double-strand breaks (DSBs), the first SSB or DSB at a 5′ locus and a second SSB or DSB at a 3′ locus, within or near the BCL11A gene or other DNA sequence that encodes a regulatory element of the BCL11A gene that causes a deletion of the chromosomal DNA between the 5′ locus and the 3′ locus that results in a permanent deletion, modulation, or inactivation of the transcriptional control sequence of the chromosomal DNA between the 5′ locus and the 3′ locus. The first guide RNA can comprise a spacer sequence that is complementary to a segment of the 5′ locus and the second guide RNA comprises a spacer sequence that is complementary to a segment of the 3′ locus. One guide RNA can create a pair of SSBs or DSBs. The one guide RNA can comprise a spacer sequence that is complementary to either the 5′ locus or the 3′ locus. Alternatively, the method may comprise a first guide RNA and a second guide RNA. The first guide RNA can comprise a spacer sequence that is complementary to a segment of the 5′ locus and the second guide RNA can comprise a spacer sequence that is complementary to a segment of the 3º locus.

[0037] The one or more gRNAs can be one or more single-molecule guide RNA (sgRNAs). The one or more gRNAs or one or more sgRNAs can be one or more modified gRNAs or one or more modified sgRNAs. The one modified sgRNA can comprise three 2′-O-methyl-phosphorothioate residues at or near each of its 5′ and 3′ ends. The one modified sgRNA can be the nucleic acid sequence of SEQ ID NO: 71,959. The one or more Cas9 endonucleases can be pre-complexed with one or more gRNA or one or more sgRNA to form one or more ribonucleoproteins (RNPs). The one or more Cas9 endonuclease can be flanked at the N-terminus, the C-terminus, or both the N-terminus and C-terminus by one or more nuclear localization signals (NLSs). The one or more Cas9 endonucleases can be flanked by two NLSs, one NLS located at the N-terminus and the second NLS located at the C-terminus. The one or more NLSs can be a SV40 NLS. The weight ratio of sgRNA to Cas9 endonuclease in the RNP can be 1:1. The one sgRNA can comprise the nucleic acid sequence of SEQ ID NO: 71,959, the Cas9 endonuclease can be a S. pyogenes Cas9 comprising a N-terminus SV40 NLS and a C-terminus SV40 NLS, and the weight ratio of sgRNA to Cas9 endonuclease can be 1:1.

[0038] The 5′ locus and/or 3′ locus can be located within a second intron of the BCL11A gene. The 5′ locus and/or 3′ locus can be located within a +58 DNA hypersensitive site (DHS) of the BCL11A gene.

[0039] The Cas9 or Cpf1 mRNA, gRNA, and donor template can be formulated into separate lipid nanoparticles or co-formulated into a lipid nanoparticle.

[0040] The Cas9 or Cpf1 mRNA can be formulated into a lipid nanoparticle, and the gRNA and donor template can be delivered to the cell by an adeno-associated virus (AAV) vector.

[0041] The Cas9 or Cpf1 mRNA can be formulated into a lipid nanoparticle, and the gRNA can be delivered to the cell by electroporation and donor template can be delivered to the cell by an adeno-associated virus (AAV) vector.

[0042] The one or more RNP can be delivered to the cell by electroporation.

[0043] The editing within or near a BCL11A gene or other DNA sequence that encodes a regulatory element of the BCL11A gene can reduce BCL11A gene expression.

[0044] The BCL11A gene can be located on Chromosome 2: 60,451, 167-60,553,567 (Genome Reference Consortium—GRCh38).

[0045] Also provided herein are one or more guide ribonucleic acids (gRNAs) for editing a BCL11A gene in a cell from a patient with a hemoglobinopathy. The one or more gRNAs can comprise a spacer sequence selected from the group consisting of nucleic acid sequences in SEQ ID NOs: 1-71,947 of the Sequence Listing. The one or more gRNAs can be one or more single-molecule guide RNAs (sgRNAs). The one or more gRNAs or one or more sgRNAs can be one or more modified gRNAs or one or more modified sgRNAs. The one or more modified sgRNAs can comprise three 2′-O-methyl-phosphorothioate residues at or near each of its 5′ and 3′ ends. The one or more modified sgRNAs can comprise the nucleic acid sequence of SEQ ID NO: 71,959. Also provided herein is a single-molecule guide RNA (sgRNA) comprising the nucleic acid sequence of SEQ ID NO: 71,959.

[0046] It is understood that the inventions described in this specification are not limited to the examples summarized in this Summary. Various other aspects are described and exemplified herein.

### BRIEF DESCRIPTION OF THE DRAWINGS

[0047] Various aspects of materials and methods for treatment of hemoglobinopathies disclosed and described in this specification can be better understood by reference to the accompanying figures, in which:

[0048] FIGS. 1A-1C show plasmids comprising a codon optimized gene for S. pyogenes Cas9 endonuclease.

[0049] FIG. 1A is a plasmid (CTx-1) comprising a codon optimized gene for S. pyogenes Cas9 endonuclease. The CTx-1 plasmid also comprises a gRNA scaffold sequence, which includes a 20 bp spacer sequence from the sequences listed in SEQ ID NOs: 1-29,482 of the Sequence Listing.

[0050] FIG. 1B is a plasmid (CTx-2) comprising a different codon optimized gene for S. pyogenes Cas9 endonuclease. The CTx-2 plasmid also comprises a gRNA scaffold sequence, which includes a 20 bp spacer sequence from the sequences listed in SEQ ID NOs: 1-29,482 of the Sequence Listing.

[0051] FIG. 1C is a plasmid (CTx-3) comprising yet another different codon optimized gene for S. pyogenes Cas9 endonuclease. The CTx-3 plasmid also comprises a gRNA scaffold sequence, which includes a 20 bp spacer sequence from the sequences listed in SEQ ID NOs: 1-29,482 of the Sequence Listing.

[0052] FIGS. 2A-2B depict the type II CRISPR/Cas system.

[0053] FIG. 2A depicts the type II CRISPR/Cas system including gRNA.

[0054] FIG. 2B depicts the type II CRISPR/Cas system including sgRNA.

[0055] FIG. 3 shows the rate of DNA editing in CD34+ hematopoietic stem and

[0056] progenitor cells (HSPCs) and each of the different resulting HPFH genotypes.

[0057] FIGS. 4A-4C show the upregulation of γ-globin expression in erythrocytes differentiated from Bulk edited human CD34+ HSPCs from mobilized peripheral blood (mPB).

[0058] FIG. 4A depicts hematopoiesis from human CD34+ HSPCs to erythrocytes.

[0059] FIG. 4B shows the ratio of γ/18sRNA for each of the deletion/modification.

[0060] FIG. 4C shows the ratio of γ/α for each of the deletion/modification.

[0061] FIGS. 5A-5B show the upregulation of γ-globin expression in erythrocytes differentiated from all gene-edited colonies from human CD34+ HSPCs.

[0062] FIG. 5A shows the γ/α globin mRNA ratio (%) for each of the gene-edited colonies.

[0063] FIG. 5B shows the average γ/α globin mRNA ratio (%) for each of the gene-modifications.

[0064] FIG. 6 shows the BCL11A Intron (SPY101) rate of DNA editing in human CD34+ HSPC derived erythroid colonies.

[0065] FIGS. 7A-7B show the correlation between the SPY101 genotype and γ-globin expression in single cell colonies differentiated from gene-edited human mPB CD34+ HSPCs.

[0066] FIG. 7A shows the percentage of γ-globin to α-globin (HBG/HBA) for each of the gene-edited colonies.

[0067] FIG. 78 shows the percentage of β-like globins (HBG/(HBB+HBG)) for each of the gene-edited colonies.

[0068] FIG. 8 shows on-target editing efficacy of several gRNAs in human mPB CD34+ cells.

[0069] FIGS. 9A-9B show the hybrid-capture assay used to detect off-target editing and results generated using the hybrid-capture assay from edited human mPB CD34+ HSPCs.

[0070] FIG. 9A shows a schematic of a hybrid-capture assay used to detect editing activity at potential off-target sites.

[0071] FIG. 98 shows observed off-target activity via hybrid capture sequencing.

[0072] FIGS. 10A-10B show ratios of globin mRNA levels measured in cells from SCD patients, a β-thalassemia patient, and healthy donors.

[0073] FIG. 10A shows ratios of globin mRNA levels measured in cells from SCD patients compared to healthy donors.

[0074] FIG. 10B shows ratios of globin mRNA levels measured in cells from a β-thalassemia patient compared to healthy donors.

[0075] FIGS. 11A-11C show the flow cytometry strategy used to detect various gene-edited cell populations and results generated using the flow cytometry strategy.

[0076] FIG. 11A shows subpopulations of human mPB CD34+ HSPCs, associated surface markers, and flow cytometry gating strategy.

[0077] FIG. 11B shows a similar distribution of cell types in the mock and edited conditions.

[0078] FIG. 11C shows similar high editing efficiencies across the subpopulations compared to bulk.

[0079] FIG. 12 shows analysis of human CD45RA+ cell populations in NSG mice 8 weeks post-engraftment of human mPB CD34+ HSPCs. Data points represent individual animals and depict the percentage of live cells that were human CD45RA+ live cells.

[0080] FIG. 13 shows average editing efficacy of a SPY101 gRNA and Cas9 protein in human mPB CD34+ HSPCs at laboratory and clinically relevant scales.

[0081] FIG. 14 shows an overview of GLP/Toxicology study design.

[0082] FIG. 15 shows an overview of an experimental approach for bulk and single cell colony analysis of hemoglobin mRNA and protein levels in erythroid cell populations derived from CRISPR/Cas9 gene edited human mPB CD34+ HSPCs.

[0083] FIGS. 16A-16B show γ-globin mRNA and protein upregulation in bulk differentiated human mPB CD34+ HSPCs modified with different targeted edits.

[0084] FIG. 16A shows γ-globin mRNA upregulation in bulk differentiated human mPB CD34+ HSPCs modified with different targeted edits.

[0085] FIG. 16B shows γ-globin protein upregulation in bulk differentiated human mPB CD34+ HSPCs modified with different targeted edits.

[0086] FIG. 17 shows average γ-globin upregulation in individual colonies of differentiated human mPB CD34+ HSPCs modified with different target edits.

[0087] FIGS. 18A-18B show a genotype to phenotype correlation in Target 5 and Target 6 edited colonies of erythroid differentiated human mPB CD34+ HSPCs.

[0088] FIG. 18A includes charts on the left-hand side that show % of colonies with each genotype, and charts on the right side that show percent of colonies with each level of γ-globin upregulation (expressed as γ/(γ+β) globin mRNA ratio).

[0089] FIG. 18B shows mRNA transcript levels, for groups of colonies with similar genotypes.

[0090] FIG. 19 shows an overview of an experimental approach for bulk analysis of editing efficiency from genomic DNA, hemoglobin expression by mRNA, and protein in erythroid differentiated cell populations derived from CRISPR/Cas9 gene edited human mPB CD34+ HSPCs.

[0091] FIGS. 20A-20B show the percentage of gene editing maintained throughout ex vivo erythroid differentiation of mPB CD34+ HSPCs edited with SPY101 gRNA or SD2 gRNA.

[0092] FIG. 20A shows the percentage of gene editing maintained throughout ex vivo erythroid differentiation of mPB CD34+ HSPCs edited with SPY101 gRNA.

[0093] FIG. 20B shows the percentage of gene editing maintained throughout ex vivo erythroid differentiation of mPB CD34+ HSPCs edited with SD2 gRNA.

[0094] FIGS. 21A-21D show the increase in γ-globin transcript depicted as γ/α or γ/(γ+β) in gene-edited mPB CD34+ HSPCs on days 11 or 15 post-erythroid differentiation.

[0095] FIG. 21A shows the increase in γ-globin transcript (γ/α) in gene-edited mPB CD34+ HSPCs on day 11 post-differentiation.

[0096] FIG. 21B shows the increase in γ-globin transcript (γ/α) in gene-edited mPB CD34+ HSPCs on day 15 post-differentiation.

[0097] FIG. 21C shows the increase in γ-globin transcript (γ/(γ+β)) in gene-edited mPB CD34+ HSPCs on day 11 post-differentiation.

[0098] FIG. 21D shows the increase in γ-globin transcript (γ/(γ+β)) in gene-edited mPB CD34+ HSPCs on day 15 post-differentiation.

[0099] FIGS. 22A-22B is FACS analysis and Median Flourescence Intensity (MFI) analysis showing the upregulation of γ-globin in gene-edited mPB CD34+ HSPCs on day 15 post-erythroid differentiation.

[0100] FIG. 22A is FACS analysis showing the upregulation of γ-globin in gene-edited mPB CD34+ HSPCs 15 days post erythroid differentiation.

[0101] FIG. 228 is MFI analysis showing the average upregulation of γ-globin in gene-edited mPB CD34+ cells from 4 donors post erythroid differentiation.

[0102] FIG. 23A-23D is bulk liquid chromatography mass-spectrometry (LC-MS) data showing the upregulation of γ-globin, depicted as γ/α or γ/(γ+β) in gene-edited mPB CD34+ HSPCs on day 15 post-erythroid differentiation.

[0103] FIG. 23A is bulk liquid-chromatography mass-spectrometry (LC-MS) data showing the upregulation of γ-globin (γ/α) in gene-edited mPB CD34+ HSPCs on day 15 post-differentiation.

[0104] FIG. 23B is bulk liquid-chromatography mass-spectrometry (LC-MS) data showing the upregulation of γ-globin (γ/α) in gene-edited mPB CD34+ HSPCs on day 15 post-differentiation normalized to γ-globin (γ/α) in mPB CD34+ HSPCs transfected with GFP gRNA.

[0105] FIG. 23C is bulk liquid-chromatography mass-spectrometry (LC-MS) data showing the upregulation of γ-globin (γ/(γ+β)) in gene-edited mPB CD34+ HSPCs on day 15 post-differentiation.

[0106] FIG. 23D is bulk liquid-chromatography mass-spectrometry (LC-MS) data showing the upregulation of γ-globin (γ/(γ+β)) in gene-edited mPB CD34+ HSPCs on day 15 post-differentiation normalized to γ-globin (γ/α) in mPB CD34+ HSPCs transfected with GFP gRNA.

[0107] FIG. 24 depicts the hybrid capture bait design.

[0108] FIG. 25 shows a graph depicting the hybrid capture method's power to detect indels.

[0109] FIG. 26 shows a summary of the data generated from hybrid capture experiments using SPY101 gRNA.

[0110] FIG. 27 shows a summary of the data generated from hybrid capture experiments using SD2 gRNA.

[0111] FIG. 28 shows a study plan for the engraftment experiments.

[0112] FIGS. 29A-29E show 8 week interim bleed analysis data for untreated mice, and mice injected with mock edited cells, GFP gRNA edited cells, SPY101 gRNA edited cells, or SD2 gRNA edited cells.

[0113] FIG. 29A shows 8 week interim bleed analysis data for untreated (UnTx) mice.

[0114] FIG. 29B shows 8 week interim bleed analysis data for mice injected with mock-edited cells.

[0115] FIG. 29C shows 8 week interim bleed analysis data for mice injected with GFP gRNA edited cells.

[0116] FIG. 29D shows 8 week interim bleed analysis data for mice injected with SPY101 gRNA edited cells.

[0117] FIG. 29E shows 8 week interim bleed analysis data for mice injected with SD2 gRNA edited cells.

[0118] FIG. 30 shows average 8 week interim bleed analysis data.

[0119] FIG. 31 shows the Indel % for human mPB CD34+ HSPCs electroporated with various Cas9 mRNAs and SPY101 gRNA (mRNA1-8) compared to human mPB CD34+ HSPCs electroporated with Cas9 protein complexed with SPY101 gRNA (a ribonucleoprotein complex, RNP).

[0120] FIGS. 32A-328 show the normalized cell count and cell viability of human mPB CD34+ HSPCs electroporated with various Cas9 mRNAs and SPY101 gRNA (mRNA 1-8) compared to human mPB CD34+ HSPCs electroporated with Cas9 protein complexed with SPY101 gRNA (RNP).

[0121] FIG. 32A shows the fold increase in cell count at 48 hours post-electroporation for human mPB CD34+ HSPCs electroporated with various Cas9 mRNAs and SPY101 gRNA (mRNA 1-8) compared to human mPB CD34+ HSPCs electroporated with Cas9 protein complexed with SPY101 gRNA (RNP).

[0122] FIG. 328 shows the cell viability at 48 hours post-electroporation for human mPB CD34+ HSPCs electroporated with various Cas9 mRNAs and SPY101 gRNA (mRNA 1-8) compared to human mPB CD34+ HSPCs electroporated with Cas9 protein complexed with SPY101 gRNA (RNP).

[0123] FIGS. 33A-330 show several Cas9 RNP constructs used for Cas9 RNP optimization and the Indel % associated with each of the Cas9 RNP constructs.

[0124] FIG. 33A shows several Cas9 RNP constructs.

[0125] FIG. 33B shows the Indel % for each of the Cas9 RNP constructs using 1 μg Cas9: 1 μg SPY101 gRNA.

[0126] FIG. 33C shows the Indel % for each of the Cas9 RNP constructs using 3 μg Cas9: 3 μg SPY101 gRNA.

[0127] FIGS. 34A-34B show the gene editing efficiency (%) for human mPB CD34+ HSPCs treated with either Cas9 mRNA or Cas9 protein (Feldan or Aldevron) at non-clinical and clinical scale.

[0128] FIG. 34A shows the gene editing efficiency (%) for human mPB or bone marrow (BM) derived CD34+ HSPCs treated with either Cas9 mRNA or Cas9 protein (Feldan or Aldevron) at non-clinical scale.

[0129] FIG. 348 shows the gene editing efficiency (%) for human mPB CD34+ HSPCs treated with Cas9 protein (Aldevron) at clinical scale.

[0130] FIGS. 35A-35B show the efficacy of SPY101 in human mPB CD34+ HSPCs by presenting the γ/α globin mRNA ratio in % and γ/(γ+β) globin mRNA ratio in % for cells treated with either Cas9 mRNA and SPY101 gRNA or Cas9 protein (Feldan or Aldevron) complexed with SPY101 gRNA.

[0131] FIG. 35A shows the γ/α globin mRNA ratio in % for human mPB CD34+ HSPCs treated with either Cas9 mRNA and SPY101 gRNA or Cas9 protein (Feldan or Aldevron) complexed with SPY101 gRNA.

[0132] FIG. 358 shows the γ/(γ+β) globin mRNA ratio in % for human mPB CD34+ HSPCs treated with either Cas9 mRNA and SPY101 gRNA or Cas9 protein (Feldan or Aldevron) complexed with SPY101 gRNA.

[0133] FIGS. 36A-36B show the efficacy of SPY101 in bone marrow derived CD34+ HSPCs by presenting the γ/α globin mRNA ratio in % and γ/(γ+β) globin mRNA ratio in % for cells treated with Cas9 protein (Aldevron, technically optimized vs. non-optimized) complexed with SPY101 gRNA.

[0134] FIG. 36A shows the γ/α globin mRNA ratio in % for bone marrow derived CD34+ HSPCs treated with Cas9 protein complexed with SPY101 gRNA.

[0135] FIG. 36B shows the γ/(γ+β) globin mRNA ratio in % for bone marrow derived CD34+ HSPCs treated with Cas9 protein complexed with SPY101 gRNA.

[0136] FIGS. 37A-37B show the efficacy of SPY101 in SCD and β-Thalassemic patient samples.

[0137] FIG. 37A shows the average γ/(γ+β) globin mRNA ratio in % for erythroid differentiated cells from six SCD patients and two healthy donors that were treated with SPY101 gRNA and Cas9 protein. All values were subtracted from their respective control samples treated with GFP gRNA and Cas9 protein.

[0138] FIG. 37B shows the γ/α globin mRNA ratio in % for erythroid differentiated cells from one β-Thalassemic patient and two healthy donors that were treated with SPY101 gRNA and Cas9 protein. All values were subtracted from their respective control samples treated with GFP gRNA and Cas9 protein.

[0139] FIGS. 38A-38B show the Bcl11a Intron (SPY101) rate of DNA editing when using Cas9 mRNA or Cas9 RNP.

[0140] FIG. 38A shows the BCL11A Intron (SPY101) rate of DNA editing when using Cas9 mRNA.

[0141] FIG. 388 shows the BCL11A Intron (SPY101) rate of DNA editing when using Cas9 RNP.

[0142] FIGS. 39A-39B show that GATA1 binding site (GBS) disruptions caused by SPY101/Cas9 RNP in single cell colonies derived from erythroid differentiated human mPB CD34+ HSPCs are linked to increased γ-globin expression.

[0143] FIG. 39A shows the γ/α globin mRNA ratio of SPY101-edited colonies with no GBS disruption, mono-allelic GBS disruptions, or bi-allelic GBS disruptions.

[0144] FIG. 39B shows the γ/(γ+β) globin mRNA ratio of SPY101-edited colonies with no GBS disruption, mono-allelic GBS disruptions, or a bi-allelic GBS disruptions.

[0145] FIGS. 40A-40E show increased γ-globin expression in erythroid differentiated SPY101/Cas9 RNP edited human mPB CD34+ HSPCs by flow cytometry analysis.

[0146] FIG. 40A is flow cytometry analysis showing α-globin expression in SPY101/Cas9 RNP edited erythroid differentiated human mPB CD34+ HSPCs compared to «-globin expression in GFP gRNA/Cas9 RNP treated erythroid differentiated human mPB CD34+ HSPCs.

[0147] FIG. 408 is flow cytometry analysis showing β-globin expression in SPY101/Cas9 RNP edited erythroid differentiated human mPB CD34+ HSPCs compared to β-globin expression in GFP gRNA/Cas9 RNP treated erythroid differentiated human mPB CD34+ HSPCs.

[0148] FIG. 40C is flow cytometry analysis showing γ-globin expression in SPY101/Cas9 RNP edited erythroid differentiated human mPB CD34+ HSPCs compared to γ-globin expression in GFP gRNA/Cas9 RNP treated erythroid differentiated human mPB CD34+ HSPCs.

[0149] FIG. 40D shows the percentage of γ-globin positive cells in SPY101/Cas9 RNP edited erythroid differentiated human mPB CD34+ HSPCs compared to GFP gRNA/Cas9 RNP treated erythroid differentiated human mPB CD34+ HSPCs.

[0150] FIG. 40E shows the median fluorescence intensity (MFI) in SPY101/Cas9 RNP edited erythroid differentiated human mPB CD34+ HSPCs compared to GFP gRNA/Cas9 RNP treated erythroid differentiated human mPB CD34+ HSPCs.

### BRIEF DESCRIPTION OF THE SEQUENCE LISTING

[0151] SEQ ID NOs: 1-29,482 are 20 bp spacer sequences for targeting within or near a BCL11A gene or other DNA sequence that encodes a regulatory element of the BCL11A gene with a S. pyogenes Cas9 endonuclease.

[0152] SEQ ID NOs: 29,483-32,387 are 20 bp spacer sequences for targeting within or near a BCL11A gene or other DNA sequence that encodes a regulatory element of the BCL11A gene with a S. aureus Cas9 endonuclease.

[0153] SEQ ID NOs: 32,388-33,420 are 20 bp spacer sequences for targeting within or near a BCL11A gene or other DNA sequence that encodes a regulatory element of the BCL11A gene with a S. thermophilus Cas9 endonuclease.

[0154] SEQ ID NOs: 33,421-33,851 are 20 bp spacer sequences for targeting within or near a BCL11A gene or other DNA sequence that encodes a regulatory element of the BCL11A gene with a T. denticola Cas9 endonuclease.

[0155] SEQ ID NOs: 33,852-36,731 are 20 bp spacer sequences for targeting within or near a BCL11A gene or other DNA sequence that encodes a regulatory element of the BCL11A gene with a N. meningitides Cas9 endonuclease.

[0156] SEQ ID NOs: 36,732-71,947 are 22 bp spacer sequences for targeting within or near a BCL11A gene or other DNA sequence that encodes a regulatory element of the BCL11A gene with an Acidominococcus, a Lachnospiraceae, and a Franciscella Novicida Cpf1 endonuclease.

[0157] SEQ ID NO: 71,948 is a sample guide RNA (gRNA) for a S. pyogenes Cas9 endonuclease.

[0158] SEQ ID NO: 71,949 shows a known family of homing endonuclease, as classified by its structure.

[0159] SEQ ID NO: 71,950 is gRNA A (CLO1).

[0160] SEQ ID NO: 71,951 is gRNA B (CLO8).

[0161] SEQ ID NO: 71,952 is gRNA C (CSO2).

[0162] SEQ ID NO: 71,953 is gRNA D (CSO6).

[0163] SEQ ID NO: 71,954 is gRNA E (HPFH-15).

[0164] SEQ ID NO: 71,955 is gRNA F (HPFH-4).

[0165] SEQ ID NO: 71,956 is gRNA G (Kenya02).

[0166] SEQ ID NO: 71,957 is gRNA H (Kenya17).

[0167] SEQ ID NO: 71,958 is gRNA I (SD2).

[0168] SEQ ID NO: 71,959 is gRNA J (SPY101).

[0169] SEQ ID NOs: 71,960-71,962 show sample sgRNA sequences.

### DETAILED DESCRIPTION

### Fetal Hemoglobin

[0170] Fetal hemoglobin (HbF, α₂γ₂) is the main oxygen transport protein in a human fetus and includes alpha (α) and gamma (γ) subunits. HbF expression ceases about 6 months after birth. Adult hemoglobin (HbA, α₂β₂) is the main oxygen transport protein in a human after ˜34 weeks from birth, and includes alpha (α) and beta (β) subunits. After 34 weeks, a developmental switch results in decreased transcription of the γ-globin genes and increased transcription of β-globin genes. Since many of the forms of hemoglobinopathies are a result of the failure to produce normal β-globin protein in sufficient amounts or failure to produce normal β-globin protein entirely, increased expression of γ-globin (i.e., HbF) will ameliorate β-globin disease severity.

### B-Cell Lymphoma 11A (BCL11A)

[0171] B-cell lymphoma 11A (BCL11A) is a gene located on Chromosome 2 and ranges from 60,451,167-60,553,567 bp (GRCh38). BCL11A is a zinc finger transcription factor that represses fetal hemoglobin (HbF) and downregulates HbF expression starting at about 6 weeks after birth. The BCL11A gene contains 4 exons, spanning 102.4 kb of genomic DNA. BCL11A also is under transcription regulation, including a binding domain in intron 2 for the master transcription factor GATA-1. GATA-1 binding enhances BCL11A expression which, in turn, represses HbF expression. Intron 2 contains multiple DNase hypersensitive sites (DHS), including sites referred to as +55, +58, and +62 based on the distance in kilobases from the transcriptional start site. Various editing strategies are discussed below to delete, modulate, or inactivate the transcriptional control sequences of BCL11A. Naturally occurring SNPs within this region have been associated with decreased BCL11A expression and increased fetal Hb levels (Orkin et al. 2013 GWAS study). These SNPs are organized around 3 DNA Hypersensitivity sites, +55DHS, +58DHS and +62DHS. Of the 3 regions, the +58 DHS region, appears to be the key region associated with increased fetal Hb levels and also harbors a GATA1 transcriptional control region.

### Therapeutic Approach

[0172] Non-homologous end joining (NHEJ) can be used to delete segments of the transcriptional control sequence of BCL11A, either directly or by altering splice donor or acceptor sites through cleavage by one gRNA targeting several locations, or several gRNAs.

[0173] The transcriptional control sequence of the BCL11A gene can also be modulated or inactivated by inserting a wild-type BCL11A gene or cDNA comprising a modified transcriptional control sequence. For example, the donor for modulating or inactivating by homology directed repair (HDR) contains the modified transcriptional control sequence of the BCL11A gene with small or large flanking homology arms to allow for annealing. HDR is essentially an error-free mechanism that uses a supplied homologous DNA sequence as a template during DSB repair. The rate of homology directed repair (HDR) is a function of the distance between the transcriptional control sequence and the cut site so choosing overlapping or nearby target sites is important. Templates can include extra sequences flanked by the homologous regions or can contain a sequence that differs from the genomic sequence, thus allowing sequence editing.

[0174] In addition to deleting, modulating, or inactivating the transcriptional control sequence of the BCL11A gene by NHEJ or HDR, a range of other options are possible. If there are small or large deletions, a cDNA can be knocked in that contains a modified transcriptional control sequence of the BCL11A gene. A full length cDNA can be knocked into any “safe harbor”—i.e., non-deleterious insertion point that is not the BCL11A gene itself —, with or without suitable regulatory sequences. If this construct is knocked-in near the BCL11A regulatory elements, it should have physiological control, similar to the normal gene. Two or more (e.g., a pair) nucleases can be used to delete transcriptional control sequence regions, though a donor would usually have to be provided to modulate or inactivate the function. In this case two gRNA and one donor sequence would be supplied.

[0175] Provided herein are cellular, ex vivo and in vivo methods for using genome engineering tools to create permanent changes to the genome by: 1) modulating or inactivating the transcriptional control sequence of the BCL11A gene, by deletions that arise due to the NHEJ pathway; 2) modulating or inactivating the transcriptional control sequence of the BCL11A gene, by HDR; 3) modulating or inactivating the transcriptional control sequence of the BCL11A gene, by deletions of at least a portion of the transcriptional control sequence and/or knocking-in a wild-type BCL11A gene or cDNA comprising a modified transcriptional control sequence into the gene locus or a safe harbour locus. Such methods use endonucleases, such as CRISPR-associated (Cas9, Cpf1 and the like) nucleases, to permanently delete, insert, or edit the transcriptional control sequence within or near the genomic locus of the BCL11A gene or other DNA sequence that encodes a regulatory element of the BCL11A gene. In this way, examples set forth in the present disclosure can help to delete, modulate, or inactivate the transcriptional control sequence of the BCL11A gene with a single treatment or a limited number of treatments (rather than deliver potential therapies for the lifetime of the patient).

[0176] Provided herein are methods for treating a patient with a hemoglobinopathy. An aspect of such method is an ex vivo cell-based therapy. For example, a patient specific induced pluripotent stem cell (IPSC) can be created. Then, the chromosomal DNA of these iPS cells can be edited using the materials and methods described herein. Next, the genome-edited IPSCs can be differentiated into hematopoietic progenitor cells. Finally, the hematopoietic progenitor cells can be implanted into the patient.

[0177] Yet another aspect of such method is an ex vivo cell-based therapy. For example, a mesenchymal stem cell can be isolated from the patient, which can be isolated from the patient's bone marrow or peripheral blood. Next, the chromosomal DNA of these mesenchymal stem cells can be edited using the materials and methods described herein. Next, the genome-edited mesenchymal stem cells can be differentiated into hematopoietic progenitor cells. Finally, these hematopoietic progenitor cells can be implanted into the patient.

[0178] A further aspect of such method is an ex vivo cell-based therapy. For example, a hematopoietic progenitor cell can be isolated from the patient. Next, the chromosomal DNA of these cells can be edited using the materials and methods described herein. Finally, the genome-edited hematopoietic progenitor cells can be implanted into the patient.

[0179] One advantage of an ex vivo cell therapy approach is the ability to conduct a comprehensive analysis of the therapeutic prior to administration. Nuclease-based therapeutics can have some level of off-target effects. Performing gene correction ex vivo allows one to characterize the corrected cell population prior to implantation. The present disclosure includes sequencing the entire genome of the corrected cells to ensure that the off-target effects, if any, can be in genomic locations associated with minimal risk to the patient. Furthermore, populations of specific cells, including clonal populations, can be isolated prior to implantation.

[0180] Another advantage of ex vivo cell therapy relates to genetic correction in IPSCs compared to other primary cell sources. IPSCs are prolific, making it easy to obtain the large number of cells that will be required for a cell-based therapy. Furthermore, IPSCs are an ideal cell type for performing clonal isolations. This allows screening for the correct genomic correction, without risking a decrease in viability. In contrast, other primary cells are viable for only a few passages and difficult to clonally expand. Thus, manipulation of iPSCs for the treatment of a hemoglobinopathy can be much easier, and can shorten the amount of time needed to make the desired genetic correction.

[0181] For ex vivo therapy, transplantation requires clearance of bone-marrow niches or the donor HSCs to engraft. Current methods rely on radiation and/or chemotherapy. Due to the limitations these impose, safer conditioning regiments have been and are being developed, such as immunodepletion of bone marrow cells by antibodies or antibody toxin conjugates directed against hematopoietic cell surface markers, for example CD117, c-kit and others. Success of HSC transplantation depends upon efficient homing to bone marrow, subsequent engraftment, and bone marrow repopulation. The level of gene-edited cells engrafted is important, as is the ability of the cells' multilineage engraftment.

[0182] Hematopoietic stem cells (HSCs) are an important target for ex vivo gene therapy as they provide a prolonged source of the corrected cells. Treated CD34+ cells would be returned to the patient.

[0183] Methods can also include an in vivo based therapy. Chromosomal DNA of the cells in the patient is edited using the materials and methods described herein. The cells can be bone marrow cells, hematopoietic progenitor cells, or CD34+ cells.

[0184] Although blood cells present an attractive target for ex vivo treatment and therapy, increased efficacy in delivery may permit direct in vivo delivery to the hematopoietic stem cells (HSCs) and/or other B and T cell progenitors, such as CD34+ cells. Ideally the targeting and editing would be directed to the relevant cells. Cleavage in other cells can also be prevented by the use of promoters only active in certain cells and or developmental stages. Additional promoters are inducible, and therefore can be temporally controlled if the nuclease is delivered as a plasmid. The amount of time that delivered RNA and protein remain in the cell can also be adjusted using treatments or domains added to change the half-life. In vivo treatment would eliminate a number of treatment steps, but a lower rate of delivery can require higher rates of editing. In vivo treatment can eliminate problems and losses from ex vivo treatment and engraftment.

[0185] An advantage of in vivo gene therapy can be the ease of therapeutic production and administration. The same therapeutic approach and therapy will have the potential to be used to treat more than one patient, for example a number of patients who share the same or similar genotype or allele. In contrast, ex vivo cell therapy typically requires using a patient's own cells, which are isolated, manipulated and returned to the same patient.

[0186] Also provided herein is a cellular method for editing the BCL11A gene in a cell by genome editing. For example, a cell can be isolated from a patient or animal. Then, the chromosomal DNA of the cell can be edited using the materials and methods described herein.

[0187] The methods provided herein, regardless of whether a cellular or ex vivo or in vivo method, can involve one or a combination of the following: 1) modulating or inactivating the transcriptional control sequence of the BCL11A gene, by deletions that arise due to the NHEJ pathway, 2) modulating or inactivating the transcriptional control sequence of the BCL11A gene, by HDR, or 3) modulating or inactivating the transcriptional control sequence of the BCL11A gene, by deletion of at least a portion of the transcriptional control sequence and/or knocking-in wild-type BCL11A gene or cDNA comprising a modified transcriptional control sequence into the gene locus or at a heterologous location in the genome (such as a safe harbor site, such as AAVS1). Both the HDR and knock-in strategies utilize a donor DNA template in Homology-Directed Repair (HDR). HDR in either strategy may be accomplished by making one or more single-stranded breaks (SSBs) or double stranded breaks (DSBs) at specific sites in the genome by using one or more endonucleases.

[0188] For example, the NHEJ strategy can involve deleting at least a portion of the transcriptional control sequence of the BCL11A gene by inducing one single stranded break or double stranded break within or near the BCL11A gene or other DNA sequence that encodes a regulatory element of the BCL11A gene with one or more CRISPR endonucleases and a gRNA (e.g., crRNA+tracrRNA, or sgRNA), or two or more single stranded breaks or double stranded breaks within or near the BCL11A gene or other DNA sequence that encodes a regulatory element of the BCL11A gene with two or more CRISPR endonucleases and two or more sgRNAs. This approach can require development and optimization of sgRNAs for the transcriptional control sequence of the BCL11A gene.

[0189] For example, the HDR strategy can involve modulating or inactivating the transcriptional control sequence of the BCL11A gene by inducing one single stranded break or double stranded break within or near the BCL11A gene or other DNA sequence that encodes a regulatory element of the BCL11A gene with one or more CRISPR endonucleases and a gRNA (e.g., crRNA+tracrRNA, or sgRNA), or two or more single stranded breaks or double stranded breaks within or near the BCL11A gene or other DNA sequence that encodes a regulatory element of the BCL11A gene with one or more CRISPR endonucleases and two or more gRNAs, in the presence of a donor DNA template introduced exogenously to direct the cellular DSB response to Homology-Directed Repair (the donor DNA template can be a short single stranded oligonucleotide, a short double stranded oligonucleotide, a long single or double stranded DNA molecule). This approach can require development and optimization of gRNAs and donor DNA molecules comprising a wild-type BCL11A gene comprising a modified transcriptional control sequence.

[0190] For example, the knock-in strategy involves knocking-in a wild-type BCL11A gene or cDNA comprising a modified transcriptional control sequence into the locus of the BCL11A gene using a gRNA (e.g., crRNA+tracrANA, or sgRNA) or a pair of gRNAs targeting upstream of or in the transcriptional control sequence of the BCL11A gene, or in a safe harbor site (such as AAVS1). The donor DNA can be single or double stranded DNA and comprises a wild-type BCL11A gene comprising a modified transcriptional control sequence.

[0191] The advantages for the above strategies (deletion/modulation/inactivation and knock-in) are similar, including in principle both short and long term beneficial clinical and laboratory effects.

[0192] In addition to the editing options listed above, Cas9 or similar proteins can be used to target effector domains to the same target sites that can be identified for editing, or additional target sites within range of the effector domain. A range of chromatin modifying enzymes, methylases or demethylases can be used to alter expression of the target gene. These types of epigenetic regulation have some advantages, particularly as they are limited in possible off-target effects.

[0193] The regulation of transcription and translation implicates a number of different classes of sites that interact with cellular proteins or nucleotides. Often the DNA binding sites of transcription factors or other proteins can be targeted for mutation or deletion to study the role of the site, though they can also be targeted to change gene expression. Sites can be added through non-homologous end joining NHEJ or direct genome editing by homology directed repair (HDR). Increased use of genome sequencing, RNA expression and genome-wide studies of transcription factor binding have increased our ability to identify how the sites lead to developmental or temporal gene regulation. These control systems can be direct or can involve extensive cooperative regulation that can require the integration of activities from multiple enhancers. Transcription factors typically bind 6-12 bp-long degenerate DNA sequences. The low level of specificity provided by individual sites suggests that complex interactions and rules are involved in binding and the functional outcome. Binding sites with less degeneracy can provide simpler means of regulation. Artificial transcription factors can be designed to specify longer sequences that have less similar sequences in the genome and have lower potential for off-target cleavage. Any of these types of binding sites can be mutated, deleted or even created to enable changes in gene regulation or expression (Canver, M. C. et al., Nature (2015)). GATA transcription factors are a family of transcription factors characterized by their ability to bind to the GATA DNA binding sequence. A GATA binding sequence is located in the +58 DNA hypersensitive site (DHS) of the BCL11A gene.

[0194] Another class of gene regulatory regions having these features is microRNA (miRNA) binding sites. miRNAs are non-coding RNAs that play key roles in post-transcriptional gene regulation. miRNA can regulate the expression of 30% of all mammalian protein-encoding genes. Specific and potent gene silencing by double stranded RNA (RNAI) was discovered, plus additional small noncoding RNA (Canver, M. C. et al., Nature (2015)). The largest class of noncoding RNAs important for gene silencing are miRNAs. In mammals, miRNAs are first transcribed as a long RNA transcripts, which can be separate transcriptional units, part of protein introns, or other transcripts. The long transcripts are called primary miRNA (pri-miRNA) that include imperfectly base-paired hairpin structures. These pri-miRNA can be cleaved into one or more shorter precursor miRNAs (pre-miRNAs) by Microprocessor, a protein complex in the nucleus, involving Drosha.

[0195] Pre-miRNAs are short stem loops ˜70 nucleotides in length with a 2-nucleotide 3′-overhang that are exported, into the mature 19-25 nucleotide miRNA:miRNA* duplexes. The miRNA strand with lower base pairing stability (the guide strand) can be loaded onto the RNA-induced silencing complex (RISC). The passenger guide strand (marked with *), can be functional, but is usually degraded. The mature miRNA tethers RISC to partly complementary sequence motifs in target mRNAs predominantly found within the 3′ untranslated regions (UTRs) and induces posttranscriptional gene silencing (Bartel, D. P. Cell 136, 215-233 (2009): Saj, A. & Lai, E. C. Curr Opin Genet Dev 21, 504-510 (2011)).

[0196] miRNAs can be important in development, differentiation, cell cycle and growth control, and in virtually all biological pathways in mammals and other multicellular organisms. miRNAs can also be involved in cell cycle control, apoptosis and stem cell differentiation, hematopoiesis, hypoxia, muscle development, neurogenesis, insulin secretion, cholesterol metabolism, aging, viral replication and immune responses.

[0197] A single miRNA can target hundreds of different mRNA transcripts, while an individual transcript can be targeted by many different miRNAs. More than 28645 microRNAs have been annotated in the latest release of miRBase (v.21). Some miRNAs can be encoded by multiple loci, some of which can be expressed from tandemly co-transcribed clusters. The features allow for complex regulatory networks with multiple pathways and feedback controls. miRNAs can be integral parts of these feedback and regulatory circuits and can help regulate gene expression by keeping protein production within limits (Herranz, H. & Cohen, S. M. Genes Dev 24, 1339-1344 (2010); Posadas, D. M. & Carthew, R. W. Curr Opin Genet Dev 27, 1-6 (2014)).

[0198] miRNA can also be important in a large number of human diseases that are associated with abnormal miRNA expression. This association underscores the importance of the miRNA regulatory pathway. Recent miRNA deletion studies have linked miRNA with regulation of the immune responses (Stern-Ginossar, N. et al., Science 317, 376-381 (2007)).

[0199] miRNA also have a strong link to cancer and can play a role in different types of cancer. miRNAs have been found to be downregulated in a number of tumors. miRNA can be important in the regulation of key cancer-related pathways, such as cell cycle control and the DNA damage response, and can therefore be used in diagnosis and can be targeted clinically. MicroRNAs can delicately regulate the balance of angiogenesis, such that experiments depleting all microRNAs suppresses tumor angiogenesis (Chen, S. et al., Genes Dev 28, 1054-1067 (2014)).

[0200] As has been shown for protein coding genes, miRNA genes can also be subject to epigenetic changes occurring with cancer. Many miRNA loci can be associated with CpG islands increasing their opportunity for regulation by DNA methylation (Weber, B., Stresemann, C., Brueckner, B. & Lyko, F. Cell Cycle 6, 1001-1005 (2007). The majority of studies have used treatment with chromatin remodeling drugs to reveal epigenetically silenced miRNAs.

[0201] In addition to their role in RNA silencing, miRNA can also activate translation (Posadas, D. M. & Carthew, R. W. Curr Opin Genet Dev 27, 1-6 (2014). Knocking out these sites may lead to decreased expression of the targeted gene, while introducing these sites may increase expression.

[0202] Individual miRNA can be knocked out most effectively by mutating the seed sequence (bases 2-8 of the microRNA), which can be important for binding specificity. Cleavage in this region, followed by mis-repair by NHEJ can effectively abolish miRNA function by blocking binding to target sites. miRNA could also be inhibited by specific targeting of the special loop region adjacent to the palindromic sequence. Catalytically inactive Cas9 can also be used to inhibit shRNA expression (Zhao, Y. et al., Sci Rep 4, 3943 (2014). In addition to targeting the miRNA, the binding sites can also be targeted and mutated to prevent the silencing by miRNA.

### Human Cells

[0203] For ameliorating hemoglobinopathies, as described and illustrated herein, the principal targets for gene editing are human cells. For example, in the ex vivo methods, the human cells can be somatic cells, which after being modified using the techniques as described, can give rise to progenitor cells. For example, in the in vivo methods, the human cells can be a bone marrow cell, a hematopoietic progenitor cell, or a CD34+ cell.

[0204] By performing gene editing in autologous cells that are derived from and therefore already completely matched with the patient in need, it is possible to generate cells that can be safely re-introduced into the patient, and effectively give rise to a population of cells that can be effective in ameliorating one or more clinical conditions associated with the patient's disease.

[0205] Progenitor cells (also referred to as stem cells herein) are capable of both proliferation and giving rise to more progenitor cells, these in turn having the ability to generate a large number of mother cells that can in turn give rise to differentiated or differentiable daughter cells. The daughter cells themselves can be induced to proliferate and produce progeny that subsequently differentiate into one or more mature cell types, while also retaining one or more cells with parental developmental potential. The term “stem cell” refers then, to a cell with the capacity or potential, under particular circumstances, to differentiate to a more specialized or differentiated phenotype, and which retains the capacity, under certain circumstances, to proliferate without substantially differentiating. In one aspect, the term progenitor or stem cell refers to a generalized mother cell whose descendants (progeny) specialize, often in different directions, by differentiation, e.g., by acquiring completely individual characters, as occurs in progressive diversification of embryonic cells and tissues. Cellular differentiation is a complex process typically occurring through many cell divisions. A differentiated cell may derive from a multipotent cell that itself is derived from a multipotent cell, and so on. While each of these multipotent cells may be considered stem cells, the range of cell types that each can give rise to may vary considerably. Some differentiated cells also have the capacity to give rise to cells of greater developmental potential. Such capacity may be natural or may be induced artificially upon treatment with various factors. In many biological instances, stem cells can also be “multipotent” because they can produce progeny of more than one distinct cell type. but this is not required for “stem-ness.”

[0206] Self-renewal can be another important aspect of the stem cell. In theory, self-renewal can occur by either of two major mechanisms. Stem cells can divide asymmetrically, with one daughter retaining the stem state and the other daughter expressing some distinct other specific function and phenotype. Alternatively, some of the stem cells in a population can divide symmetrically into two stems, thus maintaining some stem cells in the population as a whole, while other cells in the population give rise to differentiated progeny only. Generally, “progenitor cells” have a cellular phenotype that is more primitive (i.e., is at an earlier step along a developmental pathway or progression than is a fully differentiated cell). Often, progenitor cells also have significant or very high proliferative potential. Progenitor cells can give rise to multiple distinct differentiated cell types or to a single differentiated cell type, depending on the developmental pathway and on the environment in which the cells develop and differentiate.

[0207] In the context of cell ontogeny, the adjective “differentiated,” or “differentiating” is a relative term. A “differentiated cell” is a cell that has progressed further down the developmental pathway than the cell to which it is being compared. Thus, stem cells can differentiate into lineage-restricted precursor cells (such as a hematopoietic progenitor cell), which in turn can differentiate into other types of precursor cells further down the pathway (such as a hematopoietic precursor), and then to an end-stage differentiated cell, such as a erythrocyte, which plays a characteristic role in a certain tissue type, and may or may not retain the capacity to proliferate further.

[0208] The term “hematopoietic progenitor cell” refers to cells of a stem cell lineage that give rise to all the blood cell types, including erythroid (erythrocytes or red blood cells (RBCs)), myeloid (monocytes and macrophages, neutrophils, basophils, eosinophils, megakaryocytes/platelets, and dendritic cells), and lymphoid (T-cells, B-cells, NK-cells).

[0209] A “cell of the erythroid lineage” indicates that the cell being contacted is a cell that undergoes erythropoiesis, such that upon final differentiation it forms an erythrocyte or red blood cell. Such cells originate from bone marrow hematopoietic progenitor cells. Upon exposure to specific growth factors and other components of the hematopoietic microenvironment, hematopoietic progenitor cells can mature through a series of intermediate differentiation cellular types, all intermediates of the erythroid lineage, into RBCs. Thus, cells of the “erythroid lineage” comprise hematopoietic progenitor cells, rubriblasts, prorubricytes, erythroblasts, metarubricytes, reticulocytes, and erythrocytes.

[0210] The hematopoietic progenitor cell can express at least one of the following cell surface markers characteristic of hematopoietic progenitor cells: CD34+, CD59+, Thy1/CD90+, CD381o/−, and C-kit/CDI 17+. In some examples provided herein, the hematopoietic progenitors can be CD34+.

[0211] The hematopoietic progenitor cell can be a peripheral blood stem cell obtained from the patient after the patient has been treated with one or more factors such as granulocyte colony stimulating factor (optionally in combination with Plerixaflor). CD34+ cells can be enriched using CliniMACS® Cell Selection System (Miltenyi Biotec). CD34+ cells can be stimulated in serum-free medium (e.g., CellGrow SCGM media, CellGenix) with cytokines (e.g., SCF, rhTPO, rhFLT3) before genome editing. Addition of SR1 and dmPGE2 and/or other factors is contemplated to improve long-term engraftment.

[0212] The hematopoietic progenitor cells of the erythroid lineage can have a cell surface marker characteristic of the erythroid lineage: such as CD71 and Terl 19.

[0213] Hematopoietic stem cells (HSCs) can be an important target for gene therapy as they provide a prolonged source of the corrected cells. HSCs give rise to both the myeloid and lymphoid lineages of blood cells. Mature blood cells have a finite life-span and must be continuously replaced throughout life. Blood cells are continually produced by the proliferation and differentiation of a population of pluripotent HSCs that can be replenished by self-renewal. Bone marrow (BM) is the major site of hematopoiesis in humans and a good source for hematopoetic stem and progenitor cells (HSPCs). HSPCs can be found in small numbers in the peripheral blood (PB). In some indications or treatments their numbers increase. The progeny of HSCs mature through stages, generating multi-potential and lineage-committed progenitor cells including the lymphoid progenitor cells giving rise to the cells expressing BCL11A. B and T cell progenitors are the two cell populations requiring the activity of BCL11A, so they could be edited at the stages prior to re-arrangement, though correcting progenitors has the advantage of continuing to be a source of corrected cells. Treated cells, such as CD34+ cells, would be returned to the patient. The level of engraftment can be important, as is the ability of the cells' multilineage engraftment of gene-edited cells following CD34+ infusion in vivo.

### Induced Pluripotent Stem Cells

[0214] The genetically engineered human cells described herein can be induced pluripotent stem cells (IPSCs). An advantage of using IPSCs is that the cells can be derived from the same subject to which the progenitor cells are to be administered. That is, a somatic cell can be obtained from a subject, reprogrammed to an induced pluripotent stem cell, and then re-differentiated into a progenitor cell to be administered to the subject (e.g., autologous cells). Because the progenitors are essentially derived from an autologous source, the risk of engraftment rejection or allergic response can be reduced compared to the use of cells from another subject or group of subjects. In addition, the use of iPSCs negates the need for cells obtained from an embryonic source. Thus, in one aspect, the stem cells used in the disclosed methods are not embryonic stem cells.

[0215] Although differentiation is generally irreversible under physiological contexts, several methods have been recently developed to reprogram somatic cells to iPSCs. Exemplary methods are known to those of skill in the art and are described briefly herein below.

[0216] The term “reprogramming” refers to a process that alters or reverses the differentiation state of a differentiated cell (e.g., a somatic cell). Stated another way, reprogramming refers to a process of driving the differentiation of a cell backwards to a more undifferentiated or more primitive type of cell. It should be noted that placing many primary cells in culture can lead to some loss of fully differentiated characteristics. Thus, simply culturing such cells included in the term differentiated cells does not render these cells non-differentiated cells (e.g., undifferentiated cells) or pluripotent cells. The transition of a differentiated cell to pluripotency requires a reprogramming stimulus beyond the stimuli that lead to partial loss of differentiated character in culture. Reprogrammed cells also have the characteristic of the capacity of extended passaging without loss of growth potential, relative to primary cell parents, which generally have capacity for only a limited number of divisions in culture.

[0217] The cell to be reprogrammed can be either partially or terminally differentiated prior to reprogramming. Reprogramming can encompass complete reversion of the differentiation state of a differentiated cell (e.g., a somatic cell) to a pluripotent state or a multipotent state. Reprogramming can encompass complete or partial reversion of the differentiation state of a differentiated cell (e.g., a somatic cell) to an undifferentiated cell (e.g., an embryonic-like cell). Reprogramming can result in expression of particular genes by the cells, the expression of which further contributes to reprogramming. In certain examples described herein, reprogramming of a differentiated cell (e.g., a somatic cell) can cause the differentiated cell to assume an undifferentiated state (e.g., is an undifferentiated cell). The resulting cells are referred to as “reprogrammed cells,” or “induced pluripotent stem cells (IPSCs or IPS cells).”

[0218] Reprogramming can involve alteration, e.g., reversal, of at least some of the heritable patterns of nucleic acid modification (e.g., methylation), chromatin condensation, epigenetic changes, genomic imprinting, etc., that occur during cellular differentiation. Reprogramming is distinct from simply maintaining the existing undifferentiated state of a cell that is already pluripotent or maintaining the existing less than fully differentiated state of a cell that is already a multipotent cell (e.g., a hematopoietic stem cell). Reprogramming is also distinct from promoting the self-renewal or proliferation of cells that are already pluripotent or multipotent, although the compositions and methods described herein can also be of use for such purposes, in some examples.

[0219] Many methods are known in the art that can be used to generate pluripotent stem cells from somatic cells. Any such method that reprograms a somatic cell to the pluripotent phenotype would be appropriate for use in the methods described herein.

[0220] Reprogramming methodologies for generating pluripotent cells using defined combinations of transcription factors have been described. Mouse somatic cells can be converted to ES cell-like cells with expanded developmental potential by the direct transduction of Oct4, Sox2, Klf4, and c-Myc; see, e.g., Takahashi and Yamanaka, Cell 126(4): 663-76 (2006). IPSCs resemble ES cells, as they restore the pluripotency-associated transcriptional circuitry and much of the epigenetic landscape. In addition, mouse iPSCs satisfy all the standard assays for pluripotency: specifically, in vitro differentiation into cell types of the three germ layers, teratoma formation, contribution to chimeras, germline transmission [see, e.g., Maherali and Hochedlinger, Cell Stem Cell. 3(6):595-605 (2008)], and tetraploid complementation.

[0221] Human IPSCs can be obtained using similar transduction methods, and the transcription factor trio, OCT4, SOX2, and NANOG, has been established as the core set of transcription factors that govern pluripotency; see, e.g., Budniatzky and Gepstein, Stem Cells Transl Med. 3(4):448-57 (2014); Barrett et al., Stem Cells Trans Med 3:1-6 sctm.2014-0121 (2014); Focosi et al., Blood Cancer Journal 4: e211 (2014); and references cited therein. The production of IPSCs can be achieved by the introduction of nucleic acid sequences encoding stem cell-associated genes into an adult, somatic cell, historically using viral vectors.

[0222] IPSCs can be generated or derived from terminally differentiated somatic cells, as well as from adult stem cells, or somatic stem cells. That is, a non-pluripotent progenitor cell can be rendered pluripotent or multipotent by reprogramming. In such instances, it may not be necessary to include as many reprogramming factors as required to reprogram a terminally differentiated cell. Further, reprogramming can be induced by the non-viral introduction of reprogramming factors, e.g., by introducing the proteins themselves, or by introducing nucleic acids that encode the reprogramming factors, or by introducing messenger RNAs that upon translation produce the reprogramming factors (see e.g., Warren et al., Cell Stem Cell, 7(5):618-30 (2010). Reprogramming can be achieved by introducing a combination of nucleic acids encoding stem cell-associated genes, including, for example, Oct-4 (also known as Oct-3/4 or Pouf51), Sox1, Sox2, Sox3, Sox 15, Sox 18, NANOG, Klf1, Klf2, Klf4, Klf5, NR5A2, c-Myc, 1-Myc, n-Myc, Rem2, Tert, and LIN28. Reprogramming using the methods and compositions described herein can further comprise introducing one or more of Oct-3/4, a member of the Sox family, a member of the Klf family, and a member of the Myc family to a somatic cell. The methods and compositions described herein can further comprise introducing one or more of each of Oct-4, Sox2, Nanog, c-MYC and Klf4 for reprogramming. As noted above, the exact method used for reprogramming is not necessarily critical to the methods and compositions described herein. However, where cells differentiated from the reprogrammed cells are to be used in, e.g., human therapy, in one aspect the reprogramming is not effected by a method that alters the genome. Thus, in such examples, reprogramming can be achieved, e.g., without the use of viral or plasmid vectors.

[0223] The efficiency of reprogramming (i.e., the number of reprogrammed cells) derived from a population of starting cells can be enhanced by the addition of various agents, e.g., small molecules, as shown by Shi et al., Cell-Stem Cell 2:525-528 (2008); Huangfu et al., Nature Biotechnology 26(7):795-797 (2008) and Marson et al., Cell-Stem Cell 3: 132-135 (2008). Thus, an agent or combination of agents that enhance the efficiency or rate of induced pluripotent stem cell production can be used in the production of patient-specific or disease-specific IPSCs. Some non-limiting examples of agents that enhance reprogramming efficiency include soluble Wnt, Wnt conditioned media, BIX-01294 (a G9a histone methyltransferase), PD0325901 (a MEK inhibitor), DNA methyltransferase inhibitors, histone deacetylase (HDAC) inhibitors, valproic acid, 5′-azacytidine, dexamethasone, suberoylanilide, hydroxamic acid (SAHA), vitamin C, and trichostatin (TSA), among others.

[0224] Other non-limiting examples of reprogramming enhancing agents include: Suberoylanilide Hydroxamic Acid (SAHA (e.g., MK0683, vorinostat) and other hydroxamic acids), BML-210, Depudecin (e.g., (−)-Depudecin), HC Toxin, Nullscript (4-(I,3-Dioxo-IH,3H-benzo[de]isoquinolin-2-yl)-N-hydroxybutanamide), Phenylbutyrate (e.g., sodium phenylbutyrate) and Valproic Acid (VP A) and other short chain fatty acids), Scriptaid, Suramin Sodium, Trichostatin A (TSA), APHA Compound 8, Apicidin, Sodium Butyrate, pivaloyloxymethyl butyrate (Pivanex, AN-9), Trapoxin B, Chlamydocin, Depsipeptide (also known as FR901228 or FK228), benzamides (e.g., CI-994 (e.g., N-acetyl dinaline) and MS-27-275), MGCD0103, NVP-LAQ-824, CBHA (m-carboxycinnaminic acid bishydroxamic acid), JNJ16241199, Tubacin, A-161906, proxamide, oxamflatin, 3-CI-UCHA (e.g., 6-(3-chlorophenylureido)caproic hydroxamic acid), AOE (2-amino-8-oxo-9, 10-epoxydecanoic acid), CHAP31 and CHAP 50. Other reprogramming enhancing agents include, for example, dominant negative forms of the HDACs (e.g., catalytically inactive forms), siRNA inhibitors of the HDACs, and antibodies that specifically bind to the HDACs, Such inhibitors are available, e.g., from BIOMOL International, Fukasawa, Merck Biosciences, Novartis, Gloucester Pharmaceuticals, Titan Pharmaceuticals, MethylGene, and Sigma Aldrich.

[0225] To confirm the induction of pluripotent stem cells for use with the methods described herein, isolated clones can be tested for the expression of a stem cell marker. Such expression in a cell derived from a somatic cell identifies the cells as induced pluripotent stem cells. Stem cell markers can be selected from the non-limiting group including SSEA3, SSEA4, CD9, Nanog, Fbxl5, Ecatl, Esgl, Eras, Gdf3, Fgf4, Cripto, Daxl, Zpf296, Slc2a3, Rexl, Utfl, and Natl. In one case, for example, a cell that expresses Oct4 or Nanog is identified as pluripotent. Methods for detecting the expression of such markers can include, for example, RT-PCR and immunological methods that detect the presence of the encoded polypeptides, such as Western blots or flow cytometric analyses. Detection can involve not only RT-PCR, but can also include detection of protein markers. Intracellular markers may be best identified via RT-PCR, or protein detection methods such as immunocytochemistry, while cell surface markers are readily identified, e.g., by immunocytochemistry.

[0226] The pluripotent stem cell character of isolated cells can be confirmed by tests evaluating the ability of the IPSCs to differentiate into cells of each of the three germ layers. As one example, teratoma formation in nude mice can be used to evaluate the pluripotent character of the isolated clones. The cells can be introduced into nude mice and histology and/or immunohistochemistry can be performed on a tumor arising from the cells. The growth of a tumor comprising cells from all three germ layers, for example, further indicates that the cells are pluripotent stem cells.

### Creating Patient Specific IPSCs

[0227] One step of the ex vivo methods of the present disclosure can involve creating a patient specific IPS cell, patient specific iPS cells, or a patient specific iPS cell line. There are many established methods in the art for creating patient specific iPS cells, as described in Takahashi and Yamanaka 2006; Takahashi, Tanabe et al. 2007. For example, the creating step can comprise: a) isolating a somatic cell, such as a skin cell or fibroblast, from the patient; and b) introducing a set of pluripotency-associated genes into the somatic cell in order to induce the cell to become a pluripotent stem cell. The set of pluripotency-associated genes can be one or more of the genes selected from the group consisting of OCT4, SOX2, KLF4, Lin28, NANOG, and cMYC.

### Performing a Biopsy or Aspirate of the Patient's Bone Marrow

[0228] A biopsy or aspirate is a sample of tissue or fluid taken from the body. There are many different kinds of biopsies or aspirates. Nearly all of them involve using a sharp tool to remove a small amount of tissue. If the biopsy will be on the skin or other sensitive area, numbing medicine can be applied first. A biopsy or aspirate can be performed according to any of the known methods in the art. For example, in a bone marrow aspirate, a large needle is used to enter the pelvis bone to collect bone marrow.

### Isolating a Mesenchymal Stem Cell

[0229] Mesenchymal stem cells can be isolated according to any method known in the art, such as from a patient's bone marrow or peripheral blood. For example, marrow aspirate can be collected into a syringe with heparin. Cells can be washed and centrifuged on a Percoll™ density gradient. Cells, such as blood cells, liver cells, interstitial cells, macrophages, mast cells, and thymocytes, can be separated using Percoll™. The cells can be cultured in Dulbecco's modified Eagle's medium (DMEM) (low glucose) containing 10% fetal bovine serum (FBS) (Pittinger M F, Mackay A M, Beck S C et al., Science 1999: 284:143-147).

Treating a Patient with GCSF

[0230] A patient may optionally be treated with granulocyte colony stimulating factor (GCSF) in accordance with any method known in the art. The GCSF can be administered in combination with Plerixaflor.

Isolating a Hematopoietic Progenitor Cell from a Patient

[0231] A hematopoietic progenitor cell can be isolated from a patient by any method known in the art. CD34+ cells can be enriched using CliniMACS® Cell Selection System (Miltenyi Biotec). CD34+ cells can be weakly stimulated in serum-free medium (e.g., CellGrow SCGM media, CellGenix) with cytokines (e.g., SCF, rhTPO, rhFLT3) before genome editing.

### Genome Editing

[0232] Genome editing generally refers to the process of modifying the nucleotide sequence of a genome, preferably in a precise or pre-determined manner. Examples of methods of genome editing described herein include methods of using site-directed nucleases to cut deoxyribonucleic acid (DNA) at precise target locations in the genome, thereby creating single-strand or double-strand DNA breaks at particular locations within the genome. Such breaks can be and regularly are repaired by natural, endogenous cellular processes, such as homology-directed repair (HDR) and NHEJ, as recently reviewed in Cox et al., Nature Medicine 21(2), 121-31 (2015). These two main DNA repair processes consist of a family of alternative pathways. NHEJ directly joins the DNA ends resulting from a double-strand break, sometimes with the loss or addition of nucleotide sequence, which may disrupt or enhance gene expression. HDR utilizes a homologous sequence, or donor sequence, as a template for inserting a defined DNA sequence at the break point. The homologous sequence can be in the endogenous genome, such as a sister chromatid. Alternatively, the donor can be an exogenous nucleic acid, such as a plasmid, a single-strand oligonucleotide, a double-stranded oligonucleotide, a duplex oligonucleotide or a virus, that has regions of high homology with the nuclease-cleaved locus, but which can also contain additional sequence or sequence changes including deletions that can be incorporated into the cleaved target locus. A third repair mechanism can be microhomology-mediated end joining (MMEJ), also referred to as “Alternative NHEJ”, in which the genetic outcome is similar to NHEJ in that small deletions and insertions can occur at the cleavage site. MMEJ can make use of homologous sequences of a few basepairs flanking the DNA break site to drive a more favored DNA end joining repair outcome, and recent reports have further elucidated the molecular mechanism of this process; see, e.g., Cho and Greenberg, Nature 518, 174-76 (2015); Kent et al., Nature Structural and Molecular Biology, Adv. Online doi:10.1038/nsmb.2961(2015); Mateos-Gomez et al., Nature 518, 254-57 (2015); Ceccaldi et al., Nature 528, 258-62 (2015). In some instances it may be possible to predict likely repair outcomes based on analysis of potential microhomologies at the site of the DNA break.

[0233] Each of these genome editing mechanisms can be used to create desired genomic alterations. A step in the genome editing process can be to create one or two DNA breaks, the latter as double-strand breaks or as two single-stranded breaks, in the target locus as near the site of intended mutation. This can be achieved via the use of site-directed polypeptides, as described and illustrated herein.

[0234] Site-directed polypeptides, such as a DNA endonuclease, can introduce double-strand breaks or single-strand breaks in nucleic acids, e.g., genomic DNA. The double-strand break can stimulate a cell's endogenous DNA-repair pathways (e.g., homology-dependent repair or non-homologous end joining or alternative non-homologous end joining (A-NHEJ) or microhomology-mediated end joining). NHEJ can repair cleaved target nucleic acid without the need for a homologous template. This can sometimes result in small deletions or insertions (indels) in the target nucleic acid at the site of cleavage, and can lead to disruption or alteration of gene expression. HDR can occur when a homologous repair template, or donor, is available. The homologous donor template can comprise sequences that can be homologous to sequences flanking the target nucleic acid cleavage site. The sister chromatid can be used by the cell as the repair template. However, for the purposes of genome editing, the repair template can be supplied as an exogenous nucleic acid, such as a plasmid, duplex oligonucleotide, single-strand oligonucleotide, double-stranded oligonucleotide, or viral nucleic acid. With exogenous donor templates, an additional nucleic acid sequence (such as a transgene) or modification (such as a single or multiple base change or a deletion) can be introduced between the flanking regions of homology so that the additional or altered nucleic acid sequence also becomes incorporated into the target locus. MMEJ can result in a genetic outcome that is similar to NHEJ in that small deletions and insertions can occur at the cleavage site. MMEJ can make use of homologous sequences of a few basepairs flanking the cleavage site to drive a favored end-joining DNA repair outcome. In some instances it may be possible to predict likely repair outcomes based on analysis of potential microhomologies in the nuclease target regions.

[0235] Thus, in some cases, homologous recombination can be used to insert an exogenous polynucleotide sequence into the target nucleic acid cleavage site. An exogenous polynucleotide sequence is termed a donor polynucleotide (or donor or donor sequence or polynucleotide donor template) herein. The donor polynucleotide, a portion of the donor polynucleotide, a copy of the donor polynucleotide, or a portion of a copy of the donor polynucleotide can be inserted into the target nucleic acid cleavage site. The donor polynucleotide can be an exogenous polynucleotide sequence, i.e., a sequence that does not naturally occur at the target nucleic acid cleavage site.

[0236] The modifications of the target DNA due to NHEJ and/or HDR can lead to, for example, mutations, deletions, alterations, integrations, gene correction, gene replacement, gene tagging, transgene insertion, nucleotide deletion, gene disruption, translocations and/or gene mutation. The processes of deleting genomic DNA and integrating non-native nucleic acid into genomic DNA are examples of genome editing.

### CRISPR Endonuclease System

[0237] A CRISPR (Clustered Regularly Interspaced Short Palindromic Repeats) genomic locus can be found in the genomes of many prokaryotes (e.g., bacteria and archaea). In prokaryotes, the CRISPR locus encodes products that function as a type of immune system to help defend the prokaryotes against foreign invaders, such as virus and phage. There are three stages of CRISPR locus function: integration of new sequences into the CRISPR locus, expression of CRISPR RNA (crRNA), and silencing of foreign invader nucleic acid. Five types of CRISPR systems (e.g., Type I, Type II, Type III, Type U, and Type V) have been identified.

[0238] A CRISPR locus includes a number of short repeating sequences referred to as “repeats.” When expressed, the repeats can form secondary structures (e.g., hairpins) and/or comprise unstructured single-stranded sequences. The repeats usually occur in clusters and frequently diverge between species. The repeats are regularly interspaced with unique intervening sequences referred to as “spacers,” resulting in a repeat-spacer-repeat locus architecture. The spacers are identical to or have high homology with known foreign invader sequences. A spacer-repeat unit encodes a crisprRNA (crRNA), which is processed into a mature form of the spacer-repeat unit. A crRNA comprises a “seed” or spacer sequence that is involved in targeting a target nucleic acid (in the naturally occurring form in prokaryotes, the spacer sequence targets the foreign invader nucleic acid). A spacer sequence is located at the 5′ or 3′ end of the crRNA.

[0239] A CRISPR locus also comprises polynucleotide sequences encoding CRISPR Associated (Cas) genes. Cas genes encode endonucleases involved in the biogenesis and the interference stages of crRNA function in prokaryotes. Some Cas genes comprise homologous secondary and/or tertiary structures.

### Type II CRISPR Systems

[0240] crRNA biogenesis in a Type II CRISPR system in nature requires a trans-activating CRISPR RNA (tracrRNA). The tracrRNA can be modified by endogenous RNaseIII, and then hybridizes to a crRNA repeat in the pre-crRNA array. Endogenous RNaseIII can be recruited to cleave the pre-crRNA. Cleaved crRNAs can be subjected to exoribonuclease trimming to produce the mature crRNA form (e.g., 5′ trimming). The tracrRNA can remain hybridized to the crRNA, and the tracrRNA and the crRNA associate with a site-directed polypeptide (e.g., Cas9). The crRNA of the crRNA-tracrRNA-Cas9 complex can guide the complex to a target nucleic acid to which the crRNA can hybridize. Hybridization of the crRNA to the target nucleic acid can activate Cas9 for targeted nucleic acid cleavage. The target nucleic acid in a Type II CRISPR system is referred to as a protospacer adjacent motif (PAM). In nature, the PAM is essential to facilitate binding of a site-directed polypeptide (e.g., Cas9) to the target nucleic acid. Type II systems (also referred to as Nmeni or CASS4) are further subdivided into Type II-A (CASS4) and II-B (CASS4a). Jinek et al., Science, 337(6096):816-821 (2012) showed that the CRISPR/Cas9 system is useful for RNA-programmable genome editing, and international patent application publication number WO2013/176772 provides numerous examples and applications of the CRISPR/Cas endonuclease system for site-specific gene editing.

### Type V CRISPR Systems

[0241] Type V CRISPR systems have several important differences from Type II systems. For example, Cpf1 is a single RNA-guided endonuclease that, in contrast to Type II systems, lacks traerRNA. In fact, Cpf1-associated CRISPR arrays can be processed into mature crRNAs without the requirement of an additional trans-activating tracrRNA. The Type V CRISPR array can be processed into short mature crRNAs of 42-44 nucleotides in length, with each mature crRNA beginning with 19 nucleotides of direct repeat followed by 23-25 nucleotides of spacer sequence. In contrast, mature crRNAs in Type II systems can start with 20-24 nucleotides of spacer sequence followed by about 22 nucleotides of direct repeat. Also, Cpf1 can utilize a T-rich protospacer-adjacent motif such that Cpf1-crRNA complexes efficiently cleave target DNA preceded by a short T-rich PAM, which is in contrast to the G-rich PAM following the target DNA for Type II systems. Thus, Type V systems cleave at a point that is distant from the PAM, while Type II systems cleave at a point that is adjacent to the PAM. In addition, in contrast to Type II systems, Cpf1 cleaves DNA via a staggered DNA double-stranded break with a 4 or 5 nucleotide 5′ overhang. Type II systems cleave via a blunt double-stranded break. Similar to Type II systems, Cpf1 contains a predicted RuvC-like endonuclease domain, but lacks a second HNH endonuclease domain, which is in contrast to Type II systems.

### Cas Genes/Polypeptides and Protospacer Adjacent Motifs

[0242] Exemplary CRISPR/Cas polypeptides include the Cas9 polypeptides in FIG. 1 of Fonfara et al., Nucleic Acids Research, 42: 2577-2590 (2014). The CRISPR/Cas gene naming system has undergone extensive rewriting since the Cas genes were discovered. FIG. 5 of Fonfara, supra, provides PAM sequences for the Cas9 polypeptides from various species.

### Site-Directed Polypeptides

[0243] A site-directed polypeptide is a nuclease used in genome editing to cleave DNA. The site-directed nuclease or polypeptide can be administered to a cell or a patient as either: one or more polypeptides, or one or more mRNAs encoding the polypeptide.

[0244] In the context of a CRISPR/Cas or CRISPR/Cpf1 system, the site-directed polypeptide can bind to a guide RNA that, in turn, specifies the site in the target DNA to which the polypeptide is directed. In the CRISPR/Cas or CRISPR/Cpf1 systems disclosed herein, the site-directed polypeptide can be an endonuclease, such as a DNA endonuclease.

[0245] A site-directed polypeptide can comprises a plurality of nucleic acid-cleaving (i.e., nuclease) domains. Two or more nucleic acid-cleaving domains can be linked together via a linker. For example, the linker can comprise a flexible linker. Linkers can comprise 1, 2, 3, 4, 5, 6, 7, 8, 9, 10, 11, 12, 13, 14, 15, 16, 17, 18, 19, 20, 21, 22, 23, 24, 25, 30, 35, 40 or more amino acids in length.

[0246] Naturally-occurring wild-type Cas9 enzymes comprise two nuclease domains, a HNH nuclease domain and a RuvC domain. Herein, the “Cas9” refers to both naturally-occurring and recombinant Cas9s. Cas9 enzymes contemplated herein can comprise a HNH or HNH-like nuclease domain, and/or a RuvC or RuvC-like nuclease domain.

[0247] HNH or HNH-like domains comprise a McrA-like fold. HNH or HNH-like domains comprises two antiparallel β-strands and an α-helix. HNH or HNH-like domains comprises a metal binding site (e.g., a divalent cation binding site). HNH or HNH-like domains can cleave one strand of a target nucleic acid (e.g., the complementary strand of the crRNA targeted strand).

[0248] RuvC or RuvC-like domains comprise an RNaseH or RnaseH-like fold. RuvC/RnaseH domains are involved in a diverse set of nucleic acid-based functions including acting on both RNA and DNA. The RnaseH domain comprises 5 β-strands surrounded by a plurality of α-helices. RuvC/RnaseH or RuvC/RnaseH-like domains comprise a metal binding site (e.g., a divalent cation binding site), RuvC/RnaseH or RuvC/RnaseH-like domains can cleave one strand of a target nucleic acid (e.g., the non-complementary strand of a double-stranded target DNA).

[0249] Site-directed polypeptides can introduce double-strand breaks or single-strand breaks in nucleic acids, e.g., genomic DNA. The double-strand break can stimulate a cell's endogenous DNA-repair pathways (e.g., homology-dependent repair (HDR) or NHEJ or alternative non-homologous end joining (A-NHEJ) or microhomology-mediated end joining (MMEJ)). NHEJ can repair cleaved target nucleic acid without the need for a homologous template. This can sometimes result in small deletions or insertions (indels) in the target nucleic acid at the site of cleavage, and can lead to disruption or alteration of gene expression. HDR can occur when a homologous repair template, or donor, is available. The homologous donor template can comprise sequences that are homologous to sequences flanking the target nucleic acid cleavage site. The sister chromatid can be used by the cell as the repair template. However, for the purposes of genome editing, the repair template can be supplied as an exogenous nucleic acid, such as a plasmid, duplex oligonucleotide, single-strand oligonucleotide or viral nucleic acid. With exogenous donor templates, an additional nucleic acid sequence (such as a transgene) or modification (such as a single or multiple base change or a deletion) can be introduced between the flanking regions of homology so that the additional or altered nucleic acid sequence also becomes incorporated into the target locus. MMEJ can result in a genetic outcome that is similar to NHEJ in that small deletions and insertions can occur at the cleavage site. MMEJ can make use of homologous sequences of a few basepairs flanking the cleavage site to drive a favored end-joining DNA repair outcome. In some instances it may be possible to predict likely repair outcomes based on analysis of potential microhomologies in the nuclease target regions.

[0250] Thus, in some cases, homologous recombination can be used to insert an exogenous polynucleotide sequence into the target nucleic acid cleavage site. An exogenous polynucleotide sequence is termed a donor polynucleotide (or donor or donor sequence) herein. The donor polynucleotide, a portion of the donor polynucleotide, a copy of the donor polynucleotide, or a portion of a copy of the donor polynucleotide can be inserted into the target nucleic acid cleavage site. The donor polynucleotide can be an exogenous polynucleotide sequence, i.e., a sequence that does not naturally occur at the target nucleic acid cleavage site.

[0251] The modifications of the target DNA due to NHEJ and/or HDR can lead to, for example, mutations, deletions, alterations, integrations, gene correction, gene replacement, gene tagging, transgene insertion, nucleotide deletion, gene disruption, translocations and/or gene mutation. The processes of deleting genomic DNA and integrating non-native nucleic acid into genomic DNA are examples of genome editing.

[0252] The site-directed polypeptide can comprise an amino acid sequence having at least 10%, at least 15%, at least 20%, at least 30%, at least 40%, at least 50%, at least 60%, at least 70%, at least 75%, at least 80%, at least 85%, at least 90%, at least 95%, at least 99%, or 100% amino acid sequence identity to a wild-type exemplary site-directed polypeptide [e.g., Cas9 from S. pyogenes, US2014/0068797 Sequence ID No. 8 or Sapranauskas et al., Nucleic Acids Res, 39(21): 9275-9282 (2011)], and various other site-directed polypeptides. The site-directed polypeptide can comprise at least 70, 75, 80, 85, 90, 95, 97, 99, or 100% identity to a wild-type site-directed polypeptide (e.g., Cas9 from S. pyogenes, supra) over 10 contiguous amino acids. The site-directed polypeptide can comprise at most: 70, 75, 80, 85, 90, 95, 97, 99, or 100% identity to a wild-type site-directed polypeptide (e.g., Cas9 from S. pyogenes, supra) over 10 contiguous amino acids. The site-directed polypeptide can comprise at least: 70, 75, 80, 85, 90, 95, 97, 99, or 100% identity to a wild-type site-directed polypeptide (e.g., Cas9 from S. pyogenes, supra) over 10 contiguous amino acids in a HNH nuclease domain of the site-directed polypeptide. The site-directed polypeptide can comprise at most: 70, 75, 80, 85, 90, 95, 97, 99, or 100% identity to a wild-type site-directed polypeptide (e.g., Cas9 from S. pyogenes, supra) over 10 contiguous amino acids in a HNH nuclease domain of the site-directed polypeptide. The site-directed polypeptide can comprise at least: 70, 75, 80, 85, 90, 95, 97, 99, or 100% identity to a wild-type site-directed polypeptide (e.g., Cas9 from S. pyogenes, supra) over 10 contiguous amino acids in a RuvC nuclease domain of the site-directed polypeptide. The site-directed polypeptide can comprise at most: 70, 75, 80, 85, 90, 95, 97, 99, or 100% identity to a wild-type site-directed polypeptide (e.g., Cas9 from S. pyogenes, supra) over 10 contiguous amino acids in a RuvC nuclease domain of the site-directed polypeptide.

[0253] The site-directed polypeptide can comprise a modified form of a wild-type exemplary site-directed polypeptide. The modified form of the wild-type exemplary site-directed polypeptide can comprise a mutation that reduces the nucleic acid-cleaving activity of the site-directed polypeptide. The modified form of the wild-type exemplary site-directed polypeptide can have less than 90%, less than 80%, less than 70%, less than 60%, less than 50%, less than 40%, less than 30%, less than 20%, less than 10%, less than 5%, or less than 1% of the nucleic acid-cleaving activity of the wild-type exemplary site-directed polypeptide (e.g., Cas9 from S. pyogenes, supra). The modified form of the site-directed polypeptide can have no substantial nucleic acid-cleaving activity. When a site-directed polypeptide is a modified form that has no substantial nucleic acid-cleaving activity, it is referred to herein as “enzymatically inactive.”

[0254] The modified form of the site-directed polypeptide can comprise a mutation such that it can induce a single-strand break (SSB) on a target nucleic acid (e.g., by cutting only one of the sugar-phosphate backbones of a double-strand target nucleic acid). The mulation can result in less than 90%, less than 80%, less than 70%, less than 60%, less than 50%, less than 40%, less than 30%, less than 20%, less than 10%, less than 5%, or less than 1% of the nucleic acid-cleaving activity in one or more of the plurality of nucleic acid-cleaving domains of the wild-type site directed polypeptide (e.g., Cas9 from S. pyogenes, supra). The mutation can result in one or more of the plurality of nucleic acid-cleaving domains retaining the ability to cleave the complementary strand of the target nucleic acid, but reducing its ability to cleave the non-complementary strand of the target nucleic acid. The mutation can result in one or more of the plurality of nucleic acid-cleaving domains retaining the ability to cleave the non-complementary strand of the target nucleic acid, but reducing its ability to cleave the complementary strand of the target nucleic acid. For example, residues in the wild-type exemplary S. pyogenes Cas9 polypeptide, such as Asp10, His840, Asn854 and Asn856, are mutated to inactivate one or more of the plurality of nucleic acid-cleaving domains (e.g., nuclease domains). The residues to be mutated can correspond to residues Asp10, His840, Asn854 and Asn856 in the wild-type exemplary S. pyogenes Cas9 polypeptide (e.g., as determined by sequence and/or structural alignment). Non-limiting examples of mutations include D10A, H840A, N854A or N856A. One skilled in the art will recognize that mutations other than alanine substitutions can be suitable.

[0255] A D10A mutation can be combined with one or more of H840A, N854A, or N856A mutations to produce a site-directed polypeptide substantially lacking DNA cleavage activity. A H840A mutation can be combined with one or more of D10A, N854A, or N856A mutations to produce a site-directed polypeptide substantially lacking DNA cleavage activity. A N854A mutation can be combined with one or more of H840A, D10A, or N856A mutations to produce a site-directed polypeptide substantially lacking DNA cleavage activity. A N856A mutation can be combined with one or more of H840A, N854A, or D10A mutations to produce a site-directed polypeptide substantially lacking DNA cleavage activity. Site-directed polypeptides that comprise one substantially inactive nuclease domain are referred to as “nickases”.

[0256] Nickase variants of RNA-guided endonucleases, for example Cas9, can be used to increase the specificity of CRISPR-mediated genome editing. Wild type Cas9 is typically guided by a single guide RNA designed to hybridize with a specified ˜20 nucleotide sequence in the target sequence (such as an endogenous genomic locus). However, several mismatches can be tolerated between the guide RNA and the target locus, effectively reducing the length of required homology in the target site to, for example, as little as 13 nt of homology, and thereby resulting in elevated potential for binding and double-strand nucleic acid cleavage by the CRISPR/Cas9 complex elsewhere in the target genome—also known as off-target cleavage. Because nickase variants of Cas9 each only cut one strand, in order to create a double-strand break it is necessary for a pair of nickases to bind in close proximity and on opposite strands of the target nucleic acid, thereby creating a pair of nicks, which is the equivalent of a double-strand break. This requires that two separate guide RNAs—one for each nickase—must bind in close proximity and on opposite strands of the target nucleic acid. This requirement essentially doubles the minimum length of homology needed for the double-strand break to occur, thereby reducing the likelihood that a double-strand cleavage event will occur elsewhere in the genome, where the two guide RNA sites—if they exist—are unlikely to be sufficiently close to each other to enable the double-strand break to form. As described in the art, nickases can also be used to promote HDR versus NHEJ. HDR can be used to introduce selected changes into target sites in the genome through the use of specific donor sequences that effectively mediate the desired changes.

[0257] Mutations contemplated can include substitutions, additions, and deletions, or any combination thereof. The mutation converts the mutated amino acid to alanine. The mutation converts the mutated amino acid to another amino acid (e.g., glycine, serine, threonine, cysteine, valine, leucine, isoleucine, methionine, proline, phenylalanine, tyrosine, tryptophan, aspartic acid, glutamic acid, asparagines, glutamine, histidine, lysine, or arginine). The mutation converts the mutated amino acid to a non-natural amino acid (e.g., selenomethionine). The mutation converts the mutated amino acid to amino acid mimics (e.g., phosphomimics). The mutation can be a conservative mutation. For example, the mutation converts the mutated amino acid to amino acids that resemble the size, shape, charge, polarity, conformation, and/or rotamers of the mutated amino acids (e.g., cysteine/serine mulation, lysine/asparagine mutation, histidine/phenylalanine mutation). The mutation can cause a shift in reading frame and/or the creation of a premature stop codon. Mutations can cause changes to regulatory regions of genes or loci that affect expression of one or more genes.

[0258] The site-directed polypeptide (e.g., variant, mutated, enzymatically inactive and/or conditionally enzymatically inactive site-directed polypeptide) can target nucleic acid. The site-directed polypeptide (e.g., variant, mutated, enzymatically inactive and/or conditionally enzymatically inactive endoribonuclease) can target DNA. The site-directed polypeptide (e.g., variant, mutated, enzymatically inactive and/or conditionally enzymatically inactive endoribonuclease) can target RNA.

[0259] The site-directed polypeptide can comprise one or more non-native sequences (e.g., the site-directed polypeptide is a fusion protein).

[0260] The site-directed polypeptide can comprise an amino acid sequence comprising at least 15% amino acid identity to a Cas9 from a bacterium (e.g., S. pyogenes), a nucleic acid binding domain, and two nucleic acid cleaving domains (i.e., a HNH domain and a RuvC domain).

[0261] The site-directed polypeptide can comprise an amino acid sequence comprising at least 15% amino acid identity to a Cas9 from a bacterium (e.g., S. pyogenes), and two nucleic acid cleaving domains (i.e., a HNH domain and a RuvC domain).

[0262] The site-directed polypeptide can comprise an amino acid sequence comprising at least 15% amino acid identity to a Cas9 from a bacterium (e.g., S. pyogenes), and two nucleic acid cleaving domains, wherein one or both of the nucleic acid cleaving domains comprise at least 50% amino acid identity to a nuclease domain from Cas9 from a bacterium (e.g., S. pyogenes).

[0263] The site-directed polypeptide can comprise an amino acid sequence comprising at least 15% amino acid identity to a Cas9 from a bacterium (e.g., S. pyogenes), two nucleic acid cleaving domains (I.e., a HNH domain and a RuvC domain), and non-native sequence (for example, a nuclear localization signal) or a linker linking the site-directed polypeptide to a non-native sequence.

[0264] The site-directed polypeptide can comprise an amino acid sequence comprising at least 15% amino acid identity to a Cas9 from a bacterium (e.g., S. pyogenes), two nucleic acid cleaving domains (i.e., a HNH domain and a RuvC domain), wherein the site-directed polypeptide comprises a mutation in one or both of the nucleic acid cleaving domains that reduces the cleaving activity of the nuclease domains by at least 50%.

[0265] The site-directed polypeptide can comprise an amino acid sequence comprising at least 15% amino acid identity to a Cas9 from a bacterium (e.g., S. pyogenes), and two nucleic acid cleaving domains (i.e., a HNH domain and a RuvC domain), wherein one of the nuclease domains comprises mutation of aspartic acid 10, and/or wherein one of the nuclease domains can comprise a mutation of histidine 840, and wherein the mutation reduces the cleaving activity of the nuclease domain(s) by at least 50%.

[0266] The one or more site-directed polypeptides, e.g. DNA endonucleases, can comprise two nickases that together effect one double-strand break at a specific locus in the genome, or four nickases that together effect or cause two double-strand breaks at specific loci in the genome. Alternatively, one site-directed polypeptide, e.g. DNA endonuclease, can effect or cause one double-strand break at a specific locus in the genome.

[0267] The site-directed polypeptide can be flanked at the N-terminus, the C-terminus, or both the N-terminus and C-terminus by one or more nuclear localization signals (NLSs). For example, a Cas9 endonuclease can be flanked by two NLSs, one NLS located at the N-terminus and the second NLS located at the C-terminus. The NLS can be any NLS known in the art, such as a SV40 NLS.

### Genome-Targeting Nucleic Acid

[0268] The present disclosure provides a genome-targeting nucleic acid that can direct the activities of an associated polypeptide (e.g., a site-directed polypeptide) to a specific target sequence within a target nucleic acid. The genome-targeting nucleic acid can be an RNA. A genome-targeting RNA is referred to as a “guide RNA” or “gRNA” herein. A guide RNA can comprise at least a spacer sequence that hybridizes to a target nucleic acid sequence of interest, and a CRISPR repeat sequence. In Type II systems, the gRNA also comprises a second RNA called the tracrRNA sequence. In the Type II guide RNA (gRNA), the CRISPR repeat sequence and tracrRNA sequence hybridize to each other to form a duplex. In the Type V guide RNA (gRNA), the crRNA forms a duplex. In both systems, the duplex can bind a site-directed polypeptide, such that the guide RNA and site-direct polypeptide form a complex. The genome-targeting nucleic acid can provide target specificity to the complex by virtue of its association with the site-directed polypeptide. The genome-targeting nucleic acid thus can direct the activity of the site-directed polypeptide.

[0269] Exemplary guide RNAs include the spacer sequences in SEQ ID NOs: 1-71,947 and the sgRNA sequences in SEQ ID NOs: 71,950-71,959 of the Sequence Listing. As is understood by the person of ordinary skill in the art, each guide RNA can be designed to include a spacer sequence complementary to its genomic target sequence. For example, each of the spacer sequences in SEQ ID NOs: 1-71,947 of the Sequence Listing can be put into a single RNA chimera or a crRNA (along with a corresponding tracrRNA). See Jinek et al., Science, 337, 816-821 (2012) and Deltcheva et al., Nature, 471, 602-607 (2011) or Table 1.

[0270] The genome-targeting nucleic acid can be a double-molecule guide RNA. The genome targeting nucleic acid can be a single-molecule guide RNA.

[0271] A double-molecule guide RNA can comprise two strands of RNA. The first strand comprises in the 5′ to 3′ direction, an optional spacer extension sequence, a spacer sequence and a minimum CRISPR repeat sequence. The second strand can comprise a minimum tracrRNA sequence (complementary to the minimum CRISPR repeat sequence), a 3′ tracrRNA sequence and an optional tracrRNA extension sequence.

[0272] A single-molecule guide RNA (sgRNA) in a Type II system can comprise, in the 5′ to 3′ direction, an optional spacer extension sequence, a spacer sequence, a minimum CRISPR repeat sequence, a single-molecule guide linker, a minimum tracrRNA sequence, a 3′ tracrRNA sequence and an optional tracrRNA extension sequence. The optional tracrRNA extension can comprise elements that contribute additional functionality (e.g., stability) to the guide RNA. The single-molecule guide linker can link the minimum CRISPR repeat and the minimum tracrRNA sequence to form a hairpin structure. The optional tracrRNA extension can comprise one or more hairpins.

[0273] A single-molecule guide RNA (sgRNA) in a Type V system can comprise, in the 5′ to 3′ direction, a minimum CRISPR repeat sequence and a spacer sequence.

[0274] The sgRNA can comprise a 20 nucleotide spacer sequence at the 5′ end of the sgRNA sequence. The sgRNA can comprise a less than a 20 nucleotide spacer sequence at the 5′ end of the sgRNA sequence. The sgRNA can comprise a more than 20 nucleotide spacer sequence at the 5′ end of the sgRNA sequence. The sgRNA can comprise a variable length spacer sequence with 17-30 nucleotides at the 5′ end of the sgRNA sequence (see Table 1).

[0275] The sgRNA can comprise no uracil at the 3′end of the sgRNA sequence, such as in SEQ ID NO: 71,961 of Table 1. The sgRNA can comprise one or more uracil at the 3′end of the sgRNA sequence, such as in SEQ ID NO: 71,962 in Table 1. For example, the sgRNA can comprise 1 uracil (U) at the 3′ end of the sgRNA sequence. The sgRNA can comprise 2 uracil (UU) at the 3′ end of the sgRNA sequence. The sgRNA can comprise 3 uracil (UUU) at the 3′ end of the sgRNA sequence. The sgRNA can comprise 4 uracil (UUUU) at the 3′ end of the sgRNA sequence. The sgRNA can comprise 5 uracil (UUUUU) at the 3′ end of the sgRNA sequence. The sgRNA can comprise 6 uracil (UUUUUU) at the 3′ end of the sgRNA sequence. The sgRNA can comprise 7 uracil (UUUUUUU) at the 3′ end of the sgRNA sequence. The sgRNA can comprise 8 uracil (UUUUUUUU) at the 3′ end of the sgRNA sequence.

[0276] The sgRNA can be unmodified or modified. For example, modified sgRNAs can comprise one or more 2′-O-methyl phosphorothioate nucleotides.

TABLE 1

| SEQ ID NO. | sgRNA sequence |
|---|---|
| 71,960 | nnnnnnnnnnnnnnnnnnnnguuuuagagcuagaaauag |
| | caaguuaaaauaaggcuaguccguuaucaacuugaaaaa |
| | guggcaccgagucggugcuuuu |
| 71,961 | nnnnnnnnnnnnnnnnnnnnguuuuagagcuagaaauag |
| | caaguuaaaauaaggcuaguccguuaucaacuugaaaaa |
| | guggcaccgagucggugc |
| 71,962 | n₍₁₇₋₃₀₎quuuuagagcuagaaauagcaaguuaaaauaag |
| | gcuaguccguuaucaacuugaaaaaguggcaccgagucg |
| | gugcu₍₁₋₈₎ |

[0277] By way of illustration, guide RNAs used in the CRISPR/Cas/Cpf1 system, or other smaller RNAs can be readily synthesized by chemical means, as illustrated below and described in the art. While chemical synthetic procedures are continually expanding, purifications of such RNAs by procedures such as high performance liquid chromatography (HPLC, which avoids the use of gels such as PAGE) tends to become more challenging as polynucleotide lengths increase significantly beyond a hundred or so nucleotides. One approach used for generating RNAs of greater length is to produce two or more molecules that are ligated together. Much longer RNAs, such as those encoding a Cas9 or Cpf1 endonuclease, are more readily generated enzymatically. Various types of RNA modifications can be introduced during or after chemical synthesis and/or enzymatic generation of RNAs, e.g., modifications that enhance stability, reduce the likelihood or degree of innate immune response, and/or enhance other attributes, as described in the art.

### Spacer Extension Sequence

[0278] In some examples of genome-targeting nucleic acids, a spacer extension sequence can modify activity, provide stability and/or provide a location for modifications of a genome-targeting nucleic acid. A spacer extension sequence can modify on- or off-target activity or specificity. In some examples, a spacer extension sequence can be provided. The spacer extension sequence can have a length of more than 1, 5, 10, 15, 20, 25, 30, 35, 40, 45, 50, 60, 70, 80, 90, 100, 120, 140, 160, 180, 200, 220, 240, 260, 280, 300, 320, 340, 360, 380, 400, 1000, 2000, 3000, 4000, 5000, 6000, or 7000 or more nucleotides. The spacer extension sequence can have a length of less than 1, 5, 10, 15, 20, 25, 30, 35, 40, 45, 50, 60, 70, 80, 90, 100, 120, 140, 160, 180, 200, 220, 240, 260, 280, 300, 320, 340, 360, 380, 400, 1000, 2000, 3000, 4000, 5000, 6000, 7000 or more nucleotides. The spacer extension sequence can be less than 10 nucleotides in length. The spacer extension sequence can be between 10-30 nucleotides in length. The spacer extension sequence can be between 30-70 nucleotides in length.

[0279] The spacer extension sequence can comprise another moiety (e.g., a stability control sequence, an endoribonuclease binding sequence, a ribozyme). The moiety can decrease or increase the stability of a nucleic acid targeting nucleic acid. The moiety can be a transcriptional terminator segment (i.e., a transcription termination sequence). The moiety can function in a eukaryotic cell. The moiety can function in a prokaryotic cell. The moiety can function in both eukaryotic and prokaryotic cells. Non-limiting examples of suitable moieties include: a 5′ cap (e.g., a 7-methylguanylate cap (m7 G)), a riboswitch sequence (e.g., to allow for regulated stability and/or regulated accessibility by proteins and protein complexes), a sequence that forms a dsRNA duplex (i.e., a hairpin), a sequence that targets the RNA to a subcellular location (e.g., nucleus, mitochondria, chloroplasts, and the like), a modification or sequence that provides for tracking (e.g., direct conjugation to a fluorescent molecule, conjugation to a moiety that facilitates fluorescent detection, a sequence that allows for fluorescent detection, etc.), and/or a modification or sequence that provides a binding site for proteins (e.g., proteins that act on DNA, including transcriptional activators, transcriptional controls, DNA methyltransferases, DNA demethylases, histone acetyltransferases, histone deacetylases, and the like).

### Spacer Sequence

[0280] The spacer sequence hybridizes to a sequence in a target nucleic acid of interest. The spacer of a genome-targeting nucleic acid can interact with a target nucleic acid in a sequence-specific manner via hybridization (i.e., base pairing). The nucleotide sequence of the spacer can vary depending on the sequence of the target nucleic acid of interest.

[0281] In a CRISPR/Cas system herein, the spacer sequence can be designed to hybridize to a target nucleic acid that is located 5′ of a PAM of the Cas9 enzyme used in the system. The spacer may perfectly match the target sequence or may have mismatches. Each Cas9 enzyme has a particular PAM sequence that it recognizes in a target DNA. For example, S. pyogenes recognizes in a target nucleic acid a PAM that comprises the sequence 5′-NRG-3′, where R comprises either A or G, where N is any nucleotide and N is immediately 3′ of the target nucleic acid sequence targeted by the spacer sequence.

[0282] The target nucleic acid sequence can comprise 20 nucleotides. The target nucleic acid can comprise less than 20 nucleotides. The target nucleic acid can comprise more than 20 nucleotides. The target nucleic acid can comprise at least: 5, 10, 15, 16, 17, 18, 19, 20, 21, 22, 23, 24, 25, 30 or more nucleotides. The target nucleic acid can comprise at most: 5, 10, 15, 16, 17, 18, 19, 20, 21, 22, 23, 24, 25, 30 or more nucleotides. The target nucleic acid sequence can comprise 20 bases immediately 5′ of the first nucleotide of the PAM. For example, in a sequence comprising 5′-NNNNNNNNNNNNNNNNNNNNNRG-3′ (SEQ ID NO: 71,948), the target nucleic acid can comprise the sequence that corresponds to the Ns, wherein N is any nucleotide, and the underlined NRG sequence is the S. pyogenes PAM.

[0283] The spacer sequence that hybridizes to the target nucleic acid can have a length of at least about 6 nucleotides (nt). The spacer sequence can be at least about 6 nt, at least about 10 nt, at least about 15 nt, at least about 18 nt, at least about 19 nt, at least about 20 nt, at least about 25 nt, at least about 30 nt, at least about 35 nt or at least about 40 nt, from about 6 nt to about 80 nt, from about 6 nt to about 50 nt, from about 6 nt to about 45 nt, from about 6 nt to about 40 nt, from about 6 nt to about 35 nt, from about 6 nt to about 30 nt, from about 6 nt to about 25 nt, from about 6 nt to about 20 nt, from about 6 nt to about 19 nt, from about 10 nt to about 50 nt, from about 10 nt to about 45 nt, from about 10 nt to about 40 nt, from about 10 nt to about 35 nt, from about 10 nt to about 30 nt, from about 10 nt to about 25 nt, from about 10 nt to about 20 nt, from about 10 nt to about 19 nt, from about 19 nt to about 25 nt, from about 19 nt to about 30 nt, from about 19 nt to about 35 nt, from about 19 nt to about 40 nt, from about 19 nt to about 45 nt, from about 19 nt to about 50 nt, from about 19 nt to about 60 nt, from about 20 nt to about 25 nt, from about 20 nt to about 30 nt, from about 20 nt to about 35 nt, from about 20 nt to about 40 nt, from about 20 nt to about 45 nt, from about 20 nt to about 50 nt, or from about 20 nt to about 60 nt. In some examples, the spacer sequence can comprise 20 nucleotides. In some examples, the spacer can comprise 19 nucleotides.

[0284] In some examples, the percent complementarity between the spacer sequence and the target nucleic acid is at least about 30%, at least about 40%, at least about 50%, at least about 60%, at least about 65%, at least about 70%, at least about 75%, at least about 80%, at least about 85%, at least about 90%, at least about 95%, at least about 97%, at least about 98%, at least about 99%, or 100%. In some examples, the percent complementarity between the spacer sequence and the target nucleic acid is at most about 30%, at most about 40%, at most about 50%, at most about 60%, at most about 65%, at most about 70%, at most about 75%, at most about 80%, at most about 85%, at most about 90%, at most about 95%, at most about 97%, at most about 98%, at most about 99%, or 100%. In some examples, the percent complementarity between the spacer sequence and the target nucleic acid is 100% over the six contiguous 5′-most nucleotides of the target sequence of the complementary strand of the target nucleic acid. The percent complementarity between the spacer sequence and the target nucleic acid can be at least 60% over about 20 contiguous nucleotides. The length of the spacer sequence and the target nucleic acid can differ by 1 to 6 nucleotides, which may be thought of as a bulge or bulges.

[0285] The spacer sequence can be designed or chosen using a computer program. The computer program can use variables, such as predicted melting temperature, secondary structure formation, predicted annealing temperature, sequence identity, genomic context, chromatin accessibility, % GC, frequency of genomic occurrence (e.g., of sequences that are identical or are similar but vary in one or more spots as a result of mismatch, insertion or deletion), methylation status, presence of SNPs, and the like.

### Minimum CRISPR Repeat Sequence

[0286] A minimum CRISPR repeat sequence can be a sequence with at least about 30%, about 40%, about 50%, about 60%, about 65%, about 70%, about 75%, about 80%, about 85%, about 90%, about 95%, or 100% sequence identity to a reference CRISPR repeat sequence (e.g., crRNA from S. pyogenes).

[0287] A minimum CRISPR repeat sequence can comprise nucleotides that can hybridize to a minimum tracrRNA sequence in a cell. The minimum CRISPR repeat sequence and a minimum tracrRNA sequence can form a duplex, i.e. a base-paired double-stranded structure. Together, the minimum CRISPR repeat sequence and the minimum tracrRNA sequence can bind to the site-directed polypeptide. At least a part of the minimum CRISPR repeat sequence can hybridize to the minimum tracrRNA sequence. At least a part of the minimum CRISPR repeat sequence can comprise at least about 30%, about 40%, about 50%, about 60%, about 65%, about 70%, about 75%, about 80%, about 85%, about 90%, about 95%, or 100% complementary to the minimum tracrRNA sequence. At least a part of the minimum CRISPR repeat sequence can comprise at most about 30%, about 40%, about 50%, about 60%, about 65%, about 70%, about 75%, about 80%, about 85%, about 90%, about 95%, or 100% complementary to the minimum tracrRNA sequence.

[0288] The minimum CRISPR repeat sequence can have a length from about 7 nucleotides to about 100 nucleotides. For example, the length of the minimum CRISPR repeat sequence is from about 7 nucleotides (nt) to about 50 nt, from about 7 nt to about 40 nt, from about 7 nit to about 30 nt, from about 7 nt to about 25 nt, from about 7 nt to about 20 nt, from about 7 nt to about 15 nt, from about 8 nt to about 40 nt, from about 8 nt to about 30 nt, from about 8 nt to about 25 nt, from about 8 nt to about 20 nt, from about 8 nt to about 15 nt, from about 15 nt to about 100 nt, from about 15 nt to about 80 nt, from about 15 nt to about 50 nt, from about 15 nt to about 40 nt, from about 15 nt to about 30 nt, or from about 15 nt to about 25 nt. In some examples, the minimum CRISPR repeat sequence can be approximately 9 nucleotides in length. The minimum CRISPR repeat sequence can be approximately 12 nucleotides in length.

[0289] The minimum CRISPR repeat sequence can be at least about 60% identical to a reference minimum CRISPR repeat sequence (e.g., wild-type crRNA from S. pyogenes) over a stretch of at least 6, 7, or 8 contiguous nucleotides. For example, the minimum CRISPR repeat sequence can be at least about 65% identical, at least about 70% identical, at least about 75% identical, at least about 80% identical, at least about 85% identical, at least about 90% identical, at least about 95% identical, at least about 98% identical, at least about 99% identical or 100% identical to a reference minimum CRISPR repeat sequence over a stretch of at least 6, 7, or 8 contiguous nucleotides.

Minimum tracrRNA Sequence

[0290] A minimum tracrRNA sequence can be a sequence with at least about 30%, about 40%, about 50%, about 60%, about 65%, about 70%, about 75%, about 80%, about 85%, about 90%, about 95%, or 100% sequence identity to a reference tracrRNA sequence (e.g., wild type tracrRNA from S. pyogenes).

[0291] A minimum tracrRNA sequence can comprise nucleotides that hybridize to a minimum CRISPR repeat sequence in a cell. A minimum tracrRNA sequence and a minimum CRISPR repeat sequence form a duplex, i.e. a base-paired double-stranded structure. Together, the minimum tracrRNA sequence and the minimum CRISPR repeat can bind to a site-directed polypeptide. At least a part of the minimum tracrRNA sequence can hybridize to the minimum CRISPR repeat sequence. The minimum tracrANA sequence can be at least about 30%, about 40%, about 50%, about 60%, about 65%, about 70%, about 75%, about 80%, about 85%, about 90%, about 95%, or 100% complementary to the minimum CRISPR repeat sequence.

[0292] The minimum tracrRNA sequence can have a length from about 7 nucleotides to about 100 nucleotides. For example, the minimum tracrANA sequence can be from about 7 nucleotides (nt) to about 50 nt, from about 7 nt to about 40 nt, from about 7 nt to about 30 nt, from about 7 nt to about 25 nt, from about 7 nt to about 20 nt, from about 7 nt to about 15 nt, from about 8 nt to about 40 nt, from about 8 nt to about 30 nt, from about 8 nt to about 25 nt, from about 8 nt to about 20 nt, from about 8 nt to about 15 nt, from about 15 nt to about 100 nt, from about 15 nt to about 80 nt, from about 15 nt to about 50 nt, from about 15 nt to about 40 nt, from about 15 nt to about 30 nt or from about 15 nt to about 25 nt long. The minimum tracrRNA sequence can be approximately 9 nucleotides in length. The minimum tracrRNA sequence can be approximately 12 nucleotides. The minimum tracrRNA can consist of tracrRNA nt 23-48 described in Jinek et al., supra.

[0293] The minimum tracrRNA sequence can be at least about 60% identical to a reference minimum tracrRNA (e.g., wild type, tracrRNA from S. pyogenes) sequence over a stretch of at least 6, 7, or 8 contiguous nucleotides. For example, the minimum tracrRNA sequence can be at least about 65% identical, about 70% identical, about 75% identical, about 80% identical, about 85% identical, about 90% identical, about 95% identical, about 98% identical, about 99% identical or 100% identical to a reference minimum tracrRNA sequence over a stretch of at least 6, 7, or 8 contiguous nucleotides.

[0294] The duplex between the minimum CRISPR RNA and the minimum tracrRNA can comprise a double helix. The duplex between the minimum CRISPR RNA and the minimum tracrRNA can comprise at least about 1, 2, 3, 4, 5, 6, 7, 8, 9, or 10 or more nucleotides. The duplex between the minimum CRISPR RNA and the minimum tracrRNA can comprise at most about 1, 2, 3, 4, 5, 6, 7, 8, 9, or 10 or more nucleotides.

[0295] The duplex can comprise a mismatch (i.e., the two strands of the duplex are not 100% complementary). The duplex can comprise at least about 1, 2, 3, 4, or 5 or mismatches. The duplex can comprise at most about 1, 2, 3, 4, or 5 or mismatches. The duplex can comprise no more than 2 mismatches.

### Bulges

[0296] In some cases, there can be a “bulge” in the duplex between the minimum CRISPR RNA and the minimum tracrRNA. A bulge is an unpaired region of nucleotides within the duplex. A bulge can contribute to the binding of the duplex to the site-directed polypeptide. The bulge can comprise, on one side of the duplex, an unpaired 5-XXXY-3′ where X is any purine and Y comprises a nucleotide that can form a wobble pair with a nucleotide on the opposite strand, and an unpaired nucleotide region on the other side of the duplex. The number of unpaired nucleotides on the two sides of the duplex can be different.

[0297] In one example, the bulge can comprise an unpaired purine (e.g., adenine) on the minimum CRISPR repeat strand of the bulge. In some examples, the bulge can comprise an unpaired 5′-AAGY-3′ of the minimum tracrRNA sequence strand of the bulge, where Y comprises a nucleotide that can form a wobble pairing with a nucleotide on the minimum CRISPR repeat strand.

[0298] A bulge on the minimum CRISPR repeat side of the duplex can comprise at least 1, 2, 3, 4, or 5 or more unpaired nucleotides. A bulge on the minimum CRISPR repeat side of the duplex can comprise at most 1, 2, 3, 4, or 5 or more unpaired nucleotides. A bulge on the minimum CRISPR repeat side of the duplex can comprise 1 unpaired nucleotide.

[0299] A bulge on the minimum tracrRNA sequence side of the duplex can comprise at least 1, 2, 3, 4, 5, 6, 7, 8, 9, or 10 or more unpaired nucleotides. A bulge on the minimum tracrRNA sequence side of the duplex can comprise at most 1, 2, 3, 4, 5, 6, 7, 8, 9, or 10 or more unpaired nucleotides. A bulge on a second side of the duplex (e.g., the minimum tracrRNA sequence side of the duplex) can comprise 4 unpaired nucleotides.

[0300] A bulge can comprise at least one wobble pairing. In some examples, a bulge can comprise at most one wobble pairing. A bulge can comprise at least one purine nucleotide. A bulge can comprise at least 3 purine nucleotides. A bulge sequence can comprises at least 5 purine nucleotides. A bulge sequence can comprise at least one guanine nucleotide. In some examples, a bulge sequence can comprise at least one adenine nucleotide.

### Hairpins

[0301] In various examples, one or more hairpins can be located 3′ to the minimum tracrRNA in the 3′ tracrRNA sequence.

[0302] The hairpin can start at least about 1, 2, 3, 4, 5, 6, 7, 8, 9, 10, 15, or 20 or more nucleotides 3′ from the last paired nucleotide in the minimum CRISPR repeat and minimum tracrRNA sequence duplex. The hairpin can start at most about 1, 2, 3, 4, 5, 6, 7, 8, 9 or 10 or more nucleotides 3′ of the last paired nucleotide in the minimum CRISPR repeat and minimum tracrRNA sequence duplex.

[0303] The hairpin can comprise at least about 1, 2, 3, 4, 5, 6, 7, 8, 9, 10, 15, or 20 or more consecutive nucleotides. The hairpin can comprise at most about 1, 2, 3, 4, 5, 6, 7, 8, 9, 10, 15, or more consecutive nucleotides.

[0304] The hairpin can comprise a CC dinucleotide (i.e., two consecutive cytosine nucleotides).

[0305] The hairpin can comprise duplexed nucleotides (e.g., nucleotides in a hairpin, hybridized together). For example, a hairpin can comprise a CC dinucleotide that is hybridized to a GG dinucleotide in a hairpin duplex of the 3′ tracrRNA sequence.

[0306] One or more of the hairpins can interact with guide RNA-interacting regions of a site-directed polypeptide.

[0307] In some examples, there are two or more hairpins, and in other examples there are three or more hairpins.

3′ tracrRNA Sequence

[0308] A 3′ tracrRNA sequence can comprise a sequence with at least about 30%, about 40%, about 50%, about 60%, about 65%, about 70%, about 75%, about 80%, about 85%, about 90%, about 95%, or 100% sequence identity to a reference tracrRNA sequence (e.g., a tracrRNA from S. pyogenes).

[0309] The 3′ tracrRNA sequence can have a length from about 6 nucleotides to about 100 nucleotides. For example, the 3′ tracrRNA sequence can have a length from about 6 nucleotides (nt) to about 50 nt, from about 6 nt to about 40 nt, from about 6 nt to about 30 nt, from about 6 nt to about 25 nt, from about 6 nt to about 20 nt, from about 6 nt to about 15 nt, from about 8 nt to about 40 nt, from about 8 nt to about 30 nt, from about 8 nt to about 25 nt, from about 8 nt to about 20 nt, from about 8 nt to about 15 nt, from about 15 nt to about 100 nt, from about 15 nt to about 80 nt, from about 15 nt to about 50 nt, from about 15 nt to about 40 nt, from about 15 nt to about 30 nt, or from about 15 nt to about 25 nt. The 3′ tracrRNA sequence can have a length of approximately 14 nucleotides.

[0310] The 3′ tracrRNA sequence can be at least about 60% identical to a reference 3′ tracrRNA sequence (e.g., wild type 3′ tracrRNA sequence from S. pyogenes) over a stretch of at least 6, 7, or 8 contiguous nucleotides. For example, the 3′ tracrRNA sequence can be at least about 60% identical, about 65% identical, about 70% identical, about 75% identical, about 80% identical, about 85% identical, about 90% identical, about 95% identical, about 98% identical, about 99% identical, or 100% identical, to a reference 3′ tracrRNA sequence (e.g., wild type 3′ tracrRNA sequence from S. pyogenes) over a stretch of at least 6, 7, or 8 contiguous nucleotides.

[0311] The 3′ tracrRNA sequence can comprise more than one duplexed region (e.g., hairpin, hybridized region). The 3′ tracrRNA sequence can comprise two duplexed regions.

[0312] The 3′ tracrRNA sequence can comprise a stem loop structure. The stem loop structure in the 3′ tracrRNA can comprise at least 1, 2, 3, 4, 5, 6, 7, 8, 9, 10, 15 or 20 or more nucleotides. The stem loop structure in the 3′ tracrRNA can comprise at most 1, 2, 3, 4, 5, 6, 7, 8, 9 or 10 or more nucleotides. The stem loop structure can comprise a functional moiety. For example, the stem loop structure can comprise an aptamer, a ribozyme, a protein-interacting hairpin, a CRISPR array, an intron, or an exon. The stem loop structure can comprise at least about 1, 2, 3, 4, or 5 or more functional moieties. The stem loop structure can comprise at most about 1, 2, 3, 4, or 5 or more functional moieties.

[0313] The hairpin in the 3′ tracrRNA sequence can comprise a P-domain. In some examples, the P-domain can comprise a double-stranded region in the hairpin.

tracrRNA Extension Sequence

[0314] A tracrRNA extension sequence may be provided whether the tracrRNA is in the context of single-molecule guides or double-molecule guides. The tracrRNA extension sequence can have a length from about 1 nucleotide to about 400 nucleotides. The tracrRNA extension sequence can have a length of more than 1, 5, 10, 15, 20, 25, 30, 35, 40, 45, 50, 60, 70, 80, 90, 100, 120, 140, 160, 180, 200, 220, 240, 260, 280, 300, 320, 340, 360, 380, or 400 nucleotides. The tracrRNA extension sequence can have a length from about 20 to about 5000 or more nucleotides. The tracrRNA extension sequence can have a length of more than 1000 nucleotides. The tracrRNA extension sequence can have a length of less than 1, 5, 10, 15, 20, 25, 30, 35, 40, 45, 50, 60, 70, 80, 90, 100, 120, 140, 160, 180, 200, 220, 240, 260, 280, 300, 320, 340, 360, 380, 400 or more nucleotides. The tracrRNA extension sequence can have a length of less than 1000 nucleotides. The tracrRNA extension sequence can comprise less than 10 nucleotides in length. The tracrRNA extension sequence can be 10-30 nucleotides in length. The tracrRNA extension sequence can be 30-70 nucleotides in length.

[0315] The tracrRNA extension sequence can comprise a functional moiety (e.g., a stability control sequence, ribozyme, endoribonuclease binding sequence). The functional moiety can comprise a transcriptional terminator segment (i.e., a transcription termination sequence). The functional moiety can have a total length from about 10 nucleotides (nt) to about 100 nucleotides, from about 10 nt to about 20 nt, from about 20 nt to about 30 nt, from about 30 nt to about 40 nt, from about 40 nt to about 50 nt, from about 50 nt to about 60 nt, from about 60 nt to about 70 nt, from about 70 nt to about 80 nt, from about 80 nt to about 90 nt, or from about 90 nt to about 100 nt, from about 15 nt to about 80 nt, from about 15 nt to about 50 nt, from about 15 nt to about 40 nt, from about 15 nt to about 30 nt, or from about 15 nt to about 25 nt. The functional moiety can function in a eukaryotic cell. The functional moiety can function in a prokaryotic cell. The functional moiety can function in both eukaryotic and prokaryotic cells.

[0316] Non-limiting examples of suitable tracrRNA extension functional moieties include a 3′ poly-adenylated tail, a riboswitch sequence (e.g., to allow for regulated stability and/or regulated accessibility by proteins and protein complexes), a sequence that forms a dsRNA duplex (i.e., a hairpin), a sequence that targets the RNA to a subcellular location (e.g., nucleus, mitochondria, chloroplasts, and the like), a modification or sequence that provides for tracking (e.g., direct conjugation to a fluorescent molecule, conjugation to a moiety that facilitates fluorescent detection, a sequence that allows for fluorescent detection, etc.), and/or a modification or sequence that provides a binding site for proteins (e.g., proteins that act on DNA, including transcriptional activators, transcriptional controls, DNA methyltransferases, DNA demethylases, histone acetyltransferases, histone deacetylases, and the like). The tracrRNA extension sequence can comprise a primer binding site or a molecular index (e.g., barcode sequence). The tracrRNA extension sequence can comprise one or more affinity tags.

### Single-Molecule Guide Linker Sequence

[0317] The linker sequence of a single-molecule guide nucleic acid can have a length from about 3 nucleotides to about 100 nucleotides. In Jinek et al., supra, for example, a simple 4 nucleotide “tetraloop” (-GAAA-) was used, Science, 337(6096):816-821 (2012). An illustrative linker has a length from about 3 nucleotides (nt) to about 90 nt, from about 3 nt to about 80 nt, from about 3 nt to about 70 nt, from about 3 nt to about 60 nt, from about 3 nt to about 50 nt, from about 3 nt to about 40 nt, from about 3 nt to about 30 nt, from about 3 nt to about 20 nt, from about 3 nt to about 10 nt. For example, the linker can have a length from about 3 nt to about 5 nt, from about 5 nt to about 10 nt, from about 10 nt to about 15 nt, from about 15 nt to about 20 nt, from about 20 nt to about 25 nt, from about 25 nt to about 30 nt, from about 30 nt to about 35 nt, from about 35 nt to about 40 nt, from about 40 nt to about 50 nt, from about 50 nt to about 60 nt, from about 60 nt to about 70 nt, from about 70 nt to about 80 nt, from about 80 nt to about 90 nt, or from about 90 nt to about 100 nt. The linker of a single-molecule guide nucleic acid can be between 4 and 40 nucleotides. The linker can be at least about 100, 500, 1000, 1500, 2000, 2500, 3000, 3500, 4000, 4500, 5000, 5500, 6000, 6500, or 7000 or more nucleotides. The linker can be at most about 100, 500, 1000, 1500, 2000, 2500, 3000, 3500, 4000, 4500, 5000, 5500, 6000, 6500, or 7000 or more nucleotides.

[0318] Linkers can comprise any of a variety of sequences, although in some examples the linker will not comprise sequences that have extensive regions of homology with other portions of the guide RNA, which might cause intramolecular binding that could interfere with other functional regions of the guide. In Jinek et al., supra, a simple 4 nucleotide sequence -GAAA- was used, Science, 337(6096):816-821 (2012), but numerous other sequences, including longer sequences can likewise be used.

[0319] The linker sequence can comprise a functional moiety. For example, the linker sequence can comprise one or more features, including an aptamer, a ribozyme, a protein-interacting hairpin, a protein binding site, a CRISPR array, an intron, or an exon. The linker sequence can comprise at least about 1, 2, 3, 4, or 5 or more functional moieties. In some examples, the linker sequence can comprise at most about 1, 2, 3, 4, or 5 or more functional moieties.

[0320] Å step of the ex vivo methods of the present disclosure can comprise editing the patient specific IPSC cells using genome engineering. Alternatively, a step of the ex vivo methods of the present disclosure can comprise editing mesenchymal stem cell, or hematopoietic progenitor cell. Likewise, a step of the in vivo methods of the present disclosure can comprise editing the cells in a patient having hemoglobinopathy using genome engineering. Similarly, a step in the cellular methods of the present disclosure can comprise editing within or near a BCL11A gene or other DNA sequence that encodes a regulatory element of the BCL11A gene in a human cell by genome engineering.

[0321] Different patients with hemoglobinopathy will generally require different deletion, modulation, or inactivation strategies. Any CRISPR endonuclease may be used in the methods of the present disclosure, each CRISPR endonuclease having its own associated PAM, which may or may not be disease specific. For example, gRNA spacer sequences for targeting within or near a BCL11A gene or other DNA sequence that encodes a regulatory element of the BCL11A gene with a CRISPR/Cas9 endonuclease from S. pyogenes have been identified in SEQ ID NOs: 1-29,482 of the Sequence Listing. gRNA spacer sequences for targeting within or near a BCL11A gene or other DNA sequence that encodes a regulatory element of the BCL11A gene with a CRISPR/Cas9 endonuclease from S. aureus have been identified in SEQ ID NOs: 29,483-32,387 of the Sequence Listing. gRNA spacer sequences for targeting within or near a BCL11A gene or other DNA sequence that encodes a regulatory element of the BCL11A gene with a CRISPR/Cas9 endonuclease from S. thermophilus have been identified in SEQ ID NOs. 32,388-33,420 of the Sequence Listing. gRNA spacer sequences for targeting within or near a BCL11A gene or other DNA sequence that encodes a regulatory element of the BCL11A gene with a CRISPR/Cas9 endonuclease from T. denticola have been identified in SEQ ID NOs. 33,421-33,851 of the Sequence Listing. gRNA spacer sequences for targeting within or near a BCL11A gene or other DNA sequence that encodes a regulatory element of the BCL11A gene with a CRISPR/Cas9 endonuclease from N. meningitides have been identified in SEQ ID NOs. 33,852-36,731. gRNA spacer sequences for targeting within or near a BCL11A gene or other DNA sequence that encodes a regulatory element of the BCL11A gene with a CRISPR/Cpf1 endonuclease from Acidominococcus, Lachnospiraceae, and Franciscella Novicida have been identified in SEQ ID NOs. 36,732-71,947.

[0322] For example, the transcriptional control sequence of the BCL11A gene can be modulated or inactivated by deletions that arise due to the NHEJ pathway. NHEJ can be used to delete segments of the transcriptional control sequence of the BCL11A gene, either directly or by altering splice donor or acceptor sites through cleavage by one gRNA targeting several locations, or several gRNAs.

[0323] The transcriptional control sequence of the BCL11A gene can also be modulated or inactivated by inserting a wild-type BCL11A gene or cDNA comprising a modified transcriptional control sequence. For example, the donor for modulating or activating by HDR contains the modified transcriptional control sequence of the BCL11A gene with small or large flanking homology arms to allow for annealing. HDR is essentially an error-free mechanism that uses a supplied homologous DNA sequence as a template during DSB repair. The rate of homology directed repair (HDR) is a function of the distance between the transcriptional control sequence and the cut site so choosing overlapping or nearest target sites is important. Templates can include extra sequences flanked by the homologous regions or can contain a sequence that differs from the genomic sequence, thus allowing sequence editing.

[0324] In addition to modulating or inactivating the transcriptional control sequence of the BCL11A gene by NHEJ or HDR, a range of other options are possible. If there are small or large deletions, a cDNA can be knocked in that contains a modified transcriptional control sequence. A full length cDNA can be knocked into any “safe harbor”, but must use a supplied or other promoter. If this construct is knocked into the correct location, it will have physiological control, similar to the normal gene. Pairs of nucleases can be used to delete gene regions, though a donor would usually have to be provided to modulate or inactivate the function. In this case two gRNA would be supplied and one donor sequence.

[0325] Some genome engineering strategies involve modulating or inactivating a transcriptional control sequence of the BCL11A gene by deleting at least a portion of the transcriptional control sequence of the BCL11A gene and/or knocking-in a wild-type BCL11A gene or cDNA comprising a modified transcriptional control sequence into the locus of the corresponding gene or a safe harbour locus by homology directed repair (HDR), which is also known as homologous recombination (HR). This strategy can modulate or inactivate the transcriptional control sequence of the BCL11A gene and reverse, treat, and/or mitigate the diseased state. Donor nucleotides for modulating/inactivating transcriptional control sequences often are small (<300 bp). This is advantageous, as HDR efficiencies may be inversely related to the size of the donor molecule. Also, it is expected that the donor templates can fit into size constrained adeno-associated virus (AAV) molecules, which have been shown to be an effective means of donor template delivery.

[0326] Homology direct repair is a cellular mechanism for repairing double-stranded breaks (DSBs). The most common form is homologous recombination. There are additional pathways for HDR, including single-strand annealing and alternative-HDR. Genome engineering tools allow researchers to manipulate the cellular homologous recombination pathways to create site-specific modifications to the genome. It has been found that cells can repair a double-stranded break using a synthetic donor molecule provided in trans. Therefore, by introducing a double-stranded break near a specific mutation and providing a suitable donor, targeted changes can be made in the genome. Specific cleavage increases the rate of HDR more than 1,000 fold above the rate of 1 in 10⁶ cells receiving a homologous donor alone. The rate of homology directed repair (HDR) at a particular nucleotide is a function of the distance to the cut site, so choosing overlapping or nearest target sites is important. Gene editing offers the advantage over gene addition, as correcting in situ leaves the rest of the genome unperturbed.

[0327] Supplied donors for editing by HDR vary markedly but can contain the intended sequence with small or large flanking homology arms to allow annealing to the genomic DNA. The homology regions flanking the introduced genetic changes can be 30 bp or smaller, or as large as a multi-kilobase cassette that can contain promoters, CDNAs, etc. Both single-stranded and double-stranded oligonucleotide donors have been used. These oligonucleotides range in size from less than 100 nt to over many kb, though longer ssDNA can also be generated and used. Double-stranded donors can be used, including PCR amplicons, plasmids, and mini-circles. In general, it has been found that an AAV vector can be a very effective means of delivery of a donor template, though the packaging limits for individual donors is <5 kb. Active transcription of the donor increased HDR three-fold, indicating the inclusion of promoter may increase conversion. Conversely, CpG methylation of the donor decreased gene expression and HDR.

[0328] In addition to wildtype endonucleases, such as Cas9, nickase variants exist that have one or the other nuclease domain inactivated resulting in cutting of only one DNA strand. HDR can be directed from individual Cas nickases or using pairs of nickases that flank the target area. Donors can be single-stranded, nicked, or dsDNA.

[0329] The donor DNA can be supplied with the nuclease or independently by a variety of different methods, for example by transfection, nano-particle, micro-injection, or viral transduction. A range of tethering options have been proposed to increase the availability of the donors for HDR. Examples include attaching the donor to the nuclease, attaching to DNA binding proteins that bind nearby, or attaching to proteins that are involved in DNA end binding or repair.

[0330] The repair pathway choice can be guided by a number of culture conditions, such as those that influence cell cycling, or by targeting of DNA repair and associated proteins. For example, to increase HDR, key NHEJ molecules can be suppressed, such as KU70, KU80 or DNA ligase IV.

[0331] Without a donor present, the ends from a DNA break or ends from different breaks can be joined using the several nonhomologous repair pathways in which the DNA ends are joined with little or no base-pairing at the junction. In addition to canonical NHEJ, there are similar repair mechanisms, such as alt-NHEJ. If there are two breaks, the intervening segment can be deleted or inverted. NHEJ repair pathways can lead to insertions, deletions or mutations at the joints.

[0332] NHEJ was used to insert a 15-kb inducible gene expression cassette into a defined locus in human cell lines after nuclease cleavage. Maresca, M., Lin, V. G., Guo, N. & Yang, Y., Genome Res 23, 539-546 (2013).

[0333] In addition to genome editing by NHEJ or HDR, site-specific gene insertions have been conducted that use both the NHEJ pathway and HR. A combination approach may be applicable in certain settings, possibly including intron/exon borders. NHEJ may prove effective for ligation in the intron, while the error-free HDR may be better suited in the coding region.

[0334] As a further alternative, wild-type BCL11A gene or cDNA comprising a modified transcriptional control sequence can be knocked-in to the locus of the corresponding gene or knocked-in to a safe harbor site, such as AAVS1. In some examples, the methods can provide one gRNA or a pair of gRNAs that can be used to facilitate incorporation of a new sequence from a polynucleotide donor template to knock-in a part of or the entire wild-type BCL11A gene or cDNA comprising a modified transcriptional control sequence.

[0335] The methods can provide gRNA pairs that make a deletion by cutting the gene twice, one gRNA cutting at the 5′ end of one or more mutations and the other gRNA cutting at the 3′ end of one or more mutations that facilitates insertion of a new sequence from a polynucleotide donor template to replace the transcriptional control sequence of the BCL11A gene. The cutting can be accomplished by a pair of DNA endonucleases that each makes a DSB in the genome, or by multiple nickases that together make a DSB in the genome.

[0336] Alternatively, the methods can provide one gRNA to make one double-strand cut around a transcriptional control sequence of the BCL11A gene that facilitates insertion of a new sequence from a polynucleotide donor template to replace the transcriptional control sequence of the BCL11A gene with a wild-type BCL11A gene or cDNA comprising a modified transcriptional control sequence. The double-strand cut can be made by a single DNA endonuclease or multiple nickases that together make a DSB in the genome.

[0337] Illustrative modifications within or near the BCL11A gene or other DNA sequence that encodes a regulatory element of the BCL11A gene include replacements within or near (proximal) the transcriptional control sequence of the BCL11A gene referred to above, such as within the region of less than 3 kb, less than 2 kb, less than 1 kb, less than 0.5 kb upstream or downstream of the transcriptional control sequence.

[0338] Such variants can include replacements that are larger in the 5′ and/or 3′ direction than the specific replacement in question, or smaller in either direction. Accordingly, by “near” or “proximal” with respect to specific replacements, it is intended that the SSB or DSB locus associated with a desired replacement boundary (also referred to herein as an endpoint) can be within a region that is less than about 3 kb from the reference locus noted. The SSB or DSB locus can be more proximal and within 2 kb, within 1 kb, within 0.5 kb, or within 0.1 kb. In the case of small replacement, the desired endpoint can be at or “adjacent to” the reference locus, by which it is intended that the endpoint can be within 100 bp, within 50 bp, within 25 bp, or less than about 10 bp to 5 bp from the reference locus.

[0339] Examples comprising larger or smaller replacements can be expected to provide the same benefit, as long as the transcriptional control activity is modulated or inactivated. It is thus expected that many variations of the replacements described and illustrated herein can be effective for ameliorating hemoglobinopathies.

[0340] Another genome engineering strategy involves exon or intron deletion. Targeted deletion of specific exons or introns can be an attractive strategy for treating a large subset of patients with a single therapeutic cocktail. Deletions can either be single exon or intron deletions or multi-exon or intron deletions. While multi-exon deletions can reach a larger number of patients, for larger deletions the efficiency of deletion greatly decreases with increased size. Therefore, deletions range can be from 40 to 10,000 base pairs (bp) in size. For example, deletions can range from 40-100; 100-300; 300-500; 500-1,000; 1,000-2,000; 2,000-3,000; 3,000-5,000; or 5,000-10,000 base pairs in size. It may be desirable to delete an intron if the intron contains a regulatory element, such as a transcriptional control element (e.g., a transcription factor binding site).

[0341] In order to ensure that the pre-mRNA is properly processed following deletion, the surrounding splicing signals can be deleted. Splicing donor and acceptors are generally within 100 base pairs of the neighboring intron. Therefore, in some examples, methods can provide all gRNAs that cut approximately +/−100-3100 bp with respect to each exon/intron junction of interest.

[0342] For any of the genome editing strategies, gene editing can be confirmed by sequencing or PCR analysis.

### Target Sequence Selection

[0343] Shifts in the location of the 5′ boundary and/or the 3′ boundary relative to particular reference loci can be used to facilitate or enhance particular applications of gene editing, which depend in part on the endonuclease system selected for the editing, as further described and illustrated herein.

[0344] In a first nonlimiting example of such target sequence selection, many endonuclease systems have rules or criteria that can guide the initial selection of potential target sites for cleavage, such as the requirement of a PAM sequence motif in a particular position adjacent to the DNA cleavage sites in the case of CRISPR Type II or Type V endonucleases.

[0345] In another nonlimiting example of target sequence selection or optimization, the frequency of off-target activity for a particular combination of target sequence and gene editing endonuclease (i.e. the frequency of DSBs occurring at sites other than the selected target sequence) can be assessed relative to the frequency of on-target activity. In some cases, cells that have been correctly edited at the desired locus can have a selective advantage relative to other cells. Illustrative, but nonlimiting, examples of a selective advantage include the acquisition of attributes such as enhanced rates of replication, persistence, resistance to certain conditions, enhanced rates of successful engraftment or persistence in vivo following introduction into a patient, and other attributes associated with the maintenance or increased numbers or viability of such cells. In other cases, cells that have been correctly edited at the desired locus can be positively selected for by one or more screening methods used to identify, sort or otherwise select for cells that have been correctly edited. Both selective advantage and directed selection methods can take advantage of the phenotype associated with the correction. In some cases, cells can be edited two or more times in order to create a second modification that creates a new phenotype that is used to select or purify the intended population of cells. Such a second modification could be created by adding a second gRNA for a selectable or screenable marker. In some cases, cells can be correctly edited at the desired locus using a DNA fragment that contains the cDNA and also a selectable marker.

[0346] Whether any selective advantage is applicable or any directed selection is to be applied in a particular case, target sequence selection can also be guided by consideration of off-target frequencies in order to enhance the effectiveness of the application and/or reduce the potential for undesired alterations at sites other than the desired target. As described further and illustrated herein and in the art, the occurrence of off-target activity can be influenced by a number of factors including similarities and dissimilarities between the target site and various off-target sites, as well as the particular endonuclease used. Bioinformatics tools are available that assist in the prediction of off-target activity, and frequently such tools can also be used to identify the most likely sites of off-target activity, which can then be assessed in experimental settings to evaluate relative frequencies of off-target to on-target activity, thereby allowing the selection of sequences that have higher relative on-target activities. Illustrative examples of such techniques are provided herein, and others are known in the art.

[0347] Another aspect of target sequence selection relates to homologous recombination events. Sequences sharing regions of homology can serve as focal points for homologous recombination events that result in deletion of intervening sequences. Such recombination events occur during the normal course of replication of chromosomes and other DNA sequences, and also at other times when DNA sequences are being synthesized, such as in the case of repairs of double-strand breaks (DSBs), which occur on a regular basis during the normal cell replication cycle but can also be enhanced by the occurrence of various events (such as UV light and other inducers of DNA breakage) or the presence of certain agents (such as various chemical inducers). Many such inducers cause DSBs to occur indiscriminately in the genome, and DSBs can be regularly induced and repaired in normal cells. During repair, the original sequence can be reconstructed with complete fidelity, however, in some cases, small insertions or deletions (referred to as “indels”) are introduced at the DSB site.

[0348] DSBs can also be specifically induced at particular locations, as in the case of the endonucleases systems described herein, which can be used to cause directed or preferential gene modification events at selected chromosomal locations. The tendency for homologous sequences to be subject to recombination in the context of DNA repair (as well as replication) can be taken advantage of in a number of circumstances, and is the basis for one application of gene editing systems, such as CRISPR, in which homology directed repair is used to insert a sequence of interest, provided through use of a “donor” polynucleotide, into a desired chromosomal location.

[0349] Regions of homology between particular sequences, which can be small regions of “microhomology” that can comprise as few as ten basepairs or less, can also be used to bring about desired deletions. For example, a single DSB can be introduced at a site that exhibits microhomology with a nearby sequence. During the normal course of repair of such DSB, a result that occurs with high frequency is the deletion of the intervening sequence as a result of recombination being facilitated by the DSB and concomitant cellular repair process.

[0350] In some circumstances, however, selecting target sequences within regions of homology can also give rise to much larger deletions, including gene fusions (when the deletions are in coding regions), which may or may not be desired given the particular circumstances.

[0351] The examples provided herein further illustrate the selection of various target regions for the creation of DSBs designed to induce replacements that result in the modulation or inactivation of transcriptional control protein activity, as well as the selection of specific target sequences within such regions that are designed to minimize off-target events relative to on-target events.

### Nucleic Acid Modifications

[0352] In some cases, polynucleotides introduced into cells can comprise one or more modifications that can be used individually or in combination, for example, to enhance activity, stability or specificity, alter delivery, reduce innate immune responses in host cells, or for other enhancements, as further described herein and known in the art.

[0353] In certain examples, modified polynucleotides can be used in the CRISPR/Cas9/Cpf1 system, in which case the guide RNAs (either single-molecule guides or double-molecule guides) and/or a DNA or an RNA encoding a Cas or Cpf1 endonuclease introduced into a cell can be modified, as described and illustrated below. Such modified polynucleotides can be used in the CRISPR/Cas9/Cpf1 system to edit any one or more genomic loci.

[0354] Using the CRISPR/Cas9/Cpf1 system for purposes of nonlimiting illustrations of such uses, modifications of guide RNAs can be used to enhance the formation or stability of the CRISPR/Cas9/Cpf1 genome editing complex comprising guide RNAs, which can be single-molecule guides or double-molecule, and a Cas or Cpf1 endonuclease. Modifications of guide RNAs can also or alternatively be used to enhance the initiation, stability or kinetics of interactions between the genome editing complex with the target sequence in the genome, which can be used, for example, to enhance on-target activity. Modifications of guide RNAs can also or alternatively be used to enhance specificity. e.g., the relative rates of genome editing at the on-target site as compared to effects at other (off-target) sites.

[0355] Modifications can also or alternatively be used to increase the stability of a guide RNA, e.g., by increasing its resistance to degradation by ribonucleases (RNases) present in a cell, thereby causing its half-life in the cell to be increased. Modifications enhancing guide RNA half-life can be particularly useful in aspects in which a Cas or Cpf1 endonuclease is introduced into the cell to be edited via an RNA that needs to be translated in order to generate endonuclease, because increasing the half-life of guide RNAs introduced at the same time as the RNA encoding the endonuclease can be used to increase the time that the guide RNAs and the encoded Cas or Cpf1 endonuclease co-exist in the cell.

[0356] Modifications can also or alternatively be used to decrease the likelihood or degree to which RNAs introduced into cells elicit innate immune responses. Such responses, which have been well characterized in the context of RNA interference (RNAI), including small-interfering RNAs (siRNAs), as described below and in the art, tend to be associated with reduced half-life of the RNA and/or the elicitation of cytokines or other factors associated with immune responses.

[0357] One or more types of modifications can also be made to RNAs encoding an endonuclease that are introduced into a cell, including, without limitation, modifications that enhance the stability of the RNA (such as by increasing its degradation by RNAses present in the cell), modifications that enhance translation of the resulting product (i.e. the endonuclease), and/or modifications that decrease the likelihood or degree to which the RNAs introduced into cells elicit innate immune responses.

[0358] Combinations of modifications, such as the foregoing and others, can likewise be used. In the case of CRISPR/Cas9/Cpf1, for example, one or more types of modifications can be made to guide RNAs (including those exemplified above), and/or one or more types of modifications can be made to RNAs encoding Cas endonuclease (including those exemplified above).

[0359] By way of illustration, guide RNAs used in the CRISPR/Cas9/Cpf1 system, or other smaller RNAs can be readily synthesized by chemical means, enabling a number of modifications to be readily incorporated, as illustrated below and described in the art. While chemical synthetic procedures are continually expanding, purifications of such RNAs by procedures such as high performance liquid chromatography (HPLC, which avoids the use of gels such as PAGE) tends to become more challenging as polynucleotide lengths increase significantly beyond a hundred or so nucleotides. One approach that can be used for generating chemically-modified RNAs of greater length is to produce two or more molecules that are ligated together. Much longer RNAs, such as those encoding a Cas9 endonuclease, are more readily generated enzymatically. While fewer types of modifications are available for use in enzymatically produced RNAs, there are still modifications that can be used to, e.g., enhance stability, reduce the likelihood or degree of innate immune response, and/or enhance other attributes, as described further below and in the art; and new types of modifications are regularly being developed.

[0360] By way of illustration of various types of modifications, especially those used frequently with smaller chemically synthesized RNAs, modifications can comprise one or more nucleotides modified at the 2′ position of the sugar, in some aspects a 2′-O-alkyl, 2′-O-alkyl-O-alkyl, or 2′-fluoro-modified nucleotide. In some examples, RNA modifications can comprise 2′-fluoro, 2′-amino or 2′ O-methyl modifications on the ribose of pyrimidines, abasic residues, or an inverted base at the 3′ end of the RNA. Such modifications can be routinely incorporated into oligonucleotides and these oligonucleotides have been shown to have a higher Tm (i.e., higher target binding affinity) than 2′-deoxyoligonucleotides against a given target.

[0361] A number of nucleotide and nucleoside modifications have been shown to make the oligonucleotide into which they are incorporated more resistant to nuclease digestion than the native oligonucleotide; these modified oligos survive intact for a longer time than unmodified oligonucleotides. Specific examples of modified oligonucleotides include those comprising modified backbones, for example, phosphorothioates, phosphotriesters, methyl phosphonates, short chain alkyl or cycloalkyl intersugar linkages or short chain heteroatomic or heterocyclic intersugar linkages. Some oligonucleotides are oligonucleotides with phosphorothioate backbones and those with heteroatom backbones, particularly CH₂—NH—O—CH₂, CH,˜N(CH₃)˜O˜CH₂ (known as a methylene(methylimino) or MMI backbone), CH₂—O—N(CH₃)—CH₂, CH₂—N(CH₃)—N(CH₃)—CH₂ and O—N(CH₃)—CH₂—CH₂ backbones, wherein the native phosphodiester backbone is represented as O—P—O—CH); amide backbones [see De Mesmaeker et al., Ace. Chem. Res., 28:366-374 (1995)]; morpholino backbone structures (see Summerton and Weller, U.S. Pat. No. 5,034,506); peptide nucleic acid (PNA) backbone (wherein the phosphodiester backbone of the oligonucleotide is replaced with a polyamide backbone, the nucleotides being bound directly or indirectly to the aza nitrogen atoms of the polyamide backbone, see Nielsen et al., Science 1991, 254, 1497). Phosphorus-containing linkages include, but are not limited to, phosphorothioates, chiral phosphorothioates, phosphorodithioates, phosphotriesters, aminoalkylphosphotriesters, methyl and other alkyl phosphonates comprising 3′alkylene phosphonates and chiral phosphonates, phosphinates, phosphoramidates comprising 3′-amino phosphoramidate and aminoalkylphosphoramidates, thionophosphoramidates, thionoalkylphosphonates, thionoalkylphosphotriesters, and boranophosphates having normal 3′-5′ linkages, 2′-5′ linked analogs of these, and those having inverted polarity wherein the adjacent pairs of nucleoside units are linked 3′-5′ to 5′-3′ or 2′-5′ to 5′2′; see U.S. Pat. Nos. 3,687,808; 4,469,863; 4,476,301; 5,023,243; 5,177,196; 5,188,897; 5,264,423; 5,276,019; 5,278,302; 5,286,717; 5,321, 131; 5,399,676; 5,405,939; 5,453,496; 5,455,233; 5,466,677; 5,476,925; 5,519, 126; 5,536,821; 5,541,306; 5,550,111; 5,563,253; 5,571,799; 5,587,361; and 5,625,050.

[0362] Morpholino-based oligomeric compounds are described in Braasch and David Corey, Biochemistry, 41(14): 4503-4510 (2002); Genesis, Volume 30, Issue 3, (2001); Heasman, Dev. Biol., 243: 209-214 (2002); Nasevicius et al., Nat. Genet., 26:216-220 (2000); Lacerra et al., Proc. Natl. Acad. Sci., 97: 9591-9596 (2000); and U.S. Pat. No. 5,034,506, issued Jul. 23, 1991.

[0363] Cyclohexenyl nucleic acid oligonucleotide mimetics are described in Wang et al., J. Am. Chem. Soc., 122: 8595-8602 (2000).

[0364] Modified oligonucleotide backbones that do not include a phosphorus atom therein have backbones that are formed by short chain alkyl or cycloalkyl internucleoside linkages, mixed heteroatom and alkyl or cycloalkyl internucleoside linkages, or one or more short chain heteroatomic or heterocyclic internucleoside linkages. These comprise those having morpholino linkages (formed in part from the sugar portion of a nucleoside); siloxane backbones; sulfide, sulfoxide and sulfone backbones; formacetyl and thioformacetyl backbones; methylene formacetyl and thioformacetyl backbones; alkene containing backbones; sulfamate backbones; methyleneimino and methylenehydrazino backbones; sulfonate and sulfonamide backbones; amide backbones; and others having mixed N, O, S, and CH₂ component parts; see U.S. Pat. Nos. 5,034,506; 5,166,315; 5,185,444; 5,214, 134; 5,216,141; 5,235,033; 5,264,562; 5,264,564; 5,405,938; 5,434,257; 5,466,677; 5,470,967; 5,489,677; 5,541,307; 5,561,225; 5,596,086; 5,602,240; 5,610,289; 5,602,240; 5,608,046; 5,610,289; 5,618,704; 5,623,070; 5,663,312; 5,633,360; 5,677,437; and 5,677,439.

[0365] One or more substituted sugar moieties can also be included, e.g., one of the following at the 2′ position: OH, SH, SCH₃, F, OCN, OCH₃ OCH₃, OCH₃ O(CH₂)n CH₃, O(CH₂)n NH₂, or O(CH₂)n CH₃, where n is from 1 to about 10; C1 to C10 lower alkyl, alkoxyalkoxy, substituted lower alkyl, alkaryl or aralkyl; CI; Br; CN; CF₃; OCF₃; O-, S-, or N-alkyl; O-, S-, or N-alkenyl; SOCH₃; SO₂ CH₃; ONO₂; NO₂; N₃; NH₂; heterocycloalkyl; heterocycloalkaryl; aminoalkylamino; polyalkylamino; substituted silyl; an RNA cleaving group; a reporter group; an intercalator; a group for improving the pharmacokinetic properties of an oligonucleotide; or a group for improving the pharmacodynamic properties of an oligonucleotide and other substituents having similar properties. In some aspects, a modification includes 2′-methoxyethoxy (2′-0-CH₂CH₂OCH₃, also known as 2′-O-(2-methoxyethyl) (Martin et al, Helv. Chim. Acta, 1995, 78, 486). Other modifications include 2′-methoxy (2′-0-CH₃), 2′-propoxy (2′-OCH₂ CH₂CH₃) and 2′-fluoro (2′-F). Similar modifications can also be made at other positions on the oligonucleotide, particularly the 3′ position of the sugar on the 3′ terminal nucleotide and the 5′ position of 5′ terminal nucleotide. Oligonucleotides can also have sugar mimetics, such as cyclobutyls in place of the pentofuranosyl group.

[0366] In some examples, both a sugar and an internucleoside linkage, i.e., the backbone, of the nucleotide units can be replaced with novel groups. The base units can be maintained for hybridization with an appropriate nucleic acid target compound. One such oligomeric compound, an oligonucleotide mimetic that has been shown to have excellent hybridization properties, is referred to as a peptide nucleic acid (PNA). In PNA compounds, the sugar-backbone of an oligonucleotide can be replaced with an amide containing backbone, for example, an aminoethylglycine backbone. The nucleobases can be retained and bound directly or indirectly to aza nitrogen atoms of the amide portion of the backbone. Representative United States patents that teach the preparation of PNA compounds comprise, but are not limited to, U.S. Pat. Nos. 5,539,082; 5,714,331; and 5,719,262. Further teaching of PNA compounds can be found in Nielsen et al, Science, 254: 1497-1500 (1991).

[0367] Guide RNAs can also include, additionally or alternatively, nucleobase (often referred to in the art simply as “base”) modifications or substitutions. As used herein, “unmodified” or “natural” nucleobases include adenine (A), guanine (G), thymine (T), cytosine (C), and uracil (U). Modified nucleobases include nucleobases found only infrequently or transiently in natural nucleic acids, e.g., hypoxanthine, 6-methyladenine, 5-Me pyrimidines, particularly 5-methylcytosine (also referred to as 5-methyl-2′ deoxycytosine and often referred to in the art as 5-Me-C), 5-hydroxymethylcytosine (HMC), glycosyl HMC and gentobiosyl HMC, as well as synthetic nucleobases, e.g., 2-aminoadenine, 2-(methylamino)adenine, 2-(imidazolylalkyl)adenine, 2-(aminoalklyamino)adenine or other heterosubstituted alkyladenines, 2·thiouracil, 2-thiothymine, 5-bromouracil, 5-hydroxymethyluracil, 8-azaguanine, 7-deazaguanine, NG (6-aminohexyl)adenine, and 2,6-diaminopurine. Kornberg, A., DNA Replication, W. H. Freeman & Co., San Francisco, pp 75-77 (1980); Gebeyehu et al., Nucl. Acids Res. 15:4513 (1997). A “universal” base known in the art, e.g., inosine, can also be included. 5-Me-C substitutions have been shown to increase nucleic acid duplex stability by 0.6-1.2° C. (Sanghvi, Y. S., in Crooke, S. T. and Lebleu, B., eds., Antisense Research and Applications, CRC Press, Boca Raton, 1993, pp. 276-278) and are aspects of base substitutions.

[0368] Modified nucleobases can comprise other synthetic and natural nucleobases, such as 5-methylcytosine (5-me·C), 5-hydroxymethyl cytosine, xanthine, hypoxanthine, 2-aminoadenine, 6-methyl and other alkyl derivatives of adenine and guanine, 2-propyl and other alkyl derivatives of adenine and guanine, 2-thiouracil, 2-thiothymine and 2-thiocytosine, 5-halouracil and cytosine, 5-propynyl uracil and cytosine, 6-azo uracil, cytosine and thymine, 5-uracil (pseudo-uracil), 4-thiouracil, 8-halo, 8-amino, 8-thiol, 8-thioalkyl, 8-hydroxyl and other 8-substituted adenines and guanines, 5-halo particularly 5-bromo, 5-trifluoromethyl and other 5-substituted uracils and cytosines, 7-methylquanine and 7-methyladenine, 8-azaguanine and 8-azaadenine, 7-deazaguanine and 7-deazaadenine, and 3-deazaguanine and 3-deazaadenine.

[0369] Further, nucleobases can comprise those disclosed in U.S. Pat. No. 3,687,808, those disclosed in ‘The Concise Encyclopedia of Polymer Science And Engineering’, pages 858-859, Kroschwitz, J. L., ed. John Wiley & Sons, 1990, those disclosed by Englisch et al., Angewandle Chemie, International Edition’, 1991, 30, page 613, and those disclosed by Sanghvi, Y. S., Chapter 15, Antisense Research and Applications’, pages 289-302, Crooke, S. T. and Lebleu, B. ea., CRC Press, 1993. Certain of these nucleobases are particularly useful for increasing the binding affinity of the oligomeric compounds of the invention. These include 5-substituted pyrimidines, 6-azapyrimidines and N-2, N-6 and 0-6 substituted purines, comprising 2-aminopropyladenine, 5-propynyluracil and 5-propynylcytosine. 5-methylcytosine substitutions have been shown to increase nucleic acid duplex stability by 0.6-1.2ºC (Sanghvi, Y. S., Crooke, S. T. and Lebleu, B., eds, ‘Antisense Research and Applications’, CRC Press, Boca Raton, 1993, pp. 276-278) and are aspects of base substitutions, even more particularly when combined with 2′-O-methoxyethyl sugar modifications. Modified nucleobases are described in U.S. Pat. No. 3,687,808, as well as U.S. Pat. Nos. 4,845,205; 5,130,302; 5,134,066; 5,175,273; 5,367,066; 5,432,272; 5,457,187; 5,459,255; 5,484,908; 5,502, 177; 5,525,711; 5,552,540; 5,587,469; 5,596,091; 5,614,617; 5,681,941; 5,750,692; 5,763,588; 5,830,653; 6,005,096; and US Patent Application Publication 2003/0158403.

[0370] Thus, the term “modified” refers to a non-natural sugar, phosphate, or base that is incorporated into a guide RNA, an endonuclease, or transcriptional control sequence of BCL11A or both a guide RNA and an endonuclease. It is not necessary for all positions in a given oligonucleotide to be uniformly modified, and in fact more than one of the aforementioned modifications can be incorporated in a single oligonucleotide, or even in a single nucleoside within an oligonucleotide.

[0371] The guide RNAs and/or mRNA (or DNA) encoding an endonuclease can be chemically linked to one or more moieties or conjugates that enhance the activity, cellular distribution, or cellular uptake of the oligonucleotide. Such moieties comprise, but are not limited to, lipid moieties such as a cholesterol moiety [Letsinger et al., Proc. Natl. Acad. Sci. USA, 86: 6553-6556 (1989)]; cholic acid [Manoharan et al., Bioorg. Med. Chem. Let., 4: 1053-1060 (1994)]; a thioether, e.g., hexyl-S-tritylthiol [Manoharan et al, Ann. N. Y. Acad. Sci., 660: 306-309 (1992) and Manoharan et al., Bioorg. Med. Chem. Let., 3: 2765-2770 (1993)]; a thiocholesterol [Oberhauser et al., Nucl. Acids Res., 20: 533-538 (1992)]; an aliphatic chain, e.g., dodecandiol or undecyl residues [Kabanov et al., FEBS Lett., 259: 327-330 (1990) and Svinarchuk et al., Biochimie, 75: 49-54 (1993)]; a phospholipid, e.g., di-hexadecyl-rac-glycerol or triethylammonium 1,2-di-O-hexadecyl- rac-glycero-3-H-phosphonate [Manoharan et al., Tetrahedron Lett., 36: 3651-3654 (1995) and Shea et al., Nucl. Acids Res., 18: 3777-3783 (1990)]; a polyamine or a polyethylene glycol chain [Mancharan et al., Nucleosides & Nucleotides, 14: 969-973 (1995)]; adamantane acetic acid [Manoharan et al., Tetrahedron Lett., 36: 3651-3654 (1995)]; a palmityl moiety [(Mishra et al., Biochim. Biophys. Acta, 1264: 229. 237 (1995)]; or an octadecylamine or hexylamino-carbonyl-t oxycholesterol moiety [Crooke et al., J. Pharmacol. Exp. Ther., 277: 923-937 (1996)]. See also U.S. Pat. Nos. 4,828,979: 4,948,882; 5,218,105; 5,525,465; 5,541,313; 5,545,730; 5,552,538; 5,578,717, 5,580,731; 5,580,731; 5,591,584; 5,109, 124; 5,118,802; 5,138,045; 5,414,077; 5,486,603; 5,512,439; 5,578,718; 5,608,046; 4,587,044; 4,605,735; 4,667,025; 4,762,779; 4,789,737; 4,824,941; 4,835,263; 4,876,335; 4,904,582; 4,958,013; 5,082,830; 5,112,963; 5,214, 136; 5,082,830; 5, 112,963; 5,214,136; 5,245,022; 5,254,469; 5,258,506; 5,262,536; 5,272,250; 5,292,873; 5,317,098; 5,371,241, 5,391,723; 5,416,203, 5,451,463; 5,510,475; 5,512,667; 5,514,785; 5,565,552; 5,567,810; 5,574, 142; 5,585,481; 5,587,371; 5,595,726; 5,597,696; 5,599,923; 5,599, 928 and 5,688,941.

[0372] Sugars and other moieties can be used to target proteins and complexes comprising nucleotides, such as cationic polysomes and liposomes, to particular sites. For example, hepatic cell directed transfer can be mediated via asialoglycoprotein receptors (ASGPRs); see, e.g., Hu, et al., Protein Pept Lett. 21(10):1025-30 (2014). Other systems known in the art and regularly developed can be used to target biomolecules of use in the present case and/or complexes thereof to particular target cells of interest.

[0373] These targeting moieties or conjugates can include conjugate groups covalently bound to functional groups, such as primary or secondary hydroxyl groups. Conjugate groups of the invention include intercalators, reporter molecules, polyamines, polyamides, polyethylene glycols, polyethers, groups that enhance the pharmacodynamic properties of oligomers, and groups that enhance the pharmacokinetic properties of oligomers. Typical conjugate groups include cholesterols, lipids, phospholipids, biotin, phenazine, folate, phenanthridine, anthraquinone, acridine, fluoresceins, rhodamines, coumarins, and dyes. Groups that enhance the pharmacodynamic properties, in the context of this disclosure, include groups that improve uptake, enhance resistance to degradation, and/or strengthen sequence-specific hybridization with the target nucleic acid. Groups that enhance the pharmacokinetic properties, in the context of this invention, include groups that improve uptake, distribution, metabolism or excretion of the compounds of the present invention. Representative conjugate groups are disclosed in International Patent Application No. PCT/US92/09196, filed Oct. 23, 1992, and U.S. Pat. No. 6,287,860. Conjugate moieties include, but are not limited to, lipid moieties such as a cholesterol moiety, cholic acid, a thioether, e.g., hexyl-5-tritylthiol, a thiocholesterol, an aliphatic chain, e.g., dodecandiol or undecyl residues, a phospholipid, e.g., di-hexadecyl-rac- glycerol or triethylammonium 1,2-di-O-hexadecyl-rac-glycero-3·H-phosphonate, a polyamine or a polyethylene glycol chain, or adamantane acetic acid, a palmityl moiety, or an octadecylamine or hexylamino-carbonyl-oxy cholesterol moiety. See, e.g., U.S. Pat. Nos. 4,828,979; 4,948,882; 5,218,105; 5,525,465; 5,541,313; 5,545,730; 5,552,538; 5,578,717, 5,580,731; 5,580,731; 5,591,584; 5, 109, 124; 5,118,802; 5,138,045; 5,414,077; 5,486,603; 5,512,439; 5,578,718; 5,608,046; 4,587,044; 4,605,735; 4,667,025; 4,762,779; 4,789,737; 4,824,941; 4,835,263; 4,876,335; 4,904,582; 4,958,013; 5,082,830; 5, 112,963; 5,214, 136; 5,082,830; 5,112,963; 5,214,136; 5,245,022; 5,254,469; 5,258,506; 5,262,536; 5,272,250; 5,292,873; 5,317,098; 5,371,241, 5,391,723; 5,416,203, 5,451,463; 5,510,475; 5,512,667; 5,514,785; 5,565,552; 5,567,810; 5,574, 142; 5,585,481; 5,587,371; 5,595,726; 5,597,696; 5,599,923; 5,599,928 and 5,688,941.

[0374] Longer polynucleotides that are less amenable to chemical synthesis and are typically produced by enzymatic synthesis can also be modified by various means. Such modifications can include, for example, the introduction of certain nucleotide analogs, the incorporation of particular sequences or other moieties at the 5′ or 3′ ends of molecules, and other modifications. By way of illustration, the mRNA encoding Cas9 is approximately 4 kb in length and can be synthesized by in vitro transcription. Modifications to the mRNA can be applied to, e.g., increase its translation or stability (such as by increasing its resistance to degradation with a cell), or to reduce the tendency of the RNA to elicit an innate immune response that is often observed in cells following introduction of exogenous RNAs, particularly longer RNAs such as that encoding Cas9.

[0375] Numerous such modifications have been described in the art, such as polyA tails, 5′ cap analogs (e.g., Anti Reverse Cap Analog (ARCA) or m7G(5)ppp(5′)G (mCAP)), modified 5′ or 3′ untranslated regions (UTRs), use of modified bases (such as Pseudo-UTP, 2-Thio-UTP, 5-Methylcytidine-5′-Triphosphate (5-Methyl-CTP) or N6-Methyl-ATP), or treatment with phosphatase to remove 5′ terminal phosphates. These and other modifications are known in the art, and new modifications of RNAs are regularly being developed.

[0376] There are numerous commercial suppliers of modified RNAs, including for example, TriLink Biotech, AxoLabs, Bio-Synthesis Inc., Dharmacon and many others. As described by TriLink, for example, 5-Methyl-CTP can be used to impart desirable characteristics, such as increased nuclease stability, increased translation or reduced interaction of innate immune receptors with in vitro transcribed RNA. 5-Methylcytidine-5′-Triphosphate (5-Methyl-CTP), N6-Methyl-ATP, as well as Pseudo-UTP and 2-Thio. UTP, have also been shown to reduce innate immune stimulation in culture and in vivo while enhancing translation, as illustrated in publications by Kormann et al. and Warren et al. referred to below.

[0377] It has been shown that chemically modified mRNA delivered in vivo can be used to achieve improved therapeutic effects; see, e.g., Kormann et al., Nature Biotechnology 29, 154-157 (2011). Such modifications can be used, for example, to increase the stability of the RNA molecule and/or reduce its immunogenicity. Using chemical modifications such as Pseudo-U, N6-Methyl-A, 2-Thio-U and 5-Methyl-C, it was found that substituting just one quarter of the uridine and cytidine residues with 2-Thio-U and 5-Methyl-C respectively resulted in a significant decrease in toll-like receptor (TLR) mediated recognition of the mRNA in mice. By reducing the activation of the innate immune system, these modifications can be used to effectively increase the stability and longevity of the mRNA in vivo; see, e.g., Kormann et al., supra.

[0378] It has also been shown that repeated administration of synthetic messenger RNAs incorporating modifications designed to bypass innate anti-viral responses can reprogram differentiated human cells to pluripotency. See, e.g., Warren, et al., Cell Stem Cell, 7(5):618-30 (2010). Such modified mRNAs that act as primary reprogramming proteins can be an efficient means of reprogramming multiple human cell types. Such cells are referred to as induced pluripotency stem cells (IPSCs), and it was found that enzymatically synthesized RNA incorporating 5-Methyl-CTP, Pseudo-UTP and an Anti Reverse Cap Analog (ARCA) could be used to effectively evade the cell's antiviral response; see, e.g., Warren et al., supra.

[0379] Other modifications of polynucleotides described in the art include, for example, the use of polyA tails, the addition of 5′ cap analogs (such as m7G(5)ppp(5)G (mCAP)), modifications of 5′ or 3′ untranslated regions (UTRs), or treatment with phosphatase to remove 5′ terminal phosphates—and new approaches are regularly being developed.

[0380] A number of compositions and techniques applicable to the generation of modified RNAs for use herein have been developed in connection with the modification of RNA interference (RNAI), including small-interfering RNAs (siRNAs). siRNAs present particular challenges in vivo because their effects on gene silencing via mRNA interference are generally transient, which can require repeat administration. In addition, siRNAs are double-stranded RNAs (dsRNA) and mammalian cells have immune responses that have evolved to detect and neutralize dsRNA, which is often a by-product of viral infection. Thus, there are mammalian enzymes such as PKR (dsRNA-responsive kinase), and potentially retinoic acid-inducible gene I (RIG-I), that can mediate cellular responses to dsRNA, as well as Toll-like receptors (such as TLR3, TLR7 and TLR8) that can trigger the induction of cytokines in response to such molecules; see, e.g., the reviews by Angart et al., Pharmaceuticals (Basel) 6(4): 440-468 (2013); Kanasty et al., Molecular Therapy 20(3): 513-524 (2012); Burnett et al., Biotechnol J. 6(9):1130-46 (2011); Judge and MacLachlan, Hum Gene Ther 19(2):111-24 (2008); and references cited therein.

[0381] A large variety of modifications have been developed and applied to enhance RNA stability, reduce innate immune responses, and/or achieve other benefits that can be useful in connection with the introduction of polynucleotides into human cells, as described herein; see, e.g., the reviews by Whitehead K A et al., Annual Review of Chemical and Biomolecular Engineering, 2: 77-96 (2011); Gaglione and Messere, Mini Rev Med Chem, 10(7):578-95 (2010); Chernolovskaya et al, Curr Opin Mol Ther., 12(2):158-67 (2010); Deleavey et al., Curr Protoc Nucleic Acid Chem Chapter 16:Unit 16.3 (2009); Behlke, Oligonucleotides 18(4):305-19 (2008); Fucini et al., Nucleic Acid Ther 22(3): 205-210 (2012); Bremsen et al., Front Genet 3:154 (2012).

[0382] As noted above, there are a number of commercial suppliers of modified RNAs, many of which have specialized in modifications designed to improve the effectiveness of siRNAs. A variety of approaches are offered based on various findings reported in the literature. For example, Dharmacon notes that replacement of a non-bridging oxygen with sulfur (phosphorothicate, PS) has been extensively used to improve nuclease resistance of siRNAs, as reported by Kole, Nature Reviews Drug Discovery 11:125-140 (2012). Modifications of the 2′-position of the ribose have been reported to improve nuclease resistance of the internucleotide phosphate bond while increasing duplex stability (Tm), which has also been shown to provide protection from immune activation. A combination of moderate PS backbone modifications with small, well-tolerated 2′-substitutions (2′-O-Methyl, 2′-Fluoro, 2′-Hydro) have been associated with highly stable siRNAs for applications in vivo, as reported by Soutschek et al. Nature 432:173-178 (2004); and 2′-O-Methyl modifications have been reported to be effective in improving stability as reported by Volkov, Oligonucleotides 19:191-202 (2009). With respect to decreasing the induction of innate immune responses, modifying specific sequences with 2′·O-Methyl, 2′-Fluoro, 2′-Hydro have been reported to reduce TLR7/TLR8 interaction while generally preserving silencing activity; see, e.g., Judge et al., Mol. Ther. 13:494-505 (2006); and Cekaite et al., J. Mol. Biol. 365:90-108 (2007). Additional modifications, such as 2-thiouracil, pseudouracil, 5-methylcytosine, 5-methyluracil, and N6-methyladenosine have also been shown to minimize the immune effects mediated by TLR3, TLR7, and TLR8; see, e.g., Kariko, K. et al., Immunity 23:165-175 (2005).

[0383] As is also known in the art, and commercially available, a number of conjugates can be applied to polynucleotides, such as RNAs, for use herein that can enhance their delivery and/or uptake by cells, including for example, cholesterol, tocopherol and folic acid, lipids, peptides, polymers, linkers and aptamers; see, e.g., the review by Winkler, Ther. Deliv. 4:791-809 (2013), and references cited therein.

### Codon-Optimization

[0384] A polynucleotide encoding a site-directed polypeptide can be codon-optimized according to methods standard in the art for expression in the cell containing the target DNA of interest. For example, if the intended target nucleic acid is in a human cell, a human codon-optimized polynucleotide encoding Cas9 is contemplated for use for producing the Cas9 polypeptide.

### Complexes of a Genome-Targeting Nucleic Acid and a Site-Directed Polypeptide

[0385] A genome-targeting nucleic acid interacts with a site directed polypeptide (e.g., a nucleic acid-guided nuclease such as Cas9), thereby forming a complex. The genome-targeting nucleic acid guides the site-directed polypeptide to a target nucleic acid.

### RNPs

[0386] The site-directed polypeptide and genome-targeting nucleic acid can each be administered separately to a cell or a patient. On the other hand, the site-directed polypeptide can be pre-complexed with one or more genome-targeting nucleic acids (guide RNA, sgRNA, or crRNA together with a tracrRNA). The pre-complexed material can then be administered to a cell or a patient. Such pre-complexed material is known as a ribonucleoprotein particle (RNP). The site-directed polypeptide in the RNP can be, for example, a Cas9 endonuclease or a Cpf1 endonuclease. The site-directed polypeptide can be flanked at the N-terminus, the C-terminus, or both the N-terminus and C-terminus by one or more nuclear localization signals (NLSs). For example, a Cas9 endonuclease can be flanked by two NLSs, one NLS located at the N-terminus and the second NLS located at the C-terminus. The NLS can be any NILS known in the art, such as a SV40 NLS. The weight ratio of genome-targeting nucleic acid to site-directed polypeptide in the RNP can be 1:1. For example, the weight ratio of sgRNA to Cas9 endonuclease in the RNP can be 1:1. For example, the sgRNA can comprise the nucleic acid sequence of SEQ ID NO: 71,959, the Cas9 endonuclease can be a S. pyogenes Cas9 comprising a N-terminus SV40 NLS and a C-terminus SV40 NLS, and the weight ratio of sgRNA to Cas9 endonuclease can be 1:1.

### Nucleic Acids Encoding System Components

[0387] The present disclosure provides a nucleic acid comprising a nucleotide sequence encoding a genome-targeting nucleic acid of the disclosure, a site-directed polypeptide of the disclosure, and/or any nucleic acid or proteinaceous molecule necessary to carry out the aspects of the methods of the disclosure.

[0388] The nucleic acid encoding a genome-targeting nucleic acid of the disclosure, a site-directed polypeptide of the disclosure, and/or any nucleic acid or proteinaceous molecule necessary to carry out the aspects of the methods of the disclosure can comprise a vector (e.g., a recombinant expression vector).

[0389] The term “vector” refers to a nucleic acid molecule capable of transporting another nucleic acid to which it has been linked. One type of vector is a “plasmid”, which refers to a circular double-stranded DNA loop into which additional nucleic acid segments can be ligated. Another type of vector is a viral vector, wherein additional nucleic acid segments can be ligated into the viral genome. Certain vectors are capable of autonomous replication in a host cell into which they are introduced (e.g., bacterial vectors having a bacterial origin of replication and episomal mammalian vectors). Other vectors (e.g., non-episomal mammalian vectors) are integrated into the genome of a host cell upon introduction into the host cell, and thereby are replicated along with the host genome.

[0390] In some examples, vectors can be capable of directing the expression of nucleic acids to which they are operatively linked. Such vectors are referred to herein as “recombinant expression vectors”, or more simply “expression vectors”, which serve equivalent functions.

[0391] The term “operably linked” means that the nucleotide sequence of interest is linked to regulatory sequence(s) in a manner that allows for expression of the nucleotide sequence. The term “regulatory sequence” is intended to include, for example, promoters, enhancers and other expression control elements (e.g., polyadenylation signals). Such regulatory sequences are well known in the art and are described, for example, in Goeddel; Gene Expression Technology: Methods in Enzymology 185, Academic Press, San Diego, CA (1990). Regulatory sequences include those that direct constitutive expression of a nucleotide sequence in many types of host cells, and those that direct expression of the nucleotide sequence only in certain host cells (e.g., tissue-specific regulatory sequences). It will be appreciated by those skilled in the art that the design of the expression vector can depend on such factors as the choice of the target cell, the level of expression desired, and the like.

[0392] Expression vectors contemplated include, but are not limited to, viral vectors based on vaccinia virus, poliovirus, adenovirus, adeno-associated virus, SV40, herpes simplex virus, human immunodeficiency virus, retrovirus (e.g., Murine Leukemia Virus, spleen necrosis virus, and vectors derived from retroviruses such as Rous Sarcoma Virus, Harvey Sarcoma Virus, avian leukosis virus, a lentivirus, human immunodeficiency virus, myeloproliferative sarcoma virus, and mammary tumor virus) and other recombinant vectors. Other vectors contemplated for eukaryotic target cells include, but are not limited to, the vectors pXT1, pSG5, pSVK3, pBPV, pMSG, and pSVLSV40 (Pharmacia). Additional vectors contemplated for eukaryotic target cells include, but are not limited to, the vectors pCTx-1, pCTx-2, and pCTx-3, which are described in FIGS. 1A to 1C. Other vectors can be used so long as they are compatible with the host cell.

[0393] In some examples, a vector can comprise one or more transcription and/or translation control elements. Depending on the host/vector system utilized, any of a number of suitable transcription and translation control elements, including constitutive and inducible promoters, transcription enhancer elements, transcription terminators, etc. can be used in the expression vector. The vector can be a self-inactivating vector that either inactivates the viral sequences or the components of the CRISPR machinery or other elements.

[0394] Non-limiting examples of suitable eukaryotic promoters (i.e., promoters functional in a eukaryotic cell) include those from cytomegalovirus (CMV) immediate early, herpes simplex virus (HSV) thymidine kinase, early and late SV40, long terminal repeats (LTRs) from retrovirus, human elongation factor-1 promoter (EF1), a hybrid construct comprising the cytomegalovirus (CMV) enhancer fused to the chicken beta-actin promoter (CAG), murine stem cell virus promoter (MSCV), phosphoglycerate kinase-1 locus promoter (PGK), and mouse metallothionein-I.

[0395] For expressing small RNAs, including guide RNAs used in connection with Cas endonuclease, various promoters such as RNA polymerase III promoters, including for example U6 and H1, can be advantageous. Descriptions of and parameters for enhancing the use of such promoters are known in art, and additional information and approaches are regularly being described; see, e.g., Ma, H. et al., Molecular Therapy—Nucleic Acids 3, e161 (2014) doi:10.1038/mtna.2014.12.

[0396] The expression vector can also contain a ribosome binding site for translation initiation and a transcription terminator. The expression vector can also comprise appropriate sequences for amplifying expression. The expression vector can also include nucleotide sequences encoding non-native tags (e.g., histidine tag, hemagglutinin tag, green fluorescent protein, etc.) that are fused to the site-directed polypeptide, thus resulting in a fusion protein.

[0397] A promoter can be an inducible promoter (e.g., a heat shock promoter, tetracycline-regulated promoter, steroid-regulated promoter, metal-regulated promoter, estrogen receptor-regulated promoter, etc.). The promoter can be a constitutive promoter (e.g., CMV promoter, UBC promoter). In some cases, the promoter can be a spatially restricted and/or temporally restricted promoter (e.g., a tissue specific promoter, a cell type specific promoter, etc.).

[0398] The nucleic acid encoding a genome-targeting nucleic acid of the disclosure and/or a site-directed polypeptide can be packaged into or on the surface of delivery vehicles for delivery to cells. Delivery vehicles contemplated include, but are not limited to, nanospheres, liposomes, quantum dots, nanoparticles, polyethylene glycol particles, hydrogels, and micelles. As described in the art, a variety of targeting moieties can be used to enhance the preferential interaction of such vehicles with desired cell types or locations.

[0399] Introduction of the complexes, polypeptides, and nucleic acids of the disclosure into cells can occur by viral or bacteriophage infection, transfection, conjugation, protoplast fusion, lipofection, electroporation, nucleofection, calcium phosphate precipitation, polyethyleneimine (PEI)-mediated transfection, DEAE-dextran mediated transfection, liposome-mediated transfection, particle gun technology, calcium phosphate precipitation, direct micro-injection, nanoparticle-mediated nucleic acid delivery, and the like.

### Delivery

[0400] Guide RNA polynucleotides (RNA or DNA) and/or endonuclease polynucleotide(s) (RNA or DNA) can be delivered by viral or non-viral delivery vehicles known in the art, such as electroporation, mechanical force, cell deformation (SQZ Biotech), and cell penetrating peptides. Alternatively, endonuclease polypeptide(s) can be delivered by viral or non-viral delivery vehicles known in the art, such as electroporation or lipid nanoparticles. In further alternative aspects, the DNA endonuclease can be delivered as one or more polypeptides, either alone or pre-complexed with one or more guide RNAs, or one or more crRNA together with a tracrRNA.

[0401] Electroporation is a delivery technique in which an electrical field is applied to one or more cells in order to increase the permeability of the cell membrane, which allows substances such as drugs, nucleic acids (genome-targeting nucleic acids), proteins (site-directed polypeptides), or RNPs, to be introduced into the cell. In general, electroporation works by passing thousands of volts across a distance of one to two millimeters of suspended cells in an electroporation cuvette (1.0-1.5 KV, 250-750V/cm).

[0402] Polynucleotides can be delivered by non-viral delivery vehicles including, but not limited to, nanoparticles, liposomes, ribonucleoproteins, positively charged peptides, small molecule RNA-conjugates, aptamer-RNA chimeras, and RNA-fusion protein complexes. Some exemplary non-viral delivery vehicles are described in Peer and Lieberman, Gene Therapy, 18: 1127-1133 (2011) (which focuses on non-viral delivery vehicles for siRNA that are also useful for delivery of other polynucleotides).

[0403] Polynucleotides, such as guide RNA, sgRNA, and mRNA encoding an endonuclease, can be delivered to a cell or a patient by a lipid nanoparticle (LNP).

[0404] A LNP refers to any particle having a diameter of less than 1000 nm, 500 nm, 250 nm, 200 nm, 150 nm, 100 nm, 75 nm, 50 nm, or 25 nm. Alternatively, a nanoparticle can range in size from 1-1000 nm, 1-500 nm, 1-250 nm, 25-200 nm, 25-100 nm, 35-75 nm, or 25-60 nm.

[0405] LNPs can be made from cationic, anionic, or neutral lipids. Neutral lipids, such as the fusogenic phospholipid DOPE or the membrane component cholesterol, can be included in LNPs as ‘helper lipids’ to enhance transfection activity and nanoparticle stability. Limitations of cationic lipids include low efficacy owing to poor stability and rapid clearance, as well as the generation of inflammatory or anti-inflammatory responses.

[0406] LNPs can also be comprised of hydrophobic lipids, hydrophilic lipids, or both hydrophobic and hydrophilic lipids.

[0407] Any lipid or combination of lipids that are known in the art can be used to produce a LNP. Examples of lipids used to produce LNPs are: DOTMA, DOSPA, DOTAP, DMRIE, DC-cholesterol, DOTAP-cholesterol, GAP-DMORIE-DPyPE, and GL67A-DOPE-DMPE-polyethylene glycol (PEG). Examples of cationic lipids are: 98N12-5, C12-200, DLin-KC2-DMA (KC2), DLin-MC3-DMA (MC3), XTC, MD1, and 701. Examples of neutral lipids are: DPSC, DPPC, POPC, DOPE, and SM. Examples of PEG-modified lipids are: PEG-DMG, PEG-CerC14, and PEG-CerC20.

[0408] The lipids can be combined in any number of molar ratios to produce a LNP. In addition, the polynucleotide(s) can be combined with lipid(s) in a wide range of molar ratios to produce a LNP.

[0409] As stated previously, the site-directed polypeptide and genome-targeting nucleic acid can each be administered separately to a cell or a patient. On the other hand, the site-directed polypeptide can be pre-complexed with one or more guide RNAs, or one or more crRNA together with a tracrRNA. The pre-complexed material can then be administered to a cell or a patient. Such pre-complexed material is known as a ribonucleoprotein particle (RNP).

[0410] RNA is capable of forming specific interactions with RNA or DNA. While this property is exploited in many biological processes, it also comes with the risk of promiscuous interactions in a nucleic acid-rich cellular environment. One solution to this problem is the formation of ribonucleoprotein particles (RNPs), in which the RNA is pre-complexed with an endonuclease. Another benefit of the RNP is protection of the RNA from degradation.

[0411] The endonuclease in the RNP can be modified or unmodified. Likewise, the gRNA, crRNA, tracrRNA, or sgRNA can be modified or unmodified. Numerous modifications are known in the art and can be used.

[0412] The endonuclease and sgRNA can be generally combined in a 1:1 molar ratio. Alternatively, the endonuclease, crRNA and tracrRNA can be generally combined in a 1:1:1 molar ratio. However, a wide range of molar ratios can be used to produce a RNP.

[0413] A recombinant adeno-associated virus (AAV) vector can be used for delivery. Techniques to produce rAAV particles, in which an AAV genome to be packaged that includes the polynucleotide to be delivered, rep and cap genes, and helper virus functions are provided to a cell are standard in the art. Production of rAAV typically requires that the following components are present within a single cell (denoted herein as a packaging cell): a rAAV genome, AAV rep and cap genes separate from (i.e., not in) the rAAV genome, and helper virus functions. The AAV rep and cap genes may be from any AAV serotype for which recombinant virus can be derived, and may be from a different AAV serotype than the rAAV genome ITRs, including, but not limited to, AAV serotypes AAV-1, AAV-2, AAV-3, AAV-4, AAV-5, AAV-6, AAV-7, AAV-8, AAV-9, AAV-10, AAV-11, AAV-12, AAV-13 and AAV rh.74. Production of pseudotyped rAAV is disclosed in, for example, international patent application publication number WO 01/83692. See Table 2.

TABLE 2

| AAV Serotype | Genbank Accession No. |
|---|---|
| AAV-1 | NC_002077.1 |
| AAV-2 | NC_001401.2 |
| AAV-3 | NC_001729.1 |
| AAV-3B | AF028705.1 |
| AAV-4 | NC_001829.1 |
| AAV-5 | NC_006152.1 |
| AAV-6 | AF028704.1 |
| AAV-7 | NC_006260.1 |
| AAV-8 | NC_006261.1 |
| AAV-9 | AX753250.1 |
| AAV-10 | AY631965.1 |
| AAV-11 | AY631966.1 |
| AAV-12 | DQ813647.1 |
| AAV-13 | EU285562.1 |

[0414] A method of generating a packaging cell involves creating a cell line that stably expresses all of the necessary components for AAV particle production. For example, a plasmid (or multiple plasmids) comprising a rAAV genome lacking AAV rep and cap genes, AAV rep and cap genes separate from the rAAV genome, and a selectable marker, such as a neomycin resistance gene, are integrated into the genome of a cell. AAV genomes have been introduced into bacterial plasmids by procedures such as GC tailing (Samulski et al., 1982, Proc. Natl. Acad. S6. USA, 79:2077-2081), addition of synthetic linkers containing restriction endonuclease cleavage sites (Laughlin et al., 1983, Gene, 23:65-73) or by direct, blunt-end ligation (Senapathy & Carter, 1984, J. Biol. Chem., 259:4661-4666). The packaging cell line can then be infected with a helper virus, such as adenovirus. The advantages of this method are that the cells are selectable and are suitable for large-scale production of rAAV. Other examples of suitable methods employ adenovirus or baculovirus, rather than plasmids, to introduce rAAV genomes and/or rep and cap genes into packaging cells.

[0415] General principles of rAAV production are reviewed in, for example, Carter, 1992, Current Opinions in Biotechnology, 1533-539; and Muzyczka, 1992, Curr. Topics in Microbial. and Immunol., 158:97-129). Various approaches are described in Ratschin et al., Mol. Cell. Biol. 4:2072 (1984); Hermonat et al., Proc. Natl. Acad. Sci. USA, 81:6466 (1984); Tratschin et al., Mol. Cell. Biol. 5:3251 (1985); Mclaughlin et al., J. Virol., 62:1963 (1988); and Lebkowski et al., 1988 Mol. Cell. Biol., 7:349 (1988). Samulski et al. (1989, J. Virol., 63:3822-3828); U.S. Pat. No. 5,173,414; WO 95/13365 and corresponding U.S. Pat. No. 5,658,776; WO 95/13392; WO 96/17947; PCT/US98/18600; WO 97/09441 (PCT/US96/14423); WO 97/08298 (PCT/US96/13872); WO 97/21825 (PCT/US96/20777); WO 97/06243 (PCT/FR96/01064): WO 99/11764; Perrin et al. (1995) Vaccine 13:1244-1250; Paul et al. (1993) Human Gene Therapy 4:609-615; Clark et al. (1996) Gene Therapy 3:1124-1132; U.S. Pat. Nos. 5,786,211; 5,871,982; and 6,258,595.

[0416] AAV vector serotypes can be matched to target cell types. For example, the following exemplary cell types can be transduced by the indicated AAV serotypes among others. See Table 3.

TABLE 3

| Tissue/Cell Type | Serotype |
|---|---|
| Liver | AAV8, AA3, AA5, AAV9 |
| Skeletal muscle | AAV1, AAV7, AAV6, AAV8, AAV9 |
| Central nervous system | AAV5, AAV1, AAV4 |
| RPE | AAV5, AAV4 |
| Photoreceptor cells | AAV5 |
| Lung | AAV9 |
| Heart | AAV8 |
| Pancreas | AAV8 |
| Kidney | AAV2, AA8 |

[0417] In addition to adeno-associated viral vectors, other viral vectors can be used. Such viral vectors include, but are not limited to, lentivirus, alphavirus, enterovirus, pestivirus, baculovirus, herpesvirus, Epstein Barr virus, papovavirusr, poxvirus, vaccinia virus, and herpes simplex virus. S

[0418] In some cases, Cas9 mRNA, sgRNA targeting one or two loci within or near the BCL11A gene or other DNA sequence that encodes a regulatory element of the BCL11A gene, and donor DNA can each be separately formulated into lipid nanoparticles, or are all co-formulated into one lipid nanoparticle.

[0419] In some cases, Cas9 mRNA can be formulated in a lipid nanoparticle, while sgRNA and donor DNA can be delivered in an AAV vector.

[0420] Options are available to deliver the Cas9 nuclease as a DNA plasmid, as mRNA or as a protein. The guide RNA can be expressed from the same DNA, or can also be delivered as an RNA. The RNA can be chemically modified to alter or improve its half-life, or decrease the likelihood or degree of immune response. The endonuclease protein can be complexed with the gRNA prior to delivery. Viral vectors allow efficient delivery; split versions of Cas9 and smaller orthologs of Cas9 can be packaged in AAV, as can donors for HDR. A range of non-viral delivery methods also exist that can deliver each of these components, or non-viral and viral methods can be employed in tandem. For example, nano-particles can be used to deliver the protein and guide RINA, while AAV can be used to deliver a donor DNA.

### Genetically Modified Cells

[0421] The term “genetically modified cell” refers to a cell that comprises at least one genetic modification introduced by genome editing (e.g., using the CRISPR/Cas9/Cpf1 system). In some ex vivo examples herein, the genetically modified cell can be genetically modified progenitor cell. In some in vivo examples herein, the genetically modified cell can be a genetically modified hematopoietic progenitor cell. A genetically modified cell comprising an exogenous genome-targeting nucleic acid and/or an exogenous nucleic acid encoding a genome-targeting nucleic acid is contemplated herein.

[0422] The term “control treated population” describes a population of cells that has been treated with identical media, viral induction, nucleic acid sequences, temperature, confluency, flask size, pH, etc., with the exception of the addition of the genome editing components. Any method known in the art can be used to measure the modulation or inactivation of the transcriptional control sequence of the BCL11A gene or protein expression or activity, for example Western Blot analysis of the of the transcriptional control sequence of the BCL11A gene protein or quantifying of the transcriptional control sequence of the BCL11A gene mRNA.

[0423] The term “isolated cell” refers to a cell that has been removed from an organism in which it was originally found, or a descendant of such a cell. Optionally, the cell can be cultured in vitro, e.g., under defined conditions or in the presence of other cells. Optionally, the cell can be later introduced into a second organism or re-introduced into the organism from which it (or the cell from which it is descended) was isolated.

[0424] The term “isolated population” with respect to an isolated population of cells refers to a population of cells that has been removed and separated from a mixed or heterogeneous population of cells. In some cases, the isolated population can be a substantially pure population of cells, as compared to the heterogeneous population from which the cells were isolated or enriched. In some cases, the isolated population can be an isolated population of human progenitor cells, e.g., a substantially pure population of human progenitor cells, as compared to a heterogeneous population of cells comprising human progenitor cells and cells from which the human progenitor cells were derived.

[0425] The term “substantially enhanced,” with respect to a particular cell population, refers to a population of cells in which the occurrence of a particular type of cell is increased relative to pre-existing or reference levels, by at least 2-fold, at least 3-, at least 4-, at least 5-, at least 6-, at least 7-, at least 8-, at least 9, at least 10-, at least 20-, at least 50-, at least 100-, at least 400-, at least 1000-, at least 5000-, at least 20000-, at least 100000- or more fold depending, e.g., on the desired levels of such cells for ameliorating hemoglobinopathy.

[0426] The term “substantially enriched” with respect to a particular cell population, refers to a population of cells that is at least about 10%, about 20%, about 30%, about 40%, about 50%, about 60%, about 70% or more with respect to the cells making up a total cell population.

[0427] The term “substantially pure” with respect to a particular cell population, refers to a population of cells that is at least about 75%, at least about 85%, at least about 90%, or at least about 95% pure, with respect to the cells making up a total cell population. That is, the terms “substantially pure” or “essentially purified,” with regard to a population of progenitor cells, refers to a population of cells that contain fewer than about 20%, about 15%, about 10%, about 9%, about 8%, about 7%, about 6%, about 5%, about 4%, about 3%, about 2%, about 1%, or less than 1%, of cells that are not progenitor cells as defined by the terms herein.

Differentiation of Genome-Edited iPSCs into Hematopoietic Progenitor Cells

[0428] Another step of the ex vivo methods of the present disclosure can comprise differentiating the genome-edited iPSCs into hematopoietic progenitor cells. The differentiating step can be performed according to any method known in the art.

Differentiation of Genome-Edited Mesenchymal Stem Cells into Hematopoietic Progenitor Cells

[0429] Another step of the ex vivo methods of the present disclosure can comprise differentiating the genome-edited mesenchymal stem cells into hematopoietic progenitor cells. The differentiating step can be performed according to any method known in the art.

Implanting Cells into Patients

[0430] Another step of the ex vivo methods of the present disclosure can comprise implanting the cells into patients. This implanting step can be accomplished using any method of implantation known in the art. For example, the genetically modified cells can be injected directly in the patient's blood or otherwise administered to the patient. The genetically modified cells may be purified ex vivo using a selected marker.

### Pharmaceutically Acceptable Carriers

[0431] The ex vivo methods of administering progenitor cells to a subject contemplated herein can involve the use of therapeutic compositions comprising progenitor cells.

[0432] Therapeutic compositions can contain a physiologically tolerable carrier together with the cell composition, and optionally at least one additional bioactive agent as described herein, dissolved or dispersed therein as an active ingredient. In some cases, the therapeutic composition is not substantially immunogenic when administered to a mammal or human patient for therapeutic purposes, unless so desired.

[0433] In general, the progenitor cells described herein can be administered as a suspension with a pharmaceutically acceptable carrier. One of skill in the art will recognize that a pharmaceutically acceptable carrier to be used in a cell composition will not include buffers, compounds, cryopreservation agents, preservatives, or other agents in amounts that substantially interfere with the viability of the cells to be delivered to the subject. A formulation comprising cells can include e.g., osmotic buffers that permit cell membrane integrity to be maintained, and optionally, nutrients to maintain cell viability or enhance engraftment upon administration. Such formulations and suspensions are known to those of skill in the art and/or can be adapted for use with the progenitor cells, as described herein, using routine experimentation.

[0434] A cell composition can also be emulsified or presented as a liposome composition, provided that the emulsification procedure does not adversely affect cell viability. The cells and any other active ingredient can be mixed with excipients that are pharmaceutically acceptable and compatible with the active ingredient, and in amounts suitable for use in the therapeutic methods described herein.

[0435] Additional agents included in a cell composition can include pharmaceutically acceptable salts of the components therein. Pharmaceutically acceptable salts include the acid addition salts (formed with the free amino groups of the polypeptide) that are formed with inorganic acids, such as, for example, hydrochloric or phosphoric acids, or such organic acids as acetic, tartaric, mandelic and the like. Salts formed with the free carboxyl groups can also be derived from inorganic bases, such as, for example, sodium, potassium, ammonium, calcium or ferric hydroxides, and such organic bases as isopropylamine, trimethylamine, 2-ethylamino ethanol, histidine, procaine and the like.

[0436] Physiologically tolerable carriers are well known in the art. Exemplary liquid carriers are sterile aqueous solutions that contain no materials in addition to the active ingredients and water, or contain a buffer such as sodium phosphate at physiological pH value, physiological saline or both, such as phosphate-buffered saline. Still further, aqueous carriers can contain more than one buffer salt, as well as salts such as sodium and potassium chlorides, dextrose, polyethylene glycol and other solutes. Liquid compositions can also contain liquid phases in addition to and to the exclusion of water. Exemplary of such additional liquid phases are glycerine, vegetable oils such as cottonseed oil, and water-oil emulsions. The amount of an active compound used in the cell compositions that is effective in the treatment of a particular disorder or condition can depend on the nature of the disorder or condition, and can be determined by standard clinical techniques.

### Administration & Efficacy

[0437] The terms “administering,” “introducing” and “transplanting” are used interchangeably in the context of the placement of cells, e.g., progenitor cells, into a subject, by a method or route that results in at least partial localization of the introduced cells at a desired site, such as a site of injury or repair, such that a desired effect(s) is produced. The cells e.g., progenitor cells, or their differentiated progeny can be administered by any appropriate route that results in delivery to a desired location in the subject where at least a portion of the implanted cells or components of the cells remain viable. The period of viability of the cells after administration to a subject can be as short as a few hours, e.g., twenty-four hours, to a few days, to as long as several years, or even the life time of the patient, i.e., long-term engraftment. For example, in some aspects described herein, an effective amount of myogenic progenitor cells is administered via a systemic route of administration, such as an intraperitoneal or intravenous route.

[0438] The terms “individual”, “subject,” “host” and “patient” are used interchangeably herein and refer to any subject for whom diagnosis, treatment or therapy is desired. In some aspects, the subject is a mammal. In some aspects, the subject is a human being.

[0439] When provided prophylactically, progenitor cells described herein can be administered to a subject in advance of any symptom of a hemoglobinopathy, e.g., prior to the development of fatigue, shortness of breath, jaundice, slow growth late puberty, joint, bone and chest pain, enlarged spleen and liver. Accordingly, the prophylactic administration of a hematopoietic progenitor cell population serves to prevent a hemoglobinopathy, such as β-thalassemia or Sickle Cell Disease.

[0440] When provided therapeutically, hematopoietic progenitor cells are provided at (or after) the onset of a symptom or indication of hemoglobinopathy, e.g., upon the onset of disease.

[0441] The hematopoietic progenitor cell population being administered according to the methods described herein can comprise allogeneic hematopoietic progenitor cells obtained from one or more donors. “Allogeneic” refers to a hematopoietic progenitor cell or biological samples comprising hematopoietic progenitor cells obtained from one or more different donors of the same species, where the genes at one or more loci are not identical. For example, a hematopoietic progenitor cell population being administered to a subject can be derived from one more unrelated donor subjects, or from one or more non-identical siblings. In some cases, syngeneic hematopoietic progenitor cell populations can be used, such as those obtained from genetically identical animals, or from identical twins. The hematopoietic progenitor cells can be autologous cells; that is, the hematopoietic progenitor cells are obtained or isolated from a subject and administered to the same subject, i.e., the donor and recipient are the same.

[0442] The term “effective amount” refers to the amount of a population of progenitor cells or their progeny needed to prevent or alleviate at least one or more signs or symptoms of hemoglobinopathy, and relates to a sufficient amount of a composition to provide the desired effect, e.g., to treat a subject having hemoglobinopathy. The term “therapeutically effective amount” therefore refers to an amount of progenitor cells or a composition comprising progenitor cells that is sufficient to promote a particular effect when administered to a typical subject, such as one who has or is at risk for hemoglobinopathy. An effective amount would also include an amount sufficient to prevent or delay the development of a symptom of the disease, alter the course of a symptom of the disease (for example but not limited to, slow the progression of a symptom of the disease), or reverse a symptom of the disease. It is understood that for any given case, an appropriate “effective amount” can be determined by one of ordinary skill in the art using routine experimentation.

[0443] For use in the various aspects described herein, an effective amount of progenitor cells comprises at least 10² progenitor cells, at least 5×10² progenitor cells, at least 10³ progenitor cells, at least 5×10³ progenitor cells, at least 10⁴ progenitor cells, at least 5×10⁴ progenitor cells, at least 10⁵ progenitor cells, at least 2×10⁵ progenitor cells, at least 3×10⁵ progenitor cells, at least 4×10⁵ progenitor cells, at least 5×10⁵ progenitor cells, at least 6×10⁵ progenitor cells, at least 7×10⁵ progenitor cells, at least 8×10⁵ progenitor cells, at least 9×10⁵ progenitor cells, at least 1×10⁶ progenitor cells, at least 2×10⁶ progenitor cells, at least 3×10⁵ progenitor cells, at least 4×10⁶ progenitor cells, at least 5 × 10⁶ progenitor cells, at least 6×10⁶ progenitor cells, at least 7×10⁶ progenitor cells, at least 8×10⁶ progenitor cells, at least 9×10⁶ progenitor cells, or multiples thereof. The progenitor cells can be derived from one or more donors, or can be obtained from an autologous source. In some examples described herein, the progenitor cells can be expanded in culture prior to administration to a subject in need thereof.

[0444] “Administered” refers to the delivery of a progenitor cell composition into a subject by a method or route that results in at least partial localization of the cell composition at a desired site. A cell composition can be administered by any appropriate route that results in effective treatment in the subject, i.e. administration results in delivery to a desired location in the subject where at least a portion of the composition delivered, i.e. at least 1×10⁴ cells are delivered to the desired site for a period of time. Modes of administration include injection, infusion, instillation, or ingestion. “Injection” includes, without limitation, intravenous, intramuscular, intra-arterial, intrathecal, intraventricular, intracapsular, intraorbital, intracardiac, intradermal, intraperitoneal, transtracheal, subcutaneous, subcuticular, intraarticular, sub capsular, subarachnoid, intraspinal, intracerebro spinal, and intrasternal injection and infusion. In some examples, the route is intravenous. For the delivery of cells, administration by injection or infusion can be made.

[0445] The cells can be administered systemically. The phrases “systemic administration,” “administered systemically”, “peripheral administration” and “administered peripherally” refer to the administration of a population of progenitor cells other than directly into a target site, tissue, or organ, such that it enters, instead, the subject's circulatory system and, thus, is subject to metabolism and other like processes.

[0446] The efficacy of a treatment comprising a composition for the treatment of hemoglobinopathies can be determined by the skilled clinician. However, a treatment is considered “effective treatment,” if any one or all of the signs or symptoms of, as but one example, levels of functional BCL11A and functional HbF are altered in a beneficial manner (e.g., decreased by at least 10% for BCL11A and/or increased by at least 10% for HbF), or other clinically accepted symptoms or markers of disease are improved or ameliorated. Efficacy can also be measured by failure of an individual to worsen as assessed by hospitalization or need for medical interventions (e.g., progression of the disease is halted or at least slowed). Methods of measuring these indicators are known to those of skill in the art and/or described herein. Treatment includes any treatment of a disease in an individual or an animal (some non-limiting examples include a human, or a mammal) and includes: (1) inhibiting the disease, e.g., arresting, or slowing the progression of symptoms; or (2) relieving the disease, e.g., causing regression of symptoms; and (3) preventing or reducing the likelihood of the development of Symptoms.

[0447] The treatment according to the present disclosure can ameliorate one or more symptoms associated with hemoglobinopathies by decreasing the amount of functional BCL11A and/or increasing the amount of functional HbF in the individual. Early signs typically associated with hemoglobinopathies include for example, fatigue, shortness of breath, jaundice, slow growth late puberty, joint, bone and chest pain, enlarged spleen and liver.

### Kits

[0448] The present disclosure provides kits for carrying out the methods described herein. A kit can include one or more of a genome-targeting nucleic acid, a polynucleotide encoding a genome-targeting nucleic acid, a site-directed polypeptide, a polynucleotide encoding a site-directed polypeptide, and/or any nucleic acid or proteinaceous molecule necessary to carry out the aspects of the methods described herein, or any combination thereof.

[0449] A kit can comprise: (1) a vector comprising a nucleotide sequence encoding a genome-targeting nucleic acid, (2) the site-directed polypeptide or a vector comprising a nucleotide sequence encoding the site-directed polypeptide, and (3) a reagent for reconstitution and/or dilution of the vector(s) and or polypeptide.

[0450] A kit can comprise: (1) a vector comprising (i) a nucleotide sequence encoding a genome-targeting nucleic acid, and (ii) a nucleotide sequence encoding the site-directed polypeptide; and (2) a reagent for reconstitution and/or dilution of the vector.

[0451] In any of the above kits, the kit can comprise a single-molecule guide genome-targeting nucleic acid. In any of the above kits, the kit can comprise a double-molecule genome-targeting nucleic acid. In any of the above kits, the kit can comprise two or more double-molecule guides or single-molecule guides. The kits can comprise a vector that encodes the nucleic acid targeting nucleic acid.

[0452] In any of the above kits, the kit can further comprise a polynucleotide to be inserted to effect the desired genetic modification.

[0453] Components of a kit can be in separate containers, or combined in a single container.

[0454] Any kit described above can further comprise one or more additional reagents, where such additional reagents are selected from a buffer, a buffer for introducing a polypeptide or polynucleotide into a cell, a wash buffer, a control reagent, a control vector, a control RNA polynucleotide, a reagent for in vitro production of the polypeptide from DNA, adaptors for sequencing and the like. A buffer can be a stabilization buffer, a reconstituting buffer, a diluting buffer, or the like. A kit can also comprise one or more components that can be used to facilitate or enhance the on-target binding or the cleavage of DNA by the endonuclease, or improve the specificity of targeting.

[0455] In addition to the above-mentioned components, a kit can further comprise instructions for using the components of the kit to practice the methods. The instructions for practicing the methods can be recorded on a suitable recording medium. For example, the instructions can be printed on a substrate, such as paper or plastic, etc. The instructions can be present in the kits as a package insert, in the labeling of the container of the kit or components thereof (i.e., associated with the packaging or subpackaging), etc. The instructions can be present as an electronic storage data file present on a suitable computer readable storage medium, e.g. CD-ROM, diskette, flash drive, etc. In some instances, the actual instructions are not present in the kit, but means for obtaining the instructions from a remote source (e.g. via the Internet), can be provided. An example of this case is a kit that comprises a web address where the instructions can be viewed and/or from which the instructions can be downloaded. As with the instructions, this means for obtaining the instructions can be recorded on a suitable substrate.

### Guide RNA Formulation

[0456] Guide RNAs of the present disclosure can be formulated with pharmaceutically acceptable excipients such as carriers, solvents, stabilizers, adjuvants, diluents, etc., depending upon the particular mode of administration and dosage form. Guide RNA compositions can be formulated to achieve a physiologically compatible pH, and range from a pH of about 3 to a pH of about 11, about pH 3 to about pH 7, depending on the formulation and route of administration. In some cases, the pH can be adjusted to a range from about pH 5.0 to about pH 8. In some cases, the compositions can comprise a therapeutically effective amount of at least one compound as described herein, together with one or more pharmaceutically acceptable excipients. Optionally, the compositions can comprise a combination of the compounds described herein, or can include a second active ingredient useful in the treatment or prevention of bacterial growth (for example and without limitation, anti-bacterial or anti-microbial agents), or can include a combination of reagents of the present disclosure.

[0457] Suitable excipients include, for example, carrier molecules that include large, slowly metabolized macromolecules such as proteins, polysaccharides, polylactic acids, polyglycolic acids, polymeric amino acids, amino acid copolymers, and inactive virus particles. Other exemplary excipients can include antioxidants (for example and without limitation, ascorbic acid), chelating agents (for example and without limitation, EDTA), carbohydrates (for example and without limitation, dextrin, hydroxyalkylcellulose, and hydroxyalkylmethylcellulose), stearic acid, liquids (for example and without limitation, oils, water, saline, glycerol and ethanol), wetting or emulsifying agents, pH buffering substances, and the like.

### Other Possible Therapeutic Approaches

[0458] Gene editing can be conducted using nucleases engineered to target specific sequences. To date there are four major types of nucleases: meganucleases and their derivatives, zinc finger nucleases (ZFNs), transcription activator like effector nucleases (TALENs), and CRISPR-Cas9 nuclease systems. The nuclease platforms vary in difficulty of design, targeting density and mode of action, particularly as the specificity of ZFNs and TALENs is through protein-DNA interactions, while RNA-DNA interactions primarily guide Cas9. Cas9 cleavage also requires an adjacent motif, the PAM, which differs between different CRISPR systems. Cas9 from Streptococcus pyogenes cleaves using a NGG PAM, CRISPR from Neisseria meningitidis can cleave at sites with PAMs including NNNNGATT, NNNNNGTTT and NNNNGCTT. A number of other Cas9 orthologs target protospacer adjacent to alternative PAMs.

[0459] CRISPR endonucleases, such as Cas9, can be used in the methods of the present disclosure. However, the teachings described herein, such as therapeutic target sites, could be applied to other forms of endonucleases, such as ZFNs, TALENS, HEs, or MegaTALs, or using combinations of nucleases. However, in order to apply the teachings of the present disclosure to such endonucleases, one would need to, among other things, engineer proteins directed to the specific target sites.

[0460] Additional binding domains can be fused to the Cas9 protein to increase specificity. The target sites of these constructs would map to the identified gRNA specified site, but would require additional binding motifs, such as for a zinc finger domain. In the case of Mega-TAL, a meganuclease can be fused to a TALE DNA-binding domain. The meganuclease domain can increase specificity and provide the cleavage. Similarly, inactivated or dead Cas9 (dCas9) can be fused to a cleavage domain and require the sgRNA/Cas9 target site and adjacent binding site for the fused DNA-binding domain. This likely would require some protein engineering of the dCas9, in addition to the catalytic inactivation, to decrease binding without the additional binding site.

### Zinc Finger Nucleases

[0461] Zinc finger nucleases (ZFNs) are modular proteins comprised of an engineered zinc finger DNA binding domain linked to the catalytic domain of the type II endonuclease FokI. Because FokI functions only as a dimer, a pair of ZFNs must be engineered to bind to cognate target “half-site” sequences on opposite DNA strands and with precise spacing between them to enable the catalytically active FokI dimer to form. Upon dimerization of the FokI domain, which itself has no sequence specificity per se, a DNA double-strand break is generated between the ZFN half-sites as the initiating step in genome editing.

[0462] The DNA binding domain of each ZFN is typically comprised of 3-6 zinc fingers of the abundant Cys2·His2 architecture, with each finger primarily recognizing a triplet of nucleotides on one strand of the target DNA sequence, although cross-strand interaction with a fourth nucleotide also can be important. Alteration of the amino acids of a finger in positions that make key contacts with the DNA alters the sequence specificity of a given finger. Thus, a four-finger zinc finger protein will selectively recognize a 12 bp target sequence, where the target sequence is a composite of the triplet preferences contributed by each linger, although triplet preference can be influenced to varying degrees by neighboring fingers. An important aspect of ZFNs is that they can be readily re-targeted to almost any genomic address simply by modifying individual lingers, although considerable expertise is required to do this well. In most applications of ZFNs, proteins of 4-6 fingers are used, recognizing 12-18 bp respectively. Hence, a pair of ZFNs will typically recognize a combined target sequence of 24-36 bp, not including the typical 5-7 bp spacer between half-sites. The binding sites can be separated further with larger spacers, including 15-17 bp. A target sequence of this length is likely to be unique in the human genome, assuming repetitive sequences or gene homologs are excluded during the design process. Nevertheless, the ZFN protein-DNA interactions are not absolute in their specificity so off-target binding and cleavage events do occur, either as a heterodimer between the two ZFNs, or as a homodimer of one or the other of the ZFNs. The latter possibility has been effectively eliminated by engineering the dimerization interface of the FokI domain to create “plus” and “minus” variants, also known as obligate heterodimer variants, which can only dimerize with each other, and not with themselves. Forcing the obligate heterodimer prevents formation of the homodimer. This has greatly enhanced specificity of ZFNs, as well as any other nuclease that adopts these FokI variants.

[0463] A variety of ZFN-based systems have been described in the art, modifications thereof are regularly reported, and numerous references describe rules and parameters that are used to guide the design of ZFNs; see, e.g., Segal et al., Proc Natl Acad Sci USA 96(6):2758-63 (1999); Dreier B et al., J Mol Biol. 303(4):489-502 (2000); Liu Q et al., J Biol Chem. 277(6):3850-6 (2002); Dreier et al., J Biol Chem 280(42):35588-97 (2005); and Dreier et al., J Biol Chem. 276(31):29466-78 (2001).

### Transcription Activator-Like Effector Nucleases (TALENs)

[0464] TALENs represent another format of modular nucleases whereby, as with ZFNs, an engineered DNA binding domain is linked to the FokI nuclease domain, and a pair of TALENs operate in tandem to achieve targeted DNA cleavage. The major difference from ZFNs is the nature of the DNA binding domain and the associated target DNA sequence recognition properties. The TALEN DNA binding domain derives from TALE proteins, which were originally described in the plant bacterial pathogen Xanthomonas sp. TALEs are comprised of tandem arrays of 33-35 amino acid repeats, with each repeat recognizing a single basepair in the target DNA sequence that is typically up to 20 bp in length, giving a total target sequence length of up to 40 bp. Nucleotide specificity of each repeat is determined by the repeat variable diresidue (RVD), which includes just two amino acids at positions 12 and 13. The bases guanine, adenine, cytosine and thymine are predominantly recognized by the four RVDs: Asn-Asn, Asn-Ile, His-Asp and Asn-Gly, respectively. This constitutes a much simpler recognition code than for zinc fingers, and thus represents an advantage over the latter for nuclease design. Nevertheless, as with ZFNs, the protein-DNA interactions of TALENs are not absolute in their specificity, and TALENs have also benefitted from the use of obligate heterodimer variants of the FokI domain to reduce off-target activity.

[0465] Additional variants of the FokI domain have been created that are deactivated in their catalytic function. If one half of either a TALEN or a ZFN pair contains an inactive FokI domain, then only single-strand DNA cleavage (nicking) will occur at the target site, rather than a DSB. The outcome is comparable to the use of CRISPR/Cas9/Cpf1 “nickase” mutants in which one of the Cas9 cleavage domains has been deactivated. DNA nicks can be used to drive genome editing by HDR, but at lower efficiency than with a DSB. The main benefit is that off-target nicks are quickly and accurately repaired, unlike the DSB, which is prone to NHEJ-mediated mis-repair.

[0466] A variety of TALEN-based systems have been described in the art, and modifications thereof are regularly reported; see, e.g., Boch, Science 326(5959): 1509-12 (2009); Mak et al., Science 335(6069):716-9 (2012); and Moscou et al., Science 326(5959):1501 (2009). The use of TALENs based on the “Golden Gate” platform, or cloning scheme, has been described by multiple groups; see, e.g., Cermak et al., Nucleic Acids Res. 39(12):e82 (2011); Li et al., Nucleic Acids Res. 39(14):6315. 25 (2011): Weber et al., PLOS One. 6(2):e16765 (2011): Wang et al., J Genet Genomics 41(6):339-47, Epub 2014 May 17 (2014); and Cermak T et al., Methods Mol Biol. 1239:133-59 (2015).

### Homing Endonucleases

[0467] Homing endonucleases (HEs) are sequence-specific endonucleases that have long recognition sequences (14-44 base pairs) and cleave DNA with high specificity—often at sites unique in the genome. There are at least six known families of HEs as classified by their structure, including LAGLIDADG (SEQ ID NO. 71,949), GIY-YIG, His-Cis box, H-N-H, PD-(D/E)xK, and Vsr-like that are derived from a broad range of hosts, including eukarya, protists, bacteria, archaea, cyanobacteria and phage. As with ZFNs and TALENs, HEs can be used to create a DSB at a target locus as the initial step in genome editing. In addition, some natural and engineered HEs cut only a single strand of DNA, thereby functioning as site-specific nickases. The large target sequence of HEs and the specificity that they offer have made them attractive candidates to create site-specific DSBs.

[0468] A variety of HE-based systems have been described in the art, and modifications thereof are regularly reported; see, e.g., the reviews by Steentoft et al., Glycobiology 24(8):663-80 (2014); Belfort and Bonocora, Methods Mol Biol. 1123:1-26 (2014); Hafez and Hausner, Genome 55(8):553-69 (2012); and references cited therein.

### MegaTAL/Tev-mTALEN/MegaTev

[0469] As further examples of hybrid nucleases, the MegaTAL platform and Tev-mTALEN platform use a fusion of TALE DNA binding domains and catalytically active HEs, taking advantage of both the tunable DNA binding and specificity of the TALE, as well as the cleavage sequence specificity of the HE; see, e.g., Boissel et al., NAR 42: 2591-2601 (2014); Kleinstiver et al., G3 4:1155-65 (2014); and Boissel and Scharenberg, Methods Mol. Biol. 1239: 171-96 (2015).

[0470] In a further variation, the MegaTev architecture is the fusion of a meganuclease (Mega) with the nuclease domain derived from the GIY-YIG homing endonuclease I-TevI (Tev). The two active sites are positioned ˜30 bp apart on a DNA substrate and generate two DSBs with non-compatible cohesive ends; see, e.g., Wolfs et al., NAR 42, 8816-29 (2014). It is anticipated that other combinations of existing nuclease-based approaches will evolve and be useful in achieving the targeted genome modifications described herein.

dCas9-FokI or dCpf1-Fok1 and Other Nucleases

[0471] Combining the structural and functional properties of the nuclease platforms described above offers a further approach to genome editing that can potentially overcome some of the inherent deficiencies. As an example, the CRISPR genome editing system typically uses a single Cas9 endonuclease to create a DSB. The specificity of targeting is driven by a 20 or 24 nucleotide sequence in the guide RNA that undergoes Watson-Crick base-pairing with the target DNA (plus an additional 2 bases in the adjacent NAG or NGG PAM sequence in the case of Cas9 from S. pyogenes). Such a sequence is long enough to be unique in the human genome, however, the specificity of the RNA/DNA interaction is not absolute, with significant promiscuity sometimes tolerated, particularly in the 5′ half of the target sequence, effectively reducing the number of bases that drive specificity. One solution to this has been to completely deactivate the Cas9 or Cpf1 catalytic function—retaining only the RNA-guided DNA binding function—and instead fusing a FokI domain to the deactivated Cas9; see, e.g., Tsai et al., Nature Biotech 32: 569-76 (2014); and Guilinger et al., Nature Biotech. 32: 577-82 (2014). Because FokI must dimerize to become catalytically active, two guide RNAs are required to tether two FokI fusions in close proximity to form the dimer and cleave DNA. This essentially doubles the number of bases in the combined target sites, thereby increasing the stringency of targeting by CRISPR-based systems.

[0472] As further example, fusion of the TALE DNA binding domain to a catalytically active HE, such as I·TevI, takes advantage of both the tunable DNA binding and specificity of the TALE, as well as the cleavage sequence specificity of I-TevI, with the expectation that off-target cleavage can be further reduced.

### On- and Off-Target Mutation Detection by Sequencing

[0473] To sequence on-target sites and putative off-target sites, the appropriate amplification primers were identified and reactions were set up with these primers using the genomic DNA harvested using QuickExtract DNA extraction solution (Epicentre) from treated cells three days post-transfection. The amplification primers contain the gene specific portion flanked by adapters. The forward primer's 5′ end includes a modified forward (read1) primer-binding site. The reverse primer's 5′ end contains a combined modified reverse (read2) and barcode primer-binding site, in opposite orientation. The individual PCR reactions were validated by separating on agarose gels, then purified and re-amplified. The second round forward primers contain the Illumina P5 sequence, followed by a proportion of the modified forward (read1) primer binding site. The second round reverse primers contain the Illumina P7 sequence (at the 5′ end), followed by the 6-base barcode and the combined modified reverse (read2) and barcode primer binding site. The second round amplifications were also checked on agarose gels, then purified, and quantitated using a NanoDrop spectrophotometer. The amplification products were pooled to match concentration and then submitted to the Emory Integrated Genomic core for library prepping and sequencing on an Illumina Miseq machine.

[0474] The sequencing reads were sorted by barcode and then aligned to the reference sequences supplied by bioinformatics for each product. Insertion and deletion rates in the aligned sequencing reads were detected in the region of the putative cut sites using software previously described; see, e.g., Lin et al., Nucleic Acids Res., 42: 7473-7485 (2014). The levels of insertions and deletions detected in this window were then compared to the level seen in the same location in genomic DNA isolated from in mock transfected cells to minimize the effects of sequencing artifacts.

### Mutation Detection Assays

[0475] The on- and off-target cleavage activities of Cas9 and guide RNA combinations were measured using the mutation rates resulting from the imperfect repair of double-strand breaks by NHEJ.

[0476] On-target loci were amplified using AccuPrime Taq DNA Polymerase High Fidelity (Lite Technologies, Carlsbad, CA) following manufacturer's instructions for 40 cycles (94ºC, 30 s; 52-60° C., 30 s; 68ºC, 60 s) in 50 μl reactions containing 1 μl of the cell lysate, and 1 μl of each 10 μM amplification primer. T7EI mutation detection assays were performed, as per manufacturers protocol [Reyon et al., Nat. Biotechnol., 30: 460-465 (2012)], with the digestions separated on 2% agarose gels and quantified using ImageJ [Guschin et al., Methods Mol. Biol., 649: 247-256 (2010)]. The assays determine the percentage of insertions/deletions (“indels”) in the bulk population of cells.

### Methods and Compositions of the Invention

[0477] Accordingly, the present disclosure relates in particular to the following non-limiting inventions: In a first method, Method 1, the present disclosure provides a method for editing a BCL11A gene in a human cell by genome editing, the method comprising the step of: introducing into the human cell one or more deoxyribonucleic acid (DNA) endonucleases to effect one or more single-strand breaks (SSBs) or double-strand breaks (DSBs) within or near the BCL11A gene or other DNA sequence that encodes a regulatory element of the BCL11A gene that results in a permanent deletion, modulation, or inactivation of a transcriptional control sequence of the BCL11A gene.

[0478] In another method, Method 2, the present disclosure provides a method for editing a BCL11A gene in a human cell by genome editing, as provided in Method 1, wherein the transcriptional control sequence is located within a second intron of the BCL11A gene.

[0479] In another method, Method 3, the present disclosure provides a method for editing a BCL11A gene in a human cell by genome editing, as provided in Methods 1 or 2, wherein the transcriptional control sequence is located within a +58 DNA hypersensitive site (DHS) of the BCL11A gene.

[0480] In another method, Method 4, the present disclosure provides an ex vivo method for treating a patient with a hemoglobinopathy, the method comprising the steps of: creating a patient specific induced pluripotent stem cell (IPSC); editing within or near a BCL11A gene or other DNA sequence that encodes a regulatory element of the BCL11A gene of the iPSC: differentiating the genome-edited IPSC into a hematopoietic progenitor cell; and implanting the hematopoietic progenitor cell into the patient.

[0481] In another method, Method 5, the present disclosure provides an ex vivo method for treating a patient with a hemoglobinopathy as provided in Method 4 wherein the creating step comprises: isolating a somatic cell from the patient; and introducing a set of pluripotency-associated genes into the somatic cell to induce the somatic cell to become a pluripotent stem cell.

[0482] In another method, Method 6, the present disclosure provides an ex vivo method for treating a patient with a hemoglobinopathy as provided in Method 5, wherein the somatic cell is a fibroblast.

[0483] In another method, Method 7, the present disclosure provides an ex vivo method for treating a patient with a hemoglobinopathy as provided in Methods 5 or 6, wherein the set of pluripotency-associated genes is one or more of the genes selected from the group consisting of OCT4, SOX2, KLF4, Lin28, NANOG and cMYC.

[0484] In another method, Method 8, the present disclosure provides an ex vivo method for treating a patient with a hemoglobinopathy as provided in any one of Methods 4-7, wherein the editing step comprises introducing into the iPSC one or more deoxyribonucleic acid (DNA) endonucleases to effect one or more single-strand breaks (SSBs) or double-strand breaks (DSBs) within or near the BCL11A gene or other DNA sequence that encodes a regulatory element of the BCL11A gene that results in a permanent deletion, modulation, or inactivation of a transcriptional control sequence of the BCL11A gene.

[0485] In another method, Method 9, the present disclosure provides an ex vivo method for treating a patient with a hemoglobinopathy as provided in any one of Methods 4-8, wherein the differentiating step comprises one or more of the following to differentiate the genome-edited iPSC into a hematopoietic progenitor cell: treatment with a combination of small molecules, delivery of master transcription factors, delivery of mRNA encoding master transcription factors, or delivery of mRNA encoding transcription factors.

[0486] In another method, Method 10, the present disclosure provides an ex vivo method for treating a patient with a hemoglobinopathy as provided in any one of Methods 4-9, wherein the implanting step comprises implanting the hematopoietic progenitor cell into the patient by transplantation, local injection, systemic infusion, or combinations thereof.

[0487] In another method, Method 11, the present disclosure provides an ex vivo method for treating a patient with a hemoglobinopathy, the method comprising the steps of: isolating a mesenchymal stem cell from the patient; editing within or near a BCL11A gene or other DNA sequence that encodes a regulatory element of the BCL11A gene of the mesenchymal stem cell; differentiating the genome-edited mesenchymal stem cell into a hematopoietic progenitor cell; and implanting the hematopoietic progenitor cell into the patient.

[0488] In another method, Method 12, the present disclosure provides an ex vivo method for treating a patient with a hemoglobinopathy as provided in Method 11, wherein the mesenchymal stem cell is isolated from the patient's bone marrow or peripheral blood.

[0489] In another method, Method 13, the present disclosure provides an ex vivo method for treating a patient with a hemoglobinopathy as provided in Methods 11 or 12, wherein the isolating step comprises: aspiration of bone marrow and isolation of mesenchymal cells using density gradient centrifugation media.

[0490] In another method, Method 14, the present disclosure provides an ex vivo method for treating a patient with a hemoglobinopathy as provided in any one of Methods 11-13, wherein the editing step comprises introducing into the mesenchymal stem cell one or more deoxyribonucleic acid (DNA) endonucleases to effect one or more single-strand breaks (SSBs) or double-strand breaks (DSBs) within or near the BCL11A gene or other DNA sequence that encodes a regulatory element of the BCL11A gene that results in a permanent deletion, modulation, or inactivation of a transcriptional control sequence of the BCL11A gene.

[0491] In another method, Method 15, the present disclosure provides an ex vivo method for treating a patient with a hemoglobinopathy as provided in any one of Methods 11-14, wherein the differentiating step comprises one or more of the following to differentiate the genome-edited mesenchymal stem cell into a hematopoietic progenitor cell: treatment with a combination of small molecules, delivery of master transcription factors, delivery of mRNA encoding master transcription factors, or delivery of mRNA encoding transcription factors.

[0492] In another method, Method 16, the present disclosure provides an ex vivo method for treating a patient with a hemoglobinopathy as provided in any one of Methods 11-15, wherein the implanting step comprises implanting the hematopoietic progenitor cell into the patient by transplantation, local injection, systemic infusion, or combinations thereof.

[0493] In another method, Method 17, the present disclosure provides an ex vivo method for treating a patient with a hemoglobinopathy, the method comprising the steps of: isolating a hematopoietic progenitor cell from the patient; editing within or near a BCL11A gene or other DNA sequence that encodes a regulatory element of the BCL11A gene of the hematopoietic progenitor cell; and implanting the genome-edited hematopoietic progenitor cell into the patient.

[0494] In another method, Method 18, the present disclosure provides an ex vivo method for treating a patient with a hemoglobinopathy as provided in Method 17, wherein the method further comprises treating the patient with granulocyte colony stimulating factor (GCSF) prior to the isolating step.

[0495] In another method, Method 19, the present disclosure provides an ex vivo method for treating a patient with a hemoglobinopathy as provided in Method 18, wherein the treating step is performed in combination with Plerixaflor.

[0496] In another method, Method 20, the present disclosure provides an ex vivo method for treating a patient with a hemoglobinopathy as provided in any one of Methods 17-19, wherein the isolating step comprises isolating CD34+ cells.

[0497] In another method, Method 21, the present disclosure provides an ex vivo method for treating a patient with a hemoglobinopathy as provided in any one of Methods 17-20, wherein the editing step comprises introducing into the hematopoietic progenitor cell one or more deoxyribonucleic acid (DNA) endonucleases to effect one or more single-strand breaks (SSBs) or double-strand breaks (DSBs) within or near the BCL11A gene or other DNA sequence that encodes a regulatory element of the BCL11A gene that results in a permanent deletion, modulation, or inactivation of a transcriptional control sequence of the BCL11A gene.

[0498] In another method, Method 22, the present disclosure provides an ex vivo method for treating a patient with a hemoglobinopathy as provided in any one of Methods 17-21, wherein the implanting step comprises implanting the genome-edited hematopoietic progenitor cell into the patient by transplantation, local injection, systemic infusion, or combinations thereof.

[0499] In another method, Method 23, the present disclosure provides an in vivo method for treating a patient with a hemoglobinopathy, the method comprising the step of editing a BCL11A gene in a cell of the patient.

[0500] In another method, Method 24, the present disclosure provides an in vivo method for treating a patient with a hemoglobinopathy as provided in Method 23, wherein the editing step comprises introducing into the cell one or more deoxyribonucleic acid (DNA) endonucleases to effect one or more single-strand breaks (SSBs) or double-strand breaks (DSBs) within or near the BCL11A gene or other DNA sequence that encodes a regulatory element of the BCL11A gene that results in a permanent deletion, modulation, or inactivation of a transcriptional control of the BCL11A gene.

[0501] In another method, Method 25, the present disclosure provides an in vivo method for treating a patient with a hemoglobinopathy as provided in Methods 23 or 24, wherein the cell is a bone marrow cell, a hematopoietic progenitor cell, or a CD34+ cell.

[0502] In another method, Method 26, the present disclosure provides a method according to any one of Methods 1, 8, 14, 21 and 24, wherein the one or more DNA endonucleases is a Cas1, Cas18, Cas2, Cas3, Cas4, Cas5, Cas6, Cas7, Cas8, Cas9 (also known as Csn1 and Csx12), Cas100, Csy1, Csy2, Csy3, Cse1, Cse2, Csc1, Csc2, Csa5, Csn2, Csm2, Csm3, Csm4, Csm5, Csm6, Cmr1, Cmr3, Cmr4, Cmr5, Cmr6, Csb1, Csb2, Csb3, Csx17, Csx14, Csx10, Csx16, CsaX, Csx3, Csx1, Csx15, Csf1, Csf2, Csf3, Csf4, or Cpf1 endonuclease; a homolog thereof, a recombination of the naturally occurring molecule thereof, codon-optimized thereof, or modified versions thereof, and combinations thereof.

[0503] In another method, Method 27, the present disclosure provides a method as provided in Method 26, wherein the method comprises introducing into the cell one or more polynucleotides encoding the one or more DNA endonucleases.

[0504] In another method, Method 28, the present disclosure provides a method as provided in Methods 26 or 27, wherein the method comprises introducing into the cell one or more ribonucleic acids (RNAs) encoding the one or more DNA endonucleases.

[0505] In another method, Method 29, the present disclosure provides a method as provided in Methods 27 or 28, wherein the one or more polynucleotides or one or more RNAs is one or more modified polynucleotides or one or more modified RNAs.

[0506] In another method, Method 30, the present disclosure provides a method as provided in Method 26, wherein the one or more DNA endonucleases is one or more proteins or polypeptides.

[0507] In another method, Method 31, the present disclosure provides a method as provided in Method 30, wherein the one or more proteins or polypeptides is flanked at the N-terminus, the C-terminus, or both the N-terminus and C-terminus by one or more nuclear localization signals (NLSs).

[0508] In another method, Method 32, the present disclosure provides a method as provided in Method 31, wherein the one or more proteins or polypeptides is flanked by two NLSs, one NLS located at the N-terminus and the second NLS located at the C-terminus.

[0509] In another method, Method 33, the present disclosure provides a method as provided in any one of Methods 31-32, wherein the one or more NLSs is a SV40 NLS.

[0510] In another method, Method 34, the present disclosure provides a method as provided in any one of Methods 1-33, wherein the method further comprises introducing into the cell one or more guide ribonucleic acids (gRNAs).

[0511] In another method, Method 35, the present disclosure provides a method as provided in Method 34, wherein the one or more gRNAs are single-molecule guide RNA (sgRNAs).

[0512] In another method, Method 36, the present disclosure provides a method as provided in Methods 34 or 35, wherein the one or more gRNAs or one or more sgRNAs is one or more modified gRNAs or one or more modified sgRNAs.

[0513] In another method, Method 37, the present disclosure provides a method as provided in Method 36, wherein the one or more modified sgRNAs comprises three 2′-O-methyl-phosphorothioate residues at or near each of its 5′ and 3′ ends.

[0514] In another method, Method 38, the present disclosure provides a method as provided in Method 37, wherein the modified sgRNA is the nucleic acid sequence of SEQ ID NO: 71,959.

[0515] In another method, Method 39, the present disclosure provides a method as provided in Methods 34-38, wherein the one or more DNA endonucleases is pre-complexed with one or more gRNAs or one or more sgRNAs to form one or more ribonucleoproteins (RNPs).

[0516] In another method, Method 40, the present disclosure provides a method as provided in Method 39, wherein the weight ratio of sgRNA to DNA endonuclease in the RNP is 1:1.

[0517] In another method, Method 41, the present disclosure provides a method as provided in Method 40, wherein the sgRNA comprises the nucleic acid sequence of SEQ ID NO: 71,959, the DNA endonuclease is a S. pyogenes Cas9 comprising a N-terminus SV40 NLS and a C-terminus SV40 NLS, wherein the weight ratio of sgRNA to DNA endonuclease is 1:1.

[0518] In another method, Method 42, the present disclosure provides a method as provided in any one of Methods 1-41, wherein the method further comprises introducing into the cell a polynucleotide donor template comprising a wild-type BCL11A gene or cDNA comprising a modified transcriptional control sequence.

[0519] In another method, Method 43, the present disclosure provides a method as provided in any one of Methods 1, 8, 14, 21, or 24, wherein the method further comprises introducing into the cell one guide ribonucleic acid (gRNA) and a polynucleotide donor template comprising a wild-type BCL11A gene or cDNA comprising a modified transcriptional control sequence, and wherein the one or more DNA endonucleases is one or more Cas9 or Cpf1 endonucleases that effect one single-strand break (SSB) or double-strand break (DSB) at a locus within or near the BCL11A gene or other DNA sequence that encodes a regulatory element of the BCL11A gene that facilitates insertion of a new sequence from the polynucleotide donor template into the chromosomal DNA at the locus that results in a permanent insertion, modulation, or inactivation of the transcriptional control sequence of the chromosomal DNA proximal to the locus, and wherein the gRNA comprises a spacer sequence that is complementary to a segment of the locus.

[0520] In another method, Method 44, the present disclosure provides a method as provided in Method 43, wherein proximal means nucleotides both upstream and downstream of the locus.

[0521] In another method, Method 45, the present disclosure provides a method as provided in any one of Methods 1, 8, 14, 21, or 24, wherein the method further comprises introducing into the cell one or more guide ribonucleic acid (gRNAs) and a polynucleotide donor template comprising a wild-type BCL11A gene or cDNA comprising a modified transcriptional control sequence, and wherein the one or more DNA endonucleases is one or more Cas9 or Cpf1 endonucleases that effect or create a pair of single-strand breaks (SSBs) or double-strand breaks (DSBs), the first break at a 5′ locus and the second break at a 3′ locus, within or near the BCL11A gene or other DNA sequence that encodes a regulatory element of the BCL11A gene that facilitates insertion of a new sequence from the polynucleotide donor template into the chromosomal DNA between the 5′ locus and the 3′ locus that results in a permanent insertion, modulation, or inactivation of the transcriptional control sequence of the chromosomal DNA between the 5′ locus and the 3′ locus.

[0522] In another method, Method 46, the present disclosure provides a method as provided in Method 45, wherein one gRNA creates a pair of SSBs or DSBs.

[0523] In another method, Method 47, the present disclosure provides a method as provided in Method 45, wherein one gRNA comprises a spacer sequence that is complementary to either the 5′ locus or the 3′ locus.

[0524] In another method, Method 48, the present disclosure provides a method as provided in Method 45, wherein the method comprises a first guide RNA and a second guide RNA, wherein the first guide RNA comprises a spacer sequence that is complementary to a segment of the 5′ locus and the second guide RNA comprises a spacer sequence that is complementary to a segment of the 3′ locus.

[0525] In another method, Method 49, the present disclosure provides a method as provided in any one of Methods 43-48, wherein the one or two gRNAs are one or two single-molecule guide RNA (sgRNAs).

[0526] In another method, Method 50, the present disclosure provides a method as provided in any one of Methods 43-49, wherein the one or two gRNAs or one or two sgRNAs is one or two modified gRNAs or one or two modified sgRNAs.

[0527] In another method, Method 51, the present disclosure provides a method as provided in Method 50, wherein the one modified sgRNA comprises three 2′-O-methyl-phosphorothioate residues at or near each of its 5′ and 3′ ends.

[0528] In another method, Method 52, the present disclosure provides a method as provided in Method 51, wherein the one modified sgRNA is the nucleic acid sequence of SEQ ID NO: 71,959.

[0529] In another method, Method 53, the present disclosure provides a method as provided in any one of Methods 43-52, wherein the one or more Cas9 endonucleases is pre-complexed with one or two gRNAs or one or two sgRNAs to form one or more ribonucleoproteins (RNPs).

[0530] In another method, Method 54, the present disclosure provides a method as provided in Method 53, wherein the one or more Cas9 endonuclease is flanked at the N-terminus, the C-terminus, or both the N-terminus and C-terminus by one or more nuclear localization signals (NLSs).

[0531] In another method, Method 55, the present disclosure provides a method as provided in Method 54, wherein the one or more Cas9 endonucleases is flanked by two NLSs, one NLS located at the N-terminus and the second NLS located at the C-terminus.

[0532] In another method, Method 56, the present disclosure provides a method as provided in any one of Methods 54-55, wherein the one or more NLSs is a SV40 NLS.

[0533] In another method, Method 57, the present disclosure provides a method as provided in Method 53, wherein the weight ratio of sgRNA to Cas9 endonuclease in the RNP is 1:1.

[0534] In another method, Method 58, the present disclosure provides a method as provided in Method 53, wherein the one sgRNA comprises the nucleic acid sequence of SEQ ID NO: 71,959, the Cas9 endonuclease is a S. pyogenes Cas9 comprising a N-terminus SV40 NLS and a C-terminus SV40 NLS, wherein the weight ratio of sgRNA to Cas9 endonuclease is 1:1.

[0535] In another method, Method 59, the present disclosure provides a method as provided in any one of Methods 43-58, wherein the donor template is either single or double stranded.

[0536] In another method, Method 60, the present disclosure provides a method as provided in any one of Methods 42-59, wherein the modified transcriptional control sequence is located within a second intron of the BCL11A gene.

[0537] In another method, Method 61, as provided in any one of Methods 42-59, wherein the modified transcriptional control sequence is located within a +58 DNA hypersensitive site (DHS) of the BCL11A gene.

[0538] In another method, Method 62, the present disclosure provides a method as provided in any one of Methods 42-61, wherein the insertion is by homology directed repair (HDR).

[0539] In another method, Method 63, the present disclosure provides a method as provided in any one of Methods 8, 14, 21, 24, 43, and 45, wherein the SSB, DSB, or 5′ locus and 3′ locus are located within a second intron of the BCL11A gene.

[0540] In another method, Method 64, the present disclosure provides a method as provided in any one of Methods 8, 14, 21, 24, 43, and 45, wherein the SSB, DSB, or 5′ DSB and 3′ DSB are located within a +58 DNA hypersensitive site (DHS) of the BCL11A gene.

[0541] In another method, Method 65, the present disclosure provides a method as provided in any one of Methods 1, 8, 14, 21, or 24, wherein the method further comprises introducing into the cell one or more guide ribonucleic acid (gRNAs), and wherein the one or more DNA endonucleases is one or more Cas9 or Cpf1 endonucleases that effect or create a pair of single-strand breaks (SSBs) or double-strand breaks (DSBs), a first SSB or DSB at a 5′ locus and a second SSB or DSB at a 3′ locus, within or near the BCL11A gene or other DNA sequence that encodes a regulatory element of the BCL11A gene that causes a deletion of the chromosomal DNA between the 5′ locus and the 3′ locus that results in a permanent deletion, modulation, or inactivation of the transcriptional control sequence of the chromosomal DNA between the 5′ locus and the 3′ locus.

[0542] In another method, Method 66, the present disclosure provides a method as provided in Method 65, wherein one gRNA creates a pair of SSBs or DSBs.

[0543] In another method, Method 67, the present disclosure provides a method as provided in Method 65, wherein one gRNA comprises a spacer sequence that is complementary to either the 5′ locus or the 3′ locus.

[0544] In another method, Method 68, the present disclosure provides a method as provided in Method 65, wherein the method comprises a first guide RNA and a second guide RNA, wherein the first guide RNA comprises a spacer sequence that is complementary to a segment of the 5′ locus and the second guide RNA comprises a spacer sequence that is complementary to a segment of the 3′ locus.

[0545] In another method, Method 69, the present disclosure provides a method as provided in Methods 65-68, wherein the one or more gRNAs are one or more single-molecule guide RNA (sgRNAs).

[0546] In another method, Method 70, the present disclosure provides a method as provided in Methods 65-69 wherein the one or more gRNAs or one or more sgRNAs are one or more modified gRNAs or one or more modified sgRNAs.

[0547] In another method, Method 71, the present disclosure provides a method as provided in Method 70, wherein the one modified sgRNA comprises three 2-O-methyl-phosphorothioate residues at or near each of its 5′ and 3′ ends.

[0548] In another method, Method 72, the present disclosure provides a method as provided in Method 71, wherein the one modified sgRNA is the nucleic acid sequence of SEQ ID NO: 71,959.

[0549] In another method, Method 73, the present disclosure provides a method as provided in any one of Methods 65-72, wherein the one or more Cas9 endonucleases is pre-complexed with one or more gRNAs or one or more sgRNAs to form one or more ribonucleoproteins (RNPs).

[0550] In another method, Method 74, the present disclosure provides a method as provided in Method 73, wherein the one or more Cas9 endonuclease is flanked at the N-terminus, the C-terminus, or both the N-terminus and C-terminus by one or more nuclear localization signals (NLSs).

[0551] In another method, Method 75, the present disclosure provides a method as provided in Method 74, wherein the one or more Cas9 endonucleases is flanked by two NLSs, one NLS located at the N-terminus and the second NLS located at the C-terminus.

[0552] In another method, Method 76, the present disclosure provides a method as provided in any one of Methods 74-75, wherein the one or more NLSs is a SV40 NLS.

[0553] In another method, Method 77, the present disclosure provides a method as provided in Method 73, wherein the weight ratio of sgRNA to Cas9 endonuclease in the RNP is 1:1.

[0554] In another method, Method 78, the present disclosure provides a method as provided in Method 73, wherein the one sgRNA comprises the nucleic acid sequence of SEQ ID NO: 71,959, the Cas9 endonuclease is a S. pyogenes Cas9 comprising a N-terminus SV40 NLS and a C-terminus SV40 NLS, wherein the weight ratio of sgRNA to Cas9 endonuclease is 1:1.

[0555] In another method, Method 79, the present disclosure provides a method as provided in any one of Methods 65-78, wherein both the 5′ locus and 3′ locus are located within a second intron of the BCL11A gene.

[0556] In another method, Method 80, the present disclosure provides a method as provided in any one of Methods 65-78, wherein both the 5′ locus and 3′ locus are located within a +58 DNA hypersensitive site (DHS) of the BCL11A gene.

[0557] In another method, Method 81, the present disclosure provides a method as provided in any one of Methods 1, 8, 14, 21, or 24-80 wherein the Cas9 or Cpf1 mRNA, gRNA, and donor template are either each formulated into separate lipid nanoparticles or all co-formulated into a lipid nanoparticle.

[0558] In another method, Method 82, the present disclosure provides a method as provided in any one of Methods 1, 8, 14, 21, or 24-80, wherein the Cas9 or Cpf1 mRNA is formulated into a lipid nanoparticle, and both the gRNA and donor template are delivered to the cell by an adeno-associated virus (AAV) vector.

[0559] In another method, Method 83, the present disclosure provides a method as provided in any one of Methods 1, 8, 14, 21, or 24-80, wherein the Cas9 or Cpf1 mRNA is formulated into a lipid nanoparticle, and the gRNA is delivered to the cell by electroporation and donor template is delivered to the cell by an adeno-associated virus (AAV) vector.

[0560] In another method, Method 84, the present disclosure provides a method as provided in any one of Methods 1, 8, 14, 21, or 24-80, wherein the one or more RNP is delivered to the cell by electroporation.

[0561] In another method, Method 85, the present disclosure provides a method as provided in any one of Methods 1-84, wherein the BCL11A gene is located on Chromosome 2: 60,451,167-60,553,567 (Genome Reference Consortium—GRCh38).

[0562] In another method, Method 86, the present disclosure provides a method as provided in any one of Methods 1-85, wherein the hemoglobinopathy is selected from a group consisting of sickle cell anemia and thalassemia (a, B, 8, Y, and combinations thereof).

[0563] In another method, Method 87, the present disclosure provides a method as provided in any one of Methods 1-86, wherein the editing within or near a BCL11A gene or other DNA sequence that encodes a regulatory element of the BCL11A gene can reduce BCL11A gene expression.

[0564] In a first composition, Composition 1, the present disclosure provides one or more guide ribonucleic acids (gRNAs) for editing a BCL11A gene in a cell from a patient with a hemoglobinopathy, the one or more gRNAs comprising a spacer sequence selected from the group consisting of nucleic acid sequences in SEQ ID NOs: 1-71,947 of the Sequence Listing.

[0565] In another composition, Composition 2, the present disclosure provides the one or more gRNAs of Composition 1, wherein the one or more gRNAs are one or more single-molecule guide RNAs (sgRNAs).

[0566] In another composition, Composition 3, the present disclosure provides the one or more gRNAs or sgRNAs of Compositions 1 or 2, wherein the one or more gRNAs or one or more sgRNAs is one or more modified gRNAs or one or more modified sgRNAs.

[0567] In another composition, Composition 4, the present disclosure provides the one or more sgRNAs of Composition 3, wherein the one or more modified sgRNAs comprises three 2′-O-methyl-phosphorothioate residues at or near each of its 5′ and 3′ ends.

[0568] In another composition, Composition 5, the present disclosure provides the one or more sgRNAs of Composition 3, wherein the one or more modified sgRNAs comprises the nucleic acid sequence of SEQ ID NO: 71,959.

[0569] In another composition, Composition 6, the present disclosure provides a single-molecule guide RNA (sgRNA) comprising the nucleic acid sequence of SEQ ID NO: 71,959.

### Definitions

[0570] The term “comprising” or “comprises” is used in reference to compositions, methods, and respective component(s) thereof, that are essential to the invention, yet open to the inclusion of unspecified elements, whether essential or not.

[0571] The term “consisting essentially of” refers to those elements required for a given aspect. The term permits the presence of additional elements that do not materially affect the basic and novel or functional characteristic(s) of that aspect of the invention.

[0572] The term “consisting of” refers to compositions, methods, and respective components thereof as described herein, which are exclusive of any element not recited in that description of the aspect.

[0573] The singular forms “a,” “an,” and “the” include plural references, unless the context clearly dictates otherwise.

[0574] Any numerical range recited in this specification describes all sub-ranges of the same numerical precision (i.e., having the same number of specified digits) subsumed within the recited range. For example, a recited range of “1.0 to 10.0” describes all sub-ranges between (and including) the recited minimum value of 1.0 and the recited maximum value of 10.0, such as, for example, “2.4 to 7.6,” even if the range of “2.4 to 7.6” is not expressly recited in the text of the specification. Accordingly, the Applicant reserves the right to amend this specification, including the claims, to expressly recite any sub-range of the same numerical precision subsumed within the ranges expressly recited in this specification. All such ranges are inherently described in this specification such that amending to expressly recite any such sub-ranges will comply with written description, sufficiency of description, and added matter requirements, including the requirements under 35 U.S.C. § 112(a) and Article 123(2) EPC. Also, unless expressly specified or otherwise required by context, all numerical parameters described in this specification (such as those expressing values, ranges, amounts, percentages, and the like) may be read as if prefaced by the word “about,” even if the word “about” does not expressly appear before a number. Additionally, numerical parameters described in this specification should be construed in light of the number of reported significant digits, numerical precision, and by applying ordinary rounding techniques. It is also understood that numerical parameters described in this specification will necessarily possess the inherent variability characteristic of the underlying measurement techniques used to determine the numerical value of the parameter.

### EXAMPLES

[0575] The invention will be more fully understood by reference to the following examples, which provide illustrative non-limiting aspects of the invention.

[0576] The examples describe the use of the CRISPR system as an illustrative genome editing technique to create defined genomic deletions, insertions, or replacements, termed “genomic modifications” herein, within or near the BCL11A gene or other DNA sequence that encodes a regulatory element of the BCL11A gene that lead to a permanent deletion, modulation, or inactivation of a transcriptional control sequence of the BCL11A gene. Introduction of the defined therapeutic modifications represents a novel therapeutic strategy for the potential amelioration of a hemoglobinopathy, as described and illustrated herein.

### Example 1—CRISPR/SpCas9 Target Sites for the Transcriptional Control Sequence of the BCL11A Gene

[0577] Regions of the 12.4 kb transcriptional control sequence of the BCL11A gene were scanned for target sites. Each area was scanned for a protospacer adjacent motif (PAM) having the sequence NRG. gRNA 20 bp spacer sequences corresponding to the PAM were identified, as shown in SEQ ID NOs: 1-29,482 of the Sequence Listing.

### Example 2—CRISPR/SaCas9 Target Sites for the Transcriptional Control Sequence of the BCL11A Gene

[0578] Regions of the 12.4 kb transcriptional control sequence of the BCL11A gene were scanned for target sites. Each area was scanned for a protospacer adjacent motif (PAM) having the sequence NNGRRT. gRNA 20 bp spacer sequences corresponding to the PAM were identified, as shown in SEQ ID NOs: 29,483-32,387 of the Sequence Listing.

### Example 3—CRISPR/StCas9 Target Sites for the Transcriptional Control Sequence of the BCL11A Gene

[0579] Regions of the 12.4 kb transcriptional control sequence of the BCL11A gene were scanned for target sites. Each area was scanned for a protospacer adjacent motif (PAM) having the sequence NNAGAAW. gRNA 20 bp spacer sequences corresponding to the PAM were identified, as shown in SEQ ID NOs: 32,388-33,420 of the Sequence Listing.

### Example 4—CRISPR/TdCas9 Target Sites for the Transcriptional Control Sequence of the BCL11A Gene

[0580] Regions of the 12.4 kb transcriptional control sequence of the BCL11A gene were scanned for target sites. Each area was scanned for a protospacer adjacent motif (PAM) having the sequence NAAAAC. gRNA 20 bp spacer sequences corresponding to the PAM were identified, as shown in SEQ ID NOs: 33,421-33,851 of the Sequence Listing.

### Example 5—CRISPR/NmCas9 Target Sites for the Transcriptional Control Sequence of the BCL11A Gene

[0581] Regions of the 12.4 kb transcriptional control sequence of the BCL11A gene were scanned for target sites. Each area was scanned for a protospacer adjacent motif (PAM) having the sequence NNNNGHTT. gRNA 20 bp spacer sequences corresponding to the PAM were identified, as shown in SEQ ID NOs: 33,852-36,731 of the Sequence Listing.

### Example 6—CRISPR/Cpf1 Target Sites for the Transcriptional Control Sequence of the BCL11A Gene

[0582] Regions of the 12.4 kb transcriptional control sequence of the BCL11A gene were scanned for target sites. Each area was scanned for a protospacer adjacent motif (PAM) having the sequence YTN. gRNA 22 bp spacer sequences corresponding to the PAM were identified, as shown in SEQ ID NOs: 36,732-71,947 of the Sequence Listing.

### Example 7—Bioinformatics Analysis of the Guide Strands

[0583] Candidate guides will be screened and selected in a multi-step process that involves both theoretical binding and experimentally assessed activity. By way of illustration, candidate guides having sequences that match a particular on-target site, such as a site within the transcriptional control sequence of the BCL11A gene, with adjacent PAM can be assessed for their potential to cleave at off-target sites having similar sequences, using one or more of a variety of bioinformatics tools available for assessing off-target binding, as described and illustrated in more detail below, in order to assess the likelihood of effects at chromosomal positions other than those intended. Candidates predicted to have relatively lower potential for off-target activity can then be assessed experimentally to measure their on-target activity, and then off-target activities at various sites. Preferred guides have sufficiently high on-target activity to achieve desired levels of gene editing at the selected locus, and relatively lower off-target activity to reduce the likelihood of alterations at other chromosomal loci. The ratio of on-target to off-target activity is often referred to as the “specificity” of a guide.

[0584] For initial screening of predicted off-target activities, there are a number of bioinformatics tools known and publicly available that can be used to predict the most likely off-target sites; and since binding to target sites in the CRISPR/Cas9/Cpf1 nuclease system is driven by Watson-Crick base pairing between complementary sequences, the degree of dissimilarity (and therefore reduced potential for off-target binding) is essentially related to primary sequence differences: mismatches and bulges, i.e. bases that are changed to a non-complementary base, and insertions or deletions of bases in the potential off-target site relative to the target site. An exemplary bioinformatics tool called COSMID (CRISPR Off-target Sites with Mismatches, Insertions and Deletions) (available on the web at crispr.bme.gatech.edu) compiles such similarities. Other bioinformatics tools include, but are not limited to, GUIDO, autoCOSMID, and CCtop.

[0585] Bioinformatics were used to minimize off-target cleavage in order to reduce the detrimental effects of mutations and chromosomal rearrangements. Studies on CRISPR/Cas9 systems suggested the possibility of high off-target activity due to nonspecific hybridization of the guide strand to DNA sequences with base pair mismatches and/or bulges, particularly at positions distal from the PAM region. Therefore, it is important to have a bioinformatics tool that can identify potential off-target sites that have insertions and/or deletions between the RNA guide strand and genomic sequences, in addition to base-pair mismatches. The bioinformatics-based tool, COSMID (CRISPR Off-target Sites with Mismatches, Insertions and Deletions) was therefore used to search genomes for potential CRISPR off-target sites (available on the web at crispr.bre.gatech.edu). COSMID output ranked lists of the potential off-target sites based on the number and location of mismatches, allowing more informed choice of target sites, and avoiding the use of sites with more likely off-target cleavage.

[0586] Additional bioinformatics pipelines were employed that weigh the estimated on- and/or off-target activity of gRNA targeting sites in a region. Other features that may be used to predict activity include information about the cell type in question, DNA accessibility, chromatin state, transcription factor binding sites, transcription factor binding data, and other CHIP-seq data. Additional factors are weighed that predict editing efficiency, such as relative positions and directions of pairs of gRNAs, local sequence features and micro-homologies.

### Example 8—Testing of Preferred Guides in Cells for On-Target Activity

[0587] The gRNAs predicted to have the lowest off-target activity will then be tested for on-target activity in K562 cells, and evaluated for indel frequency using TIDE.

[0588] TIDE is a web tool to rapidly assess genome editing by CRISPR-Cas9 of a target locus determined by a guide RNA (gRNA or sgRNA). Based on quantitative sequence trace data from two standard capillary sequencing reactions, the TIDE software quantifies the editing efficacy and identifies the predominant types of insertions and deletions (indels) in the DNA of a targeted cell pool. See Brinkman et al, Nucl. Acids Res. (2014) for a detailed explanation and examples. An alternative method is Next-generation sequencing (NGS), also known as high-throughput sequencing, which is the catch-all term used to describe a number of different modern sequencing technologies including: Illumina (Solexa) sequencing, Roche 454 sequencing, Ion torrent: Proton/PGM sequencing, and SOLID sequencing. These recent technologies allow one to sequence DNA and RNA much more quickly and cheaply than the previously used Sanger sequencing, and as such have revolutionized the study of genomics and molecular biology.

[0589] Transfection of tissue culture cells, allows screening of different constructs and a robust means of testing activity and specificity. Tissue culture cell lines, such as K562 or HEK293T are easily transfected and result in high activity. These or other cell lines will be evaluated to determine the cell lines that match with CD34+ and provide the best surrogate. These cells will then be used for many early stage tests. For example, individual gRNAs for S. pyogenes Cas9 can be transfected into the cells using plasmids, such as, for example, CTx-1, CTx-2, or CTx-3 described in FIG. 1A-1C, which are suitable for expression in human cells. Alternatively, commercially available vectors may also be used. For the Indel Freq assessment of the BCL11A gRNAs described herein, a commercially available Cas9 expression plasmid (GeneArt, Thermo Fisher) was employed. Several days later (48 hrs for this experiment), the genomic DNA was harvested and the target site amplified by PCR. The cutting activity was measured by the rate of insertions, deletions and mutations introduced by NHEJ repair of the free DNA ends. Although this method cannot differentiate correctly repaired sequences from uncleaved DNA, the level of cutting can be gauged by the amount of mis-repair. Off-target activity can be observed by amplifying identified putative off-target sites and using similar methods to detect cleavage. Translocation can also be assayed using primers flanking cut sites, to determine if specific cutting and translocations happen. Un-guided assays have been developed allowing complementary testing of off-target cleavage including guide-seq. The gRNA or pairs of gRNA with significant activity can then be followed up in cultured cells to measure the modulation or inactivation of the +58 DNA hypersensitive site (DHS) within the transcriptional control sequence of the BCL11A gene. Off-target events can be followed again. Similarly CD34+ cells can be transfected and the level of modulation or inactivation of the +58 DNA hypersensitive site (DHS) within the transcriptional control sequence of the BCL11A gene and possible off-target events measured. These experiments allow optimization of nuclease and donor design and delivery.

### Example 9—Testing of Preferred Guides in Cells for Off-Target Activity

[0590] The gRNAs having the best on-target activity from the TIDE and next generation sequencing studies in the above example will then be tested for off-target activity using whole genome sequencing. Candidate gRNAs will be more completely evaluated in CD34+ cells or iPSCs.

### Example 10—Testing of Preferred gRNA Combinations in Cells

[0591] The gRNAs having the best on-target activity from the TIDE and next generation sequencing studies and lowest off-target activity will be tested in combinations to evaluate the size of the deletion resulting from the use of each gRNA combination. Potential gRNA combinations will be evaluated in primary human CD34+ cells.

[0592] For example, gRNA combinations will be tested for efficiency of deleting all or a portion of the transcriptional control sequence of the BCL11A gene. The gRNA combinations will also be tested for efficiency of deleting all or a portion of the +58 DNA hypersensitive site (DHS) of the BCL11A gene.

### Example 11—Testing Different Approaches for HDR Gene Editing

[0593] After testing the gRNAs for both on-target activity and off-target activity, modulation/inactivation and knock-in strategies will be tested for HDR gene editing.

[0594] For the modulation/inactivation approach, donor DNA template will be provided as a short single-stranded oligonucleotide, a short double-stranded oligonucleotide (PAM sequence intact/PAM sequence mutated), a long single-stranded DNA molecule (PAM sequence intact/PAM sequence mutated) or a long double-stranded DNA molecule (PAM sequence intact/PAM sequence mutated). The donor DNA template will comprise either a wild-type BCL11A gene or cDNA comprising a modified transcriptional control sequence or a wild-type BCL11A gene or cDNA comprising a modified (e.g. mutated)+58 DNA hypersensitive site (DHS). In addition, the donor DNA template will be delivered by AAV.

[0595] For the cDNA knock-in approach, a single-stranded or double-stranded DNA may include more than 40 nt of the modified transcriptional control sequence of the BCL11A gene. The single-stranded or double-stranded DNA may include more than 80 nt of the modified transcriptional control sequence of the BCL11A gene. The single-stranded or double-stranded DNA may include more than 100 nt of the modified transcriptional control sequence of the BCL11A gene. The single-stranded or double-stranded DNA may include more than 150 nt of the modified transcriptional control sequence of the BCL11A gene. The single-stranded or double-stranded DNA may include more than 300 nt of the modified transcriptional control sequence of the BCL11A gene. The single-stranded or double-stranded DNA may include more than 400 nt of the modified transcriptional control sequence of the BCL11A gene. Alternatively, the DNA template will be delivered by AAV.

[0596] For the cDNA knock-in approach, a single-stranded or double-stranded DNA may include more than 40 nt of the modified +58 DNA hypersensitive site (DHS) of the BCL11A gene. The single-stranded or double-stranded DNA may include more than 80 nt of the modified +58 DNA hypersensitive site (DHS) of the BCL11A gene. The single-stranded or double stranded DNA may include more than 100 nt of the modified +58 DNA hypersensitive site (DHS) of the BCL11A gene. The single-stranded or double-stranded DNA may include more than 150 nt of the modified +58 DNA hypersensitive site (DHS) of the BCL11A gene. The single-stranded or double-stranded DNA may include more than 300 nt of the modified +58 DNA hypersensitive site (DHS) of the BCL11A gene. The single-stranded or double-stranded DNA may include more than 400 nt of the modified +58 DNA hypersensitive site (DHS) of the BCL11A gene. Alternatively, the DNA template will be delivered by AAV.

### Example 12—Re-Assessment of Lead CRISPR-Cas9/DNA Donor Combinations

[0597] After testing the different strategies for HDR gene editing, the lead CRISPR-Cas9/DNA donor combinations will be re-assessed in primary human cells for efficiency of deletion, recombination, and off-target specificity. Cas9 mRNA or RNP will be formulated into lipid nanoparticles for delivery, sgRNAs will be formulated into nanoparticles or delivered as AAV, and donor DNA will be formulated into nanoparticles or delivered as AAV.

### Example 13—In Vivo Testing in Relevant Animal Model

[0598] After the CRISPR-Cas9/DNA donor combinations have been re-assessed, the lead formulations will be tested in vivo in an animal model.

[0599] Culture in human cells allows direct testing on the human target and the background human genome, as described above.

[0600] Preclinical efficacy and safety evaluations can be observed through engraftment of modified mouse or human CD34+ cells in NSG or similar mice. The modified cells can be observed in the months after engraftment.

### Example 14—Editing Cells with Various gRNAs

[0601] Mobilized human peripheral blood CD34+ cells from human donors 1-3 were cultured in serum free StemSpan Medium with CD34+ expansion supplement for two days. 100,000 cells were washed and electroporated using Cas9 mRNA with Corfu Large (CLO) gRNAs, Corfu Small (CSO) gRNAs, HPFH5 gRNAs, Kenya gRNAs, SD2 sgRNA, or SPY101 sgRNA. Cells were allowed to recover for two days before being switched to an erythroid differentiation medium (IMDM+Glutamax supplemented with 5% human serum, 10 μg/ml insulin, 20 ng/ml SCF, 5 ng/ml IL-3, 3U/ml EPO, 1 uM dexamethasone, 1 uM β-estradiol, 330 μg/ml holo-transferrin and 2 U/ml heraprin). The percentage of insertions/deletions (“indels”) was determined for each of the cells electroporated with Corfu Large (CLO) gRNAs, cells electroporated with Corfu Small (CSO) gRNAs, cells electroporated with HPFH5 gRNAs, cells electroporated with Kenya gRNAs, cells electroporated with SD2 sgRNA, and the cells electroporated with SPY101 sgRNA (FIG. 3), as described in the “On- and off-target mutation detection by sequence” and “Mutation detection assays” sections described herein. After differentiating these cells for 12 days in erythroid differentiation medium, RNA was collected to assess hemoglobin levels by quantitative real-time-PCR (FIGS. 4A-4C).

[0602] Single erythroid progenitors were generated using flow cytometry one day later and cultured in the erythroid differentiation medium to expand and grow as colonies. Each colony was split and collected 12 days post-sorting for DNA and RNA analysis. The sister colonies were collected 15 days post-sorting for the analysis of hemoglobin proteins. Globin expression (ratio of γ/18sRNA or ratio of γ/α) was determined by quantitative real-time PCR and compared for each of the edited erythroid colonies (FIGS. 5A-5B).

### Example 15—Testing of SPY101 sgRNA

[0603] Three possible gene editing outcomes may occur within intron 2 of the BCL11A gene when using SPY101 sgRNA. The first gene editing outcome that may occur when using SPY101 sgRNA results in only indels in both alleles (Indel/Indel, FIG. 6). The second gene editing outcome that may occur when using SPY101 sgRNA results in a clone with both indels and wild-type sequences in the two alleles (Indel/WT, FIG. 6). The third gene editing outcome that may occur when using SPY101 sgRNA results in a colony with wild-type sequences in both alleles (WT/WT, FIG. 6).

[0604] When using SPY101 sgRNA, 92% of the erythroid colonies were edited. For example, 92% of the erythroid colonies had alleles with indels (FIG. 6).

[0605] γ-globin expression (γ/α globin mRNA ratio or γ/(γ+β) globin mRNA ratio) was measured in single erythroid colonies edited with SPY101 (FIGS. 7A-B). The single erythroid colonies included colonies with biallelic or homozygous indel (indel/indel), colonies with a monoallelic or heterozygous indel (indel/WT), and colonies with wild-type sequences in both alleles (WT/WT). The erythroid colonies having indels were able to express higher levels of gamma globin compared to the clones with wild-type sequences in both alleles (FIGS. 7A-B).

### Example 16—Therapeutic Strategy for Sickle Cell Disease (SCD) and β-Thalassemia

[0606] The following Table (Table 4) provides information related to the gRNAs used in Examples 16-17.

TABLE 4

| | | | SEQ |
|---|---|---|---|
| | | | ID |
| gRNA | Name | Sequence | NO. |
| gRNA A | CL01 | 5′usgsusGUGCUGGCCCGCAACUUGU | 71950 |
| | | UUUAGAGCUAGAAAUAGCAAGUUAAAA | |
| | | UAAGGCUAGUCCGUUAUCAACUUGAA | |
| | | AAAGUGGCACCGAGUCGGUGCusuSus | |
| | | U3′ | |
| gRNA B | CL08 | 5′cscscsACUCAAGAGAUAUGGUGGU | 71951 |
| | | UUUAGAGCUAGAAAUAGCAAGUUAAAA | |
| | | UAAGGCUAGUCCGUUAUCAACUUGAAA | |
| | | AAGUGGCACCGAGUCGGUGCusususU | |
| | | 3′ | |
| gRNA C | CS02 | 5′gsusasGACCACCAGUAAUCUGAGU | 71952 |
| | | UUUAGAGOUAGAAAUAGCAAGUUAAAA | |
| | | UAAGGCUAGUCCGUUAUCAACUUGAAA | |
| | | AAGUGGCACCGAGUCGGUGCUSUsusU | |
| | | 3′ | |
| gRNA D | CS06 | 5′asgsusAUACCUCCCAUACCAUGGU | 71953 |
| | | UUUAGAGOUAGAAAUAGCAAGUUAAAA | |
| | | UAAGGCUAGUCCGUUAUCAACUUGAAA | |
| | | AAGUGGCACOGAGUCGGUGCusususU | |
| | | 3′ | |
| gRNA E | HPFH5-15 | 5′csusgsUCUUAUUACCCUGUCAUGU | 71954 |
| | | UUUAGAGCUAGAAAUAGCAAGUUAAAA | |
| | | UAAGGCUAGUCCGUUAUCAACUUGAAA | |
| | | AAGUGGCACCGAGUCGGUGCusususU | |
| | | 3′ | |
| gANA F | HPFH5-4 | 5′ascsusGAGUUCUAAAAUCAUCGGU | 71955 |
| | | UUUAGAGCUAGAAAUAGCAAGUUAAAA | |
| | | UAAGGCUAGUCCGUUAUCAACUUGAAA | |
| | | AAGUGGCACCGAGUCGGUGCusususU | |
| | | 3′ | |
| gANA G | Kenya 02 | 5′gsuscsUUCAGCCUACAACAUACGU | 71956 |
| | | UUUAGAGCUAGAAAUAGCAAGUUAAAA | |
| | | UAAGGCUAGUCCGUUAUCAACUUGAAA | |
| | | AAGUGGCACCGAGUCGGUGCusususU | |
| | | 3′ | |
| gRNA H | Kenya 17 | 5′gsususAAGUUCAUGUCAUAGGAGU | 71957 |
| | | UUUAGAGCUAGAAAUAGCAAGUUAAAA | |
| | | UAAGGCUAGUCCGUUAUCAACUUGAA | |
| | | AAAGUGGCACCGAGUCGGUGCUSUSus | |
| | | U3′ | |
| gRNA I | SD2 | 5′csususGUCAAGGCUAUUGGUCAGU | 71958 |
| | | UUUAGAGCUAGAAAUAGCAAGUUAAAA | |
| | | UAAGGCUAGUCCGUUAUCAACUUGAA | |
| | | AAAGUGGCACCGAGUCGGUGCUSUSUS | |
| | | U3′ | |
| gRNA J | SPY | 5′csusasACAGUUGCUUUUAUCACGU | 71959 |
| | | UUUAGAGOUAGAAAUAGCAAGUUAAAA | |
| | | UAAGGCUAGUCCGUUAUCAACUUGAAA | |
| | | AAGUGGCACCGAGUCGGUGCusususU | |
| | | 3′ | |

a, g, u: 2′-O-methyl residues
s: phosphorothioate
A, C, G, U: RNA residues

[0607] The following Table (Table 5) provides information related to the targets referred to in Examples 16-17.

TABLE 5

| | |
|---|---|
| Target 1 | Corfu Large |
| Target 2 | Corfu Small |
| Target 3 | HPFH5 |
| Target 4 | KENYA |
| Target 5 | SD2 |
| Target 6 | SPY101 |

[0608] A therapeutic strategy for SCD and β-thalassemia used CRISPR/Cas9 to re-create the same genetic mutations that occur naturally in HPFH patients. Patients' hematopoietic stem cells were isolated, these cells were treated ex vivo with CRISPR/Cas9 to create HPFH genetic edits, and then the edited cells were reintroduced into the patients. The genetically modified stem cells gave rise to erythrocytes that contain sufficient levels of HBF to significantly reduce the severity of disease symptoms. A number of genetic edits have been prioritized based on the degree of HBF upregulation seen in nature, the ability to re-create theses edits at high efficiency using CRISPR/Cas9, and the absence of off target editing.

[0609] Candidate guide RNA (gRNA) sequences were computationally selected and then screened for on-target editing efficacy in CD34+ cells. Shown in FIG. 8 are the results of one such screen. gRNAs were identified with consistent, high (>70%) on target editing across multiple donor samples. Each CD34+ cell donor is represented by a unique symbol (▴, *, ●) and on-target editing efficiency for each donor is measured twice.

[0610] Candidate gRNAs were screened in CD34+ cells for off-target activity by examining hundreds of sites computationally identified to be most similar in sequence to the intended on-target site, and thus have the highest potential for off-target activity. FIGS. 9A-B shows the experimental approach (FIG. 9A) and results (FIG. 9B) for each of the gRNAs tested in FIG. 8. Most gRNAs displayed no detectable off-target activity, even at predicted sites. Only gRNA C and gRNA G show off-target activity. Multiple probes were used for each predicted site to increase assay sensitivity.

[0611] Candidate gRNAs were used to re-create specific HPFH or other modifications in erythroid cells obtained from SCD and β-thalassemia patients, as well as from healthy donors. After erythroid differentiation, globin transcript levels were measured to assess the increase in γ-globin relative to α- or β-globin. Shown in FIGS. 10A-B, greater than 30% γ-globin mRNA levels were observed in patient cells edited with gRNAs to re-create HPFH Target 5 and 6. SCD and β-thalassemia patient samples exhibited a larger absolute increase in γ-globin than those from healthy donors, consistent with the observation of higher HbF in patients than in heterozygote carriers with HPFH. The background level for mock treated cells from each donor was subtracted from the values shown. Data represent a single experiment, except for SCD patient data which represent the mean of 3 different donor samples. Editing efficiency was similar for all experiments.

[0612] To ensure that editing efficiencies in the bulk CD34+ population were representative of those in long-term repopulating HSCs (LT-HSC), bulk CD34+ cells were sorted into specific sub-populations and assayed for on-target editing efficiency as shown in FIGS. 11A-C. High editing efficiency in the LT-HSC population was observed. Experiments were done using SPY101 and Cas9 protein across 4 donors. Bars depict Mean #SEM. LT-HSC, Long Term Hematopoietic Stem Cell; MPP. Multipotent Progenitor; MLP, Multilymphoid Progenitor; CMP, Common Myeloid Progenitor; MEP, Megakaryocyte Erythrocyte Progenitor; GMP, Granulocyte Macrophage Progenitor.

[0613] In vivo engraftment studies were performed in immunocompromised mice to confirm that the gene-edited HSPCs retain the potential for long-term repopulation of the hematopoietic system. Human CD34+ cells from healthy donors were untreated, unedited, or gene-edited using SPY101 gRNA and introduced into NSG mice. As shown in FIG. 12, the presence of similar levels of hCD45RA+ cells (at 8-weeks post-engraftment) in mice injected with untreated/unedited HSPCs and mice injected with SPY101 gene-edited HSPCs confirmed that the SPY101 edited cells retained engraftment potential. Data points represent individual animals and depict the percentage of live cells that were human CD45RA+. Mean±SD. “Untreated” represents HSPCs that were not electroporated and injected into immunocompromised mice. “Unedited” represents HSPCs that were electroporated, but not gene-edited and injected into immunocompromised mice. “SPY101” represents HSPCs that were electroporated with Cas9 and SPY101 gRNA and injected into immunocompromised mice.

[0614] Process development was initiated at a GMP-capable facility in preparation for clinical studies. As shown in FIG. 13, no significant loss of gene editing efficacy was observed at clinical scale in a GMP-compatible process. Data was average across 4 or more experiments, +SD.

[0615] GLP/toxicology studies have been initiated for our lead candidates, as shown in FIG. 14. Two separate studies in NSG mice will allow for a comprehensive characterization of biodistribution and toxicology of edited CD34+ cells.

### Example 17—Therapeutic Strategy for Sickle Cell Disease (SCD) and β-Thalassemia

[0616] Results from recreation of six different HPFH variants, or editing “targets”, in human mPB CD34+ cells are shown in FIGS. 16A-B and FIG. 17. The CD34+ cells were treated with CRISPR/Cas9, differentiated into erythrocytes, and then assayed for HBF mRNA and protein expression in bulk (FIGS. 16A-B) and colonies (FIG. 17), using an experimental process demonstrated in FIG. 15.

[0617] The results presented in FIGS. 16A-B were from 3 different donors for targets 1-3, and 7 different donors for targets 4-6. The background level for mock treated cells had been subtracted. Data is mean #SEM. Bulk analysis confirmed HBF upregulation and allowed for the prioritization of targets that demonstrated the highest levels of HBF.

[0618] Clonal analysis presented in FIG. 17 allowed confirmation that genetic edits caused by CRISPR/Cas9 were indeed the cause of the increase in HBF at the individual cell level. Results were from a single donor, and 50-80 colonies per target. mRNA transcript levels were measured by qRT-PCR. Data is mean±SEM.

[0619] Targets 5 and 6 displayed the highest HBF levels and were further analyzed in FIGS. 18A-B. Data is mean #SEM. WT denotes colonies that do not show evidence of gene editing, Heterozygous or Het denotes colonies with one allele edited, and Homozygous or Homo denotes colonies with both alleles edited. The evidence in FIGS. 16A-B, 17, and 18A-B support the causal relationship between the genetic edits produced, and the desired upregulation of HBF, providing further validation for the proposed therapeutic strategy.

### Example 18—Testing of Preferred Guide RNAs in Cells for On-Targeting Activity

[0620] Mobilized human peripheral blood (mPB) CD34+ cells from four independent donors were cultured in serum free CellGro® media including 100 ng/ml recombinant human stem cell factor (SCF), 100 ng/ml recombinant human Fit 3-Ligand (FLT3L), and 100 ng/ml Thrombopoietin (TPO). 200,000 cells per donor were washed and electroporated using Lonza electroporator without any CRISPR/Cas9 editing components (mock electroporation sample), with GFP gRNA and Cas9 protein as a negative control (GFP), with SPY101 gRNA and Cas9 protein (SPY), with SD2 gRNA and Cas9 protein (SD2), or dual BCL11A Exon 2 gRNAs and Cas9 protein (Ex2). The recombinant Cas9 protein encodes for S. pyogenes Cas9 flanked by two SV40 nuclear localization sequences (NLSs). These experiments were performed using a ribonucleoprotein (RNP) 1:1 weight ratio of gRNA to Cas9. The SPY101 gRNA creates an InDel disruption of DHS+58 Gata1 binding site in intron 2 of the BCL11a locus. The SD2 gRNA creates InDels and a 4.9 Kb deletion in the human beta globin locus. The 4.9 Kb deletion is located upstream of HBG1 and includes the entire HBG2 sequence. The 4.9 Kb deletion starts 168 bp 5′ to the HBG2 coding sequence and ends 168 bp 5′ to the HBG1 coding sequence. The Exon 2 gRNAs create a 196 bp deletion on Exon 2 of the BCL11A locus and served as a positive control. Human mPB CD34+ cells that were not electroporated served as a negative control (no EP).

[0621] After electroporation, the gene-edited mPB CD34+ cells were allowed to recover for two days before being switched to an erythroid differentiation medium (IMDM+L-glutamine supplemented with 5% human serum, 10 μg/mL insulin, 20 ng/ml. SCF, 5 ng/ml IL-3, 3 U/mL EPO, 1 uM dexamethasone, 330 μg/ml holo-transferrin and 2 U/mL heparin). The gene-edited mPB CD34+ cells were differentiated into erythrocytes and further tested via TIDE analysis, ddPCR analysis, quantitative real-time PCR analysis, FACS, and LC-MS (FIGS. 20A-B, 21A-D, 22A-B, and 23A-D). The overall experimental process is demonstrated in FIG. 19.

### TIDE Analysis/ddPCR Analysis

[0622] Genomic DNA was isolated and tested for each of the gene-edited human mPB CD34+ cell samples grown in differentiation medium. Genomic DNA was isolated from the cells on days 1, 11, 13 and 15 post-differentiation. The genomic DNA was analyzed via TIDE analysis, which is a web tool to rapidly assess genome editing by CRISPR-Cas9 of a target locus determined by a guide RNA (gRNA or sgRNA). The results presented in FIGS. 20A-B were from 4 different donors and demonstrated that the percentage of gene editing was maintained throughout ex-vivo erythroid differentiation of mPB CD34+ cells edited with SD2 gRNA (FIG. 20B) and mPB CD34+ cells edited with SPY101 gRNA (FIG. 20A). Data is mean±SD.

[0623] The genomic DNA was also analyzed via ddPCR analysis to detect 4.9 kb deletion frequency with SD2 treatment. The results presented in FIG. 20B were from 4 different donors and demonstrated that the percentage of gene editing was maintained throughout ex-vivo erythroid differentiation of mPB CD34+ cells edited with SD2 gRNA (FIG. 20B). Data is mean±SD.

### Quantitative Real-Time PCR Analysis

[0624] mRNA was isolated and tested for each of the gene-edited human mPB CD34+ cell samples grown in differentiation medium. mRNA isolation was performed on days 11 and 15 post-differentiation. Globin expression (ratio of γ/α and ratio of γ/(γ+β)) was determined by quantitative real-time PCR and compared for each of the human mPB CD34+ cells edited with SD2 gRNA and human mPB CD34+ cells edited with SPY101 gRNA (FIGS. 21A-D). The results presented in FIGS. 21A-D were from 4 different donors and demonstrated an increase in γ-globin transcript in human mPB CD34+ cells edited with SD2 gRNA and human mPB CD34+ cells edited with SPY101 gRNA compared to negative control. Data is mean±SD.

### FACS/LC-MS

[0625] Human mPB CD34+ cells edited with SD2 gRNA and human mPB CD34+ cells edited with SPY101 gRNA were grown in differentiation medium for 15 days. Human mPB CD34+ cells were also edited with dual BCL11A Exon 2 gRNAs (Ex2) or GFP gRNA and grown in differentiation medium for 15 days. Some human mPB CD34+ cells were not edited with any CRISPR/Cas9 editing components (mock electroporation sample) and some human mPB CD34+ cells were not electroporated (no EP). The live cells were stained with Glycophorin A, a erythroid maturation marker. The cells were then fixed and permeabilized. The fixed cells were stained with fluorophore-conjugated antibody for each globin subunit. The stained cells were then analyzed via FACS, an example of γ-globin represented in FIG. 22A. The average median fluorescent intensity for γ-globin from 4 different donors are depicted in FIG. 22B (mean±SEM) and demonstrated an upregulation in γ-globin in human mPB CD34+ cells edited with SD2 gRNA and human mPB CD34+ cells edited with SPY101 gRNA.

[0626] Human mPB CD34+ cells edited with SD2 gRNA and mPB CD34+ cells edited with SPY101 gRNA were grown in differentiation medium for 15 days. Human mPB CD34+ cells were also edited with dual BCL11A Exon 2 gRNAs (Ex2) or GFP gRNA and grown in differentiation medium for 15 days. Some human mPB CD34+ cells were not edited with any CRISPR/Cas9 editing components (mock electroporation sample) and some human mPB CD34+ cells were not electroporated (no EP). Liquid chromatography-mass spectrometry (LC-MS) was used to detect denatured globin monomers (FIGS. 23A-D). The results presented in FIGS. 23A-D were from 4 different donors and also demonstrated an upregulation in γ-globin in mPB CD34+ cells edited with SD2 gRNA and mPB CD34+ cells edited with SPY101 gRNA. Data is mean±SD.

### Example 19—Testing of Preferred Guide RNAs in Cells for Off-Targeting Activity

[0627] While on-target editing of the genome is fundamental to a successful therapy, the detection of any off-target editing events is an important component of ensuring product safety. One method for detecting modifications at off-target sites involves enriching for regions of the genome that are most similar to the on-target site via hybrid capture sequencing and quantifying any indels that are detected.

[0628] Hybrid capture sequencing is a method that quantifies off-target edits in CRISPR-Cas9 edited cells and DNA. Details related to the hybrid capture sequencing method are as follows:

### Materials and Methods

### Materials and Sources

### 1.1.1. Genomic DNA

[0629] As the purpose of this method is to determine if editing by CRISPR-Cas9 has occurred at off-target sites in the genome at least two input samples are typically used—treated and control (untreated, mock electroporated, etc.) samples. Each sample has genomic DNA (gDNA) extracted by an appropriated method and that gDNA is hybridized with the hybrid capture libraries (1.1.2) followed by the remainder of the protocol as described below.

### 1.1.2. Hybrid Capture Libraries

[0630] Hybrid capture libraries as described in (1.2.2) are generated by providing a list of up to 57,000 120-mer oligonucleotide bait sequences which are then synthesized as a custom SureSelect XT hybrid capture kit.

### 1.2 Methods

### 1.2.1. Off-Target Site Detection Algorithms

[0631] To determine the sites that are most likely to have off-target editing we use several algorithms with different features to ensure a wide-range of off-target sites were covered.

### 1.1.1.1. CCTop

[0632] For a given guide sequence CCTop uses the Bowtie 1 sequence mapping algorithm to search the genome for off-target sites with up to 5 mismatch between the site and the guide. We refer to these site as “homologous off-target sites” (rather than “predicted off-target sites”) since only sequence homology is used to determine the potential off-target sites in the genome. These 5 mismatches are limited to no more than 2 mismatches in the 5 base alignment seed region closest to the PAM end of the sequences. The CRISPOR algorithm (1.2.1.2) does not have the limitation in the seed region and thus complements CCTop.

### 1.2.1.1. COSMID

[0633] Since some off-target Cas9 cleavage sites may have a short indels (also referred to as bulges) between themselves and the guide, we also search with the COSMID algorithm that can detect off-target sites with indels (typically limited to up to 2 indels) and thus complements the search done with CCTop.

### 1.2.1.2. CRISPOR

[0634] CRISPOR is a tool that implements many different published CRISPR on- and off-target scoring functions for the purpose of comparing various methods. It uses the BWA algorithm for searching guide sequences against the genome to find their off-target sites. This differs from Bowtie 1 algorithm used in CCTop and allows for a search that is slightly more permissive in that mismatches near the PAM region are not limited to 2 out of 5 bases as in CCTop.

### 30) 1.2.1.3. PAMs

[0635] By default, screens are done with a search for guides with an NGG or NAG PAMs as they have some of the greatest activity. Later stage screens may include more PAMs to ensure that no off-target sites, even those with very low activity, are missed.

### 1.2.1.4. Combination of Algorithms

[0636] The guides output by each algorithm are joined together to eliminate identical off-target sites and fed into the hybrid capture bait design component.

### 1.2.2. Hybrid Capture Baits

### 1.2.2.1 Design

[0637] The list of sites produced by the off-target site detection algorithms (1.2.1.) are then used to generate hybrid capture probes that will enrich for each of the off-target sites in the input gDNA samples. Although one bait may be sufficient to successfully enrich for a target DNA sequence, several baits are generally designed and tiled across the target site (FIG. 24) in order to make it more likely that a bait specifically pulls down a target region even if it is flanked on a side by repetitive sequence that may be difficult to bind specifically. Hybrid capture baits (120-mers, dark colored portions) tiled across a bait (20-mer, light portion denoted by the *) (FIG. 24).

### 1.2.3. Sequencing

[0638] After hybrid capture enrichment, sequencing is done on an Illumina HiSeq sequencer with paired-end 125 bp reads and a 175 bp insert size. Sequencing is typically done to target a depth of coverage that targets having 5 reads detected from a minimal frequency event. To detect for example 0.5% indel events, sequencing to 1000× coverage is performed so that an 0.5% event might have 5 reads.

### 1.2.4. Bait Effectiveness

[0639] In a typical experiment we find that baits cover the large majority of the target sites with high levels of sequencing coverage. There are some limitations to the sequencing coverage that may be achieved by next-generation sequencing (NGS) methods due to: high or low % GC, low-complexity sequences, low bait affinity, bait non-specificity, and other reasons. The actual power to detect indels in an experiment is estimated by calculating the sampling power of different sequencing coverage for sites with different true indel frequencies. Generally, increased sequence coverage provides increased power to detect sites with low-frequency indels. For example, if a site has 2500× sequencing coverage, hybrid capture will have 99% power to see sites with 0.4% indel frequency, and 94% power to see sites with 0.3% indel frequency (FIG. 25).

### 1.2.5. Quantification

[0640] Sequencing data is aligned with the BWA algorithm using default parameters to the human genome build hg38. For each potential off-target site, all indels within 3 bp of the potential Cas9 cleavage site are counted and divided by the coverage at the cut site and thus provides a quantity of indels at a particular cut site.

### 1.2.6. Statistical Assessment of Significant Cut Sites

[0641] Various events can lead to indels that are not a result of CRISPR-Cas9 being detected at sites throughout the genome: germline indel variants or polymorphisms, regions susceptible to genomic breaks, regions with homopolymer runs, and regions that are otherwise difficult to sequence

1.2.6.1. Sites Excluded from Analysis

[0642] We exclude from analysis: any sites with a “germline” indel on a donor-by-donor basis (donor has >30% indel frequency in every sample), any chromosome Y sites in female samples, and any sites with 0 coverage.

### 1.2.6.2. Statistical Test

[0643] To assess whether an indel seen at a potential off-target site is truly a CRISPR-Cas9 induced event, we test whether the samples treated with Cas9 and guide have a significantly higher frequency of indels than the untreated samples using both Mann-Whitney Wilcoxon test and Student's t-test. If either of these tests is significant (p <0.05) we consider the site flagged for follow-up with PCR to determine if there is significant editing. To ensure that we flag sites for follow-up as aggressively as possible, we do not perform multiple hypothesis testing correction, which would decrease the number of sites that we find significant.

[0644] We also establish a negative control analysis, where we repeat the analysis, except we look for sites with higher frequency of indels in the untreated sample than the treated sample. Biologically, there is no reason we would expect to find “true hits” in this analysis, which provides us empirical information about the number of false positives we can expect to find in this dataset that can be attributable to background noise. Furthermore, we can expand this into an empirical null distribution by leveraging an additional two negative control samples, including cells electroporated with no Cas9 or guide, and cells electroporated with Cas9 and a GFP guide. By testing for hits in samples that are “less treated” compared to samples that are “more treated”, we determine a conservative empirical null distribution of false positive hits, which can be used to inform the believability of the hits in our original analysis for treated vs untreated samples.

[0645] Human mPB CD34+ cells edited with SD2 gRNA and human mPB CD34+ cells edited with SPY101 gRNA were analyzed via a hybrid capture sequencing method described herein. The results presented in FIGS. 26-27 were from 3-4 different donors and demonstrated 0 off-target sites with evidence of cutting in gene-edited mPB CD34+ cells, which were edited with SD2 gRNA (FIG. 27) and gene-edited mPB CD34+ cells edited with SPY101 gRNA (FIG. 26). The indel frequency for round 1 is greater than (>) 0.5%. The indel frequency for round 2 is greater than (>) 0.2%.

### Example 20—Engraftment Experiments

[0646] Mobilized human peripheral blood (mPB) CD34+ cells were isolated from healthy donors using CliniMACS CD34 microbeads with the CliniMACS Prodigy (Miltenyi Biotec) and cultured in serum free CellGro #media including 100 ng/ml recombinant human stem cell factor (SCF), 100 ng/ml recombinant human Fit 3-Ligand (FLT3L), and 100 ng/ml Thrombopoietin (TPO). The cells were then electroporated using a Maxcyte® device following the manufacture's instructions with one of the following: an empty vector that does not contain any CRISPR/Cas9 editing components (mock electroporation sample), with GFP gRNA and Cas9 protein as a negative control (GFP), with SPY101 gRNA and Cas9 protein (SPY101), or with SD2 gRNA and Cas9 protein (SD2). The recombinant Cas9 protein encodes for S. pyogenes Cas9 flanked by two SV40 nuclear localization sequences (NLSs). These experiments were performed using a ribonucleoprotein (RNP) 1:1 weight ratio of gRNA to Cas9.

[0647] Each of the gene-edited mPB CD34+ human cells were injected via tail vein into 16 immunodeficient mice (“NSG” or NOD scid gamma—NOD) to demonstrate homing and engraftment capabilities. NSG is a strain of inbred laboratory mice and among the most immunodeficient described to date; see, e.g., Shultz et al., Nat. Rev. Immunol. 7(2): 118-130 (2007). Details related to the engraftment experiment are presented in FIG. 28. At 8-weeks post injection, the NSG mice were bled and the peripheral blood was analyzed via FACS for human CD45RA+ and mouse CD45+ live cells. At 16-weeks post injection, the NSG mice were sacrificed, and the bone marrow, spleen, and peripheral blood were analyzed via FACS for human CD45RA+ and mouse CD45+ live cells. Engraftment of mPB CD34+ human cells in irradiated NSG mice in all treatment groups was observed from all three healthy donors. Human CD45RA+ cells were detected using FACS in all 3 hematopoetic organs from all donors. Untransfected CD34+ control cells exhibited slightly better engraftment percentages. All transfected cell groups had similar engraftment percentages, including the mock transfected group across all 3 healthy donors. In general, the addition of Cas9-gRNA RNP did not affect engraftment as compared to the mock transfection control (FIGS. 29A-E and FIG. 30). Data points in FIGS. 29A-E represent individual mice and depict the percentage of live cells that were human CD45RA+ cells. Data is mean±SEM.

### Example 21—Assessing SPY101 Editing Efficiency and Efficacy Using Cas9 RNP

[0648] In order to achieve the highest efficacy using CRISPR-Cas9 for treating SCD and β-thalassemia using SPY101, we assessed two different Cas9 formats, Cas9 mRNA or Cas9 protein, for their editing efficiency, efficacy and toxicity in human CD34+ cells from mobilized peripheral blood (mPB). We compared various sources for Cas9 mRNA to Cas9 protein by electroporating Cas9 mRNA and SPY101 gRNA or Cas9 protein complexed with SPY101 gRNA (as ribonucleoprotein (RNP) complex) into human mPB CD34+ cells and assessed for their editing efficiency and cellular viability at 48 hours post-electroporation. We compared various sources for Cas9 mRNA to Cas9 protein and found that while we can achieve similar levels of editing efficiency between some Cas9 mRNA to Cas9 protein (FIG. 31), most had significantly lower cell viability compared to control samples (No electroporation (No EP) or No substrate electroporation (Mock EP) controls) shown in FIGS. 32A-B, This indicates that Cas9 RNP is the best format to use for efficient delivery of Cas9 and gRNA into human mPB CD34+ cells.

[0649] We next compared different sources of Cas9 protein as well as Cas9 protein with varying number of nuclear localization signal (NLS) at either N or C-terminus as this can affect efficient localization of Cas9 into the nucleus to afford editing. Shown in FIGS. 33A-C, we found that Aldevron Cas9 protein with one NLS at both N and C terminus gave the best editing efficiency with no change in cell viability.

[0650] Next, we compiled SPY101 editing efficiency examined across various human mPB CD34+ donors using either Cas9 mRNA or Cas9 protein (Feldan or Aldevron chosen from previous example) and observed that Aldevron Cas9 protein resulted in the highest editing efficacy (FIG. 34A). Furthermore, we were able to achieve similar rates of editing efficiency in GMP-compatible manufacturing at clinical scale using Cas9 protein (FIG. 34B).

[0651] We next examined SPY101 efficacy across several CD34+ donors derived from mPB (FIGS. 35A-B) or bone marrow (BM, FIGS. 36A-B). We see that throughout our optimization process, we achieved better efficacy, measured as γ-globin expression to xx-globin or to β-globin like globins (β-globin+γ-globin) by quantitative real-time PCR in erythroid differentiated CD34+ cells.

[0652] We then investigated whether SPY101 would be efficacious in cells obtained from SCD or β-thalassemia patients. Peripheral blood mononuclear cells from healthy donors or patients were electroporated with SPY101 Cas9 RNP and erythroid differentiated similar to examples above prior to extracting RNA to measure γ-globin expression. We see that SPY101 was indeed efficacious in γ-globin increase in patient samples (FIGS. 37A-B).

[0653] In order to better understand a genotype to phenotype relationship in SPY101 edited erythroid cells, we performed single colony analysis similar to Example 15 with Cas9 RNP and found that this increase a greater fraction of bi-allelic edited colonies using Cas9 RNP compared to Cas9 mRNA (FIGS. 38A-B). Furthermore, detailed breakdown of unedited colonies, mono-allelic disruption of GATA1 binding site targeted by SPY101 and bi-allelic disruption of GATA1 binding site revealed in dose-dependent efficacy of SPY101, measured as γ-globin increase compared to control GFP gRNA treated cells (FIGS. 39A-B).

[0654] To examine the percentage of cells expressing γ-globin, we performed FACS analysis in SPY101 Cas9 RNP edited CD34+ cells from human mPB. Compared to control GFP gRNA treated cells, we see a higher percentage of erythroid differentiated cells expressing γ-globin (FIGS. 40A-D), as well as an increase of γ-globin expression per cell (FIG. 40E) in SPY101 treated cells.

### Note Regarding Illustrative Examples

[0655] While the present disclosure provides descriptions of various specific aspects for the purpose of illustrating various aspects of the present invention and/or its potential applications, it is understood that variations and modifications will occur to those skilled in the art. Accordingly, the invention or inventions described herein should be understood to be at least as broad as they are claimed, and not as more narrowly defined by particular illustrative aspects provided herein.

[0656] Any patent, publication, or other disclosure material identified herein is incorporated by reference into this specification in its entirety unless otherwise indicated, but only to the extent that the incorporated material does not conflict with existing descriptions, definitions, statements, or other disclosure material expressly set forth in this specification. As such, and to the extent necessary, the express disclosure as set forth in this specification supersedes any conflicting material incorporated by reference. Any material, or portion thereof, that is said to be incorporated by reference into this specification, but which conflicts with existing definitions, statements, or other disclosure material set forth herein, is only incorporated to the extent that no conflict arises between that incorporated material and the existing disclosure material. Applicants reserve the right to amend this specification to expressly recite any subject matter, or portion thereof, incorporated by reference herein.

The application's sequence listing, which the Patent Office published only in electronic form, follows.

SEQUENCE LISTING (71962 sequences)

SEQ ID NO: 1 - DNA, 20 bp, synthetic construct
  misc_feature 1..20: note = chemically synthesized
  source 1..20: mol_type = other DNA
tttttttcacactgtgatct

SEQ ID NO: 2 - DNA, 20 bp, synthetic construct
  misc_feature 1..20: note = chemically synthesized
  source 1..20: mol_type = other DNA
ttttttcacactgtgatctt

SEQ ID NO: 3 - DNA, 20 bp, synthetic construct
  misc_feature 1..20: note = chemically synthesized
  source 1..20: mol_type = other DNA
taggtacttcacttaatctt

SEQ ID NO: 4 - DNA, 20 bp, synthetic construct
  misc_feature 1..20: note = chemically synthesized
  source 1..20: mol_type = other DNA
aggtacttcacttaatcttt

SEQ ID NO: 5 - DNA, 20 bp, synthetic construct
  misc_feature 1..20: note = chemically synthesized
  source 1..20: mol_type = other DNA
attattctgatctctaaaat

SEQ ID NO: 6 - DNA, 20 bp, synthetic construct
  misc_feature 1..20: note = chemically synthesized
  source 1..20: mol_type = other DNA
tctctaaaatgagtgattac

SEQ ID NO: 7 - DNA, 20 bp, synthetic construct
  misc_feature 1..20: note = chemically synthesized
  source 1..20: mol_type = other DNA
ctctaaaatgagtgattact

SEQ ID NO: 8 - DNA, 20 bp, synthetic construct
  misc_feature 1..20: note = chemically synthesized
  source 1..20: mol_type = other DNA
actaggattcctttcaactt

SEQ ID NO: 9 - DNA, 20 bp, synthetic construct
  misc_feature 1..20: note = chemically synthesized
  source 1..20: mol_type = other DNA
ttcttttcttatctaattta

SEQ ID NO: 10 - DNA, 20 bp, synthetic construct
  misc_feature 1..20: note = chemically synthesized
  source 1..20: mol_type = other DNA
tatctaatttatagaatcac

SEQ ID NO: 11 - DNA, 20 bp, synthetic construct
  misc_feature 1..20: note = chemically synthesized
  source 1..20: mol_type = other DNA
atctaatttatagaatcaca

SEQ ID NO: 12 - DNA, 20 bp, synthetic construct
  misc_feature 1..20: note = chemically synthesized
  source 1..20: mol_type = other DNA
tgattctatcatgtatataa

SEQ ID NO: 13 - DNA, 20 bp, synthetic construct
  misc_feature 1..20: note = chemically synthesized
  source 1..20: mol_type = other DNA
gtatataaaagtattctata

SEQ ID NO: 14 - DNA, 20 bp, synthetic construct
  misc_feature 1..20: note = chemically synthesized
  source 1..20: mol_type = other DNA
aaaagtattctataaagctt

SEQ ID NO: 15 - DNA, 20 bp, synthetic construct
  misc_feature 1..20: note = chemically synthesized
  source 1..20: mol_type = other DNA
tataaagcttaagtacttcc

SEQ ID NO: 16 - DNA, 20 bp, synthetic construct
  misc_feature 1..20: note = chemically synthesized
  source 1..20: mol_type = other DNA
ataaagcttaagtacttcct

SEQ ID NO: 17 - DNA, 20 bp, synthetic construct
  misc_feature 1..20: note = chemically synthesized
  source 1..20: mol_type = other DNA
aaagcttaagtacttcctgg

SEQ ID NO: 18 - DNA, 20 bp, synthetic construct
  misc_feature 1..20: note = chemically synthesized
  source 1..20: mol_type = other DNA
ggagcattttttaaaataca

SEQ ID NO: 19 - DNA, 20 bp, synthetic construct
  misc_feature 1..20: note = chemically synthesized
  source 1..20: mol_type = other DNA
tttttaaaatacaaagcaaa

SEQ ID NO: 20 - DNA, 20 bp, synthetic construct
  misc_feature 1..20: note = chemically synthesized
  source 1..20: mol_type = other DNA
taaaatacaaagcaaaaaga

SEQ ID NO: 21 - DNA, 20 bp, synthetic construct
  misc_feature 1..20: note = chemically synthesized
  source 1..20: mol_type = other DNA
aaaatacaaagcaaaaagaa

SEQ ID NO: 22 - DNA, 20 bp, synthetic construct
  misc_feature 1..20: note = chemically synthesized
  source 1..20: mol_type = other DNA
aagcaaaaagaaaggccatg

SEQ ID NO: 23 - DNA, 20 bp, synthetic construct
  misc_feature 1..20: note = chemically synthesized
  source 1..20: mol_type = other DNA
aaggccatgtggttcgtaat

SEQ ID NO: 24 - DNA, 20 bp, synthetic construct
  misc_feature 1..20: note = chemically synthesized
  source 1..20: mol_type = other DNA
aagatatcctaatttaaact

SEQ ID NO: 25 - DNA, 20 bp, synthetic construct
  misc_feature 1..20: note = chemically synthesized
  source 1..20: mol_type = other DNA
tatcctaatttaaactaaga

SEQ ID NO: 26 - DNA, 20 bp, synthetic construct
  misc_feature 1..20: note = chemically synthesized
  source 1..20: mol_type = other DNA
tttaaactaagatagaaaaa

SEQ ID NO: 27 - DNA, 20 bp, synthetic construct
  misc_feature 1..20: note = chemically synthesized
  source 1..20: mol_type = other DNA
aaacagacaatgactgcttc

SEQ ID NO: 28 - DNA, 20 bp, synthetic construct
  misc_feature 1..20: note = chemically synthesized
  source 1..20: mol_type = other DNA
tgactgcttctggattttac

SEQ ID NO: 29 - DNA, 20 bp, synthetic construct
  misc_feature 1..20: note = chemically synthesized
  source 1..20: mol_type = other DNA
ctgcttctggattttactgg

SEQ ID NO: 30 - DNA, 20 bp, synthetic construct
  misc_feature 1..20: note = chemically synthesized
  source 1..20: mol_type = other DNA
ttctggattttactggaagt

SEQ ID NO: 31 - DNA, 20 bp, synthetic construct
  misc_feature 1..20: note = chemically synthesized
  source 1..20: mol_type = other DNA
tggattttactggaagtgag

SEQ ID NO: 32 - DNA, 20 bp, synthetic construct
  misc_feature 1..20: note = chemically synthesized
  source 1..20: mol_type = other DNA
tccatgacttaatgtaactc

SEQ ID NO: 33 - DNA, 20 bp, synthetic construct
  misc_feature 1..20: note = chemically synthesized
  source 1..20: mol_type = other DNA
ccatgacttaatgtaactcc

SEQ ID NO: 34 - DNA, 20 bp, synthetic construct
  misc_feature 1..20: note = chemically synthesized
  source 1..20: mol_type = other DNA
catgacttaatgtaactcca

SEQ ID NO: 35 - DNA, 20 bp, synthetic construct
  misc_feature 1..20: note = chemically synthesized
  source 1..20: mol_type = other DNA
atgacttaatgtaactccag

SEQ ID NO: 36 - DNA, 20 bp, synthetic construct
  misc_feature 1..20: note = chemically synthesized
  source 1..20: mol_type = other DNA
ctccaggggaatgcaaactg

SEQ ID NO: 37 - DNA, 20 bp, synthetic construct
  misc_feature 1..20: note = chemically synthesized
  source 1..20: mol_type = other DNA
ccaggggaatgcaaactgaa

SEQ ID NO: 38 - DNA, 20 bp, synthetic construct
  misc_feature 1..20: note = chemically synthesized
  source 1..20: mol_type = other DNA
ctgaagagtactgtctctcc

SEQ ID NO: 39 - DNA, 20 bp, synthetic construct
  misc_feature 1..20: note = chemically synthesized
  source 1..20: mol_type = other DNA
tgaagagtactgtctctcct

SEQ ID NO: 40 - DNA, 20 bp, synthetic construct
  misc_feature 1..20: note = chemically synthesized
  source 1..20: mol_type = other DNA
agagtactgtctctcctagg

SEQ ID NO: 41 - DNA, 20 bp, synthetic construct
  misc_feature 1..20: note = chemically synthesized
  source 1..20: mol_type = other DNA
tactgtctctcctaggcagt

SEQ ID NO: 42 - DNA, 20 bp, synthetic construct
  misc_feature 1..20: note = chemically synthesized
  source 1..20: mol_type = other DNA
ctgtctctcctaggcagtca

SEQ ID NO: 43 - DNA, 20 bp, synthetic construct
  misc_feature 1..20: note = chemically synthesized
  source 1..20: mol_type = other DNA
tgtctctcctaggcagtcag

SEQ ID NO: 44 - DNA, 20 bp, synthetic construct
  misc_feature 1..20: note = chemically synthesized
  source 1..20: mol_type = other DNA
tctcctaggcagtcagagga

SEQ ID NO: 45 - DNA, 20 bp, synthetic construct
  misc_feature 1..20: note = chemically synthesized
  source 1..20: mol_type = other DNA
atataatattgtttctctgc

SEQ ID NO: 46 - DNA, 20 bp, synthetic construct
  misc_feature 1..20: note = chemically synthesized
  source 1..20: mol_type = other DNA
aatattgtttctctgctggt

SEQ ID NO: 47 - DNA, 20 bp, synthetic construct
  misc_feature 1..20: note = chemically synthesized
  source 1..20: mol_type = other DNA
atattgtttctctgctggtt

SEQ ID NO: 48 - DNA, 20 bp, synthetic construct
  misc_feature 1..20: note = chemically synthesized
  source 1..20: mol_type = other DNA
tctctgctggttaggaactc

SEQ ID NO: 49 - DNA, 20 bp, synthetic construct
  misc_feature 1..20: note = chemically synthesized
  source 1..20: mol_type = other DNA
gaactcaagatgaactcttg

SEQ ID NO: 50 - DNA, 20 bp, synthetic construct
  misc_feature 1..20: note = chemically synthesized
  source 1..20: mol_type = other DNA
ctcaagatgaactcttgaag

SEQ ID NO: 51 - DNA, 20 bp, synthetic construct
  misc_feature 1..20: note = chemically synthesized
  source 1..20: mol_type = other DNA
tcaagatgaactcttgaaga

SEQ ID NO: 52 - DNA, 20 bp, synthetic construct
  misc_feature 1..20: note = chemically synthesized
  source 1..20: mol_type = other DNA
agatgaactcttgaagaagg

SEQ ID NO: 53 - DNA, 20 bp, synthetic construct
  misc_feature 1..20: note = chemically synthesized
  source 1..20: mol_type = other DNA
gatgaactcttgaagaagga

SEQ ID NO: 54 - DNA, 20 bp, synthetic construct
  misc_feature 1..20: note = chemically synthesized
  source 1..20: mol_type = other DNA
ggaaggtgtgcttgcatcac

SEQ ID NO: 55 - DNA, 20 bp, synthetic construct
  misc_feature 1..20: note = chemically synthesized
  source 1..20: mol_type = other DNA
gcttgcatcaccagttattt

SEQ ID NO: 56 - DNA, 20 bp, synthetic construct
  misc_feature 1..20: note = chemically synthesized
  source 1..20: mol_type = other DNA
agttattttggaacttccac

SEQ ID NO: 57 - DNA, 20 bp, synthetic construct
  misc_feature 1..20: note = chemically synthesized
  source 1..20: mol_type = other DNA
tccttcacactatactccaa

SEQ ID NO: 58 - DNA, 20 bp, synthetic construct
  misc_feature 1..20: note = chemically synthesized
  source 1..20: mol_type = other DNA
ccttcacactatactccaaa

SEQ ID NO: 59 - DNA, 20 bp, synthetic construct
  misc_feature 1..20: note = chemically synthesized
  source 1..20: mol_type = other DNA
ttcacactatactccaaaag

SEQ ID NO: 60 - DNA, 20 bp, synthetic construct
  misc_feature 1..20: note = chemically synthesized
  source 1..20: mol_type = other DNA
ctatactccaaaaggagtca

SEQ ID NO: 61 - DNA, 20 bp, synthetic construct
  misc_feature 1..20: note = chemically synthesized
  source 1..20: mol_type = other DNA
caaaaggagtcaaagctatg

SEQ ID NO: 62 - DNA, 20 bp, synthetic construct
  misc_feature 1..20: note = chemically synthesized
  source 1..20: mol_type = other DNA
aaagctatgtggcatactgt

SEQ ID NO: 63 - DNA, 20 bp, synthetic construct
  misc_feature 1..20: note = chemically synthesized
  source 1..20: mol_type = other DNA
tatgtggcatactgtaagaa

SEQ ID NO: 64 - DNA, 20 bp, synthetic construct
  misc_feature 1..20: note = chemically synthesized
  source 1..20: mol_type = other DNA
tactgtaagaacagaaccaa

SEQ ID NO: 65 - DNA, 20 bp, synthetic construct
  misc_feature 1..20: note = chemically synthesized
  source 1..20: mol_type = other DNA
tctaatcctactattacttc

SEQ ID NO: 66 - DNA, 20 bp, synthetic construct
  misc_feature 1..20: note = chemically synthesized
  source 1..20: mol_type = other DNA
ctaatcctactattacttcc

SEQ ID NO: 67 - DNA, 20 bp, synthetic construct
  misc_feature 1..20: note = chemically synthesized
  source 1..20: mol_type = other DNA
taatcctactattacttccg

SEQ ID NO: 68 - DNA, 20 bp, synthetic construct
  misc_feature 1..20: note = chemically synthesized
  source 1..20: mol_type = other DNA
gggacactgatttataaaat

SEQ ID NO: 69 - DNA, 20 bp, synthetic construct
  misc_feature 1..20: note = chemically synthesized
  source 1..20: mol_type = other DNA
taaaataagaattataaaat

SEQ ID NO: 70 - DNA, 20 bp, synthetic construct
  misc_feature 1..20: note = chemically synthesized
  source 1..20: mol_type = other DNA
aaaataagaatttttaaaaa

SEQ ID NO: 71 - DNA, 20 bp, synthetic construct
  misc_feature 1..20: note = chemically synthesized
  source 1..20: mol_type = other DNA
aaataagaatttttaaaaat

SEQ ID NO: 72 - DNA, 20 bp, synthetic construct
  misc_feature 1..20: note = chemically synthesized
  source 1..20: mol_type = other DNA
tttaaaaataggaataaata

SEQ ID NO: 73 - DNA, 20 bp, synthetic construct
  misc_feature 1..20: note = chemically synthesized
  source 1..20: mol_type = other DNA
tcaacgcatacaaaacctga

SEQ ID NO: 74 - DNA, 20 bp, synthetic construct
  misc_feature 1..20: note = chemically synthesized
  source 1..20: mol_type = other DNA
aagatattcctgaccacttg

SEQ ID NO: 75 - DNA, 20 bp, synthetic construct
  misc_feature 1..20: note = chemically synthesized
  source 1..20: mol_type = other DNA
agatattcctgaccacttga

SEQ ID NO: 76 - DNA, 20 bp, synthetic construct
  misc_feature 1..20: note = chemically synthesized
  source 1..20: mol_type = other DNA
gatattcctgaccacttgaa

SEQ ID NO: 77 - DNA, 20 bp, synthetic construct
  misc_feature 1..20: note = chemically synthesized
  source 1..20: mol_type = other DNA
tcctgaccacttgaagggct

SEQ ID NO: 78 - DNA, 20 bp, synthetic construct
  misc_feature 1..20: note = chemically synthesized
  source 1..20: mol_type = other DNA
ggttttaatctgaatgctct

SEQ ID NO: 79 - DNA, 20 bp, synthetic construct
  misc_feature 1..20: note = chemically synthesized
  source 1..20: mol_type = other DNA
tgaatgctcttggaaactcc

SEQ ID NO: 80 - DNA, 20 bp, synthetic construct
  misc_feature 1..20: note = chemically synthesized
  source 1..20: mol_type = other DNA
ctcttggaaactccaagcaa

SEQ ID NO: 81 - DNA, 20 bp, synthetic construct
  misc_feature 1..20: note = chemically synthesized
  source 1..20: mol_type = other DNA
aaactccaagcaaaagtgcc

SEQ ID NO: 82 - DNA, 20 bp, synthetic construct
  misc_feature 1..20: note = chemically synthesized
  source 1..20: mol_type = other DNA
tgcccagaaaatatgctgcc

SEQ ID NO: 83 - DNA, 20 bp, synthetic construct
  misc_feature 1..20: note = chemically synthesized
  source 1..20: mol_type = other DNA
gcccagaaaatatgctgcca

SEQ ID NO: 84 - DNA, 20 bp, synthetic construct
  misc_feature 1..20: note = chemically synthesized
  source 1..20: mol_type = other DNA
gaaaatatgctgccaaggtt

SEQ ID NO: 85 - DNA, 20 bp, synthetic construct
  misc_feature 1..20: note = chemically synthesized
  source 1..20: mol_type = other DNA
aaaatatgctgccaaggttt

SEQ ID NO: 86 - DNA, 20 bp, synthetic construct
  misc_feature 1..20: note = chemically synthesized
  source 1..20: mol_type = other DNA
aaatatgctgccaaggtttg

SEQ ID NO: 87 - DNA, 20 bp, synthetic construct
  misc_feature 1..20: note = chemically synthesized
  source 1..20: mol_type = other DNA
ctgccaaggtttggggcact

SEQ ID NO: 88 - DNA, 20 bp, synthetic construct
  misc_feature 1..20: note = chemically synthesized
  source 1..20: mol_type = other DNA
caaggtttggggcactcagt

SEQ ID NO: 89 - DNA, 20 bp, synthetic construct
  misc_feature 1..20: note = chemically synthesized
  source 1..20: mol_type = other DNA
tggggcactcagttagacct

SEQ ID NO: 90 - DNA, 20 bp, synthetic construct
  misc_feature 1..20: note = chemically synthesized
  source 1..20: mol_type = other DNA
ggcactcagttagacctcag

SEQ ID NO: 91 - DNA, 20 bp, synthetic construct
  misc_feature 1..20: note = chemically synthesized
  source 1..20: mol_type = other DNA
gttagacctcagcagattcc

SEQ ID NO: 92 - DNA, 20 bp, synthetic construct
  misc_feature 1..20: note = chemically synthesized
  source 1..20: mol_type = other DNA
caagattgcactccttgcct

SEQ ID NO: 93 - DNA, 20 bp, synthetic construct
  misc_feature 1..20: note = chemically synthesized
  source 1..20: mol_type = other DNA
agattgcactccttgcctaa

SEQ ID NO: 94 - DNA, 20 bp, synthetic construct
  misc_feature 1..20: note = chemically synthesized
  source 1..20: mol_type = other DNA
agttttctttaaatgatcac

SEQ ID NO: 95 - DNA, 20 bp, synthetic construct
  misc_feature 1..20: note = chemically synthesized
  source 1..20: mol_type = other DNA
tgaaacaattatttctcaaa

SEQ ID NO: 96 - DNA, 20 bp, synthetic construct
  misc_feature 1..20: note = chemically synthesized
  source 1..20: mol_type = other DNA
gaaacaattatttctcaaac

SEQ ID NO: 97 - DNA, 20 bp, synthetic construct
  misc_feature 1..20: note = chemically synthesized
  source 1..20: mol_type = other DNA
caggctgatattcaacatgc

SEQ ID NO: 98 - DNA, 20 bp, synthetic construct
  misc_feature 1..20: note = chemically synthesized
  source 1..20: mol_type = other DNA
atattcaacatgctggatgc

SEQ ID NO: 99 - DNA, 20 bp, synthetic construct
  misc_feature 1..20: note = chemically synthesized
  source 1..20: mol_type = other DNA
tattcaacatgctggatgct

SEQ ID NO: 100 - DNA, 20 bp, synthetic construct
  misc_feature 1..20: note = chemically synthesized
  source 1..20: mol_type = other DNA
atgctggatgctgggtgctg

SEQ ID NO: 101 - DNA, 20 bp, synthetic construct
  misc_feature 1..20: note = chemically synthesized
  source 1..20: mol_type = other DNA
tgctggatgctgggtgctgc

SEQ ID NO: 102 - DNA, 20 bp, synthetic construct
  misc_feature 1..20: note = chemically synthesized
  source 1..20: mol_type = other DNA
gctggatgctgggtgctgca

SEQ ID NO: 103 - DNA, 20 bp, synthetic construct
  misc_feature 1..20: note = chemically synthesized
  source 1..20: mol_type = other DNA
ctggatgctgggtgctgcag

SEQ ID NO: 104 - DNA, 20 bp, synthetic construct
  misc_feature 1..20: note = chemically synthesized
  source 1..20: mol_type = other DNA
ctgggtgctgcaggggcttt

SEQ ID NO: 105 - DNA, 20 bp, synthetic construct
  misc_feature 1..20: note = chemically synthesized
  source 1..20: mol_type = other DNA
agtgtctttctctcccatca

SEQ ID NO: 106 - DNA, 20 bp, synthetic construct
  misc_feature 1..20: note = chemically synthesized
  source 1..20: mol_type = other DNA
atcatggaccccaattctaa

SEQ ID NO: 107 - DNA, 20 bp, synthetic construct
  misc_feature 1..20: note = chemically synthesized
  source 1..20: mol_type = other DNA
tctaacagaccttttttata

SEQ ID NO: 108 - DNA, 20 bp, synthetic construct
  misc_feature 1..20: note = chemically synthesized
  source 1..20: mol_type = other DNA
atacagtgtaataatctgtc

SEQ ID NO: 109 - DNA, 20 bp, synthetic construct
  misc_feature 1..20: note = chemically synthesized
  source 1..20: mol_type = other DNA
tacagtgtaataatctgtcc

SEQ ID NO: 110 - DNA, 20 bp, synthetic construct
  misc_feature 1..20: note = chemically synthesized
  source 1..20: mol_type = other DNA
tgtaataatctgtccgggcg

SEQ ID NO: 111 - DNA, 20 bp, synthetic construct
  misc_feature 1..20: note = chemically synthesized
  source 1..20: mol_type = other DNA
aataatctgtccgggcgcgg

SEQ ID NO: 112 - DNA, 20 bp, synthetic construct
  misc_feature 1..20: note = chemically synthesized
  source 1..20: mol_type = other DNA
gtggcttacacctgtaatcc

SEQ ID NO: 113 - DNA, 20 bp, synthetic construct
  misc_feature 1..20: note = chemically synthesized
  source 1..20: mol_type = other DNA
cacctgtaatcccagcactt

SEQ ID NO: 114 - DNA, 20 bp, synthetic construct
  misc_feature 1..20: note = chemically synthesized
  source 1..20: mol_type = other DNA
acctgtaatcccagcacttt

SEQ ID NO: 115 - DNA, 20 bp, synthetic construct
  misc_feature 1..20: note = chemically synthesized
  source 1..20: mol_type = other DNA
ctgtaatcccagcactttgg

SEQ ID NO: 116 - DNA, 20 bp, synthetic construct
  misc_feature 1..20: note = chemically synthesized
  source 1..20: mol_type = other DNA
tgtaatcccagcactttggg

SEQ ID NO: 117 - DNA, 20 bp, synthetic construct
  misc_feature 1..20: note = chemically synthesized
  source 1..20: mol_type = other DNA
tcccagcactttgggaggcc

SEQ ID NO: 118 - DNA, 20 bp, synthetic construct
  misc_feature 1..20: note = chemically synthesized
  source 1..20: mol_type = other DNA
cccagcactttgggaggccg

SEQ ID NO: 119 - DNA, 20 bp, synthetic construct
  misc_feature 1..20: note = chemically synthesized
  source 1..20: mol_type = other DNA
agcactttgggaggccgagg

SEQ ID NO: 120 - DNA, 20 bp, synthetic construct
  misc_feature 1..20: note = chemically synthesized
  source 1..20: mol_type = other DNA
gcactttgggaggccgaggc

SEQ ID NO: 121 - DNA, 20 bp, synthetic construct
  misc_feature 1..20: note = chemically synthesized
  source 1..20: mol_type = other DNA
ctttgggaggccgaggcagg

SEQ ID NO: 122 - DNA, 20 bp, synthetic construct
  misc_feature 1..20: note = chemically synthesized
  source 1..20: mol_type = other DNA
ggccgaggcaggtggctcat

SEQ ID NO: 123 - DNA, 20 bp, synthetic construct
  misc_feature 1..20: note = chemically synthesized
  source 1..20: mol_type = other DNA
gccgaggcaggtggctcatg

SEQ ID NO: 124 - DNA, 20 bp, synthetic construct
  misc_feature 1..20: note = chemically synthesized
  source 1..20: mol_type = other DNA
aggcaggtggctcatgaggt

SEQ ID NO: 125 - DNA, 20 bp, synthetic construct
  misc_feature 1..20: note = chemically synthesized
  source 1..20: mol_type = other DNA
ggcaggtggctcatgaggtc

SEQ ID NO: 126 - DNA, 20 bp, synthetic construct
  misc_feature 1..20: note = chemically synthesized
  source 1..20: mol_type = other DNA
caggtggctcatgaggtcag

SEQ ID NO: 127 - DNA, 20 bp, synthetic construct
  misc_feature 1..20: note = chemically synthesized
  source 1..20: mol_type = other DNA
gctcatgaggtcaggagttc

SEQ ID NO: 128 - DNA, 20 bp, synthetic construct
  misc_feature 1..20: note = chemically synthesized
  source 1..20: mol_type = other DNA
tgaggtcaggagttcgagac

SEQ ID NO: 129 - DNA, 20 bp, synthetic construct
  misc_feature 1..20: note = chemically synthesized
  source 1..20: mol_type = other DNA
cgagaccagcctgaccaaca

SEQ ID NO: 130 - DNA, 20 bp, synthetic construct
  misc_feature 1..20: note = chemically synthesized
  source 1..20: mol_type = other DNA
tctactaaaaatacaaaaat

SEQ ID NO: 131 - DNA, 20 bp, synthetic construct
  misc_feature 1..20: note = chemically synthesized
  source 1..20: mol_type = other DNA
ctaaaaatacaaaaattagc

SEQ ID NO: 132 - DNA, 20 bp, synthetic construct
  misc_feature 1..20: note = chemically synthesized
  source 1..20: mol_type = other DNA
taaaaatacaaaaattagcc

SEQ ID NO: 133 - DNA, 20 bp, synthetic construct
  misc_feature 1..20: note = chemically synthesized
  source 1..20: mol_type = other DNA
aaatacaaaaattagccagg

SEQ ID NO: 134 - DNA, 20 bp, synthetic construct
  misc_feature 1..20: note = chemically synthesized
  source 1..20: mol_type = other DNA
gtggtacgcacctgtaatcc

SEQ ID NO: 135 - DNA, 20 bp, synthetic construct
  misc_feature 1..20: note = chemically synthesized
  source 1..20: mol_type = other DNA
cacctgtaatcccagccact

SEQ ID NO: 136 - DNA, 20 bp, synthetic construct
  misc_feature 1..20: note = chemically synthesized
  source 1..20: mol_type = other DNA
acctgtaatcccagccactc

SEQ ID NO: 137 - DNA, 20 bp, synthetic construct
  misc_feature 1..20: note = chemically synthesized
  source 1..20: mol_type = other DNA
ctgtaatcccagccactcag

SEQ ID NO: 138 - DNA, 20 bp, synthetic construct
  misc_feature 1..20: note = chemically synthesized
  source 1..20: mol_type = other DNA
tgtaatcccagccactcagg

SEQ ID NO: 139 - DNA, 20 bp, synthetic construct
  misc_feature 1..20: note = chemically synthesized
  source 1..20: mol_type = other DNA
tcccagccactcaggaggct

SEQ ID NO: 140 - DNA, 20 bp, synthetic construct
  misc_feature 1..20: note = chemically synthesized
  source 1..20: mol_type = other DNA
cccagccactcaggaggctg

SEQ ID NO: 141 - DNA, 20 bp, synthetic construct
  misc_feature 1..20: note = chemically synthesized
  source 1..20: mol_type = other DNA
agccactcaggaggctgagg

SEQ ID NO: 142 - DNA, 20 bp, synthetic construct
  misc_feature 1..20: note = chemically synthesized
  source 1..20: mol_type = other DNA
gccactcaggaggctgaggc

SEQ ID NO: 143 - DNA, 20 bp, synthetic construct
  misc_feature 1..20: note = chemically synthesized
  source 1..20: mol_type = other DNA
cactcaggaggctgaggcag

SEQ ID NO: 144 - DNA, 20 bp, synthetic construct
  misc_feature 1..20: note = chemically synthesized
  source 1..20: mol_type = other DNA
gcaggagaaccacttgaacc

SEQ ID NO: 145 - DNA, 20 bp, synthetic construct
  misc_feature 1..20: note = chemically synthesized
  source 1..20: mol_type = other DNA
caggagaaccacttgaaccc

SEQ ID NO: 146 - DNA, 20 bp, synthetic construct
  misc_feature 1..20: note = chemically synthesized
  source 1..20: mol_type = other DNA
ggagaaccacttgaacccgg

SEQ ID NO: 147 - DNA, 20 bp, synthetic construct
  misc_feature 1..20: note = chemically synthesized
  source 1..20: mol_type = other DNA
gagaaccacttgaacccggg

SEQ ID NO: 148 - DNA, 20 bp, synthetic construct
  misc_feature 1..20: note = chemically synthesized
  source 1..20: mol_type = other DNA
aaccacttgaacccgggagg

SEQ ID NO: 149 - DNA, 20 bp, synthetic construct
  misc_feature 1..20: note = chemically synthesized
  source 1..20: mol_type = other DNA
ccacttgaacccgggaggta

SEQ ID NO: 150 - DNA, 20 bp, synthetic construct
  misc_feature 1..20: note = chemically synthesized
  source 1..20: mol_type = other DNA
cacttgaacccgggaggtag

SEQ ID NO: 151 - DNA, 20 bp, synthetic construct
  misc_feature 1..20: note = chemically synthesized
  source 1..20: mol_type = other DNA
aacccgggaggtagaggttg

SEQ ID NO: 152 - DNA, 20 bp, synthetic construct
  misc_feature 1..20: note = chemically synthesized
  source 1..20: mol_type = other DNA
cgggaggtagaggttgcagt

SEQ ID NO: 153 - DNA, 20 bp, synthetic construct
  misc_feature 1..20: note = chemically synthesized
  source 1..20: mol_type = other DNA
ggtagaggttgcagtgagcc

SEQ ID NO: 154 - DNA, 20 bp, synthetic construct
  misc_feature 1..20: note = chemically synthesized
  source 1..20: mol_type = other DNA
aagatcgtgccattgcactc

SEQ ID NO: 155 - DNA, 20 bp, synthetic construct
  misc_feature 1..20: note = chemically synthesized
  source 1..20: mol_type = other DNA
cgtgccattgcactccagcc

SEQ ID NO: 156 - DNA, 20 bp, synthetic construct
  misc_feature 1..20: note = chemically synthesized
  source 1..20: mol_type = other DNA
gtgccattgcactccagcct

SEQ ID NO: 157 - DNA, 20 bp, synthetic construct
  misc_feature 1..20: note = chemically synthesized
  source 1..20: mol_type = other DNA
ttgcactccagcctgggcaa

SEQ ID NO: 158 - DNA, 20 bp, synthetic construct
  misc_feature 1..20: note = chemically synthesized
  source 1..20: mol_type = other DNA
gcactccagcctgggcaata

SEQ ID NO: 159 - DNA, 20 bp, synthetic construct
  misc_feature 1..20: note = chemically synthesized
  source 1..20: mol_type = other DNA
tccagcctgggcaatagagt

SEQ ID NO: 160 - DNA, 20 bp, synthetic construct
  misc_feature 1..20: note = chemically synthesized
  source 1..20: mol_type = other DNA
aataataataataatctgaa

SEQ ID NO: 161 - DNA, 20 bp, synthetic construct
  misc_feature 1..20: note = chemically synthesized
  source 1..20: mol_type = other DNA
ataatctgaacagcccacaa

SEQ ID NO: 162 - DNA, 20 bp, synthetic construct
  misc_feature 1..20: note = chemically synthesized
  source 1..20: mol_type = other DNA
taatctgaacagcccacaaa

SEQ ID NO: 163 - DNA, 20 bp, synthetic construct
  misc_feature 1..20: note = chemically synthesized
  source 1..20: mol_type = other DNA
tgaacagcccacaaaaggct

SEQ ID NO: 164 - DNA, 20 bp, synthetic construct
  misc_feature 1..20: note = chemically synthesized
  source 1..20: mol_type = other DNA
gaacagcccacaaaaggctt

SEQ ID NO: 165 - DNA, 20 bp, synthetic construct
  misc_feature 1..20: note = chemically synthesized
  source 1..20: mol_type = other DNA
agcccacaaaaggcttggga

SEQ ID NO: 166 - DNA, 20 bp, synthetic construct
  misc_feature 1..20: note = chemically synthesized
  source 1..20: mol_type = other DNA
taaaaacaatgccctgtatt

SEQ ID NO: 167 - DNA, 20 bp, synthetic construct
  misc_feature 1..20: note = chemically synthesized
  source 1..20: mol_type = other DNA
gtatttggtctcctccatcc

SEQ ID NO: 168 - DNA, 20 bp, synthetic construct
  misc_feature 1..20: note = chemically synthesized
  source 1..20: mol_type = other DNA
tttggtctcctccatccaag

SEQ ID NO: 169 - DNA, 20 bp, synthetic construct
  misc_feature 1..20: note = chemically synthesized
  source 1..20: mol_type = other DNA
gtctcctccatccaagtggc

SEQ ID NO: 170 - DNA, 20 bp, synthetic construct
  misc_feature 1..20: note = chemically synthesized
  source 1..20: mol_type = other DNA
tctcctccatccaagtggct

SEQ ID NO: 171 - DNA, 20 bp, synthetic construct
  misc_feature 1..20: note = chemically synthesized
  source 1..20: mol_type = other DNA
gtggctgggactctgtcctc

SEQ ID NO: 172 - DNA, 20 bp, synthetic construct
  misc_feature 1..20: note = chemically synthesized
  source 1..20: mol_type = other DNA
cctctagtctgtgctcatgt

SEQ ID NO: 173 - DNA, 20 bp, synthetic construct
  misc_feature 1..20: note = chemically synthesized
  source 1..20: mol_type = other DNA
ctctagtctgtgctcatgtc

SEQ ID NO: 174 - DNA, 20 bp, synthetic construct
  misc_feature 1..20: note = chemically synthesized
  source 1..20: mol_type = other DNA
atttatctctctgcaatctg

SEQ ID NO: 175 - DNA, 20 bp, synthetic construct
  misc_feature 1..20: note = chemically synthesized
  source 1..20: mol_type = other DNA
caatctgaagttccactctg

SEQ ID NO: 176 - DNA, 20 bp, synthetic construct
  misc_feature 1..20: note = chemically synthesized
  source 1..20: mol_type = other DNA
atctgaagttccactctgca

SEQ ID NO: 177 - DNA, 20 bp, synthetic construct
  misc_feature 1..20: note = chemically synthesized
  source 1..20: mol_type = other DNA
ctgaagttccactctgcaga

SEQ ID NO: 178 - DNA, 20 bp, synthetic construct
  misc_feature 1..20: note = chemically synthesized
  source 1..20: mol_type = other DNA
tgaagttccactctgcagag

SEQ ID NO: 179 - DNA, 20 bp, synthetic construct
  misc_feature 1..20: note = chemically synthesized
  source 1..20: mol_type = other DNA
tccactctgcagagaggaca

SEQ ID NO: 180 - DNA, 20 bp, synthetic construct
  misc_feature 1..20: note = chemically synthesized
  source 1..20: mol_type = other DNA
ctctgcagagaggacacagt

SEQ ID NO: 181 - DNA, 20 bp, synthetic construct
  misc_feature 1..20: note = chemically synthesized
  source 1..20: mol_type = other DNA
gaggacacagtgagaacccc

SEQ ID NO: 182 - DNA, 20 bp, synthetic construct
  misc_feature 1..20: note = chemically synthesized
  source 1..20: mol_type = other DNA
gacacagtgagaacccctgg

SEQ ID NO: 183 - DNA, 20 bp, synthetic construct
  misc_feature 1..20: note = chemically synthesized
  source 1..20: mol_type = other DNA
agaacccctggcagatttgt

SEQ ID NO: 184 - DNA, 20 bp, synthetic construct
  misc_feature 1..20: note = chemically synthesized
  source 1..20: mol_type = other DNA
ttccctgcttctgccattca

SEQ ID NO: 185 - DNA, 20 bp, synthetic construct
  misc_feature 1..20: note = chemically synthesized
  source 1..20: mol_type = other DNA
catgatcttgactcatcaca

SEQ ID NO: 186 - DNA, 20 bp, synthetic construct
  misc_feature 1..20: note = chemically synthesized
  source 1..20: mol_type = other DNA
tgatcttgactcatcacaca

SEQ ID NO: 187 - DNA, 20 bp, synthetic construct
  misc_feature 1..20: note = chemically synthesized
  source 1..20: mol_type = other DNA
atcttgactcatcacacaga

SEQ ID NO: 188 - DNA, 20 bp, synthetic construct
  misc_feature 1..20: note = chemically synthesized
  source 1..20: mol_type = other DNA
cccaaattgtcaatcttgta

SEQ ID NO: 189 - DNA, 20 bp, synthetic construct
  misc_feature 1..20: note = chemically synthesized
  source 1..20: mol_type = other DNA
ccaaattgtcaatcttgtat

SEQ ID NO: 190 - DNA, 20 bp, synthetic construct
  misc_feature 1..20: note = chemically synthesized
  source 1..20: mol_type = other DNA
caaattgtcaatcttgtatg

SEQ ID NO: 191 - DNA, 20 bp, synthetic construct
  misc_feature 1..20: note = chemically synthesized
  source 1..20: mol_type = other DNA
aatcttgtatggggtttcaa

SEQ ID NO: 192 - DNA, 20 bp, synthetic construct
  misc_feature 1..20: note = chemically synthesized
  source 1..20: mol_type = other DNA
tgtatggggtttcaaaagtc

SEQ ID NO: 193 - DNA, 20 bp, synthetic construct
  misc_feature 1..20: note = chemically synthesized
  source 1..20: mol_type = other DNA
gggtttcaaaagtctagccc

SEQ ID NO: 194 - DNA, 20 bp, synthetic construct
  misc_feature 1..20: note = chemically synthesized
  source 1..20: mol_type = other DNA
ggtttcaaaagtctagccct

SEQ ID NO: 195 - DNA, 20 bp, synthetic construct
  misc_feature 1..20: note = chemically synthesized
  source 1..20: mol_type = other DNA
tcaaaagtctagccctaggc

SEQ ID NO: 196 - DNA, 20 bp, synthetic construct
  misc_feature 1..20: note = chemically synthesized
  source 1..20: mol_type = other DNA
caaaagtctagccctaggcc

SEQ ID NO: 197 - DNA, 20 bp, synthetic construct
  misc_feature 1..20: note = chemically synthesized
  source 1..20: mol_type = other DNA
agtctagccctaggccaggt

SEQ ID NO: 198 - DNA, 20 bp, synthetic construct
  misc_feature 1..20: note = chemically synthesized
  source 1..20: mol_type = other DNA
gtctagccctaggccaggtg

SEQ ID NO: 199 - DNA, 20 bp, synthetic construct
  misc_feature 1..20: note = chemically synthesized
  source 1..20: mol_type = other DNA
tagccctaggccaggtgagg

SEQ ID NO: 200 - DNA, 20 bp, synthetic construct
  misc_feature 1..20: note = chemically synthesized
  source 1..20: mol_type = other DNA
tagtgcaatgcctctaatcc

SEQ ID NO: 201 - DNA, 20 bp, synthetic construct
  misc_feature 1..20: note = chemically synthesized
  source 1..20: mol_type = other DNA
tgcctctaatcccagcacta

SEQ ID NO: 202 - DNA, 20 bp, synthetic construct
  misc_feature 1..20: note = chemically synthesized
  source 1..20: mol_type = other DNA
gcctctaatcccagcactat

SEQ ID NO: 203 - DNA, 20 bp, synthetic construct
  misc_feature 1..20: note = chemically synthesized
  source 1..20: mol_type = other DNA
ctctaatcccagcactatgg

SEQ ID NO: 204 - DNA, 20 bp, synthetic construct
  misc_feature 1..20: note = chemically synthesized
  source 1..20: mol_type = other DNA
tctaatcccagcactatggg

SEQ ID NO: 205 - DNA, 20 bp, synthetic construct
  misc_feature 1..20: note = chemically synthesized
  source 1..20: mol_type = other DNA
tcccagcactatgggaggcc

SEQ ID NO: 206 - DNA, 20 bp, synthetic construct
  misc_feature 1..20: note = chemically synthesized
  source 1..20: mol_type = other DNA
cccagcactatgggaggcct

SEQ ID NO: 207 - DNA, 20 bp, synthetic construct
  misc_feature 1..20: note = chemically synthesized
  source 1..20: mol_type = other DNA
cagcactatgggaggcctag

SEQ ID NO: 208 - DNA, 20 bp, synthetic construct
  misc_feature 1..20: note = chemically synthesized
  source 1..20: mol_type = other DNA
agcactatgggaggcctagg

SEQ ID NO: 209 - DNA, 20 bp, synthetic construct
  misc_feature 1..20: note = chemically synthesized
  source 1..20: mol_type = other DNA
gcactatgggaggcctagga

SEQ ID NO: 210 - DNA, 20 bp, synthetic construct
  misc_feature 1..20: note = chemically synthesized
  source 1..20: mol_type = other DNA
ctatgggaggcctaggaggg

SEQ ID NO: 211 - DNA, 20 bp, synthetic construct
  misc_feature 1..20: note = chemically synthesized
  source 1..20: mol_type = other DNA
ggcctaggagggtggatcac

SEQ ID NO: 212 - DNA, 20 bp, synthetic construct
  misc_feature 1..20: note = chemically synthesized
  source 1..20: mol_type = other DNA
aggagggtggatcacgagat

SEQ ID NO: 213 - DNA, 20 bp, synthetic construct
  misc_feature 1..20: note = chemically synthesized
  source 1..20: mol_type = other DNA
ggagggtggatcacgagatc

SEQ ID NO: 214 - DNA, 20 bp, synthetic construct
  misc_feature 1..20: note = chemically synthesized
  source 1..20: mol_type = other DNA
agggtggatcacgagatcag

SEQ ID NO: 215 - DNA, 20 bp, synthetic construct
  misc_feature 1..20: note = chemically synthesized
  source 1..20: mol_type = other DNA
tggatcacgagatcaggaga

SEQ ID NO: 216 - DNA, 20 bp, synthetic construct
  misc_feature 1..20: note = chemically synthesized
  source 1..20: mol_type = other DNA
gatcacgagatcaggagatg

SEQ ID NO: 217 - DNA, 20 bp, synthetic construct
  misc_feature 1..20: note = chemically synthesized
  source 1..20: mol_type = other DNA
tcaggagatggagaccatcc

SEQ ID NO: 218 - DNA, 20 bp, synthetic construct
  misc_feature 1..20: note = chemically synthesized
  source 1..20: mol_type = other DNA
ggagaccatcctggctaaca

SEQ ID NO: 219 - DNA, 20 bp, synthetic construct
  misc_feature 1..20: note = chemically synthesized
  source 1..20: mol_type = other DNA
actaaaaatacaaaaaatat

SEQ ID NO: 220 - DNA, 20 bp, synthetic construct
  misc_feature 1..20: note = chemically synthesized
  source 1..20: mol_type = other DNA
aaaatacaaaaaatattagc

SEQ ID NO: 221 - DNA, 20 bp, synthetic construct
  misc_feature 1..20: note = chemically synthesized
  source 1..20: mol_type = other DNA
aaatacaaaaaatattagct

SEQ ID NO: 222 - DNA, 20 bp, synthetic construct
  misc_feature 1..20: note = chemically synthesized
  source 1..20: mol_type = other DNA
caaaaaatattagctgggcg

SEQ ID NO: 223 - DNA, 20 bp, synthetic construct
  misc_feature 1..20: note = chemically synthesized
  source 1..20: mol_type = other DNA
aaaatattagctgggcgtgg

SEQ ID NO: 224 - DNA, 20 bp, synthetic construct
  misc_feature 1..20: note = chemically synthesized
  source 1..20: mol_type = other DNA
ggcgtggtggcgcgtgcctg

SEQ ID NO: 225 - DNA, 20 bp, synthetic construct
  misc_feature 1..20: note = chemically synthesized
  source 1..20: mol_type = other DNA
gtggcgcgtgcctgtagtcc

SEQ ID NO: 226 - DNA, 20 bp, synthetic construct
  misc_feature 1..20: note = chemically synthesized
  source 1..20: mol_type = other DNA
tgcctgtagtcccagctact

SEQ ID NO: 227 - DNA, 20 bp, synthetic construct
  misc_feature 1..20: note = chemically synthesized
  source 1..20: mol_type = other DNA
gcctgtagtcccagctactt

SEQ ID NO: 228 - DNA, 20 bp, synthetic construct
  misc_feature 1..20: note = chemically synthesized
  source 1..20: mol_type = other DNA
tgtagtcccagctacttggg

SEQ ID NO: 229 - DNA, 20 bp, synthetic construct
  misc_feature 1..20: note = chemically synthesized
  source 1..20: mol_type = other DNA
tcccagctacttgggaagct

SEQ ID NO: 230 - DNA, 20 bp, synthetic construct
  misc_feature 1..20: note = chemically synthesized
  source 1..20: mol_type = other DNA
cccagctacttgggaagctg

SEQ ID NO: 231 - DNA, 20 bp, synthetic construct
  misc_feature 1..20: note = chemically synthesized
  source 1..20: mol_type = other DNA
agctacttgggaagctgagg

SEQ ID NO: 232 - DNA, 20 bp, synthetic construct
  misc_feature 1..20: note = chemically synthesized
  source 1..20: mol_type = other DNA
gctacttgggaagctgaggc

SEQ ID NO: 233 - DNA, 20 bp, synthetic construct
  misc_feature 1..20: note = chemically synthesized
  source 1..20: mol_type = other DNA
tacttgggaagctgaggcag

SEQ ID NO: 234 - DNA, 20 bp, synthetic construct
  misc_feature 1..20: note = chemically synthesized
  source 1..20: mol_type = other DNA
acttgggaagctgaggcagg

SEQ ID NO: 235 - DNA, 20 bp, synthetic construct
  misc_feature 1..20: note = chemically synthesized
  source 1..20: mol_type = other DNA
gcaggaggatcccttgaacc

SEQ ID NO: 236 - DNA, 20 bp, synthetic construct
  misc_feature 1..20: note = chemically synthesized
  source 1..20: mol_type = other DNA
ggaggatcccttgaacccag

SEQ ID NO: 237 - DNA, 20 bp, synthetic construct
  misc_feature 1..20: note = chemically synthesized
  source 1..20: mol_type = other DNA
gaggatcccttgaacccagt

SEQ ID NO: 238 - DNA, 20 bp, synthetic construct
  misc_feature 1..20: note = chemically synthesized
  source 1..20: mol_type = other DNA
gatcccttgaacccagtagg

SEQ ID NO: 239 - DNA, 20 bp, synthetic construct
  misc_feature 1..20: note = chemically synthesized
  source 1..20: mol_type = other DNA
tcccttgaacccagtaggcg

SEQ ID NO: 240 - DNA, 20 bp, synthetic construct
  misc_feature 1..20: note = chemically synthesized
  source 1..20: mol_type = other DNA
cccttgaacccagtaggcgg

SEQ ID NO: 241 - DNA, 20 bp, synthetic construct
  misc_feature 1..20: note = chemically synthesized
  source 1..20: mol_type = other DNA
aacccagtaggcggaggttg

SEQ ID NO: 242 - DNA, 20 bp, synthetic construct
  misc_feature 1..20: note = chemically synthesized
  source 1..20: mol_type = other DNA
cagtaggcggaggttgtggt

SEQ ID NO: 243 - DNA, 20 bp, synthetic construct
  misc_feature 1..20: note = chemically synthesized
  source 1..20: mol_type = other DNA
ggcggaggttgtggtgagct

SEQ ID NO: 244 - DNA, 20 bp, synthetic construct
  misc_feature 1..20: note = chemically synthesized
  source 1..20: mol_type = other DNA
gagtccttgccactgcactc

SEQ ID NO: 245 - DNA, 20 bp, synthetic construct
  misc_feature 1..20: note = chemically synthesized
  source 1..20: mol_type = other DNA
cttgccactgcactccagcc

SEQ ID NO: 246 - DNA, 20 bp, synthetic construct
  misc_feature 1..20: note = chemically synthesized
  source 1..20: mol_type = other DNA
ttgccactgcactccagcct

SEQ ID NO: 247 - DNA, 20 bp, synthetic construct
  misc_feature 1..20: note = chemically synthesized
  source 1..20: mol_type = other DNA
ctgcactccagcctgggtga

SEQ ID NO: 248 - DNA, 20 bp, synthetic construct
  misc_feature 1..20: note = chemically synthesized
  source 1..20: mol_type = other DNA
gcactccagcctgggtgaca

SEQ ID NO: 249 - DNA, 20 bp, synthetic construct
  misc_feature 1..20: note = chemically synthesized
  source 1..20: mol_type = other DNA
tccagcctgggtgacagagc

SEQ ID NO: 250 - DNA, 20 bp, synthetic construct
  misc_feature 1..20: note = chemically synthesized
  source 1..20: mol_type = other DNA
aaaaaaaaaaaaaaaaaaaa

SEQ ID NO: 251 - DNA, 20 bp, synthetic construct
  misc_feature 1..20: note = chemically synthesized
  source 1..20: mol_type = other DNA
aaaaaaaaaaaaaaaatggc

SEQ ID NO: 252 - DNA, 20 bp, synthetic construct
  misc_feature 1..20: note = chemically synthesized
  source 1..20: mol_type = other DNA
ttgttgtctttcaactttaa

SEQ ID NO: 253 - DNA, 20 bp, synthetic construct
  misc_feature 1..20: note = chemically synthesized
  source 1..20: mol_type = other DNA
tctttcaactttaaaagcca

SEQ ID NO: 254 - DNA, 20 bp, synthetic construct
  misc_feature 1..20: note = chemically synthesized
  source 1..20: mol_type = other DNA
ctttcaactttaaaagccat

SEQ ID NO: 255 - DNA, 20 bp, synthetic construct
  misc_feature 1..20: note = chemically synthesized
  source 1..20: mol_type = other DNA
aactttaaaagccatgggaa

SEQ ID NO: 256 - DNA, 20 bp, synthetic construct
  misc_feature 1..20: note = chemically synthesized
  source 1..20: mol_type = other DNA
ttaaaagccatgggaaaaga

SEQ ID NO: 257 - DNA, 20 bp, synthetic construct
  misc_feature 1..20: note = chemically synthesized
  source 1..20: mol_type = other DNA
ctttttgttctgtttgtttt

SEQ ID NO: 258 - DNA, 20 bp, synthetic construct
  misc_feature 1..20: note = chemically synthesized
  source 1..20: mol_type = other DNA
tttttgttctgtttgttttg

SEQ ID NO: 259 - DNA, 20 bp, synthetic construct
  misc_feature 1..20: note = chemically synthesized
  source 1..20: mol_type = other DNA
ttttgttctgtttgttttga

SEQ ID NO: 260 - DNA, 20 bp, synthetic construct
  misc_feature 1..20: note = chemically synthesized
  source 1..20: mol_type = other DNA
tttgttctgtttgttttgag

SEQ ID NO: 261 - DNA, 20 bp, synthetic construct
  misc_feature 1..20: note = chemically synthesized
  source 1..20: mol_type = other DNA
ttgttctgtttgttttgagg

SEQ ID NO: 262 - DNA, 20 bp, synthetic construct
  misc_feature 1..20: note = chemically synthesized
  source 1..20: mol_type = other DNA
tttgagggggttcttctcca

SEQ ID NO: 263 - DNA, 20 bp, synthetic construct
  misc_feature 1..20: note = chemically synthesized
  source 1..20: mol_type = other DNA
gggggttcttctccacagtg

SEQ ID NO: 264 - DNA, 20 bp, synthetic construct
  misc_feature 1..20: note = chemically synthesized
  source 1..20: mol_type = other DNA
gggttcttctccacagtgaa

SEQ ID NO: 265 - DNA, 20 bp, synthetic construct
  misc_feature 1..20: note = chemically synthesized
  source 1..20: mol_type = other DNA
ggttcttctccacagtgaag

SEQ ID NO: 266 - DNA, 20 bp, synthetic construct
  misc_feature 1..20: note = chemically synthesized
  source 1..20: mol_type = other DNA
ccccttaaaaatcccacttt

SEQ ID NO: 267 - DNA, 20 bp, synthetic construct
  misc_feature 1..20: note = chemically synthesized
  source 1..20: mol_type = other DNA
ccttaaaaatcccactttta

SEQ ID NO: 268 - DNA, 20 bp, synthetic construct
  misc_feature 1..20: note = chemically synthesized
  source 1..20: mol_type = other DNA
cttatttacaaactgactct

SEQ ID NO: 269 - DNA, 20 bp, synthetic construct
  misc_feature 1..20: note = chemically synthesized
  source 1..20: mol_type = other DNA
atttacaaactgactctgag

SEQ ID NO: 270 - DNA, 20 bp, synthetic construct
  misc_feature 1..20: note = chemically synthesized
  source 1..20: mol_type = other DNA
tctgagaagaaatatataaa

SEQ ID NO: 271 - DNA, 20 bp, synthetic construct
  misc_feature 1..20: note = chemically synthesized
  source 1..20: mol_type = other DNA
gagaagaaatatataaaaag

SEQ ID NO: 272 - DNA, 20 bp, synthetic construct
  misc_feature 1..20: note = chemically synthesized
  source 1..20: mol_type = other DNA
agaagaaatatataaaaagt

SEQ ID NO: 273 - DNA, 20 bp, synthetic construct
  misc_feature 1..20: note = chemically synthesized
  source 1..20: mol_type = other DNA
gaagaaatatataaaaagtg

SEQ ID NO: 274 - DNA, 20 bp, synthetic construct
  misc_feature 1..20: note = chemically synthesized
  source 1..20: mol_type = other DNA
aagaaatatataaaaagtgg

SEQ ID NO: 275 - DNA, 20 bp, synthetic construct
  misc_feature 1..20: note = chemically synthesized
  source 1..20: mol_type = other DNA
aaatatataaaaagtggggg

SEQ ID NO: 276 - DNA, 20 bp, synthetic construct
  misc_feature 1..20: note = chemically synthesized
  source 1..20: mol_type = other DNA
aaaaagtgggggtagaaaca

SEQ ID NO: 277 - DNA, 20 bp, synthetic construct
  misc_feature 1..20: note = chemically synthesized
  source 1..20: mol_type = other DNA
gtgggggtagaaacacagac

SEQ ID NO: 278 - DNA, 20 bp, synthetic construct
  misc_feature 1..20: note = chemically synthesized
  source 1..20: mol_type = other DNA
gaaacacagaccagaaatga

SEQ ID NO: 279 - DNA, 20 bp, synthetic construct
  misc_feature 1..20: note = chemically synthesized
  source 1..20: mol_type = other DNA
acagaccagaaatgaaagtg

SEQ ID NO: 280 - DNA, 20 bp, synthetic construct
  misc_feature 1..20: note = chemically synthesized
  source 1..20: mol_type = other DNA
atgaaagtgtagtgaccacc

SEQ ID NO: 281 - DNA, 20 bp, synthetic construct
  misc_feature 1..20: note = chemically synthesized
  source 1..20: mol_type = other DNA
agtgtagtgaccaccaagtg

SEQ ID NO: 282 - DNA, 20 bp, synthetic construct
  misc_feature 1..20: note = chemically synthesized
  source 1..20: mol_type = other DNA
gaccaccaagtgcagttaca

SEQ ID NO: 283 - DNA, 20 bp, synthetic construct
  misc_feature 1..20: note = chemically synthesized
  source 1..20: mol_type = other DNA
accaccaagtgcagttacaa

SEQ ID NO: 284 - DNA, 20 bp, synthetic construct
  misc_feature 1..20: note = chemically synthesized
  source 1..20: mol_type = other DNA
acaaaggctgaacttgtctc

SEQ ID NO: 285 - DNA, 20 bp, synthetic construct
  misc_feature 1..20: note = chemically synthesized
  source 1..20: mol_type = other DNA
gctgaacttgtctcaagacc

SEQ ID NO: 286 - DNA, 20 bp, synthetic construct
  misc_feature 1..20: note = chemically synthesized
  source 1..20: mol_type = other DNA
ctgaacttgtctcaagaccc

SEQ ID NO: 287 - DNA, 20 bp, synthetic construct
  misc_feature 1..20: note = chemically synthesized
  source 1..20: mol_type = other DNA
aagacccaggattgttgttt

SEQ ID NO: 288 - DNA, 20 bp, synthetic construct
  misc_feature 1..20: note = chemically synthesized
  source 1..20: mol_type = other DNA
caggattgttgtttcagttc

SEQ ID NO: 289 - DNA, 20 bp, synthetic construct
  misc_feature 1..20: note = chemically synthesized
  source 1..20: mol_type = other DNA
tttcagttctggcctccctt

SEQ ID NO: 290 - DNA, 20 bp, synthetic construct
  misc_feature 1..20: note = chemically synthesized
  source 1..20: mol_type = other DNA
cagttctggcctccctttgg

SEQ ID NO: 291 - DNA, 20 bp, synthetic construct
  misc_feature 1..20: note = chemically synthesized
  source 1..20: mol_type = other DNA
ttctggcctccctttggaag

SEQ ID NO: 292 - DNA, 20 bp, synthetic construct
  misc_feature 1..20: note = chemically synthesized
  source 1..20: mol_type = other DNA
ggaagtggtgtcactctttc

SEQ ID NO: 293 - DNA, 20 bp, synthetic construct
  misc_feature 1..20: note = chemically synthesized
  source 1..20: mol_type = other DNA
gaagtggtgtcactctttct

SEQ ID NO: 294 - DNA, 20 bp, synthetic construct
  misc_feature 1..20: note = chemically synthesized
  source 1..20: mol_type = other DNA
gtgtcactctttctaggcat

SEQ ID NO: 295 - DNA, 20 bp, synthetic construct
  misc_feature 1..20: note = chemically synthesized
  source 1..20: mol_type = other DNA
cactctttctaggcatcagc

SEQ ID NO: 296 - DNA, 20 bp, synthetic construct
  misc_feature 1..20: note = chemically synthesized
  source 1..20: mol_type = other DNA
actctttctaggcatcagca

SEQ ID NO: 297 - DNA, 20 bp, synthetic construct
  misc_feature 1..20: note = chemically synthesized
  source 1..20: mol_type = other DNA
tctttctaggcatcagcaag

SEQ ID NO: 298 - DNA, 20 bp, synthetic construct
  misc_feature 1..20: note = chemically synthesized
  source 1..20: mol_type = other DNA
ctaggcatcagcaaggagtt

SEQ ID NO: 299 - DNA, 20 bp, synthetic construct
  misc_feature 1..20: note = chemically synthesized
  source 1..20: mol_type = other DNA
agcaaggagttcagcacatt

SEQ ID NO: 300 - DNA, 20 bp, synthetic construct
  misc_feature 1..20: note = chemically synthesized
  source 1..20: mol_type = other DNA
gcaaggagttcagcacattt

SEQ ID NO: 301 - DNA, 20 bp, synthetic construct
  misc_feature 1..20: note = chemically synthesized
  source 1..20: mol_type = other DNA
caaggagttcagcacattta

SEQ ID NO: 302 - DNA, 20 bp, synthetic construct
  misc_feature 1..20: note = chemically synthesized
  source 1..20: mol_type = other DNA
aggagttcagcacatttagg

SEQ ID NO: 303 - DNA, 20 bp, synthetic construct
  misc_feature 1..20: note = chemically synthesized
  source 1..20: mol_type = other DNA
ggagttcagcacatttaggg

SEQ ID NO: 304 - DNA, 20 bp, synthetic construct
  misc_feature 1..20: note = chemically synthesized
  source 1..20: mol_type = other DNA
gttcagcacatttagggagg

SEQ ID NO: 305 - DNA, 20 bp, synthetic construct
  misc_feature 1..20: note = chemically synthesized
  source 1..20: mol_type = other DNA
atttagggaggaagccatca

SEQ ID NO: 306 - DNA, 20 bp, synthetic construct
  misc_feature 1..20: note = chemically synthesized
  source 1..20: mol_type = other DNA
agccatcacagaaaccctaa

SEQ ID NO: 307 - DNA, 20 bp, synthetic construct
  misc_feature 1..20: note = chemically synthesized
  source 1..20: mol_type = other DNA
accctaatggtcttatgttt

SEQ ID NO: 308 - DNA, 20 bp, synthetic construct
  misc_feature 1..20: note = chemically synthesized
  source 1..20: mol_type = other DNA
tcttatgtttcagcaacaca

SEQ ID NO: 309 - DNA, 20 bp, synthetic construct
  misc_feature 1..20: note = chemically synthesized
  source 1..20: mol_type = other DNA
cttatgtttcagcaacacat

SEQ ID NO: 310 - DNA, 20 bp, synthetic construct
  misc_feature 1..20: note = chemically synthesized
  source 1..20: mol_type = other DNA
atgtttcagcaacacatagg

SEQ ID NO: 311 - DNA, 20 bp, synthetic construct
  misc_feature 1..20: note = chemically synthesized
  source 1..20: mol_type = other DNA
gtttcagcaacacataggca

SEQ ID NO: 312 - DNA, 20 bp, synthetic construct
  misc_feature 1..20: note = chemically synthesized
  source 1..20: mol_type = other DNA
agcaacacataggcagagca

SEQ ID NO: 313 - DNA, 20 bp, synthetic construct
  misc_feature 1..20: note = chemically synthesized
  source 1..20: mol_type = other DNA
gcaacacataggcagagcat

SEQ ID NO: 314 - DNA, 20 bp, synthetic construct
  misc_feature 1..20: note = chemically synthesized
  source 1..20: mol_type = other DNA
caacacataggcagagcatg

SEQ ID NO: 315 - DNA, 20 bp, synthetic construct
  misc_feature 1..20: note = chemically synthesized
  source 1..20: mol_type = other DNA
cacataggcagagcatgggg

SEQ ID NO: 316 - DNA, 20 bp, synthetic construct
  misc_feature 1..20: note = chemically synthesized
  source 1..20: mol_type = other DNA
acataggcagagcatggggc

SEQ ID NO: 317 - DNA, 20 bp, synthetic construct
  misc_feature 1..20: note = chemically synthesized
  source 1..20: mol_type = other DNA
cataggcagagcatggggca

SEQ ID NO: 318 - DNA, 20 bp, synthetic construct
  misc_feature 1..20: note = chemically synthesized
  source 1..20: mol_type = other DNA
taggcagagcatggggcagg

SEQ ID NO: 319 - DNA, 20 bp, synthetic construct
  misc_feature 1..20: note = chemically synthesized
  source 1..20: mol_type = other DNA
ggcagagcatggggcaggga

SEQ ID NO: 320 - DNA, 20 bp, synthetic construct
  misc_feature 1..20: note = chemically synthesized
  source 1..20: mol_type = other DNA
gcagagcatggggcagggag

SEQ ID NO: 321 - DNA, 20 bp, synthetic construct
  misc_feature 1..20: note = chemically synthesized
  source 1..20: mol_type = other DNA
cagagcatggggcagggaga

SEQ ID NO: 322 - DNA, 20 bp, synthetic construct
  misc_feature 1..20: note = chemically synthesized
  source 1..20: mol_type = other DNA
ttatgaaataacttcttgtc

SEQ ID NO: 323 - DNA, 20 bp, synthetic construct
  misc_feature 1..20: note = chemically synthesized
  source 1..20: mol_type = other DNA
tgaaataacttcttgtctgg

SEQ ID NO: 324 - DNA, 20 bp, synthetic construct
  misc_feature 1..20: note = chemically synthesized
  source 1..20: mol_type = other DNA
tggaagtcccaactaattga

SEQ ID NO: 325 - DNA, 20 bp, synthetic construct
  misc_feature 1..20: note = chemically synthesized
  source 1..20: mol_type = other DNA
ggaagtcccaactaattgat

SEQ ID NO: 326 - DNA, 20 bp, synthetic construct
  misc_feature 1..20: note = chemically synthesized
  source 1..20: mol_type = other DNA
agtcccaactaattgatagg

SEQ ID NO: 327 - DNA, 20 bp, synthetic construct
  misc_feature 1..20: note = chemically synthesized
  source 1..20: mol_type = other DNA
aattgataggaagtcacaaa

SEQ ID NO: 328 - DNA, 20 bp, synthetic construct
  misc_feature 1..20: note = chemically synthesized
  source 1..20: mol_type = other DNA
attgataggaagtcacaaac

SEQ ID NO: 329 - DNA, 20 bp, synthetic construct
  misc_feature 1..20: note = chemically synthesized
  source 1..20: mol_type = other DNA
aaacaggccactcgtgcaat

SEQ ID NO: 330 - DNA, 20 bp, synthetic construct
  misc_feature 1..20: note = chemically synthesized
  source 1..20: mol_type = other DNA
aacaggccactcgtgcaatc

SEQ ID NO: 331 - DNA, 20 bp, synthetic construct
  misc_feature 1..20: note = chemically synthesized
  source 1..20: mol_type = other DNA
acaggccactcgtgcaatca

SEQ ID NO: 332 - DNA, 20 bp, synthetic construct
  misc_feature 1..20: note = chemically synthesized
  source 1..20: mol_type = other DNA
gcaatcagggttatttgtca

SEQ ID NO: 333 - DNA, 20 bp, synthetic construct
  misc_feature 1..20: note = chemically synthesized
  source 1..20: mol_type = other DNA
cagggttatttgtcatggaa

SEQ ID NO: 334 - DNA, 20 bp, synthetic construct
  misc_feature 1..20: note = chemically synthesized
  source 1..20: mol_type = other DNA
tatttgtcatggaaaagcca

SEQ ID NO: 335 - DNA, 20 bp, synthetic construct
  misc_feature 1..20: note = chemically synthesized
  source 1..20: mol_type = other DNA
atttgtcatggaaaagccac

SEQ ID NO: 336 - DNA, 20 bp, synthetic construct
  misc_feature 1..20: note = chemically synthesized
  source 1..20: mol_type = other DNA
tttgtcatggaaaagccaca

SEQ ID NO: 337 - DNA, 20 bp, synthetic construct
  misc_feature 1..20: note = chemically synthesized
  source 1..20: mol_type = other DNA
ttgtcatggaaaagccacag

SEQ ID NO: 338 - DNA, 20 bp, synthetic construct
  misc_feature 1..20: note = chemically synthesized
  source 1..20: mol_type = other DNA
catggaaaagccacagggga

SEQ ID NO: 339 - DNA, 20 bp, synthetic construct
  misc_feature 1..20: note = chemically synthesized
  source 1..20: mol_type = other DNA
atggaaaagccacaggggaa

SEQ ID NO: 340 - DNA, 20 bp, synthetic construct
  misc_feature 1..20: note = chemically synthesized
  source 1..20: mol_type = other DNA
aagccacaggggaaaggtga

SEQ ID NO: 341 - DNA, 20 bp, synthetic construct
  misc_feature 1..20: note = chemically synthesized
  source 1..20: mol_type = other DNA
cacaggggaaaggtgatggc

SEQ ID NO: 342 - DNA, 20 bp, synthetic construct
  misc_feature 1..20: note = chemically synthesized
  source 1..20: mol_type = other DNA
acaggggaaaggtgatggca

SEQ ID NO: 343 - DNA, 20 bp, synthetic construct
  misc_feature 1..20: note = chemically synthesized
  source 1..20: mol_type = other DNA
aggggaaaggtgatggcaag

SEQ ID NO: 344 - DNA, 20 bp, synthetic construct
  misc_feature 1..20: note = chemically synthesized
  source 1..20: mol_type = other DNA
ggggaaaggtgatggcaagg

SEQ ID NO: 345 - DNA, 20 bp, synthetic construct
  misc_feature 1..20: note = chemically synthesized
  source 1..20: mol_type = other DNA
aggctgcaacctccctttct

SEQ ID NO: 346 - DNA, 20 bp, synthetic construct
  misc_feature 1..20: note = chemically synthesized
  source 1..20: mol_type = other DNA
ttctcagtgcacacatctgt

SEQ ID NO: 347 - DNA, 20 bp, synthetic construct
  misc_feature 1..20: note = chemically synthesized
  source 1..20: mol_type = other DNA
tcagtgcacacatctgttgg

SEQ ID NO: 348 - DNA, 20 bp, synthetic construct
  misc_feature 1..20: note = chemically synthesized
  source 1..20: mol_type = other DNA
cagtgcacacatctgttggt

SEQ ID NO: 349 - DNA, 20 bp, synthetic construct
  misc_feature 1..20: note = chemically synthesized
  source 1..20: mol_type = other DNA
tgcacacatctgttggtagg

SEQ ID NO: 350 - DNA, 20 bp, synthetic construct
  misc_feature 1..20: note = chemically synthesized
  source 1..20: mol_type = other DNA
cacacatctgttggtaggaa

SEQ ID NO: 351 - DNA, 20 bp, synthetic construct
  misc_feature 1..20: note = chemically synthesized
  source 1..20: mol_type = other DNA
acacatctgttggtaggaag

SEQ ID NO: 352 - DNA, 20 bp, synthetic construct
  misc_feature 1..20: note = chemically synthesized
  source 1..20: mol_type = other DNA
aactctgcatgcctttacca

SEQ ID NO: 353 - DNA, 20 bp, synthetic construct
  misc_feature 1..20: note = chemically synthesized
  source 1..20: mol_type = other DNA
actctgcatgcctttaccaa

SEQ ID NO: 354 - DNA, 20 bp, synthetic construct
  misc_feature 1..20: note = chemically synthesized
  source 1..20: mol_type = other DNA
gcctttaccaaaggccatcc

SEQ ID NO: 355 - DNA, 20 bp, synthetic construct
  misc_feature 1..20: note = chemically synthesized
  source 1..20: mol_type = other DNA
cctttaccaaaggccatcct

SEQ ID NO: 356 - DNA, 20 bp, synthetic construct
  misc_feature 1..20: note = chemically synthesized
  source 1..20: mol_type = other DNA
catcctgggtctgtatgtgt

SEQ ID NO: 357 - DNA, 20 bp, synthetic construct
  misc_feature 1..20: note = chemically synthesized
  source 1..20: mol_type = other DNA
ttatgacttatgtgctaaca

SEQ ID NO: 358 - DNA, 20 bp, synthetic construct
  misc_feature 1..20: note = chemically synthesized
  source 1..20: mol_type = other DNA
tatgacttatgtgctaacac

SEQ ID NO: 359 - DNA, 20 bp, synthetic construct
  misc_feature 1..20: note = chemically synthesized
  source 1..20: mol_type = other DNA
cttatgtgctaacacaggaa

SEQ ID NO: 360 - DNA, 20 bp, synthetic construct
  misc_feature 1..20: note = chemically synthesized
  source 1..20: mol_type = other DNA
gaaaagatactccctttgat

SEQ ID NO: 361 - DNA, 20 bp, synthetic construct
  misc_feature 1..20: note = chemically synthesized
  source 1..20: mol_type = other DNA
actccctttgatcagttaaa

SEQ ID NO: 362 - DNA, 20 bp, synthetic construct
  misc_feature 1..20: note = chemically synthesized
  source 1..20: mol_type = other DNA
tccctttgatcagttaaaca

SEQ ID NO: 363 - DNA, 20 bp, synthetic construct
  misc_feature 1..20: note = chemically synthesized
  source 1..20: mol_type = other DNA
ttgatcagttaaacagagtt

SEQ ID NO: 364 - DNA, 20 bp, synthetic construct
  misc_feature 1..20: note = chemically synthesized
  source 1..20: mol_type = other DNA
taaacagagtttggtgaaat

SEQ ID NO: 365 - DNA, 20 bp, synthetic construct
  misc_feature 1..20: note = chemically synthesized
  source 1..20: mol_type = other DNA
gagtttggtgaaattagctc

SEQ ID NO: 366 - DNA, 20 bp, synthetic construct
  misc_feature 1..20: note = chemically synthesized
  source 1..20: mol_type = other DNA
tggtgaaattagctctggac

SEQ ID NO: 367 - DNA, 20 bp, synthetic construct
  misc_feature 1..20: note = chemically synthesized
  source 1..20: mol_type = other DNA
attagctctggacaagaaac

SEQ ID NO: 368 - DNA, 20 bp, synthetic construct
  misc_feature 1..20: note = chemically synthesized
  source 1..20: mol_type = other DNA
ggacaagaaaccagaaaacc

SEQ ID NO: 369 - DNA, 20 bp, synthetic construct
  misc_feature 1..20: note = chemically synthesized
  source 1..20: mol_type = other DNA
tgctttctctcttactgatg

SEQ ID NO: 370 - DNA, 20 bp, synthetic construct
  misc_feature 1..20: note = chemically synthesized
  source 1..20: mol_type = other DNA
tctcttactgatgtggcctc

SEQ ID NO: 371 - DNA, 20 bp, synthetic construct
  misc_feature 1..20: note = chemically synthesized
  source 1..20: mol_type = other DNA
ttactgatgtggcctctggc

SEQ ID NO: 372 - DNA, 20 bp, synthetic construct
  misc_feature 1..20: note = chemically synthesized
  source 1..20: mol_type = other DNA
ctctggcaagcccttaacct

SEQ ID NO: 373 - DNA, 20 bp, synthetic construct
  misc_feature 1..20: note = chemically synthesized
  source 1..20: mol_type = other DNA
ggcaagcccttaaccttggt

SEQ ID NO: 374 - DNA, 20 bp, synthetic construct
  misc_feature 1..20: note = chemically synthesized
  source 1..20: mol_type = other DNA
cctcaatctccacctccata

SEQ ID NO: 375 - DNA, 20 bp, synthetic construct
  misc_feature 1..20: note = chemically synthesized
  source 1..20: mol_type = other DNA
caatctccacctccataaag

SEQ ID NO: 376 - DNA, 20 bp, synthetic construct
  misc_feature 1..20: note = chemically synthesized
  source 1..20: mol_type = other DNA
tctccacctccataaagtag

SEQ ID NO: 377 - DNA, 20 bp, synthetic construct
  misc_feature 1..20: note = chemically synthesized
  source 1..20: mol_type = other DNA
ctccataaagtagaagtcgt

SEQ ID NO: 378 - DNA, 20 bp, synthetic construct
  misc_feature 1..20: note = chemically synthesized
  source 1..20: mol_type = other DNA
agaagtcgtgagatctgtcc

SEQ ID NO: 379 - DNA, 20 bp, synthetic construct
  misc_feature 1..20: note = chemically synthesized
  source 1..20: mol_type = other DNA
aagtcgtgagatctgtccca

SEQ ID NO: 380 - DNA, 20 bp, synthetic construct
  misc_feature 1..20: note = chemically synthesized
  source 1..20: mol_type = other DNA
gtcgtgagatctgtcccaga

SEQ ID NO: 381 - DNA, 20 bp, synthetic construct
  misc_feature 1..20: note = chemically synthesized
  source 1..20: mol_type = other DNA
gtgagatctgtcccagagag

SEQ ID NO: 382 - DNA, 20 bp, synthetic construct
  misc_feature 1..20: note = chemically synthesized
  source 1..20: mol_type = other DNA
tgagatctgtcccagagagc

SEQ ID NO: 383 - DNA, 20 bp, synthetic construct
  misc_feature 1..20: note = chemically synthesized
  source 1..20: mol_type = other DNA
gagcaggtgaaataatgcac

SEQ ID NO: 384 - DNA, 20 bp, synthetic construct
  misc_feature 1..20: note = chemically synthesized
  source 1..20: mol_type = other DNA
aggtgaaataatgcacgaga

SEQ ID NO: 385 - DNA, 20 bp, synthetic construct
  misc_feature 1..20: note = chemically synthesized
  source 1..20: mol_type = other DNA
gcacgagacagcactgtata

SEQ ID NO: 386 - DNA, 20 bp, synthetic construct
  misc_feature 1..20: note = chemically synthesized
  source 1..20: mol_type = other DNA
gacagcactgtatacagtat

SEQ ID NO: 387 - DNA, 20 bp, synthetic construct
  misc_feature 1..20: note = chemically synthesized
  source 1..20: mol_type = other DNA
acagcactgtatacagtata

SEQ ID NO: 388 - DNA, 20 bp, synthetic construct
  misc_feature 1..20: note = chemically synthesized
  source 1..20: mol_type = other DNA
gcactgtatacagtataagg

SEQ ID NO: 389 - DNA, 20 bp, synthetic construct
  misc_feature 1..20: note = chemically synthesized
  source 1..20: mol_type = other DNA
tataaggtagttcactactg

SEQ ID NO: 390 - DNA, 20 bp, synthetic construct
  misc_feature 1..20: note = chemically synthesized
  source 1..20: mol_type = other DNA
aggtagttcactactgtaga

SEQ ID NO: 391 - DNA, 20 bp, synthetic construct
  misc_feature 1..20: note = chemically synthesized
  source 1..20: mol_type = other DNA
agtcattatttattatgaat

SEQ ID NO: 392 - DNA, 20 bp, synthetic construct
  misc_feature 1..20: note = chemically synthesized
  source 1..20: mol_type = other DNA
cattatttattatgaataag

SEQ ID NO: 393 - DNA, 20 bp, synthetic construct
  misc_feature 1..20: note = chemically synthesized
  source 1..20: mol_type = other DNA
attatttattatgaataagc

SEQ ID NO: 394 - DNA, 20 bp, synthetic construct
  misc_feature 1..20: note = chemically synthesized
  source 1..20: mol_type = other DNA
taattcacatgccaattatt

SEQ ID NO: 395 - DNA, 20 bp, synthetic construct
  misc_feature 1..20: note = chemically synthesized
  source 1..20: mol_type = other DNA
tatttggctatcttttcact

SEQ ID NO: 396 - DNA, 20 bp, synthetic construct
  misc_feature 1..20: note = chemically synthesized
  source 1..20: mol_type = other DNA
tggctatcttttcactaagc

SEQ ID NO: 397 - DNA, 20 bp, synthetic construct
  misc_feature 1..20: note = chemically synthesized
  source 1..20: mol_type = other DNA
ggctatcttttcactaagct

SEQ ID NO: 398 - DNA, 20 bp, synthetic construct
  misc_feature 1..20: note = chemically synthesized
  source 1..20: mol_type = other DNA
tttcactaagctaggtaatc

SEQ ID NO: 399 - DNA, 20 bp, synthetic construct
  misc_feature 1..20: note = chemically synthesized
  source 1..20: mol_type = other DNA
actaagctaggtaatctagc

SEQ ID NO: 400 - DNA, 20 bp, synthetic construct
  misc_feature 1..20: note = chemically synthesized
  source 1..20: mol_type = other DNA
aagctaggtaatctagccag

SEQ ID NO: 401 - DNA, 20 bp, synthetic construct
  misc_feature 1..20: note = chemically synthesized
  source 1..20: mol_type = other DNA
agctaggtaatctagccaga

SEQ ID NO: 402 - DNA, 20 bp, synthetic construct
  misc_feature 1..20: note = chemically synthesized
  source 1..20: mol_type = other DNA
taggtaatctagccagaagg

SEQ ID NO: 403 - DNA, 20 bp, synthetic construct
  misc_feature 1..20: note = chemically synthesized
  source 1..20: mol_type = other DNA
taatctagccagaaggtgga

SEQ ID NO: 404 - DNA, 20 bp, synthetic construct
  misc_feature 1..20: note = chemically synthesized
  source 1..20: mol_type = other DNA
aatctagccagaaggtggat

SEQ ID NO: 405 - DNA, 20 bp, synthetic construct
  misc_feature 1..20: note = chemically synthesized
  source 1..20: mol_type = other DNA
ctagccagaaggtggatagg

SEQ ID NO: 406 - DNA, 20 bp, synthetic construct
  misc_feature 1..20: note = chemically synthesized
  source 1..20: mol_type = other DNA
tagccagaaggtggataggt

SEQ ID NO: 407 - DNA, 20 bp, synthetic construct
  misc_feature 1..20: note = chemically synthesized
  source 1..20: mol_type = other DNA
taggtaggattttccccact

SEQ ID NO: 408 - DNA, 20 bp, synthetic construct
  misc_feature 1..20: note = chemically synthesized
  source 1..20: mol_type = other DNA
aggtaggattttccccactt

SEQ ID NO: 409 - DNA, 20 bp, synthetic construct
  misc_feature 1..20: note = chemically synthesized
  source 1..20: mol_type = other DNA
attttccccacttaggttca

SEQ ID NO: 410 - DNA, 20 bp, synthetic construct
  misc_feature 1..20: note = chemically synthesized
  source 1..20: mol_type = other DNA
acggcctgtatgtgaatcta

SEQ ID NO: 411 - DNA, 20 bp, synthetic construct
  misc_feature 1..20: note = chemically synthesized
  source 1..20: mol_type = other DNA
gtatgtgaatctacagcaca

SEQ ID NO: 412 - DNA, 20 bp, synthetic construct
  misc_feature 1..20: note = chemically synthesized
  source 1..20: mol_type = other DNA
tatgtgaatctacagcacac

SEQ ID NO: 413 - DNA, 20 bp, synthetic construct
  misc_feature 1..20: note = chemically synthesized
  source 1..20: mol_type = other DNA
tctacagcacacaggtgtct

SEQ ID NO: 414 - DNA, 20 bp, synthetic construct
  misc_feature 1..20: note = chemically synthesized
  source 1..20: mol_type = other DNA
tgttgtttctaattctcttc

SEQ ID NO: 415 - DNA, 20 bp, synthetic construct
  misc_feature 1..20: note = chemically synthesized
  source 1..20: mol_type = other DNA
taattctcttctggatctcc

SEQ ID NO: 416 - DNA, 20 bp, synthetic construct
  misc_feature 1..20: note = chemically synthesized
  source 1..20: mol_type = other DNA
ttctcttctggatctccaag

SEQ ID NO: 417 - DNA, 20 bp, synthetic construct
  misc_feature 1..20: note = chemically synthesized
  source 1..20: mol_type = other DNA
gcagtaaaaaataccaaact

SEQ ID NO: 418 - DNA, 20 bp, synthetic construct
  misc_feature 1..20: note = chemically synthesized
  source 1..20: mol_type = other DNA
aaaaaataccaaactgagaa

SEQ ID NO: 419 - DNA, 20 bp, synthetic construct
  misc_feature 1..20: note = chemically synthesized
  source 1..20: mol_type = other DNA
aaagttctgtgcaaattaac

SEQ ID NO: 420 - DNA, 20 bp, synthetic construct
  misc_feature 1..20: note = chemically synthesized
  source 1..20: mol_type = other DNA
aagttctgtgcaaattaact

SEQ ID NO: 421 - DNA, 20 bp, synthetic construct
  misc_feature 1..20: note = chemically synthesized
  source 1..20: mol_type = other DNA
tctgtgcaaattaactgggc

SEQ ID NO: 422 - DNA, 20 bp, synthetic construct
  misc_feature 1..20: note = chemically synthesized
  source 1..20: mol_type = other DNA
tgcaaattaactgggccaga

SEQ ID NO: 423 - DNA, 20 bp, synthetic construct
  misc_feature 1..20: note = chemically synthesized
  source 1..20: mol_type = other DNA
gaatttttaccacctgtttg

SEQ ID NO: 424 - DNA, 20 bp, synthetic construct
  misc_feature 1..20: note = chemically synthesized
  source 1..20: mol_type = other DNA
ttgtagatgtaacttatttg

SEQ ID NO: 425 - DNA, 20 bp, synthetic construct
  misc_feature 1..20: note = chemically synthesized
  source 1..20: mol_type = other DNA
tatttgtggcactaatttct

SEQ ID NO: 426 - DNA, 20 bp, synthetic construct
  misc_feature 1..20: note = chemically synthesized
  source 1..20: mol_type = other DNA
atttgtggcactaatttcta

SEQ ID NO: 427 - DNA, 20 bp, synthetic construct
  misc_feature 1..20: note = chemically synthesized
  source 1..20: mol_type = other DNA
tggcactaatttctaaggaa

SEQ ID NO: 428 - DNA, 20 bp, synthetic construct
  misc_feature 1..20: note = chemically synthesized
  source 1..20: mol_type = other DNA
gcactaatttctaaggaata

SEQ ID NO: 429 - DNA, 20 bp, synthetic construct
  misc_feature 1..20: note = chemically synthesized
  source 1..20: mol_type = other DNA
tgccccaaatttcctgatgt

SEQ ID NO: 430 - DNA, 20 bp, synthetic construct
  misc_feature 1..20: note = chemically synthesized
  source 1..20: mol_type = other DNA
atttcctgatgtaagtacta

SEQ ID NO: 431 - DNA, 20 bp, synthetic construct
  misc_feature 1..20: note = chemically synthesized
  source 1..20: mol_type = other DNA
tcctgatgtaagtactaaag

SEQ ID NO: 432 - DNA, 20 bp, synthetic construct
  misc_feature 1..20: note = chemically synthesized
  source 1..20: mol_type = other DNA
tatgtttgtttgtctgcatt

SEQ ID NO: 433 - DNA, 20 bp, synthetic construct
  misc_feature 1..20: note = chemically synthesized
  source 1..20: mol_type = other DNA
gcattaagatatatttcctg

SEQ ID NO: 434 - DNA, 20 bp, synthetic construct
  misc_feature 1..20: note = chemically synthesized
  source 1..20: mol_type = other DNA
cattaagatatatttcctga

SEQ ID NO: 435 - DNA, 20 bp, synthetic construct
  misc_feature 1..20: note = chemically synthesized
  source 1..20: mol_type = other DNA
agatatatttcctgaaggtt

SEQ ID NO: 436 - DNA, 20 bp, synthetic construct
  misc_feature 1..20: note = chemically synthesized
  source 1..20: mol_type = other DNA
gatatatttcctgaaggttt

SEQ ID NO: 437 - DNA, 20 bp, synthetic construct
  misc_feature 1..20: note = chemically synthesized
  source 1..20: mol_type = other DNA
aaggtttgggaacctaaaat

SEQ ID NO: 438 - DNA, 20 bp, synthetic construct
  misc_feature 1..20: note = chemically synthesized
  source 1..20: mol_type = other DNA
ctaaaattagaatatttaat

SEQ ID NO: 439 - DNA, 20 bp, synthetic construct
  misc_feature 1..20: note = chemically synthesized
  source 1..20: mol_type = other DNA
ctgacatttatcaccttctt

SEQ ID NO: 440 - DNA, 20 bp, synthetic construct
  misc_feature 1..20: note = chemically synthesized
  source 1..20: mol_type = other DNA
tgacatttatcaccttcttt

SEQ ID NO: 441 - DNA, 20 bp, synthetic construct
  misc_feature 1..20: note = chemically synthesized
  source 1..20: mol_type = other DNA
tttaggatttaccgctcgcc

SEQ ID NO: 442 - DNA, 20 bp, synthetic construct
  misc_feature 1..20: note = chemically synthesized
  source 1..20: mol_type = other DNA
gcccagtgatgttctttcct

SEQ ID NO: 443 - DNA, 20 bp, synthetic construct
  misc_feature 1..20: note = chemically synthesized
  source 1..20: mol_type = other DNA
tctttcctaagctaaattaa

SEQ ID NO: 444 - DNA, 20 bp, synthetic construct
  misc_feature 1..20: note = chemically synthesized
  source 1..20: mol_type = other DNA
agacaaattcaaatcctgca

SEQ ID NO: 445 - DNA, 20 bp, synthetic construct
  misc_feature 1..20: note = chemically synthesized
  source 1..20: mol_type = other DNA
caaattcaaatcctgcatgg

SEQ ID NO: 446 - DNA, 20 bp, synthetic construct
  misc_feature 1..20: note = chemically synthesized
  source 1..20: mol_type = other DNA
tcctgcatggtagccaccaa

SEQ ID NO: 447 - DNA, 20 bp, synthetic construct
  misc_feature 1..20: note = chemically synthesized
  source 1..20: mol_type = other DNA
aaaagcatatatttgaaaaa

SEQ ID NO: 448 - DNA, 20 bp, synthetic construct
  misc_feature 1..20: note = chemically synthesized
  source 1..20: mol_type = other DNA
aaagcatatatttgaaaaac

SEQ ID NO: 449 - DNA, 20 bp, synthetic construct
  misc_feature 1..20: note = chemically synthesized
  source 1..20: mol_type = other DNA
tatatttgaaaaacaggatt

SEQ ID NO: 450 - DNA, 20 bp, synthetic construct
  misc_feature 1..20: note = chemically synthesized
  source 1..20: mol_type = other DNA
ccatattatgcattatttaa

SEQ ID NO: 451 - DNA, 20 bp, synthetic construct
  misc_feature 1..20: note = chemically synthesized
  source 1..20: mol_type = other DNA
tttaatggtatgcaaattat

SEQ ID NO: 452 - DNA, 20 bp, synthetic construct
  misc_feature 1..20: note = chemically synthesized
  source 1..20: mol_type = other DNA
atggtatgcaaattataagt

SEQ ID NO: 453 - DNA, 20 bp, synthetic construct
  misc_feature 1..20: note = chemically synthesized
  source 1..20: mol_type = other DNA
tatgcaaattataagtcaga

SEQ ID NO: 454 - DNA, 20 bp, synthetic construct
  misc_feature 1..20: note = chemically synthesized
  source 1..20: mol_type = other DNA
caaattataagtcagacagt

SEQ ID NO: 455 - DNA, 20 bp, synthetic construct
  misc_feature 1..20: note = chemically synthesized
  source 1..20: mol_type = other DNA
aaattataagtcagacagtt

SEQ ID NO: 456 - DNA, 20 bp, synthetic construct
  misc_feature 1..20: note = chemically synthesized
  source 1..20: mol_type = other DNA
cagttaggaaaaccacactt

SEQ ID NO: 457 - DNA, 20 bp, synthetic construct
  misc_feature 1..20: note = chemically synthesized
  source 1..20: mol_type = other DNA
cacacttcagcattaataaa

SEQ ID NO: 458 - DNA, 20 bp, synthetic construct
  misc_feature 1..20: note = chemically synthesized
  source 1..20: mol_type = other DNA
tattgctatgatttattccc

SEQ ID NO: 459 - DNA, 20 bp, synthetic construct
  misc_feature 1..20: note = chemically synthesized
  source 1..20: mol_type = other DNA
gaaaatttatgccatctgat

SEQ ID NO: 460 - DNA, 20 bp, synthetic construct
  misc_feature 1..20: note = chemically synthesized
  source 1..20: mol_type = other DNA
aatttatgccatctgataag

SEQ ID NO: 461 - DNA, 20 bp, synthetic construct
  misc_feature 1..20: note = chemically synthesized
  source 1..20: mol_type = other DNA
ccatctgataagcggtaacc

SEQ ID NO: 462 - DNA, 20 bp, synthetic construct
  misc_feature 1..20: note = chemically synthesized
  source 1..20: mol_type = other DNA
tgttcctcctacccacccga

SEQ ID NO: 463 - DNA, 20 bp, synthetic construct
  misc_feature 1..20: note = chemically synthesized
  source 1..20: mol_type = other DNA
gttcctcctacccacccgat

SEQ ID NO: 464 - DNA, 20 bp, synthetic construct
  misc_feature 1..20: note = chemically synthesized
  source 1..20: mol_type = other DNA
acccacccgatgggtgtctg

SEQ ID NO: 465 - DNA, 20 bp, synthetic construct
  misc_feature 1..20: note = chemically synthesized
  source 1..20: mol_type = other DNA
cccacccgatgggtgtctgt

SEQ ID NO: 466 - DNA, 20 bp, synthetic construct
  misc_feature 1..20: note = chemically synthesized
  source 1..20: mol_type = other DNA
cgatgggtgtctgtaggaaa

SEQ ID NO: 467 - DNA, 20 bp, synthetic construct
  misc_feature 1..20: note = chemically synthesized
  source 1..20: mol_type = other DNA
gatgggtgtctgtaggaaac

SEQ ID NO: 468 - DNA, 20 bp, synthetic construct
  misc_feature 1..20: note = chemically synthesized
  source 1..20: mol_type = other DNA
gtgtctgtaggaaacaggta

SEQ ID NO: 469 - DNA, 20 bp, synthetic construct
  misc_feature 1..20: note = chemically synthesized
  source 1..20: mol_type = other DNA
tctgtaggaaacaggtacag

SEQ ID NO: 470 - DNA, 20 bp, synthetic construct
  misc_feature 1..20: note = chemically synthesized
  source 1..20: mol_type = other DNA
gtacagaagtacaaaatcat

SEQ ID NO: 471 - DNA, 20 bp, synthetic construct
  misc_feature 1..20: note = chemically synthesized
  source 1..20: mol_type = other DNA
cagaagtacaaaatcataag

SEQ ID NO: 472 - DNA, 20 bp, synthetic construct
  misc_feature 1..20: note = chemically synthesized
  source 1..20: mol_type = other DNA
aagcagcctcattgtcttat

SEQ ID NO: 473 - DNA, 20 bp, synthetic construct
  misc_feature 1..20: note = chemically synthesized
  source 1..20: mol_type = other DNA
cttataagcattaaaaatta

SEQ ID NO: 474 - DNA, 20 bp, synthetic construct
  misc_feature 1..20: note = chemically synthesized
  source 1..20: mol_type = other DNA
agcattaaaaattaaagaac

SEQ ID NO: 475 - DNA, 20 bp, synthetic construct
  misc_feature 1..20: note = chemically synthesized
  source 1..20: mol_type = other DNA
gaacaagcaaacaccaccta

SEQ ID NO: 476 - DNA, 20 bp, synthetic construct
  misc_feature 1..20: note = chemically synthesized
  source 1..20: mol_type = other DNA
acatttattgtgtcaatgtt

SEQ ID NO: 477 - DNA, 20 bp, synthetic construct
  misc_feature 1..20: note = chemically synthesized
  source 1..20: mol_type = other DNA
atgttaagcacactttttaa

SEQ ID NO: 478 - DNA, 20 bp, synthetic construct
  misc_feature 1..20: note = chemically synthesized
  source 1..20: mol_type = other DNA
acactttttaaaagacaaca

SEQ ID NO: 479 - DNA, 20 bp, synthetic construct
  misc_feature 1..20: note = chemically synthesized
  source 1..20: mol_type = other DNA
aaaagacaacatagaatgta

SEQ ID NO: 480 - DNA, 20 bp, synthetic construct
  misc_feature 1..20: note = chemically synthesized
  source 1..20: mol_type = other DNA
aacatagaatgtatagaaac

SEQ ID NO: 481 - DNA, 20 bp, synthetic construct
  misc_feature 1..20: note = chemically synthesized
  source 1..20: mol_type = other DNA
acatagaatgtatagaaaca

SEQ ID NO: 482 - DNA, 20 bp, synthetic construct
  misc_feature 1..20: note = chemically synthesized
  source 1..20: mol_type = other DNA
catagaatgtatagaaacaa

SEQ ID NO: 483 - DNA, 20 bp, synthetic construct
  misc_feature 1..20: note = chemically synthesized
  source 1..20: mol_type = other DNA
atagaatgtatagaaacaag

SEQ ID NO: 484 - DNA, 20 bp, synthetic construct
  misc_feature 1..20: note = chemically synthesized
  source 1..20: mol_type = other DNA
aatgtatagaaacaaggggt

SEQ ID NO: 485 - DNA, 20 bp, synthetic construct
  misc_feature 1..20: note = chemically synthesized
  source 1..20: mol_type = other DNA
atgtatagaaacaaggggtt

SEQ ID NO: 486 - DNA, 20 bp, synthetic construct
  misc_feature 1..20: note = chemically synthesized
  source 1..20: mol_type = other DNA
tgtatagaaacaaggggttg

SEQ ID NO: 487 - DNA, 20 bp, synthetic construct
  misc_feature 1..20: note = chemically synthesized
  source 1..20: mol_type = other DNA
tcatgcgcatttccacaata

SEQ ID NO: 488 - DNA, 20 bp, synthetic construct
  misc_feature 1..20: note = chemically synthesized
  source 1..20: mol_type = other DNA
catgcgcatttccacaatac

SEQ ID NO: 489 - DNA, 20 bp, synthetic construct
  misc_feature 1..20: note = chemically synthesized
  source 1..20: mol_type = other DNA
atttccacaatacaggtaat

SEQ ID NO: 490 - DNA, 20 bp, synthetic construct
  misc_feature 1..20: note = chemically synthesized
  source 1..20: mol_type = other DNA
tttccacaatacaggtaatt

SEQ ID NO: 491 - DNA, 20 bp, synthetic construct
  misc_feature 1..20: note = chemically synthesized
  source 1..20: mol_type = other DNA
cacaatacaggtaattaggt

SEQ ID NO: 492 - DNA, 20 bp, synthetic construct
  misc_feature 1..20: note = chemically synthesized
  source 1..20: mol_type = other DNA
atacaggtaattaggttggc

SEQ ID NO: 493 - DNA, 20 bp, synthetic construct
  misc_feature 1..20: note = chemically synthesized
  source 1..20: mol_type = other DNA
gtaattaggttggctggttt

SEQ ID NO: 494 - DNA, 20 bp, synthetic construct
  misc_feature 1..20: note = chemically synthesized
  source 1..20: mol_type = other DNA
attaggttggctggtttcag

SEQ ID NO: 495 - DNA, 20 bp, synthetic construct
  misc_feature 1..20: note = chemically synthesized
  source 1..20: mol_type = other DNA
ttaggttggctggtttcaga

SEQ ID NO: 496 - DNA, 20 bp, synthetic construct
  misc_feature 1..20: note = chemically synthesized
  source 1..20: mol_type = other DNA
taggttggctggtttcagaa

SEQ ID NO: 497 - DNA, 20 bp, synthetic construct
  misc_feature 1..20: note = chemically synthesized
  source 1..20: mol_type = other DNA
ttggctggtttcagaagggc

SEQ ID NO: 498 - DNA, 20 bp, synthetic construct
  misc_feature 1..20: note = chemically synthesized
  source 1..20: mol_type = other DNA
tggctggtttcagaagggcc

SEQ ID NO: 499 - DNA, 20 bp, synthetic construct
  misc_feature 1..20: note = chemically synthesized
  source 1..20: mol_type = other DNA
ggctggtttcagaagggcca

SEQ ID NO: 500 - DNA, 20 bp, synthetic construct
  misc_feature 1..20: note = chemically synthesized
  source 1..20: mol_type = other DNA
ggccagggcatcactcatga

SEQ ID NO: 501 - DNA, 20 bp, synthetic construct
  misc_feature 1..20: note = chemically synthesized
  source 1..20: mol_type = other DNA
ggcatcactcatgacagcga

SEQ ID NO: 502 - DNA, 20 bp, synthetic construct
  misc_feature 1..20: note = chemically synthesized
  source 1..20: mol_type = other DNA
ctcatgacagcgatggtcca

SEQ ID NO: 503 - DNA, 20 bp, synthetic construct
  misc_feature 1..20: note = chemically synthesized
  source 1..20: mol_type = other DNA
tcatgacagcgatggtccac

SEQ ID NO: 504 - DNA, 20 bp, synthetic construct
  misc_feature 1..20: note = chemically synthesized
  source 1..20: mol_type = other DNA
tggtccacgggccctctcta

SEQ ID NO: 505 - DNA, 20 bp, synthetic construct
  misc_feature 1..20: note = chemically synthesized
  source 1..20: mol_type = other DNA
ggtccacgggccctctctat

SEQ ID NO: 506 - DNA, 20 bp, synthetic construct
  misc_feature 1..20: note = chemically synthesized
  source 1..20: mol_type = other DNA
actgattcactgttccaatg

SEQ ID NO: 507 - DNA, 20 bp, synthetic construct
  misc_feature 1..20: note = chemically synthesized
  source 1..20: mol_type = other DNA
ctgattcactgttccaatgt

SEQ ID NO: 508 - DNA, 20 bp, synthetic construct
  misc_feature 1..20: note = chemically synthesized
  source 1..20: mol_type = other DNA
attaaaaaatataaataaaa

SEQ ID NO: 509 - DNA, 20 bp, synthetic construct
  misc_feature 1..20: note = chemically synthesized
  source 1..20: mol_type = other DNA
atataaataaaatggcgctg

SEQ ID NO: 510 - DNA, 20 bp, synthetic construct
  misc_feature 1..20: note = chemically synthesized
  source 1..20: mol_type = other DNA
tataaataaaatggcgctgc

SEQ ID NO: 511 - DNA, 20 bp, synthetic construct
  misc_feature 1..20: note = chemically synthesized
  source 1..20: mol_type = other DNA
ataaaatggcgctgcaggcc

SEQ ID NO: 512 - DNA, 20 bp, synthetic construct
  misc_feature 1..20: note = chemically synthesized
  source 1..20: mol_type = other DNA
taaaatggcgctgcaggcct

SEQ ID NO: 513 - DNA, 20 bp, synthetic construct
  misc_feature 1..20: note = chemically synthesized
  source 1..20: mol_type = other DNA
atggcgctgcaggcctaggc

SEQ ID NO: 514 - DNA, 20 bp, synthetic construct
  misc_feature 1..20: note = chemically synthesized
  source 1..20: mol_type = other DNA
gcgctgcaggcctaggctgg

SEQ ID NO: 515 - DNA, 20 bp, synthetic construct
  misc_feature 1..20: note = chemically synthesized
  source 1..20: mol_type = other DNA
cgctgcaggcctaggctgga

SEQ ID NO: 516 - DNA, 20 bp, synthetic construct
  misc_feature 1..20: note = chemically synthesized
  source 1..20: mol_type = other DNA
cctaggctggaaggactctg

SEQ ID NO: 517 - DNA, 20 bp, synthetic construct
  misc_feature 1..20: note = chemically synthesized
  source 1..20: mol_type = other DNA
ctaggctggaaggactctgc

SEQ ID NO: 518 - DNA, 20 bp, synthetic construct
  misc_feature 1..20: note = chemically synthesized
  source 1..20: mol_type = other DNA
aggactctgtcttcgcacaa

SEQ ID NO: 519 - DNA, 20 bp, synthetic construct
  misc_feature 1..20: note = chemically synthesized
  source 1..20: mol_type = other DNA
gtcttcgcacaacggcttct

SEQ ID NO: 520 - DNA, 20 bp, synthetic construct
  misc_feature 1..20: note = chemically synthesized
  source 1..20: mol_type = other DNA
cttcgcacaacggcttcttg

SEQ ID NO: 521 - DNA, 20 bp, synthetic construct
  misc_feature 1..20: note = chemically synthesized
  source 1..20: mol_type = other DNA
ttcgcacaacggcttcttgg

SEQ ID NO: 522 - DNA, 20 bp, synthetic construct
  misc_feature 1..20: note = chemically synthesized
  source 1..20: mol_type = other DNA
ggcttcttggaggctactgt

SEQ ID NO: 523 - DNA, 20 bp, synthetic construct
  misc_feature 1..20: note = chemically synthesized
  source 1..20: mol_type = other DNA
tgtcagaaaacatcacaaac

SEQ ID NO: 524 - DNA, 20 bp, synthetic construct
  misc_feature 1..20: note = chemically synthesized
  source 1..20: mol_type = other DNA
cagaaaacatcacaaactag

SEQ ID NO: 525 - DNA, 20 bp, synthetic construct
  misc_feature 1..20: note = chemically synthesized
  source 1..20: mol_type = other DNA
agaaaacatcacaaactagc

SEQ ID NO: 526 - DNA, 20 bp, synthetic construct
  misc_feature 1..20: note = chemically synthesized
  source 1..20: mol_type = other DNA
atcacaaactagcaggatga

SEQ ID NO: 527 - DNA, 20 bp, synthetic construct
  misc_feature 1..20: note = chemically synthesized
  source 1..20: mol_type = other DNA
cagaccacgctgacgtcgac

SEQ ID NO: 528 - DNA, 20 bp, synthetic construct
  misc_feature 1..20: note = chemically synthesized
  source 1..20: mol_type = other DNA
agaccacgctgacgtcgact

SEQ ID NO: 529 - DNA, 20 bp, synthetic construct
  misc_feature 1..20: note = chemically synthesized
  source 1..20: mol_type = other DNA
ccacgctgacgtcgactggg

SEQ ID NO: 530 - DNA, 20 bp, synthetic construct
  misc_feature 1..20: note = chemically synthesized
  source 1..20: mol_type = other DNA
gcacgcgtccaccccacccc

SEQ ID NO: 531 - DNA, 20 bp, synthetic construct
  misc_feature 1..20: note = chemically synthesized
  source 1..20: mol_type = other DNA
cacgcgtccaccccacccct

SEQ ID NO: 532 - DNA, 20 bp, synthetic construct
  misc_feature 1..20: note = chemically synthesized
  source 1..20: mol_type = other DNA
acgcgtccaccccacccctg

SEQ ID NO: 533 - DNA, 20 bp, synthetic construct
  misc_feature 1..20: note = chemically synthesized
  source 1..20: mol_type = other DNA
cgcgtccaccccacccctgg

SEQ ID NO: 534 - DNA, 20 bp, synthetic construct
  misc_feature 1..20: note = chemically synthesized
  source 1..20: mol_type = other DNA
ctgggggcttcaaattttct

SEQ ID NO: 535 - DNA, 20 bp, synthetic construct
  misc_feature 1..20: note = chemically synthesized
  source 1..20: mol_type = other DNA
ttcaaattttctcagaactt

SEQ ID NO: 536 - DNA, 20 bp, synthetic construct
  misc_feature 1..20: note = chemically synthesized
  source 1..20: mol_type = other DNA
tcaaattttctcagaactta

SEQ ID NO: 537 - DNA, 20 bp, synthetic construct
  misc_feature 1..20: note = chemically synthesized
  source 1..20: mol_type = other DNA
caaattttctcagaacttaa

SEQ ID NO: 538 - DNA, 20 bp, synthetic construct
  misc_feature 1..20: note = chemically synthesized
  source 1..20: mol_type = other DNA
ctcagaacttaagggctctc

SEQ ID NO: 539 - DNA, 20 bp, synthetic construct
  misc_feature 1..20: note = chemically synthesized
  source 1..20: mol_type = other DNA
cgaaaactgccacacatctt

SEQ ID NO: 540 - DNA, 20 bp, synthetic construct
  misc_feature 1..20: note = chemically synthesized
  source 1..20: mol_type = other DNA
gccacacatcttgagctctc

SEQ ID NO: 541 - DNA, 20 bp, synthetic construct
  misc_feature 1..20: note = chemically synthesized
  source 1..20: mol_type = other DNA
ccacacatcttgagctctct

SEQ ID NO: 542 - DNA, 20 bp, synthetic construct
  misc_feature 1..20: note = chemically synthesized
  source 1..20: mol_type = other DNA
tctctgggtactacgccgaa

SEQ ID NO: 543 - DNA, 20 bp, synthetic construct
  misc_feature 1..20: note = chemically synthesized
  source 1..20: mol_type = other DNA
ctctgggtactacgccgaat

SEQ ID NO: 544 - DNA, 20 bp, synthetic construct
  misc_feature 1..20: note = chemically synthesized
  source 1..20: mol_type = other DNA
tctgggtactacgccgaatg

SEQ ID NO: 545 - DNA, 20 bp, synthetic construct
  misc_feature 1..20: note = chemically synthesized
  source 1..20: mol_type = other DNA
ctgggtactacgccgaatgg

SEQ ID NO: 546 - DNA, 20 bp, synthetic construct
  misc_feature 1..20: note = chemically synthesized
  source 1..20: mol_type = other DNA
acgccgaatgggggtgtgtg

SEQ ID NO: 547 - DNA, 20 bp, synthetic construct
  misc_feature 1..20: note = chemically synthesized
  source 1..20: mol_type = other DNA
atgggggtgtgtgaagaacc

SEQ ID NO: 548 - DNA, 20 bp, synthetic construct
  misc_feature 1..20: note = chemically synthesized
  source 1..20: mol_type = other DNA
gggtgtgtgaagaacctaga

SEQ ID NO: 549 - DNA, 20 bp, synthetic construct
  misc_feature 1..20: note = chemically synthesized
  source 1..20: mol_type = other DNA
gtgtgtgaagaacctagaaa

SEQ ID NO: 550 - DNA, 20 bp, synthetic construct
  misc_feature 1..20: note = chemically synthesized
  source 1..20: mol_type = other DNA
tgtgtgaagaacctagaaag

SEQ ID NO: 551 - DNA, 20 bp, synthetic construct
  misc_feature 1..20: note = chemically synthesized
  source 1..20: mol_type = other DNA
tgaagaacctagaaagaggt

SEQ ID NO: 552 - DNA, 20 bp, synthetic construct
  misc_feature 1..20: note = chemically synthesized
  source 1..20: mol_type = other DNA
aagaacctagaaagaggttg

SEQ ID NO: 553 - DNA, 20 bp, synthetic construct
  misc_feature 1..20: note = chemically synthesized
  source 1..20: mol_type = other DNA
acctagaaagaggttggaga

SEQ ID NO: 554 - DNA, 20 bp, synthetic construct
  misc_feature 1..20: note = chemically synthesized
  source 1..20: mol_type = other DNA
ctagaaagaggttggagaca

SEQ ID NO: 555 - DNA, 20 bp, synthetic construct
  misc_feature 1..20: note = chemically synthesized
  source 1..20: mol_type = other DNA
tagaaagaggttggagacag

SEQ ID NO: 556 - DNA, 20 bp, synthetic construct
  misc_feature 1..20: note = chemically synthesized
  source 1..20: mol_type = other DNA
gaaagaggttggagacagag

SEQ ID NO: 557 - DNA, 20 bp, synthetic construct
  misc_feature 1..20: note = chemically synthesized
  source 1..20: mol_type = other DNA
aaagaggttggagacagagg

SEQ ID NO: 558 - DNA, 20 bp, synthetic construct
  misc_feature 1..20: note = chemically synthesized
  source 1..20: mol_type = other DNA
aagaggttggagacagagga

SEQ ID NO: 559 - DNA, 20 bp, synthetic construct
  misc_feature 1..20: note = chemically synthesized
  source 1..20: mol_type = other DNA
agaggttggagacagaggag

SEQ ID NO: 560 - DNA, 20 bp, synthetic construct
  misc_feature 1..20: note = chemically synthesized
  source 1..20: mol_type = other DNA
gaggttggagacagaggagg

SEQ ID NO: 561 - DNA, 20 bp, synthetic construct
  misc_feature 1..20: note = chemically synthesized
  source 1..20: mol_type = other DNA
acagaggagggggaaaaaaa

SEQ ID NO: 562 - DNA, 20 bp, synthetic construct
  misc_feature 1..20: note = chemically synthesized
  source 1..20: mol_type = other DNA
ggagggggaaaaaaaaagta

SEQ ID NO: 563 - DNA, 20 bp, synthetic construct
  misc_feature 1..20: note = chemically synthesized
  source 1..20: mol_type = other DNA
gagggggaaaaaaaaagtac

SEQ ID NO: 564 - DNA, 20 bp, synthetic construct
  misc_feature 1..20: note = chemically synthesized
  source 1..20: mol_type = other DNA
aaaaaagtacaggtgtgact

SEQ ID NO: 565 - DNA, 20 bp, synthetic construct
  misc_feature 1..20: note = chemically synthesized
  source 1..20: mol_type = other DNA
atgattttctgttctctaac

SEQ ID NO: 566 - DNA, 20 bp, synthetic construct
  misc_feature 1..20: note = chemically synthesized
  source 1..20: mol_type = other DNA
ctaactagctttttaaaaat

SEQ ID NO: 567 - DNA, 20 bp, synthetic construct
  misc_feature 1..20: note = chemically synthesized
  source 1..20: mol_type = other DNA
attagaacttaaaccaacca

SEQ ID NO: 568 - DNA, 20 bp, synthetic construct
  misc_feature 1..20: note = chemically synthesized
  source 1..20: mol_type = other DNA
ttagaacttaaaccaaccac

SEQ ID NO: 569 - DNA, 20 bp, synthetic construct
  misc_feature 1..20: note = chemically synthesized
  source 1..20: mol_type = other DNA
acttaaaccaaccacaggtc

SEQ ID NO: 570 - DNA, 20 bp, synthetic construct
  misc_feature 1..20: note = chemically synthesized
  source 1..20: mol_type = other DNA
ccaaccacaggtcgagccac

SEQ ID NO: 571 - DNA, 20 bp, synthetic construct
  misc_feature 1..20: note = chemically synthesized
  source 1..20: mol_type = other DNA
ggtcgagccactggcatctt

SEQ ID NO: 572 - DNA, 20 bp, synthetic construct
  misc_feature 1..20: note = chemically synthesized
  source 1..20: mol_type = other DNA
cttaagcatgatttcaaact

SEQ ID NO: 573 - DNA, 20 bp, synthetic construct
  misc_feature 1..20: note = chemically synthesized
  source 1..20: mol_type = other DNA
aaactcagcctcccctcccc

SEQ ID NO: 574 - DNA, 20 bp, synthetic construct
  misc_feature 1..20: note = chemically synthesized
  source 1..20: mol_type = other DNA
cccaagtatctctgacctct

SEQ ID NO: 575 - DNA, 20 bp, synthetic construct
  misc_feature 1..20: note = chemically synthesized
  source 1..20: mol_type = other DNA
tccctcccttccgtcccccc

SEQ ID NO: 576 - DNA, 20 bp, synthetic construct
  misc_feature 1..20: note = chemically synthesized
  source 1..20: mol_type = other DNA
ccctcccttccgtcccccca

SEQ ID NO: 577 - DNA, 20 bp, synthetic construct
  misc_feature 1..20: note = chemically synthesized
  source 1..20: mol_type = other DNA
ctcccttccgtccccccaag

SEQ ID NO: 578 - DNA, 20 bp, synthetic construct
  misc_feature 1..20: note = chemically synthesized
  source 1..20: mol_type = other DNA
tcccttccgtccccccaagg

SEQ ID NO: 579 - DNA, 20 bp, synthetic construct
  misc_feature 1..20: note = chemically synthesized
  source 1..20: mol_type = other DNA
ccgtccccccaaggaggacc

SEQ ID NO: 580 - DNA, 20 bp, synthetic construct
  misc_feature 1..20: note = chemically synthesized
  source 1..20: mol_type = other DNA
cgtccccccaaggaggaccc

SEQ ID NO: 581 - DNA, 20 bp, synthetic construct
  misc_feature 1..20: note = chemically synthesized
  source 1..20: mol_type = other DNA
acccctgcccaattgtatga

SEQ ID NO: 582 - DNA, 20 bp, synthetic construct
  misc_feature 1..20: note = chemically synthesized
  source 1..20: mol_type = other DNA
tatgatagtcctaataaact

SEQ ID NO: 583 - DNA, 20 bp, synthetic construct
  misc_feature 1..20: note = chemically synthesized
  source 1..20: mol_type = other DNA
atgatagtcctaataaactc

SEQ ID NO: 584 - DNA, 20 bp, synthetic construct
  misc_feature 1..20: note = chemically synthesized
  source 1..20: mol_type = other DNA
taataaactcgggacacacc

SEQ ID NO: 585 - DNA, 20 bp, synthetic construct
  misc_feature 1..20: note = chemically synthesized
  source 1..20: mol_type = other DNA
taaactcgggacacacctgg

SEQ ID NO: 586 - DNA, 20 bp, synthetic construct
  misc_feature 1..20: note = chemically synthesized
  source 1..20: mol_type = other DNA
aaactcgggacacacctgga

SEQ ID NO: 587 - DNA, 20 bp, synthetic construct
  misc_feature 1..20: note = chemically synthesized
  source 1..20: mol_type = other DNA
aaacacttgcccttatgact

SEQ ID NO: 588 - DNA, 20 bp, synthetic construct
  misc_feature 1..20: note = chemically synthesized
  source 1..20: mol_type = other DNA
cccttatgactgagaaaact

SEQ ID NO: 589 - DNA, 20 bp, synthetic construct
  misc_feature 1..20: note = chemically synthesized
  source 1..20: mol_type = other DNA
tatgactgagaaaacttagt

SEQ ID NO: 590 - DNA, 20 bp, synthetic construct
  misc_feature 1..20: note = chemically synthesized
  source 1..20: mol_type = other DNA
tgagaaaacttagtaagaaa

SEQ ID NO: 591 - DNA, 20 bp, synthetic construct
  misc_feature 1..20: note = chemically synthesized
  source 1..20: mol_type = other DNA
cttagtaagaaacagtcctt

SEQ ID NO: 592 - DNA, 20 bp, synthetic construct
  misc_feature 1..20: note = chemically synthesized
  source 1..20: mol_type = other DNA
taagaaacagtcctttggtt

SEQ ID NO: 593 - DNA, 20 bp, synthetic construct
  misc_feature 1..20: note = chemically synthesized
  source 1..20: mol_type = other DNA
aagaaacagtcctttggttg

SEQ ID NO: 594 - DNA, 20 bp, synthetic construct
  misc_feature 1..20: note = chemically synthesized
  source 1..20: mol_type = other DNA
gaaacagtcctttggttgag

SEQ ID NO: 595 - DNA, 20 bp, synthetic construct
  misc_feature 1..20: note = chemically synthesized
  source 1..20: mol_type = other DNA
aacagtcctttggttgagga

SEQ ID NO: 596 - DNA, 20 bp, synthetic construct
  misc_feature 1..20: note = chemically synthesized
  source 1..20: mol_type = other DNA
agtcctttggttgaggagag

SEQ ID NO: 597 - DNA, 20 bp, synthetic construct
  misc_feature 1..20: note = chemically synthesized
  source 1..20: mol_type = other DNA
gtcctttggttgaggagagc

SEQ ID NO: 598 - DNA, 20 bp, synthetic construct
  misc_feature 1..20: note = chemically synthesized
  source 1..20: mol_type = other DNA
cctttggttgaggagagcgg

SEQ ID NO: 599 - DNA, 20 bp, synthetic construct
  misc_feature 1..20: note = chemically synthesized
  source 1..20: mol_type = other DNA
tttggttgaggagagcggga

SEQ ID NO: 600 - DNA, 20 bp, synthetic construct
  misc_feature 1..20: note = chemically synthesized
  source 1..20: mol_type = other DNA
ttggttgaggagagcgggag

SEQ ID NO: 601 - DNA, 20 bp, synthetic construct
  misc_feature 1..20: note = chemically synthesized
  source 1..20: mol_type = other DNA
tggttgaggagagcgggaga

SEQ ID NO: 602 - DNA, 20 bp, synthetic construct
  misc_feature 1..20: note = chemically synthesized
  source 1..20: mol_type = other DNA
gttgaggagagcgggagagg

SEQ ID NO: 603 - DNA, 20 bp, synthetic construct
  misc_feature 1..20: note = chemically synthesized
  source 1..20: mol_type = other DNA
ttgaggagagcgggagaggg

SEQ ID NO: 604 - DNA, 20 bp, synthetic construct
  misc_feature 1..20: note = chemically synthesized
  source 1..20: mol_type = other DNA
gaggagagcgggagagggag

SEQ ID NO: 605 - DNA, 20 bp, synthetic construct
  misc_feature 1..20: note = chemically synthesized
  source 1..20: mol_type = other DNA
aggagagcgggagagggagg

SEQ ID NO: 606 - DNA, 20 bp, synthetic construct
  misc_feature 1..20: note = chemically synthesized
  source 1..20: mol_type = other DNA
ggagagcgggagagggagga

SEQ ID NO: 607 - DNA, 20 bp, synthetic construct
  misc_feature 1..20: note = chemically synthesized
  source 1..20: mol_type = other DNA
agcgggagagggaggaggga

SEQ ID NO: 608 - DNA, 20 bp, synthetic construct
  misc_feature 1..20: note = chemically synthesized
  source 1..20: mol_type = other DNA
gcgggagagggaggagggaa

SEQ ID NO: 609 - DNA, 20 bp, synthetic construct
  misc_feature 1..20: note = chemically synthesized
  source 1..20: mol_type = other DNA
cgggagagggaggagggaaa

SEQ ID NO: 610 - DNA, 20 bp, synthetic construct
  misc_feature 1..20: note = chemically synthesized
  source 1..20: mol_type = other DNA
gggagagggaggagggaaag

SEQ ID NO: 611 - DNA, 20 bp, synthetic construct
  misc_feature 1..20: note = chemically synthesized
  source 1..20: mol_type = other DNA
aaaataataataaaattata

SEQ ID NO: 612 - DNA, 20 bp, synthetic construct
  misc_feature 1..20: note = chemically synthesized
  source 1..20: mol_type = other DNA
aaaaatcaaaactgatgtaa

SEQ ID NO: 613 - DNA, 20 bp, synthetic construct
  misc_feature 1..20: note = chemically synthesized
  source 1..20: mol_type = other DNA
aatcaaaactgatgtaaaag

SEQ ID NO: 614 - DNA, 20 bp, synthetic construct
  misc_feature 1..20: note = chemically synthesized
  source 1..20: mol_type = other DNA
cgaaaacatgaaatgtcatc

SEQ ID NO: 615 - DNA, 20 bp, synthetic construct
  misc_feature 1..20: note = chemically synthesized
  source 1..20: mol_type = other DNA
tgtcatcaagttcaacgtca

SEQ ID NO: 616 - DNA, 20 bp, synthetic construct
  misc_feature 1..20: note = chemically synthesized
  source 1..20: mol_type = other DNA
catcaagttcaacgtcaaag

SEQ ID NO: 617 - DNA, 20 bp, synthetic construct
  misc_feature 1..20: note = chemically synthesized
  source 1..20: mol_type = other DNA
caaagcagccaatgatttac

SEQ ID NO: 618 - DNA, 20 bp, synthetic construct
  misc_feature 1..20: note = chemically synthesized
  source 1..20: mol_type = other DNA
aagcagccaatgatttacaa

SEQ ID NO: 619 - DNA, 20 bp, synthetic construct
  misc_feature 1..20: note = chemically synthesized
  source 1..20: mol_type = other DNA
agcagccaatgatttacaag

SEQ ID NO: 620 - DNA, 20 bp, synthetic construct
  misc_feature 1..20: note = chemically synthesized
  source 1..20: mol_type = other DNA
aagaggcgaacaaatctctg

SEQ ID NO: 621 - DNA, 20 bp, synthetic construct
  misc_feature 1..20: note = chemically synthesized
  source 1..20: mol_type = other DNA
gaggcgaacaaatctctgaa

SEQ ID NO: 622 - DNA, 20 bp, synthetic construct
  misc_feature 1..20: note = chemically synthesized
  source 1..20: mol_type = other DNA
caaatctctgaagagaaaac

SEQ ID NO: 623 - DNA, 20 bp, synthetic construct
  misc_feature 1..20: note = chemically synthesized
  source 1..20: mol_type = other DNA
aagagaaaaccagaacccaa

SEQ ID NO: 624 - DNA, 20 bp, synthetic construct
  misc_feature 1..20: note = chemically synthesized
  source 1..20: mol_type = other DNA
gagaaaaccagaacccaaaa

SEQ ID NO: 625 - DNA, 20 bp, synthetic construct
  misc_feature 1..20: note = chemically synthesized
  source 1..20: mol_type = other DNA
attgcaccaaaaactgcctg

SEQ ID NO: 626 - DNA, 20 bp, synthetic construct
  misc_feature 1..20: note = chemically synthesized
  source 1..20: mol_type = other DNA
tgtagtttctttcaaacatg

SEQ ID NO: 627 - DNA, 20 bp, synthetic construct
  misc_feature 1..20: note = chemically synthesized
  source 1..20: mol_type = other DNA
tgcagttttcttttcttttt

SEQ ID NO: 628 - DNA, 20 bp, synthetic construct
  misc_feature 1..20: note = chemically synthesized
  source 1..20: mol_type = other DNA
agttttcttttcttttttgg

SEQ ID NO: 629 - DNA, 20 bp, synthetic construct
  misc_feature 1..20: note = chemically synthesized
  source 1..20: mol_type = other DNA
gttttcttttcttttttgga

SEQ ID NO: 630 - DNA, 20 bp, synthetic construct
  misc_feature 1..20: note = chemically synthesized
  source 1..20: mol_type = other DNA
ttttcttttcttttttggaa

SEQ ID NO: 631 - DNA, 20 bp, synthetic construct
  misc_feature 1..20: note = chemically synthesized
  source 1..20: mol_type = other DNA
tttcttttcttttttggaag

SEQ ID NO: 632 - DNA, 20 bp, synthetic construct
  misc_feature 1..20: note = chemically synthesized
  source 1..20: mol_type = other DNA
ttcttttcttttttggaagg

SEQ ID NO: 633 - DNA, 20 bp, synthetic construct
  misc_feature 1..20: note = chemically synthesized
  source 1..20: mol_type = other DNA
ttttcttttttggaaggggg

SEQ ID NO: 634 - DNA, 20 bp, synthetic construct
  misc_feature 1..20: note = chemically synthesized
  source 1..20: mol_type = other DNA
tttcttttttggaaggggga

SEQ ID NO: 635 - DNA, 20 bp, synthetic construct
  misc_feature 1..20: note = chemically synthesized
  source 1..20: mol_type = other DNA
ttttggaagggggaaggcaa

SEQ ID NO: 636 - DNA, 20 bp, synthetic construct
  misc_feature 1..20: note = chemically synthesized
  source 1..20: mol_type = other DNA
gaagggggaaggcaatggtg

SEQ ID NO: 637 - DNA, 20 bp, synthetic construct
  misc_feature 1..20: note = chemically synthesized
  source 1..20: mol_type = other DNA
aagggggaaggcaatggtga

SEQ ID NO: 638 - DNA, 20 bp, synthetic construct
  misc_feature 1..20: note = chemically synthesized
  source 1..20: mol_type = other DNA
agggggaaggcaatggtgaa

SEQ ID NO: 639 - DNA, 20 bp, synthetic construct
  misc_feature 1..20: note = chemically synthesized
  source 1..20: mol_type = other DNA
gggaaggcaatggtgaaggg

SEQ ID NO: 640 - DNA, 20 bp, synthetic construct
  misc_feature 1..20: note = chemically synthesized
  source 1..20: mol_type = other DNA
aaggcaatggtgaagggaag

SEQ ID NO: 641 - DNA, 20 bp, synthetic construct
  misc_feature 1..20: note = chemically synthesized
  source 1..20: mol_type = other DNA
aggcaatggtgaagggaaga

SEQ ID NO: 642 - DNA, 20 bp, synthetic construct
  misc_feature 1..20: note = chemically synthesized
  source 1..20: mol_type = other DNA
ggcaatggtgaagggaagaa

SEQ ID NO: 643 - DNA, 20 bp, synthetic construct
  misc_feature 1..20: note = chemically synthesized
  source 1..20: mol_type = other DNA
caatggtgaagggaagaagg

SEQ ID NO: 644 - DNA, 20 bp, synthetic construct
  misc_feature 1..20: note = chemically synthesized
  source 1..20: mol_type = other DNA
tggtgaagggaagaagggag

SEQ ID NO: 645 - DNA, 20 bp, synthetic construct
  misc_feature 1..20: note = chemically synthesized
  source 1..20: mol_type = other DNA
agggagtggttattttcctc

SEQ ID NO: 646 - DNA, 20 bp, synthetic construct
  misc_feature 1..20: note = chemically synthesized
  source 1..20: mol_type = other DNA
gggagtggttattttcctcc

SEQ ID NO: 647 - DNA, 20 bp, synthetic construct
  misc_feature 1..20: note = chemically synthesized
  source 1..20: mol_type = other DNA
ggagtggttattttcctccg

SEQ ID NO: 648 - DNA, 20 bp, synthetic construct
  misc_feature 1..20: note = chemically synthesized
  source 1..20: mol_type = other DNA
ccggggttcctcccttgctg

SEQ ID NO: 649 - DNA, 20 bp, synthetic construct
  misc_feature 1..20: note = chemically synthesized
  source 1..20: mol_type = other DNA
ttgctgtggacattgacttg

SEQ ID NO: 650 - DNA, 20 bp, synthetic construct
  misc_feature 1..20: note = chemically synthesized
  source 1..20: mol_type = other DNA
ctgtggacattgacttgaag

SEQ ID NO: 651 - DNA, 20 bp, synthetic construct
  misc_feature 1..20: note = chemically synthesized
  source 1..20: mol_type = other DNA
tggacattgacttgaagcag

SEQ ID NO: 652 - DNA, 20 bp, synthetic construct
  misc_feature 1..20: note = chemically synthesized
  source 1..20: mol_type = other DNA
ttgacttgaagcagcagaac

SEQ ID NO: 653 - DNA, 20 bp, synthetic construct
  misc_feature 1..20: note = chemically synthesized
  source 1..20: mol_type = other DNA
tgacttgaagcagcagaact

SEQ ID NO: 654 - DNA, 20 bp, synthetic construct
  misc_feature 1..20: note = chemically synthesized
  source 1..20: mol_type = other DNA
acttgaagcagcagaactgg

SEQ ID NO: 655 - DNA, 20 bp, synthetic construct
  misc_feature 1..20: note = chemically synthesized
  source 1..20: mol_type = other DNA
aagcagcagaactgggagtc

SEQ ID NO: 656 - DNA, 20 bp, synthetic construct
  misc_feature 1..20: note = chemically synthesized
  source 1..20: mol_type = other DNA
actgggagtccggatgtgcc

SEQ ID NO: 657 - DNA, 20 bp, synthetic construct
  misc_feature 1..20: note = chemically synthesized
  source 1..20: mol_type = other DNA
ctgggagtccggatgtgccg

SEQ ID NO: 658 - DNA, 20 bp, synthetic construct
  misc_feature 1..20: note = chemically synthesized
  source 1..20: mol_type = other DNA
ggagtccggatgtgccgagg

SEQ ID NO: 659 - DNA, 20 bp, synthetic construct
  misc_feature 1..20: note = chemically synthesized
  source 1..20: mol_type = other DNA
agtccggatgtgccgaggaa

SEQ ID NO: 660 - DNA, 20 bp, synthetic construct
  misc_feature 1..20: note = chemically synthesized
  source 1..20: mol_type = other DNA
gtccggatgtgccgaggaag

SEQ ID NO: 661 - DNA, 20 bp, synthetic construct
  misc_feature 1..20: note = chemically synthesized
  source 1..20: mol_type = other DNA
tccggatgtgccgaggaaga

SEQ ID NO: 662 - DNA, 20 bp, synthetic construct
  misc_feature 1..20: note = chemically synthesized
  source 1..20: mol_type = other DNA
gaggaagagggctaccactg

SEQ ID NO: 663 - DNA, 20 bp, synthetic construct
  misc_feature 1..20: note = chemically synthesized
  source 1..20: mol_type = other DNA
gggctaccactgtggcattc

SEQ ID NO: 664 - DNA, 20 bp, synthetic construct
  misc_feature 1..20: note = chemically synthesized
  source 1..20: mol_type = other DNA
ggctaccactgtggcattcc

SEQ ID NO: 665 - DNA, 20 bp, synthetic construct
  misc_feature 1..20: note = chemically synthesized
  source 1..20: mol_type = other DNA
cattccaggcctcgttgcca

SEQ ID NO: 666 - DNA, 20 bp, synthetic construct
  misc_feature 1..20: note = chemically synthesized
  source 1..20: mol_type = other DNA
ctcgttgccatggcgacccg

SEQ ID NO: 667 - DNA, 20 bp, synthetic construct
  misc_feature 1..20: note = chemically synthesized
  source 1..20: mol_type = other DNA
gttgccatggcgacccgaag

SEQ ID NO: 668 - DNA, 20 bp, synthetic construct
  misc_feature 1..20: note = chemically synthesized
  source 1..20: mol_type = other DNA
ttgccatggcgacccgaagc

SEQ ID NO: 669 - DNA, 20 bp, synthetic construct
  misc_feature 1..20: note = chemically synthesized
  source 1..20: mol_type = other DNA
tgccatggcgacccgaagca

SEQ ID NO: 670 - DNA, 20 bp, synthetic construct
  misc_feature 1..20: note = chemically synthesized
  source 1..20: mol_type = other DNA
gccatggcgacccgaagcag

SEQ ID NO: 671 - DNA, 20 bp, synthetic construct
  misc_feature 1..20: note = chemically synthesized
  source 1..20: mol_type = other DNA
ggcgacccgaagcaggggcc

SEQ ID NO: 672 - DNA, 20 bp, synthetic construct
  misc_feature 1..20: note = chemically synthesized
  source 1..20: mol_type = other DNA
gcgacccgaagcaggggcct

SEQ ID NO: 673 - DNA, 20 bp, synthetic construct
  misc_feature 1..20: note = chemically synthesized
  source 1..20: mol_type = other DNA
cgacccgaagcaggggcctg

SEQ ID NO: 674 - DNA, 20 bp, synthetic construct
  misc_feature 1..20: note = chemically synthesized
  source 1..20: mol_type = other DNA
gggcctcctctcccctgact

SEQ ID NO: 675 - DNA, 20 bp, synthetic construct
  misc_feature 1..20: note = chemically synthesized
  source 1..20: mol_type = other DNA
tctcccctgacttggcgccg

SEQ ID NO: 676 - DNA, 20 bp, synthetic construct
  misc_feature 1..20: note = chemically synthesized
  source 1..20: mol_type = other DNA
ctcccctgacttggcgccgc

SEQ ID NO: 677 - DNA, 20 bp, synthetic construct
  misc_feature 1..20: note = chemically synthesized
  source 1..20: mol_type = other DNA
cccctgacttggcgccgcag

SEQ ID NO: 678 - DNA, 20 bp, synthetic construct
  misc_feature 1..20: note = chemically synthesized
  source 1..20: mol_type = other DNA
ccctgacttggcgccgcagg

SEQ ID NO: 679 - DNA, 20 bp, synthetic construct
  misc_feature 1..20: note = chemically synthesized
  source 1..20: mol_type = other DNA
acttggcgccgcaggaggcc

SEQ ID NO: 680 - DNA, 20 bp, synthetic construct
  misc_feature 1..20: note = chemically synthesized
  source 1..20: mol_type = other DNA
cttggcgccgcaggaggccc

SEQ ID NO: 681 - DNA, 20 bp, synthetic construct
  misc_feature 1..20: note = chemically synthesized
  source 1..20: mol_type = other DNA
ttggcgccgcaggaggcccg

SEQ ID NO: 682 - DNA, 20 bp, synthetic construct
  misc_feature 1..20: note = chemically synthesized
  source 1..20: mol_type = other DNA
gccgcaggaggcccggggtc

SEQ ID NO: 683 - DNA, 20 bp, synthetic construct
  misc_feature 1..20: note = chemically synthesized
  source 1..20: mol_type = other DNA
gaggcccggggtctggatct

SEQ ID NO: 684 - DNA, 20 bp, synthetic construct
  misc_feature 1..20: note = chemically synthesized
  source 1..20: mol_type = other DNA
ctctcacgcatcccacccct

SEQ ID NO: 685 - DNA, 20 bp, synthetic construct
  misc_feature 1..20: note = chemically synthesized
  source 1..20: mol_type = other DNA
tcacgcatcccacccctgag

SEQ ID NO: 686 - DNA, 20 bp, synthetic construct
  misc_feature 1..20: note = chemically synthesized
  source 1..20: mol_type = other DNA
acgcatcccacccctgagca

SEQ ID NO: 687 - DNA, 20 bp, synthetic construct
  misc_feature 1..20: note = chemically synthesized
  source 1..20: mol_type = other DNA
catcccacccctgagcagag

SEQ ID NO: 688 - DNA, 20 bp, synthetic construct
  misc_feature 1..20: note = chemically synthesized
  source 1..20: mol_type = other DNA
cccacccctgagcagagcag

SEQ ID NO: 689 - DNA, 20 bp, synthetic construct
  misc_feature 1..20: note = chemically synthesized
  source 1..20: mol_type = other DNA
cacccctgagcagagcagcg

SEQ ID NO: 690 - DNA, 20 bp, synthetic construct
  misc_feature 1..20: note = chemically synthesized
  source 1..20: mol_type = other DNA
tgagcagagcagcggagacc

SEQ ID NO: 691 - DNA, 20 bp, synthetic construct
  misc_feature 1..20: note = chemically synthesized
  source 1..20: mol_type = other DNA
gagcagagcagcggagacct

SEQ ID NO: 692 - DNA, 20 bp, synthetic construct
  misc_feature 1..20: note = chemically synthesized
  source 1..20: mol_type = other DNA
gagcagcggagacctgggct

SEQ ID NO: 693 - DNA, 20 bp, synthetic construct
  misc_feature 1..20: note = chemically synthesized
  source 1..20: mol_type = other DNA
agcagcggagacctgggctg

SEQ ID NO: 694 - DNA, 20 bp, synthetic construct
  misc_feature 1..20: note = chemically synthesized
  source 1..20: mol_type = other DNA
gcagcggagacctgggctga

SEQ ID NO: 695 - DNA, 20 bp, synthetic construct
  misc_feature 1..20: note = chemically synthesized
  source 1..20: mol_type = other DNA
cagcggagacctgggctgag

SEQ ID NO: 696 - DNA, 20 bp, synthetic construct
  misc_feature 1..20: note = chemically synthesized
  source 1..20: mol_type = other DNA
gctgaggggcatgctgcgtc

SEQ ID NO: 697 - DNA, 20 bp, synthetic construct
  misc_feature 1..20: note = chemically synthesized
  source 1..20: mol_type = other DNA
ctgaggggcatgctgcgtcc

SEQ ID NO: 698 - DNA, 20 bp, synthetic construct
  misc_feature 1..20: note = chemically synthesized
  source 1..20: mol_type = other DNA
aggggcatgctgcgtccagg

SEQ ID NO: 699 - DNA, 20 bp, synthetic construct
  misc_feature 1..20: note = chemically synthesized
  source 1..20: mol_type = other DNA
ggggcatgctgcgtccaggt

SEQ ID NO: 700 - DNA, 20 bp, synthetic construct
  misc_feature 1..20: note = chemically synthesized
  source 1..20: mol_type = other DNA
tgctgcgtccaggtgggttc

SEQ ID NO: 701 - DNA, 20 bp, synthetic construct
  misc_feature 1..20: note = chemically synthesized
  source 1..20: mol_type = other DNA
gctgcgtccaggtgggttct

SEQ ID NO: 702 - DNA, 20 bp, synthetic construct
  misc_feature 1..20: note = chemically synthesized
  source 1..20: mol_type = other DNA
ctgcgtccaggtgggttctg

SEQ ID NO: 703 - DNA, 20 bp, synthetic construct
  misc_feature 1..20: note = chemically synthesized
  source 1..20: mol_type = other DNA
gttctggggaatcccattcc

SEQ ID NO: 704 - DNA, 20 bp, synthetic construct
  misc_feature 1..20: note = chemically synthesized
  source 1..20: mol_type = other DNA
ggggaatcccattcccagtc

SEQ ID NO: 705 - DNA, 20 bp, synthetic construct
  misc_feature 1..20: note = chemically synthesized
  source 1..20: mol_type = other DNA
cccattcccagtccagcgct

SEQ ID NO: 706 - DNA, 20 bp, synthetic construct
  misc_feature 1..20: note = chemically synthesized
  source 1..20: mol_type = other DNA
agcgctaagtcactgtcgtc

SEQ ID NO: 707 - DNA, 20 bp, synthetic construct
  misc_feature 1..20: note = chemically synthesized
  source 1..20: mol_type = other DNA
gcgctaagtcactgtcgtcg

SEQ ID NO: 708 - DNA, 20 bp, synthetic construct
  misc_feature 1..20: note = chemically synthesized
  source 1..20: mol_type = other DNA
cactgtcgtcgaggcccctt

SEQ ID NO: 709 - DNA, 20 bp, synthetic construct
  misc_feature 1..20: note = chemically synthesized
  source 1..20: mol_type = other DNA
taccaatattcaaattctaa

SEQ ID NO: 710 - DNA, 20 bp, synthetic construct
  misc_feature 1..20: note = chemically synthesized
  source 1..20: mol_type = other DNA
tattcaaattctaatagaca

SEQ ID NO: 711 - DNA, 20 bp, synthetic construct
  misc_feature 1..20: note = chemically synthesized
  source 1..20: mol_type = other DNA
ctaatagacaaagtatatca

SEQ ID NO: 712 - DNA, 20 bp, synthetic construct
  misc_feature 1..20: note = chemically synthesized
  source 1..20: mol_type = other DNA
taatagacaaagtatatcat

SEQ ID NO: 713 - DNA, 20 bp, synthetic construct
  misc_feature 1..20: note = chemically synthesized
  source 1..20: mol_type = other DNA
atgggcatgtaccacgttca

SEQ ID NO: 714 - DNA, 20 bp, synthetic construct
  misc_feature 1..20: note = chemically synthesized
  source 1..20: mol_type = other DNA
ccacgttcacagctatttaa

SEQ ID NO: 715 - DNA, 20 bp, synthetic construct
  misc_feature 1..20: note = chemically synthesized
  source 1..20: mol_type = other DNA
ttcacagctatttaaaagca

SEQ ID NO: 716 - DNA, 20 bp, synthetic construct
  misc_feature 1..20: note = chemically synthesized
  source 1..20: mol_type = other DNA
ttaaaagcacagccccccta

SEQ ID NO: 717 - DNA, 20 bp, synthetic construct
  misc_feature 1..20: note = chemically synthesized
  source 1..20: mol_type = other DNA
taaaagcacagcccccctat

SEQ ID NO: 718 - DNA, 20 bp, synthetic construct
  misc_feature 1..20: note = chemically synthesized
  source 1..20: mol_type = other DNA
gcacagcccccctatgggtt

SEQ ID NO: 719 - DNA, 20 bp, synthetic construct
  misc_feature 1..20: note = chemically synthesized
  source 1..20: mol_type = other DNA
cacagcccccctatgggttt

SEQ ID NO: 720 - DNA, 20 bp, synthetic construct
  misc_feature 1..20: note = chemically synthesized
  source 1..20: mol_type = other DNA
acagcccccctatgggttta

SEQ ID NO: 721 - DNA, 20 bp, synthetic construct
  misc_feature 1..20: note = chemically synthesized
  source 1..20: mol_type = other DNA
cagcccccctatgggtttag

SEQ ID NO: 722 - DNA, 20 bp, synthetic construct
  misc_feature 1..20: note = chemically synthesized
  source 1..20: mol_type = other DNA
gggtttaggggctcccgctt

SEQ ID NO: 723 - DNA, 20 bp, synthetic construct
  misc_feature 1..20: note = chemically synthesized
  source 1..20: mol_type = other DNA
gtttaggggctcccgcttta

SEQ ID NO: 724 - DNA, 20 bp, synthetic construct
  misc_feature 1..20: note = chemically synthesized
  source 1..20: mol_type = other DNA
tttaggggctcccgctttag

SEQ ID NO: 725 - DNA, 20 bp, synthetic construct
  misc_feature 1..20: note = chemically synthesized
  source 1..20: mol_type = other DNA
ctcccgctttagaggatact

SEQ ID NO: 726 - DNA, 20 bp, synthetic construct
  misc_feature 1..20: note = chemically synthesized
  source 1..20: mol_type = other DNA
tcccgctttagaggatactt

SEQ ID NO: 727 - DNA, 20 bp, synthetic construct
  misc_feature 1..20: note = chemically synthesized
  source 1..20: mol_type = other DNA
cccgctttagaggatacttg

SEQ ID NO: 728 - DNA, 20 bp, synthetic construct
  misc_feature 1..20: note = chemically synthesized
  source 1..20: mol_type = other DNA
ttagaggatacttggggaaa

SEQ ID NO: 729 - DNA, 20 bp, synthetic construct
  misc_feature 1..20: note = chemically synthesized
  source 1..20: mol_type = other DNA
cttttctaccatccctatga

SEQ ID NO: 730 - DNA, 20 bp, synthetic construct
  misc_feature 1..20: note = chemically synthesized
  source 1..20: mol_type = other DNA
atacacgtgctcccttgaaa

SEQ ID NO: 731 - DNA, 20 bp, synthetic construct
  misc_feature 1..20: note = chemically synthesized
  source 1..20: mol_type = other DNA
aaatagtttttgccacttta

SEQ ID NO: 732 - DNA, 20 bp, synthetic construct
  misc_feature 1..20: note = chemically synthesized
  source 1..20: mol_type = other DNA
agtttttgccactttacaga

SEQ ID NO: 733 - DNA, 20 bp, synthetic construct
  misc_feature 1..20: note = chemically synthesized
  source 1..20: mol_type = other DNA
gtttttgccactttacagaa

SEQ ID NO: 734 - DNA, 20 bp, synthetic construct
  misc_feature 1..20: note = chemically synthesized
  source 1..20: mol_type = other DNA
acagaaaggaaaaacgtatt

SEQ ID NO: 735 - DNA, 20 bp, synthetic construct
  misc_feature 1..20: note = chemically synthesized
  source 1..20: mol_type = other DNA
acgtatttggatcaaccatc

SEQ ID NO: 736 - DNA, 20 bp, synthetic construct
  misc_feature 1..20: note = chemically synthesized
  source 1..20: mol_type = other DNA
atcaaccatcgagctgtgtt

SEQ ID NO: 737 - DNA, 20 bp, synthetic construct
  misc_feature 1..20: note = chemically synthesized
  source 1..20: mol_type = other DNA
ccatcgagctgtgttcagcc

SEQ ID NO: 738 - DNA, 20 bp, synthetic construct
  misc_feature 1..20: note = chemically synthesized
  source 1..20: mol_type = other DNA
gagctgtgttcagccaagtt

SEQ ID NO: 739 - DNA, 20 bp, synthetic construct
  misc_feature 1..20: note = chemically synthesized
  source 1..20: mol_type = other DNA
agctgtgttcagccaagttt

SEQ ID NO: 740 - DNA, 20 bp, synthetic construct
  misc_feature 1..20: note = chemically synthesized
  source 1..20: mol_type = other DNA
tcagccaagtttaggttctc

SEQ ID NO: 741 - DNA, 20 bp, synthetic construct
  misc_feature 1..20: note = chemically synthesized
  source 1..20: mol_type = other DNA
gtacaatgacccgtgtgaac

SEQ ID NO: 742 - DNA, 20 bp, synthetic construct
  misc_feature 1..20: note = chemically synthesized
  source 1..20: mol_type = other DNA
atgacccgtgtgaactggat

SEQ ID NO: 743 - DNA, 20 bp, synthetic construct
  misc_feature 1..20: note = chemically synthesized
  source 1..20: mol_type = other DNA
ggattggtctctttcccatt

SEQ ID NO: 744 - DNA, 20 bp, synthetic construct
  misc_feature 1..20: note = chemically synthesized
  source 1..20: mol_type = other DNA
ttggtctctttcccatttgg

SEQ ID NO: 745 - DNA, 20 bp, synthetic construct
  misc_feature 1..20: note = chemically synthesized
  source 1..20: mol_type = other DNA
tggtctctttcccatttgga

SEQ ID NO: 746 - DNA, 20 bp, synthetic construct
  misc_feature 1..20: note = chemically synthesized
  source 1..20: mol_type = other DNA
ggtctctttcccatttggaa

SEQ ID NO: 747 - DNA, 20 bp, synthetic construct
  misc_feature 1..20: note = chemically synthesized
  source 1..20: mol_type = other DNA
tctctttcccatttggaagg

SEQ ID NO: 748 - DNA, 20 bp, synthetic construct
  misc_feature 1..20: note = chemically synthesized
  source 1..20: mol_type = other DNA
ctctttcccatttggaaggg

SEQ ID NO: 749 - DNA, 20 bp, synthetic construct
  misc_feature 1..20: note = chemically synthesized
  source 1..20: mol_type = other DNA
atttggaagggaggaattaa

SEQ ID NO: 750 - DNA, 20 bp, synthetic construct
  misc_feature 1..20: note = chemically synthesized
  source 1..20: mol_type = other DNA
ttaatggtatcccatgaccg

SEQ ID NO: 751 - DNA, 20 bp, synthetic construct
  misc_feature 1..20: note = chemically synthesized
  source 1..20: mol_type = other DNA
cccatgaccgtagatgacgc

SEQ ID NO: 752 - DNA, 20 bp, synthetic construct
  misc_feature 1..20: note = chemically synthesized
  source 1..20: mol_type = other DNA
ccatgaccgtagatgacgct

SEQ ID NO: 753 - DNA, 20 bp, synthetic construct
  misc_feature 1..20: note = chemically synthesized
  source 1..20: mol_type = other DNA
ccgtagatgacgctgggaaa

SEQ ID NO: 754 - DNA, 20 bp, synthetic construct
  misc_feature 1..20: note = chemically synthesized
  source 1..20: mol_type = other DNA
gtagatgacgctgggaaata

SEQ ID NO: 755 - DNA, 20 bp, synthetic construct
  misc_feature 1..20: note = chemically synthesized
  source 1..20: mol_type = other DNA
agatgacgctgggaaataga

SEQ ID NO: 756 - DNA, 20 bp, synthetic construct
  misc_feature 1..20: note = chemically synthesized
  source 1..20: mol_type = other DNA
atgacgctgggaaatagaga

SEQ ID NO: 757 - DNA, 20 bp, synthetic construct
  misc_feature 1..20: note = chemically synthesized
  source 1..20: mol_type = other DNA
gacgctgggaaatagagaga

SEQ ID NO: 758 - DNA, 20 bp, synthetic construct
  misc_feature 1..20: note = chemically synthesized
  source 1..20: mol_type = other DNA
ctgggaaatagagagagaga

SEQ ID NO: 759 - DNA, 20 bp, synthetic construct
  misc_feature 1..20: note = chemically synthesized
  source 1..20: mol_type = other DNA
gggaaatagagagagagaaa

SEQ ID NO: 760 - DNA, 20 bp, synthetic construct
  misc_feature 1..20: note = chemically synthesized
  source 1..20: mol_type = other DNA
gaaatagagagagagaaaga

SEQ ID NO: 761 - DNA, 20 bp, synthetic construct
  misc_feature 1..20: note = chemically synthesized
  source 1..20: mol_type = other DNA
aatagagagagagaaagaga

SEQ ID NO: 762 - DNA, 20 bp, synthetic construct
  misc_feature 1..20: note = chemically synthesized
  source 1..20: mol_type = other DNA
tagagagagagaaagagaga

SEQ ID NO: 763 - DNA, 20 bp, synthetic construct
  misc_feature 1..20: note = chemically synthesized
  source 1..20: mol_type = other DNA
gagagagagaaagagagaga

SEQ ID NO: 764 - DNA, 20 bp, synthetic construct
  misc_feature 1..20: note = chemically synthesized
  source 1..20: mol_type = other DNA
gagagagaaagagagagaga

SEQ ID NO: 765 - DNA, 20 bp, synthetic construct
  misc_feature 1..20: note = chemically synthesized
  source 1..20: mol_type = other DNA
gagagaaagagagagagaga

SEQ ID NO: 766 - DNA, 20 bp, synthetic construct
  misc_feature 1..20: note = chemically synthesized
  source 1..20: mol_type = other DNA
gagaaagagagagagagaga

SEQ ID NO: 767 - DNA, 20 bp, synthetic construct
  misc_feature 1..20: note = chemically synthesized
  source 1..20: mol_type = other DNA
gagagagagagagagagaaa

SEQ ID NO: 768 - DNA, 20 bp, synthetic construct
  misc_feature 1..20: note = chemically synthesized
  source 1..20: mol_type = other DNA
gaaacagccccattccccta

SEQ ID NO: 769 - DNA, 20 bp, synthetic construct
  misc_feature 1..20: note = chemically synthesized
  source 1..20: mol_type = other DNA
aaacagccccattcccctaa

SEQ ID NO: 770 - DNA, 20 bp, synthetic construct
  misc_feature 1..20: note = chemically synthesized
  source 1..20: mol_type = other DNA
gccccattcccctaaaggct

SEQ ID NO: 771 - DNA, 20 bp, synthetic construct
  misc_feature 1..20: note = chemically synthesized
  source 1..20: mol_type = other DNA
tcccctaaaggctgagtcac

SEQ ID NO: 772 - DNA, 20 bp, synthetic construct
  misc_feature 1..20: note = chemically synthesized
  source 1..20: mol_type = other DNA
cactggcctcgtgctgtatg

SEQ ID NO: 773 - DNA, 20 bp, synthetic construct
  misc_feature 1..20: note = chemically synthesized
  source 1..20: mol_type = other DNA
gctgtatgtagtaaattaaa

SEQ ID NO: 774 - DNA, 20 bp, synthetic construct
  misc_feature 1..20: note = chemically synthesized
  source 1..20: mol_type = other DNA
gtatgtagtaaattaaacag

SEQ ID NO: 775 - DNA, 20 bp, synthetic construct
  misc_feature 1..20: note = chemically synthesized
  source 1..20: mol_type = other DNA
tatgtagtaaattaaacagc

SEQ ID NO: 776 - DNA, 20 bp, synthetic construct
  misc_feature 1..20: note = chemically synthesized
  source 1..20: mol_type = other DNA
taaattaaacagcgggctaa

SEQ ID NO: 777 - DNA, 20 bp, synthetic construct
  misc_feature 1..20: note = chemically synthesized
  source 1..20: mol_type = other DNA
aaattaaacagcgggctaat

SEQ ID NO: 778 - DNA, 20 bp, synthetic construct
  misc_feature 1..20: note = chemically synthesized
  source 1..20: mol_type = other DNA
cagcgggctaatgggataac

SEQ ID NO: 779 - DNA, 20 bp, synthetic construct
  misc_feature 1..20: note = chemically synthesized
  source 1..20: mol_type = other DNA
ctaatgggataacgagatgc

SEQ ID NO: 780 - DNA, 20 bp, synthetic construct
  misc_feature 1..20: note = chemically synthesized
  source 1..20: mol_type = other DNA
tgggataacgagatgccagc

SEQ ID NO: 781 - DNA, 20 bp, synthetic construct
  misc_feature 1..20: note = chemically synthesized
  source 1..20: mol_type = other DNA
gataacgagatgccagcaag

SEQ ID NO: 782 - DNA, 20 bp, synthetic construct
  misc_feature 1..20: note = chemically synthesized
  source 1..20: mol_type = other DNA
aacgagatgccagcaagcag

SEQ ID NO: 783 - DNA, 20 bp, synthetic construct
  misc_feature 1..20: note = chemically synthesized
  source 1..20: mol_type = other DNA
gatgccagcaagcagaagtg

SEQ ID NO: 784 - DNA, 20 bp, synthetic construct
  misc_feature 1..20: note = chemically synthesized
  source 1..20: mol_type = other DNA
cagcaagcagaagtgcagac

SEQ ID NO: 785 - DNA, 20 bp, synthetic construct
  misc_feature 1..20: note = chemically synthesized
  source 1..20: mol_type = other DNA
gaccggacaacccatgtcca

SEQ ID NO: 786 - DNA, 20 bp, synthetic construct
  misc_feature 1..20: note = chemically synthesized
  source 1..20: mol_type = other DNA
caacccatgtccacagttca

SEQ ID NO: 787 - DNA, 20 bp, synthetic construct
  misc_feature 1..20: note = chemically synthesized
  source 1..20: mol_type = other DNA
atgtccacagttcatagcta

SEQ ID NO: 788 - DNA, 20 bp, synthetic construct
  misc_feature 1..20: note = chemically synthesized
  source 1..20: mol_type = other DNA
tccacagttcatagctatag

SEQ ID NO: 789 - DNA, 20 bp, synthetic construct
  misc_feature 1..20: note = chemically synthesized
  source 1..20: mol_type = other DNA
gttcatagctatagcagccc

SEQ ID NO: 790 - DNA, 20 bp, synthetic construct
  misc_feature 1..20: note = chemically synthesized
  source 1..20: mol_type = other DNA
tcatagctatagcagcccta

SEQ ID NO: 791 - DNA, 20 bp, synthetic construct
  misc_feature 1..20: note = chemically synthesized
  source 1..20: mol_type = other DNA
gatgtccatttctctaacaa

SEQ ID NO: 792 - DNA, 20 bp, synthetic construct
  misc_feature 1..20: note = chemically synthesized
  source 1..20: mol_type = other DNA
atgtccatttctctaacaat

SEQ ID NO: 793 - DNA, 20 bp, synthetic construct
  misc_feature 1..20: note = chemically synthesized
  source 1..20: mol_type = other DNA
tgggttcgtttattttctat

SEQ ID NO: 794 - DNA, 20 bp, synthetic construct
  misc_feature 1..20: note = chemically synthesized
  source 1..20: mol_type = other DNA
gggttcgtttattttctatt

SEQ ID NO: 795 - DNA, 20 bp, synthetic construct
  misc_feature 1..20: note = chemically synthesized
  source 1..20: mol_type = other DNA
attttctattgggaaatatg

SEQ ID NO: 796 - DNA, 20 bp, synthetic construct
  misc_feature 1..20: note = chemically synthesized
  source 1..20: mol_type = other DNA
ttttctattgggaaatatgc

SEQ ID NO: 797 - DNA, 20 bp, synthetic construct
  misc_feature 1..20: note = chemically synthesized
  source 1..20: mol_type = other DNA
tttctattgggaaatatgca

SEQ ID NO: 798 - DNA, 20 bp, synthetic construct
  misc_feature 1..20: note = chemically synthesized
  source 1..20: mol_type = other DNA
ttgggaaatatgcagggctt

SEQ ID NO: 799 - DNA, 20 bp, synthetic construct
  misc_feature 1..20: note = chemically synthesized
  source 1..20: mol_type = other DNA
tgggaaatatgcagggcttt

SEQ ID NO: 800 - DNA, 20 bp, synthetic construct
  misc_feature 1..20: note = chemically synthesized
  source 1..20: mol_type = other DNA
ggaaatatgcagggctttag

SEQ ID NO: 801 - DNA, 20 bp, synthetic construct
  misc_feature 1..20: note = chemically synthesized
  source 1..20: mol_type = other DNA
gcagggctttaggagacaac

SEQ ID NO: 802 - DNA, 20 bp, synthetic construct
  misc_feature 1..20: note = chemically synthesized
  source 1..20: mol_type = other DNA
cagggctttaggagacaact

SEQ ID NO: 803 - DNA, 20 bp, synthetic construct
  misc_feature 1..20: note = chemically synthesized
  source 1..20: mol_type = other DNA
agacaactaggaaaatctgc

SEQ ID NO: 804 - DNA, 20 bp, synthetic construct
  misc_feature 1..20: note = chemically synthesized
  source 1..20: mol_type = other DNA
aactaggaaaatctgctaga

SEQ ID NO: 805 - DNA, 20 bp, synthetic construct
  misc_feature 1..20: note = chemically synthesized
  source 1..20: mol_type = other DNA
agatggctcatgccttttaa

SEQ ID NO: 806 - DNA, 20 bp, synthetic construct
  misc_feature 1..20: note = chemically synthesized
  source 1..20: mol_type = other DNA
ggctcatgccttttaaaagt

SEQ ID NO: 807 - DNA, 20 bp, synthetic construct
  misc_feature 1..20: note = chemically synthesized
  source 1..20: mol_type = other DNA
tcatgccttttaaaagttag

SEQ ID NO: 808 - DNA, 20 bp, synthetic construct
  misc_feature 1..20: note = chemically synthesized
  source 1..20: mol_type = other DNA
ttaaaagttagcagtctttt

SEQ ID NO: 809 - DNA, 20 bp, synthetic construct
  misc_feature 1..20: note = chemically synthesized
  source 1..20: mol_type = other DNA
cttttaagaaacatttttcc

SEQ ID NO: 810 - DNA, 20 bp, synthetic construct
  misc_feature 1..20: note = chemically synthesized
  source 1..20: mol_type = other DNA
ttaagaaacatttttccaag

SEQ ID NO: 811 - DNA, 20 bp, synthetic construct
  misc_feature 1..20: note = chemically synthesized
  source 1..20: mol_type = other DNA
taagaaacatttttccaagc

SEQ ID NO: 812 - DNA, 20 bp, synthetic construct
  misc_feature 1..20: note = chemically synthesized
  source 1..20: mol_type = other DNA
aacatttttccaagcaggtt

SEQ ID NO: 813 - DNA, 20 bp, synthetic construct
  misc_feature 1..20: note = chemically synthesized
  source 1..20: mol_type = other DNA
catttttccaagcaggttga

SEQ ID NO: 814 - DNA, 20 bp, synthetic construct
  misc_feature 1..20: note = chemically synthesized
  source 1..20: mol_type = other DNA
tgccaatcccatcctcatat

SEQ ID NO: 815 - DNA, 20 bp, synthetic construct
  misc_feature 1..20: note = chemically synthesized
  source 1..20: mol_type = other DNA
atcccatcctcatatcggca

SEQ ID NO: 816 - DNA, 20 bp, synthetic construct
  misc_feature 1..20: note = chemically synthesized
  source 1..20: mol_type = other DNA
ttcccacaatttttttttta

SEQ ID NO: 817 - DNA, 20 bp, synthetic construct
  misc_feature 1..20: note = chemically synthesized
  source 1..20: mol_type = other DNA
tcccacaattttttttttat

SEQ ID NO: 818 - DNA, 20 bp, synthetic construct
  misc_feature 1..20: note = chemically synthesized
  source 1..20: mol_type = other DNA
cacaattttttttttatggg

SEQ ID NO: 819 - DNA, 20 bp, synthetic construct
  misc_feature 1..20: note = chemically synthesized
  source 1..20: mol_type = other DNA
atgggaagttgtctgaaaaa

SEQ ID NO: 820 - DNA, 20 bp, synthetic construct
  misc_feature 1..20: note = chemically synthesized
  source 1..20: mol_type = other DNA
gggaagttgtctgaaaaaaa

SEQ ID NO: 821 - DNA, 20 bp, synthetic construct
  misc_feature 1..20: note = chemically synthesized
  source 1..20: mol_type = other DNA
gttgtctgaaaaaaagagaa

SEQ ID NO: 822 - DNA, 20 bp, synthetic construct
  misc_feature 1..20: note = chemically synthesized
  source 1..20: mol_type = other DNA
ttgtctgaaaaaaagagaat

SEQ ID NO: 823 - DNA, 20 bp, synthetic construct
  misc_feature 1..20: note = chemically synthesized
  source 1..20: mol_type = other DNA
ctgaaaaaaagagaatggga

SEQ ID NO: 824 - DNA, 20 bp, synthetic construct
  misc_feature 1..20: note = chemically synthesized
  source 1..20: mol_type = other DNA
tgaaaaaaagagaatgggat

SEQ ID NO: 825 - DNA, 20 bp, synthetic construct
  misc_feature 1..20: note = chemically synthesized
  source 1..20: mol_type = other DNA
gggtacattcctgaacacac

SEQ ID NO: 826 - DNA, 20 bp, synthetic construct
  misc_feature 1..20: note = chemically synthesized
  source 1..20: mol_type = other DNA
ggtacattcctgaacacacc

SEQ ID NO: 827 - DNA, 20 bp, synthetic construct
  misc_feature 1..20: note = chemically synthesized
  source 1..20: mol_type = other DNA
attcctgaacacaccaggcc

SEQ ID NO: 828 - DNA, 20 bp, synthetic construct
  misc_feature 1..20: note = chemically synthesized
  source 1..20: mol_type = other DNA
ttcctgaacacaccaggccc

SEQ ID NO: 829 - DNA, 20 bp, synthetic construct
  misc_feature 1..20: note = chemically synthesized
  source 1..20: mol_type = other DNA
tcctgaacacaccaggccca

SEQ ID NO: 830 - DNA, 20 bp, synthetic construct
  misc_feature 1..20: note = chemically synthesized
  source 1..20: mol_type = other DNA
cacaccaggcccagggacaa

SEQ ID NO: 831 - DNA, 20 bp, synthetic construct
  misc_feature 1..20: note = chemically synthesized
  source 1..20: mol_type = other DNA
caccaggcccagggacaatg

SEQ ID NO: 832 - DNA, 20 bp, synthetic construct
  misc_feature 1..20: note = chemically synthesized
  source 1..20: mol_type = other DNA
gcccagggacaatggagtaa

SEQ ID NO: 833 - DNA, 20 bp, synthetic construct
  misc_feature 1..20: note = chemically synthesized
  source 1..20: mol_type = other DNA
tggagtaacagaatcgtaat

SEQ ID NO: 834 - DNA, 20 bp, synthetic construct
  misc_feature 1..20: note = chemically synthesized
  source 1..20: mol_type = other DNA
ggagtaacagaatcgtaatg

SEQ ID NO: 835 - DNA, 20 bp, synthetic construct
  misc_feature 1..20: note = chemically synthesized
  source 1..20: mol_type = other DNA
gaatcgtaatgaggaacaca

SEQ ID NO: 836 - DNA, 20 bp, synthetic construct
  misc_feature 1..20: note = chemically synthesized
  source 1..20: mol_type = other DNA
aggaacacacagttacaaca

SEQ ID NO: 837 - DNA, 20 bp, synthetic construct
  misc_feature 1..20: note = chemically synthesized
  source 1..20: mol_type = other DNA
cacagttacaacacagtcat

SEQ ID NO: 838 - DNA, 20 bp, synthetic construct
  misc_feature 1..20: note = chemically synthesized
  source 1..20: mol_type = other DNA
agttacaacacagtcataag

SEQ ID NO: 839 - DNA, 20 bp, synthetic construct
  misc_feature 1..20: note = chemically synthesized
  source 1..20: mol_type = other DNA
aagtcatgttcatgtgtgta

SEQ ID NO: 840 - DNA, 20 bp, synthetic construct
  misc_feature 1..20: note = chemically synthesized
  source 1..20: mol_type = other DNA
gtcatgttcatgtgtgtacg

SEQ ID NO: 841 - DNA, 20 bp, synthetic construct
  misc_feature 1..20: note = chemically synthesized
  source 1..20: mol_type = other DNA
tcatgttcatgtgtgtacgg

SEQ ID NO: 842 - DNA, 20 bp, synthetic construct
  misc_feature 1..20: note = chemically synthesized
  source 1..20: mol_type = other DNA
catgttcatgtgtgtacgga

SEQ ID NO: 843 - DNA, 20 bp, synthetic construct
  misc_feature 1..20: note = chemically synthesized
  source 1..20: mol_type = other DNA
atgttcatgtgtgtacggag

SEQ ID NO: 844 - DNA, 20 bp, synthetic construct
  misc_feature 1..20: note = chemically synthesized
  source 1..20: mol_type = other DNA
tgttcatgtgtgtacggagg

SEQ ID NO: 845 - DNA, 20 bp, synthetic construct
  misc_feature 1..20: note = chemically synthesized
  source 1..20: mol_type = other DNA
atgtgtgtacggagggggaa

SEQ ID NO: 846 - DNA, 20 bp, synthetic construct
  misc_feature 1..20: note = chemically synthesized
  source 1..20: mol_type = other DNA
gtgtgtacggagggggaaaa

SEQ ID NO: 847 - DNA, 20 bp, synthetic construct
  misc_feature 1..20: note = chemically synthesized
  source 1..20: mol_type = other DNA
tgtgtacggagggggaaaag

SEQ ID NO: 848 - DNA, 20 bp, synthetic construct
  misc_feature 1..20: note = chemically synthesized
  source 1..20: mol_type = other DNA
ggggaaaagaggcttaaaac

SEQ ID NO: 849 - DNA, 20 bp, synthetic construct
  misc_feature 1..20: note = chemically synthesized
  source 1..20: mol_type = other DNA
aaacactgtatttcctccct

SEQ ID NO: 850 - DNA, 20 bp, synthetic construct
  misc_feature 1..20: note = chemically synthesized
  source 1..20: mol_type = other DNA
tttcctccctcagtctctgt

SEQ ID NO: 851 - DNA, 20 bp, synthetic construct
  misc_feature 1..20: note = chemically synthesized
  source 1..20: mol_type = other DNA
tccctcagtctctgtgagca

SEQ ID NO: 852 - DNA, 20 bp, synthetic construct
  misc_feature 1..20: note = chemically synthesized
  source 1..20: mol_type = other DNA
ctctgtgagcaaagtactac

SEQ ID NO: 853 - DNA, 20 bp, synthetic construct
  misc_feature 1..20: note = chemically synthesized
  source 1..20: mol_type = other DNA
tgtgagcaaagtactacaag

SEQ ID NO: 854 - DNA, 20 bp, synthetic construct
  misc_feature 1..20: note = chemically synthesized
  source 1..20: mol_type = other DNA
gtgagcaaagtactacaagc

SEQ ID NO: 855 - DNA, 20 bp, synthetic construct
  misc_feature 1..20: note = chemically synthesized
  source 1..20: mol_type = other DNA
gagcaaagtactacaagcag

SEQ ID NO: 856 - DNA, 20 bp, synthetic construct
  misc_feature 1..20: note = chemically synthesized
  source 1..20: mol_type = other DNA
gcaaagtactacaagcagga

SEQ ID NO: 857 - DNA, 20 bp, synthetic construct
  misc_feature 1..20: note = chemically synthesized
  source 1..20: mol_type = other DNA
caaagtactacaagcaggag

SEQ ID NO: 858 - DNA, 20 bp, synthetic construct
  misc_feature 1..20: note = chemically synthesized
  source 1..20: mol_type = other DNA
gtactacaagcaggagagga

SEQ ID NO: 859 - DNA, 20 bp, synthetic construct
  misc_feature 1..20: note = chemically synthesized
  source 1..20: mol_type = other DNA
tactacaagcaggagaggat

SEQ ID NO: 860 - DNA, 20 bp, synthetic construct
  misc_feature 1..20: note = chemically synthesized
  source 1..20: mol_type = other DNA
actacaagcaggagaggatg

SEQ ID NO: 861 - DNA, 20 bp, synthetic construct
  misc_feature 1..20: note = chemically synthesized
  source 1..20: mol_type = other DNA
agcaggagaggatggggcct

SEQ ID NO: 862 - DNA, 20 bp, synthetic construct
  misc_feature 1..20: note = chemically synthesized
  source 1..20: mol_type = other DNA
gcaggagaggatggggcctg

SEQ ID NO: 863 - DNA, 20 bp, synthetic construct
  misc_feature 1..20: note = chemically synthesized
  source 1..20: mol_type = other DNA
gaggcttctcaactcctttt

SEQ ID NO: 864 - DNA, 20 bp, synthetic construct
  misc_feature 1..20: note = chemically synthesized
  source 1..20: mol_type = other DNA
aggcttctcaactccttttc

SEQ ID NO: 865 - DNA, 20 bp, synthetic construct
  misc_feature 1..20: note = chemically synthesized
  source 1..20: mol_type = other DNA
cttctcaactccttttcagg

SEQ ID NO: 866 - DNA, 20 bp, synthetic construct
  misc_feature 1..20: note = chemically synthesized
  source 1..20: mol_type = other DNA
ttctcaactccttttcagga

SEQ ID NO: 867 - DNA, 20 bp, synthetic construct
  misc_feature 1..20: note = chemically synthesized
  source 1..20: mol_type = other DNA
aggaaggcccgaaataatcc

SEQ ID NO: 868 - DNA, 20 bp, synthetic construct
  misc_feature 1..20: note = chemically synthesized
  source 1..20: mol_type = other DNA
gaaataatcccagtaccttt

SEQ ID NO: 869 - DNA, 20 bp, synthetic construct
  misc_feature 1..20: note = chemically synthesized
  source 1..20: mol_type = other DNA
catttccttatttctccaat

SEQ ID NO: 870 - DNA, 20 bp, synthetic construct
  misc_feature 1..20: note = chemically synthesized
  source 1..20: mol_type = other DNA
ctccaattggaattatacct

SEQ ID NO: 871 - DNA, 20 bp, synthetic construct
  misc_feature 1..20: note = chemically synthesized
  source 1..20: mol_type = other DNA
atctcccgccacttcctttc

SEQ ID NO: 872 - DNA, 20 bp, synthetic construct
  misc_feature 1..20: note = chemically synthesized
  source 1..20: mol_type = other DNA
tcctttcaagttctcacttc

SEQ ID NO: 873 - DNA, 20 bp, synthetic construct
  misc_feature 1..20: note = chemically synthesized
  source 1..20: mol_type = other DNA
acttattgcatatacaaaaa

SEQ ID NO: 874 - DNA, 20 bp, synthetic construct
  misc_feature 1..20: note = chemically synthesized
  source 1..20: mol_type = other DNA
aaaaatggtatttaaataaa

SEQ ID NO: 875 - DNA, 20 bp, synthetic construct
  misc_feature 1..20: note = chemically synthesized
  source 1..20: mol_type = other DNA
aataaacagttctatatcta

SEQ ID NO: 876 - DNA, 20 bp, synthetic construct
  misc_feature 1..20: note = chemically synthesized
  source 1..20: mol_type = other DNA
tctatatctacagaatgccc

SEQ ID NO: 877 - DNA, 20 bp, synthetic construct
  misc_feature 1..20: note = chemically synthesized
  source 1..20: mol_type = other DNA
ctatatctacagaatgccct

SEQ ID NO: 878 - DNA, 20 bp, synthetic construct
  misc_feature 1..20: note = chemically synthesized
  source 1..20: mol_type = other DNA
ctacttcacactttctgcca

SEQ ID NO: 879 - DNA, 20 bp, synthetic construct
  misc_feature 1..20: note = chemically synthesized
  source 1..20: mol_type = other DNA
ttcacactttctgccatggc

SEQ ID NO: 880 - DNA, 20 bp, synthetic construct
  misc_feature 1..20: note = chemically synthesized
  source 1..20: mol_type = other DNA
tgccatggccagtgcaaatg

SEQ ID NO: 881 - DNA, 20 bp, synthetic construct
  misc_feature 1..20: note = chemically synthesized
  source 1..20: mol_type = other DNA
actgtgttcacctcacttct

SEQ ID NO: 882 - DNA, 20 bp, synthetic construct
  misc_feature 1..20: note = chemically synthesized
  source 1..20: mol_type = other DNA
tagcaacctttgtaatgtgt

SEQ ID NO: 883 - DNA, 20 bp, synthetic construct
  misc_feature 1..20: note = chemically synthesized
  source 1..20: mol_type = other DNA
cctttgtaatgtgttggttc

SEQ ID NO: 884 - DNA, 20 bp, synthetic construct
  misc_feature 1..20: note = chemically synthesized
  source 1..20: mol_type = other DNA
tgttggttccagcctttttg

SEQ ID NO: 885 - DNA, 20 bp, synthetic construct
  misc_feature 1..20: note = chemically synthesized
  source 1..20: mol_type = other DNA
gttggttccagcctttttgt

SEQ ID NO: 886 - DNA, 20 bp, synthetic construct
  misc_feature 1..20: note = chemically synthesized
  source 1..20: mol_type = other DNA
ctttttgtaggtcctaaaca

SEQ ID NO: 887 - DNA, 20 bp, synthetic construct
  misc_feature 1..20: note = chemically synthesized
  source 1..20: mol_type = other DNA
ttttgtaggtcctaaacaaa

SEQ ID NO: 888 - DNA, 20 bp, synthetic construct
  misc_feature 1..20: note = chemically synthesized
  source 1..20: mol_type = other DNA
ttgtaggtcctaaacaaaga

SEQ ID NO: 889 - DNA, 20 bp, synthetic construct
  misc_feature 1..20: note = chemically synthesized
  source 1..20: mol_type = other DNA
tgtaggtcctaaacaaagag

SEQ ID NO: 890 - DNA, 20 bp, synthetic construct
  misc_feature 1..20: note = chemically synthesized
  source 1..20: mol_type = other DNA
ggtcctaaacaaagagagga

SEQ ID NO: 891 - DNA, 20 bp, synthetic construct
  misc_feature 1..20: note = chemically synthesized
  source 1..20: mol_type = other DNA
aacaaagagaggatagcaaa

SEQ ID NO: 892 - DNA, 20 bp, synthetic construct
  misc_feature 1..20: note = chemically synthesized
  source 1..20: mol_type = other DNA
acaaagagaggatagcaaat

SEQ ID NO: 893 - DNA, 20 bp, synthetic construct
  misc_feature 1..20: note = chemically synthesized
  source 1..20: mol_type = other DNA
gagaggatagcaaatgggtt

SEQ ID NO: 894 - DNA, 20 bp, synthetic construct
  misc_feature 1..20: note = chemically synthesized
  source 1..20: mol_type = other DNA
agaggatagcaaatgggttc

SEQ ID NO: 895 - DNA, 20 bp, synthetic construct
  misc_feature 1..20: note = chemically synthesized
  source 1..20: mol_type = other DNA
ggatagcaaatgggttcagg

SEQ ID NO: 896 - DNA, 20 bp, synthetic construct
  misc_feature 1..20: note = chemically synthesized
  source 1..20: mol_type = other DNA
gatagcaaatgggttcagga

SEQ ID NO: 897 - DNA, 20 bp, synthetic construct
  misc_feature 1..20: note = chemically synthesized
  source 1..20: mol_type = other DNA
tagcaaatgggttcaggaag

SEQ ID NO: 898 - DNA, 20 bp, synthetic construct
  misc_feature 1..20: note = chemically synthesized
  source 1..20: mol_type = other DNA
agcaaatgggttcaggaagg

SEQ ID NO: 899 - DNA, 20 bp, synthetic construct
  misc_feature 1..20: note = chemically synthesized
  source 1..20: mol_type = other DNA
ggttcaggaaggaggtaata

SEQ ID NO: 900 - DNA, 20 bp, synthetic construct
  misc_feature 1..20: note = chemically synthesized
  source 1..20: mol_type = other DNA
gttcaggaaggaggtaatat

SEQ ID NO: 901 - DNA, 20 bp, synthetic construct
  misc_feature 1..20: note = chemically synthesized
  source 1..20: mol_type = other DNA
gaaggaggtaatataggcac

SEQ ID NO: 902 - DNA, 20 bp, synthetic construct
  misc_feature 1..20: note = chemically synthesized
  source 1..20: mol_type = other DNA
ggaggtaatataggcactgg

SEQ ID NO: 903 - DNA, 20 bp, synthetic construct
  misc_feature 1..20: note = chemically synthesized
  source 1..20: mol_type = other DNA
aggtaatataggcactggaa

SEQ ID NO: 904 - DNA, 20 bp, synthetic construct
  misc_feature 1..20: note = chemically synthesized
  source 1..20: mol_type = other DNA
ataggcactggaagagtttc

SEQ ID NO: 905 - DNA, 20 bp, synthetic construct
  misc_feature 1..20: note = chemically synthesized
  source 1..20: mol_type = other DNA
gtttctggtttaaaatctgt

SEQ ID NO: 906 - DNA, 20 bp, synthetic construct
  misc_feature 1..20: note = chemically synthesized
  source 1..20: mol_type = other DNA
ggtttaaaatctgtgagaaa

SEQ ID NO: 907 - DNA, 20 bp, synthetic construct
  misc_feature 1..20: note = chemically synthesized
  source 1..20: mol_type = other DNA
tctgtgagaaatagaatttg

SEQ ID NO: 908 - DNA, 20 bp, synthetic construct
  misc_feature 1..20: note = chemically synthesized
  source 1..20: mol_type = other DNA
ttgcggtattcctgtttatt

SEQ ID NO: 909 - DNA, 20 bp, synthetic construct
  misc_feature 1..20: note = chemically synthesized
  source 1..20: mol_type = other DNA
tattaagttgttctcaaatg

SEQ ID NO: 910 - DNA, 20 bp, synthetic construct
  misc_feature 1..20: note = chemically synthesized
  source 1..20: mol_type = other DNA
gttctcaaatgaagattaaa

SEQ ID NO: 911 - DNA, 20 bp, synthetic construct
  misc_feature 1..20: note = chemically synthesized
  source 1..20: mol_type = other DNA
aagattaaaaagaacatttt

SEQ ID NO: 912 - DNA, 20 bp, synthetic construct
  misc_feature 1..20: note = chemically synthesized
  source 1..20: mol_type = other DNA
aaaaagaacattttaagcat

SEQ ID NO: 913 - DNA, 20 bp, synthetic construct
  misc_feature 1..20: note = chemically synthesized
  source 1..20: mol_type = other DNA
gaacattttaagcatcagtt

SEQ ID NO: 914 - DNA, 20 bp, synthetic construct
  misc_feature 1..20: note = chemically synthesized
  source 1..20: mol_type = other DNA
aacattttaagcatcagttc

SEQ ID NO: 915 - DNA, 20 bp, synthetic construct
  misc_feature 1..20: note = chemically synthesized
  source 1..20: mol_type = other DNA
taagcatcagttcaggtatg

SEQ ID NO: 916 - DNA, 20 bp, synthetic construct
  misc_feature 1..20: note = chemically synthesized
  source 1..20: mol_type = other DNA
agcatcagttcaggtatgta

SEQ ID NO: 917 - DNA, 20 bp, synthetic construct
  misc_feature 1..20: note = chemically synthesized
  source 1..20: mol_type = other DNA
gtatgtagagaacattccat

SEQ ID NO: 918 - DNA, 20 bp, synthetic construct
  misc_feature 1..20: note = chemically synthesized
  source 1..20: mol_type = other DNA
gaacattccatcagcacgtc

SEQ ID NO: 919 - DNA, 20 bp, synthetic construct
  misc_feature 1..20: note = chemically synthesized
  source 1..20: mol_type = other DNA
cctgttacaaaaacttactt

SEQ ID NO: 920 - DNA, 20 bp, synthetic construct
  misc_feature 1..20: note = chemically synthesized
  source 1..20: mol_type = other DNA
ctgttacaaaaacttacttg

SEQ ID NO: 921 - DNA, 20 bp, synthetic construct
  misc_feature 1..20: note = chemically synthesized
  source 1..20: mol_type = other DNA
aaaacttacttgaggatttt

SEQ ID NO: 922 - DNA, 20 bp, synthetic construct
  misc_feature 1..20: note = chemically synthesized
  source 1..20: mol_type = other DNA
aacttacttgaggattttaa

SEQ ID NO: 923 - DNA, 20 bp, synthetic construct
  misc_feature 1..20: note = chemically synthesized
  source 1..20: mol_type = other DNA
ttaagagacattaatgttct

SEQ ID NO: 924 - DNA, 20 bp, synthetic construct
  misc_feature 1..20: note = chemically synthesized
  source 1..20: mol_type = other DNA
agagacattaatgttcttag

SEQ ID NO: 925 - DNA, 20 bp, synthetic construct
  misc_feature 1..20: note = chemically synthesized
  source 1..20: mol_type = other DNA
agttcctcatttaaaaaaaa

SEQ ID NO: 926 - DNA, 20 bp, synthetic construct
  misc_feature 1..20: note = chemically synthesized
  source 1..20: mol_type = other DNA
tcatgaattcatcttactat

SEQ ID NO: 927 - DNA, 20 bp, synthetic construct
  misc_feature 1..20: note = chemically synthesized
  source 1..20: mol_type = other DNA
tgtgcatgttattttatatt

SEQ ID NO: 928 - DNA, 20 bp, synthetic construct
  misc_feature 1..20: note = chemically synthesized
  source 1..20: mol_type = other DNA
tatattaagattttaaattt

SEQ ID NO: 929 - DNA, 20 bp, synthetic construct
  misc_feature 1..20: note = chemically synthesized
  source 1..20: mol_type = other DNA
tattaagattttaaatttta

SEQ ID NO: 930 - DNA, 20 bp, synthetic construct
  misc_feature 1..20: note = chemically synthesized
  source 1..20: mol_type = other DNA
gattttaaattttagagttc

SEQ ID NO: 931 - DNA, 20 bp, synthetic construct
  misc_feature 1..20: note = chemically synthesized
  source 1..20: mol_type = other DNA
ggatacaaaatatcatttat

SEQ ID NO: 932 - DNA, 20 bp, synthetic construct
  misc_feature 1..20: note = chemically synthesized
  source 1..20: mol_type = other DNA
atttataagtgatatcatgt

SEQ ID NO: 933 - DNA, 20 bp, synthetic construct
  misc_feature 1..20: note = chemically synthesized
  source 1..20: mol_type = other DNA
ataagtgatatcatgttggc

SEQ ID NO: 934 - DNA, 20 bp, synthetic construct
  misc_feature 1..20: note = chemically synthesized
  source 1..20: mol_type = other DNA
taagtgatatcatgttggct

SEQ ID NO: 935 - DNA, 20 bp, synthetic construct
  misc_feature 1..20: note = chemically synthesized
  source 1..20: mol_type = other DNA
ctcatgtttctattgttcat

SEQ ID NO: 936 - DNA, 20 bp, synthetic construct
  misc_feature 1..20: note = chemically synthesized
  source 1..20: mol_type = other DNA
tttctattgttcatcagctt

SEQ ID NO: 937 - DNA, 20 bp, synthetic construct
  misc_feature 1..20: note = chemically synthesized
  source 1..20: mol_type = other DNA
cttcagaaataatattttat

SEQ ID NO: 938 - DNA, 20 bp, synthetic construct
  misc_feature 1..20: note = chemically synthesized
  source 1..20: mol_type = other DNA
cagaaataatattttatcag

SEQ ID NO: 939 - DNA, 20 bp, synthetic construct
  misc_feature 1..20: note = chemically synthesized
  source 1..20: mol_type = other DNA
agaaataatattttatcaga

SEQ ID NO: 940 - DNA, 20 bp, synthetic construct
  misc_feature 1..20: note = chemically synthesized
  source 1..20: mol_type = other DNA
ttttatcagaaggcgtcaat

SEQ ID NO: 941 - DNA, 20 bp, synthetic construct
  misc_feature 1..20: note = chemically synthesized
  source 1..20: mol_type = other DNA
atcagaaggcgtcaataagt

SEQ ID NO: 942 - DNA, 20 bp, synthetic construct
  misc_feature 1..20: note = chemically synthesized
  source 1..20: mol_type = other DNA
tcagaaggcgtcaataagtc

SEQ ID NO: 943 - DNA, 20 bp, synthetic construct
  misc_feature 1..20: note = chemically synthesized
  source 1..20: mol_type = other DNA
agaaggcgtcaataagtcag

SEQ ID NO: 944 - DNA, 20 bp, synthetic construct
  misc_feature 1..20: note = chemically synthesized
  source 1..20: mol_type = other DNA
cgtcaataagtcaggagact

SEQ ID NO: 945 - DNA, 20 bp, synthetic construct
  misc_feature 1..20: note = chemically synthesized
  source 1..20: mol_type = other DNA
tcaggagactaagtaacctg

SEQ ID NO: 946 - DNA, 20 bp, synthetic construct
  misc_feature 1..20: note = chemically synthesized
  source 1..20: mol_type = other DNA
aacctgaagaacccatctcc

SEQ ID NO: 947 - DNA, 20 bp, synthetic construct
  misc_feature 1..20: note = chemically synthesized
  source 1..20: mol_type = other DNA
ccagtaaatttatttaactt

SEQ ID NO: 948 - DNA, 20 bp, synthetic construct
  misc_feature 1..20: note = chemically synthesized
  source 1..20: mol_type = other DNA
cagtaaatttatttaacttt

SEQ ID NO: 949 - DNA, 20 bp, synthetic construct
  misc_feature 1..20: note = chemically synthesized
  source 1..20: mol_type = other DNA
cataatctgtgatttatcac

SEQ ID NO: 950 - DNA, 20 bp, synthetic construct
  misc_feature 1..20: note = chemically synthesized
  source 1..20: mol_type = other DNA
ccccattccccatttgattt

SEQ ID NO: 951 - DNA, 20 bp, synthetic construct
  misc_feature 1..20: note = chemically synthesized
  source 1..20: mol_type = other DNA
tttgatttaagaaatttgaa

SEQ ID NO: 952 - DNA, 20 bp, synthetic construct
  misc_feature 1..20: note = chemically synthesized
  source 1..20: mol_type = other DNA
tttaagaaatttgaacagac

SEQ ID NO: 953 - DNA, 20 bp, synthetic construct
  misc_feature 1..20: note = chemically synthesized
  source 1..20: mol_type = other DNA
aatttgaacagacaagtgta

SEQ ID NO: 954 - DNA, 20 bp, synthetic construct
  misc_feature 1..20: note = chemically synthesized
  source 1..20: mol_type = other DNA
ccaccattaattctgtctgt

SEQ ID NO: 955 - DNA, 20 bp, synthetic construct
  misc_feature 1..20: note = chemically synthesized
  source 1..20: mol_type = other DNA
caccattaattctgtctgtc

SEQ ID NO: 956 - DNA, 20 bp, synthetic construct
  misc_feature 1..20: note = chemically synthesized
  source 1..20: mol_type = other DNA
atgcaaaacctaattacgct

SEQ ID NO: 957 - DNA, 20 bp, synthetic construct
  misc_feature 1..20: note = chemically synthesized
  source 1..20: mol_type = other DNA
gcaaaacctaattacgctaa

SEQ ID NO: 958 - DNA, 20 bp, synthetic construct
  misc_feature 1..20: note = chemically synthesized
  source 1..20: mol_type = other DNA
aaacctaattacgctaagag

SEQ ID NO: 959 - DNA, 20 bp, synthetic construct
  misc_feature 1..20: note = chemically synthesized
  source 1..20: mol_type = other DNA
cgctaagagcagcatatact

SEQ ID NO: 960 - DNA, 20 bp, synthetic construct
  misc_feature 1..20: note = chemically synthesized
  source 1..20: mol_type = other DNA
tactgtatataaaacctaca

SEQ ID NO: 961 - DNA, 20 bp, synthetic construct
  misc_feature 1..20: note = chemically synthesized
  source 1..20: mol_type = other DNA
aacctacacagttgcactca

SEQ ID NO: 962 - DNA, 20 bp, synthetic construct
  misc_feature 1..20: note = chemically synthesized
  source 1..20: mol_type = other DNA
gcactcatagctcctaataa

SEQ ID NO: 963 - DNA, 20 bp, synthetic construct
  misc_feature 1..20: note = chemically synthesized
  source 1..20: mol_type = other DNA
actcatagctcctaataaaa

SEQ ID NO: 964 - DNA, 20 bp, synthetic construct
  misc_feature 1..20: note = chemically synthesized
  source 1..20: mol_type = other DNA
agctcctaataaaagagtaa

SEQ ID NO: 965 - DNA, 20 bp, synthetic construct
  misc_feature 1..20: note = chemically synthesized
  source 1..20: mol_type = other DNA
gctcctaataaaagagtaat

SEQ ID NO: 966 - DNA, 20 bp, synthetic construct
  misc_feature 1..20: note = chemically synthesized
  source 1..20: mol_type = other DNA
ctcctaataaaagagtaata

SEQ ID NO: 967 - DNA, 20 bp, synthetic construct
  misc_feature 1..20: note = chemically synthesized
  source 1..20: mol_type = other DNA
aaaagagtaatagggacaca

SEQ ID NO: 968 - DNA, 20 bp, synthetic construct
  misc_feature 1..20: note = chemically synthesized
  source 1..20: mol_type = other DNA
aagagtaatagggacacaca

SEQ ID NO: 969 - DNA, 20 bp, synthetic construct
  misc_feature 1..20: note = chemically synthesized
  source 1..20: mol_type = other DNA
agagtaatagggacacacag

SEQ ID NO: 970 - DNA, 20 bp, synthetic construct
  misc_feature 1..20: note = chemically synthesized
  source 1..20: mol_type = other DNA
agggacacacagaggtttta

SEQ ID NO: 971 - DNA, 20 bp, synthetic construct
  misc_feature 1..20: note = chemically synthesized
  source 1..20: mol_type = other DNA
gaggttttatggacatttaa

SEQ ID NO: 972 - DNA, 20 bp, synthetic construct
  misc_feature 1..20: note = chemically synthesized
  source 1..20: mol_type = other DNA
aggttttatggacatttaat

SEQ ID NO: 973 - DNA, 20 bp, synthetic construct
  misc_feature 1..20: note = chemically synthesized
  source 1..20: mol_type = other DNA
ggttttatggacatttaata

SEQ ID NO: 974 - DNA, 20 bp, synthetic construct
  misc_feature 1..20: note = chemically synthesized
  source 1..20: mol_type = other DNA
tttatggacatttaataggg

SEQ ID NO: 975 - DNA, 20 bp, synthetic construct
  misc_feature 1..20: note = chemically synthesized
  source 1..20: mol_type = other DNA
tatggacatttaatagggtg

SEQ ID NO: 976 - DNA, 20 bp, synthetic construct
  misc_feature 1..20: note = chemically synthesized
  source 1..20: mol_type = other DNA
catttaatagggtggagtcg

SEQ ID NO: 977 - DNA, 20 bp, synthetic construct
  misc_feature 1..20: note = chemically synthesized
  source 1..20: mol_type = other DNA
agtcgaagtcaccacatcta

SEQ ID NO: 978 - DNA, 20 bp, synthetic construct
  misc_feature 1..20: note = chemically synthesized
  source 1..20: mol_type = other DNA
gaagtcaccacatctaaagc

SEQ ID NO: 979 - DNA, 20 bp, synthetic construct
  misc_feature 1..20: note = chemically synthesized
  source 1..20: mol_type = other DNA
caccacatctaaagctggca

SEQ ID NO: 980 - DNA, 20 bp, synthetic construct
  misc_feature 1..20: note = chemically synthesized
  source 1..20: mol_type = other DNA
atctaaagctggcatggcac

SEQ ID NO: 981 - DNA, 20 bp, synthetic construct
  misc_feature 1..20: note = chemically synthesized
  source 1..20: mol_type = other DNA
tctaaagctggcatggcact

SEQ ID NO: 982 - DNA, 20 bp, synthetic construct
  misc_feature 1..20: note = chemically synthesized
  source 1..20: mol_type = other DNA
ctaaagctggcatggcactg

SEQ ID NO: 983 - DNA, 20 bp, synthetic construct
  misc_feature 1..20: note = chemically synthesized
  source 1..20: mol_type = other DNA
gaattatttctatctgtctt

SEQ ID NO: 984 - DNA, 20 bp, synthetic construct
  misc_feature 1..20: note = chemically synthesized
  source 1..20: mol_type = other DNA
ttatttctatctgtcttgag

SEQ ID NO: 985 - DNA, 20 bp, synthetic construct
  misc_feature 1..20: note = chemically synthesized
  source 1..20: mol_type = other DNA
atctgtcttgagcagcattt

SEQ ID NO: 986 - DNA, 20 bp, synthetic construct
  misc_feature 1..20: note = chemically synthesized
  source 1..20: mol_type = other DNA
cttgagcagcattttggatt

SEQ ID NO: 987 - DNA, 20 bp, synthetic construct
  misc_feature 1..20: note = chemically synthesized
  source 1..20: mol_type = other DNA
cagcattttggattcagttt

SEQ ID NO: 988 - DNA, 20 bp, synthetic construct
  misc_feature 1..20: note = chemically synthesized
  source 1..20: mol_type = other DNA
gcattttggattcagttttg

SEQ ID NO: 989 - DNA, 20 bp, synthetic construct
  misc_feature 1..20: note = chemically synthesized
  source 1..20: mol_type = other DNA
aacctaatccaaaacacata

SEQ ID NO: 990 - DNA, 20 bp, synthetic construct
  misc_feature 1..20: note = chemically synthesized
  source 1..20: mol_type = other DNA
acatacagtatatcttttct

SEQ ID NO: 991 - DNA, 20 bp, synthetic construct
  misc_feature 1..20: note = chemically synthesized
  source 1..20: mol_type = other DNA
cagtatatcttttctaagtt

SEQ ID NO: 992 - DNA, 20 bp, synthetic construct
  misc_feature 1..20: note = chemically synthesized
  source 1..20: mol_type = other DNA
taagttcagtgacaaacatc

SEQ ID NO: 993 - DNA, 20 bp, synthetic construct
  misc_feature 1..20: note = chemically synthesized
  source 1..20: mol_type = other DNA
gtgacaaacatcaagttctc

SEQ ID NO: 994 - DNA, 20 bp, synthetic construct
  misc_feature 1..20: note = chemically synthesized
  source 1..20: mol_type = other DNA
tgacaaacatcaagttctca

SEQ ID NO: 995 - DNA, 20 bp, synthetic construct
  misc_feature 1..20: note = chemically synthesized
  source 1..20: mol_type = other DNA
tattctccaacatcctttct

SEQ ID NO: 996 - DNA, 20 bp, synthetic construct
  misc_feature 1..20: note = chemically synthesized
  source 1..20: mol_type = other DNA
tctccaacatcctttctcag

SEQ ID NO: 997 - DNA, 20 bp, synthetic construct
  misc_feature 1..20: note = chemically synthesized
  source 1..20: mol_type = other DNA
cctttctcagtggattcctc

SEQ ID NO: 998 - DNA, 20 bp, synthetic construct
  misc_feature 1..20: note = chemically synthesized
  source 1..20: mol_type = other DNA
tctctccttcccacccaaac

SEQ ID NO: 999 - DNA, 20 bp, synthetic construct
  misc_feature 1..20: note = chemically synthesized
  source 1..20: mol_type = other DNA
tcccacccaaactggctttt

SEQ ID NO: 1000 - DNA, 20 bp, synthetic construct
  misc_feature 1..20: note = chemically synthesized
  source 1..20: mol_type = other DNA
cattgactttctttatactt

SEQ ID NO: 1001 - DNA, 20 bp, synthetic construct
  misc_feature 1..20: note = chemically synthesized
  source 1..20: mol_type = other DNA
gactttctttatactttaga

SEQ ID NO: 1002 - DNA, 20 bp, synthetic construct
  misc_feature 1..20: note = chemically synthesized
  source 1..20: mol_type = other DNA
agataaaactattcttgcct

SEQ ID NO: 1003 - DNA, 20 bp, synthetic construct
  misc_feature 1..20: note = chemically synthesized
  source 1..20: mol_type = other DNA
actattcttgcctcagataa

SEQ ID NO: 1004 - DNA, 20 bp, synthetic construct
  misc_feature 1..20: note = chemically synthesized
  source 1..20: mol_type = other DNA
ctattcttgcctcagataaa

SEQ ID NO: 1005 - DNA, 20 bp, synthetic construct
  misc_feature 1..20: note = chemically synthesized
  source 1..20: mol_type = other DNA
gataaaaggcatgacatgaa

SEQ ID NO: 1006 - DNA, 20 bp, synthetic construct
  misc_feature 1..20: note = chemically synthesized
  source 1..20: mol_type = other DNA
ataaaaggcatgacatgaaa

SEQ ID NO: 1007 - DNA, 20 bp, synthetic construct
  misc_feature 1..20: note = chemically synthesized
  source 1..20: mol_type = other DNA
gacatgaaaaggccacctca

SEQ ID NO: 1008 - DNA, 20 bp, synthetic construct
  misc_feature 1..20: note = chemically synthesized
  source 1..20: mol_type = other DNA
acatgaaaaggccacctcac

SEQ ID NO: 1009 - DNA, 20 bp, synthetic construct
  misc_feature 1..20: note = chemically synthesized
  source 1..20: mol_type = other DNA
aaaggccacctcacaggcac

SEQ ID NO: 1010 - DNA, 20 bp, synthetic construct
  misc_feature 1..20: note = chemically synthesized
  source 1..20: mol_type = other DNA
aaggccacctcacaggcact

SEQ ID NO: 1011 - DNA, 20 bp, synthetic construct
  misc_feature 1..20: note = chemically synthesized
  source 1..20: mol_type = other DNA
aggccacctcacaggcacta

SEQ ID NO: 1012 - DNA, 20 bp, synthetic construct
  misc_feature 1..20: note = chemically synthesized
  source 1..20: mol_type = other DNA
cctcacaggcactagggcat

SEQ ID NO: 1013 - DNA, 20 bp, synthetic construct
  misc_feature 1..20: note = chemically synthesized
  source 1..20: mol_type = other DNA
ggcactagggcataagaact

SEQ ID NO: 1014 - DNA, 20 bp, synthetic construct
  misc_feature 1..20: note = chemically synthesized
  source 1..20: mol_type = other DNA
gcgacaaaaaatgctaccac

SEQ ID NO: 1015 - DNA, 20 bp, synthetic construct
  misc_feature 1..20: note = chemically synthesized
  source 1..20: mol_type = other DNA
acaaaaaatgctaccacaag

SEQ ID NO: 1016 - DNA, 20 bp, synthetic construct
  misc_feature 1..20: note = chemically synthesized
  source 1..20: mol_type = other DNA
atgctaccacaagaagacaa

SEQ ID NO: 1017 - DNA, 20 bp, synthetic construct
  misc_feature 1..20: note = chemically synthesized
  source 1..20: mol_type = other DNA
accacaagaagacaacagaa

SEQ ID NO: 1018 - DNA, 20 bp, synthetic construct
  misc_feature 1..20: note = chemically synthesized
  source 1..20: mol_type = other DNA
caacagaacggcttttgttt

SEQ ID NO: 1019 - DNA, 20 bp, synthetic construct
  misc_feature 1..20: note = chemically synthesized
  source 1..20: mol_type = other DNA
ttttggttttttacaaaaat

SEQ ID NO: 1020 - DNA, 20 bp, synthetic construct
  misc_feature 1..20: note = chemically synthesized
  source 1..20: mol_type = other DNA
tcgtattcattcatctacac

SEQ ID NO: 1021 - DNA, 20 bp, synthetic construct
  misc_feature 1..20: note = chemically synthesized
  source 1..20: mol_type = other DNA
cgtattcattcatctacact

SEQ ID NO: 1022 - DNA, 20 bp, synthetic construct
  misc_feature 1..20: note = chemically synthesized
  source 1..20: mol_type = other DNA
tcattcatctacactgggaa

SEQ ID NO: 1023 - DNA, 20 bp, synthetic construct
  misc_feature 1..20: note = chemically synthesized
  source 1..20: mol_type = other DNA
cattcatctacactgggaac

SEQ ID NO: 1024 - DNA, 20 bp, synthetic construct
  misc_feature 1..20: note = chemically synthesized
  source 1..20: mol_type = other DNA
attcatctacactgggaaca

SEQ ID NO: 1025 - DNA, 20 bp, synthetic construct
  misc_feature 1..20: note = chemically synthesized
  source 1..20: mol_type = other DNA
ggaacagggacacgatatca

SEQ ID NO: 1026 - DNA, 20 bp, synthetic construct
  misc_feature 1..20: note = chemically synthesized
  source 1..20: mol_type = other DNA
aacagggacacgatatcaca

SEQ ID NO: 1027 - DNA, 20 bp, synthetic construct
  misc_feature 1..20: note = chemically synthesized
  source 1..20: mol_type = other DNA
acagggacacgatatcacag

SEQ ID NO: 1028 - DNA, 20 bp, synthetic construct
  misc_feature 1..20: note = chemically synthesized
  source 1..20: mol_type = other DNA
atatcacagaggtatgtgtt

SEQ ID NO: 1029 - DNA, 20 bp, synthetic construct
  misc_feature 1..20: note = chemically synthesized
  source 1..20: mol_type = other DNA
acagaggtatgtgtttagta

SEQ ID NO: 1030 - DNA, 20 bp, synthetic construct
  misc_feature 1..20: note = chemically synthesized
  source 1..20: mol_type = other DNA
tatgtgtttagtaaagcaaa

SEQ ID NO: 1031 - DNA, 20 bp, synthetic construct
  misc_feature 1..20: note = chemically synthesized
  source 1..20: mol_type = other DNA
caaatagatgctgcaacatg

SEQ ID NO: 1032 - DNA, 20 bp, synthetic construct
  misc_feature 1..20: note = chemically synthesized
  source 1..20: mol_type = other DNA
gcaacatgcagtatttgtaa

SEQ ID NO: 1033 - DNA, 20 bp, synthetic construct
  misc_feature 1..20: note = chemically synthesized
  source 1..20: mol_type = other DNA
tatttgtaaaagtgacaaca

SEQ ID NO: 1034 - DNA, 20 bp, synthetic construct
  misc_feature 1..20: note = chemically synthesized
  source 1..20: mol_type = other DNA
aagtgacaacacagatttct

SEQ ID NO: 1035 - DNA, 20 bp, synthetic construct
  misc_feature 1..20: note = chemically synthesized
  source 1..20: mol_type = other DNA
agtgacaacacagatttcta

SEQ ID NO: 1036 - DNA, 20 bp, synthetic construct
  misc_feature 1..20: note = chemically synthesized
  source 1..20: mol_type = other DNA
atttctaaggatttttaaaa

SEQ ID NO: 1037 - DNA, 20 bp, synthetic construct
  misc_feature 1..20: note = chemically synthesized
  source 1..20: mol_type = other DNA
atttttaaaatagacctaac

SEQ ID NO: 1038 - DNA, 20 bp, synthetic construct
  misc_feature 1..20: note = chemically synthesized
  source 1..20: mol_type = other DNA
ttaaaatagacctaactggc

SEQ ID NO: 1039 - DNA, 20 bp, synthetic construct
  misc_feature 1..20: note = chemically synthesized
  source 1..20: mol_type = other DNA
aatagacctaactggctggt

SEQ ID NO: 1040 - DNA, 20 bp, synthetic construct
  misc_feature 1..20: note = chemically synthesized
  source 1..20: mol_type = other DNA
agacctaactggctggtcag

SEQ ID NO: 1041 - DNA, 20 bp, synthetic construct
  misc_feature 1..20: note = chemically synthesized
  source 1..20: mol_type = other DNA
ggctggtcagaagataattg

SEQ ID NO: 1042 - DNA, 20 bp, synthetic construct
  misc_feature 1..20: note = chemically synthesized
  source 1..20: mol_type = other DNA
gctggtcagaagataattga

SEQ ID NO: 1043 - DNA, 20 bp, synthetic construct
  misc_feature 1..20: note = chemically synthesized
  source 1..20: mol_type = other DNA
ctggtcagaagataattgaa

SEQ ID NO: 1044 - DNA, 20 bp, synthetic construct
  misc_feature 1..20: note = chemically synthesized
  source 1..20: mol_type = other DNA
cgcccttatttgctgtcatc

SEQ ID NO: 1045 - DNA, 20 bp, synthetic construct
  misc_feature 1..20: note = chemically synthesized
  source 1..20: mol_type = other DNA
gcccttatttgctgtcatcc

SEQ ID NO: 1046 - DNA, 20 bp, synthetic construct
  misc_feature 1..20: note = chemically synthesized
  source 1..20: mol_type = other DNA
cttatttgctgtcatccagg

SEQ ID NO: 1047 - DNA, 20 bp, synthetic construct
  misc_feature 1..20: note = chemically synthesized
  source 1..20: mol_type = other DNA
agaccctatcaaaacaccta

SEQ ID NO: 1048 - DNA, 20 bp, synthetic construct
  misc_feature 1..20: note = chemically synthesized
  source 1..20: mol_type = other DNA
aaaacacctaaagtaatctg

SEQ ID NO: 1049 - DNA, 20 bp, synthetic construct
  misc_feature 1..20: note = chemically synthesized
  source 1..20: mol_type = other DNA
ctaaagtaatctgtagcatc

SEQ ID NO: 1050 - DNA, 20 bp, synthetic construct
  misc_feature 1..20: note = chemically synthesized
  source 1..20: mol_type = other DNA
taaagtaatctgtagcatct

SEQ ID NO: 1051 - DNA, 20 bp, synthetic construct
  misc_feature 1..20: note = chemically synthesized
  source 1..20: mol_type = other DNA
aaagtaatctgtagcatcta

SEQ ID NO: 1052 - DNA, 20 bp, synthetic construct
  misc_feature 1..20: note = chemically synthesized
  source 1..20: mol_type = other DNA
tctgtagcatctagggttcc

SEQ ID NO: 1053 - DNA, 20 bp, synthetic construct
  misc_feature 1..20: note = chemically synthesized
  source 1..20: mol_type = other DNA
ctgtagcatctagggttcct

SEQ ID NO: 1054 - DNA, 20 bp, synthetic construct
  misc_feature 1..20: note = chemically synthesized
  source 1..20: mol_type = other DNA
atctagggttcctgggatct

SEQ ID NO: 1055 - DNA, 20 bp, synthetic construct
  misc_feature 1..20: note = chemically synthesized
  source 1..20: mol_type = other DNA
tcctgggatctcagaaccac

SEQ ID NO: 1056 - DNA, 20 bp, synthetic construct
  misc_feature 1..20: note = chemically synthesized
  source 1..20: mol_type = other DNA
cctgggatctcagaaccaca

SEQ ID NO: 1057 - DNA, 20 bp, synthetic construct
  misc_feature 1..20: note = chemically synthesized
  source 1..20: mol_type = other DNA
aggcaaaccactatgcatct

SEQ ID NO: 1058 - DNA, 20 bp, synthetic construct
  misc_feature 1..20: note = chemically synthesized
  source 1..20: mol_type = other DNA
ggcaaaccactatgcatctc

SEQ ID NO: 1059 - DNA, 20 bp, synthetic construct
  misc_feature 1..20: note = chemically synthesized
  source 1..20: mol_type = other DNA
cactatgcatctcaggaaat

SEQ ID NO: 1060 - DNA, 20 bp, synthetic construct
  misc_feature 1..20: note = chemically synthesized
  source 1..20: mol_type = other DNA
tatgcatctcaggaaatcag

SEQ ID NO: 1061 - DNA, 20 bp, synthetic construct
  misc_feature 1..20: note = chemically synthesized
  source 1..20: mol_type = other DNA
gaaatcagtggctgattcca

SEQ ID NO: 1062 - DNA, 20 bp, synthetic construct
  misc_feature 1..20: note = chemically synthesized
  source 1..20: mol_type = other DNA
tccaaagatttcactatgtc

SEQ ID NO: 1063 - DNA, 20 bp, synthetic construct
  misc_feature 1..20: note = chemically synthesized
  source 1..20: mol_type = other DNA
actatgtctggctacacccc

SEQ ID NO: 1064 - DNA, 20 bp, synthetic construct
  misc_feature 1..20: note = chemically synthesized
  source 1..20: mol_type = other DNA
atgtctggctacacccctag

SEQ ID NO: 1065 - DNA, 20 bp, synthetic construct
  misc_feature 1..20: note = chemically synthesized
  source 1..20: mol_type = other DNA
aaacctgatgcctttgtttc

SEQ ID NO: 1066 - DNA, 20 bp, synthetic construct
  misc_feature 1..20: note = chemically synthesized
  source 1..20: mol_type = other DNA
tgcctttgtttccagatttt

SEQ ID NO: 1067 - DNA, 20 bp, synthetic construct
  misc_feature 1..20: note = chemically synthesized
  source 1..20: mol_type = other DNA
tccagatttttagatttcaa

SEQ ID NO: 1068 - DNA, 20 bp, synthetic construct
  misc_feature 1..20: note = chemically synthesized
  source 1..20: mol_type = other DNA
agatttttagatttcaaaag

SEQ ID NO: 1069 - DNA, 20 bp, synthetic construct
  misc_feature 1..20: note = chemically synthesized
  source 1..20: mol_type = other DNA
gatttttagatttcaaaagt

SEQ ID NO: 1070 - DNA, 20 bp, synthetic construct
  misc_feature 1..20: note = chemically synthesized
  source 1..20: mol_type = other DNA
atttttagatttcaaaagtg

SEQ ID NO: 1071 - DNA, 20 bp, synthetic construct
  misc_feature 1..20: note = chemically synthesized
  source 1..20: mol_type = other DNA
aagtggggttattttgttat

SEQ ID NO: 1072 - DNA, 20 bp, synthetic construct
  misc_feature 1..20: note = chemically synthesized
  source 1..20: mol_type = other DNA
gggttattttgttatgagaa

SEQ ID NO: 1073 - DNA, 20 bp, synthetic construct
  misc_feature 1..20: note = chemically synthesized
  source 1..20: mol_type = other DNA
tatgagaaaagactcttaca

SEQ ID NO: 1074 - DNA, 20 bp, synthetic construct
  misc_feature 1..20: note = chemically synthesized
  source 1..20: mol_type = other DNA
agactcttacatggaaacca

SEQ ID NO: 1075 - DNA, 20 bp, synthetic construct
  misc_feature 1..20: note = chemically synthesized
  source 1..20: mol_type = other DNA
actcttacatggaaaccaaa

SEQ ID NO: 1076 - DNA, 20 bp, synthetic construct
  misc_feature 1..20: note = chemically synthesized
  source 1..20: mol_type = other DNA
tcttttttacattatgttct

SEQ ID NO: 1077 - DNA, 20 bp, synthetic construct
  misc_feature 1..20: note = chemically synthesized
  source 1..20: mol_type = other DNA
ttacattatgttctaagata

SEQ ID NO: 1078 - DNA, 20 bp, synthetic construct
  misc_feature 1..20: note = chemically synthesized
  source 1..20: mol_type = other DNA
attatgttctaagataaagc

SEQ ID NO: 1079 - DNA, 20 bp, synthetic construct
  misc_feature 1..20: note = chemically synthesized
  source 1..20: mol_type = other DNA
ttatgttctaagataaagca

SEQ ID NO: 1080 - DNA, 20 bp, synthetic construct
  misc_feature 1..20: note = chemically synthesized
  source 1..20: mol_type = other DNA
gttctaagataaagcaagga

SEQ ID NO: 1081 - DNA, 20 bp, synthetic construct
  misc_feature 1..20: note = chemically synthesized
  source 1..20: mol_type = other DNA
ttctaagataaagcaaggat

SEQ ID NO: 1082 - DNA, 20 bp, synthetic construct
  misc_feature 1..20: note = chemically synthesized
  source 1..20: mol_type = other DNA
ctaagataaagcaaggatgg

SEQ ID NO: 1083 - DNA, 20 bp, synthetic construct
  misc_feature 1..20: note = chemically synthesized
  source 1..20: mol_type = other DNA
ataaagcaaggatgggagaa

SEQ ID NO: 1084 - DNA, 20 bp, synthetic construct
  misc_feature 1..20: note = chemically synthesized
  source 1..20: mol_type = other DNA
gcaaggatgggagaatagaa

SEQ ID NO: 1085 - DNA, 20 bp, synthetic construct
  misc_feature 1..20: note = chemically synthesized
  source 1..20: mol_type = other DNA
ggagaatagaaaagaacttt

SEQ ID NO: 1086 - DNA, 20 bp, synthetic construct
  misc_feature 1..20: note = chemically synthesized
  source 1..20: mol_type = other DNA
gaaaagaacttttagacaac

SEQ ID NO: 1087 - DNA, 20 bp, synthetic construct
  misc_feature 1..20: note = chemically synthesized
  source 1..20: mol_type = other DNA
gaacttttagacaacaagaa

SEQ ID NO: 1088 - DNA, 20 bp, synthetic construct
  misc_feature 1..20: note = chemically synthesized
  source 1..20: mol_type = other DNA
caagaacagcaaaaaattta

SEQ ID NO: 1089 - DNA, 20 bp, synthetic construct
  misc_feature 1..20: note = chemically synthesized
  source 1..20: mol_type = other DNA
aagaacagcaaaaaatttaa

SEQ ID NO: 1090 - DNA, 20 bp, synthetic construct
  misc_feature 1..20: note = chemically synthesized
  source 1..20: mol_type = other DNA
aaaaaatttaaaggaaataa

SEQ ID NO: 1091 - DNA, 20 bp, synthetic construct
  misc_feature 1..20: note = chemically synthesized
  source 1..20: mol_type = other DNA
tttaaaggaaataaaagttt

SEQ ID NO: 1092 - DNA, 20 bp, synthetic construct
  misc_feature 1..20: note = chemically synthesized
  source 1..20: mol_type = other DNA
aaagtttaagatgctattac

SEQ ID NO: 1093 - DNA, 20 bp, synthetic construct
  misc_feature 1..20: note = chemically synthesized
  source 1..20: mol_type = other DNA
tttaagatgctattaccagc

SEQ ID NO: 1094 - DNA, 20 bp, synthetic construct
  misc_feature 1..20: note = chemically synthesized
  source 1..20: mol_type = other DNA
ttttttcacttatgtttgaa

SEQ ID NO: 1095 - DNA, 20 bp, synthetic construct
  misc_feature 1..20: note = chemically synthesized
  source 1..20: mol_type = other DNA
tgtttgaatggatttctgct

SEQ ID NO: 1096 - DNA, 20 bp, synthetic construct
  misc_feature 1..20: note = chemically synthesized
  source 1..20: mol_type = other DNA
tttgaatggatttctgctaa

SEQ ID NO: 1097 - DNA, 20 bp, synthetic construct
  misc_feature 1..20: note = chemically synthesized
  source 1..20: mol_type = other DNA
aatggatttctgctaagaga

SEQ ID NO: 1098 - DNA, 20 bp, synthetic construct
  misc_feature 1..20: note = chemically synthesized
  source 1..20: mol_type = other DNA
tggatttctgctaagagatg

SEQ ID NO: 1099 - DNA, 20 bp, synthetic construct
  misc_feature 1..20: note = chemically synthesized
  source 1..20: mol_type = other DNA
tttctgctaagagatggagt

SEQ ID NO: 1100 - DNA, 20 bp, synthetic construct
  misc_feature 1..20: note = chemically synthesized
  source 1..20: mol_type = other DNA
atggagtaagtttttaacat

SEQ ID NO: 1101 - DNA, 20 bp, synthetic construct
  misc_feature 1..20: note = chemically synthesized
  source 1..20: mol_type = other DNA
tcttgaaaactattctaaac

SEQ ID NO: 1102 - DNA, 20 bp, synthetic construct
  misc_feature 1..20: note = chemically synthesized
  source 1..20: mol_type = other DNA
gaaaactattctaaactgga

SEQ ID NO: 1103 - DNA, 20 bp, synthetic construct
  misc_feature 1..20: note = chemically synthesized
  source 1..20: mol_type = other DNA
gaaagccttaaaactatgtc

SEQ ID NO: 1104 - DNA, 20 bp, synthetic construct
  misc_feature 1..20: note = chemically synthesized
  source 1..20: mol_type = other DNA
aaagccttaaaactatgtcc

SEQ ID NO: 1105 - DNA, 20 bp, synthetic construct
  misc_feature 1..20: note = chemically synthesized
  source 1..20: mol_type = other DNA
aagccttaaaactatgtcca

SEQ ID NO: 1106 - DNA, 20 bp, synthetic construct
  misc_feature 1..20: note = chemically synthesized
  source 1..20: mol_type = other DNA
taaaactatgtccagggttt

SEQ ID NO: 1107 - DNA, 20 bp, synthetic construct
  misc_feature 1..20: note = chemically synthesized
  source 1..20: mol_type = other DNA
gagatatgtctattttaata

SEQ ID NO: 1108 - DNA, 20 bp, synthetic construct
  misc_feature 1..20: note = chemically synthesized
  source 1..20: mol_type = other DNA
tatgtctattttaatatagt

SEQ ID NO: 1109 - DNA, 20 bp, synthetic construct
  misc_feature 1..20: note = chemically synthesized
  source 1..20: mol_type = other DNA
gtaagtactttatgttcctt

SEQ ID NO: 1110 - DNA, 20 bp, synthetic construct
  misc_feature 1..20: note = chemically synthesized
  source 1..20: mol_type = other DNA
taagtactttatgttccttt

SEQ ID NO: 1111 - DNA, 20 bp, synthetic construct
  misc_feature 1..20: note = chemically synthesized
  source 1..20: mol_type = other DNA
aagtactttatgttccttta

SEQ ID NO: 1112 - DNA, 20 bp, synthetic construct
  misc_feature 1..20: note = chemically synthesized
  source 1..20: mol_type = other DNA
ttagggtataatacacgcat

SEQ ID NO: 1113 - DNA, 20 bp, synthetic construct
  misc_feature 1..20: note = chemically synthesized
  source 1..20: mol_type = other DNA
tacacgcatcagaatgccca

SEQ ID NO: 1114 - DNA, 20 bp, synthetic construct
  misc_feature 1..20: note = chemically synthesized
  source 1..20: mol_type = other DNA
ccatagaaataatcctgaaa

SEQ ID NO: 1115 - DNA, 20 bp, synthetic construct
  misc_feature 1..20: note = chemically synthesized
  source 1..20: mol_type = other DNA
taatcctgaaaaagactgac

SEQ ID NO: 1116 - DNA, 20 bp, synthetic construct
  misc_feature 1..20: note = chemically synthesized
  source 1..20: mol_type = other DNA
aaaacctgttattttcttgc

SEQ ID NO: 1117 - DNA, 20 bp, synthetic construct
  misc_feature 1..20: note = chemically synthesized
  source 1..20: mol_type = other DNA
attttcttgcaagtaattta

SEQ ID NO: 1118 - DNA, 20 bp, synthetic construct
  misc_feature 1..20: note = chemically synthesized
  source 1..20: mol_type = other DNA
tttcttgcaagtaatttaca

SEQ ID NO: 1119 - DNA, 20 bp, synthetic construct
  misc_feature 1..20: note = chemically synthesized
  source 1..20: mol_type = other DNA
atttacagagtgtgtcaaat

SEQ ID NO: 1120 - DNA, 20 bp, synthetic construct
  misc_feature 1..20: note = chemically synthesized
  source 1..20: mol_type = other DNA
tttacagagtgtgtcaaatg

SEQ ID NO: 1121 - DNA, 20 bp, synthetic construct
  misc_feature 1..20: note = chemically synthesized
  source 1..20: mol_type = other DNA
agtgtgtcaaatgaggacac

SEQ ID NO: 1122 - DNA, 20 bp, synthetic construct
  misc_feature 1..20: note = chemically synthesized
  source 1..20: mol_type = other DNA
gtgtcaaatgaggacacaag

SEQ ID NO: 1123 - DNA, 20 bp, synthetic construct
  misc_feature 1..20: note = chemically synthesized
  source 1..20: mol_type = other DNA
ttttttttattttttcaata

SEQ ID NO: 1124 - DNA, 20 bp, synthetic construct
  misc_feature 1..20: note = chemically synthesized
  source 1..20: mol_type = other DNA
tttttttattttttcaataa

SEQ ID NO: 1125 - DNA, 20 bp, synthetic construct
  misc_feature 1..20: note = chemically synthesized
  source 1..20: mol_type = other DNA
ttttttattttttcaataaa

SEQ ID NO: 1126 - DNA, 20 bp, synthetic construct
  misc_feature 1..20: note = chemically synthesized
  source 1..20: mol_type = other DNA
ttttcaataaagggacaaaa

SEQ ID NO: 1127 - DNA, 20 bp, synthetic construct
  misc_feature 1..20: note = chemically synthesized
  source 1..20: mol_type = other DNA
tttcaataaagggacaaaat

SEQ ID NO: 1128 - DNA, 20 bp, synthetic construct
  misc_feature 1..20: note = chemically synthesized
  source 1..20: mol_type = other DNA
ggacaaaatgggtgtatgaa

SEQ ID NO: 1129 - DNA, 20 bp, synthetic construct
  misc_feature 1..20: note = chemically synthesized
  source 1..20: mol_type = other DNA
gacaaaatgggtgtatgaac

SEQ ID NO: 1130 - DNA, 20 bp, synthetic construct
  misc_feature 1..20: note = chemically synthesized
  source 1..20: mol_type = other DNA
ggtgtatgaacaggttaatg

SEQ ID NO: 1131 - DNA, 20 bp, synthetic construct
  misc_feature 1..20: note = chemically synthesized
  source 1..20: mol_type = other DNA
agacaactgccaaaaaaaca

SEQ ID NO: 1132 - DNA, 20 bp, synthetic construct
  misc_feature 1..20: note = chemically synthesized
  source 1..20: mol_type = other DNA
aactgccaaaaaaacacaga

SEQ ID NO: 1133 - DNA, 20 bp, synthetic construct
  misc_feature 1..20: note = chemically synthesized
  source 1..20: mol_type = other DNA
tgccaaaaaaacacagacag

SEQ ID NO: 1134 - DNA, 20 bp, synthetic construct
  misc_feature 1..20: note = chemically synthesized
  source 1..20: mol_type = other DNA
acagacagtggtttttccaa

SEQ ID NO: 1135 - DNA, 20 bp, synthetic construct
  misc_feature 1..20: note = chemically synthesized
  source 1..20: mol_type = other DNA
ttttccaatagaacttaaca

SEQ ID NO: 1136 - DNA, 20 bp, synthetic construct
  misc_feature 1..20: note = chemically synthesized
  source 1..20: mol_type = other DNA
caatagaacttaacaaagac

SEQ ID NO: 1137 - DNA, 20 bp, synthetic construct
  misc_feature 1..20: note = chemically synthesized
  source 1..20: mol_type = other DNA
ccagaaacaaatacaataaa

SEQ ID NO: 1138 - DNA, 20 bp, synthetic construct
  misc_feature 1..20: note = chemically synthesized
  source 1..20: mol_type = other DNA
aaacaaatacaataaaaagc

SEQ ID NO: 1139 - DNA, 20 bp, synthetic construct
  misc_feature 1..20: note = chemically synthesized
  source 1..20: mol_type = other DNA
aacaaatacaataaaaagcc

SEQ ID NO: 1140 - DNA, 20 bp, synthetic construct
  misc_feature 1..20: note = chemically synthesized
  source 1..20: mol_type = other DNA
agccaggttgtaatgacctt

SEQ ID NO: 1141 - DNA, 20 bp, synthetic construct
  misc_feature 1..20: note = chemically synthesized
  source 1..20: mol_type = other DNA
taaaaaaaaaaataaaaaca

SEQ ID NO: 1142 - DNA, 20 bp, synthetic construct
  misc_feature 1..20: note = chemically synthesized
  source 1..20: mol_type = other DNA
ataaaaacaaagaaaaataa

SEQ ID NO: 1143 - DNA, 20 bp, synthetic construct
  misc_feature 1..20: note = chemically synthesized
  source 1..20: mol_type = other DNA
gaaaaataaaagatcaaatt

SEQ ID NO: 1144 - DNA, 20 bp, synthetic construct
  misc_feature 1..20: note = chemically synthesized
  source 1..20: mol_type = other DNA
ttaagtgcctctgttttgaa

SEQ ID NO: 1145 - DNA, 20 bp, synthetic construct
  misc_feature 1..20: note = chemically synthesized
  source 1..20: mol_type = other DNA
taagtgcctctgttttgaac

SEQ ID NO: 1146 - DNA, 20 bp, synthetic construct
  misc_feature 1..20: note = chemically synthesized
  source 1..20: mol_type = other DNA
aagtgcctctgttttgaaca

SEQ ID NO: 1147 - DNA, 20 bp, synthetic construct
  misc_feature 1..20: note = chemically synthesized
  source 1..20: mol_type = other DNA
ctgttttgaacagggcacat

SEQ ID NO: 1148 - DNA, 20 bp, synthetic construct
  misc_feature 1..20: note = chemically synthesized
  source 1..20: mol_type = other DNA
ggcacataagcaataataaa

SEQ ID NO: 1149 - DNA, 20 bp, synthetic construct
  misc_feature 1..20: note = chemically synthesized
  source 1..20: mol_type = other DNA
ataataaatagtgactccca

SEQ ID NO: 1150 - DNA, 20 bp, synthetic construct
  misc_feature 1..20: note = chemically synthesized
  source 1..20: mol_type = other DNA
aatagtgactcccatagtaa

SEQ ID NO: 1151 - DNA, 20 bp, synthetic construct
  misc_feature 1..20: note = chemically synthesized
  source 1..20: mol_type = other DNA
atagtaaaagataaaatttc

SEQ ID NO: 1152 - DNA, 20 bp, synthetic construct
  misc_feature 1..20: note = chemically synthesized
  source 1..20: mol_type = other DNA
aaatttcaagttacgacaaa

SEQ ID NO: 1153 - DNA, 20 bp, synthetic construct
  misc_feature 1..20: note = chemically synthesized
  source 1..20: mol_type = other DNA
acgacaaacagctttcatta

SEQ ID NO: 1154 - DNA, 20 bp, synthetic construct
  misc_feature 1..20: note = chemically synthesized
  source 1..20: mol_type = other DNA
cgacaaacagctttcattac

SEQ ID NO: 1155 - DNA, 20 bp, synthetic construct
  misc_feature 1..20: note = chemically synthesized
  source 1..20: mol_type = other DNA
aacagctttcattacaggaa

SEQ ID NO: 1156 - DNA, 20 bp, synthetic construct
  misc_feature 1..20: note = chemically synthesized
  source 1..20: mol_type = other DNA
ctttcattacaggaatagaa

SEQ ID NO: 1157 - DNA, 20 bp, synthetic construct
  misc_feature 1..20: note = chemically synthesized
  source 1..20: mol_type = other DNA
tttcattacaggaatagaaa

SEQ ID NO: 1158 - DNA, 20 bp, synthetic construct
  misc_feature 1..20: note = chemically synthesized
  source 1..20: mol_type = other DNA
ctgcattgccatttacaaaa

SEQ ID NO: 1159 - DNA, 20 bp, synthetic construct
  misc_feature 1..20: note = chemically synthesized
  source 1..20: mol_type = other DNA
ttacaaaaaagtattgacta

SEQ ID NO: 1160 - DNA, 20 bp, synthetic construct
  misc_feature 1..20: note = chemically synthesized
  source 1..20: mol_type = other DNA
caaaaaagtattgactaaag

SEQ ID NO: 1161 - DNA, 20 bp, synthetic construct
  misc_feature 1..20: note = chemically synthesized
  source 1..20: mol_type = other DNA
aaaaaagtattgactaaagc

SEQ ID NO: 1162 - DNA, 20 bp, synthetic construct
  misc_feature 1..20: note = chemically synthesized
  source 1..20: mol_type = other DNA
ttctttccaatctaaatata

SEQ ID NO: 1163 - DNA, 20 bp, synthetic construct
  misc_feature 1..20: note = chemically synthesized
  source 1..20: mol_type = other DNA
tctaaatataaagcaccatt

SEQ ID NO: 1164 - DNA, 20 bp, synthetic construct
  misc_feature 1..20: note = chemically synthesized
  source 1..20: mol_type = other DNA
ataaagcaccatttagtttt

SEQ ID NO: 1165 - DNA, 20 bp, synthetic construct
  misc_feature 1..20: note = chemically synthesized
  source 1..20: mol_type = other DNA
tgaaaaaaactgcaaaacat

SEQ ID NO: 1166 - DNA, 20 bp, synthetic construct
  misc_feature 1..20: note = chemically synthesized
  source 1..20: mol_type = other DNA
tctttcttttactgcatatg

SEQ ID NO: 1167 - DNA, 20 bp, synthetic construct
  misc_feature 1..20: note = chemically synthesized
  source 1..20: mol_type = other DNA
ctttcttttactgcatatga

SEQ ID NO: 1168 - DNA, 20 bp, synthetic construct
  misc_feature 1..20: note = chemically synthesized
  source 1..20: mol_type = other DNA
cttttactgcatatgaaggt

SEQ ID NO: 1169 - DNA, 20 bp, synthetic construct
  misc_feature 1..20: note = chemically synthesized
  source 1..20: mol_type = other DNA
tgcatatgaaggtaagatgc

SEQ ID NO: 1170 - DNA, 20 bp, synthetic construct
  misc_feature 1..20: note = chemically synthesized
  source 1..20: mol_type = other DNA
gaaggtaagatgctggaatg

SEQ ID NO: 1171 - DNA, 20 bp, synthetic construct
  misc_feature 1..20: note = chemically synthesized
  source 1..20: mol_type = other DNA
aaggtaagatgctggaatgt

SEQ ID NO: 1172 - DNA, 20 bp, synthetic construct
  misc_feature 1..20: note = chemically synthesized
  source 1..20: mol_type = other DNA
aggtaagatgctggaatgta

SEQ ID NO: 1173 - DNA, 20 bp, synthetic construct
  misc_feature 1..20: note = chemically synthesized
  source 1..20: mol_type = other DNA
gatgctggaatgtagggtga

SEQ ID NO: 1174 - DNA, 20 bp, synthetic construct
  misc_feature 1..20: note = chemically synthesized
  source 1..20: mol_type = other DNA
gctggaatgtagggtgatag

SEQ ID NO: 1175 - DNA, 20 bp, synthetic construct
  misc_feature 1..20: note = chemically synthesized
  source 1..20: mol_type = other DNA
ctggaatgtagggtgataga

SEQ ID NO: 1176 - DNA, 20 bp, synthetic construct
  misc_feature 1..20: note = chemically synthesized
  source 1..20: mol_type = other DNA
aatgtagggtgatagaagga

SEQ ID NO: 1177 - DNA, 20 bp, synthetic construct
  misc_feature 1..20: note = chemically synthesized
  source 1..20: mol_type = other DNA
atgtagggtgatagaaggaa

SEQ ID NO: 1178 - DNA, 20 bp, synthetic construct
  misc_feature 1..20: note = chemically synthesized
  source 1..20: mol_type = other DNA
tgtagggtgatagaaggaaa

SEQ ID NO: 1179 - DNA, 20 bp, synthetic construct
  misc_feature 1..20: note = chemically synthesized
  source 1..20: mol_type = other DNA
gatagaaggaaagggacaaa

SEQ ID NO: 1180 - DNA, 20 bp, synthetic construct
  misc_feature 1..20: note = chemically synthesized
  source 1..20: mol_type = other DNA
acataacaaaccaacgttat

SEQ ID NO: 1181 - DNA, 20 bp, synthetic construct
  misc_feature 1..20: note = chemically synthesized
  source 1..20: mol_type = other DNA
aaaccaacgttattagcttg

SEQ ID NO: 1182 - DNA, 20 bp, synthetic construct
  misc_feature 1..20: note = chemically synthesized
  source 1..20: mol_type = other DNA
ttagcttgcagtactgcata

SEQ ID NO: 1183 - DNA, 20 bp, synthetic construct
  misc_feature 1..20: note = chemically synthesized
  source 1..20: mol_type = other DNA
ttgcagtactgcatacagta

SEQ ID NO: 1184 - DNA, 20 bp, synthetic construct
  misc_feature 1..20: note = chemically synthesized
  source 1..20: mol_type = other DNA
cagtactgcatacagtatgg

SEQ ID NO: 1185 - DNA, 20 bp, synthetic construct
  misc_feature 1..20: note = chemically synthesized
  source 1..20: mol_type = other DNA
tactgcatacagtatggcag

SEQ ID NO: 1186 - DNA, 20 bp, synthetic construct
  misc_feature 1..20: note = chemically synthesized
  source 1..20: mol_type = other DNA
actgcatacagtatggcagc

SEQ ID NO: 1187 - DNA, 20 bp, synthetic construct
  misc_feature 1..20: note = chemically synthesized
  source 1..20: mol_type = other DNA
tacagtatggcagcaggaaa

SEQ ID NO: 1188 - DNA, 20 bp, synthetic construct
  misc_feature 1..20: note = chemically synthesized
  source 1..20: mol_type = other DNA
acagtatggcagcaggaaaa

SEQ ID NO: 1189 - DNA, 20 bp, synthetic construct
  misc_feature 1..20: note = chemically synthesized
  source 1..20: mol_type = other DNA
agcaggaaaaaggaacaaaa

SEQ ID NO: 1190 - DNA, 20 bp, synthetic construct
  misc_feature 1..20: note = chemically synthesized
  source 1..20: mol_type = other DNA
gcaggaaaaaggaacaaaaa

SEQ ID NO: 1191 - DNA, 20 bp, synthetic construct
  misc_feature 1..20: note = chemically synthesized
  source 1..20: mol_type = other DNA
gatatgtacaacccctatga

SEQ ID NO: 1192 - DNA, 20 bp, synthetic construct
  misc_feature 1..20: note = chemically synthesized
  source 1..20: mol_type = other DNA
cagccatccatgtgacattc

SEQ ID NO: 1193 - DNA, 20 bp, synthetic construct
  misc_feature 1..20: note = chemically synthesized
  source 1..20: mol_type = other DNA
ccatccatgtgacattctag

SEQ ID NO: 1194 - DNA, 20 bp, synthetic construct
  misc_feature 1..20: note = chemically synthesized
  source 1..20: mol_type = other DNA
catccatgtgacattctagc

SEQ ID NO: 1195 - DNA, 20 bp, synthetic construct
  misc_feature 1..20: note = chemically synthesized
  source 1..20: mol_type = other DNA
tcccccaaaccgccattata

SEQ ID NO: 1196 - DNA, 20 bp, synthetic construct
  misc_feature 1..20: note = chemically synthesized
  source 1..20: mol_type = other DNA
ctctcttttttttttttttg

SEQ ID NO: 1197 - DNA, 20 bp, synthetic construct
  misc_feature 1..20: note = chemically synthesized
  source 1..20: mol_type = other DNA
caaattaaaaaaatatactg

SEQ ID NO: 1198 - DNA, 20 bp, synthetic construct
  misc_feature 1..20: note = chemically synthesized
  source 1..20: mol_type = other DNA
attaaaaaaatatactgtgg

SEQ ID NO: 1199 - DNA, 20 bp, synthetic construct
  misc_feature 1..20: note = chemically synthesized
  source 1..20: mol_type = other DNA
ttttttttccactaccaaaa

SEQ ID NO: 1200 - DNA, 20 bp, synthetic construct
  misc_feature 1..20: note = chemically synthesized
  source 1..20: mol_type = other DNA
tttttttccactaccaaaaa

SEQ ID NO: 1201 - DNA, 20 bp, synthetic construct
  misc_feature 1..20: note = chemically synthesized
  source 1..20: mol_type = other DNA
aaggtacattgatacctttt

SEQ ID NO: 1202 - DNA, 20 bp, synthetic construct
  misc_feature 1..20: note = chemically synthesized
  source 1..20: mol_type = other DNA
ggtacattgataccttttaa

SEQ ID NO: 1203 - DNA, 20 bp, synthetic construct
  misc_feature 1..20: note = chemically synthesized
  source 1..20: mol_type = other DNA
ttgataccttttaagagaac

SEQ ID NO: 1204 - DNA, 20 bp, synthetic construct
  misc_feature 1..20: note = chemically synthesized
  source 1..20: mol_type = other DNA
ccttttaagagaacaagcaa

SEQ ID NO: 1205 - DNA, 20 bp, synthetic construct
  misc_feature 1..20: note = chemically synthesized
  source 1..20: mol_type = other DNA
caagcaacagttaaaaatac

SEQ ID NO: 1206 - DNA, 20 bp, synthetic construct
  misc_feature 1..20: note = chemically synthesized
  source 1..20: mol_type = other DNA
aagcttcaatataaatacta

SEQ ID NO: 1207 - DNA, 20 bp, synthetic construct
  misc_feature 1..20: note = chemically synthesized
  source 1..20: mol_type = other DNA
aatactatagtgcctaacac

SEQ ID NO: 1208 - DNA, 20 bp, synthetic construct
  misc_feature 1..20: note = chemically synthesized
  source 1..20: mol_type = other DNA
atttaattcaaataccattc

SEQ ID NO: 1209 - DNA, 20 bp, synthetic construct
  misc_feature 1..20: note = chemically synthesized
  source 1..20: mol_type = other DNA
caaataccattctagaaata

SEQ ID NO: 1210 - DNA, 20 bp, synthetic construct
  misc_feature 1..20: note = chemically synthesized
  source 1..20: mol_type = other DNA
cattctagaaatacagaaaa

SEQ ID NO: 1211 - DNA, 20 bp, synthetic construct
  misc_feature 1..20: note = chemically synthesized
  source 1..20: mol_type = other DNA
aaaagaccataaatgtattt

SEQ ID NO: 1212 - DNA, 20 bp, synthetic construct
  misc_feature 1..20: note = chemically synthesized
  source 1..20: mol_type = other DNA
accataaatgtattttagca

SEQ ID NO: 1213 - DNA, 20 bp, synthetic construct
  misc_feature 1..20: note = chemically synthesized
  source 1..20: mol_type = other DNA
ccataaatgtattttagcat

SEQ ID NO: 1214 - DNA, 20 bp, synthetic construct
  misc_feature 1..20: note = chemically synthesized
  source 1..20: mol_type = other DNA
tttagcataggaatcaacat

SEQ ID NO: 1215 - DNA, 20 bp, synthetic construct
  misc_feature 1..20: note = chemically synthesized
  source 1..20: mol_type = other DNA
gtgtgcattttcctatattt

SEQ ID NO: 1216 - DNA, 20 bp, synthetic construct
  misc_feature 1..20: note = chemically synthesized
  source 1..20: mol_type = other DNA
ttttttttttttacaacctg

SEQ ID NO: 1217 - DNA, 20 bp, synthetic construct
  misc_feature 1..20: note = chemically synthesized
  source 1..20: mol_type = other DNA
ttttttttttacaacctgaa

SEQ ID NO: 1218 - DNA, 20 bp, synthetic construct
  misc_feature 1..20: note = chemically synthesized
  source 1..20: mol_type = other DNA
tttttttacaacctgaagag

SEQ ID NO: 1219 - DNA, 20 bp, synthetic construct
  misc_feature 1..20: note = chemically synthesized
  source 1..20: mol_type = other DNA
ctgaagagcggtgtgtatcc

SEQ ID NO: 1220 - DNA, 20 bp, synthetic construct
  misc_feature 1..20: note = chemically synthesized
  source 1..20: mol_type = other DNA
tgaagagcggtgtgtatcca

SEQ ID NO: 1221 - DNA, 20 bp, synthetic construct
  misc_feature 1..20: note = chemically synthesized
  source 1..20: mol_type = other DNA
agcggtgtgtatccaaggca

SEQ ID NO: 1222 - DNA, 20 bp, synthetic construct
  misc_feature 1..20: note = chemically synthesized
  source 1..20: mol_type = other DNA
tttccactaccatttttaaa

SEQ ID NO: 1223 - DNA, 20 bp, synthetic construct
  misc_feature 1..20: note = chemically synthesized
  source 1..20: mol_type = other DNA
accatttttaaatggataac

SEQ ID NO: 1224 - DNA, 20 bp, synthetic construct
  misc_feature 1..20: note = chemically synthesized
  source 1..20: mol_type = other DNA
acaagtcttgtaacaccacc

SEQ ID NO: 1225 - DNA, 20 bp, synthetic construct
  misc_feature 1..20: note = chemically synthesized
  source 1..20: mol_type = other DNA
ttgtaacaccaccaagacaa

SEQ ID NO: 1226 - DNA, 20 bp, synthetic construct
  misc_feature 1..20: note = chemically synthesized
  source 1..20: mol_type = other DNA
gacaatggaaccctaaaatg

SEQ ID NO: 1227 - DNA, 20 bp, synthetic construct
  misc_feature 1..20: note = chemically synthesized
  source 1..20: mol_type = other DNA
gttcccccctaaacataatg

SEQ ID NO: 1228 - DNA, 20 bp, synthetic construct
  misc_feature 1..20: note = chemically synthesized
  source 1..20: mol_type = other DNA
cttaacatttatatttaaaa

SEQ ID NO: 1229 - DNA, 20 bp, synthetic construct
  misc_feature 1..20: note = chemically synthesized
  source 1..20: mol_type = other DNA
acaaaaaaatccttgcactg

SEQ ID NO: 1230 - DNA, 20 bp, synthetic construct
  misc_feature 1..20: note = chemically synthesized
  source 1..20: mol_type = other DNA
aaaaaatccttgcactgtag

SEQ ID NO: 1231 - DNA, 20 bp, synthetic construct
  misc_feature 1..20: note = chemically synthesized
  source 1..20: mol_type = other DNA
tccttgcactgtagaagcga

SEQ ID NO: 1232 - DNA, 20 bp, synthetic construct
  misc_feature 1..20: note = chemically synthesized
  source 1..20: mol_type = other DNA
caatcattcatttctatgtt

SEQ ID NO: 1233 - DNA, 20 bp, synthetic construct
  misc_feature 1..20: note = chemically synthesized
  source 1..20: mol_type = other DNA
gtgtattctgtttccattca

SEQ ID NO: 1234 - DNA, 20 bp, synthetic construct
  misc_feature 1..20: note = chemically synthesized
  source 1..20: mol_type = other DNA
gcgcttgcaatgttgcgtcc

SEQ ID NO: 1235 - DNA, 20 bp, synthetic construct
  misc_feature 1..20: note = chemically synthesized
  source 1..20: mol_type = other DNA
ttgcaatgttgcgtccaagt

SEQ ID NO: 1236 - DNA, 20 bp, synthetic construct
  misc_feature 1..20: note = chemically synthesized
  source 1..20: mol_type = other DNA
aatgttgcgtccaagtaagt

SEQ ID NO: 1237 - DNA, 20 bp, synthetic construct
  misc_feature 1..20: note = chemically synthesized
  source 1..20: mol_type = other DNA
gtccaagtaagtaagctcaa

SEQ ID NO: 1238 - DNA, 20 bp, synthetic construct
  misc_feature 1..20: note = chemically synthesized
  source 1..20: mol_type = other DNA
agtaagtaagctcaatagtc

SEQ ID NO: 1239 - DNA, 20 bp, synthetic construct
  misc_feature 1..20: note = chemically synthesized
  source 1..20: mol_type = other DNA
aagctcaatagtcaagtaaa

SEQ ID NO: 1240 - DNA, 20 bp, synthetic construct
  misc_feature 1..20: note = chemically synthesized
  source 1..20: mol_type = other DNA
tcaatagtcaagtaaatggc

SEQ ID NO: 1241 - DNA, 20 bp, synthetic construct
  misc_feature 1..20: note = chemically synthesized
  source 1..20: mol_type = other DNA
agtcaagtaaatggctggca

SEQ ID NO: 1242 - DNA, 20 bp, synthetic construct
  misc_feature 1..20: note = chemically synthesized
  source 1..20: mol_type = other DNA
tggcaaagtttttttttttt

SEQ ID NO: 1243 - DNA, 20 bp, synthetic construct
  misc_feature 1..20: note = chemically synthesized
  source 1..20: mol_type = other DNA
tttaaaaaatgctcctcaat

SEQ ID NO: 1244 - DNA, 20 bp, synthetic construct
  misc_feature 1..20: note = chemically synthesized
  source 1..20: mol_type = other DNA
gattgtgttcaatttttttt

SEQ ID NO: 1245 - DNA, 20 bp, synthetic construct
  misc_feature 1..20: note = chemically synthesized
  source 1..20: mol_type = other DNA
attcttgcaacttttccctt

SEQ ID NO: 1246 - DNA, 20 bp, synthetic construct
  misc_feature 1..20: note = chemically synthesized
  source 1..20: mol_type = other DNA
tgcaacttttcccttaagta

SEQ ID NO: 1247 - DNA, 20 bp, synthetic construct
  misc_feature 1..20: note = chemically synthesized
  source 1..20: mol_type = other DNA
ttaagtatagacctgtaaac

SEQ ID NO: 1248 - DNA, 20 bp, synthetic construct
  misc_feature 1..20: note = chemically synthesized
  source 1..20: mol_type = other DNA
taagtatagacctgtaaact

SEQ ID NO: 1249 - DNA, 20 bp, synthetic construct
  misc_feature 1..20: note = chemically synthesized
  source 1..20: mol_type = other DNA
tgtaaactgggaaaattgta

SEQ ID NO: 1250 - DNA, 20 bp, synthetic construct
  misc_feature 1..20: note = chemically synthesized
  source 1..20: mol_type = other DNA
tgcacttaattgtcctatct

SEQ ID NO: 1251 - DNA, 20 bp, synthetic construct
  misc_feature 1..20: note = chemically synthesized
  source 1..20: mol_type = other DNA
acttaattgtcctatctgag

SEQ ID NO: 1252 - DNA, 20 bp, synthetic construct
  misc_feature 1..20: note = chemically synthesized
  source 1..20: mol_type = other DNA
cttaattgtcctatctgagc

SEQ ID NO: 1253 - DNA, 20 bp, synthetic construct
  misc_feature 1..20: note = chemically synthesized
  source 1..20: mol_type = other DNA
tcaacctctgtatctctgat

SEQ ID NO: 1254 - DNA, 20 bp, synthetic construct
  misc_feature 1..20: note = chemically synthesized
  source 1..20: mol_type = other DNA
aacctctgtatctctgatta

SEQ ID NO: 1255 - DNA, 20 bp, synthetic construct
  misc_feature 1..20: note = chemically synthesized
  source 1..20: mol_type = other DNA
ctgtatctctgattagagaa

SEQ ID NO: 1256 - DNA, 20 bp, synthetic construct
  misc_feature 1..20: note = chemically synthesized
  source 1..20: mol_type = other DNA
ctctgattagagaaaagata

SEQ ID NO: 1257 - DNA, 20 bp, synthetic construct
  misc_feature 1..20: note = chemically synthesized
  source 1..20: mol_type = other DNA
gagaaaagatacagatatca

SEQ ID NO: 1258 - DNA, 20 bp, synthetic construct
  misc_feature 1..20: note = chemically synthesized
  source 1..20: mol_type = other DNA
agaaaagatacagatatcac

SEQ ID NO: 1259 - DNA, 20 bp, synthetic construct
  misc_feature 1..20: note = chemically synthesized
  source 1..20: mol_type = other DNA
aaagatacagatatcacagg

SEQ ID NO: 1260 - DNA, 20 bp, synthetic construct
  misc_feature 1..20: note = chemically synthesized
  source 1..20: mol_type = other DNA
agatacagatatcacaggca

SEQ ID NO: 1261 - DNA, 20 bp, synthetic construct
  misc_feature 1..20: note = chemically synthesized
  source 1..20: mol_type = other DNA
cagatatcacaggcagagtc

SEQ ID NO: 1262 - DNA, 20 bp, synthetic construct
  misc_feature 1..20: note = chemically synthesized
  source 1..20: mol_type = other DNA
agtgctatttgaacaccaac

SEQ ID NO: 1263 - DNA, 20 bp, synthetic construct
  misc_feature 1..20: note = chemically synthesized
  source 1..20: mol_type = other DNA
gtgctatttgaacaccaact

SEQ ID NO: 1264 - DNA, 20 bp, synthetic construct
  misc_feature 1..20: note = chemically synthesized
  source 1..20: mol_type = other DNA
tgctatttgaacaccaactg

SEQ ID NO: 1265 - DNA, 20 bp, synthetic construct
  misc_feature 1..20: note = chemically synthesized
  source 1..20: mol_type = other DNA
tatttgaacaccaactgggg

SEQ ID NO: 1266 - DNA, 20 bp, synthetic construct
  misc_feature 1..20: note = chemically synthesized
  source 1..20: mol_type = other DNA
acaccaactggggcagatgc

SEQ ID NO: 1267 - DNA, 20 bp, synthetic construct
  misc_feature 1..20: note = chemically synthesized
  source 1..20: mol_type = other DNA
cagatgctagcttaataaaa

SEQ ID NO: 1268 - DNA, 20 bp, synthetic construct
  misc_feature 1..20: note = chemically synthesized
  source 1..20: mol_type = other DNA
ctcttccatgttaacacaaa

SEQ ID NO: 1269 - DNA, 20 bp, synthetic construct
  misc_feature 1..20: note = chemically synthesized
  source 1..20: mol_type = other DNA
atgttaacacaaatagcaca

SEQ ID NO: 1270 - DNA, 20 bp, synthetic construct
  misc_feature 1..20: note = chemically synthesized
  source 1..20: mol_type = other DNA
cacaaatagcacacagtgta

SEQ ID NO: 1271 - DNA, 20 bp, synthetic construct
  misc_feature 1..20: note = chemically synthesized
  source 1..20: mol_type = other DNA
atagcacacagtgtatggaa

SEQ ID NO: 1272 - DNA, 20 bp, synthetic construct
  misc_feature 1..20: note = chemically synthesized
  source 1..20: mol_type = other DNA
cagtgtatggaaaagaaatg

SEQ ID NO: 1273 - DNA, 20 bp, synthetic construct
  misc_feature 1..20: note = chemically synthesized
  source 1..20: mol_type = other DNA
aagaaatgaagtacaacttt

SEQ ID NO: 1274 - DNA, 20 bp, synthetic construct
  misc_feature 1..20: note = chemically synthesized
  source 1..20: mol_type = other DNA
agaaatgaagtacaactttt

SEQ ID NO: 1275 - DNA, 20 bp, synthetic construct
  misc_feature 1..20: note = chemically synthesized
  source 1..20: mol_type = other DNA
gaaatgaagtacaactttta

SEQ ID NO: 1276 - DNA, 20 bp, synthetic construct
  misc_feature 1..20: note = chemically synthesized
  source 1..20: mol_type = other DNA
aatgaagtacaacttttagg

SEQ ID NO: 1277 - DNA, 20 bp, synthetic construct
  misc_feature 1..20: note = chemically synthesized
  source 1..20: mol_type = other DNA
agtacaacttttagggagca

SEQ ID NO: 1278 - DNA, 20 bp, synthetic construct
  misc_feature 1..20: note = chemically synthesized
  source 1..20: mol_type = other DNA
attctttctcttcttttttt

SEQ ID NO: 1279 - DNA, 20 bp, synthetic construct
  misc_feature 1..20: note = chemically synthesized
  source 1..20: mol_type = other DNA
agaatgtcacatttaaatgc

SEQ ID NO: 1280 - DNA, 20 bp, synthetic construct
  misc_feature 1..20: note = chemically synthesized
  source 1..20: mol_type = other DNA
cacatttaaatgcaagtctt

SEQ ID NO: 1281 - DNA, 20 bp, synthetic construct
  misc_feature 1..20: note = chemically synthesized
  source 1..20: mol_type = other DNA
atgcaagtcttaagaattca

SEQ ID NO: 1282 - DNA, 20 bp, synthetic construct
  misc_feature 1..20: note = chemically synthesized
  source 1..20: mol_type = other DNA
aatcatcattgtatcaatat

SEQ ID NO: 1283 - DNA, 20 bp, synthetic construct
  misc_feature 1..20: note = chemically synthesized
  source 1..20: mol_type = other DNA
attagcttatatacctgttc

SEQ ID NO: 1284 - DNA, 20 bp, synthetic construct
  misc_feature 1..20: note = chemically synthesized
  source 1..20: mol_type = other DNA
atacctgttctagttttaaa

SEQ ID NO: 1285 - DNA, 20 bp, synthetic construct
  misc_feature 1..20: note = chemically synthesized
  source 1..20: mol_type = other DNA
ttctagttttaaatggcaaa

SEQ ID NO: 1286 - DNA, 20 bp, synthetic construct
  misc_feature 1..20: note = chemically synthesized
  source 1..20: mol_type = other DNA
cctctgtcaaaccttattgt

SEQ ID NO: 1287 - DNA, 20 bp, synthetic construct
  misc_feature 1..20: note = chemically synthesized
  source 1..20: mol_type = other DNA
tcagcctcttcctttcaata

SEQ ID NO: 1288 - DNA, 20 bp, synthetic construct
  misc_feature 1..20: note = chemically synthesized
  source 1..20: mol_type = other DNA
ttcctttcaatatggtatac

SEQ ID NO: 1289 - DNA, 20 bp, synthetic construct
  misc_feature 1..20: note = chemically synthesized
  source 1..20: mol_type = other DNA
tcctttcaatatggtataca

SEQ ID NO: 1290 - DNA, 20 bp, synthetic construct
  misc_feature 1..20: note = chemically synthesized
  source 1..20: mol_type = other DNA
atatggtatacaaggtctta

SEQ ID NO: 1291 - DNA, 20 bp, synthetic construct
  misc_feature 1..20: note = chemically synthesized
  source 1..20: mol_type = other DNA
tgattgtccacttgacaacc

SEQ ID NO: 1292 - DNA, 20 bp, synthetic construct
  misc_feature 1..20: note = chemically synthesized
  source 1..20: mol_type = other DNA
ttgtccacttgacaaccaag

SEQ ID NO: 1293 - DNA, 20 bp, synthetic construct
  misc_feature 1..20: note = chemically synthesized
  source 1..20: mol_type = other DNA
acttgacaaccaagtagatc

SEQ ID NO: 1294 - DNA, 20 bp, synthetic construct
  misc_feature 1..20: note = chemically synthesized
  source 1..20: mol_type = other DNA
agatctggatctatttcttt

SEQ ID NO: 1295 - DNA, 20 bp, synthetic construct
  misc_feature 1..20: note = chemically synthesized
  source 1..20: mol_type = other DNA
ggatctatttcttttggtgc

SEQ ID NO: 1296 - DNA, 20 bp, synthetic construct
  misc_feature 1..20: note = chemically synthesized
  source 1..20: mol_type = other DNA
ttggtgccagtatttttaaa

SEQ ID NO: 1297 - DNA, 20 bp, synthetic construct
  misc_feature 1..20: note = chemically synthesized
  source 1..20: mol_type = other DNA
tttttaaaaagacattatta

SEQ ID NO: 1298 - DNA, 20 bp, synthetic construct
  misc_feature 1..20: note = chemically synthesized
  source 1..20: mol_type = other DNA
tcataaaatgaactccttac

SEQ ID NO: 1299 - DNA, 20 bp, synthetic construct
  misc_feature 1..20: note = chemically synthesized
  source 1..20: mol_type = other DNA
tagtgtatttaattgcgttc

SEQ ID NO: 1300 - DNA, 20 bp, synthetic construct
  misc_feature 1..20: note = chemically synthesized
  source 1..20: mol_type = other DNA
agtgtatttaattgcgttcc

SEQ ID NO: 1301 - DNA, 20 bp, synthetic construct
  misc_feature 1..20: note = chemically synthesized
  source 1..20: mol_type = other DNA
gtgtatttaattgcgttcca

SEQ ID NO: 1302 - DNA, 20 bp, synthetic construct
  misc_feature 1..20: note = chemically synthesized
  source 1..20: mol_type = other DNA
gtttaaaaaaaataaaactt

SEQ ID NO: 1303 - DNA, 20 bp, synthetic construct
  misc_feature 1..20: note = chemically synthesized
  source 1..20: mol_type = other DNA
tttaaaaaaaataaaacttt

SEQ ID NO: 1304 - DNA, 20 bp, synthetic construct
  misc_feature 1..20: note = chemically synthesized
  source 1..20: mol_type = other DNA
aaataaaactttgggcaaaa

SEQ ID NO: 1305 - DNA, 20 bp, synthetic construct
  misc_feature 1..20: note = chemically synthesized
  source 1..20: mol_type = other DNA
caaaacagcccatttctttt

SEQ ID NO: 1306 - DNA, 20 bp, synthetic construct
  misc_feature 1..20: note = chemically synthesized
  source 1..20: mol_type = other DNA
catttcttttaagctctcac

SEQ ID NO: 1307 - DNA, 20 bp, synthetic construct
  misc_feature 1..20: note = chemically synthesized
  source 1..20: mol_type = other DNA
atttcttttaagctctcacc

SEQ ID NO: 1308 - DNA, 20 bp, synthetic construct
  misc_feature 1..20: note = chemically synthesized
  source 1..20: mol_type = other DNA
ttcttttaagctctcaccag

SEQ ID NO: 1309 - DNA, 20 bp, synthetic construct
  misc_feature 1..20: note = chemically synthesized
  source 1..20: mol_type = other DNA
ttaagctctcaccaggagca

SEQ ID NO: 1310 - DNA, 20 bp, synthetic construct
  misc_feature 1..20: note = chemically synthesized
  source 1..20: mol_type = other DNA
agctctcaccaggagcaaag

SEQ ID NO: 1311 - DNA, 20 bp, synthetic construct
  misc_feature 1..20: note = chemically synthesized
  source 1..20: mol_type = other DNA
gagcaaagtagcttttatac

SEQ ID NO: 1312 - DNA, 20 bp, synthetic construct
  misc_feature 1..20: note = chemically synthesized
  source 1..20: mol_type = other DNA
agcttttatactggtataat

SEQ ID NO: 1313 - DNA, 20 bp, synthetic construct
  misc_feature 1..20: note = chemically synthesized
  source 1..20: mol_type = other DNA
ttgtttataaaattaaacta

SEQ ID NO: 1314 - DNA, 20 bp, synthetic construct
  misc_feature 1..20: note = chemically synthesized
  source 1..20: mol_type = other DNA
tgtttataaaattaaactaa

SEQ ID NO: 1315 - DNA, 20 bp, synthetic construct
  misc_feature 1..20: note = chemically synthesized
  source 1..20: mol_type = other DNA
aaggaaaaatgatgattaac

SEQ ID NO: 1316 - DNA, 20 bp, synthetic construct
  misc_feature 1..20: note = chemically synthesized
  source 1..20: mol_type = other DNA
aggaaaaatgatgattaact

SEQ ID NO: 1317 - DNA, 20 bp, synthetic construct
  misc_feature 1..20: note = chemically synthesized
  source 1..20: mol_type = other DNA
gatgattaactaggacataa

SEQ ID NO: 1318 - DNA, 20 bp, synthetic construct
  misc_feature 1..20: note = chemically synthesized
  source 1..20: mol_type = other DNA
atgattaactaggacataat

SEQ ID NO: 1319 - DNA, 20 bp, synthetic construct
  misc_feature 1..20: note = chemically synthesized
  source 1..20: mol_type = other DNA
gacataatgggtcatctttt

SEQ ID NO: 1320 - DNA, 20 bp, synthetic construct
  misc_feature 1..20: note = chemically synthesized
  source 1..20: mol_type = other DNA
acataatgggtcatcttttt

SEQ ID NO: 1321 - DNA, 20 bp, synthetic construct
  misc_feature 1..20: note = chemically synthesized
  source 1..20: mol_type = other DNA
taatgggtcatctttttagg

SEQ ID NO: 1322 - DNA, 20 bp, synthetic construct
  misc_feature 1..20: note = chemically synthesized
  source 1..20: mol_type = other DNA
ttttaggtagccattgttgt

SEQ ID NO: 1323 - DNA, 20 bp, synthetic construct
  misc_feature 1..20: note = chemically synthesized
  source 1..20: mol_type = other DNA
ttgttgtgagaaatacaata

SEQ ID NO: 1324 - DNA, 20 bp, synthetic construct
  misc_feature 1..20: note = chemically synthesized
  source 1..20: mol_type = other DNA
tacaatatagaattatatgc

SEQ ID NO: 1325 - DNA, 20 bp, synthetic construct
  misc_feature 1..20: note = chemically synthesized
  source 1..20: mol_type = other DNA
agaattatatgctagttcct

SEQ ID NO: 1326 - DNA, 20 bp, synthetic construct
  misc_feature 1..20: note = chemically synthesized
  source 1..20: mol_type = other DNA
gaattatatgctagttccta

SEQ ID NO: 1327 - DNA, 20 bp, synthetic construct
  misc_feature 1..20: note = chemically synthesized
  source 1..20: mol_type = other DNA
acctcacccaatgctgaatt

SEQ ID NO: 1328 - DNA, 20 bp, synthetic construct
  misc_feature 1..20: note = chemically synthesized
  source 1..20: mol_type = other DNA
ccaatgctgaattaagctac

SEQ ID NO: 1329 - DNA, 20 bp, synthetic construct
  misc_feature 1..20: note = chemically synthesized
  source 1..20: mol_type = other DNA
ttaagctacaagtttataac

SEQ ID NO: 1330 - DNA, 20 bp, synthetic construct
  misc_feature 1..20: note = chemically synthesized
  source 1..20: mol_type = other DNA
agctacaagtttataacaag

SEQ ID NO: 1331 - DNA, 20 bp, synthetic construct
  misc_feature 1..20: note = chemically synthesized
  source 1..20: mol_type = other DNA
acaagtttataacaagtaga

SEQ ID NO: 1332 - DNA, 20 bp, synthetic construct
  misc_feature 1..20: note = chemically synthesized
  source 1..20: mol_type = other DNA
agtagaaagaaccatcgatg

SEQ ID NO: 1333 - DNA, 20 bp, synthetic construct
  misc_feature 1..20: note = chemically synthesized
  source 1..20: mol_type = other DNA
aaccatcgatgtggttttaa

SEQ ID NO: 1334 - DNA, 20 bp, synthetic construct
  misc_feature 1..20: note = chemically synthesized
  source 1..20: mol_type = other DNA
gatgtggttttaatagatcc

SEQ ID NO: 1335 - DNA, 20 bp, synthetic construct
  misc_feature 1..20: note = chemically synthesized
  source 1..20: mol_type = other DNA
atgtggttttaatagatcca

SEQ ID NO: 1336 - DNA, 20 bp, synthetic construct
  misc_feature 1..20: note = chemically synthesized
  source 1..20: mol_type = other DNA
catattttaaaaccaaatga

SEQ ID NO: 1337 - DNA, 20 bp, synthetic construct
  misc_feature 1..20: note = chemically synthesized
  source 1..20: mol_type = other DNA
ttctgttaatttgtcaattc

SEQ ID NO: 1338 - DNA, 20 bp, synthetic construct
  misc_feature 1..20: note = chemically synthesized
  source 1..20: mol_type = other DNA
tctgttaatttgtcaattca

SEQ ID NO: 1339 - DNA, 20 bp, synthetic construct
  misc_feature 1..20: note = chemically synthesized
  source 1..20: mol_type = other DNA
aattgatacatttaaccctt

SEQ ID NO: 1340 - DNA, 20 bp, synthetic construct
  misc_feature 1..20: note = chemically synthesized
  source 1..20: mol_type = other DNA
ttgatacatttaacccttta

SEQ ID NO: 1341 - DNA, 20 bp, synthetic construct
  misc_feature 1..20: note = chemically synthesized
  source 1..20: mol_type = other DNA
tacatttaaccctttagaga

SEQ ID NO: 1342 - DNA, 20 bp, synthetic construct
  misc_feature 1..20: note = chemically synthesized
  source 1..20: mol_type = other DNA
accctttagagacagacatt

SEQ ID NO: 1343 - DNA, 20 bp, synthetic construct
  misc_feature 1..20: note = chemically synthesized
  source 1..20: mol_type = other DNA
agagacagacatttagctca

SEQ ID NO: 1344 - DNA, 20 bp, synthetic construct
  misc_feature 1..20: note = chemically synthesized
  source 1..20: mol_type = other DNA
agacagacatttagctcata

SEQ ID NO: 1345 - DNA, 20 bp, synthetic construct
  misc_feature 1..20: note = chemically synthesized
  source 1..20: mol_type = other DNA
agctcatagagatttttttt

SEQ ID NO: 1346 - DNA, 20 bp, synthetic construct
  misc_feature 1..20: note = chemically synthesized
  source 1..20: mol_type = other DNA
agtgctatctattctgtcta

SEQ ID NO: 1347 - DNA, 20 bp, synthetic construct
  misc_feature 1..20: note = chemically synthesized
  source 1..20: mol_type = other DNA
tgctatctattctgtctata

SEQ ID NO: 1348 - DNA, 20 bp, synthetic construct
  misc_feature 1..20: note = chemically synthesized
  source 1..20: mol_type = other DNA
gctatctattctgtctatag

SEQ ID NO: 1349 - DNA, 20 bp, synthetic construct
  misc_feature 1..20: note = chemically synthesized
  source 1..20: mol_type = other DNA
ctatctattctgtctataga

SEQ ID NO: 1350 - DNA, 20 bp, synthetic construct
  misc_feature 1..20: note = chemically synthesized
  source 1..20: mol_type = other DNA
gtctatagagggttaatcca

SEQ ID NO: 1351 - DNA, 20 bp, synthetic construct
  misc_feature 1..20: note = chemically synthesized
  source 1..20: mol_type = other DNA
actgtacatgatatgtatta

SEQ ID NO: 1352 - DNA, 20 bp, synthetic construct
  misc_feature 1..20: note = chemically synthesized
  source 1..20: mol_type = other DNA
tatgtattacagaatgtatg

SEQ ID NO: 1353 - DNA, 20 bp, synthetic construct
  misc_feature 1..20: note = chemically synthesized
  source 1..20: mol_type = other DNA
attacagaatgtatgcagca

SEQ ID NO: 1354 - DNA, 20 bp, synthetic construct
  misc_feature 1..20: note = chemically synthesized
  source 1..20: mol_type = other DNA
ctctctctctctttttctct

SEQ ID NO: 1355 - DNA, 20 bp, synthetic construct
  misc_feature 1..20: note = chemically synthesized
  source 1..20: mol_type = other DNA
tctctctttttctctcagaa

SEQ ID NO: 1356 - DNA, 20 bp, synthetic construct
  misc_feature 1..20: note = chemically synthesized
  source 1..20: mol_type = other DNA
tttttctctcagaacggaac

SEQ ID NO: 1357 - DNA, 20 bp, synthetic construct
  misc_feature 1..20: note = chemically synthesized
  source 1..20: mol_type = other DNA
tctcagaacggaactggaaa

SEQ ID NO: 1358 - DNA, 20 bp, synthetic construct
  misc_feature 1..20: note = chemically synthesized
  source 1..20: mol_type = other DNA
gaaacagcaacatgtttgct

SEQ ID NO: 1359 - DNA, 20 bp, synthetic construct
  misc_feature 1..20: note = chemically synthesized
  source 1..20: mol_type = other DNA
atgtttgctcagcaacgaat

SEQ ID NO: 1360 - DNA, 20 bp, synthetic construct
  misc_feature 1..20: note = chemically synthesized
  source 1..20: mol_type = other DNA
tgtttgctcagcaacgaatt

SEQ ID NO: 1361 - DNA, 20 bp, synthetic construct
  misc_feature 1..20: note = chemically synthesized
  source 1..20: mol_type = other DNA
gtttgctcagcaacgaatta

SEQ ID NO: 1362 - DNA, 20 bp, synthetic construct
  misc_feature 1..20: note = chemically synthesized
  source 1..20: mol_type = other DNA
gaattagggacaatttaaaa

SEQ ID NO: 1363 - DNA, 20 bp, synthetic construct
  misc_feature 1..20: note = chemically synthesized
  source 1..20: mol_type = other DNA
acataccatacatgctgtct

SEQ ID NO: 1364 - DNA, 20 bp, synthetic construct
  misc_feature 1..20: note = chemically synthesized
  source 1..20: mol_type = other DNA
caacatgtaaattattgcac

SEQ ID NO: 1365 - DNA, 20 bp, synthetic construct
  misc_feature 1..20: note = chemically synthesized
  source 1..20: mol_type = other DNA
acatgtaaattattgcacaa

SEQ ID NO: 1366 - DNA, 20 bp, synthetic construct
  misc_feature 1..20: note = chemically synthesized
  source 1..20: mol_type = other DNA
gtaaattattgcacaagaga

SEQ ID NO: 1367 - DNA, 20 bp, synthetic construct
  misc_feature 1..20: note = chemically synthesized
  source 1..20: mol_type = other DNA
taaattattgcacaagagaa

SEQ ID NO: 1368 - DNA, 20 bp, synthetic construct
  misc_feature 1..20: note = chemically synthesized
  source 1..20: mol_type = other DNA
ttgcacaagagaaaggctca

SEQ ID NO: 1369 - DNA, 20 bp, synthetic construct
  misc_feature 1..20: note = chemically synthesized
  source 1..20: mol_type = other DNA
aaagtttgcgtaaaatgcaa

SEQ ID NO: 1370 - DNA, 20 bp, synthetic construct
  misc_feature 1..20: note = chemically synthesized
  source 1..20: mol_type = other DNA
tgcaatagtattgccccata

SEQ ID NO: 1371 - DNA, 20 bp, synthetic construct
  misc_feature 1..20: note = chemically synthesized
  source 1..20: mol_type = other DNA
atacagatcatgcattcaaa

SEQ ID NO: 1372 - DNA, 20 bp, synthetic construct
  misc_feature 1..20: note = chemically synthesized
  source 1..20: mol_type = other DNA
agatcatgcattcaaacggt

SEQ ID NO: 1373 - DNA, 20 bp, synthetic construct
  misc_feature 1..20: note = chemically synthesized
  source 1..20: mol_type = other DNA
attcaaacggtgagaacata

SEQ ID NO: 1374 - DNA, 20 bp, synthetic construct
  misc_feature 1..20: note = chemically synthesized
  source 1..20: mol_type = other DNA
ttcaaacggtgagaacataa

SEQ ID NO: 1375 - DNA, 20 bp, synthetic construct
  misc_feature 1..20: note = chemically synthesized
  source 1..20: mol_type = other DNA
cataaaggaaaaaaaaaaaa

SEQ ID NO: 1376 - DNA, 20 bp, synthetic construct
  misc_feature 1..20: note = chemically synthesized
  source 1..20: mol_type = other DNA
ataaaggaaaaaaaaaaaaa

SEQ ID NO: 1377 - DNA, 20 bp, synthetic construct
  misc_feature 1..20: note = chemically synthesized
  source 1..20: mol_type = other DNA
gaaaaaaaaaaaaaaggaaa

SEQ ID NO: 1378 - DNA, 20 bp, synthetic construct
  misc_feature 1..20: note = chemically synthesized
  source 1..20: mol_type = other DNA
aaaaaaaaggaaaaagaaaa

SEQ ID NO: 1379 - DNA, 20 bp, synthetic construct
  misc_feature 1..20: note = chemically synthesized
  source 1..20: mol_type = other DNA
aaggaaaaagaaaaaagaaa

SEQ ID NO: 1380 - DNA, 20 bp, synthetic construct
  misc_feature 1..20: note = chemically synthesized
  source 1..20: mol_type = other DNA
aaagaaaaaagaaaaagaaa

SEQ ID NO: 1381 - DNA, 20 bp, synthetic construct
  misc_feature 1..20: note = chemically synthesized
  source 1..20: mol_type = other DNA
aaaaagaaaaagaaaaaaaa

SEQ ID NO: 1382 - DNA, 20 bp, synthetic construct
  misc_feature 1..20: note = chemically synthesized
  source 1..20: mol_type = other DNA
aaaagaaaaagaaaaaaaac

SEQ ID NO: 1383 - DNA, 20 bp, synthetic construct
  misc_feature 1..20: note = chemically synthesized
  source 1..20: mol_type = other DNA
aagaaaaaaaacaggtgtgc

SEQ ID NO: 1384 - DNA, 20 bp, synthetic construct
  misc_feature 1..20: note = chemically synthesized
  source 1..20: mol_type = other DNA
aaaacaggtgtgctggtgac

SEQ ID NO: 1385 - DNA, 20 bp, synthetic construct
  misc_feature 1..20: note = chemically synthesized
  source 1..20: mol_type = other DNA
gacaagcactctcatattct

SEQ ID NO: 1386 - DNA, 20 bp, synthetic construct
  misc_feature 1..20: note = chemically synthesized
  source 1..20: mol_type = other DNA
gtttgtttgtttaaatcaca

SEQ ID NO: 1387 - DNA, 20 bp, synthetic construct
  misc_feature 1..20: note = chemically synthesized
  source 1..20: mol_type = other DNA
tttgtttgtttaaatcacat

SEQ ID NO: 1388 - DNA, 20 bp, synthetic construct
  misc_feature 1..20: note = chemically synthesized
  source 1..20: mol_type = other DNA
ttgtttaaatcacatgggac

SEQ ID NO: 1389 - DNA, 20 bp, synthetic construct
  misc_feature 1..20: note = chemically synthesized
  source 1..20: mol_type = other DNA
gggactagaaaaaaatccta

SEQ ID NO: 1390 - DNA, 20 bp, synthetic construct
  misc_feature 1..20: note = chemically synthesized
  source 1..20: mol_type = other DNA
ggactagaaaaaaatcctac

SEQ ID NO: 1391 - DNA, 20 bp, synthetic construct
  misc_feature 1..20: note = chemically synthesized
  source 1..20: mol_type = other DNA
gactagaaaaaaatcctaca

SEQ ID NO: 1392 - DNA, 20 bp, synthetic construct
  misc_feature 1..20: note = chemically synthesized
  source 1..20: mol_type = other DNA
ctagaaaaaaatcctacagg

SEQ ID NO: 1393 - DNA, 20 bp, synthetic construct
  misc_feature 1..20: note = chemically synthesized
  source 1..20: mol_type = other DNA
gaaaaaaatcctacagggag

SEQ ID NO: 1394 - DNA, 20 bp, synthetic construct
  misc_feature 1..20: note = chemically synthesized
  source 1..20: mol_type = other DNA
aaaaaaatcctacagggagt

SEQ ID NO: 1395 - DNA, 20 bp, synthetic construct
  misc_feature 1..20: note = chemically synthesized
  source 1..20: mol_type = other DNA
aaaaaatcctacagggagtg

SEQ ID NO: 1396 - DNA, 20 bp, synthetic construct
  misc_feature 1..20: note = chemically synthesized
  source 1..20: mol_type = other DNA
aatcctacagggagtggggc

SEQ ID NO: 1397 - DNA, 20 bp, synthetic construct
  misc_feature 1..20: note = chemically synthesized
  source 1..20: mol_type = other DNA
tcctacagggagtggggctg

SEQ ID NO: 1398 - DNA, 20 bp, synthetic construct
  misc_feature 1..20: note = chemically synthesized
  source 1..20: mol_type = other DNA
cctacagggagtggggctgg

SEQ ID NO: 1399 - DNA, 20 bp, synthetic construct
  misc_feature 1..20: note = chemically synthesized
  source 1..20: mol_type = other DNA
ctacagggagtggggctgga

SEQ ID NO: 1400 - DNA, 20 bp, synthetic construct
  misc_feature 1..20: note = chemically synthesized
  source 1..20: mol_type = other DNA
ggagtggggctggagggcga

SEQ ID NO: 1401 - DNA, 20 bp, synthetic construct
  misc_feature 1..20: note = chemically synthesized
  source 1..20: mol_type = other DNA
gagtggggctggagggcgat

SEQ ID NO: 1402 - DNA, 20 bp, synthetic construct
  misc_feature 1..20: note = chemically synthesized
  source 1..20: mol_type = other DNA
agtggggctggagggcgatg

SEQ ID NO: 1403 - DNA, 20 bp, synthetic construct
  misc_feature 1..20: note = chemically synthesized
  source 1..20: mol_type = other DNA
ggggctggagggcgatgggg

SEQ ID NO: 1404 - DNA, 20 bp, synthetic construct
  misc_feature 1..20: note = chemically synthesized
  source 1..20: mol_type = other DNA
gggctggagggcgatgggga

SEQ ID NO: 1405 - DNA, 20 bp, synthetic construct
  misc_feature 1..20: note = chemically synthesized
  source 1..20: mol_type = other DNA
ggctggagggcgatggggaa

SEQ ID NO: 1406 - DNA, 20 bp, synthetic construct
  misc_feature 1..20: note = chemically synthesized
  source 1..20: mol_type = other DNA
gctggagggcgatggggaag

SEQ ID NO: 1407 - DNA, 20 bp, synthetic construct
  misc_feature 1..20: note = chemically synthesized
  source 1..20: mol_type = other DNA
tggagggcgatggggaaggg

SEQ ID NO: 1408 - DNA, 20 bp, synthetic construct
  misc_feature 1..20: note = chemically synthesized
  source 1..20: mol_type = other DNA
agggcgatggggaaggggag

SEQ ID NO: 1409 - DNA, 20 bp, synthetic construct
  misc_feature 1..20: note = chemically synthesized
  source 1..20: mol_type = other DNA
ggggaaggggagtggtgaaa

SEQ ID NO: 1410 - DNA, 20 bp, synthetic construct
  misc_feature 1..20: note = chemically synthesized
  source 1..20: mol_type = other DNA
gggaaggggagtggtgaaaa

SEQ ID NO: 1411 - DNA, 20 bp, synthetic construct
  misc_feature 1..20: note = chemically synthesized
  source 1..20: mol_type = other DNA
ggaaggggagtggtgaaaaa

SEQ ID NO: 1412 - DNA, 20 bp, synthetic construct
  misc_feature 1..20: note = chemically synthesized
  source 1..20: mol_type = other DNA
gaaggggagtggtgaaaaag

SEQ ID NO: 1413 - DNA, 20 bp, synthetic construct
  misc_feature 1..20: note = chemically synthesized
  source 1..20: mol_type = other DNA
aaggggagtggtgaaaaagg

SEQ ID NO: 1414 - DNA, 20 bp, synthetic construct
  misc_feature 1..20: note = chemically synthesized
  source 1..20: mol_type = other DNA
agtggtgaaaaagggggtgt

SEQ ID NO: 1415 - DNA, 20 bp, synthetic construct
  misc_feature 1..20: note = chemically synthesized
  source 1..20: mol_type = other DNA
gtggtgaaaaagggggtgtc

SEQ ID NO: 1416 - DNA, 20 bp, synthetic construct
  misc_feature 1..20: note = chemically synthesized
  source 1..20: mol_type = other DNA
gtgaaaaagggggtgtcagg

SEQ ID NO: 1417 - DNA, 20 bp, synthetic construct
  misc_feature 1..20: note = chemically synthesized
  source 1..20: mol_type = other DNA
tgaaaaagggggtgtcaggt

SEQ ID NO: 1418 - DNA, 20 bp, synthetic construct
  misc_feature 1..20: note = chemically synthesized
  source 1..20: mol_type = other DNA
aaaaagggggtgtcaggtgg

SEQ ID NO: 1419 - DNA, 20 bp, synthetic construct
  misc_feature 1..20: note = chemically synthesized
  source 1..20: mol_type = other DNA
agggggtgtcaggtgggagt

SEQ ID NO: 1420 - DNA, 20 bp, synthetic construct
  misc_feature 1..20: note = chemically synthesized
  source 1..20: mol_type = other DNA
gggggtgtcaggtgggagtg

SEQ ID NO: 1421 - DNA, 20 bp, synthetic construct
  misc_feature 1..20: note = chemically synthesized
  source 1..20: mol_type = other DNA
ggggtgtcaggtgggagtga

SEQ ID NO: 1422 - DNA, 20 bp, synthetic construct
  misc_feature 1..20: note = chemically synthesized
  source 1..20: mol_type = other DNA
ggtgtcaggtgggagtgagg

SEQ ID NO: 1423 - DNA, 20 bp, synthetic construct
  misc_feature 1..20: note = chemically synthesized
  source 1..20: mol_type = other DNA
gtgtcaggtgggagtgaggg

SEQ ID NO: 1424 - DNA, 20 bp, synthetic construct
  misc_feature 1..20: note = chemically synthesized
  source 1..20: mol_type = other DNA
tgtcaggtgggagtgaggga

SEQ ID NO: 1425 - DNA, 20 bp, synthetic construct
  misc_feature 1..20: note = chemically synthesized
  source 1..20: mol_type = other DNA
gtcaggtgggagtgagggag

SEQ ID NO: 1426 - DNA, 20 bp, synthetic construct
  misc_feature 1..20: note = chemically synthesized
  source 1..20: mol_type = other DNA
ggtattaatatacctctatt

SEQ ID NO: 1427 - DNA, 20 bp, synthetic construct
  misc_feature 1..20: note = chemically synthesized
  source 1..20: mol_type = other DNA
cattttttcatgtgtttctc

SEQ ID NO: 1428 - DNA, 20 bp, synthetic construct
  misc_feature 1..20: note = chemically synthesized
  source 1..20: mol_type = other DNA
attttttcatgtgtttctcc

SEQ ID NO: 1429 - DNA, 20 bp, synthetic construct
  misc_feature 1..20: note = chemically synthesized
  source 1..20: mol_type = other DNA
ttttttcatgtgtttctcca

SEQ ID NO: 1430 - DNA, 20 bp, synthetic construct
  misc_feature 1..20: note = chemically synthesized
  source 1..20: mol_type = other DNA
cagggtactgtacacgctaa

SEQ ID NO: 1431 - DNA, 20 bp, synthetic construct
  misc_feature 1..20: note = chemically synthesized
  source 1..20: mol_type = other DNA
agggtactgtacacgctaaa

SEQ ID NO: 1432 - DNA, 20 bp, synthetic construct
  misc_feature 1..20: note = chemically synthesized
  source 1..20: mol_type = other DNA
tgtaaacgtccttccccacc

SEQ ID NO: 1433 - DNA, 20 bp, synthetic construct
  misc_feature 1..20: note = chemically synthesized
  source 1..20: mol_type = other DNA
gccatgcgttttcatgtgcc

SEQ ID NO: 1434 - DNA, 20 bp, synthetic construct
  misc_feature 1..20: note = chemically synthesized
  source 1..20: mol_type = other DNA
tgcgttttcatgtgcctggt

SEQ ID NO: 1435 - DNA, 20 bp, synthetic construct
  misc_feature 1..20: note = chemically synthesized
  source 1..20: mol_type = other DNA
gcctggtgagcttgctactc

SEQ ID NO: 1436 - DNA, 20 bp, synthetic construct
  misc_feature 1..20: note = chemically synthesized
  source 1..20: mol_type = other DNA
cctggtgagcttgctactct

SEQ ID NO: 1437 - DNA, 20 bp, synthetic construct
  misc_feature 1..20: note = chemically synthesized
  source 1..20: mol_type = other DNA
tgagcttgctactctgggca

SEQ ID NO: 1438 - DNA, 20 bp, synthetic construct
  misc_feature 1..20: note = chemically synthesized
  source 1..20: mol_type = other DNA
gagcttgctactctgggcac

SEQ ID NO: 1439 - DNA, 20 bp, synthetic construct
  misc_feature 1..20: note = chemically synthesized
  source 1..20: mol_type = other DNA
tgctactctgggcacaggca

SEQ ID NO: 1440 - DNA, 20 bp, synthetic construct
  misc_feature 1..20: note = chemically synthesized
  source 1..20: mol_type = other DNA
tgggcacaggcatagttgca

SEQ ID NO: 1441 - DNA, 20 bp, synthetic construct
  misc_feature 1..20: note = chemically synthesized
  source 1..20: mol_type = other DNA
gttgcacagctcgcatttat

SEQ ID NO: 1442 - DNA, 20 bp, synthetic construct
  misc_feature 1..20: note = chemically synthesized
  source 1..20: mol_type = other DNA
ttgcacagctcgcatttata

SEQ ID NO: 1443 - DNA, 20 bp, synthetic construct
  misc_feature 1..20: note = chemically synthesized
  source 1..20: mol_type = other DNA
tataaggcctttcgcccgtg

SEQ ID NO: 1444 - DNA, 20 bp, synthetic construct
  misc_feature 1..20: note = chemically synthesized
  source 1..20: mol_type = other DNA
cgcccgtgtggcttctcctg

SEQ ID NO: 1445 - DNA, 20 bp, synthetic construct
  misc_feature 1..20: note = chemically synthesized
  source 1..20: mol_type = other DNA
cgtgtggcttctcctgtgga

SEQ ID NO: 1446 - DNA, 20 bp, synthetic construct
  misc_feature 1..20: note = chemically synthesized
  source 1..20: mol_type = other DNA
tggcttctcctgtggacagt

SEQ ID NO: 1447 - DNA, 20 bp, synthetic construct
  misc_feature 1..20: note = chemically synthesized
  source 1..20: mol_type = other DNA
tgtggacagtgagattgcta

SEQ ID NO: 1448 - DNA, 20 bp, synthetic construct
  misc_feature 1..20: note = chemically synthesized
  source 1..20: mol_type = other DNA
tgagattgctacagttcttg

SEQ ID NO: 1449 - DNA, 20 bp, synthetic construct
  misc_feature 1..20: note = chemically synthesized
  source 1..20: mol_type = other DNA
agttcttgaagactttccca

SEQ ID NO: 1450 - DNA, 20 bp, synthetic construct
  misc_feature 1..20: note = chemically synthesized
  source 1..20: mol_type = other DNA
gactttcccacagtactcac

SEQ ID NO: 1451 - DNA, 20 bp, synthetic construct
  misc_feature 1..20: note = chemically synthesized
  source 1..20: mol_type = other DNA
cgctgcgtctgccctctttt

SEQ ID NO: 1452 - DNA, 20 bp, synthetic construct
  misc_feature 1..20: note = chemically synthesized
  source 1..20: mol_type = other DNA
gcgtctgccctcttttgagc

SEQ ID NO: 1453 - DNA, 20 bp, synthetic construct
  misc_feature 1..20: note = chemically synthesized
  source 1..20: mol_type = other DNA
cgtctgccctcttttgagct

SEQ ID NO: 1454 - DNA, 20 bp, synthetic construct
  misc_feature 1..20: note = chemically synthesized
  source 1..20: mol_type = other DNA
tcttttgagctgggcctgcc

SEQ ID NO: 1455 - DNA, 20 bp, synthetic construct
  misc_feature 1..20: note = chemically synthesized
  source 1..20: mol_type = other DNA
cttttgagctgggcctgccc

SEQ ID NO: 1456 - DNA, 20 bp, synthetic construct
  misc_feature 1..20: note = chemically synthesized
  source 1..20: mol_type = other DNA
gagctgggcctgcccgggcc

SEQ ID NO: 1457 - DNA, 20 bp, synthetic construct
  misc_feature 1..20: note = chemically synthesized
  source 1..20: mol_type = other DNA
ccgggcccggaccactaata

SEQ ID NO: 1458 - DNA, 20 bp, synthetic construct
  misc_feature 1..20: note = chemically synthesized
  source 1..20: mol_type = other DNA
cgggcccggaccactaatat

SEQ ID NO: 1459 - DNA, 20 bp, synthetic construct
  misc_feature 1..20: note = chemically synthesized
  source 1..20: mol_type = other DNA
gggcccggaccactaatatg

SEQ ID NO: 1460 - DNA, 20 bp, synthetic construct
  misc_feature 1..20: note = chemically synthesized
  source 1..20: mol_type = other DNA
ttcccgtgccgctgcgcccc

SEQ ID NO: 1461 - DNA, 20 bp, synthetic construct
  misc_feature 1..20: note = chemically synthesized
  source 1..20: mol_type = other DNA
cgccccgagatccctccgtc

SEQ ID NO: 1462 - DNA, 20 bp, synthetic construct
  misc_feature 1..20: note = chemically synthesized
  source 1..20: mol_type = other DNA
gatccctccgtccagctccc

SEQ ID NO: 1463 - DNA, 20 bp, synthetic construct
  misc_feature 1..20: note = chemically synthesized
  source 1..20: mol_type = other DNA
atccctccgtccagctcccc

SEQ ID NO: 1464 - DNA, 20 bp, synthetic construct
  misc_feature 1..20: note = chemically synthesized
  source 1..20: mol_type = other DNA
cctccgtccagctccccggg

SEQ ID NO: 1465 - DNA, 20 bp, synthetic construct
  misc_feature 1..20: note = chemically synthesized
  source 1..20: mol_type = other DNA
gtccagctccccgggcggtg

SEQ ID NO: 1466 - DNA, 20 bp, synthetic construct
  misc_feature 1..20: note = chemically synthesized
  source 1..20: mol_type = other DNA
ccagctccccgggcggtgtg

SEQ ID NO: 1467 - DNA, 20 bp, synthetic construct
  misc_feature 1..20: note = chemically synthesized
  source 1..20: mol_type = other DNA
gctccccgggcggtgtggag

SEQ ID NO: 1468 - DNA, 20 bp, synthetic construct
  misc_feature 1..20: note = chemically synthesized
  source 1..20: mol_type = other DNA
agcgcaaactcccgttctcc

SEQ ID NO: 1469 - DNA, 20 bp, synthetic construct
  misc_feature 1..20: note = chemically synthesized
  source 1..20: mol_type = other DNA
gcgcaaactcccgttctccg

SEQ ID NO: 1470 - DNA, 20 bp, synthetic construct
  misc_feature 1..20: note = chemically synthesized
  source 1..20: mol_type = other DNA
gcaaactcccgttctccgag

SEQ ID NO: 1471 - DNA, 20 bp, synthetic construct
  misc_feature 1..20: note = chemically synthesized
  source 1..20: mol_type = other DNA
tctccgaggagtgctccgac

SEQ ID NO: 1472 - DNA, 20 bp, synthetic construct
  misc_feature 1..20: note = chemically synthesized
  source 1..20: mol_type = other DNA
ctccgaggagtgctccgacg

SEQ ID NO: 1473 - DNA, 20 bp, synthetic construct
  misc_feature 1..20: note = chemically synthesized
  source 1..20: mol_type = other DNA
ccgaggagtgctccgacgag

SEQ ID NO: 1474 - DNA, 20 bp, synthetic construct
  misc_feature 1..20: note = chemically synthesized
  source 1..20: mol_type = other DNA
cgaggagtgctccgacgagg

SEQ ID NO: 1475 - DNA, 20 bp, synthetic construct
  misc_feature 1..20: note = chemically synthesized
  source 1..20: mol_type = other DNA
gtgctccgacgaggaggcaa

SEQ ID NO: 1476 - DNA, 20 bp, synthetic construct
  misc_feature 1..20: note = chemically synthesized
  source 1..20: mol_type = other DNA
tgctccgacgaggaggcaaa

SEQ ID NO: 1477 - DNA, 20 bp, synthetic construct
  misc_feature 1..20: note = chemically synthesized
  source 1..20: mol_type = other DNA
ggaggcaaaaggcgattgtc

SEQ ID NO: 1478 - DNA, 20 bp, synthetic construct
  misc_feature 1..20: note = chemically synthesized
  source 1..20: mol_type = other DNA
aggcaaaaggcgattgtctg

SEQ ID NO: 1479 - DNA, 20 bp, synthetic construct
  misc_feature 1..20: note = chemically synthesized
  source 1..20: mol_type = other DNA
gcgattgtctggagtctccg

SEQ ID NO: 1480 - DNA, 20 bp, synthetic construct
  misc_feature 1..20: note = chemically synthesized
  source 1..20: mol_type = other DNA
tgtctggagtctccgaagct

SEQ ID NO: 1481 - DNA, 20 bp, synthetic construct
  misc_feature 1..20: note = chemically synthesized
  source 1..20: mol_type = other DNA
gtctggagtctccgaagcta

SEQ ID NO: 1482 - DNA, 20 bp, synthetic construct
  misc_feature 1..20: note = chemically synthesized
  source 1..20: mol_type = other DNA
tggagtctccgaagctaagg

SEQ ID NO: 1483 - DNA, 20 bp, synthetic construct
  misc_feature 1..20: note = chemically synthesized
  source 1..20: mol_type = other DNA
ggagtctccgaagctaagga

SEQ ID NO: 1484 - DNA, 20 bp, synthetic construct
  misc_feature 1..20: note = chemically synthesized
  source 1..20: mol_type = other DNA
gagtctccgaagctaaggaa

SEQ ID NO: 1485 - DNA, 20 bp, synthetic construct
  misc_feature 1..20: note = chemically synthesized
  source 1..20: mol_type = other DNA
aagctaaggaagggatcttt

SEQ ID NO: 1486 - DNA, 20 bp, synthetic construct
  misc_feature 1..20: note = chemically synthesized
  source 1..20: mol_type = other DNA
gaagggatctttgagctgcc

SEQ ID NO: 1487 - DNA, 20 bp, synthetic construct
  misc_feature 1..20: note = chemically synthesized
  source 1..20: mol_type = other DNA
agggatctttgagctgcctg

SEQ ID NO: 1488 - DNA, 20 bp, synthetic construct
  misc_feature 1..20: note = chemically synthesized
  source 1..20: mol_type = other DNA
gggatctttgagctgcctgg

SEQ ID NO: 1489 - DNA, 20 bp, synthetic construct
  misc_feature 1..20: note = chemically synthesized
  source 1..20: mol_type = other DNA
tgagctgcctggaggccgcg

SEQ ID NO: 1490 - DNA, 20 bp, synthetic construct
  misc_feature 1..20: note = chemically synthesized
  source 1..20: mol_type = other DNA
ctgcctggaggccgcgtagc

SEQ ID NO: 1491 - DNA, 20 bp, synthetic construct
  misc_feature 1..20: note = chemically synthesized
  source 1..20: mol_type = other DNA
ctggaggccgcgtagccggc

SEQ ID NO: 1492 - DNA, 20 bp, synthetic construct
  misc_feature 1..20: note = chemically synthesized
  source 1..20: mol_type = other DNA
cgtagccggcgagccactgc

SEQ ID NO: 1493 - DNA, 20 bp, synthetic construct
  misc_feature 1..20: note = chemically synthesized
  source 1..20: mol_type = other DNA
cgagtacacgttctccgtgt

SEQ ID NO: 1494 - DNA, 20 bp, synthetic construct
  misc_feature 1..20: note = chemically synthesized
  source 1..20: mol_type = other DNA
gagtacacgttctccgtgtt

SEQ ID NO: 1495 - DNA, 20 bp, synthetic construct
  misc_feature 1..20: note = chemically synthesized
  source 1..20: mol_type = other DNA
gttctccgtgttgggcatcg

SEQ ID NO: 1496 - DNA, 20 bp, synthetic construct
  misc_feature 1..20: note = chemically synthesized
  source 1..20: mol_type = other DNA
tccgtgttgggcatcgcggc

SEQ ID NO: 1497 - DNA, 20 bp, synthetic construct
  misc_feature 1..20: note = chemically synthesized
  source 1..20: mol_type = other DNA
ccgtgttgggcatcgcggcc

SEQ ID NO: 1498 - DNA, 20 bp, synthetic construct
  misc_feature 1..20: note = chemically synthesized
  source 1..20: mol_type = other DNA
cgtgttgggcatcgcggccg

SEQ ID NO: 1499 - DNA, 20 bp, synthetic construct
  misc_feature 1..20: note = chemically synthesized
  source 1..20: mol_type = other DNA
gtgttgggcatcgcggccgg

SEQ ID NO: 1500 - DNA, 20 bp, synthetic construct
  misc_feature 1..20: note = chemically synthesized
  source 1..20: mol_type = other DNA
ttgggcatcgcggccggggg

SEQ ID NO: 1501 - DNA, 20 bp, synthetic construct
  misc_feature 1..20: note = chemically synthesized
  source 1..20: mol_type = other DNA
tgggcatcgcggccgggggc

SEQ ID NO: 1502 - DNA, 20 bp, synthetic construct
  misc_feature 1..20: note = chemically synthesized
  source 1..20: mol_type = other DNA
ggcaggtcgaactccttctc

SEQ ID NO: 1503 - DNA, 20 bp, synthetic construct
  misc_feature 1..20: note = chemically synthesized
  source 1..20: mol_type = other DNA
cttctcgagcttgatgcgct

SEQ ID NO: 1504 - DNA, 20 bp, synthetic construct
  misc_feature 1..20: note = chemically synthesized
  source 1..20: mol_type = other DNA
tctcgagcttgatgcgctta

SEQ ID NO: 1505 - DNA, 20 bp, synthetic construct
  misc_feature 1..20: note = chemically synthesized
  source 1..20: mol_type = other DNA
cgagcttgatgcgcttagag

SEQ ID NO: 1506 - DNA, 20 bp, synthetic construct
  misc_feature 1..20: note = chemically synthesized
  source 1..20: mol_type = other DNA
gagcttgatgcgcttagaga

SEQ ID NO: 1507 - DNA, 20 bp, synthetic construct
  misc_feature 1..20: note = chemically synthesized
  source 1..20: mol_type = other DNA
agcttgatgcgcttagagaa

SEQ ID NO: 1508 - DNA, 20 bp, synthetic construct
  misc_feature 1..20: note = chemically synthesized
  source 1..20: mol_type = other DNA
gcttgatgcgcttagagaag

SEQ ID NO: 1509 - DNA, 20 bp, synthetic construct
  misc_feature 1..20: note = chemically synthesized
  source 1..20: mol_type = other DNA
atgcgcttagagaaggggct

SEQ ID NO: 1510 - DNA, 20 bp, synthetic construct
  misc_feature 1..20: note = chemically synthesized
  source 1..20: mol_type = other DNA
gcttagagaaggggctcagc

SEQ ID NO: 1511 - DNA, 20 bp, synthetic construct
  misc_feature 1..20: note = chemically synthesized
  source 1..20: mol_type = other DNA
agagaaggggctcagcgagc

SEQ ID NO: 1512 - DNA, 20 bp, synthetic construct
  misc_feature 1..20: note = chemically synthesized
  source 1..20: mol_type = other DNA
gagaaggggctcagcgagct

SEQ ID NO: 1513 - DNA, 20 bp, synthetic construct
  misc_feature 1..20: note = chemically synthesized
  source 1..20: mol_type = other DNA
agaaggggctcagcgagctg

SEQ ID NO: 1514 - DNA, 20 bp, synthetic construct
  misc_feature 1..20: note = chemically synthesized
  source 1..20: mol_type = other DNA
ctcagcgagctggggctgcc

SEQ ID NO: 1515 - DNA, 20 bp, synthetic construct
  misc_feature 1..20: note = chemically synthesized
  source 1..20: mol_type = other DNA
agcgagctggggctgcccag

SEQ ID NO: 1516 - DNA, 20 bp, synthetic construct
  misc_feature 1..20: note = chemically synthesized
  source 1..20: mol_type = other DNA
gagctggggctgcccagcag

SEQ ID NO: 1517 - DNA, 20 bp, synthetic construct
  misc_feature 1..20: note = chemically synthesized
  source 1..20: mol_type = other DNA
gctgcccagcagcagctttt

SEQ ID NO: 1518 - DNA, 20 bp, synthetic construct
  misc_feature 1..20: note = chemically synthesized
  source 1..20: mol_type = other DNA
cccagcagcagctttttgga

SEQ ID NO: 1519 - DNA, 20 bp, synthetic construct
  misc_feature 1..20: note = chemically synthesized
  source 1..20: mol_type = other DNA
ccagcagcagctttttggac

SEQ ID NO: 1520 - DNA, 20 bp, synthetic construct
  misc_feature 1..20: note = chemically synthesized
  source 1..20: mol_type = other DNA
gctttttggacaggcccccc

SEQ ID NO: 1521 - DNA, 20 bp, synthetic construct
  misc_feature 1..20: note = chemically synthesized
  source 1..20: mol_type = other DNA
ctttttggacaggccccccg

SEQ ID NO: 1522 - DNA, 20 bp, synthetic construct
  misc_feature 1..20: note = chemically synthesized
  source 1..20: mol_type = other DNA
ccccccgaggccgactcgcc

SEQ ID NO: 1523 - DNA, 20 bp, synthetic construct
  misc_feature 1..20: note = chemically synthesized
  source 1..20: mol_type = other DNA
cccccgaggccgactcgccc

SEQ ID NO: 1524 - DNA, 20 bp, synthetic construct
  misc_feature 1..20: note = chemically synthesized
  source 1..20: mol_type = other DNA
ccccgaggccgactcgcccg

SEQ ID NO: 1525 - DNA, 20 bp, synthetic construct
  misc_feature 1..20: note = chemically synthesized
  source 1..20: mol_type = other DNA
ccgaggccgactcgcccggg

SEQ ID NO: 1526 - DNA, 20 bp, synthetic construct
  misc_feature 1..20: note = chemically synthesized
  source 1..20: mol_type = other DNA
aggccgactcgcccggggag

SEQ ID NO: 1527 - DNA, 20 bp, synthetic construct
  misc_feature 1..20: note = chemically synthesized
  source 1..20: mol_type = other DNA
actcgcccggggagcagccg

SEQ ID NO: 1528 - DNA, 20 bp, synthetic construct
  misc_feature 1..20: note = chemically synthesized
  source 1..20: mol_type = other DNA
ggagcagccgcggccattaa

SEQ ID NO: 1529 - DNA, 20 bp, synthetic construct
  misc_feature 1..20: note = chemically synthesized
  source 1..20: mol_type = other DNA
taacagtgccatcgtctatg

SEQ ID NO: 1530 - DNA, 20 bp, synthetic construct
  misc_feature 1..20: note = chemically synthesized
  source 1..20: mol_type = other DNA
gtctatgcggtccgactcgc

SEQ ID NO: 1531 - DNA, 20 bp, synthetic construct
  misc_feature 1..20: note = chemically synthesized
  source 1..20: mol_type = other DNA
ggtccgactcgccggccacc

SEQ ID NO: 1532 - DNA, 20 bp, synthetic construct
  misc_feature 1..20: note = chemically synthesized
  source 1..20: mol_type = other DNA
ggccaccgagtcttcgtcgc

SEQ ID NO: 1533 - DNA, 20 bp, synthetic construct
  misc_feature 1..20: note = chemically synthesized
  source 1..20: mol_type = other DNA
cttcgtcgcaagtgtccctg

SEQ ID NO: 1534 - DNA, 20 bp, synthetic construct
  misc_feature 1..20: note = chemically synthesized
  source 1..20: mol_type = other DNA
gcaagtgtccctgtggccct

SEQ ID NO: 1535 - DNA, 20 bp, synthetic construct
  misc_feature 1..20: note = chemically synthesized
  source 1..20: mol_type = other DNA
gtccctgtggccctcggcct

SEQ ID NO: 1536 - DNA, 20 bp, synthetic construct
  misc_feature 1..20: note = chemically synthesized
  source 1..20: mol_type = other DNA
ctgtggccctcggcctcggc

SEQ ID NO: 1537 - DNA, 20 bp, synthetic construct
  misc_feature 1..20: note = chemically synthesized
  source 1..20: mol_type = other DNA
tgtggccctcggcctcggcc

SEQ ID NO: 1538 - DNA, 20 bp, synthetic construct
  misc_feature 1..20: note = chemically synthesized
  source 1..20: mol_type = other DNA
ggccctcggcctcggccagg

SEQ ID NO: 1539 - DNA, 20 bp, synthetic construct
  misc_feature 1..20: note = chemically synthesized
  source 1..20: mol_type = other DNA
ccgcgcttatgcttctcgcc

SEQ ID NO: 1540 - DNA, 20 bp, synthetic construct
  misc_feature 1..20: note = chemically synthesized
  source 1..20: mol_type = other DNA
cgcgcttatgcttctcgccc

SEQ ID NO: 1541 - DNA, 20 bp, synthetic construct
  misc_feature 1..20: note = chemically synthesized
  source 1..20: mol_type = other DNA
tatgcttctcgcccaggacc

SEQ ID NO: 1542 - DNA, 20 bp, synthetic construct
  misc_feature 1..20: note = chemically synthesized
  source 1..20: mol_type = other DNA
gcttctcgcccaggacctgg

SEQ ID NO: 1543 - DNA, 20 bp, synthetic construct
  misc_feature 1..20: note = chemically synthesized
  source 1..20: mol_type = other DNA
tctcgcccaggacctggtgg

SEQ ID NO: 1544 - DNA, 20 bp, synthetic construct
  misc_feature 1..20: note = chemically synthesized
  source 1..20: mol_type = other DNA
ctcgcccaggacctggtgga

SEQ ID NO: 1545 - DNA, 20 bp, synthetic construct
  misc_feature 1..20: note = chemically synthesized
  source 1..20: mol_type = other DNA
cctggtggaaggcctcgctg

SEQ ID NO: 1546 - DNA, 20 bp, synthetic construct
  misc_feature 1..20: note = chemically synthesized
  source 1..20: mol_type = other DNA
ggcctcgctgaagtgctgca

SEQ ID NO: 1547 - DNA, 20 bp, synthetic construct
  misc_feature 1..20: note = chemically synthesized
  source 1..20: mol_type = other DNA
cctcgctgaagtgctgcatg

SEQ ID NO: 1548 - DNA, 20 bp, synthetic construct
  misc_feature 1..20: note = chemically synthesized
  source 1..20: mol_type = other DNA
ctgaagtgctgcatggagct

SEQ ID NO: 1549 - DNA, 20 bp, synthetic construct
  misc_feature 1..20: note = chemically synthesized
  source 1..20: mol_type = other DNA
caccatgccctgcatgacgt

SEQ ID NO: 1550 - DNA, 20 bp, synthetic construct
  misc_feature 1..20: note = chemically synthesized
  source 1..20: mol_type = other DNA
accatgccctgcatgacgtc

SEQ ID NO: 1551 - DNA, 20 bp, synthetic construct
  misc_feature 1..20: note = chemically synthesized
  source 1..20: mol_type = other DNA
atgccctgcatgacgtcggg

SEQ ID NO: 1552 - DNA, 20 bp, synthetic construct
  misc_feature 1..20: note = chemically synthesized
  source 1..20: mol_type = other DNA
tgccctgcatgacgtcgggc

SEQ ID NO: 1553 - DNA, 20 bp, synthetic construct
  misc_feature 1..20: note = chemically synthesized
  source 1..20: mol_type = other DNA
gccctgcatgacgtcgggca

SEQ ID NO: 1554 - DNA, 20 bp, synthetic construct
  misc_feature 1..20: note = chemically synthesized
  source 1..20: mol_type = other DNA
gcatgacgtcgggcagggcg

SEQ ID NO: 1555 - DNA, 20 bp, synthetic construct
  misc_feature 1..20: note = chemically synthesized
  source 1..20: mol_type = other DNA
cgcccacgaccgcgccccgc

SEQ ID NO: 1556 - DNA, 20 bp, synthetic construct
  misc_feature 1..20: note = chemically synthesized
  source 1..20: mol_type = other DNA
cgccccgcgagctgttctcg

SEQ ID NO: 1557 - DNA, 20 bp, synthetic construct
  misc_feature 1..20: note = chemically synthesized
  source 1..20: mol_type = other DNA
cccgcgagctgttctcgtgg

SEQ ID NO: 1558 - DNA, 20 bp, synthetic construct
  misc_feature 1..20: note = chemically synthesized
  source 1..20: mol_type = other DNA
tcgtggtggcgcgccgcctc

SEQ ID NO: 1559 - DNA, 20 bp, synthetic construct
  misc_feature 1..20: note = chemically synthesized
  source 1..20: mol_type = other DNA
cgtggtggcgcgccgcctcc

SEQ ID NO: 1560 - DNA, 20 bp, synthetic construct
  misc_feature 1..20: note = chemically synthesized
  source 1..20: mol_type = other DNA
tggcgcgccgcctccaggct

SEQ ID NO: 1561 - DNA, 20 bp, synthetic construct
  misc_feature 1..20: note = chemically synthesized
  source 1..20: mol_type = other DNA
ccgcctccaggctcagcccg

SEQ ID NO: 1562 - DNA, 20 bp, synthetic construct
  misc_feature 1..20: note = chemically synthesized
  source 1..20: mol_type = other DNA
ccaggctcagcccgaagccg

SEQ ID NO: 1563 - DNA, 20 bp, synthetic construct
  misc_feature 1..20: note = chemically synthesized
  source 1..20: mol_type = other DNA
tccaccctctcgctctccgt

SEQ ID NO: 1564 - DNA, 20 bp, synthetic construct
  misc_feature 1..20: note = chemically synthesized
  source 1..20: mol_type = other DNA
tcctcctcgtccccgttctc

SEQ ID NO: 1565 - DNA, 20 bp, synthetic construct
  misc_feature 1..20: note = chemically synthesized
  source 1..20: mol_type = other DNA
cctcctcgtccccgttctcc

SEQ ID NO: 1566 - DNA, 20 bp, synthetic construct
  misc_feature 1..20: note = chemically synthesized
  source 1..20: mol_type = other DNA
tcgtccccgttctccgggat

SEQ ID NO: 1567 - DNA, 20 bp, synthetic construct
  misc_feature 1..20: note = chemically synthesized
  source 1..20: mol_type = other DNA
cgtccccgttctccgggatc

SEQ ID NO: 1568 - DNA, 20 bp, synthetic construct
  misc_feature 1..20: note = chemically synthesized
  source 1..20: mol_type = other DNA
cccgttctccgggatcaggt

SEQ ID NO: 1569 - DNA, 20 bp, synthetic construct
  misc_feature 1..20: note = chemically synthesized
  source 1..20: mol_type = other DNA
ccgttctccgggatcaggtt

SEQ ID NO: 1570 - DNA, 20 bp, synthetic construct
  misc_feature 1..20: note = chemically synthesized
  source 1..20: mol_type = other DNA
cgttctccgggatcaggttg

SEQ ID NO: 1571 - DNA, 20 bp, synthetic construct
  misc_feature 1..20: note = chemically synthesized
  source 1..20: mol_type = other DNA
gtcgttctcgctcttgaact

SEQ ID NO: 1572 - DNA, 20 bp, synthetic construct
  misc_feature 1..20: note = chemically synthesized
  source 1..20: mol_type = other DNA
gctcttgaacttggccacca

SEQ ID NO: 1573 - DNA, 20 bp, synthetic construct
  misc_feature 1..20: note = chemically synthesized
  source 1..20: mol_type = other DNA
aacttggccaccacggactt

SEQ ID NO: 1574 - DNA, 20 bp, synthetic construct
  misc_feature 1..20: note = chemically synthesized
  source 1..20: mol_type = other DNA
cacggacttgagcgcgctgc

SEQ ID NO: 1575 - DNA, 20 bp, synthetic construct
  misc_feature 1..20: note = chemically synthesized
  source 1..20: mol_type = other DNA
cgctgctggcgctgcccacc

SEQ ID NO: 1576 - DNA, 20 bp, synthetic construct
  misc_feature 1..20: note = chemically synthesized
  source 1..20: mol_type = other DNA
ggcgctgcccaccaagtcgc

SEQ ID NO: 1577 - DNA, 20 bp, synthetic construct
  misc_feature 1..20: note = chemically synthesized
  source 1..20: mol_type = other DNA
gcccaccaagtcgctggtgc

SEQ ID NO: 1578 - DNA, 20 bp, synthetic construct
  misc_feature 1..20: note = chemically synthesized
  source 1..20: mol_type = other DNA
cccaccaagtcgctggtgcc

SEQ ID NO: 1579 - DNA, 20 bp, synthetic construct
  misc_feature 1..20: note = chemically synthesized
  source 1..20: mol_type = other DNA
aagtcgctggtgccgggttc

SEQ ID NO: 1580 - DNA, 20 bp, synthetic construct
  misc_feature 1..20: note = chemically synthesized
  source 1..20: mol_type = other DNA
agtcgctggtgccgggttcc

SEQ ID NO: 1581 - DNA, 20 bp, synthetic construct
  misc_feature 1..20: note = chemically synthesized
  source 1..20: mol_type = other DNA
gtcgctggtgccgggttccg

SEQ ID NO: 1582 - DNA, 20 bp, synthetic construct
  misc_feature 1..20: note = chemically synthesized
  source 1..20: mol_type = other DNA
cgctggtgccgggttccggg

SEQ ID NO: 1583 - DNA, 20 bp, synthetic construct
  misc_feature 1..20: note = chemically synthesized
  source 1..20: mol_type = other DNA
ggtgccgggttccggggagc

SEQ ID NO: 1584 - DNA, 20 bp, synthetic construct
  misc_feature 1..20: note = chemically synthesized
  source 1..20: mol_type = other DNA
gccgggttccggggagctgg

SEQ ID NO: 1585 - DNA, 20 bp, synthetic construct
  misc_feature 1..20: note = chemically synthesized
  source 1..20: mol_type = other DNA
gggttccggggagctggcgg

SEQ ID NO: 1586 - DNA, 20 bp, synthetic construct
  misc_feature 1..20: note = chemically synthesized
  source 1..20: mol_type = other DNA
gttccggggagctggcggtg

SEQ ID NO: 1587 - DNA, 20 bp, synthetic construct
  misc_feature 1..20: note = chemically synthesized
  source 1..20: mol_type = other DNA
tccggggagctggcggtgga

SEQ ID NO: 1588 - DNA, 20 bp, synthetic construct
  misc_feature 1..20: note = chemically synthesized
  source 1..20: mol_type = other DNA
ggcggtggagagaccgtcgt

SEQ ID NO: 1589 - DNA, 20 bp, synthetic construct
  misc_feature 1..20: note = chemically synthesized
  source 1..20: mol_type = other DNA
gtcgtcggacttgaccgtca

SEQ ID NO: 1590 - DNA, 20 bp, synthetic construct
  misc_feature 1..20: note = chemically synthesized
  source 1..20: mol_type = other DNA
tcgtcggacttgaccgtcat

SEQ ID NO: 1591 - DNA, 20 bp, synthetic construct
  misc_feature 1..20: note = chemically synthesized
  source 1..20: mol_type = other DNA
cgtcggacttgaccgtcatg

SEQ ID NO: 1592 - DNA, 20 bp, synthetic construct
  misc_feature 1..20: note = chemically synthesized
  source 1..20: mol_type = other DNA
gtcggacttgaccgtcatgg

SEQ ID NO: 1593 - DNA, 20 bp, synthetic construct
  misc_feature 1..20: note = chemically synthesized
  source 1..20: mol_type = other DNA
tgtgcatgtgcgtcttcatg

SEQ ID NO: 1594 - DNA, 20 bp, synthetic construct
  misc_feature 1..20: note = chemically synthesized
  source 1..20: mol_type = other DNA
tgcgtcttcatgtggcgctt

SEQ ID NO: 1595 - DNA, 20 bp, synthetic construct
  misc_feature 1..20: note = chemically synthesized
  source 1..20: mol_type = other DNA
catgtggcgcttcagcttgc

SEQ ID NO: 1596 - DNA, 20 bp, synthetic construct
  misc_feature 1..20: note = chemically synthesized
  source 1..20: mol_type = other DNA
ggcgcttcagcttgctggcc

SEQ ID NO: 1597 - DNA, 20 bp, synthetic construct
  misc_feature 1..20: note = chemically synthesized
  source 1..20: mol_type = other DNA
gcgcttcagcttgctggcct

SEQ ID NO: 1598 - DNA, 20 bp, synthetic construct
  misc_feature 1..20: note = chemically synthesized
  source 1..20: mol_type = other DNA
tgctggcctgggtgcacgcg

SEQ ID NO: 1599 - DNA, 20 bp, synthetic construct
  misc_feature 1..20: note = chemically synthesized
  source 1..20: mol_type = other DNA
tgggtgcacgcgtggtcgca

SEQ ID NO: 1600 - DNA, 20 bp, synthetic construct
  misc_feature 1..20: note = chemically synthesized
  source 1..20: mol_type = other DNA
gggtgcacgcgtggtcgcac

SEQ ID NO: 1601 - DNA, 20 bp, synthetic construct
  misc_feature 1..20: note = chemically synthesized
  source 1..20: mol_type = other DNA
ggtcgcacaggttgcacttg

SEQ ID NO: 1602 - DNA, 20 bp, synthetic construct
  misc_feature 1..20: note = chemically synthesized
  source 1..20: mol_type = other DNA
gtcgcacaggttgcacttgt

SEQ ID NO: 1603 - DNA, 20 bp, synthetic construct
  misc_feature 1..20: note = chemically synthesized
  source 1..20: mol_type = other DNA
tcgcacaggttgcacttgta

SEQ ID NO: 1604 - DNA, 20 bp, synthetic construct
  misc_feature 1..20: note = chemically synthesized
  source 1..20: mol_type = other DNA
tgtagggcttctcgcccgtg

SEQ ID NO: 1605 - DNA, 20 bp, synthetic construct
  misc_feature 1..20: note = chemically synthesized
  source 1..20: mol_type = other DNA
tctcgcccgtgtggctgcgc

SEQ ID NO: 1606 - DNA, 20 bp, synthetic construct
  misc_feature 1..20: note = chemically synthesized
  source 1..20: mol_type = other DNA
tggctgcgccggtgcaccac

SEQ ID NO: 1607 - DNA, 20 bp, synthetic construct
  misc_feature 1..20: note = chemically synthesized
  source 1..20: mol_type = other DNA
ggctgcgccggtgcaccacc

SEQ ID NO: 1608 - DNA, 20 bp, synthetic construct
  misc_feature 1..20: note = chemically synthesized
  source 1..20: mol_type = other DNA
gaaatttgaacgtcttgccg

SEQ ID NO: 1609 - DNA, 20 bp, synthetic construct
  misc_feature 1..20: note = chemically synthesized
  source 1..20: mol_type = other DNA
gccgcagaactcgcatgact

SEQ ID NO: 1610 - DNA, 20 bp, synthetic construct
  misc_feature 1..20: note = chemically synthesized
  source 1..20: mol_type = other DNA
tcgcatgacttggacttgac

SEQ ID NO: 1611 - DNA, 20 bp, synthetic construct
  misc_feature 1..20: note = chemically synthesized
  source 1..20: mol_type = other DNA
cgcatgacttggacttgacc

SEQ ID NO: 1612 - DNA, 20 bp, synthetic construct
  misc_feature 1..20: note = chemically synthesized
  source 1..20: mol_type = other DNA
gcatgacttggacttgaccg

SEQ ID NO: 1613 - DNA, 20 bp, synthetic construct
  misc_feature 1..20: note = chemically synthesized
  source 1..20: mol_type = other DNA
catgacttggacttgaccgg

SEQ ID NO: 1614 - DNA, 20 bp, synthetic construct
  misc_feature 1..20: note = chemically synthesized
  source 1..20: mol_type = other DNA
acttggacttgaccgggggc

SEQ ID NO: 1615 - DNA, 20 bp, synthetic construct
  misc_feature 1..20: note = chemically synthesized
  source 1..20: mol_type = other DNA
cttggacttgaccgggggct

SEQ ID NO: 1616 - DNA, 20 bp, synthetic construct
  misc_feature 1..20: note = chemically synthesized
  source 1..20: mol_type = other DNA
tggacttgaccgggggctgg

SEQ ID NO: 1617 - DNA, 20 bp, synthetic construct
  misc_feature 1..20: note = chemically synthesized
  source 1..20: mol_type = other DNA
ggacttgaccgggggctggg

SEQ ID NO: 1618 - DNA, 20 bp, synthetic construct
  misc_feature 1..20: note = chemically synthesized
  source 1..20: mol_type = other DNA
gacttgaccgggggctggga

SEQ ID NO: 1619 - DNA, 20 bp, synthetic construct
  misc_feature 1..20: note = chemically synthesized
  source 1..20: mol_type = other DNA
cttgaccgggggctgggagg

SEQ ID NO: 1620 - DNA, 20 bp, synthetic construct
  misc_feature 1..20: note = chemically synthesized
  source 1..20: mol_type = other DNA
ttgaccgggggctgggaggg

SEQ ID NO: 1621 - DNA, 20 bp, synthetic construct
  misc_feature 1..20: note = chemically synthesized
  source 1..20: mol_type = other DNA
gaccgggggctgggagggag

SEQ ID NO: 1622 - DNA, 20 bp, synthetic construct
  misc_feature 1..20: note = chemically synthesized
  source 1..20: mol_type = other DNA
accgggggctgggagggagg

SEQ ID NO: 1623 - DNA, 20 bp, synthetic construct
  misc_feature 1..20: note = chemically synthesized
  source 1..20: mol_type = other DNA
ccgggggctgggagggagga

SEQ ID NO: 1624 - DNA, 20 bp, synthetic construct
  misc_feature 1..20: note = chemically synthesized
  source 1..20: mol_type = other DNA
cgggggctgggagggaggag

SEQ ID NO: 1625 - DNA, 20 bp, synthetic construct
  misc_feature 1..20: note = chemically synthesized
  source 1..20: mol_type = other DNA
gggctgggagggaggagggg

SEQ ID NO: 1626 - DNA, 20 bp, synthetic construct
  misc_feature 1..20: note = chemically synthesized
  source 1..20: mol_type = other DNA
gagggaggaggggcggattg

SEQ ID NO: 1627 - DNA, 20 bp, synthetic construct
  misc_feature 1..20: note = chemically synthesized
  source 1..20: mol_type = other DNA
gggaggaggggcggattgca

SEQ ID NO: 1628 - DNA, 20 bp, synthetic construct
  misc_feature 1..20: note = chemically synthesized
  source 1..20: mol_type = other DNA
ggaggaggggcggattgcag

SEQ ID NO: 1629 - DNA, 20 bp, synthetic construct
  misc_feature 1..20: note = chemically synthesized
  source 1..20: mol_type = other DNA
aggaggggcggattgcagag

SEQ ID NO: 1630 - DNA, 20 bp, synthetic construct
  misc_feature 1..20: note = chemically synthesized
  source 1..20: mol_type = other DNA
ggaggggcggattgcagagg

SEQ ID NO: 1631 - DNA, 20 bp, synthetic construct
  misc_feature 1..20: note = chemically synthesized
  source 1..20: mol_type = other DNA
gaggggcggattgcagagga

SEQ ID NO: 1632 - DNA, 20 bp, synthetic construct
  misc_feature 1..20: note = chemically synthesized
  source 1..20: mol_type = other DNA
ggggcggattgcagaggagg

SEQ ID NO: 1633 - DNA, 20 bp, synthetic construct
  misc_feature 1..20: note = chemically synthesized
  source 1..20: mol_type = other DNA
gggcggattgcagaggaggg

SEQ ID NO: 1634 - DNA, 20 bp, synthetic construct
  misc_feature 1..20: note = chemically synthesized
  source 1..20: mol_type = other DNA
ggcggattgcagaggaggga

SEQ ID NO: 1635 - DNA, 20 bp, synthetic construct
  misc_feature 1..20: note = chemically synthesized
  source 1..20: mol_type = other DNA
gcggattgcagaggagggag

SEQ ID NO: 1636 - DNA, 20 bp, synthetic construct
  misc_feature 1..20: note = chemically synthesized
  source 1..20: mol_type = other DNA
cggattgcagaggagggagg

SEQ ID NO: 1637 - DNA, 20 bp, synthetic construct
  misc_feature 1..20: note = chemically synthesized
  source 1..20: mol_type = other DNA
ggattgcagaggagggaggg

SEQ ID NO: 1638 - DNA, 20 bp, synthetic construct
  misc_feature 1..20: note = chemically synthesized
  source 1..20: mol_type = other DNA
gattgcagaggagggagggg

SEQ ID NO: 1639 - DNA, 20 bp, synthetic construct
  misc_feature 1..20: note = chemically synthesized
  source 1..20: mol_type = other DNA
ggagggagggggggcgtcgc

SEQ ID NO: 1640 - DNA, 20 bp, synthetic construct
  misc_feature 1..20: note = chemically synthesized
  source 1..20: mol_type = other DNA
gagggagggggggcgtcgcc

SEQ ID NO: 1641 - DNA, 20 bp, synthetic construct
  misc_feature 1..20: note = chemically synthesized
  source 1..20: mol_type = other DNA
ggagggggggcgtcgccagg

SEQ ID NO: 1642 - DNA, 20 bp, synthetic construct
  misc_feature 1..20: note = chemically synthesized
  source 1..20: mol_type = other DNA
gagggggggcgtcgccagga

SEQ ID NO: 1643 - DNA, 20 bp, synthetic construct
  misc_feature 1..20: note = chemically synthesized
  source 1..20: mol_type = other DNA
agggggggcgtcgccaggaa

SEQ ID NO: 1644 - DNA, 20 bp, synthetic construct
  misc_feature 1..20: note = chemically synthesized
  source 1..20: mol_type = other DNA
gggggcgtcgccaggaaggg

SEQ ID NO: 1645 - DNA, 20 bp, synthetic construct
  misc_feature 1..20: note = chemically synthesized
  source 1..20: mol_type = other DNA
aggaagggcggcttgctacc

SEQ ID NO: 1646 - DNA, 20 bp, synthetic construct
  misc_feature 1..20: note = chemically synthesized
  source 1..20: mol_type = other DNA
agggcggcttgctacctggc

SEQ ID NO: 1647 - DNA, 20 bp, synthetic construct
  misc_feature 1..20: note = chemically synthesized
  source 1..20: mol_type = other DNA
ggcttgctacctggctggaa

SEQ ID NO: 1648 - DNA, 20 bp, synthetic construct
  misc_feature 1..20: note = chemically synthesized
  source 1..20: mol_type = other DNA
ctacctggctggaatggttg

SEQ ID NO: 1649 - DNA, 20 bp, synthetic construct
  misc_feature 1..20: note = chemically synthesized
  source 1..20: mol_type = other DNA
tggttgcagtaacctttgca

SEQ ID NO: 1650 - DNA, 20 bp, synthetic construct
  misc_feature 1..20: note = chemically synthesized
  source 1..20: mol_type = other DNA
ggttgcagtaacctttgcat

SEQ ID NO: 1651 - DNA, 20 bp, synthetic construct
  misc_feature 1..20: note = chemically synthesized
  source 1..20: mol_type = other DNA
gttgcagtaacctttgcata

SEQ ID NO: 1652 - DNA, 20 bp, synthetic construct
  misc_feature 1..20: note = chemically synthesized
  source 1..20: mol_type = other DNA
cagtaacctttgcatagggc

SEQ ID NO: 1653 - DNA, 20 bp, synthetic construct
  misc_feature 1..20: note = chemically synthesized
  source 1..20: mol_type = other DNA
agtaacctttgcatagggct

SEQ ID NO: 1654 - DNA, 20 bp, synthetic construct
  misc_feature 1..20: note = chemically synthesized
  source 1..20: mol_type = other DNA
acctttgcatagggctgggc

SEQ ID NO: 1655 - DNA, 20 bp, synthetic construct
  misc_feature 1..20: note = chemically synthesized
  source 1..20: mol_type = other DNA
tgcatagggctgggccggcc

SEQ ID NO: 1656 - DNA, 20 bp, synthetic construct
  misc_feature 1..20: note = chemically synthesized
  source 1..20: mol_type = other DNA
gcatagggctgggccggcct

SEQ ID NO: 1657 - DNA, 20 bp, synthetic construct
  misc_feature 1..20: note = chemically synthesized
  source 1..20: mol_type = other DNA
catagggctgggccggcctg

SEQ ID NO: 1658 - DNA, 20 bp, synthetic construct
  misc_feature 1..20: note = chemically synthesized
  source 1..20: mol_type = other DNA
gggctgggccggcctgggga

SEQ ID NO: 1659 - DNA, 20 bp, synthetic construct
  misc_feature 1..20: note = chemically synthesized
  source 1..20: mol_type = other DNA
ctgggccggcctggggacag

SEQ ID NO: 1660 - DNA, 20 bp, synthetic construct
  misc_feature 1..20: note = chemically synthesized
  source 1..20: mol_type = other DNA
ggccggcctggggacagcgg

SEQ ID NO: 1661 - DNA, 20 bp, synthetic construct
  misc_feature 1..20: note = chemically synthesized
  source 1..20: mol_type = other DNA
gccggcctggggacagcggt

SEQ ID NO: 1662 - DNA, 20 bp, synthetic construct
  misc_feature 1..20: note = chemically synthesized
  source 1..20: mol_type = other DNA
gcctggggacagcggtgggc

SEQ ID NO: 1663 - DNA, 20 bp, synthetic construct
  misc_feature 1..20: note = chemically synthesized
  source 1..20: mol_type = other DNA
gggctagacgtgttccctgc

SEQ ID NO: 1664 - DNA, 20 bp, synthetic construct
  misc_feature 1..20: note = chemically synthesized
  source 1..20: mol_type = other DNA
gtgttccctgccagctctct

SEQ ID NO: 1665 - DNA, 20 bp, synthetic construct
  misc_feature 1..20: note = chemically synthesized
  source 1..20: mol_type = other DNA
tgccagctctctaagtctcc

SEQ ID NO: 1666 - DNA, 20 bp, synthetic construct
  misc_feature 1..20: note = chemically synthesized
  source 1..20: mol_type = other DNA
ccagctctctaagtctccta

SEQ ID NO: 1667 - DNA, 20 bp, synthetic construct
  misc_feature 1..20: note = chemically synthesized
  source 1..20: mol_type = other DNA
aagtctcctagagaaatcca

SEQ ID NO: 1668 - DNA, 20 bp, synthetic construct
  misc_feature 1..20: note = chemically synthesized
  source 1..20: mol_type = other DNA
tctcctagagaaatccatgg

SEQ ID NO: 1669 - DNA, 20 bp, synthetic construct
  misc_feature 1..20: note = chemically synthesized
  source 1..20: mol_type = other DNA
ctcctagagaaatccatggc

SEQ ID NO: 1670 - DNA, 20 bp, synthetic construct
  misc_feature 1..20: note = chemically synthesized
  source 1..20: mol_type = other DNA
cctagagaaatccatggcgg

SEQ ID NO: 1671 - DNA, 20 bp, synthetic construct
  misc_feature 1..20: note = chemically synthesized
  source 1..20: mol_type = other DNA
ctagagaaatccatggcggg

SEQ ID NO: 1672 - DNA, 20 bp, synthetic construct
  misc_feature 1..20: note = chemically synthesized
  source 1..20: mol_type = other DNA
atccatggcgggaggctcca

SEQ ID NO: 1673 - DNA, 20 bp, synthetic construct
  misc_feature 1..20: note = chemically synthesized
  source 1..20: mol_type = other DNA
gcgggaggctccatagccat

SEQ ID NO: 1674 - DNA, 20 bp, synthetic construct
  misc_feature 1..20: note = chemically synthesized
  source 1..20: mol_type = other DNA
atagccattggattcaaccg

SEQ ID NO: 1675 - DNA, 20 bp, synthetic construct
  misc_feature 1..20: note = chemically synthesized
  source 1..20: mol_type = other DNA
tcaaccgcagcaccctgtca

SEQ ID NO: 1676 - DNA, 20 bp, synthetic construct
  misc_feature 1..20: note = chemically synthesized
  source 1..20: mol_type = other DNA
caaccgcagcaccctgtcaa

SEQ ID NO: 1677 - DNA, 20 bp, synthetic construct
  misc_feature 1..20: note = chemically synthesized
  source 1..20: mol_type = other DNA
agcaccctgtcaaaggcact

SEQ ID NO: 1678 - DNA, 20 bp, synthetic construct
  misc_feature 1..20: note = chemically synthesized
  source 1..20: mol_type = other DNA
gcaccctgtcaaaggcactc

SEQ ID NO: 1679 - DNA, 20 bp, synthetic construct
  misc_feature 1..20: note = chemically synthesized
  source 1..20: mol_type = other DNA
tgtcaaaggcactcgggtga

SEQ ID NO: 1680 - DNA, 20 bp, synthetic construct
  misc_feature 1..20: note = chemically synthesized
  source 1..20: mol_type = other DNA
gtcaaaggcactcgggtgat

SEQ ID NO: 1681 - DNA, 20 bp, synthetic construct
  misc_feature 1..20: note = chemically synthesized
  source 1..20: mol_type = other DNA
aaaggcactcgggtgatggg

SEQ ID NO: 1682 - DNA, 20 bp, synthetic construct
  misc_feature 1..20: note = chemically synthesized
  source 1..20: mol_type = other DNA
gcactcgggtgatgggtggc

SEQ ID NO: 1683 - DNA, 20 bp, synthetic construct
  misc_feature 1..20: note = chemically synthesized
  source 1..20: mol_type = other DNA
cactcgggtgatgggtggcc

SEQ ID NO: 1684 - DNA, 20 bp, synthetic construct
  misc_feature 1..20: note = chemically synthesized
  source 1..20: mol_type = other DNA
actcgggtgatgggtggcca

SEQ ID NO: 1685 - DNA, 20 bp, synthetic construct
  misc_feature 1..20: note = chemically synthesized
  source 1..20: mol_type = other DNA
agggccatctcttccgcccc

SEQ ID NO: 1686 - DNA, 20 bp, synthetic construct
  misc_feature 1..20: note = chemically synthesized
  source 1..20: mol_type = other DNA
gggccatctcttccgccccc

SEQ ID NO: 1687 - DNA, 20 bp, synthetic construct
  misc_feature 1..20: note = chemically synthesized
  source 1..20: mol_type = other DNA
ccgcccccaggcgctctatg

SEQ ID NO: 1688 - DNA, 20 bp, synthetic construct
  misc_feature 1..20: note = chemically synthesized
  source 1..20: mol_type = other DNA
cccccaggcgctctatgcgg

SEQ ID NO: 1689 - DNA, 20 bp, synthetic construct
  misc_feature 1..20: note = chemically synthesized
  source 1..20: mol_type = other DNA
ccccaggcgctctatgcggt

SEQ ID NO: 1690 - DNA, 20 bp, synthetic construct
  misc_feature 1..20: note = chemically synthesized
  source 1..20: mol_type = other DNA
cccaggcgctctatgcggtg

SEQ ID NO: 1691 - DNA, 20 bp, synthetic construct
  misc_feature 1..20: note = chemically synthesized
  source 1..20: mol_type = other DNA
ccaggcgctctatgcggtgg

SEQ ID NO: 1692 - DNA, 20 bp, synthetic construct
  misc_feature 1..20: note = chemically synthesized
  source 1..20: mol_type = other DNA
gctctatgcggtgggggtcc

SEQ ID NO: 1693 - DNA, 20 bp, synthetic construct
  misc_feature 1..20: note = chemically synthesized
  source 1..20: mol_type = other DNA
tgggggtccaagtgatgtct

SEQ ID NO: 1694 - DNA, 20 bp, synthetic construct
  misc_feature 1..20: note = chemically synthesized
  source 1..20: mol_type = other DNA
gggtccaagtgatgtctcgg

SEQ ID NO: 1695 - DNA, 20 bp, synthetic construct
  misc_feature 1..20: note = chemically synthesized
  source 1..20: mol_type = other DNA
tccaagtgatgtctcggtgg

SEQ ID NO: 1696 - DNA, 20 bp, synthetic construct
  misc_feature 1..20: note = chemically synthesized
  source 1..20: mol_type = other DNA
tgtctcggtggtggactaaa

SEQ ID NO: 1697 - DNA, 20 bp, synthetic construct
  misc_feature 1..20: note = chemically synthesized
  source 1..20: mol_type = other DNA
gtctcggtggtggactaaac

SEQ ID NO: 1698 - DNA, 20 bp, synthetic construct
  misc_feature 1..20: note = chemically synthesized
  source 1..20: mol_type = other DNA
tctcggtggtggactaaaca

SEQ ID NO: 1699 - DNA, 20 bp, synthetic construct
  misc_feature 1..20: note = chemically synthesized
  source 1..20: mol_type = other DNA
ctcggtggtggactaaacag

SEQ ID NO: 1700 - DNA, 20 bp, synthetic construct
  misc_feature 1..20: note = chemically synthesized
  source 1..20: mol_type = other DNA
tcggtggtggactaaacagg

SEQ ID NO: 1701 - DNA, 20 bp, synthetic construct
  misc_feature 1..20: note = chemically synthesized
  source 1..20: mol_type = other DNA
cggtggtggactaaacaggg

SEQ ID NO: 1702 - DNA, 20 bp, synthetic construct
  misc_feature 1..20: note = chemically synthesized
  source 1..20: mol_type = other DNA
ggtggtggactaaacagggg

SEQ ID NO: 1703 - DNA, 20 bp, synthetic construct
  misc_feature 1..20: note = chemically synthesized
  source 1..20: mol_type = other DNA
tggtggactaaacagggggg

SEQ ID NO: 1704 - DNA, 20 bp, synthetic construct
  misc_feature 1..20: note = chemically synthesized
  source 1..20: mol_type = other DNA
tggactaaacagggggggag

SEQ ID NO: 1705 - DNA, 20 bp, synthetic construct
  misc_feature 1..20: note = chemically synthesized
  source 1..20: mol_type = other DNA
ggactaaacagggggggagt

SEQ ID NO: 1706 - DNA, 20 bp, synthetic construct
  misc_feature 1..20: note = chemically synthesized
  source 1..20: mol_type = other DNA
ctaaacagggggggagtggg

SEQ ID NO: 1707 - DNA, 20 bp, synthetic construct
  misc_feature 1..20: note = chemically synthesized
  source 1..20: mol_type = other DNA
acagggggggagtgggtgga

SEQ ID NO: 1708 - DNA, 20 bp, synthetic construct
  misc_feature 1..20: note = chemically synthesized
  source 1..20: mol_type = other DNA
ggtggaaagcgcccttctgc

SEQ ID NO: 1709 - DNA, 20 bp, synthetic construct
  misc_feature 1..20: note = chemically synthesized
  source 1..20: mol_type = other DNA
gtggaaagcgcccttctgcc

SEQ ID NO: 1710 - DNA, 20 bp, synthetic construct
  misc_feature 1..20: note = chemically synthesized
  source 1..20: mol_type = other DNA
aaagcgcccttctgccaggc

SEQ ID NO: 1711 - DNA, 20 bp, synthetic construct
  misc_feature 1..20: note = chemically synthesized
  source 1..20: mol_type = other DNA
gcgcccttctgccaggccgg

SEQ ID NO: 1712 - DNA, 20 bp, synthetic construct
  misc_feature 1..20: note = chemically synthesized
  source 1..20: mol_type = other DNA
gcctctctcgatactgatcc

SEQ ID NO: 1713 - DNA, 20 bp, synthetic construct
  misc_feature 1..20: note = chemically synthesized
  source 1..20: mol_type = other DNA
gatactgatcctggtattct

SEQ ID NO: 1714 - DNA, 20 bp, synthetic construct
  misc_feature 1..20: note = chemically synthesized
  source 1..20: mol_type = other DNA
actgatcctggtattcttag

SEQ ID NO: 1715 - DNA, 20 bp, synthetic construct
  misc_feature 1..20: note = chemically synthesized
  source 1..20: mol_type = other DNA
ctgatcctggtattcttagc

SEQ ID NO: 1716 - DNA, 20 bp, synthetic construct
  misc_feature 1..20: note = chemically synthesized
  source 1..20: mol_type = other DNA
ctggtattcttagcaggtta

SEQ ID NO: 1717 - DNA, 20 bp, synthetic construct
  misc_feature 1..20: note = chemically synthesized
  source 1..20: mol_type = other DNA
tggtattcttagcaggttaa

SEQ ID NO: 1718 - DNA, 20 bp, synthetic construct
  misc_feature 1..20: note = chemically synthesized
  source 1..20: mol_type = other DNA
ggtattcttagcaggttaaa

SEQ ID NO: 1719 - DNA, 20 bp, synthetic construct
  misc_feature 1..20: note = chemically synthesized
  source 1..20: mol_type = other DNA
gtattcttagcaggttaaag

SEQ ID NO: 1720 - DNA, 20 bp, synthetic construct
  misc_feature 1..20: note = chemically synthesized
  source 1..20: mol_type = other DNA
tgtctgcaatatgaatccca

SEQ ID NO: 1721 - DNA, 20 bp, synthetic construct
  misc_feature 1..20: note = chemically synthesized
  source 1..20: mol_type = other DNA
tctgcaatatgaatcccatg

SEQ ID NO: 1722 - DNA, 20 bp, synthetic construct
  misc_feature 1..20: note = chemically synthesized
  source 1..20: mol_type = other DNA
tgcaatatgaatcccatgga

SEQ ID NO: 1723 - DNA, 20 bp, synthetic construct
  misc_feature 1..20: note = chemically synthesized
  source 1..20: mol_type = other DNA
gcaatatgaatcccatggag

SEQ ID NO: 1724 - DNA, 20 bp, synthetic construct
  misc_feature 1..20: note = chemically synthesized
  source 1..20: mol_type = other DNA
atatgaatcccatggagagg

SEQ ID NO: 1725 - DNA, 20 bp, synthetic construct
  misc_feature 1..20: note = chemically synthesized
  source 1..20: mol_type = other DNA
gaatcccatggagaggtggc

SEQ ID NO: 1726 - DNA, 20 bp, synthetic construct
  misc_feature 1..20: note = chemically synthesized
  source 1..20: mol_type = other DNA
aatcccatggagaggtggct

SEQ ID NO: 1727 - DNA, 20 bp, synthetic construct
  misc_feature 1..20: note = chemically synthesized
  source 1..20: mol_type = other DNA
cccatggagaggtggctggg

SEQ ID NO: 1728 - DNA, 20 bp, synthetic construct
  misc_feature 1..20: note = chemically synthesized
  source 1..20: mol_type = other DNA
ccatggagaggtggctggga

SEQ ID NO: 1729 - DNA, 20 bp, synthetic construct
  misc_feature 1..20: note = chemically synthesized
  source 1..20: mol_type = other DNA
tgggaaggacattctgcacc

SEQ ID NO: 1730 - DNA, 20 bp, synthetic construct
  misc_feature 1..20: note = chemically synthesized
  source 1..20: mol_type = other DNA
acattctgcacctagtcctg

SEQ ID NO: 1731 - DNA, 20 bp, synthetic construct
  misc_feature 1..20: note = chemically synthesized
  source 1..20: mol_type = other DNA
cattctgcacctagtcctga

SEQ ID NO: 1732 - DNA, 20 bp, synthetic construct
  misc_feature 1..20: note = chemically synthesized
  source 1..20: mol_type = other DNA
attctgcacctagtcctgaa

SEQ ID NO: 1733 - DNA, 20 bp, synthetic construct
  misc_feature 1..20: note = chemically synthesized
  source 1..20: mol_type = other DNA
cctgaagggataccaacccg

SEQ ID NO: 1734 - DNA, 20 bp, synthetic construct
  misc_feature 1..20: note = chemically synthesized
  source 1..20: mol_type = other DNA
ctgaagggataccaacccgc

SEQ ID NO: 1735 - DNA, 20 bp, synthetic construct
  misc_feature 1..20: note = chemically synthesized
  source 1..20: mol_type = other DNA
tgaagggataccaacccgcg

SEQ ID NO: 1736 - DNA, 20 bp, synthetic construct
  misc_feature 1..20: note = chemically synthesized
  source 1..20: mol_type = other DNA
gggataccaacccgcggggt

SEQ ID NO: 1737 - DNA, 20 bp, synthetic construct
  misc_feature 1..20: note = chemically synthesized
  source 1..20: mol_type = other DNA
ggataccaacccgcggggtc

SEQ ID NO: 1738 - DNA, 20 bp, synthetic construct
  misc_feature 1..20: note = chemically synthesized
  source 1..20: mol_type = other DNA
gataccaacccgcggggtca

SEQ ID NO: 1739 - DNA, 20 bp, synthetic construct
  misc_feature 1..20: note = chemically synthesized
  source 1..20: mol_type = other DNA
ataccaacccgcggggtcag

SEQ ID NO: 1740 - DNA, 20 bp, synthetic construct
  misc_feature 1..20: note = chemically synthesized
  source 1..20: mol_type = other DNA
gacttccgtgttcgctttct

SEQ ID NO: 1741 - DNA, 20 bp, synthetic construct
  misc_feature 1..20: note = chemically synthesized
  source 1..20: mol_type = other DNA
ttccgtgttcgctttctaag

SEQ ID NO: 1742 - DNA, 20 bp, synthetic construct
  misc_feature 1..20: note = chemically synthesized
  source 1..20: mol_type = other DNA
taagtagattcttaatccat

SEQ ID NO: 1743 - DNA, 20 bp, synthetic construct
  misc_feature 1..20: note = chemically synthesized
  source 1..20: mol_type = other DNA
gagtgttctgtgcgtgttgc

SEQ ID NO: 1744 - DNA, 20 bp, synthetic construct
  misc_feature 1..20: note = chemically synthesized
  source 1..20: mol_type = other DNA
gtgttctgtgcgtgttgcaa

SEQ ID NO: 1745 - DNA, 20 bp, synthetic construct
  misc_feature 1..20: note = chemically synthesized
  source 1..20: mol_type = other DNA
ttgcaagagaaaccatgcac

SEQ ID NO: 1746 - DNA, 20 bp, synthetic construct
  misc_feature 1..20: note = chemically synthesized
  source 1..20: mol_type = other DNA
agaaaccatgcactggtgaa

SEQ ID NO: 1747 - DNA, 20 bp, synthetic construct
  misc_feature 1..20: note = chemically synthesized
  source 1..20: mol_type = other DNA
actggtgaatggctgtttgc

SEQ ID NO: 1748 - DNA, 20 bp, synthetic construct
  misc_feature 1..20: note = chemically synthesized
  source 1..20: mol_type = other DNA
gtttgcaagttgtacatgtg

SEQ ID NO: 1749 - DNA, 20 bp, synthetic construct
  misc_feature 1..20: note = chemically synthesized
  source 1..20: mol_type = other DNA
agttgtacatgtgtagctgc

SEQ ID NO: 1750 - DNA, 20 bp, synthetic construct
  misc_feature 1..20: note = chemically synthesized
  source 1..20: mol_type = other DNA
gttgtacatgtgtagctgct

SEQ ID NO: 1751 - DNA, 20 bp, synthetic construct
  misc_feature 1..20: note = chemically synthesized
  source 1..20: mol_type = other DNA
aacatcaatgtttaatcact

SEQ ID NO: 1752 - DNA, 20 bp, synthetic construct
  misc_feature 1..20: note = chemically synthesized
  source 1..20: mol_type = other DNA
acatcaatgtttaatcactg

SEQ ID NO: 1753 - DNA, 20 bp, synthetic construct
  misc_feature 1..20: note = chemically synthesized
  source 1..20: mol_type = other DNA
tcaatgtttaatcactgagg

SEQ ID NO: 1754 - DNA, 20 bp, synthetic construct
  misc_feature 1..20: note = chemically synthesized
  source 1..20: mol_type = other DNA
caatgtttaatcactgaggc

SEQ ID NO: 1755 - DNA, 20 bp, synthetic construct
  misc_feature 1..20: note = chemically synthesized
  source 1..20: mol_type = other DNA
ttaatcactgaggcgggcat

SEQ ID NO: 1756 - DNA, 20 bp, synthetic construct
  misc_feature 1..20: note = chemically synthesized
  source 1..20: mol_type = other DNA
gcttatttatgttccacctc

SEQ ID NO: 1757 - DNA, 20 bp, synthetic construct
  misc_feature 1..20: note = chemically synthesized
  source 1..20: mol_type = other DNA
tgcccccacccctcaacccc

SEQ ID NO: 1758 - DNA, 20 bp, synthetic construct
  misc_feature 1..20: note = chemically synthesized
  source 1..20: mol_type = other DNA
gcccccacccctcaacccca

SEQ ID NO: 1759 - DNA, 20 bp, synthetic construct
  misc_feature 1..20: note = chemically synthesized
  source 1..20: mol_type = other DNA
acccctcaaccccaaggcct

SEQ ID NO: 1760 - DNA, 20 bp, synthetic construct
  misc_feature 1..20: note = chemically synthesized
  source 1..20: mol_type = other DNA
actgacctaccccctgtgcc

SEQ ID NO: 1761 - DNA, 20 bp, synthetic construct
  misc_feature 1..20: note = chemically synthesized
  source 1..20: mol_type = other DNA
cccctgtgcctggcacgtct

SEQ ID NO: 1762 - DNA, 20 bp, synthetic construct
  misc_feature 1..20: note = chemically synthesized
  source 1..20: mol_type = other DNA
gtgcctggcacgtctgagca

SEQ ID NO: 1763 - DNA, 20 bp, synthetic construct
  misc_feature 1..20: note = chemically synthesized
  source 1..20: mol_type = other DNA
tgcctggcacgtctgagcat

SEQ ID NO: 1764 - DNA, 20 bp, synthetic construct
  misc_feature 1..20: note = chemically synthesized
  source 1..20: mol_type = other DNA
cacgtctgagcatgggtacc

SEQ ID NO: 1765 - DNA, 20 bp, synthetic construct
  misc_feature 1..20: note = chemically synthesized
  source 1..20: mol_type = other DNA
catgggtacccagtaaatat

SEQ ID NO: 1766 - DNA, 20 bp, synthetic construct
  misc_feature 1..20: note = chemically synthesized
  source 1..20: mol_type = other DNA
gatcttcctgccattaaact

SEQ ID NO: 1767 - DNA, 20 bp, synthetic construct
  misc_feature 1..20: note = chemically synthesized
  source 1..20: mol_type = other DNA
cctgccattaaactcagttc

SEQ ID NO: 1768 - DNA, 20 bp, synthetic construct
  misc_feature 1..20: note = chemically synthesized
  source 1..20: mol_type = other DNA
aattttatatccaatcccca

SEQ ID NO: 1769 - DNA, 20 bp, synthetic construct
  misc_feature 1..20: note = chemically synthesized
  source 1..20: mol_type = other DNA
tttatatccaatccccaaag

SEQ ID NO: 1770 - DNA, 20 bp, synthetic construct
  misc_feature 1..20: note = chemically synthesized
  source 1..20: mol_type = other DNA
caaagcagaaaaatcctgac

SEQ ID NO: 1771 - DNA, 20 bp, synthetic construct
  misc_feature 1..20: note = chemically synthesized
  source 1..20: mol_type = other DNA
agaaaaatcctgaccagttc

SEQ ID NO: 1772 - DNA, 20 bp, synthetic construct
  misc_feature 1..20: note = chemically synthesized
  source 1..20: mol_type = other DNA
atcctgaccagttctggctt

SEQ ID NO: 1773 - DNA, 20 bp, synthetic construct
  misc_feature 1..20: note = chemically synthesized
  source 1..20: mol_type = other DNA
tcctgaccagttctggcttg

SEQ ID NO: 1774 - DNA, 20 bp, synthetic construct
  misc_feature 1..20: note = chemically synthesized
  source 1..20: mol_type = other DNA
ccagttctggcttgaggatg

SEQ ID NO: 1775 - DNA, 20 bp, synthetic construct
  misc_feature 1..20: note = chemically synthesized
  source 1..20: mol_type = other DNA
cagttctggcttgaggatga

SEQ ID NO: 1776 - DNA, 20 bp, synthetic construct
  misc_feature 1..20: note = chemically synthesized
  source 1..20: mol_type = other DNA
ggatgaaggtccctacattc

SEQ ID NO: 1777 - DNA, 20 bp, synthetic construct
  misc_feature 1..20: note = chemically synthesized
  source 1..20: mol_type = other DNA
gatgaaggtccctacattct

SEQ ID NO: 1778 - DNA, 20 bp, synthetic construct
  misc_feature 1..20: note = chemically synthesized
  source 1..20: mol_type = other DNA
caaatgtcttctaaactttc

SEQ ID NO: 1779 - DNA, 20 bp, synthetic construct
  misc_feature 1..20: note = chemically synthesized
  source 1..20: mol_type = other DNA
tctaaactttccagttccat

SEQ ID NO: 1780 - DNA, 20 bp, synthetic construct
  misc_feature 1..20: note = chemically synthesized
  source 1..20: mol_type = other DNA
ctttccagttccatcagctg

SEQ ID NO: 1781 - DNA, 20 bp, synthetic construct
  misc_feature 1..20: note = chemically synthesized
  source 1..20: mol_type = other DNA
cagttccatcagctgtagtt

SEQ ID NO: 1782 - DNA, 20 bp, synthetic construct
  misc_feature 1..20: note = chemically synthesized
  source 1..20: mol_type = other DNA
agttccatcagctgtagttt

SEQ ID NO: 1783 - DNA, 20 bp, synthetic construct
  misc_feature 1..20: note = chemically synthesized
  source 1..20: mol_type = other DNA
gttccatcagctgtagtttg

SEQ ID NO: 1784 - DNA, 20 bp, synthetic construct
  misc_feature 1..20: note = chemically synthesized
  source 1..20: mol_type = other DNA
catcagctgtagtttggggc

SEQ ID NO: 1785 - DNA, 20 bp, synthetic construct
  misc_feature 1..20: note = chemically synthesized
  source 1..20: mol_type = other DNA
gcctctgtttcctccttgtt

SEQ ID NO: 1786 - DNA, 20 bp, synthetic construct
  misc_feature 1..20: note = chemically synthesized
  source 1..20: mol_type = other DNA
ctgtttcctccttgttaagt

SEQ ID NO: 1787 - DNA, 20 bp, synthetic construct
  misc_feature 1..20: note = chemically synthesized
  source 1..20: mol_type = other DNA
tccttgttaagtgagaaact

SEQ ID NO: 1788 - DNA, 20 bp, synthetic construct
  misc_feature 1..20: note = chemically synthesized
  source 1..20: mol_type = other DNA
gttaagtgagaaacttggac

SEQ ID NO: 1789 - DNA, 20 bp, synthetic construct
  misc_feature 1..20: note = chemically synthesized
  source 1..20: mol_type = other DNA
ttaagtgagaaacttggaca

SEQ ID NO: 1790 - DNA, 20 bp, synthetic construct
  misc_feature 1..20: note = chemically synthesized
  source 1..20: mol_type = other DNA
aaacttggacaaggtgaccc

SEQ ID NO: 1791 - DNA, 20 bp, synthetic construct
  misc_feature 1..20: note = chemically synthesized
  source 1..20: mol_type = other DNA
aacttggacaaggtgaccca

SEQ ID NO: 1792 - DNA, 20 bp, synthetic construct
  misc_feature 1..20: note = chemically synthesized
  source 1..20: mol_type = other DNA
ggtgacccaaggaaactttt

SEQ ID NO: 1793 - DNA, 20 bp, synthetic construct
  misc_feature 1..20: note = chemically synthesized
  source 1..20: mol_type = other DNA
ctttttggcttcctaaatcc

SEQ ID NO: 1794 - DNA, 20 bp, synthetic construct
  misc_feature 1..20: note = chemically synthesized
  source 1..20: mol_type = other DNA
cccagctttctattcccccc

SEQ ID NO: 1795 - DNA, 20 bp, synthetic construct
  misc_feature 1..20: note = chemically synthesized
  source 1..20: mol_type = other DNA
ccagctttctattcccccct

SEQ ID NO: 1796 - DNA, 20 bp, synthetic construct
  misc_feature 1..20: note = chemically synthesized
  source 1..20: mol_type = other DNA
ttctattcccccctgggtga

SEQ ID NO: 1797 - DNA, 20 bp, synthetic construct
  misc_feature 1..20: note = chemically synthesized
  source 1..20: mol_type = other DNA
tctattcccccctgggtgac

SEQ ID NO: 1798 - DNA, 20 bp, synthetic construct
  misc_feature 1..20: note = chemically synthesized
  source 1..20: mol_type = other DNA
tgacaggtgaactttctaaa

SEQ ID NO: 1799 - DNA, 20 bp, synthetic construct
  misc_feature 1..20: note = chemically synthesized
  source 1..20: mol_type = other DNA
gacaggtgaactttctaaat

SEQ ID NO: 1800 - DNA, 20 bp, synthetic construct
  misc_feature 1..20: note = chemically synthesized
  source 1..20: mol_type = other DNA
ctaaataggcaaacatttca

SEQ ID NO: 1801 - DNA, 20 bp, synthetic construct
  misc_feature 1..20: note = chemically synthesized
  source 1..20: mol_type = other DNA
aaataggcaaacatttcata

SEQ ID NO: 1802 - DNA, 20 bp, synthetic construct
  misc_feature 1..20: note = chemically synthesized
  source 1..20: mol_type = other DNA
aataggcaaacatttcatag

SEQ ID NO: 1803 - DNA, 20 bp, synthetic construct
  misc_feature 1..20: note = chemically synthesized
  source 1..20: mol_type = other DNA
atttcatagaggtatcaaaa

SEQ ID NO: 1804 - DNA, 20 bp, synthetic construct
  misc_feature 1..20: note = chemically synthesized
  source 1..20: mol_type = other DNA
tttcatagaggtatcaaaaa

SEQ ID NO: 1805 - DNA, 20 bp, synthetic construct
  misc_feature 1..20: note = chemically synthesized
  source 1..20: mol_type = other DNA
ttcatagaggtatcaaaaaa

SEQ ID NO: 1806 - DNA, 20 bp, synthetic construct
  misc_feature 1..20: note = chemically synthesized
  source 1..20: mol_type = other DNA
tcatagaggtatcaaaaaag

SEQ ID NO: 1807 - DNA, 20 bp, synthetic construct
  misc_feature 1..20: note = chemically synthesized
  source 1..20: mol_type = other DNA
tagaggtatcaaaaaagggg

SEQ ID NO: 1808 - DNA, 20 bp, synthetic construct
  misc_feature 1..20: note = chemically synthesized
  source 1..20: mol_type = other DNA
aggtatcaaaaaaggggaag

SEQ ID NO: 1809 - DNA, 20 bp, synthetic construct
  misc_feature 1..20: note = chemically synthesized
  source 1..20: mol_type = other DNA
ggtatcaaaaaaggggaaga

SEQ ID NO: 1810 - DNA, 20 bp, synthetic construct
  misc_feature 1..20: note = chemically synthesized
  source 1..20: mol_type = other DNA
caactcactacaatgttcta

SEQ ID NO: 1811 - DNA, 20 bp, synthetic construct
  misc_feature 1..20: note = chemically synthesized
  source 1..20: mol_type = other DNA
tacaatgttctatggcccta

SEQ ID NO: 1812 - DNA, 20 bp, synthetic construct
  misc_feature 1..20: note = chemically synthesized
  source 1..20: mol_type = other DNA
tatggccctaaagatgcttt

SEQ ID NO: 1813 - DNA, 20 bp, synthetic construct
  misc_feature 1..20: note = chemically synthesized
  source 1..20: mol_type = other DNA
cctaaagatgctttcagcat

SEQ ID NO: 1814 - DNA, 20 bp, synthetic construct
  misc_feature 1..20: note = chemically synthesized
  source 1..20: mol_type = other DNA
attgttgatattgttaaaat

SEQ ID NO: 1815 - DNA, 20 bp, synthetic construct
  misc_feature 1..20: note = chemically synthesized
  source 1..20: mol_type = other DNA
tgttgatattgttaaaatga

SEQ ID NO: 1816 - DNA, 20 bp, synthetic construct
  misc_feature 1..20: note = chemically synthesized
  source 1..20: mol_type = other DNA
gttgatattgttaaaatgag

SEQ ID NO: 1817 - DNA, 20 bp, synthetic construct
  misc_feature 1..20: note = chemically synthesized
  source 1..20: mol_type = other DNA
ttgatattgttaaaatgaga

SEQ ID NO: 1818 - DNA, 20 bp, synthetic construct
  misc_feature 1..20: note = chemically synthesized
  source 1..20: mol_type = other DNA
gtactcataaaatacttccg

SEQ ID NO: 1819 - DNA, 20 bp, synthetic construct
  misc_feature 1..20: note = chemically synthesized
  source 1..20: mol_type = other DNA
taaaatacttccgtggaaaa

SEQ ID NO: 1820 - DNA, 20 bp, synthetic construct
  misc_feature 1..20: note = chemically synthesized
  source 1..20: mol_type = other DNA
tacttccgtggaaaaaagac

SEQ ID NO: 1821 - DNA, 20 bp, synthetic construct
  misc_feature 1..20: note = chemically synthesized
  source 1..20: mol_type = other DNA
ctagcaacattctcacaccc

SEQ ID NO: 1822 - DNA, 20 bp, synthetic construct
  misc_feature 1..20: note = chemically synthesized
  source 1..20: mol_type = other DNA
cattctcacaccccagactg

SEQ ID NO: 1823 - DNA, 20 bp, synthetic construct
  misc_feature 1..20: note = chemically synthesized
  source 1..20: mol_type = other DNA
attctcacaccccagactgt

SEQ ID NO: 1824 - DNA, 20 bp, synthetic construct
  misc_feature 1..20: note = chemically synthesized
  source 1..20: mol_type = other DNA
tctcacaccccagactgtgg

SEQ ID NO: 1825 - DNA, 20 bp, synthetic construct
  misc_feature 1..20: note = chemically synthesized
  source 1..20: mol_type = other DNA
ctcacaccccagactgtggg

SEQ ID NO: 1826 - DNA, 20 bp, synthetic construct
  misc_feature 1..20: note = chemically synthesized
  source 1..20: mol_type = other DNA
accccagactgtgggaggat

SEQ ID NO: 1827 - DNA, 20 bp, synthetic construct
  misc_feature 1..20: note = chemically synthesized
  source 1..20: mol_type = other DNA
cagactgtgggaggatcagt

SEQ ID NO: 1828 - DNA, 20 bp, synthetic construct
  misc_feature 1..20: note = chemically synthesized
  source 1..20: mol_type = other DNA
ggatcagtgagtcccaattt

SEQ ID NO: 1829 - DNA, 20 bp, synthetic construct
  misc_feature 1..20: note = chemically synthesized
  source 1..20: mol_type = other DNA
tttggttccacaacacccca

SEQ ID NO: 1830 - DNA, 20 bp, synthetic construct
  misc_feature 1..20: note = chemically synthesized
  source 1..20: mol_type = other DNA
ttggttccacaacaccccat

SEQ ID NO: 1831 - DNA, 20 bp, synthetic construct
  misc_feature 1..20: note = chemically synthesized
  source 1..20: mol_type = other DNA
tggttccacaacaccccatg

SEQ ID NO: 1832 - DNA, 20 bp, synthetic construct
  misc_feature 1..20: note = chemically synthesized
  source 1..20: mol_type = other DNA
ggacgtccatttttatctca

SEQ ID NO: 1833 - DNA, 20 bp, synthetic construct
  misc_feature 1..20: note = chemically synthesized
  source 1..20: mol_type = other DNA
agaatgtttaaaaaatctga

SEQ ID NO: 1834 - DNA, 20 bp, synthetic construct
  misc_feature 1..20: note = chemically synthesized
  source 1..20: mol_type = other DNA
tctgaaagaaaaacttcatt

SEQ ID NO: 1835 - DNA, 20 bp, synthetic construct
  misc_feature 1..20: note = chemically synthesized
  source 1..20: mol_type = other DNA
aaaacttcattcagatttaa

SEQ ID NO: 1836 - DNA, 20 bp, synthetic construct
  misc_feature 1..20: note = chemically synthesized
  source 1..20: mol_type = other DNA
cttcattcagatttaacgga

SEQ ID NO: 1837 - DNA, 20 bp, synthetic construct
  misc_feature 1..20: note = chemically synthesized
  source 1..20: mol_type = other DNA
ttcattcagatttaacggat

SEQ ID NO: 1838 - DNA, 20 bp, synthetic construct
  misc_feature 1..20: note = chemically synthesized
  source 1..20: mol_type = other DNA
gataggctgtatccaatctt

SEQ ID NO: 1839 - DNA, 20 bp, synthetic construct
  misc_feature 1..20: note = chemically synthesized
  source 1..20: mol_type = other DNA
ataggctgtatccaatcttt

SEQ ID NO: 1840 - DNA, 20 bp, synthetic construct
  misc_feature 1..20: note = chemically synthesized
  source 1..20: mol_type = other DNA
aggctgtatccaatctttag

SEQ ID NO: 1841 - DNA, 20 bp, synthetic construct
  misc_feature 1..20: note = chemically synthesized
  source 1..20: mol_type = other DNA
aatctttaggagttgtcccc

SEQ ID NO: 1842 - DNA, 20 bp, synthetic construct
  misc_feature 1..20: note = chemically synthesized
  source 1..20: mol_type = other DNA
tttaggagttgtcccccggt

SEQ ID NO: 1843 - DNA, 20 bp, synthetic construct
  misc_feature 1..20: note = chemically synthesized
  source 1..20: mol_type = other DNA
tcccccggtcagacaaatgc

SEQ ID NO: 1844 - DNA, 20 bp, synthetic construct
  misc_feature 1..20: note = chemically synthesized
  source 1..20: mol_type = other DNA
cggtcagacaaatgcaagtc

SEQ ID NO: 1845 - DNA, 20 bp, synthetic construct
  misc_feature 1..20: note = chemically synthesized
  source 1..20: mol_type = other DNA
agacaaatgcaagtctggaa

SEQ ID NO: 1846 - DNA, 20 bp, synthetic construct
  misc_feature 1..20: note = chemically synthesized
  source 1..20: mol_type = other DNA
aaatgcaagtctggaaaagt

SEQ ID NO: 1847 - DNA, 20 bp, synthetic construct
  misc_feature 1..20: note = chemically synthesized
  source 1..20: mol_type = other DNA
aatgcaagtctggaaaagtt

SEQ ID NO: 1848 - DNA, 20 bp, synthetic construct
  misc_feature 1..20: note = chemically synthesized
  source 1..20: mol_type = other DNA
tgcaagtctggaaaagttag

SEQ ID NO: 1849 - DNA, 20 bp, synthetic construct
  misc_feature 1..20: note = chemically synthesized
  source 1..20: mol_type = other DNA
gcaagtctggaaaagttagg

SEQ ID NO: 1850 - DNA, 20 bp, synthetic construct
  misc_feature 1..20: note = chemically synthesized
  source 1..20: mol_type = other DNA
aagtctggaaaagttaggag

SEQ ID NO: 1851 - DNA, 20 bp, synthetic construct
  misc_feature 1..20: note = chemically synthesized
  source 1..20: mol_type = other DNA
tctggaaaagttaggaggag

SEQ ID NO: 1852 - DNA, 20 bp, synthetic construct
  misc_feature 1..20: note = chemically synthesized
  source 1..20: mol_type = other DNA
gaaaagttaggaggagtggc

SEQ ID NO: 1853 - DNA, 20 bp, synthetic construct
  misc_feature 1..20: note = chemically synthesized
  source 1..20: mol_type = other DNA
ggagtggctggtgccgactt

SEQ ID NO: 1854 - DNA, 20 bp, synthetic construct
  misc_feature 1..20: note = chemically synthesized
  source 1..20: mol_type = other DNA
gtggctggtgccgacttaag

SEQ ID NO: 1855 - DNA, 20 bp, synthetic construct
  misc_feature 1..20: note = chemically synthesized
  source 1..20: mol_type = other DNA
ggtgccgacttaagcagaca

SEQ ID NO: 1856 - DNA, 20 bp, synthetic construct
  misc_feature 1..20: note = chemically synthesized
  source 1..20: mol_type = other DNA
cttaagcagacacagcatcc

SEQ ID NO: 1857 - DNA, 20 bp, synthetic construct
  misc_feature 1..20: note = chemically synthesized
  source 1..20: mol_type = other DNA
cagacacagcatcctagttt

SEQ ID NO: 1858 - DNA, 20 bp, synthetic construct
  misc_feature 1..20: note = chemically synthesized
  source 1..20: mol_type = other DNA
agacacagcatcctagttta

SEQ ID NO: 1859 - DNA, 20 bp, synthetic construct
  misc_feature 1..20: note = chemically synthesized
  source 1..20: mol_type = other DNA
cagcatcctagtttaaggaa

SEQ ID NO: 1860 - DNA, 20 bp, synthetic construct
  misc_feature 1..20: note = chemically synthesized
  source 1..20: mol_type = other DNA
agtttaaggaacagttaaaa

SEQ ID NO: 1861 - DNA, 20 bp, synthetic construct
  misc_feature 1..20: note = chemically synthesized
  source 1..20: mol_type = other DNA
taaggaacagttaaaacagc

SEQ ID NO: 1862 - DNA, 20 bp, synthetic construct
  misc_feature 1..20: note = chemically synthesized
  source 1..20: mol_type = other DNA
taaaacagccagcgccatga

SEQ ID NO: 1863 - DNA, 20 bp, synthetic construct
  misc_feature 1..20: note = chemically synthesized
  source 1..20: mol_type = other DNA
aaaacagccagcgccatgac

SEQ ID NO: 1864 - DNA, 20 bp, synthetic construct
  misc_feature 1..20: note = chemically synthesized
  source 1..20: mol_type = other DNA
acagccagcgccatgacagg

SEQ ID NO: 1865 - DNA, 20 bp, synthetic construct
  misc_feature 1..20: note = chemically synthesized
  source 1..20: mol_type = other DNA
gccagcgccatgacaggcag

SEQ ID NO: 1866 - DNA, 20 bp, synthetic construct
  misc_feature 1..20: note = chemically synthesized
  source 1..20: mol_type = other DNA
ccagcgccatgacaggcagc

SEQ ID NO: 1867 - DNA, 20 bp, synthetic construct
  misc_feature 1..20: note = chemically synthesized
  source 1..20: mol_type = other DNA
gccatgacaggcagcaggct

SEQ ID NO: 1868 - DNA, 20 bp, synthetic construct
  misc_feature 1..20: note = chemically synthesized
  source 1..20: mol_type = other DNA
atcctcctcctcattgtttt

SEQ ID NO: 1869 - DNA, 20 bp, synthetic construct
  misc_feature 1..20: note = chemically synthesized
  source 1..20: mol_type = other DNA
cctcctcctcattgttttga

SEQ ID NO: 1870 - DNA, 20 bp, synthetic construct
  misc_feature 1..20: note = chemically synthesized
  source 1..20: mol_type = other DNA
ctcctcctcattgttttgag

SEQ ID NO: 1871 - DNA, 20 bp, synthetic construct
  misc_feature 1..20: note = chemically synthesized
  source 1..20: mol_type = other DNA
tatacaacatcctgcgccct

SEQ ID NO: 1872 - DNA, 20 bp, synthetic construct
  misc_feature 1..20: note = chemically synthesized
  source 1..20: mol_type = other DNA
caacatcctgcgccctcggc

SEQ ID NO: 1873 - DNA, 20 bp, synthetic construct
  misc_feature 1..20: note = chemically synthesized
  source 1..20: mol_type = other DNA
aacatcctgcgccctcggct

SEQ ID NO: 1874 - DNA, 20 bp, synthetic construct
  misc_feature 1..20: note = chemically synthesized
  source 1..20: mol_type = other DNA
ctgcgccctcggctgggact

SEQ ID NO: 1875 - DNA, 20 bp, synthetic construct
  misc_feature 1..20: note = chemically synthesized
  source 1..20: mol_type = other DNA
cctcggctgggactcagctc

SEQ ID NO: 1876 - DNA, 20 bp, synthetic construct
  misc_feature 1..20: note = chemically synthesized
  source 1..20: mol_type = other DNA
gctgggactcagctccagtt

SEQ ID NO: 1877 - DNA, 20 bp, synthetic construct
  misc_feature 1..20: note = chemically synthesized
  source 1..20: mol_type = other DNA
ggactcagctccagttgaga

SEQ ID NO: 1878 - DNA, 20 bp, synthetic construct
  misc_feature 1..20: note = chemically synthesized
  source 1..20: mol_type = other DNA
agctccagttgagaaagaaa

SEQ ID NO: 1879 - DNA, 20 bp, synthetic construct
  misc_feature 1..20: note = chemically synthesized
  source 1..20: mol_type = other DNA
ccagttgagaaagaaacaga

SEQ ID NO: 1880 - DNA, 20 bp, synthetic construct
  misc_feature 1..20: note = chemically synthesized
  source 1..20: mol_type = other DNA
gagaaagaaacagaaagata

SEQ ID NO: 1881 - DNA, 20 bp, synthetic construct
  misc_feature 1..20: note = chemically synthesized
  source 1..20: mol_type = other DNA
agaaacagaaagatacagtt

SEQ ID NO: 1882 - DNA, 20 bp, synthetic construct
  misc_feature 1..20: note = chemically synthesized
  source 1..20: mol_type = other DNA
acagaaagatacagttcagc

SEQ ID NO: 1883 - DNA, 20 bp, synthetic construct
  misc_feature 1..20: note = chemically synthesized
  source 1..20: mol_type = other DNA
acagttcagctagtcaactc

SEQ ID NO: 1884 - DNA, 20 bp, synthetic construct
  misc_feature 1..20: note = chemically synthesized
  source 1..20: mol_type = other DNA
ttcagctagtcaactctggc

SEQ ID NO: 1885 - DNA, 20 bp, synthetic construct
  misc_feature 1..20: note = chemically synthesized
  source 1..20: mol_type = other DNA
agctagtcaactctggccag

SEQ ID NO: 1886 - DNA, 20 bp, synthetic construct
  misc_feature 1..20: note = chemically synthesized
  source 1..20: mol_type = other DNA
gtcaactctggccagtagcc

SEQ ID NO: 1887 - DNA, 20 bp, synthetic construct
  misc_feature 1..20: note = chemically synthesized
  source 1..20: mol_type = other DNA
tggccagtagccaagccgtc

SEQ ID NO: 1888 - DNA, 20 bp, synthetic construct
  misc_feature 1..20: note = chemically synthesized
  source 1..20: mol_type = other DNA
gccagtagccaagccgtctg

SEQ ID NO: 1889 - DNA, 20 bp, synthetic construct
  misc_feature 1..20: note = chemically synthesized
  source 1..20: mol_type = other DNA
cagtagccaagccgtctgga

SEQ ID NO: 1890 - DNA, 20 bp, synthetic construct
  misc_feature 1..20: note = chemically synthesized
  source 1..20: mol_type = other DNA
agtagccaagccgtctggag

SEQ ID NO: 1891 - DNA, 20 bp, synthetic construct
  misc_feature 1..20: note = chemically synthesized
  source 1..20: mol_type = other DNA
gtagccaagccgtctggaga

SEQ ID NO: 1892 - DNA, 20 bp, synthetic construct
  misc_feature 1..20: note = chemically synthesized
  source 1..20: mol_type = other DNA
tagccaagccgtctggagag

SEQ ID NO: 1893 - DNA, 20 bp, synthetic construct
  misc_feature 1..20: note = chemically synthesized
  source 1..20: mol_type = other DNA
tctggagaggggccctgctt

SEQ ID NO: 1894 - DNA, 20 bp, synthetic construct
  misc_feature 1..20: note = chemically synthesized
  source 1..20: mol_type = other DNA
acattatttcccttgctgaa

SEQ ID NO: 1895 - DNA, 20 bp, synthetic construct
  misc_feature 1..20: note = chemically synthesized
  source 1..20: mol_type = other DNA
tcccttgctgaaaagaaccc

SEQ ID NO: 1896 - DNA, 20 bp, synthetic construct
  misc_feature 1..20: note = chemically synthesized
  source 1..20: mol_type = other DNA
ccttgctgaaaagaacccaa

SEQ ID NO: 1897 - DNA, 20 bp, synthetic construct
  misc_feature 1..20: note = chemically synthesized
  source 1..20: mol_type = other DNA
tgctgaaaagaacccaagag

SEQ ID NO: 1898 - DNA, 20 bp, synthetic construct
  misc_feature 1..20: note = chemically synthesized
  source 1..20: mol_type = other DNA
aagagtggtaaatgccactt

SEQ ID NO: 1899 - DNA, 20 bp, synthetic construct
  misc_feature 1..20: note = chemically synthesized
  source 1..20: mol_type = other DNA
tggtaaatgccactttggca

SEQ ID NO: 1900 - DNA, 20 bp, synthetic construct
  misc_feature 1..20: note = chemically synthesized
  source 1..20: mol_type = other DNA
taaatgccactttggcaaag

SEQ ID NO: 1901 - DNA, 20 bp, synthetic construct
  misc_feature 1..20: note = chemically synthesized
  source 1..20: mol_type = other DNA
aaatgccactttggcaaaga

SEQ ID NO: 1902 - DNA, 20 bp, synthetic construct
  misc_feature 1..20: note = chemically synthesized
  source 1..20: mol_type = other DNA
aatgccactttggcaaagaa

SEQ ID NO: 1903 - DNA, 20 bp, synthetic construct
  misc_feature 1..20: note = chemically synthesized
  source 1..20: mol_type = other DNA
ccactttggcaaagaagggc

SEQ ID NO: 1904 - DNA, 20 bp, synthetic construct
  misc_feature 1..20: note = chemically synthesized
  source 1..20: mol_type = other DNA
acttcacaaaatatttcatt

SEQ ID NO: 1905 - DNA, 20 bp, synthetic construct
  misc_feature 1..20: note = chemically synthesized
  source 1..20: mol_type = other DNA
cttcacaaaatatttcattt

SEQ ID NO: 1906 - DNA, 20 bp, synthetic construct
  misc_feature 1..20: note = chemically synthesized
  source 1..20: mol_type = other DNA
ttcacaaaatatttcatttg

SEQ ID NO: 1907 - DNA, 20 bp, synthetic construct
  misc_feature 1..20: note = chemically synthesized
  source 1..20: mol_type = other DNA
cacaaaatatttcatttggg

SEQ ID NO: 1908 - DNA, 20 bp, synthetic construct
  misc_feature 1..20: note = chemically synthesized
  source 1..20: mol_type = other DNA
aaatatttcatttggggaga

SEQ ID NO: 1909 - DNA, 20 bp, synthetic construct
  misc_feature 1..20: note = chemically synthesized
  source 1..20: mol_type = other DNA
atggctaaattaaatatata

SEQ ID NO: 1910 - DNA, 20 bp, synthetic construct
  misc_feature 1..20: note = chemically synthesized
  source 1..20: mol_type = other DNA
tggctaaattaaatatatat

SEQ ID NO: 1911 - DNA, 20 bp, synthetic construct
  misc_feature 1..20: note = chemically synthesized
  source 1..20: mol_type = other DNA
ggctaaattaaatatatatg

SEQ ID NO: 1912 - DNA, 20 bp, synthetic construct
  misc_feature 1..20: note = chemically synthesized
  source 1..20: mol_type = other DNA
ctaaattaaatatatatggg

SEQ ID NO: 1913 - DNA, 20 bp, synthetic construct
  misc_feature 1..20: note = chemically synthesized
  source 1..20: mol_type = other DNA
attaaatatatatggggaga

SEQ ID NO: 1914 - DNA, 20 bp, synthetic construct
  misc_feature 1..20: note = chemically synthesized
  source 1..20: mol_type = other DNA
acattaaatatatatatata

SEQ ID NO: 1915 - DNA, 20 bp, synthetic construct
  misc_feature 1..20: note = chemically synthesized
  source 1..20: mol_type = other DNA
tatatggaataactgaccaa

SEQ ID NO: 1916 - DNA, 20 bp, synthetic construct
  misc_feature 1..20: note = chemically synthesized
  source 1..20: mol_type = other DNA
ataactgaccaacagtttac

SEQ ID NO: 1917 - DNA, 20 bp, synthetic construct
  misc_feature 1..20: note = chemically synthesized
  source 1..20: mol_type = other DNA
tagtcaactgcaacattaaa

SEQ ID NO: 1918 - DNA, 20 bp, synthetic construct
  misc_feature 1..20: note = chemically synthesized
  source 1..20: mol_type = other DNA
agtcaactgcaacattaaaa

SEQ ID NO: 1919 - DNA, 20 bp, synthetic construct
  misc_feature 1..20: note = chemically synthesized
  source 1..20: mol_type = other DNA
gtcaactgcaacattaaaaa

SEQ ID NO: 1920 - DNA, 20 bp, synthetic construct
  misc_feature 1..20: note = chemically synthesized
  source 1..20: mol_type = other DNA
aactgcaacattaaaaaggg

SEQ ID NO: 1921 - DNA, 20 bp, synthetic construct
  misc_feature 1..20: note = chemically synthesized
  source 1..20: mol_type = other DNA
tgcaacattaaaaagggcag

SEQ ID NO: 1922 - DNA, 20 bp, synthetic construct
  misc_feature 1..20: note = chemically synthesized
  source 1..20: mol_type = other DNA
attaaaaagggcagaagtaa

SEQ ID NO: 1923 - DNA, 20 bp, synthetic construct
  misc_feature 1..20: note = chemically synthesized
  source 1..20: mol_type = other DNA
aaaaagggcagaagtaatgg

SEQ ID NO: 1924 - DNA, 20 bp, synthetic construct
  misc_feature 1..20: note = chemically synthesized
  source 1..20: mol_type = other DNA
ggcagaagtaatggtagcca

SEQ ID NO: 1925 - DNA, 20 bp, synthetic construct
  misc_feature 1..20: note = chemically synthesized
  source 1..20: mol_type = other DNA
gcagaagtaatggtagccaa

SEQ ID NO: 1926 - DNA, 20 bp, synthetic construct
  misc_feature 1..20: note = chemically synthesized
  source 1..20: mol_type = other DNA
agtaatggtagccaaaggac

SEQ ID NO: 1927 - DNA, 20 bp, synthetic construct
  misc_feature 1..20: note = chemically synthesized
  source 1..20: mol_type = other DNA
gtaatggtagccaaaggacg

SEQ ID NO: 1928 - DNA, 20 bp, synthetic construct
  misc_feature 1..20: note = chemically synthesized
  source 1..20: mol_type = other DNA
ggtagccaaaggacgaggat

SEQ ID NO: 1929 - DNA, 20 bp, synthetic construct
  misc_feature 1..20: note = chemically synthesized
  source 1..20: mol_type = other DNA
atgagaaaaacaaaacttcc

SEQ ID NO: 1930 - DNA, 20 bp, synthetic construct
  misc_feature 1..20: note = chemically synthesized
  source 1..20: mol_type = other DNA
gagaaaaacaaaacttccca

SEQ ID NO: 1931 - DNA, 20 bp, synthetic construct
  misc_feature 1..20: note = chemically synthesized
  source 1..20: mol_type = other DNA
cccagagattctgaaaaaaa

SEQ ID NO: 1932 - DNA, 20 bp, synthetic construct
  misc_feature 1..20: note = chemically synthesized
  source 1..20: mol_type = other DNA
aaaagccttaaaatataact

SEQ ID NO: 1933 - DNA, 20 bp, synthetic construct
  misc_feature 1..20: note = chemically synthesized
  source 1..20: mol_type = other DNA
aacttttctccttcttttaa

SEQ ID NO: 1934 - DNA, 20 bp, synthetic construct
  misc_feature 1..20: note = chemically synthesized
  source 1..20: mol_type = other DNA
ttttctccttcttttaaaag

SEQ ID NO: 1935 - DNA, 20 bp, synthetic construct
  misc_feature 1..20: note = chemically synthesized
  source 1..20: mol_type = other DNA
tttctccttcttttaaaaga

SEQ ID NO: 1936 - DNA, 20 bp, synthetic construct
  misc_feature 1..20: note = chemically synthesized
  source 1..20: mol_type = other DNA
ttctccttcttttaaaagaa

SEQ ID NO: 1937 - DNA, 20 bp, synthetic construct
  misc_feature 1..20: note = chemically synthesized
  source 1..20: mol_type = other DNA
tcttttaaaagaagggctgc

SEQ ID NO: 1938 - DNA, 20 bp, synthetic construct
  misc_feature 1..20: note = chemically synthesized
  source 1..20: mol_type = other DNA
ttttaaaagaagggctgcaa

SEQ ID NO: 1939 - DNA, 20 bp, synthetic construct
  misc_feature 1..20: note = chemically synthesized
  source 1..20: mol_type = other DNA
aagggctgcaagagttcttt

SEQ ID NO: 1940 - DNA, 20 bp, synthetic construct
  misc_feature 1..20: note = chemically synthesized
  source 1..20: mol_type = other DNA
agggctgcaagagttcttta

SEQ ID NO: 1941 - DNA, 20 bp, synthetic construct
  misc_feature 1..20: note = chemically synthesized
  source 1..20: mol_type = other DNA
gcaagagttctttaaggcca

SEQ ID NO: 1942 - DNA, 20 bp, synthetic construct
  misc_feature 1..20: note = chemically synthesized
  source 1..20: mol_type = other DNA
gagttctttaaggccacagc

SEQ ID NO: 1943 - DNA, 20 bp, synthetic construct
  misc_feature 1..20: note = chemically synthesized
  source 1..20: mol_type = other DNA
aggccacagctagtatttgt

SEQ ID NO: 1944 - DNA, 20 bp, synthetic construct
  misc_feature 1..20: note = chemically synthesized
  source 1..20: mol_type = other DNA
gtatttgtcagtaactttct

SEQ ID NO: 1945 - DNA, 20 bp, synthetic construct
  misc_feature 1..20: note = chemically synthesized
  source 1..20: mol_type = other DNA
tttgtcagtaactttctaag

SEQ ID NO: 1946 - DNA, 20 bp, synthetic construct
  misc_feature 1..20: note = chemically synthesized
  source 1..20: mol_type = other DNA
ttgtcagtaactttctaaga

SEQ ID NO: 1947 - DNA, 20 bp, synthetic construct
  misc_feature 1..20: note = chemically synthesized
  source 1..20: mol_type = other DNA
gaaaaaaaaaaaaaatctac

SEQ ID NO: 1948 - DNA, 20 bp, synthetic construct
  misc_feature 1..20: note = chemically synthesized
  source 1..20: mol_type = other DNA
aaaaaaaaaaaaaatctacc

SEQ ID NO: 1949 - DNA, 20 bp, synthetic construct
  misc_feature 1..20: note = chemically synthesized
  source 1..20: mol_type = other DNA
aaaaaaaaaaaaatctacca

SEQ ID NO: 1950 - DNA, 20 bp, synthetic construct
  misc_feature 1..20: note = chemically synthesized
  source 1..20: mol_type = other DNA
aaaaaaaaaaatctaccagg

SEQ ID NO: 1951 - DNA, 20 bp, synthetic construct
  misc_feature 1..20: note = chemically synthesized
  source 1..20: mol_type = other DNA
aaaaaaaaaatctaccaggg

SEQ ID NO: 1952 - DNA, 20 bp, synthetic construct
  misc_feature 1..20: note = chemically synthesized
  source 1..20: mol_type = other DNA
aaaaatctaccagggaggtt

SEQ ID NO: 1953 - DNA, 20 bp, synthetic construct
  misc_feature 1..20: note = chemically synthesized
  source 1..20: mol_type = other DNA
aaatctaccagggaggttaa

SEQ ID NO: 1954 - DNA, 20 bp, synthetic construct
  misc_feature 1..20: note = chemically synthesized
  source 1..20: mol_type = other DNA
ctaccagggaggttaagagt

SEQ ID NO: 1955 - DNA, 20 bp, synthetic construct
  misc_feature 1..20: note = chemically synthesized
  source 1..20: mol_type = other DNA
gggaggttaagagtgagaat

SEQ ID NO: 1956 - DNA, 20 bp, synthetic construct
  misc_feature 1..20: note = chemically synthesized
  source 1..20: mol_type = other DNA
ggaggttaagagtgagaatg

SEQ ID NO: 1957 - DNA, 20 bp, synthetic construct
  misc_feature 1..20: note = chemically synthesized
  source 1..20: mol_type = other DNA
aattatatgatgcctccatt

SEQ ID NO: 1958 - DNA, 20 bp, synthetic construct
  misc_feature 1..20: note = chemically synthesized
  source 1..20: mol_type = other DNA
atatgatgcctccatttagc

SEQ ID NO: 1959 - DNA, 20 bp, synthetic construct
  misc_feature 1..20: note = chemically synthesized
  source 1..20: mol_type = other DNA
gatgcctccatttagcaagt

SEQ ID NO: 1960 - DNA, 20 bp, synthetic construct
  misc_feature 1..20: note = chemically synthesized
  source 1..20: mol_type = other DNA
cctccatttagcaagtcaga

SEQ ID NO: 1961 - DNA, 20 bp, synthetic construct
  misc_feature 1..20: note = chemically synthesized
  source 1..20: mol_type = other DNA
atttagcaagtcagaaagaa

SEQ ID NO: 1962 - DNA, 20 bp, synthetic construct
  misc_feature 1..20: note = chemically synthesized
  source 1..20: mol_type = other DNA
agcaagtcagaaagaaaagc

SEQ ID NO: 1963 - DNA, 20 bp, synthetic construct
  misc_feature 1..20: note = chemically synthesized
  source 1..20: mol_type = other DNA
aagtcagaaagaaaagccgg

SEQ ID NO: 1964 - DNA, 20 bp, synthetic construct
  misc_feature 1..20: note = chemically synthesized
  source 1..20: mol_type = other DNA
agtcagaaagaaaagccggc

SEQ ID NO: 1965 - DNA, 20 bp, synthetic construct
  misc_feature 1..20: note = chemically synthesized
  source 1..20: mol_type = other DNA
gtcagaaagaaaagccggca

SEQ ID NO: 1966 - DNA, 20 bp, synthetic construct
  misc_feature 1..20: note = chemically synthesized
  source 1..20: mol_type = other DNA
aaaagccggcagggtcttct

SEQ ID NO: 1967 - DNA, 20 bp, synthetic construct
  misc_feature 1..20: note = chemically synthesized
  source 1..20: mol_type = other DNA
aaagccggcagggtcttctc

SEQ ID NO: 1968 - DNA, 20 bp, synthetic construct
  misc_feature 1..20: note = chemically synthesized
  source 1..20: mol_type = other DNA
agccggcagggtcttctcag

SEQ ID NO: 1969 - DNA, 20 bp, synthetic construct
  misc_feature 1..20: note = chemically synthesized
  source 1..20: mol_type = other DNA
tctcaggagcccccaaacac

SEQ ID NO: 1970 - DNA, 20 bp, synthetic construct
  misc_feature 1..20: note = chemically synthesized
  source 1..20: mol_type = other DNA
aaacactggtattccaaaat

SEQ ID NO: 1971 - DNA, 20 bp, synthetic construct
  misc_feature 1..20: note = chemically synthesized
  source 1..20: mol_type = other DNA
actggtattccaaaataagc

SEQ ID NO: 1972 - DNA, 20 bp, synthetic construct
  misc_feature 1..20: note = chemically synthesized
  source 1..20: mol_type = other DNA
aaaataagccagcctcgctc

SEQ ID NO: 1973 - DNA, 20 bp, synthetic construct
  misc_feature 1..20: note = chemically synthesized
  source 1..20: mol_type = other DNA
tcaagcacttgtctaaataa

SEQ ID NO: 1974 - DNA, 20 bp, synthetic construct
  misc_feature 1..20: note = chemically synthesized
  source 1..20: mol_type = other DNA
cactcaatatatctcactcc

SEQ ID NO: 1975 - DNA, 20 bp, synthetic construct
  misc_feature 1..20: note = chemically synthesized
  source 1..20: mol_type = other DNA
actcaatatatctcactcct

SEQ ID NO: 1976 - DNA, 20 bp, synthetic construct
  misc_feature 1..20: note = chemically synthesized
  source 1..20: mol_type = other DNA
cctgggtaaatctcttaaac

SEQ ID NO: 1977 - DNA, 20 bp, synthetic construct
  misc_feature 1..20: note = chemically synthesized
  source 1..20: mol_type = other DNA
gtaaatctcttaaacaagat

SEQ ID NO: 1978 - DNA, 20 bp, synthetic construct
  misc_feature 1..20: note = chemically synthesized
  source 1..20: mol_type = other DNA
atctcttaaacaagattaga

SEQ ID NO: 1979 - DNA, 20 bp, synthetic construct
  misc_feature 1..20: note = chemically synthesized
  source 1..20: mol_type = other DNA
cttaaacaagattagatggt

SEQ ID NO: 1980 - DNA, 20 bp, synthetic construct
  misc_feature 1..20: note = chemically synthesized
  source 1..20: mol_type = other DNA
agatggtaagataccaaaat

SEQ ID NO: 1981 - DNA, 20 bp, synthetic construct
  misc_feature 1..20: note = chemically synthesized
  source 1..20: mol_type = other DNA
gatggtaagataccaaaatt

SEQ ID NO: 1982 - DNA, 20 bp, synthetic construct
  misc_feature 1..20: note = chemically synthesized
  source 1..20: mol_type = other DNA
tttcaaacatttgtctaatg

SEQ ID NO: 1983 - DNA, 20 bp, synthetic construct
  misc_feature 1..20: note = chemically synthesized
  source 1..20: mol_type = other DNA
caaacatttgtctaatgtgg

SEQ ID NO: 1984 - DNA, 20 bp, synthetic construct
  misc_feature 1..20: note = chemically synthesized
  source 1..20: mol_type = other DNA
aaacatttgtctaatgtgga

SEQ ID NO: 1985 - DNA, 20 bp, synthetic construct
  misc_feature 1..20: note = chemically synthesized
  source 1..20: mol_type = other DNA
aacatttgtctaatgtggaa

SEQ ID NO: 1986 - DNA, 20 bp, synthetic construct
  misc_feature 1..20: note = chemically synthesized
  source 1..20: mol_type = other DNA
acatttgtctaatgtggaag

SEQ ID NO: 1987 - DNA, 20 bp, synthetic construct
  misc_feature 1..20: note = chemically synthesized
  source 1..20: mol_type = other DNA
catttgtctaatgtggaagg

SEQ ID NO: 1988 - DNA, 20 bp, synthetic construct
  misc_feature 1..20: note = chemically synthesized
  source 1..20: mol_type = other DNA
ctaatgtggaagggggaaaa

SEQ ID NO: 1989 - DNA, 20 bp, synthetic construct
  misc_feature 1..20: note = chemically synthesized
  source 1..20: mol_type = other DNA
taatgtggaagggggaaaaa

SEQ ID NO: 1990 - DNA, 20 bp, synthetic construct
  misc_feature 1..20: note = chemically synthesized
  source 1..20: mol_type = other DNA
tgtggaagggggaaaaaagg

SEQ ID NO: 1991 - DNA, 20 bp, synthetic construct
  misc_feature 1..20: note = chemically synthesized
  source 1..20: mol_type = other DNA
gaagggggaaaaaaggcaga

SEQ ID NO: 1992 - DNA, 20 bp, synthetic construct
  misc_feature 1..20: note = chemically synthesized
  source 1..20: mol_type = other DNA
aaaaggcagaaagattttga

SEQ ID NO: 1993 - DNA, 20 bp, synthetic construct
  misc_feature 1..20: note = chemically synthesized
  source 1..20: mol_type = other DNA
ttgaaagaaaacgctgacat

SEQ ID NO: 1994 - DNA, 20 bp, synthetic construct
  misc_feature 1..20: note = chemically synthesized
  source 1..20: mol_type = other DNA
ttgtttgcctcctctcttca

SEQ ID NO: 1995 - DNA, 20 bp, synthetic construct
  misc_feature 1..20: note = chemically synthesized
  source 1..20: mol_type = other DNA
tgtttgcctcctctcttcaa

SEQ ID NO: 1996 - DNA, 20 bp, synthetic construct
  misc_feature 1..20: note = chemically synthesized
  source 1..20: mol_type = other DNA
gtttgcctcctctcttcaaa

SEQ ID NO: 1997 - DNA, 20 bp, synthetic construct
  misc_feature 1..20: note = chemically synthesized
  source 1..20: mol_type = other DNA
tctcttcaaagggaaataaa

SEQ ID NO: 1998 - DNA, 20 bp, synthetic construct
  misc_feature 1..20: note = chemically synthesized
  source 1..20: mol_type = other DNA
gggaaataaaaagcttcatt

SEQ ID NO: 1999 - DNA, 20 bp, synthetic construct
  misc_feature 1..20: note = chemically synthesized
  source 1..20: mol_type = other DNA
gttgttgttgaacaataact

SEQ ID NO: 2000 - DNA, 20 bp, synthetic construct
  misc_feature 1..20: note = chemically synthesized
  source 1..20: mol_type = other DNA
ttgttgttgaacaataactt

SEQ ID NO: 2001 - DNA, 20 bp, synthetic construct
  misc_feature 1..20: note = chemically synthesized
  source 1..20: mol_type = other DNA
acaataacttgggtcccaaa

SEQ ID NO: 2002 - DNA, 20 bp, synthetic construct
  misc_feature 1..20: note = chemically synthesized
  source 1..20: mol_type = other DNA
caataacttgggtcccaaat

SEQ ID NO: 2003 - DNA, 20 bp, synthetic construct
  misc_feature 1..20: note = chemically synthesized
  source 1..20: mol_type = other DNA
aacttgggtcccaaataggc

SEQ ID NO: 2004 - DNA, 20 bp, synthetic construct
  misc_feature 1..20: note = chemically synthesized
  source 1..20: mol_type = other DNA
aggctggaaaaaaaactatc

SEQ ID NO: 2005 - DNA, 20 bp, synthetic construct
  misc_feature 1..20: note = chemically synthesized
  source 1..20: mol_type = other DNA
tccaactacatgatcctctg

SEQ ID NO: 2006 - DNA, 20 bp, synthetic construct
  misc_feature 1..20: note = chemically synthesized
  source 1..20: mol_type = other DNA
ggcttcctccttgtcctccc

SEQ ID NO: 2007 - DNA, 20 bp, synthetic construct
  misc_feature 1..20: note = chemically synthesized
  source 1..20: mol_type = other DNA
ccttgtcctccctagatctc

SEQ ID NO: 2008 - DNA, 20 bp, synthetic construct
  misc_feature 1..20: note = chemically synthesized
  source 1..20: mol_type = other DNA
cttgtcctccctagatctct

SEQ ID NO: 2009 - DNA, 20 bp, synthetic construct
  misc_feature 1..20: note = chemically synthesized
  source 1..20: mol_type = other DNA
gggtgactatcattcctatt

SEQ ID NO: 2010 - DNA, 20 bp, synthetic construct
  misc_feature 1..20: note = chemically synthesized
  source 1..20: mol_type = other DNA
cctatttagcctgacgatct

SEQ ID NO: 2011 - DNA, 20 bp, synthetic construct
  misc_feature 1..20: note = chemically synthesized
  source 1..20: mol_type = other DNA
tttagcctgacgatctgagt

SEQ ID NO: 2012 - DNA, 20 bp, synthetic construct
  misc_feature 1..20: note = chemically synthesized
  source 1..20: mol_type = other DNA
ttagcctgacgatctgagtt

SEQ ID NO: 2013 - DNA, 20 bp, synthetic construct
  misc_feature 1..20: note = chemically synthesized
  source 1..20: mol_type = other DNA
cctgacgatctgagttgggc

SEQ ID NO: 2014 - DNA, 20 bp, synthetic construct
  misc_feature 1..20: note = chemically synthesized
  source 1..20: mol_type = other DNA
atctgagttgggcaagtaaa

SEQ ID NO: 2015 - DNA, 20 bp, synthetic construct
  misc_feature 1..20: note = chemically synthesized
  source 1..20: mol_type = other DNA
aaagatttgtctgataatcc

SEQ ID NO: 2016 - DNA, 20 bp, synthetic construct
  misc_feature 1..20: note = chemically synthesized
  source 1..20: mol_type = other DNA
ataaaacatcgattgaaatc

SEQ ID NO: 2017 - DNA, 20 bp, synthetic construct
  misc_feature 1..20: note = chemically synthesized
  source 1..20: mol_type = other DNA
taaaacatcgattgaaatcc

SEQ ID NO: 2018 - DNA, 20 bp, synthetic construct
  misc_feature 1..20: note = chemically synthesized
  source 1..20: mol_type = other DNA
catcgattgaaatccaggac

SEQ ID NO: 2019 - DNA, 20 bp, synthetic construct
  misc_feature 1..20: note = chemically synthesized
  source 1..20: mol_type = other DNA
tccaggactagactcataat

SEQ ID NO: 2020 - DNA, 20 bp, synthetic construct
  misc_feature 1..20: note = chemically synthesized
  source 1..20: mol_type = other DNA
aggactagactcataattag

SEQ ID NO: 2021 - DNA, 20 bp, synthetic construct
  misc_feature 1..20: note = chemically synthesized
  source 1..20: mol_type = other DNA
agactcataattagtggtgc

SEQ ID NO: 2022 - DNA, 20 bp, synthetic construct
  misc_feature 1..20: note = chemically synthesized
  source 1..20: mol_type = other DNA
ttcacatgtgccatgaattg

SEQ ID NO: 2023 - DNA, 20 bp, synthetic construct
  misc_feature 1..20: note = chemically synthesized
  source 1..20: mol_type = other DNA
ttgataaatgccaaaatctg

SEQ ID NO: 2024 - DNA, 20 bp, synthetic construct
  misc_feature 1..20: note = chemically synthesized
  source 1..20: mol_type = other DNA
atgccaaaatctgtggcata

SEQ ID NO: 2025 - DNA, 20 bp, synthetic construct
  misc_feature 1..20: note = chemically synthesized
  source 1..20: mol_type = other DNA
gtggcatacagcactacatc

SEQ ID NO: 2026 - DNA, 20 bp, synthetic construct
  misc_feature 1..20: note = chemically synthesized
  source 1..20: mol_type = other DNA
tggcatacagcactacatca

SEQ ID NO: 2027 - DNA, 20 bp, synthetic construct
  misc_feature 1..20: note = chemically synthesized
  source 1..20: mol_type = other DNA
ctcatttgtatcctttcaaa

SEQ ID NO: 2028 - DNA, 20 bp, synthetic construct
  misc_feature 1..20: note = chemically synthesized
  source 1..20: mol_type = other DNA
tcatttgtatcctttcaaaa

SEQ ID NO: 2029 - DNA, 20 bp, synthetic construct
  misc_feature 1..20: note = chemically synthesized
  source 1..20: mol_type = other DNA
cctttcaaaaaggcttaaat

SEQ ID NO: 2030 - DNA, 20 bp, synthetic construct
  misc_feature 1..20: note = chemically synthesized
  source 1..20: mol_type = other DNA
caaaaaggcttaaatgagaa

SEQ ID NO: 2031 - DNA, 20 bp, synthetic construct
  misc_feature 1..20: note = chemically synthesized
  source 1..20: mol_type = other DNA
ccattttattttgctgccct

SEQ ID NO: 2032 - DNA, 20 bp, synthetic construct
  misc_feature 1..20: note = chemically synthesized
  source 1..20: mol_type = other DNA
gagcatcctaaacttttttt

SEQ ID NO: 2033 - DNA, 20 bp, synthetic construct
  misc_feature 1..20: note = chemically synthesized
  source 1..20: mol_type = other DNA
gcatcctaaactttttttca

SEQ ID NO: 2034 - DNA, 20 bp, synthetic construct
  misc_feature 1..20: note = chemically synthesized
  source 1..20: mol_type = other DNA
cctaaactttttttcagagc

SEQ ID NO: 2035 - DNA, 20 bp, synthetic construct
  misc_feature 1..20: note = chemically synthesized
  source 1..20: mol_type = other DNA
ccagttatgtgatcatgcta

SEQ ID NO: 2036 - DNA, 20 bp, synthetic construct
  misc_feature 1..20: note = chemically synthesized
  source 1..20: mol_type = other DNA
ctcccctctctctcatacat

SEQ ID NO: 2037 - DNA, 20 bp, synthetic construct
  misc_feature 1..20: note = chemically synthesized
  source 1..20: mol_type = other DNA
tcccctctctctcatacatc

SEQ ID NO: 2038 - DNA, 20 bp, synthetic construct
  misc_feature 1..20: note = chemically synthesized
  source 1..20: mol_type = other DNA
ctctctctcatacatcaggt

SEQ ID NO: 2039 - DNA, 20 bp, synthetic construct
  misc_feature 1..20: note = chemically synthesized
  source 1..20: mol_type = other DNA
ctctctcatacatcaggtca

SEQ ID NO: 2040 - DNA, 20 bp, synthetic construct
  misc_feature 1..20: note = chemically synthesized
  source 1..20: mol_type = other DNA
atacatcaggtcagagaaaa

SEQ ID NO: 2041 - DNA, 20 bp, synthetic construct
  misc_feature 1..20: note = chemically synthesized
  source 1..20: mol_type = other DNA
atggcattttatcttataat

SEQ ID NO: 2042 - DNA, 20 bp, synthetic construct
  misc_feature 1..20: note = chemically synthesized
  source 1..20: mol_type = other DNA
tataatgagcatacaacata

SEQ ID NO: 2043 - DNA, 20 bp, synthetic construct
  misc_feature 1..20: note = chemically synthesized
  source 1..20: mol_type = other DNA
cagttttcactatcgcattt

SEQ ID NO: 2044 - DNA, 20 bp, synthetic construct
  misc_feature 1..20: note = chemically synthesized
  source 1..20: mol_type = other DNA
attttagtattcccatcaac

SEQ ID NO: 2045 - DNA, 20 bp, synthetic construct
  misc_feature 1..20: note = chemically synthesized
  source 1..20: mol_type = other DNA
ttcccatcaactagatattc

SEQ ID NO: 2046 - DNA, 20 bp, synthetic construct
  misc_feature 1..20: note = chemically synthesized
  source 1..20: mol_type = other DNA
aactagatattctagatcat

SEQ ID NO: 2047 - DNA, 20 bp, synthetic construct
  misc_feature 1..20: note = chemically synthesized
  source 1..20: mol_type = other DNA
actagatattctagatcatg

SEQ ID NO: 2048 - DNA, 20 bp, synthetic construct
  misc_feature 1..20: note = chemically synthesized
  source 1..20: mol_type = other DNA
ctagatattctagatcatga

SEQ ID NO: 2049 - DNA, 20 bp, synthetic construct
  misc_feature 1..20: note = chemically synthesized
  source 1..20: mol_type = other DNA
gatattctagatcatgaggg

SEQ ID NO: 2050 - DNA, 20 bp, synthetic construct
  misc_feature 1..20: note = chemically synthesized
  source 1..20: mol_type = other DNA
ttctagatcatgagggcagc

SEQ ID NO: 2051 - DNA, 20 bp, synthetic construct
  misc_feature 1..20: note = chemically synthesized
  source 1..20: mol_type = other DNA
agtgtaatcataatgtcaat

SEQ ID NO: 2052 - DNA, 20 bp, synthetic construct
  misc_feature 1..20: note = chemically synthesized
  source 1..20: mol_type = other DNA
gtaatcataatgtcaatgag

SEQ ID NO: 2053 - DNA, 20 bp, synthetic construct
  misc_feature 1..20: note = chemically synthesized
  source 1..20: mol_type = other DNA
taatcataatgtcaatgaga

SEQ ID NO: 2054 - DNA, 20 bp, synthetic construct
  misc_feature 1..20: note = chemically synthesized
  source 1..20: mol_type = other DNA
aatcataatgtcaatgagaa

SEQ ID NO: 2055 - DNA, 20 bp, synthetic construct
  misc_feature 1..20: note = chemically synthesized
  source 1..20: mol_type = other DNA
tgagaagggctgttacgatt

SEQ ID NO: 2056 - DNA, 20 bp, synthetic construct
  misc_feature 1..20: note = chemically synthesized
  source 1..20: mol_type = other DNA
ggctgttacgattgagacta

SEQ ID NO: 2057 - DNA, 20 bp, synthetic construct
  misc_feature 1..20: note = chemically synthesized
  source 1..20: mol_type = other DNA
gattgagactaaagattaca

SEQ ID NO: 2058 - DNA, 20 bp, synthetic construct
  misc_feature 1..20: note = chemically synthesized
  source 1..20: mol_type = other DNA
ttgagactaaagattacatg

SEQ ID NO: 2059 - DNA, 20 bp, synthetic construct
  misc_feature 1..20: note = chemically synthesized
  source 1..20: mol_type = other DNA
gagactaaagattacatgga

SEQ ID NO: 2060 - DNA, 20 bp, synthetic construct
  misc_feature 1..20: note = chemically synthesized
  source 1..20: mol_type = other DNA
gactaaagattacatggaga

SEQ ID NO: 2061 - DNA, 20 bp, synthetic construct
  misc_feature 1..20: note = chemically synthesized
  source 1..20: mol_type = other DNA
ggagagagctgctttgaaac

SEQ ID NO: 2062 - DNA, 20 bp, synthetic construct
  misc_feature 1..20: note = chemically synthesized
  source 1..20: mol_type = other DNA
ttgaaactggtaattattac

SEQ ID NO: 2063 - DNA, 20 bp, synthetic construct
  misc_feature 1..20: note = chemically synthesized
  source 1..20: mol_type = other DNA
aattattaccagtccactaa

SEQ ID NO: 2064 - DNA, 20 bp, synthetic construct
  misc_feature 1..20: note = chemically synthesized
  source 1..20: mol_type = other DNA
catataatctgtatttcact

SEQ ID NO: 2065 - DNA, 20 bp, synthetic construct
  misc_feature 1..20: note = chemically synthesized
  source 1..20: mol_type = other DNA
gtatttcactcagctcatgc

SEQ ID NO: 2066 - DNA, 20 bp, synthetic construct
  misc_feature 1..20: note = chemically synthesized
  source 1..20: mol_type = other DNA
cggtgtaccatattatatta

SEQ ID NO: 2067 - DNA, 20 bp, synthetic construct
  misc_feature 1..20: note = chemically synthesized
  source 1..20: mol_type = other DNA
atattatattacagtgctca

SEQ ID NO: 2068 - DNA, 20 bp, synthetic construct
  misc_feature 1..20: note = chemically synthesized
  source 1..20: mol_type = other DNA
gattctaaattcctaaactg

SEQ ID NO: 2069 - DNA, 20 bp, synthetic construct
  misc_feature 1..20: note = chemically synthesized
  source 1..20: mol_type = other DNA
tcataacatctttgatgatt

SEQ ID NO: 2070 - DNA, 20 bp, synthetic construct
  misc_feature 1..20: note = chemically synthesized
  source 1..20: mol_type = other DNA
aacatctttgatgatttaga

SEQ ID NO: 2071 - DNA, 20 bp, synthetic construct
  misc_feature 1..20: note = chemically synthesized
  source 1..20: mol_type = other DNA
ctttgatgatttagaaagac

SEQ ID NO: 2072 - DNA, 20 bp, synthetic construct
  misc_feature 1..20: note = chemically synthesized
  source 1..20: mol_type = other DNA
actggaattgatttcctgtg

SEQ ID NO: 2073 - DNA, 20 bp, synthetic construct
  misc_feature 1..20: note = chemically synthesized
  source 1..20: mol_type = other DNA
gatttcctgtgtggcaaaat

SEQ ID NO: 2074 - DNA, 20 bp, synthetic construct
  misc_feature 1..20: note = chemically synthesized
  source 1..20: mol_type = other DNA
atttcctgtgtggcaaaatt

SEQ ID NO: 2075 - DNA, 20 bp, synthetic construct
  misc_feature 1..20: note = chemically synthesized
  source 1..20: mol_type = other DNA
tttcctgtgtggcaaaatta

SEQ ID NO: 2076 - DNA, 20 bp, synthetic construct
  misc_feature 1..20: note = chemically synthesized
  source 1..20: mol_type = other DNA
gaaaatcaacttctcaattt

SEQ ID NO: 2077 - DNA, 20 bp, synthetic construct
  misc_feature 1..20: note = chemically synthesized
  source 1..20: mol_type = other DNA
aaatcaacttctcaatttga

SEQ ID NO: 2078 - DNA, 20 bp, synthetic construct
  misc_feature 1..20: note = chemically synthesized
  source 1..20: mol_type = other DNA
tctcaatttgagagcctcat

SEQ ID NO: 2079 - DNA, 20 bp, synthetic construct
  misc_feature 1..20: note = chemically synthesized
  source 1..20: mol_type = other DNA
ctcaatttgagagcctcatt

SEQ ID NO: 2080 - DNA, 20 bp, synthetic construct
  misc_feature 1..20: note = chemically synthesized
  source 1..20: mol_type = other DNA
agagcctcattgggcattta

SEQ ID NO: 2081 - DNA, 20 bp, synthetic construct
  misc_feature 1..20: note = chemically synthesized
  source 1..20: mol_type = other DNA
gagcctcattgggcatttac

SEQ ID NO: 2082 - DNA, 20 bp, synthetic construct
  misc_feature 1..20: note = chemically synthesized
  source 1..20: mol_type = other DNA
agcctcattgggcatttacg

SEQ ID NO: 2083 - DNA, 20 bp, synthetic construct
  misc_feature 1..20: note = chemically synthesized
  source 1..20: mol_type = other DNA
ttacggggattgttttgatt

SEQ ID NO: 2084 - DNA, 20 bp, synthetic construct
  misc_feature 1..20: note = chemically synthesized
  source 1..20: mol_type = other DNA
acggggattgttttgattta

SEQ ID NO: 2085 - DNA, 20 bp, synthetic construct
  misc_feature 1..20: note = chemically synthesized
  source 1..20: mol_type = other DNA
tagagcaataaactgacacc

SEQ ID NO: 2086 - DNA, 20 bp, synthetic construct
  misc_feature 1..20: note = chemically synthesized
  source 1..20: mol_type = other DNA
taaactgacacctggcccct

SEQ ID NO: 2087 - DNA, 20 bp, synthetic construct
  misc_feature 1..20: note = chemically synthesized
  source 1..20: mol_type = other DNA
tgacacctggcccctaagca

SEQ ID NO: 2088 - DNA, 20 bp, synthetic construct
  misc_feature 1..20: note = chemically synthesized
  source 1..20: mol_type = other DNA
gacacctggcccctaagcat

SEQ ID NO: 2089 - DNA, 20 bp, synthetic construct
  misc_feature 1..20: note = chemically synthesized
  source 1..20: mol_type = other DNA
gcccctaagcataggaactt

SEQ ID NO: 2090 - DNA, 20 bp, synthetic construct
  misc_feature 1..20: note = chemically synthesized
  source 1..20: mol_type = other DNA
ataggaacttgagacatcaa

SEQ ID NO: 2091 - DNA, 20 bp, synthetic construct
  misc_feature 1..20: note = chemically synthesized
  source 1..20: mol_type = other DNA
taggaacttgagacatcaaa

SEQ ID NO: 2092 - DNA, 20 bp, synthetic construct
  misc_feature 1..20: note = chemically synthesized
  source 1..20: mol_type = other DNA
aggaacttgagacatcaaaa

SEQ ID NO: 2093 - DNA, 20 bp, synthetic construct
  misc_feature 1..20: note = chemically synthesized
  source 1..20: mol_type = other DNA
gacatcaaaagggttaaaat

SEQ ID NO: 2094 - DNA, 20 bp, synthetic construct
  misc_feature 1..20: note = chemically synthesized
  source 1..20: mol_type = other DNA
aaagggttaaaatcagctat

SEQ ID NO: 2095 - DNA, 20 bp, synthetic construct
  misc_feature 1..20: note = chemically synthesized
  source 1..20: mol_type = other DNA
tcagctattagcccacctac

SEQ ID NO: 2096 - DNA, 20 bp, synthetic construct
  misc_feature 1..20: note = chemically synthesized
  source 1..20: mol_type = other DNA
ttttatttcattttacttta

SEQ ID NO: 2097 - DNA, 20 bp, synthetic construct
  misc_feature 1..20: note = chemically synthesized
  source 1..20: mol_type = other DNA
tttatttcattttactttat

SEQ ID NO: 2098 - DNA, 20 bp, synthetic construct
  misc_feature 1..20: note = chemically synthesized
  source 1..20: mol_type = other DNA
atttcattttactttatggg

SEQ ID NO: 2099 - DNA, 20 bp, synthetic construct
  misc_feature 1..20: note = chemically synthesized
  source 1..20: mol_type = other DNA
tttcattttactttatggga

SEQ ID NO: 2100 - DNA, 20 bp, synthetic construct
  misc_feature 1..20: note = chemically synthesized
  source 1..20: mol_type = other DNA
gaaggaatgacccccatttc

SEQ ID NO: 2101 - DNA, 20 bp, synthetic construct
  misc_feature 1..20: note = chemically synthesized
  source 1..20: mol_type = other DNA
agtatgtcaccaatgtgaaa

SEQ ID NO: 2102 - DNA, 20 bp, synthetic construct
  misc_feature 1..20: note = chemically synthesized
  source 1..20: mol_type = other DNA
gtgaaaaagtcatgtgatct

SEQ ID NO: 2103 - DNA, 20 bp, synthetic construct
  misc_feature 1..20: note = chemically synthesized
  source 1..20: mol_type = other DNA
agtcatgtgatctaagcctc

SEQ ID NO: 2104 - DNA, 20 bp, synthetic construct
  misc_feature 1..20: note = chemically synthesized
  source 1..20: mol_type = other DNA
gtgatctaagcctcaagatt

SEQ ID NO: 2105 - DNA, 20 bp, synthetic construct
  misc_feature 1..20: note = chemically synthesized
  source 1..20: mol_type = other DNA
atctaagcctcaagattcag

SEQ ID NO: 2106 - DNA, 20 bp, synthetic construct
  misc_feature 1..20: note = chemically synthesized
  source 1..20: mol_type = other DNA
gcctcaagattcagaagaac

SEQ ID NO: 2107 - DNA, 20 bp, synthetic construct
  misc_feature 1..20: note = chemically synthesized
  source 1..20: mol_type = other DNA
cctcaagattcagaagaaca

SEQ ID NO: 2108 - DNA, 20 bp, synthetic construct
  misc_feature 1..20: note = chemically synthesized
  source 1..20: mol_type = other DNA
tcaagattcagaagaacaag

SEQ ID NO: 2109 - DNA, 20 bp, synthetic construct
  misc_feature 1..20: note = chemically synthesized
  source 1..20: mol_type = other DNA
caagattcagaagaacaagg

SEQ ID NO: 2110 - DNA, 20 bp, synthetic construct
  misc_feature 1..20: note = chemically synthesized
  source 1..20: mol_type = other DNA
tcagaagaacaaggaggtct

SEQ ID NO: 2111 - DNA, 20 bp, synthetic construct
  misc_feature 1..20: note = chemically synthesized
  source 1..20: mol_type = other DNA
agaacaaggaggtctgagac

SEQ ID NO: 2112 - DNA, 20 bp, synthetic construct
  misc_feature 1..20: note = chemically synthesized
  source 1..20: mol_type = other DNA
aacaaggaggtctgagactg

SEQ ID NO: 2113 - DNA, 20 bp, synthetic construct
  misc_feature 1..20: note = chemically synthesized
  source 1..20: mol_type = other DNA
acaaggaggtctgagactgg

SEQ ID NO: 2114 - DNA, 20 bp, synthetic construct
  misc_feature 1..20: note = chemically synthesized
  source 1..20: mol_type = other DNA
gaggtctgagactggaggcc

SEQ ID NO: 2115 - DNA, 20 bp, synthetic construct
  misc_feature 1..20: note = chemically synthesized
  source 1..20: mol_type = other DNA
ggcctagctctattatccac

SEQ ID NO: 2116 - DNA, 20 bp, synthetic construct
  misc_feature 1..20: note = chemically synthesized
  source 1..20: mol_type = other DNA
tatccactagattgtaactc

SEQ ID NO: 2117 - DNA, 20 bp, synthetic construct
  misc_feature 1..20: note = chemically synthesized
  source 1..20: mol_type = other DNA
atccactagattgtaactct

SEQ ID NO: 2118 - DNA, 20 bp, synthetic construct
  misc_feature 1..20: note = chemically synthesized
  source 1..20: mol_type = other DNA
actagattgtaactctggga

SEQ ID NO: 2119 - DNA, 20 bp, synthetic construct
  misc_feature 1..20: note = chemically synthesized
  source 1..20: mol_type = other DNA
gatagtcatttgatttctct

SEQ ID NO: 2120 - DNA, 20 bp, synthetic construct
  misc_feature 1..20: note = chemically synthesized
  source 1..20: mol_type = other DNA
catttgatttctctgagtct

SEQ ID NO: 2121 - DNA, 20 bp, synthetic construct
  misc_feature 1..20: note = chemically synthesized
  source 1..20: mol_type = other DNA
ggaattcctatctgtaaaat

SEQ ID NO: 2122 - DNA, 20 bp, synthetic construct
  misc_feature 1..20: note = chemically synthesized
  source 1..20: mol_type = other DNA
ctgtaaaatgagcataaaaa

SEQ ID NO: 2123 - DNA, 20 bp, synthetic construct
  misc_feature 1..20: note = chemically synthesized
  source 1..20: mol_type = other DNA
agcataaaaacagtacctgt

SEQ ID NO: 2124 - DNA, 20 bp, synthetic construct
  misc_feature 1..20: note = chemically synthesized
  source 1..20: mol_type = other DNA
acagtacctgtaagaattgt

SEQ ID NO: 2125 - DNA, 20 bp, synthetic construct
  misc_feature 1..20: note = chemically synthesized
  source 1..20: mol_type = other DNA
cagtacctgtaagaattgtt

SEQ ID NO: 2126 - DNA, 20 bp, synthetic construct
  misc_feature 1..20: note = chemically synthesized
  source 1..20: mol_type = other DNA
tacctgtaagaattgttggg

SEQ ID NO: 2127 - DNA, 20 bp, synthetic construct
  misc_feature 1..20: note = chemically synthesized
  source 1..20: mol_type = other DNA
ttgttgggaagttcaaatga

SEQ ID NO: 2128 - DNA, 20 bp, synthetic construct
  misc_feature 1..20: note = chemically synthesized
  source 1..20: mol_type = other DNA
ttgggaagttcaaatgacag

SEQ ID NO: 2129 - DNA, 20 bp, synthetic construct
  misc_feature 1..20: note = chemically synthesized
  source 1..20: mol_type = other DNA
caaatgacagaagtatataa

SEQ ID NO: 2130 - DNA, 20 bp, synthetic construct
  misc_feature 1..20: note = chemically synthesized
  source 1..20: mol_type = other DNA
aaaagccctctgtaaactat

SEQ ID NO: 2131 - DNA, 20 bp, synthetic construct
  misc_feature 1..20: note = chemically synthesized
  source 1..20: mol_type = other DNA
aaagccctctgtaaactatc

SEQ ID NO: 2132 - DNA, 20 bp, synthetic construct
  misc_feature 1..20: note = chemically synthesized
  source 1..20: mol_type = other DNA
atcaggtcgaatgtgaatgt

SEQ ID NO: 2133 - DNA, 20 bp, synthetic construct
  misc_feature 1..20: note = chemically synthesized
  source 1..20: mol_type = other DNA
atgtgagttttcattactac

SEQ ID NO: 2134 - DNA, 20 bp, synthetic construct
  misc_feature 1..20: note = chemically synthesized
  source 1..20: mol_type = other DNA
tgtgagttttcattactacc

SEQ ID NO: 2135 - DNA, 20 bp, synthetic construct
  misc_feature 1..20: note = chemically synthesized
  source 1..20: mol_type = other DNA
gtgagttttcattactacca

SEQ ID NO: 2136 - DNA, 20 bp, synthetic construct
  misc_feature 1..20: note = chemically synthesized
  source 1..20: mol_type = other DNA
tgagttttcattactaccag

SEQ ID NO: 2137 - DNA, 20 bp, synthetic construct
  misc_feature 1..20: note = chemically synthesized
  source 1..20: mol_type = other DNA
accaggggtgattaattact

SEQ ID NO: 2138 - DNA, 20 bp, synthetic construct
  misc_feature 1..20: note = chemically synthesized
  source 1..20: mol_type = other DNA
ccaggggtgattaattactg

SEQ ID NO: 2139 - DNA, 20 bp, synthetic construct
  misc_feature 1..20: note = chemically synthesized
  source 1..20: mol_type = other DNA
caggggtgattaattactga

SEQ ID NO: 2140 - DNA, 20 bp, synthetic construct
  misc_feature 1..20: note = chemically synthesized
  source 1..20: mol_type = other DNA
accacattacacaccccgaa

SEQ ID NO: 2141 - DNA, 20 bp, synthetic construct
  misc_feature 1..20: note = chemically synthesized
  source 1..20: mol_type = other DNA
tacacaccccgaacggcttc

SEQ ID NO: 2142 - DNA, 20 bp, synthetic construct
  misc_feature 1..20: note = chemically synthesized
  source 1..20: mol_type = other DNA
cacaccccgaacggcttcca

SEQ ID NO: 2143 - DNA, 20 bp, synthetic construct
  misc_feature 1..20: note = chemically synthesized
  source 1..20: mol_type = other DNA
acaccccgaacggcttccag

SEQ ID NO: 2144 - DNA, 20 bp, synthetic construct
  misc_feature 1..20: note = chemically synthesized
  source 1..20: mol_type = other DNA
ccccgaacggcttccagagg

SEQ ID NO: 2145 - DNA, 20 bp, synthetic construct
  misc_feature 1..20: note = chemically synthesized
  source 1..20: mol_type = other DNA
cccgaacggcttccagagga

SEQ ID NO: 2146 - DNA, 20 bp, synthetic construct
  misc_feature 1..20: note = chemically synthesized
  source 1..20: mol_type = other DNA
cggcttccagaggaaggtcc

SEQ ID NO: 2147 - DNA, 20 bp, synthetic construct
  misc_feature 1..20: note = chemically synthesized
  source 1..20: mol_type = other DNA
tccagaggaaggtcccagtc

SEQ ID NO: 2148 - DNA, 20 bp, synthetic construct
  misc_feature 1..20: note = chemically synthesized
  source 1..20: mol_type = other DNA
ccagaggaaggtcccagtcc

SEQ ID NO: 2149 - DNA, 20 bp, synthetic construct
  misc_feature 1..20: note = chemically synthesized
  source 1..20: mol_type = other DNA
tcccagtccaggccttaacc

SEQ ID NO: 2150 - DNA, 20 bp, synthetic construct
  misc_feature 1..20: note = chemically synthesized
  source 1..20: mol_type = other DNA
cccagtccaggccttaaccc

SEQ ID NO: 2151 - DNA, 20 bp, synthetic construct
  misc_feature 1..20: note = chemically synthesized
  source 1..20: mol_type = other DNA
caggccttaacccaggccaa

SEQ ID NO: 2152 - DNA, 20 bp, synthetic construct
  misc_feature 1..20: note = chemically synthesized
  source 1..20: mol_type = other DNA
aggccttaacccaggccaaa

SEQ ID NO: 2153 - DNA, 20 bp, synthetic construct
  misc_feature 1..20: note = chemically synthesized
  source 1..20: mol_type = other DNA
gccttaacccaggccaaaag

SEQ ID NO: 2154 - DNA, 20 bp, synthetic construct
  misc_feature 1..20: note = chemically synthesized
  source 1..20: mol_type = other DNA
ccttaacccaggccaaaagg

SEQ ID NO: 2155 - DNA, 20 bp, synthetic construct
  misc_feature 1..20: note = chemically synthesized
  source 1..20: mol_type = other DNA
cccaggccaaaaggaggctc

SEQ ID NO: 2156 - DNA, 20 bp, synthetic construct
  misc_feature 1..20: note = chemically synthesized
  source 1..20: mol_type = other DNA
ccaaaaggaggctctagtta

SEQ ID NO: 2157 - DNA, 20 bp, synthetic construct
  misc_feature 1..20: note = chemically synthesized
  source 1..20: mol_type = other DNA
aaaaggaggctctagttaaa

SEQ ID NO: 2158 - DNA, 20 bp, synthetic construct
  misc_feature 1..20: note = chemically synthesized
  source 1..20: mol_type = other DNA
aggaggctctagttaaagag

SEQ ID NO: 2159 - DNA, 20 bp, synthetic construct
  misc_feature 1..20: note = chemically synthesized
  source 1..20: mol_type = other DNA
ggaggctctagttaaagagc

SEQ ID NO: 2160 - DNA, 20 bp, synthetic construct
  misc_feature 1..20: note = chemically synthesized
  source 1..20: mol_type = other DNA
gaggctctagttaaagagca

SEQ ID NO: 2161 - DNA, 20 bp, synthetic construct
  misc_feature 1..20: note = chemically synthesized
  source 1..20: mol_type = other DNA
aggctctagttaaagagcag

SEQ ID NO: 2162 - DNA, 20 bp, synthetic construct
  misc_feature 1..20: note = chemically synthesized
  source 1..20: mol_type = other DNA
agttaaagagcaggggtgac

SEQ ID NO: 2163 - DNA, 20 bp, synthetic construct
  misc_feature 1..20: note = chemically synthesized
  source 1..20: mol_type = other DNA
gagcaggggtgactggcaca

SEQ ID NO: 2164 - DNA, 20 bp, synthetic construct
  misc_feature 1..20: note = chemically synthesized
  source 1..20: mol_type = other DNA
caggggtgactggcacacag

SEQ ID NO: 2165 - DNA, 20 bp, synthetic construct
  misc_feature 1..20: note = chemically synthesized
  source 1..20: mol_type = other DNA
ggggtgactggcacacagca

SEQ ID NO: 2166 - DNA, 20 bp, synthetic construct
  misc_feature 1..20: note = chemically synthesized
  source 1..20: mol_type = other DNA
gtgactggcacacagcagag

SEQ ID NO: 2167 - DNA, 20 bp, synthetic construct
  misc_feature 1..20: note = chemically synthesized
  source 1..20: mol_type = other DNA
ggcacacagcagagtggcca

SEQ ID NO: 2168 - DNA, 20 bp, synthetic construct
  misc_feature 1..20: note = chemically synthesized
  source 1..20: mol_type = other DNA
gcacacagcagagtggccac

SEQ ID NO: 2169 - DNA, 20 bp, synthetic construct
  misc_feature 1..20: note = chemically synthesized
  source 1..20: mol_type = other DNA
cacacagcagagtggccaca

SEQ ID NO: 2170 - DNA, 20 bp, synthetic construct
  misc_feature 1..20: note = chemically synthesized
  source 1..20: mol_type = other DNA
acagcagagtggccacaggg

SEQ ID NO: 2171 - DNA, 20 bp, synthetic construct
  misc_feature 1..20: note = chemically synthesized
  source 1..20: mol_type = other DNA
tggccacagggaagtgctat

SEQ ID NO: 2172 - DNA, 20 bp, synthetic construct
  misc_feature 1..20: note = chemically synthesized
  source 1..20: mol_type = other DNA
cagggaagtgctatgagctc

SEQ ID NO: 2173 - DNA, 20 bp, synthetic construct
  misc_feature 1..20: note = chemically synthesized
  source 1..20: mol_type = other DNA
ggaagtgctatgagctctgg

SEQ ID NO: 2174 - DNA, 20 bp, synthetic construct
  misc_feature 1..20: note = chemically synthesized
  source 1..20: mol_type = other DNA
gtgctatgagctctggaagc

SEQ ID NO: 2175 - DNA, 20 bp, synthetic construct
  misc_feature 1..20: note = chemically synthesized
  source 1..20: mol_type = other DNA
tgctatgagctctggaagcc

SEQ ID NO: 2176 - DNA, 20 bp, synthetic construct
  misc_feature 1..20: note = chemically synthesized
  source 1..20: mol_type = other DNA
gctatgagctctggaagcca

SEQ ID NO: 2177 - DNA, 20 bp, synthetic construct
  misc_feature 1..20: note = chemically synthesized
  source 1..20: mol_type = other DNA
ctatgagctctggaagccag

SEQ ID NO: 2178 - DNA, 20 bp, synthetic construct
  misc_feature 1..20: note = chemically synthesized
  source 1..20: mol_type = other DNA
tgagctctggaagccagggg

SEQ ID NO: 2179 - DNA, 20 bp, synthetic construct
  misc_feature 1..20: note = chemically synthesized
  source 1..20: mol_type = other DNA
gctctggaagccaggggcag

SEQ ID NO: 2180 - DNA, 20 bp, synthetic construct
  misc_feature 1..20: note = chemically synthesized
  source 1..20: mol_type = other DNA
ctctggaagccaggggcagc

SEQ ID NO: 2181 - DNA, 20 bp, synthetic construct
  misc_feature 1..20: note = chemically synthesized
  source 1..20: mol_type = other DNA
ggcagcaggttaatgccgcc

SEQ ID NO: 2182 - DNA, 20 bp, synthetic construct
  misc_feature 1..20: note = chemically synthesized
  source 1..20: mol_type = other DNA
agcaggttaatgccgccaag

SEQ ID NO: 2183 - DNA, 20 bp, synthetic construct
  misc_feature 1..20: note = chemically synthesized
  source 1..20: mol_type = other DNA
gttaatgccgccaagtggaa

SEQ ID NO: 2184 - DNA, 20 bp, synthetic construct
  misc_feature 1..20: note = chemically synthesized
  source 1..20: mol_type = other DNA
ttaatgccgccaagtggaat

SEQ ID NO: 2185 - DNA, 20 bp, synthetic construct
  misc_feature 1..20: note = chemically synthesized
  source 1..20: mol_type = other DNA
ccgccaagtggaatgggcat

SEQ ID NO: 2186 - DNA, 20 bp, synthetic construct
  misc_feature 1..20: note = chemically synthesized
  source 1..20: mol_type = other DNA
cgccaagtggaatgggcatc

SEQ ID NO: 2187 - DNA, 20 bp, synthetic construct
  misc_feature 1..20: note = chemically synthesized
  source 1..20: mol_type = other DNA
aatgggcatcaggtttgttc

SEQ ID NO: 2188 - DNA, 20 bp, synthetic construct
  misc_feature 1..20: note = chemically synthesized
  source 1..20: mol_type = other DNA
tgggcatcaggtttgttcta

SEQ ID NO: 2189 - DNA, 20 bp, synthetic construct
  misc_feature 1..20: note = chemically synthesized
  source 1..20: mol_type = other DNA
aggtttgttctagagctttc

SEQ ID NO: 2190 - DNA, 20 bp, synthetic construct
  misc_feature 1..20: note = chemically synthesized
  source 1..20: mol_type = other DNA
cacttccacataccttgttc

SEQ ID NO: 2191 - DNA, 20 bp, synthetic construct
  misc_feature 1..20: note = chemically synthesized
  source 1..20: mol_type = other DNA
tgttctggtcactcctaaat

SEQ ID NO: 2192 - DNA, 20 bp, synthetic construct
  misc_feature 1..20: note = chemically synthesized
  source 1..20: mol_type = other DNA
cactcctaaattggtcctgc

SEQ ID NO: 2193 - DNA, 20 bp, synthetic construct
  misc_feature 1..20: note = chemically synthesized
  source 1..20: mol_type = other DNA
tcctaaattggtcctgccag

SEQ ID NO: 2194 - DNA, 20 bp, synthetic construct
  misc_feature 1..20: note = chemically synthesized
  source 1..20: mol_type = other DNA
cctaaattggtcctgccagc

SEQ ID NO: 2195 - DNA, 20 bp, synthetic construct
  misc_feature 1..20: note = chemically synthesized
  source 1..20: mol_type = other DNA
ctaaattggtcctgccagca

SEQ ID NO: 2196 - DNA, 20 bp, synthetic construct
  misc_feature 1..20: note = chemically synthesized
  source 1..20: mol_type = other DNA
taaattggtcctgccagcag

SEQ ID NO: 2197 - DNA, 20 bp, synthetic construct
  misc_feature 1..20: note = chemically synthesized
  source 1..20: mol_type = other DNA
ggtcctgccagcaggggcac

SEQ ID NO: 2198 - DNA, 20 bp, synthetic construct
  misc_feature 1..20: note = chemically synthesized
  source 1..20: mol_type = other DNA
aactatgtaccctccctttg

SEQ ID NO: 2199 - DNA, 20 bp, synthetic construct
  misc_feature 1..20: note = chemically synthesized
  source 1..20: mol_type = other DNA
actatgtaccctccctttgt

SEQ ID NO: 2200 - DNA, 20 bp, synthetic construct
  misc_feature 1..20: note = chemically synthesized
  source 1..20: mol_type = other DNA
atgtaccctccctttgtggg

SEQ ID NO: 2201 - DNA, 20 bp, synthetic construct
  misc_feature 1..20: note = chemically synthesized
  source 1..20: mol_type = other DNA
tgtaccctccctttgtggga

SEQ ID NO: 2202 - DNA, 20 bp, synthetic construct
  misc_feature 1..20: note = chemically synthesized
  source 1..20: mol_type = other DNA
accctccctttgtgggaagg

SEQ ID NO: 2203 - DNA, 20 bp, synthetic construct
  misc_feature 1..20: note = chemically synthesized
  source 1..20: mol_type = other DNA
ccctccctttgtgggaaggt

SEQ ID NO: 2204 - DNA, 20 bp, synthetic construct
  misc_feature 1..20: note = chemically synthesized
  source 1..20: mol_type = other DNA
ctccctttgtgggaaggtgg

SEQ ID NO: 2205 - DNA, 20 bp, synthetic construct
  misc_feature 1..20: note = chemically synthesized
  source 1..20: mol_type = other DNA
ccctttgtgggaaggtggga

SEQ ID NO: 2206 - DNA, 20 bp, synthetic construct
  misc_feature 1..20: note = chemically synthesized
  source 1..20: mol_type = other DNA
cctttgtgggaaggtgggag

SEQ ID NO: 2207 - DNA, 20 bp, synthetic construct
  misc_feature 1..20: note = chemically synthesized
  source 1..20: mol_type = other DNA
tgtgggaaggtgggagagga

SEQ ID NO: 2208 - DNA, 20 bp, synthetic construct
  misc_feature 1..20: note = chemically synthesized
  source 1..20: mol_type = other DNA
gtgggaaggtgggagaggac

SEQ ID NO: 2209 - DNA, 20 bp, synthetic construct
  misc_feature 1..20: note = chemically synthesized
  source 1..20: mol_type = other DNA
tgggaaggtgggagaggaca

SEQ ID NO: 2210 - DNA, 20 bp, synthetic construct
  misc_feature 1..20: note = chemically synthesized
  source 1..20: mol_type = other DNA
gggaaggtgggagaggacag

SEQ ID NO: 2211 - DNA, 20 bp, synthetic construct
  misc_feature 1..20: note = chemically synthesized
  source 1..20: mol_type = other DNA
gaggacaggggttccctatc

SEQ ID NO: 2212 - DNA, 20 bp, synthetic construct
  misc_feature 1..20: note = chemically synthesized
  source 1..20: mol_type = other DNA
caggggttccctatcaagct

SEQ ID NO: 2213 - DNA, 20 bp, synthetic construct
  misc_feature 1..20: note = chemically synthesized
  source 1..20: mol_type = other DNA
tcaagctcagactttcctac

SEQ ID NO: 2214 - DNA, 20 bp, synthetic construct
  misc_feature 1..20: note = chemically synthesized
  source 1..20: mol_type = other DNA
taccagtcaaatcaaactcc

SEQ ID NO: 2215 - DNA, 20 bp, synthetic construct
  misc_feature 1..20: note = chemically synthesized
  source 1..20: mol_type = other DNA
caaatcaaactcccagccct

SEQ ID NO: 2216 - DNA, 20 bp, synthetic construct
  misc_feature 1..20: note = chemically synthesized
  source 1..20: mol_type = other DNA
aaatcaaactcccagccctc

SEQ ID NO: 2217 - DNA, 20 bp, synthetic construct
  misc_feature 1..20: note = chemically synthesized
  source 1..20: mol_type = other DNA
tcaaactcccagccctcagg

SEQ ID NO: 2218 - DNA, 20 bp, synthetic construct
  misc_feature 1..20: note = chemically synthesized
  source 1..20: mol_type = other DNA
ctcccagccctcaggaagac

SEQ ID NO: 2219 - DNA, 20 bp, synthetic construct
  misc_feature 1..20: note = chemically synthesized
  source 1..20: mol_type = other DNA
tcccagccctcaggaagacc

SEQ ID NO: 2220 - DNA, 20 bp, synthetic construct
  misc_feature 1..20: note = chemically synthesized
  source 1..20: mol_type = other DNA
ccctcaggaagaccaggctg

SEQ ID NO: 2221 - DNA, 20 bp, synthetic construct
  misc_feature 1..20: note = chemically synthesized
  source 1..20: mol_type = other DNA
ggaagaccaggctgaagacc

SEQ ID NO: 2222 - DNA, 20 bp, synthetic construct
  misc_feature 1..20: note = chemically synthesized
  source 1..20: mol_type = other DNA
gaccgagaactatgtttccc

SEQ ID NO: 2223 - DNA, 20 bp, synthetic construct
  misc_feature 1..20: note = chemically synthesized
  source 1..20: mol_type = other DNA
gaactatgtttccctggcaa

SEQ ID NO: 2224 - DNA, 20 bp, synthetic construct
  misc_feature 1..20: note = chemically synthesized
  source 1..20: mol_type = other DNA
gtttccctggcaacagccct

SEQ ID NO: 2225 - DNA, 20 bp, synthetic construct
  misc_feature 1..20: note = chemically synthesized
  source 1..20: mol_type = other DNA
cttctatcccttccctccaa

SEQ ID NO: 2226 - DNA, 20 bp, synthetic construct
  misc_feature 1..20: note = chemically synthesized
  source 1..20: mol_type = other DNA
ctatcccttccctccaaaag

SEQ ID NO: 2227 - DNA, 20 bp, synthetic construct
  misc_feature 1..20: note = chemically synthesized
  source 1..20: mol_type = other DNA
caaaagtggctccgtttcca

SEQ ID NO: 2228 - DNA, 20 bp, synthetic construct
  misc_feature 1..20: note = chemically synthesized
  source 1..20: mol_type = other DNA
tccgtttccacagccccatg

SEQ ID NO: 2229 - DNA, 20 bp, synthetic construct
  misc_feature 1..20: note = chemically synthesized
  source 1..20: mol_type = other DNA
ccgtttccacagccccatgc

SEQ ID NO: 2230 - DNA, 20 bp, synthetic construct
  misc_feature 1..20: note = chemically synthesized
  source 1..20: mol_type = other DNA
ccacagccccatgcaggccc

SEQ ID NO: 2231 - DNA, 20 bp, synthetic construct
  misc_feature 1..20: note = chemically synthesized
  source 1..20: mol_type = other DNA
atgcaggccccagatgcccc

SEQ ID NO: 2232 - DNA, 20 bp, synthetic construct
  misc_feature 1..20: note = chemically synthesized
  source 1..20: mol_type = other DNA
gccccagatgcccccagcaa

SEQ ID NO: 2233 - DNA, 20 bp, synthetic construct
  misc_feature 1..20: note = chemically synthesized
  source 1..20: mol_type = other DNA
ccccagatgcccccagcaac

SEQ ID NO: 2234 - DNA, 20 bp, synthetic construct
  misc_feature 1..20: note = chemically synthesized
  source 1..20: mol_type = other DNA
ccagatgcccccagcaacag

SEQ ID NO: 2235 - DNA, 20 bp, synthetic construct
  misc_feature 1..20: note = chemically synthesized
  source 1..20: mol_type = other DNA
agatgcccccagcaacagga

SEQ ID NO: 2236 - DNA, 20 bp, synthetic construct
  misc_feature 1..20: note = chemically synthesized
  source 1..20: mol_type = other DNA
acaggagagctctccccacc

SEQ ID NO: 2237 - DNA, 20 bp, synthetic construct
  misc_feature 1..20: note = chemically synthesized
  source 1..20: mol_type = other DNA
gagagctctccccacccagc

SEQ ID NO: 2238 - DNA, 20 bp, synthetic construct
  misc_feature 1..20: note = chemically synthesized
  source 1..20: mol_type = other DNA
ctccccacccagccagcatg

SEQ ID NO: 2239 - DNA, 20 bp, synthetic construct
  misc_feature 1..20: note = chemically synthesized
  source 1..20: mol_type = other DNA
tccccacccagccagcatgc

SEQ ID NO: 2240 - DNA, 20 bp, synthetic construct
  misc_feature 1..20: note = chemically synthesized
  source 1..20: mol_type = other DNA
ccccacccagccagcatgca

SEQ ID NO: 2241 - DNA, 20 bp, synthetic construct
  misc_feature 1..20: note = chemically synthesized
  source 1..20: mol_type = other DNA
cccagccagcatgcagggac

SEQ ID NO: 2242 - DNA, 20 bp, synthetic construct
  misc_feature 1..20: note = chemically synthesized
  source 1..20: mol_type = other DNA
atgcagggactagaaaccgt

SEQ ID NO: 2243 - DNA, 20 bp, synthetic construct
  misc_feature 1..20: note = chemically synthesized
  source 1..20: mol_type = other DNA
ctgcaatctgtgacctaacc

SEQ ID NO: 2244 - DNA, 20 bp, synthetic construct
  misc_feature 1..20: note = chemically synthesized
  source 1..20: mol_type = other DNA
tgcaatctgtgacctaaccc

SEQ ID NO: 2245 - DNA, 20 bp, synthetic construct
  misc_feature 1..20: note = chemically synthesized
  source 1..20: mol_type = other DNA
tctgtgacctaacccaggct

SEQ ID NO: 2246 - DNA, 20 bp, synthetic construct
  misc_feature 1..20: note = chemically synthesized
  source 1..20: mol_type = other DNA
ctgtgacctaacccaggctt

SEQ ID NO: 2247 - DNA, 20 bp, synthetic construct
  misc_feature 1..20: note = chemically synthesized
  source 1..20: mol_type = other DNA
acctaacccaggcttaggcc

SEQ ID NO: 2248 - DNA, 20 bp, synthetic construct
  misc_feature 1..20: note = chemically synthesized
  source 1..20: mol_type = other DNA
acccaggcttaggcccagct

SEQ ID NO: 2249 - DNA, 20 bp, synthetic construct
  misc_feature 1..20: note = chemically synthesized
  source 1..20: mol_type = other DNA
cccaggcttaggcccagctt

SEQ ID NO: 2250 - DNA, 20 bp, synthetic construct
  misc_feature 1..20: note = chemically synthesized
  source 1..20: mol_type = other DNA
ccaggcttaggcccagcttg

SEQ ID NO: 2251 - DNA, 20 bp, synthetic construct
  misc_feature 1..20: note = chemically synthesized
  source 1..20: mol_type = other DNA
caggcttaggcccagcttgg

SEQ ID NO: 2252 - DNA, 20 bp, synthetic construct
  misc_feature 1..20: note = chemically synthesized
  source 1..20: mol_type = other DNA
gcttaggcccagcttggggg

SEQ ID NO: 2253 - DNA, 20 bp, synthetic construct
  misc_feature 1..20: note = chemically synthesized
  source 1..20: mol_type = other DNA
cttaggcccagcttggggga

SEQ ID NO: 2254 - DNA, 20 bp, synthetic construct
  misc_feature 1..20: note = chemically synthesized
  source 1..20: mol_type = other DNA
ttaggcccagcttgggggaa

SEQ ID NO: 2255 - DNA, 20 bp, synthetic construct
  misc_feature 1..20: note = chemically synthesized
  source 1..20: mol_type = other DNA
aggcccagcttgggggaagg

SEQ ID NO: 2256 - DNA, 20 bp, synthetic construct
  misc_feature 1..20: note = chemically synthesized
  source 1..20: mol_type = other DNA
cccagcttgggggaagggag

SEQ ID NO: 2257 - DNA, 20 bp, synthetic construct
  misc_feature 1..20: note = chemically synthesized
  source 1..20: mol_type = other DNA
cttgggggaagggagcagat

SEQ ID NO: 2258 - DNA, 20 bp, synthetic construct
  misc_feature 1..20: note = chemically synthesized
  source 1..20: mol_type = other DNA
ttgggggaagggagcagatg

SEQ ID NO: 2259 - DNA, 20 bp, synthetic construct
  misc_feature 1..20: note = chemically synthesized
  source 1..20: mol_type = other DNA
cttttaacccctgaaccacc

SEQ ID NO: 2260 - DNA, 20 bp, synthetic construct
  misc_feature 1..20: note = chemically synthesized
  source 1..20: mol_type = other DNA
cccctgaaccacccagccct

SEQ ID NO: 2261 - DNA, 20 bp, synthetic construct
  misc_feature 1..20: note = chemically synthesized
  source 1..20: mol_type = other DNA
ccctgaaccacccagccctc

SEQ ID NO: 2262 - DNA, 20 bp, synthetic construct
  misc_feature 1..20: note = chemically synthesized
  source 1..20: mol_type = other DNA
ccacccagccctcaggacct

SEQ ID NO: 2263 - DNA, 20 bp, synthetic construct
  misc_feature 1..20: note = chemically synthesized
  source 1..20: mol_type = other DNA
cacccagccctcaggacctg

SEQ ID NO: 2264 - DNA, 20 bp, synthetic construct
  misc_feature 1..20: note = chemically synthesized
  source 1..20: mol_type = other DNA
acccagccctcaggacctga

SEQ ID NO: 2265 - DNA, 20 bp, synthetic construct
  misc_feature 1..20: note = chemically synthesized
  source 1..20: mol_type = other DNA
cacaataactctttgttacc

SEQ ID NO: 2266 - DNA, 20 bp, synthetic construct
  misc_feature 1..20: note = chemically synthesized
  source 1..20: mol_type = other DNA
acaataactctttgttacct

SEQ ID NO: 2267 - DNA, 20 bp, synthetic construct
  misc_feature 1..20: note = chemically synthesized
  source 1..20: mol_type = other DNA
ctttgttacctaggattacc

SEQ ID NO: 2268 - DNA, 20 bp, synthetic construct
  misc_feature 1..20: note = chemically synthesized
  source 1..20: mol_type = other DNA
tttgttacctaggattacct

SEQ ID NO: 2269 - DNA, 20 bp, synthetic construct
  misc_feature 1..20: note = chemically synthesized
  source 1..20: mol_type = other DNA
tgttacctaggattacctag

SEQ ID NO: 2270 - DNA, 20 bp, synthetic construct
  misc_feature 1..20: note = chemically synthesized
  source 1..20: mol_type = other DNA
agttaacaaaaataaacaac

SEQ ID NO: 2271 - DNA, 20 bp, synthetic construct
  misc_feature 1..20: note = chemically synthesized
  source 1..20: mol_type = other DNA
taaacaactggctttgaatc

SEQ ID NO: 2272 - DNA, 20 bp, synthetic construct
  misc_feature 1..20: note = chemically synthesized
  source 1..20: mol_type = other DNA
actggctttgaatctggtct

SEQ ID NO: 2273 - DNA, 20 bp, synthetic construct
  misc_feature 1..20: note = chemically synthesized
  source 1..20: mol_type = other DNA
ctggctttgaatctggtctc

SEQ ID NO: 2274 - DNA, 20 bp, synthetic construct
  misc_feature 1..20: note = chemically synthesized
  source 1..20: mol_type = other DNA
tggctttgaatctggtctca

SEQ ID NO: 2275 - DNA, 20 bp, synthetic construct
  misc_feature 1..20: note = chemically synthesized
  source 1..20: mol_type = other DNA
agggtgcatgccctgctctt

SEQ ID NO: 2276 - DNA, 20 bp, synthetic construct
  misc_feature 1..20: note = chemically synthesized
  source 1..20: mol_type = other DNA
gctcttcagataccatttac

SEQ ID NO: 2277 - DNA, 20 bp, synthetic construct
  misc_feature 1..20: note = chemically synthesized
  source 1..20: mol_type = other DNA
ttcagataccatttacaaga

SEQ ID NO: 2278 - DNA, 20 bp, synthetic construct
  misc_feature 1..20: note = chemically synthesized
  source 1..20: mol_type = other DNA
tcagataccatttacaagat

SEQ ID NO: 2279 - DNA, 20 bp, synthetic construct
  misc_feature 1..20: note = chemically synthesized
  source 1..20: mol_type = other DNA
ataccatttacaagatgggt

SEQ ID NO: 2280 - DNA, 20 bp, synthetic construct
  misc_feature 1..20: note = chemically synthesized
  source 1..20: mol_type = other DNA
atctccctcccatctaaaaa

SEQ ID NO: 2281 - DNA, 20 bp, synthetic construct
  misc_feature 1..20: note = chemically synthesized
  source 1..20: mol_type = other DNA
catctaaaaacagtccccct

SEQ ID NO: 2282 - DNA, 20 bp, synthetic construct
  misc_feature 1..20: note = chemically synthesized
  source 1..20: mol_type = other DNA
tctaaaaacagtccccctta

SEQ ID NO: 2283 - DNA, 20 bp, synthetic construct
  misc_feature 1..20: note = chemically synthesized
  source 1..20: mol_type = other DNA
cccccttagagccttaactc

SEQ ID NO: 2284 - DNA, 20 bp, synthetic construct
  misc_feature 1..20: note = chemically synthesized
  source 1..20: mol_type = other DNA
tttctttttttttctttcca

SEQ ID NO: 2285 - DNA, 20 bp, synthetic construct
  misc_feature 1..20: note = chemically synthesized
  source 1..20: mol_type = other DNA
ctttttttttctttccacag

SEQ ID NO: 2286 - DNA, 20 bp, synthetic construct
  misc_feature 1..20: note = chemically synthesized
  source 1..20: mol_type = other DNA
tttttttttctttccacagc

SEQ ID NO: 2287 - DNA, 20 bp, synthetic construct
  misc_feature 1..20: note = chemically synthesized
  source 1..20: mol_type = other DNA
atttactttcaaataaaaat

SEQ ID NO: 2288 - DNA, 20 bp, synthetic construct
  misc_feature 1..20: note = chemically synthesized
  source 1..20: mol_type = other DNA
tgaacctgcttttttgtgtt

SEQ ID NO: 2289 - DNA, 20 bp, synthetic construct
  misc_feature 1..20: note = chemically synthesized
  source 1..20: mol_type = other DNA
gaacctgcttttttgtgttt

SEQ ID NO: 2290 - DNA, 20 bp, synthetic construct
  misc_feature 1..20: note = chemically synthesized
  source 1..20: mol_type = other DNA
aacctgcttttttgtgttta

SEQ ID NO: 2291 - DNA, 20 bp, synthetic construct
  misc_feature 1..20: note = chemically synthesized
  source 1..20: mol_type = other DNA
ctgcttttttgtgtttaggg

SEQ ID NO: 2292 - DNA, 20 bp, synthetic construct
  misc_feature 1..20: note = chemically synthesized
  source 1..20: mol_type = other DNA
ctgcccaccccctaaccttt

SEQ ID NO: 2293 - DNA, 20 bp, synthetic construct
  misc_feature 1..20: note = chemically synthesized
  source 1..20: mol_type = other DNA
tcataccatgtgttcctaca

SEQ ID NO: 2294 - DNA, 20 bp, synthetic construct
  misc_feature 1..20: note = chemically synthesized
  source 1..20: mol_type = other DNA
ataccatgtgttcctacaca

SEQ ID NO: 2295 - DNA, 20 bp, synthetic construct
  misc_feature 1..20: note = chemically synthesized
  source 1..20: mol_type = other DNA
ccatgtgttcctacacagag

SEQ ID NO: 2296 - DNA, 20 bp, synthetic construct
  misc_feature 1..20: note = chemically synthesized
  source 1..20: mol_type = other DNA
aactgtattattttctaaaa

SEQ ID NO: 2297 - DNA, 20 bp, synthetic construct
  misc_feature 1..20: note = chemically synthesized
  source 1..20: mol_type = other DNA
ttttctaaaacagtatcttt

SEQ ID NO: 2298 - DNA, 20 bp, synthetic construct
  misc_feature 1..20: note = chemically synthesized
  source 1..20: mol_type = other DNA
tcagaaaacatttgtataaa

SEQ ID NO: 2299 - DNA, 20 bp, synthetic construct
  misc_feature 1..20: note = chemically synthesized
  source 1..20: mol_type = other DNA
ttgtataaatggacaaattt

SEQ ID NO: 2300 - DNA, 20 bp, synthetic construct
  misc_feature 1..20: note = chemically synthesized
  source 1..20: mol_type = other DNA
caaatttaagtttcataaaa

SEQ ID NO: 2301 - DNA, 20 bp, synthetic construct
  misc_feature 1..20: note = chemically synthesized
  source 1..20: mol_type = other DNA
taaaatggtccctactataa

SEQ ID NO: 2302 - DNA, 20 bp, synthetic construct
  misc_feature 1..20: note = chemically synthesized
  source 1..20: mol_type = other DNA
ctataaaagctcacttgaac

SEQ ID NO: 2303 - DNA, 20 bp, synthetic construct
  misc_feature 1..20: note = chemically synthesized
  source 1..20: mol_type = other DNA
agctcacttgaacaagtaaa

SEQ ID NO: 2304 - DNA, 20 bp, synthetic construct
  misc_feature 1..20: note = chemically synthesized
  source 1..20: mol_type = other DNA
tcacttgaacaagtaaatgg

SEQ ID NO: 2305 - DNA, 20 bp, synthetic construct
  misc_feature 1..20: note = chemically synthesized
  source 1..20: mol_type = other DNA
cttgaacaagtaaatggtgg

SEQ ID NO: 2306 - DNA, 20 bp, synthetic construct
  misc_feature 1..20: note = chemically synthesized
  source 1..20: mol_type = other DNA
gaacaagtaaatggtggtgg

SEQ ID NO: 2307 - DNA, 20 bp, synthetic construct
  misc_feature 1..20: note = chemically synthesized
  source 1..20: mol_type = other DNA
caagtaaatggtggtggcag

SEQ ID NO: 2308 - DNA, 20 bp, synthetic construct
  misc_feature 1..20: note = chemically synthesized
  source 1..20: mol_type = other DNA
gtaaatggtggtggcagtgg

SEQ ID NO: 2309 - DNA, 20 bp, synthetic construct
  misc_feature 1..20: note = chemically synthesized
  source 1..20: mol_type = other DNA
aatggtggtggcagtggtgg

SEQ ID NO: 2310 - DNA, 20 bp, synthetic construct
  misc_feature 1..20: note = chemically synthesized
  source 1..20: mol_type = other DNA
ggtggtggcagtggtggtgg

SEQ ID NO: 2311 - DNA, 20 bp, synthetic construct
  misc_feature 1..20: note = chemically synthesized
  source 1..20: mol_type = other DNA
ggtggcagtggtggtggtgg

SEQ ID NO: 2312 - DNA, 20 bp, synthetic construct
  misc_feature 1..20: note = chemically synthesized
  source 1..20: mol_type = other DNA
ggcagtggtggtggtggtgg

SEQ ID NO: 2313 - DNA, 20 bp, synthetic construct
  misc_feature 1..20: note = chemically synthesized
  source 1..20: mol_type = other DNA
agtggtggtggtggtggtgg

SEQ ID NO: 2314 - DNA, 20 bp, synthetic construct
  misc_feature 1..20: note = chemically synthesized
  source 1..20: mol_type = other DNA
ggtggtggtggtggtgatga

SEQ ID NO: 2315 - DNA, 20 bp, synthetic construct
  misc_feature 1..20: note = chemically synthesized
  source 1..20: mol_type = other DNA
ggtggtggtggtgatgatgg

SEQ ID NO: 2316 - DNA, 20 bp, synthetic construct
  misc_feature 1..20: note = chemically synthesized
  source 1..20: mol_type = other DNA
ggtggtggtgatgatggtgg

SEQ ID NO: 2317 - DNA, 20 bp, synthetic construct
  misc_feature 1..20: note = chemically synthesized
  source 1..20: mol_type = other DNA
ggtggtgatgatggtggtgg

SEQ ID NO: 2318 - DNA, 20 bp, synthetic construct
  misc_feature 1..20: note = chemically synthesized
  source 1..20: mol_type = other DNA
ggtgatgatggtggtggtag

SEQ ID NO: 2319 - DNA, 20 bp, synthetic construct
  misc_feature 1..20: note = chemically synthesized
  source 1..20: mol_type = other DNA
gatgatggtggtggtagtgg

SEQ ID NO: 2320 - DNA, 20 bp, synthetic construct
  misc_feature 1..20: note = chemically synthesized
  source 1..20: mol_type = other DNA
gatggtggtggtagtggtgg

SEQ ID NO: 2321 - DNA, 20 bp, synthetic construct
  misc_feature 1..20: note = chemically synthesized
  source 1..20: mol_type = other DNA
ggtggtggtagtggtggtgg

SEQ ID NO: 2322 - DNA, 20 bp, synthetic construct
  misc_feature 1..20: note = chemically synthesized
  source 1..20: mol_type = other DNA
ggtggtagtggtggtggtgg

SEQ ID NO: 2323 - DNA, 20 bp, synthetic construct
  misc_feature 1..20: note = chemically synthesized
  source 1..20: mol_type = other DNA
agtggtggtggtggtggtga

SEQ ID NO: 2324 - DNA, 20 bp, synthetic construct
  misc_feature 1..20: note = chemically synthesized
  source 1..20: mol_type = other DNA
ggtggtggtggtggtgatgg

SEQ ID NO: 2325 - DNA, 20 bp, synthetic construct
  misc_feature 1..20: note = chemically synthesized
  source 1..20: mol_type = other DNA
ggtggtggtgatggtggtgt

SEQ ID NO: 2326 - DNA, 20 bp, synthetic construct
  misc_feature 1..20: note = chemically synthesized
  source 1..20: mol_type = other DNA
ggtggtgatggtggtgttgg

SEQ ID NO: 2327 - DNA, 20 bp, synthetic construct
  misc_feature 1..20: note = chemically synthesized
  source 1..20: mol_type = other DNA
gatggtggtgttggtggtga

SEQ ID NO: 2328 - DNA, 20 bp, synthetic construct
  misc_feature 1..20: note = chemically synthesized
  source 1..20: mol_type = other DNA
ggtggtgttggtggtgatgg

SEQ ID NO: 2329 - DNA, 20 bp, synthetic construct
  misc_feature 1..20: note = chemically synthesized
  source 1..20: mol_type = other DNA
ggtgttggtggtgatggtgg

SEQ ID NO: 2330 - DNA, 20 bp, synthetic construct
  misc_feature 1..20: note = chemically synthesized
  source 1..20: mol_type = other DNA
gttggtggtgatggtggtgg

SEQ ID NO: 2331 - DNA, 20 bp, synthetic construct
  misc_feature 1..20: note = chemically synthesized
  source 1..20: mol_type = other DNA
ggtggtgatggtggtggtgg

SEQ ID NO: 2332 - DNA, 20 bp, synthetic construct
  misc_feature 1..20: note = chemically synthesized
  source 1..20: mol_type = other DNA
ggtgatggtggtggtggtgg

SEQ ID NO: 2333 - DNA, 20 bp, synthetic construct
  misc_feature 1..20: note = chemically synthesized
  source 1..20: mol_type = other DNA
ggtggtggtggtggtggtga

SEQ ID NO: 2334 - DNA, 20 bp, synthetic construct
  misc_feature 1..20: note = chemically synthesized
  source 1..20: mol_type = other DNA
ggtggtggtggtggtgatgg

SEQ ID NO: 2335 - DNA, 20 bp, synthetic construct
  misc_feature 1..20: note = chemically synthesized
  source 1..20: mol_type = other DNA
ggtggtggtggtgatggtgg

SEQ ID NO: 2336 - DNA, 20 bp, synthetic construct
  misc_feature 1..20: note = chemically synthesized
  source 1..20: mol_type = other DNA
ggtggtggtgatggtggtgg

SEQ ID NO: 2337 - DNA, 20 bp, synthetic construct
  misc_feature 1..20: note = chemically synthesized
  source 1..20: mol_type = other DNA
ggtggtgatggtggtggtgg

SEQ ID NO: 2338 - DNA, 20 bp, synthetic construct
  misc_feature 1..20: note = chemically synthesized
  source 1..20: mol_type = other DNA
ggtgatggtggtggtggtgg

SEQ ID NO: 2339 - DNA, 20 bp, synthetic construct
  misc_feature 1..20: note = chemically synthesized
  source 1..20: mol_type = other DNA
ggtggtggtggtggtggtga

SEQ ID NO: 2340 - DNA, 20 bp, synthetic construct
  misc_feature 1..20: note = chemically synthesized
  source 1..20: mol_type = other DNA
ggtggtggtggtggtgatgg

SEQ ID NO: 2341 - DNA, 20 bp, synthetic construct
  misc_feature 1..20: note = chemically synthesized
  source 1..20: mol_type = other DNA
ggtggtggtggtgatggtgg

SEQ ID NO: 2342 - DNA, 20 bp, synthetic construct
  misc_feature 1..20: note = chemically synthesized
  source 1..20: mol_type = other DNA
ggtggtgatggtggtggtga

SEQ ID NO: 2343 - DNA, 20 bp, synthetic construct
  misc_feature 1..20: note = chemically synthesized
  source 1..20: mol_type = other DNA
ggtgatggtggtggtgatgg

SEQ ID NO: 2344 - DNA, 20 bp, synthetic construct
  misc_feature 1..20: note = chemically synthesized
  source 1..20: mol_type = other DNA
ggtggtggtgatggcggtga

SEQ ID NO: 2345 - DNA, 20 bp, synthetic construct
  misc_feature 1..20: note = chemically synthesized
  source 1..20: mol_type = other DNA
ggtgatggcggtgatggtac

SEQ ID NO: 2346 - DNA, 20 bp, synthetic construct
  misc_feature 1..20: note = chemically synthesized
  source 1..20: mol_type = other DNA
ggcggtgatggtactggtga

SEQ ID NO: 2347 - DNA, 20 bp, synthetic construct
  misc_feature 1..20: note = chemically synthesized
  source 1..20: mol_type = other DNA
ggtgatggtactggtgatgg

SEQ ID NO: 2348 - DNA, 20 bp, synthetic construct
  misc_feature 1..20: note = chemically synthesized
  source 1..20: mol_type = other DNA
gatggtactggtgatggtgg

SEQ ID NO: 2349 - DNA, 20 bp, synthetic construct
  misc_feature 1..20: note = chemically synthesized
  source 1..20: mol_type = other DNA
ggtactggtgatggtggtgg

SEQ ID NO: 2350 - DNA, 20 bp, synthetic construct
  misc_feature 1..20: note = chemically synthesized
  source 1..20: mol_type = other DNA
actggtgatggtggtggtgg

SEQ ID NO: 2351 - DNA, 20 bp, synthetic construct
  misc_feature 1..20: note = chemically synthesized
  source 1..20: mol_type = other DNA
gatggtggtggtggtagtga

SEQ ID NO: 2352 - DNA, 20 bp, synthetic construct
  misc_feature 1..20: note = chemically synthesized
  source 1..20: mol_type = other DNA
ggtggtggtggtagtgatgg

SEQ ID NO: 2353 - DNA, 20 bp, synthetic construct
  misc_feature 1..20: note = chemically synthesized
  source 1..20: mol_type = other DNA
ggtggtggtagtgatggtgg

SEQ ID NO: 2354 - DNA, 20 bp, synthetic construct
  misc_feature 1..20: note = chemically synthesized
  source 1..20: mol_type = other DNA
ggtagtgatggtggtggtaa

SEQ ID NO: 2355 - DNA, 20 bp, synthetic construct
  misc_feature 1..20: note = chemically synthesized
  source 1..20: mol_type = other DNA
agtgatggtggtggtaatgg

SEQ ID NO: 2356 - DNA, 20 bp, synthetic construct
  misc_feature 1..20: note = chemically synthesized
  source 1..20: mol_type = other DNA
gatggtggtggtaatggtgg

SEQ ID NO: 2357 - DNA, 20 bp, synthetic construct
  misc_feature 1..20: note = chemically synthesized
  source 1..20: mol_type = other DNA
ggtggtggtaatggtggtgg

SEQ ID NO: 2358 - DNA, 20 bp, synthetic construct
  misc_feature 1..20: note = chemically synthesized
  source 1..20: mol_type = other DNA
ggtaatggtggtggtggtga

SEQ ID NO: 2359 - DNA, 20 bp, synthetic construct
  misc_feature 1..20: note = chemically synthesized
  source 1..20: mol_type = other DNA
aatggtggtggtggtgatgg

SEQ ID NO: 2360 - DNA, 20 bp, synthetic construct
  misc_feature 1..20: note = chemically synthesized
  source 1..20: mol_type = other DNA
ggtggtggtggtgatggtgg

SEQ ID NO: 2361 - DNA, 20 bp, synthetic construct
  misc_feature 1..20: note = chemically synthesized
  source 1..20: mol_type = other DNA
ggtggtggtgatggtggtgg

SEQ ID NO: 2362 - DNA, 20 bp, synthetic construct
  misc_feature 1..20: note = chemically synthesized
  source 1..20: mol_type = other DNA
ggtggtgatggtggtggtgg

SEQ ID NO: 2363 - DNA, 20 bp, synthetic construct
  misc_feature 1..20: note = chemically synthesized
  source 1..20: mol_type = other DNA
ggtgatggtggtggtggtgg

SEQ ID NO: 2364 - DNA, 20 bp, synthetic construct
  misc_feature 1..20: note = chemically synthesized
  source 1..20: mol_type = other DNA
ggtggtggtggtggtagtga

SEQ ID NO: 2365 - DNA, 20 bp, synthetic construct
  misc_feature 1..20: note = chemically synthesized
  source 1..20: mol_type = other DNA
ggtggtggtggtagtgatgg

SEQ ID NO: 2366 - DNA, 20 bp, synthetic construct
  misc_feature 1..20: note = chemically synthesized
  source 1..20: mol_type = other DNA
ggtggtggtagtgatggtgg

SEQ ID NO: 2367 - DNA, 20 bp, synthetic construct
  misc_feature 1..20: note = chemically synthesized
  source 1..20: mol_type = other DNA
ggtagtgatggtggtggtaa

SEQ ID NO: 2368 - DNA, 20 bp, synthetic construct
  misc_feature 1..20: note = chemically synthesized
  source 1..20: mol_type = other DNA
agtgatggtggtggtaatgg

SEQ ID NO: 2369 - DNA, 20 bp, synthetic construct
  misc_feature 1..20: note = chemically synthesized
  source 1..20: mol_type = other DNA
gatggtggtggtaatggtgg

SEQ ID NO: 2370 - DNA, 20 bp, synthetic construct
  misc_feature 1..20: note = chemically synthesized
  source 1..20: mol_type = other DNA
ggtggtggtaatggtggtgg

SEQ ID NO: 2371 - DNA, 20 bp, synthetic construct
  misc_feature 1..20: note = chemically synthesized
  source 1..20: mol_type = other DNA
ggtaatggtggtggtggtga

SEQ ID NO: 2372 - DNA, 20 bp, synthetic construct
  misc_feature 1..20: note = chemically synthesized
  source 1..20: mol_type = other DNA
aatggtggtggtggtgatgg

SEQ ID NO: 2373 - DNA, 20 bp, synthetic construct
  misc_feature 1..20: note = chemically synthesized
  source 1..20: mol_type = other DNA
ggtggtggtggtgatggtgg

SEQ ID NO: 2374 - DNA, 20 bp, synthetic construct
  misc_feature 1..20: note = chemically synthesized
  source 1..20: mol_type = other DNA
ggtggtggtgatggtggtgg

SEQ ID NO: 2375 - DNA, 20 bp, synthetic construct
  misc_feature 1..20: note = chemically synthesized
  source 1..20: mol_type = other DNA
ggtggtgatggtggtggtgg

SEQ ID NO: 2376 - DNA, 20 bp, synthetic construct
  misc_feature 1..20: note = chemically synthesized
  source 1..20: mol_type = other DNA
ggtgatggtggtggtggtgg

SEQ ID NO: 2377 - DNA, 20 bp, synthetic construct
  misc_feature 1..20: note = chemically synthesized
  source 1..20: mol_type = other DNA
ggtggtggtggtggtagtga

SEQ ID NO: 2378 - DNA, 20 bp, synthetic construct
  misc_feature 1..20: note = chemically synthesized
  source 1..20: mol_type = other DNA
ggtggtggtggtagtgatgg

SEQ ID NO: 2379 - DNA, 20 bp, synthetic construct
  misc_feature 1..20: note = chemically synthesized
  source 1..20: mol_type = other DNA
ggtggtggtagtgatggtgg

SEQ ID NO: 2380 - DNA, 20 bp, synthetic construct
  misc_feature 1..20: note = chemically synthesized
  source 1..20: mol_type = other DNA
ggtagtgatggtggtggtaa

SEQ ID NO: 2381 - DNA, 20 bp, synthetic construct
  misc_feature 1..20: note = chemically synthesized
  source 1..20: mol_type = other DNA
agtgatggtggtggtaatgg

SEQ ID NO: 2382 - DNA, 20 bp, synthetic construct
  misc_feature 1..20: note = chemically synthesized
  source 1..20: mol_type = other DNA
gatggtggtggtaatggtgg

SEQ ID NO: 2383 - DNA, 20 bp, synthetic construct
  misc_feature 1..20: note = chemically synthesized
  source 1..20: mol_type = other DNA
ggtggtggtaatggtggtgg

SEQ ID NO: 2384 - DNA, 20 bp, synthetic construct
  misc_feature 1..20: note = chemically synthesized
  source 1..20: mol_type = other DNA
ggtaatggtggtggtggtga

SEQ ID NO: 2385 - DNA, 20 bp, synthetic construct
  misc_feature 1..20: note = chemically synthesized
  source 1..20: mol_type = other DNA
aatggtggtggtggtgatgg

SEQ ID NO: 2386 - DNA, 20 bp, synthetic construct
  misc_feature 1..20: note = chemically synthesized
  source 1..20: mol_type = other DNA
ggtggtgatggtggtgatga

SEQ ID NO: 2387 - DNA, 20 bp, synthetic construct
  misc_feature 1..20: note = chemically synthesized
  source 1..20: mol_type = other DNA
gatggtggtgatgatggtga

SEQ ID NO: 2388 - DNA, 20 bp, synthetic construct
  misc_feature 1..20: note = chemically synthesized
  source 1..20: mol_type = other DNA
ggtgatgatggtgatggtac

SEQ ID NO: 2389 - DNA, 20 bp, synthetic construct
  misc_feature 1..20: note = chemically synthesized
  source 1..20: mol_type = other DNA
gatgatggtgatggtactgg

SEQ ID NO: 2390 - DNA, 20 bp, synthetic construct
  misc_feature 1..20: note = chemically synthesized
  source 1..20: mol_type = other DNA
ggtgatggtactggtggtga

SEQ ID NO: 2391 - DNA, 20 bp, synthetic construct
  misc_feature 1..20: note = chemically synthesized
  source 1..20: mol_type = other DNA
ggtactggtggtgatggtga

SEQ ID NO: 2392 - DNA, 20 bp, synthetic construct
  misc_feature 1..20: note = chemically synthesized
  source 1..20: mol_type = other DNA
ggtggtgatggtgatggtga

SEQ ID NO: 2393 - DNA, 20 bp, synthetic construct
  misc_feature 1..20: note = chemically synthesized
  source 1..20: mol_type = other DNA
gatggtgatggtgatggtac

SEQ ID NO: 2394 - DNA, 20 bp, synthetic construct
  misc_feature 1..20: note = chemically synthesized
  source 1..20: mol_type = other DNA
gatggtgatggtactggtga

SEQ ID NO: 2395 - DNA, 20 bp, synthetic construct
  misc_feature 1..20: note = chemically synthesized
  source 1..20: mol_type = other DNA
ggtgatggtactggtgatgg

SEQ ID NO: 2396 - DNA, 20 bp, synthetic construct
  misc_feature 1..20: note = chemically synthesized
  source 1..20: mol_type = other DNA
gatggtactggtgatggtgg

SEQ ID NO: 2397 - DNA, 20 bp, synthetic construct
  misc_feature 1..20: note = chemically synthesized
  source 1..20: mol_type = other DNA
ggtactggtgatggtggtgg

SEQ ID NO: 2398 - DNA, 20 bp, synthetic construct
  misc_feature 1..20: note = chemically synthesized
  source 1..20: mol_type = other DNA
actggtgatggtggtggtgg

SEQ ID NO: 2399 - DNA, 20 bp, synthetic construct
  misc_feature 1..20: note = chemically synthesized
  source 1..20: mol_type = other DNA
gatggtggtggtggtagtga

SEQ ID NO: 2400 - DNA, 20 bp, synthetic construct
  misc_feature 1..20: note = chemically synthesized
  source 1..20: mol_type = other DNA
ggtggtggtggtagtgatgg

SEQ ID NO: 2401 - DNA, 20 bp, synthetic construct
  misc_feature 1..20: note = chemically synthesized
  source 1..20: mol_type = other DNA
ggtggtggtagtgatggtgg

SEQ ID NO: 2402 - DNA, 20 bp, synthetic construct
  misc_feature 1..20: note = chemically synthesized
  source 1..20: mol_type = other DNA
ggtagtgatggtggtggtaa

SEQ ID NO: 2403 - DNA, 20 bp, synthetic construct
  misc_feature 1..20: note = chemically synthesized
  source 1..20: mol_type = other DNA
agtgatggtggtggtaatgg

SEQ ID NO: 2404 - DNA, 20 bp, synthetic construct
  misc_feature 1..20: note = chemically synthesized
  source 1..20: mol_type = other DNA
gatggtggtggtaatggtgg

SEQ ID NO: 2405 - DNA, 20 bp, synthetic construct
  misc_feature 1..20: note = chemically synthesized
  source 1..20: mol_type = other DNA
ggtggtggtaatggtggtgg

SEQ ID NO: 2406 - DNA, 20 bp, synthetic construct
  misc_feature 1..20: note = chemically synthesized
  source 1..20: mol_type = other DNA
ggtaatggtggtggtggtga

SEQ ID NO: 2407 - DNA, 20 bp, synthetic construct
  misc_feature 1..20: note = chemically synthesized
  source 1..20: mol_type = other DNA
aatggtggtggtggtgatgg

SEQ ID NO: 2408 - DNA, 20 bp, synthetic construct
  misc_feature 1..20: note = chemically synthesized
  source 1..20: mol_type = other DNA
ggtggtggtggtgatggtgg

SEQ ID NO: 2409 - DNA, 20 bp, synthetic construct
  misc_feature 1..20: note = chemically synthesized
  source 1..20: mol_type = other DNA
ggtggtgatggtggtggtaa

SEQ ID NO: 2410 - DNA, 20 bp, synthetic construct
  misc_feature 1..20: note = chemically synthesized
  source 1..20: mol_type = other DNA
ggtgatggtggtggtaatgg

SEQ ID NO: 2411 - DNA, 20 bp, synthetic construct
  misc_feature 1..20: note = chemically synthesized
  source 1..20: mol_type = other DNA
gatggtggtggtaatggtgg

SEQ ID NO: 2412 - DNA, 20 bp, synthetic construct
  misc_feature 1..20: note = chemically synthesized
  source 1..20: mol_type = other DNA
ggtggtggtaatggtggtgg

SEQ ID NO: 2413 - DNA, 20 bp, synthetic construct
  misc_feature 1..20: note = chemically synthesized
  source 1..20: mol_type = other DNA
ggtaatggtggtggtggtga

SEQ ID NO: 2414 - DNA, 20 bp, synthetic construct
  misc_feature 1..20: note = chemically synthesized
  source 1..20: mol_type = other DNA
aatggtggtggtggtgatgg

SEQ ID NO: 2415 - DNA, 20 bp, synthetic construct
  misc_feature 1..20: note = chemically synthesized
  source 1..20: mol_type = other DNA
ggtggtgatggtggtgatga

SEQ ID NO: 2416 - DNA, 20 bp, synthetic construct
  misc_feature 1..20: note = chemically synthesized
  source 1..20: mol_type = other DNA
gatggtggtgatgatggtga

SEQ ID NO: 2417 - DNA, 20 bp, synthetic construct
  misc_feature 1..20: note = chemically synthesized
  source 1..20: mol_type = other DNA
ggtgatgatggtgatggtac

SEQ ID NO: 2418 - DNA, 20 bp, synthetic construct
  misc_feature 1..20: note = chemically synthesized
  source 1..20: mol_type = other DNA
gatgatggtgatggtactgg

SEQ ID NO: 2419 - DNA, 20 bp, synthetic construct
  misc_feature 1..20: note = chemically synthesized
  source 1..20: mol_type = other DNA
ggtgatggtactggtggtga

SEQ ID NO: 2420 - DNA, 20 bp, synthetic construct
  misc_feature 1..20: note = chemically synthesized
  source 1..20: mol_type = other DNA
ggtactggtggtgatggtga

SEQ ID NO: 2421 - DNA, 20 bp, synthetic construct
  misc_feature 1..20: note = chemically synthesized
  source 1..20: mol_type = other DNA
ggtggtgatggtgatggtga

SEQ ID NO: 2422 - DNA, 20 bp, synthetic construct
  misc_feature 1..20: note = chemically synthesized
  source 1..20: mol_type = other DNA
gatggtgatggtgatggtac

SEQ ID NO: 2423 - DNA, 20 bp, synthetic construct
  misc_feature 1..20: note = chemically synthesized
  source 1..20: mol_type = other DNA
gatggtgatggtactggtga

SEQ ID NO: 2424 - DNA, 20 bp, synthetic construct
  misc_feature 1..20: note = chemically synthesized
  source 1..20: mol_type = other DNA
ggtgatggtactggtgatgg

SEQ ID NO: 2425 - DNA, 20 bp, synthetic construct
  misc_feature 1..20: note = chemically synthesized
  source 1..20: mol_type = other DNA
gatggtactggtgatggtgg

SEQ ID NO: 2426 - DNA, 20 bp, synthetic construct
  misc_feature 1..20: note = chemically synthesized
  source 1..20: mol_type = other DNA
ggtactggtgatggtggtgg

SEQ ID NO: 2427 - DNA, 20 bp, synthetic construct
  misc_feature 1..20: note = chemically synthesized
  source 1..20: mol_type = other DNA
actggtgatggtggtggtgg

SEQ ID NO: 2428 - DNA, 20 bp, synthetic construct
  misc_feature 1..20: note = chemically synthesized
  source 1..20: mol_type = other DNA
gatggtggtggtggtagtga

SEQ ID NO: 2429 - DNA, 20 bp, synthetic construct
  misc_feature 1..20: note = chemically synthesized
  source 1..20: mol_type = other DNA
ggtggtggtggtagtgatgg

SEQ ID NO: 2430 - DNA, 20 bp, synthetic construct
  misc_feature 1..20: note = chemically synthesized
  source 1..20: mol_type = other DNA
ggtggtggtagtgatggtgg

SEQ ID NO: 2431 - DNA, 20 bp, synthetic construct
  misc_feature 1..20: note = chemically synthesized
  source 1..20: mol_type = other DNA
ggtagtgatggtggtggtaa

SEQ ID NO: 2432 - DNA, 20 bp, synthetic construct
  misc_feature 1..20: note = chemically synthesized
  source 1..20: mol_type = other DNA
agtgatggtggtggtaatgg

SEQ ID NO: 2433 - DNA, 20 bp, synthetic construct
  misc_feature 1..20: note = chemically synthesized
  source 1..20: mol_type = other DNA
gatggtggtggtaatggtgg

SEQ ID NO: 2434 - DNA, 20 bp, synthetic construct
  misc_feature 1..20: note = chemically synthesized
  source 1..20: mol_type = other DNA
ggtggtggtaatggtggtgg

SEQ ID NO: 2435 - DNA, 20 bp, synthetic construct
  misc_feature 1..20: note = chemically synthesized
  source 1..20: mol_type = other DNA
ggtaatggtggtggtggtga

SEQ ID NO: 2436 - DNA, 20 bp, synthetic construct
  misc_feature 1..20: note = chemically synthesized
  source 1..20: mol_type = other DNA
aatggtggtggtggtgatgg

SEQ ID NO: 2437 - DNA, 20 bp, synthetic construct
  misc_feature 1..20: note = chemically synthesized
  source 1..20: mol_type = other DNA
ggtggtggtggtgatggtgg

SEQ ID NO: 2438 - DNA, 20 bp, synthetic construct
  misc_feature 1..20: note = chemically synthesized
  source 1..20: mol_type = other DNA
ggtggtggtgatggtggtgg

SEQ ID NO: 2439 - DNA, 20 bp, synthetic construct
  misc_feature 1..20: note = chemically synthesized
  source 1..20: mol_type = other DNA
ggtggtgatggtggtggtgg

SEQ ID NO: 2440 - DNA, 20 bp, synthetic construct
  misc_feature 1..20: note = chemically synthesized
  source 1..20: mol_type = other DNA
ggtgatggtggtggtggtgg

SEQ ID NO: 2441 - DNA, 20 bp, synthetic construct
  misc_feature 1..20: note = chemically synthesized
  source 1..20: mol_type = other DNA
ggtggtggtggtggtagtga

SEQ ID NO: 2442 - DNA, 20 bp, synthetic construct
  misc_feature 1..20: note = chemically synthesized
  source 1..20: mol_type = other DNA
ggtggtggtggtagtgatgg

SEQ ID NO: 2443 - DNA, 20 bp, synthetic construct
  misc_feature 1..20: note = chemically synthesized
  source 1..20: mol_type = other DNA
ggtggtggtagtgatggtgg

SEQ ID NO: 2444 - DNA, 20 bp, synthetic construct
  misc_feature 1..20: note = chemically synthesized
  source 1..20: mol_type = other DNA
ggtagtgatggtggtggtaa

SEQ ID NO: 2445 - DNA, 20 bp, synthetic construct
  misc_feature 1..20: note = chemically synthesized
  source 1..20: mol_type = other DNA
agtgatggtggtggtaatgg

SEQ ID NO: 2446 - DNA, 20 bp, synthetic construct
  misc_feature 1..20: note = chemically synthesized
  source 1..20: mol_type = other DNA
gatggtggtggtaatggtgg

SEQ ID NO: 2447 - DNA, 20 bp, synthetic construct
  misc_feature 1..20: note = chemically synthesized
  source 1..20: mol_type = other DNA
ggtggtggtaatggtggtgg

SEQ ID NO: 2448 - DNA, 20 bp, synthetic construct
  misc_feature 1..20: note = chemically synthesized
  source 1..20: mol_type = other DNA
ggtaatggtggtggtggtga

SEQ ID NO: 2449 - DNA, 20 bp, synthetic construct
  misc_feature 1..20: note = chemically synthesized
  source 1..20: mol_type = other DNA
aatggtggtggtggtgatgg

SEQ ID NO: 2450 - DNA, 20 bp, synthetic construct
  misc_feature 1..20: note = chemically synthesized
  source 1..20: mol_type = other DNA
ggtggtgatggtggtgatga

SEQ ID NO: 2451 - DNA, 20 bp, synthetic construct
  misc_feature 1..20: note = chemically synthesized
  source 1..20: mol_type = other DNA
gatggtggtgatgatggtga

SEQ ID NO: 2452 - DNA, 20 bp, synthetic construct
  misc_feature 1..20: note = chemically synthesized
  source 1..20: mol_type = other DNA
ggtgatgatggtgatggtac

SEQ ID NO: 2453 - DNA, 20 bp, synthetic construct
  misc_feature 1..20: note = chemically synthesized
  source 1..20: mol_type = other DNA
gatgatggtgatggtactgg

SEQ ID NO: 2454 - DNA, 20 bp, synthetic construct
  misc_feature 1..20: note = chemically synthesized
  source 1..20: mol_type = other DNA
ggtgatggtactggtggtga

SEQ ID NO: 2455 - DNA, 20 bp, synthetic construct
  misc_feature 1..20: note = chemically synthesized
  source 1..20: mol_type = other DNA
ggtactggtggtgatggtga

SEQ ID NO: 2456 - DNA, 20 bp, synthetic construct
  misc_feature 1..20: note = chemically synthesized
  source 1..20: mol_type = other DNA
actggtggtgatggtgatgg

SEQ ID NO: 2457 - DNA, 20 bp, synthetic construct
  misc_feature 1..20: note = chemically synthesized
  source 1..20: mol_type = other DNA
ggtggtgatggtgatggtgg

SEQ ID NO: 2458 - DNA, 20 bp, synthetic construct
  misc_feature 1..20: note = chemically synthesized
  source 1..20: mol_type = other DNA
ggtgatggtgatggtggtgg

SEQ ID NO: 2459 - DNA, 20 bp, synthetic construct
  misc_feature 1..20: note = chemically synthesized
  source 1..20: mol_type = other DNA
gatggtgatggtggtggtgg

SEQ ID NO: 2460 - DNA, 20 bp, synthetic construct
  misc_feature 1..20: note = chemically synthesized
  source 1..20: mol_type = other DNA
gatggtggtggtggtggtga

SEQ ID NO: 2461 - DNA, 20 bp, synthetic construct
  misc_feature 1..20: note = chemically synthesized
  source 1..20: mol_type = other DNA
ggtggtggtggtgatggtac

SEQ ID NO: 2462 - DNA, 20 bp, synthetic construct
  misc_feature 1..20: note = chemically synthesized
  source 1..20: mol_type = other DNA
ggtggtggtgatggtactgg

SEQ ID NO: 2463 - DNA, 20 bp, synthetic construct
  misc_feature 1..20: note = chemically synthesized
  source 1..20: mol_type = other DNA
ggtgatggtactggtggtga

SEQ ID NO: 2464 - DNA, 20 bp, synthetic construct
  misc_feature 1..20: note = chemically synthesized
  source 1..20: mol_type = other DNA
ggtactggtggtgatggtac

SEQ ID NO: 2465 - DNA, 20 bp, synthetic construct
  misc_feature 1..20: note = chemically synthesized
  source 1..20: mol_type = other DNA
actggtggtgatggtactgg

SEQ ID NO: 2466 - DNA, 20 bp, synthetic construct
  misc_feature 1..20: note = chemically synthesized
  source 1..20: mol_type = other DNA
ggtgatggtactggtggtga

SEQ ID NO: 2467 - DNA, 20 bp, synthetic construct
  misc_feature 1..20: note = chemically synthesized
  source 1..20: mol_type = other DNA
gatggtactggtggtgatgg

SEQ ID NO: 2468 - DNA, 20 bp, synthetic construct
  misc_feature 1..20: note = chemically synthesized
  source 1..20: mol_type = other DNA
ggtactggtggtgatggtgg

SEQ ID NO: 2469 - DNA, 20 bp, synthetic construct
  misc_feature 1..20: note = chemically synthesized
  source 1..20: mol_type = other DNA
actggtggtgatggtggtgg

SEQ ID NO: 2470 - DNA, 20 bp, synthetic construct
  misc_feature 1..20: note = chemically synthesized
  source 1..20: mol_type = other DNA
ggtggtgatggtggtggtgg

SEQ ID NO: 2471 - DNA, 20 bp, synthetic construct
  misc_feature 1..20: note = chemically synthesized
  source 1..20: mol_type = other DNA
gatggtggtggtggtagtga

SEQ ID NO: 2472 - DNA, 20 bp, synthetic construct
  misc_feature 1..20: note = chemically synthesized
  source 1..20: mol_type = other DNA
ggtggtggtggtagtgatgg

SEQ ID NO: 2473 - DNA, 20 bp, synthetic construct
  misc_feature 1..20: note = chemically synthesized
  source 1..20: mol_type = other DNA
ggtggtggtagtgatggtgg

SEQ ID NO: 2474 - DNA, 20 bp, synthetic construct
  misc_feature 1..20: note = chemically synthesized
  source 1..20: mol_type = other DNA
ggtagtgatggtggtggtaa

SEQ ID NO: 2475 - DNA, 20 bp, synthetic construct
  misc_feature 1..20: note = chemically synthesized
  source 1..20: mol_type = other DNA
agtgatggtggtggtaatgg

SEQ ID NO: 2476 - DNA, 20 bp, synthetic construct
  misc_feature 1..20: note = chemically synthesized
  source 1..20: mol_type = other DNA
gatggtggtggtaatggtgg

SEQ ID NO: 2477 - DNA, 20 bp, synthetic construct
  misc_feature 1..20: note = chemically synthesized
  source 1..20: mol_type = other DNA
ggtggtggtaatggtggtgg

SEQ ID NO: 2478 - DNA, 20 bp, synthetic construct
  misc_feature 1..20: note = chemically synthesized
  source 1..20: mol_type = other DNA
tggtggtaatggtggtggtg

SEQ ID NO: 2479 - DNA, 20 bp, synthetic construct
  misc_feature 1..20: note = chemically synthesized
  source 1..20: mol_type = other DNA
ggtaatggtggtggtggaga

SEQ ID NO: 2480 - DNA, 20 bp, synthetic construct
  misc_feature 1..20: note = chemically synthesized
  source 1..20: mol_type = other DNA
aatggtggtggtggagatgg

SEQ ID NO: 2481 - DNA, 20 bp, synthetic construct
  misc_feature 1..20: note = chemically synthesized
  source 1..20: mol_type = other DNA
ggtggagatggtggtgttga

SEQ ID NO: 2482 - DNA, 20 bp, synthetic construct
  misc_feature 1..20: note = chemically synthesized
  source 1..20: mol_type = other DNA
gatggtggtgttgatggtga

SEQ ID NO: 2483 - DNA, 20 bp, synthetic construct
  misc_feature 1..20: note = chemically synthesized
  source 1..20: mol_type = other DNA
ggtgttgatggtgatggtac

SEQ ID NO: 2484 - DNA, 20 bp, synthetic construct
  misc_feature 1..20: note = chemically synthesized
  source 1..20: mol_type = other DNA
gttgatggtgatggtactgg

SEQ ID NO: 2485 - DNA, 20 bp, synthetic construct
  misc_feature 1..20: note = chemically synthesized
  source 1..20: mol_type = other DNA
ggtgatggtactggtggtga

SEQ ID NO: 2486 - DNA, 20 bp, synthetic construct
  misc_feature 1..20: note = chemically synthesized
  source 1..20: mol_type = other DNA
ggtactggtggtgatggtac

SEQ ID NO: 2487 - DNA, 20 bp, synthetic construct
  misc_feature 1..20: note = chemically synthesized
  source 1..20: mol_type = other DNA
actggtggtgatggtactgg

SEQ ID NO: 2488 - DNA, 20 bp, synthetic construct
  misc_feature 1..20: note = chemically synthesized
  source 1..20: mol_type = other DNA
ggtgatggtactggtggtga

SEQ ID NO: 2489 - DNA, 20 bp, synthetic construct
  misc_feature 1..20: note = chemically synthesized
  source 1..20: mol_type = other DNA
ggtactggtggtgatggtga

SEQ ID NO: 2490 - DNA, 20 bp, synthetic construct
  misc_feature 1..20: note = chemically synthesized
  source 1..20: mol_type = other DNA
actggtggtgatggtgatgg

SEQ ID NO: 2491 - DNA, 20 bp, synthetic construct
  misc_feature 1..20: note = chemically synthesized
  source 1..20: mol_type = other DNA
ggtggtgatggtgatggtgg

SEQ ID NO: 2492 - DNA, 20 bp, synthetic construct
  misc_feature 1..20: note = chemically synthesized
  source 1..20: mol_type = other DNA
ggtgatggtgatggtggtgg

SEQ ID NO: 2493 - DNA, 20 bp, synthetic construct
  misc_feature 1..20: note = chemically synthesized
  source 1..20: mol_type = other DNA
gatggtgatggtggtggtgg

SEQ ID NO: 2494 - DNA, 20 bp, synthetic construct
  misc_feature 1..20: note = chemically synthesized
  source 1..20: mol_type = other DNA
ggtggtggtggtgatgctac

SEQ ID NO: 2495 - DNA, 20 bp, synthetic construct
  misc_feature 1..20: note = chemically synthesized
  source 1..20: mol_type = other DNA
ggtggtggtgatgctactgg

SEQ ID NO: 2496 - DNA, 20 bp, synthetic construct
  misc_feature 1..20: note = chemically synthesized
  source 1..20: mol_type = other DNA
ggtgatgctactggtggtga

SEQ ID NO: 2497 - DNA, 20 bp, synthetic construct
  misc_feature 1..20: note = chemically synthesized
  source 1..20: mol_type = other DNA
gctactggtggtgatggtac

SEQ ID NO: 2498 - DNA, 20 bp, synthetic construct
  misc_feature 1..20: note = chemically synthesized
  source 1..20: mol_type = other DNA
actggtggtgatggtactgg

SEQ ID NO: 2499 - DNA, 20 bp, synthetic construct
  misc_feature 1..20: note = chemically synthesized
  source 1..20: mol_type = other DNA
ggtgatggtactggtggtga

SEQ ID NO: 2500 - DNA, 20 bp, synthetic construct
  misc_feature 1..20: note = chemically synthesized
  source 1..20: mol_type = other DNA
gatggtactggtggtgatgg

SEQ ID NO: 2501 - DNA, 20 bp, synthetic construct
  misc_feature 1..20: note = chemically synthesized
  source 1..20: mol_type = other DNA
ggtactggtggtgatggtgg

SEQ ID NO: 2502 - DNA, 20 bp, synthetic construct
  misc_feature 1..20: note = chemically synthesized
  source 1..20: mol_type = other DNA
actggtggtgatggtggtgg

SEQ ID NO: 2503 - DNA, 20 bp, synthetic construct
  misc_feature 1..20: note = chemically synthesized
  source 1..20: mol_type = other DNA
ggtggtgatggtggtggtgg

SEQ ID NO: 2504 - DNA, 20 bp, synthetic construct
  misc_feature 1..20: note = chemically synthesized
  source 1..20: mol_type = other DNA
gatggtggtggtggtagtga

SEQ ID NO: 2505 - DNA, 20 bp, synthetic construct
  misc_feature 1..20: note = chemically synthesized
  source 1..20: mol_type = other DNA
ggtggtggtggtagtgatgg

SEQ ID NO: 2506 - DNA, 20 bp, synthetic construct
  misc_feature 1..20: note = chemically synthesized
  source 1..20: mol_type = other DNA
ggtggtggtagtgatggtgg

SEQ ID NO: 2507 - DNA, 20 bp, synthetic construct
  misc_feature 1..20: note = chemically synthesized
  source 1..20: mol_type = other DNA
ggtagtgatggtggtggtaa

SEQ ID NO: 2508 - DNA, 20 bp, synthetic construct
  misc_feature 1..20: note = chemically synthesized
  source 1..20: mol_type = other DNA
agtgatggtggtggtaatgg

SEQ ID NO: 2509 - DNA, 20 bp, synthetic construct
  misc_feature 1..20: note = chemically synthesized
  source 1..20: mol_type = other DNA
gatggtggtggtaatggtgg

SEQ ID NO: 2510 - DNA, 20 bp, synthetic construct
  misc_feature 1..20: note = chemically synthesized
  source 1..20: mol_type = other DNA
ggtggtggtaatggtggtgg

SEQ ID NO: 2511 - DNA, 20 bp, synthetic construct
  misc_feature 1..20: note = chemically synthesized
  source 1..20: mol_type = other DNA
ggtggtaatggtggtggtgg

SEQ ID NO: 2512 - DNA, 20 bp, synthetic construct
  misc_feature 1..20: note = chemically synthesized
  source 1..20: mol_type = other DNA
ggtaatggtggtggtggtgg

SEQ ID NO: 2513 - DNA, 20 bp, synthetic construct
  misc_feature 1..20: note = chemically synthesized
  source 1..20: mol_type = other DNA
aatggtggtggtggtggtgg

SEQ ID NO: 2514 - DNA, 20 bp, synthetic construct
  misc_feature 1..20: note = chemically synthesized
  source 1..20: mol_type = other DNA
ggtggtggtggtggtggtgg

SEQ ID NO: 2515 - DNA, 20 bp, synthetic construct
  misc_feature 1..20: note = chemically synthesized
  source 1..20: mol_type = other DNA
ggtggtggtggtggtagtga

SEQ ID NO: 2516 - DNA, 20 bp, synthetic construct
  misc_feature 1..20: note = chemically synthesized
  source 1..20: mol_type = other DNA
ggtggtggtggtagtgatgg

SEQ ID NO: 2517 - DNA, 20 bp, synthetic construct
  misc_feature 1..20: note = chemically synthesized
  source 1..20: mol_type = other DNA
ggtggtggtagtgatggtgg

SEQ ID NO: 2518 - DNA, 20 bp, synthetic construct
  misc_feature 1..20: note = chemically synthesized
  source 1..20: mol_type = other DNA
ggtggtagtgatggtggtgg

SEQ ID NO: 2519 - DNA, 20 bp, synthetic construct
  misc_feature 1..20: note = chemically synthesized
  source 1..20: mol_type = other DNA
agtgatggtggtggtggtga

SEQ ID NO: 2520 - DNA, 20 bp, synthetic construct
  misc_feature 1..20: note = chemically synthesized
  source 1..20: mol_type = other DNA
ggtggtggtggtgatggtac

SEQ ID NO: 2521 - DNA, 20 bp, synthetic construct
  misc_feature 1..20: note = chemically synthesized
  source 1..20: mol_type = other DNA
ggtggtggtgatggtactgg

SEQ ID NO: 2522 - DNA, 20 bp, synthetic construct
  misc_feature 1..20: note = chemically synthesized
  source 1..20: mol_type = other DNA
ggtgatggtactggtggtga

SEQ ID NO: 2523 - DNA, 20 bp, synthetic construct
  misc_feature 1..20: note = chemically synthesized
  source 1..20: mol_type = other DNA
gatggtactggtggtgatgg

SEQ ID NO: 2524 - DNA, 20 bp, synthetic construct
  misc_feature 1..20: note = chemically synthesized
  source 1..20: mol_type = other DNA
ggtactggtggtgatggtgg

SEQ ID NO: 2525 - DNA, 20 bp, synthetic construct
  misc_feature 1..20: note = chemically synthesized
  source 1..20: mol_type = other DNA
actggtggtgatggtggtgg

SEQ ID NO: 2526 - DNA, 20 bp, synthetic construct
  misc_feature 1..20: note = chemically synthesized
  source 1..20: mol_type = other DNA
ggtggtgatggtggtggtgg

SEQ ID NO: 2527 - DNA, 20 bp, synthetic construct
  misc_feature 1..20: note = chemically synthesized
  source 1..20: mol_type = other DNA
gatggtggtggtggtagtga

SEQ ID NO: 2528 - DNA, 20 bp, synthetic construct
  misc_feature 1..20: note = chemically synthesized
  source 1..20: mol_type = other DNA
ggtggtggtggtagtgatgg

SEQ ID NO: 2529 - DNA, 20 bp, synthetic construct
  misc_feature 1..20: note = chemically synthesized
  source 1..20: mol_type = other DNA
ggtggtggtagtgatggtgg

SEQ ID NO: 2530 - DNA, 20 bp, synthetic construct
  misc_feature 1..20: note = chemically synthesized
  source 1..20: mol_type = other DNA
ggtagtgatggtggtggtaa

SEQ ID NO: 2531 - DNA, 20 bp, synthetic construct
  misc_feature 1..20: note = chemically synthesized
  source 1..20: mol_type = other DNA
agtgatggtggtggtaatgg

SEQ ID NO: 2532 - DNA, 20 bp, synthetic construct
  misc_feature 1..20: note = chemically synthesized
  source 1..20: mol_type = other DNA
gatggtggtggtaatggtgg

SEQ ID NO: 2533 - DNA, 20 bp, synthetic construct
  misc_feature 1..20: note = chemically synthesized
  source 1..20: mol_type = other DNA
ggtggtggtaatggtggtgg

SEQ ID NO: 2534 - DNA, 20 bp, synthetic construct
  misc_feature 1..20: note = chemically synthesized
  source 1..20: mol_type = other DNA
ggtaatggtggtggtggtga

SEQ ID NO: 2535 - DNA, 20 bp, synthetic construct
  misc_feature 1..20: note = chemically synthesized
  source 1..20: mol_type = other DNA
aatggtggtggtggtgatgg

SEQ ID NO: 2536 - DNA, 20 bp, synthetic construct
  misc_feature 1..20: note = chemically synthesized
  source 1..20: mol_type = other DNA
ggtggtggtggtgatggtgg

SEQ ID NO: 2537 - DNA, 20 bp, synthetic construct
  misc_feature 1..20: note = chemically synthesized
  source 1..20: mol_type = other DNA
ggtggtggtgatggtggtgg

SEQ ID NO: 2538 - DNA, 20 bp, synthetic construct
  misc_feature 1..20: note = chemically synthesized
  source 1..20: mol_type = other DNA
ggtggtgatggtggtggtgg

SEQ ID NO: 2539 - DNA, 20 bp, synthetic construct
  misc_feature 1..20: note = chemically synthesized
  source 1..20: mol_type = other DNA
ggtgatggtggtggtggtgg

SEQ ID NO: 2540 - DNA, 20 bp, synthetic construct
  misc_feature 1..20: note = chemically synthesized
  source 1..20: mol_type = other DNA
gatggtggtggtggtggtag

SEQ ID NO: 2541 - DNA, 20 bp, synthetic construct
  misc_feature 1..20: note = chemically synthesized
  source 1..20: mol_type = other DNA
ggtggtggtggtggtagtgg

SEQ ID NO: 2542 - DNA, 20 bp, synthetic construct
  misc_feature 1..20: note = chemically synthesized
  source 1..20: mol_type = other DNA
ggtggtggtagtggtggtga

SEQ ID NO: 2543 - DNA, 20 bp, synthetic construct
  misc_feature 1..20: note = chemically synthesized
  source 1..20: mol_type = other DNA
ggtggtagtggtggtgatgg

SEQ ID NO: 2544 - DNA, 20 bp, synthetic construct
  misc_feature 1..20: note = chemically synthesized
  source 1..20: mol_type = other DNA
agtggtggtgatggtggtga

SEQ ID NO: 2545 - DNA, 20 bp, synthetic construct
  misc_feature 1..20: note = chemically synthesized
  source 1..20: mol_type = other DNA
ggtgatggtggtgatggtac

SEQ ID NO: 2546 - DNA, 20 bp, synthetic construct
  misc_feature 1..20: note = chemically synthesized
  source 1..20: mol_type = other DNA
gatggtggtgatggtactgg

SEQ ID NO: 2547 - DNA, 20 bp, synthetic construct
  misc_feature 1..20: note = chemically synthesized
  source 1..20: mol_type = other DNA
ggtgatggtactggtggtga

SEQ ID NO: 2548 - DNA, 20 bp, synthetic construct
  misc_feature 1..20: note = chemically synthesized
  source 1..20: mol_type = other DNA
gatggtactggtggtgatgg

SEQ ID NO: 2549 - DNA, 20 bp, synthetic construct
  misc_feature 1..20: note = chemically synthesized
  source 1..20: mol_type = other DNA
ggtactggtggtgatggtgg

SEQ ID NO: 2550 - DNA, 20 bp, synthetic construct
  misc_feature 1..20: note = chemically synthesized
  source 1..20: mol_type = other DNA
actggtggtgatggtggtgg

SEQ ID NO: 2551 - DNA, 20 bp, synthetic construct
  misc_feature 1..20: note = chemically synthesized
  source 1..20: mol_type = other DNA
ggtggtgatggtggtggtgg

SEQ ID NO: 2552 - DNA, 20 bp, synthetic construct
  misc_feature 1..20: note = chemically synthesized
  source 1..20: mol_type = other DNA
gatggtggtggtggtagtga

SEQ ID NO: 2553 - DNA, 20 bp, synthetic construct
  misc_feature 1..20: note = chemically synthesized
  source 1..20: mol_type = other DNA
ggtggtggtggtagtgatgg

SEQ ID NO: 2554 - DNA, 20 bp, synthetic construct
  misc_feature 1..20: note = chemically synthesized
  source 1..20: mol_type = other DNA
ggtggtggtagtgatggtgg

SEQ ID NO: 2555 - DNA, 20 bp, synthetic construct
  misc_feature 1..20: note = chemically synthesized
  source 1..20: mol_type = other DNA
ggtagtgatggtggtggttg

SEQ ID NO: 2556 - DNA, 20 bp, synthetic construct
  misc_feature 1..20: note = chemically synthesized
  source 1..20: mol_type = other DNA
agtgatggtggtggttgtgg

SEQ ID NO: 2557 - DNA, 20 bp, synthetic construct
  misc_feature 1..20: note = chemically synthesized
  source 1..20: mol_type = other DNA
gatggtggtggttgtggtgg

SEQ ID NO: 2558 - DNA, 20 bp, synthetic construct
  misc_feature 1..20: note = chemically synthesized
  source 1..20: mol_type = other DNA
ggtggtggttgtggtggtgg

SEQ ID NO: 2559 - DNA, 20 bp, synthetic construct
  misc_feature 1..20: note = chemically synthesized
  source 1..20: mol_type = other DNA
ggttgtggtggtggtggtga

SEQ ID NO: 2560 - DNA, 20 bp, synthetic construct
  misc_feature 1..20: note = chemically synthesized
  source 1..20: mol_type = other DNA
tgtggtggtggtggtgatgg

SEQ ID NO: 2561 - DNA, 20 bp, synthetic construct
  misc_feature 1..20: note = chemically synthesized
  source 1..20: mol_type = other DNA
ggtggtggtggtgatggtgg

SEQ ID NO: 2562 - DNA, 20 bp, synthetic construct
  misc_feature 1..20: note = chemically synthesized
  source 1..20: mol_type = other DNA
ggtggtggtgatggtggcag

SEQ ID NO: 2563 - DNA, 20 bp, synthetic construct
  misc_feature 1..20: note = chemically synthesized
  source 1..20: mol_type = other DNA
ggtggtgatggtggcagtgg

SEQ ID NO: 2564 - DNA, 20 bp, synthetic construct
  misc_feature 1..20: note = chemically synthesized
  source 1..20: mol_type = other DNA
gatggtggcagtggtggttg

SEQ ID NO: 2565 - DNA, 20 bp, synthetic construct
  misc_feature 1..20: note = chemically synthesized
  source 1..20: mol_type = other DNA
ggtggcagtggtggttgtgg

SEQ ID NO: 2566 - DNA, 20 bp, synthetic construct
  misc_feature 1..20: note = chemically synthesized
  source 1..20: mol_type = other DNA
ggcagtggtggttgtggtgg

SEQ ID NO: 2567 - DNA, 20 bp, synthetic construct
  misc_feature 1..20: note = chemically synthesized
  source 1..20: mol_type = other DNA
agtggtggttgtggtggtgg

SEQ ID NO: 2568 - DNA, 20 bp, synthetic construct
  misc_feature 1..20: note = chemically synthesized
  source 1..20: mol_type = other DNA
ggttgtggtggtggtggtga

SEQ ID NO: 2569 - DNA, 20 bp, synthetic construct
  misc_feature 1..20: note = chemically synthesized
  source 1..20: mol_type = other DNA
tgtggtggtggtggtgatgg

SEQ ID NO: 2570 - DNA, 20 bp, synthetic construct
  misc_feature 1..20: note = chemically synthesized
  source 1..20: mol_type = other DNA
ggtggtggtggtgatggtgg

SEQ ID NO: 2571 - DNA, 20 bp, synthetic construct
  misc_feature 1..20: note = chemically synthesized
  source 1..20: mol_type = other DNA
ggtggtggtgatggtggtgg

SEQ ID NO: 2572 - DNA, 20 bp, synthetic construct
  misc_feature 1..20: note = chemically synthesized
  source 1..20: mol_type = other DNA
ggtggtgatggtggtggtgg

SEQ ID NO: 2573 - DNA, 20 bp, synthetic construct
  misc_feature 1..20: note = chemically synthesized
  source 1..20: mol_type = other DNA
ggtgatggtggtggtggtgg

SEQ ID NO: 2574 - DNA, 20 bp, synthetic construct
  misc_feature 1..20: note = chemically synthesized
  source 1..20: mol_type = other DNA
ggtggtggtggtggtggtga

SEQ ID NO: 2575 - DNA, 20 bp, synthetic construct
  misc_feature 1..20: note = chemically synthesized
  source 1..20: mol_type = other DNA
ggtggtggtggtggtgatag

SEQ ID NO: 2576 - DNA, 20 bp, synthetic construct
  misc_feature 1..20: note = chemically synthesized
  source 1..20: mol_type = other DNA
tggtggtggtggtgatagta

SEQ ID NO: 2577 - DNA, 20 bp, synthetic construct
  misc_feature 1..20: note = chemically synthesized
  source 1..20: mol_type = other DNA
tgtgcatttttctctaaaac

SEQ ID NO: 2578 - DNA, 20 bp, synthetic construct
  misc_feature 1..20: note = chemically synthesized
  source 1..20: mol_type = other DNA
gtgcatttttctctaaaacc

SEQ ID NO: 2579 - DNA, 20 bp, synthetic construct
  misc_feature 1..20: note = chemically synthesized
  source 1..20: mol_type = other DNA
gcatttttctctaaaaccag

SEQ ID NO: 2580 - DNA, 20 bp, synthetic construct
  misc_feature 1..20: note = chemically synthesized
  source 1..20: mol_type = other DNA
tctaaaaccaggagaaaaat

SEQ ID NO: 2581 - DNA, 20 bp, synthetic construct
  misc_feature 1..20: note = chemically synthesized
  source 1..20: mol_type = other DNA
aaattagtcaaaattatgtg

SEQ ID NO: 2582 - DNA, 20 bp, synthetic construct
  misc_feature 1..20: note = chemically synthesized
  source 1..20: mol_type = other DNA
aattagtcaaaattatgtgt

SEQ ID NO: 2583 - DNA, 20 bp, synthetic construct
  misc_feature 1..20: note = chemically synthesized
  source 1..20: mol_type = other DNA
aaatacacatgtaaatacat

SEQ ID NO: 2584 - DNA, 20 bp, synthetic construct
  misc_feature 1..20: note = chemically synthesized
  source 1..20: mol_type = other DNA
aatacacatgtaaatacata

SEQ ID NO: 2585 - DNA, 20 bp, synthetic construct
  misc_feature 1..20: note = chemically synthesized
  source 1..20: mol_type = other DNA
aatacataaggaatatgcat

SEQ ID NO: 2586 - DNA, 20 bp, synthetic construct
  misc_feature 1..20: note = chemically synthesized
  source 1..20: mol_type = other DNA
aatatgcattggaataactc

SEQ ID NO: 2587 - DNA, 20 bp, synthetic construct
  misc_feature 1..20: note = chemically synthesized
  source 1..20: mol_type = other DNA
aaactgactccttttgattc

SEQ ID NO: 2588 - DNA, 20 bp, synthetic construct
  misc_feature 1..20: note = chemically synthesized
  source 1..20: mol_type = other DNA
actccttttgattctggcct

SEQ ID NO: 2589 - DNA, 20 bp, synthetic construct
  misc_feature 1..20: note = chemically synthesized
  source 1..20: mol_type = other DNA
tttgattctggccttggcta

SEQ ID NO: 2590 - DNA, 20 bp, synthetic construct
  misc_feature 1..20: note = chemically synthesized
  source 1..20: mol_type = other DNA
ttggctaaagatgtgtgcca

SEQ ID NO: 2591 - DNA, 20 bp, synthetic construct
  misc_feature 1..20: note = chemically synthesized
  source 1..20: mol_type = other DNA
tgtgccatggactataccca

SEQ ID NO: 2592 - DNA, 20 bp, synthetic construct
  misc_feature 1..20: note = chemically synthesized
  source 1..20: mol_type = other DNA
ctatacccaaagtcctaaat

SEQ ID NO: 2593 - DNA, 20 bp, synthetic construct
  misc_feature 1..20: note = chemically synthesized
  source 1..20: mol_type = other DNA
tatacccaaagtcctaaatg

SEQ ID NO: 2594 - DNA, 20 bp, synthetic construct
  misc_feature 1..20: note = chemically synthesized
  source 1..20: mol_type = other DNA
caaagtcctaaatgaggcca

SEQ ID NO: 2595 - DNA, 20 bp, synthetic construct
  misc_feature 1..20: note = chemically synthesized
  source 1..20: mol_type = other DNA
aaagtcctaaatgaggccac

SEQ ID NO: 2596 - DNA, 20 bp, synthetic construct
  misc_feature 1..20: note = chemically synthesized
  source 1..20: mol_type = other DNA
agtcctaaatgaggccacag

SEQ ID NO: 2597 - DNA, 20 bp, synthetic construct
  misc_feature 1..20: note = chemically synthesized
  source 1..20: mol_type = other DNA
aggccacaggagtgaatgtc

SEQ ID NO: 2598 - DNA, 20 bp, synthetic construct
  misc_feature 1..20: note = chemically synthesized
  source 1..20: mol_type = other DNA
gtgaatgtccagtaataaaa

SEQ ID NO: 2599 - DNA, 20 bp, synthetic construct
  misc_feature 1..20: note = chemically synthesized
  source 1..20: mol_type = other DNA
tgaatgtccagtaataaaat

SEQ ID NO: 2600 - DNA, 20 bp, synthetic construct
  misc_feature 1..20: note = chemically synthesized
  source 1..20: mol_type = other DNA
tccagtaataaaatgggctc

SEQ ID NO: 2601 - DNA, 20 bp, synthetic construct
  misc_feature 1..20: note = chemically synthesized
  source 1..20: mol_type = other DNA
cagtaataaaatgggctcca

SEQ ID NO: 2602 - DNA, 20 bp, synthetic construct
  misc_feature 1..20: note = chemically synthesized
  source 1..20: mol_type = other DNA
agtaataaaatgggctccag

SEQ ID NO: 2603 - DNA, 20 bp, synthetic construct
  misc_feature 1..20: note = chemically synthesized
  source 1..20: mol_type = other DNA
taaaatgggctccagaggca

SEQ ID NO: 2604 - DNA, 20 bp, synthetic construct
  misc_feature 1..20: note = chemically synthesized
  source 1..20: mol_type = other DNA
aaaatgggctccagaggcac

SEQ ID NO: 2605 - DNA, 20 bp, synthetic construct
  misc_feature 1..20: note = chemically synthesized
  source 1..20: mol_type = other DNA
gcacaggcatcttcaatcac

SEQ ID NO: 2606 - DNA, 20 bp, synthetic construct
  misc_feature 1..20: note = chemically synthesized
  source 1..20: mol_type = other DNA
gcatcttcaatcactagcca

SEQ ID NO: 2607 - DNA, 20 bp, synthetic construct
  misc_feature 1..20: note = chemically synthesized
  source 1..20: mol_type = other DNA
atcttcaatcactagccacg

SEQ ID NO: 2608 - DNA, 20 bp, synthetic construct
  misc_feature 1..20: note = chemically synthesized
  source 1..20: mol_type = other DNA
tcaatcactagccacggagc

SEQ ID NO: 2609 - DNA, 20 bp, synthetic construct
  misc_feature 1..20: note = chemically synthesized
  source 1..20: mol_type = other DNA
cactagccacggagcaagac

SEQ ID NO: 2610 - DNA, 20 bp, synthetic construct
  misc_feature 1..20: note = chemically synthesized
  source 1..20: mol_type = other DNA
cacggagcaagacaagaccc

SEQ ID NO: 2611 - DNA, 20 bp, synthetic construct
  misc_feature 1..20: note = chemically synthesized
  source 1..20: mol_type = other DNA
acggagcaagacaagaccct

SEQ ID NO: 2612 - DNA, 20 bp, synthetic construct
  misc_feature 1..20: note = chemically synthesized
  source 1..20: mol_type = other DNA
cggagcaagacaagaccctg

SEQ ID NO: 2613 - DNA, 20 bp, synthetic construct
  misc_feature 1..20: note = chemically synthesized
  source 1..20: mol_type = other DNA
gagcaagacaagaccctggg

SEQ ID NO: 2614 - DNA, 20 bp, synthetic construct
  misc_feature 1..20: note = chemically synthesized
  source 1..20: mol_type = other DNA
caagacaagaccctggggag

SEQ ID NO: 2615 - DNA, 20 bp, synthetic construct
  misc_feature 1..20: note = chemically synthesized
  source 1..20: mol_type = other DNA
gaccctggggagaagaccca

SEQ ID NO: 2616 - DNA, 20 bp, synthetic construct
  misc_feature 1..20: note = chemically synthesized
  source 1..20: mol_type = other DNA
accctggggagaagacccac

SEQ ID NO: 2617 - DNA, 20 bp, synthetic construct
  misc_feature 1..20: note = chemically synthesized
  source 1..20: mol_type = other DNA
ccctggggagaagacccaca

SEQ ID NO: 2618 - DNA, 20 bp, synthetic construct
  misc_feature 1..20: note = chemically synthesized
  source 1..20: mol_type = other DNA
gggagaagacccacagggat

SEQ ID NO: 2619 - DNA, 20 bp, synthetic construct
  misc_feature 1..20: note = chemically synthesized
  source 1..20: mol_type = other DNA
ccacagggatgagctactat

SEQ ID NO: 2620 - DNA, 20 bp, synthetic construct
  misc_feature 1..20: note = chemically synthesized
  source 1..20: mol_type = other DNA
gatgagctactatcagctcc

SEQ ID NO: 2621 - DNA, 20 bp, synthetic construct
  misc_feature 1..20: note = chemically synthesized
  source 1..20: mol_type = other DNA
tactatcagctcccagcctc

SEQ ID NO: 2622 - DNA, 20 bp, synthetic construct
  misc_feature 1..20: note = chemically synthesized
  source 1..20: mol_type = other DNA
atcagctcccagcctccagt

SEQ ID NO: 2623 - DNA, 20 bp, synthetic construct
  misc_feature 1..20: note = chemically synthesized
  source 1..20: mol_type = other DNA
tcagctcccagcctccagtg

SEQ ID NO: 2624 - DNA, 20 bp, synthetic construct
  misc_feature 1..20: note = chemically synthesized
  source 1..20: mol_type = other DNA
ctcccagcctccagtgagga

SEQ ID NO: 2625 - DNA, 20 bp, synthetic construct
  misc_feature 1..20: note = chemically synthesized
  source 1..20: mol_type = other DNA
gcctccagtgaggaaagaaa

SEQ ID NO: 2626 - DNA, 20 bp, synthetic construct
  misc_feature 1..20: note = chemically synthesized
  source 1..20: mol_type = other DNA
cctccagtgaggaaagaaaa

SEQ ID NO: 2627 - DNA, 20 bp, synthetic construct
  misc_feature 1..20: note = chemically synthesized
  source 1..20: mol_type = other DNA
ctccagtgaggaaagaaaaa

SEQ ID NO: 2628 - DNA, 20 bp, synthetic construct
  misc_feature 1..20: note = chemically synthesized
  source 1..20: mol_type = other DNA
tccagtgaggaaagaaaaag

SEQ ID NO: 2629 - DNA, 20 bp, synthetic construct
  misc_feature 1..20: note = chemically synthesized
  source 1..20: mol_type = other DNA
cagtgaggaaagaaaaaggg

SEQ ID NO: 2630 - DNA, 20 bp, synthetic construct
  misc_feature 1..20: note = chemically synthesized
  source 1..20: mol_type = other DNA
agtgaggaaagaaaaagggg

SEQ ID NO: 2631 - DNA, 20 bp, synthetic construct
  misc_feature 1..20: note = chemically synthesized
  source 1..20: mol_type = other DNA
gtgaggaaagaaaaagggga

SEQ ID NO: 2632 - DNA, 20 bp, synthetic construct
  misc_feature 1..20: note = chemically synthesized
  source 1..20: mol_type = other DNA
aggaaagaaaaaggggaggg

SEQ ID NO: 2633 - DNA, 20 bp, synthetic construct
  misc_feature 1..20: note = chemically synthesized
  source 1..20: mol_type = other DNA
aaagaaaaaggggagggaag

SEQ ID NO: 2634 - DNA, 20 bp, synthetic construct
  misc_feature 1..20: note = chemically synthesized
  source 1..20: mol_type = other DNA
ggggagggaagaagtccctc

SEQ ID NO: 2635 - DNA, 20 bp, synthetic construct
  misc_feature 1..20: note = chemically synthesized
  source 1..20: mol_type = other DNA
gggagggaagaagtccctct

SEQ ID NO: 2636 - DNA, 20 bp, synthetic construct
  misc_feature 1..20: note = chemically synthesized
  source 1..20: mol_type = other DNA
ggagggaagaagtccctctg

SEQ ID NO: 2637 - DNA, 20 bp, synthetic construct
  misc_feature 1..20: note = chemically synthesized
  source 1..20: mol_type = other DNA
gaagaagtccctctggggct

SEQ ID NO: 2638 - DNA, 20 bp, synthetic construct
  misc_feature 1..20: note = chemically synthesized
  source 1..20: mol_type = other DNA
gaagtccctctggggctgag

SEQ ID NO: 2639 - DNA, 20 bp, synthetic construct
  misc_feature 1..20: note = chemically synthesized
  source 1..20: mol_type = other DNA
agtccctctggggctgagtg

SEQ ID NO: 2640 - DNA, 20 bp, synthetic construct
  misc_feature 1..20: note = chemically synthesized
  source 1..20: mol_type = other DNA
ccctctggggctgagtggag

SEQ ID NO: 2641 - DNA, 20 bp, synthetic construct
  misc_feature 1..20: note = chemically synthesized
  source 1..20: mol_type = other DNA
cctctggggctgagtggagt

SEQ ID NO: 2642 - DNA, 20 bp, synthetic construct
  misc_feature 1..20: note = chemically synthesized
  source 1..20: mol_type = other DNA
ctctggggctgagtggagtg

SEQ ID NO: 2643 - DNA, 20 bp, synthetic construct
  misc_feature 1..20: note = chemically synthesized
  source 1..20: mol_type = other DNA
ctggggctgagtggagtggg

SEQ ID NO: 2644 - DNA, 20 bp, synthetic construct
  misc_feature 1..20: note = chemically synthesized
  source 1..20: mol_type = other DNA
gggctgagtggagtggggag

SEQ ID NO: 2645 - DNA, 20 bp, synthetic construct
  misc_feature 1..20: note = chemically synthesized
  source 1..20: mol_type = other DNA
tggagtggggagcggctgcc

SEQ ID NO: 2646 - DNA, 20 bp, synthetic construct
  misc_feature 1..20: note = chemically synthesized
  source 1..20: mol_type = other DNA
gtggggagcggctgccaagt

SEQ ID NO: 2647 - DNA, 20 bp, synthetic construct
  misc_feature 1..20: note = chemically synthesized
  source 1..20: mol_type = other DNA
agcggctgccaagtgagtaa

SEQ ID NO: 2648 - DNA, 20 bp, synthetic construct
  misc_feature 1..20: note = chemically synthesized
  source 1..20: mol_type = other DNA
atacatatgacaatctattt

SEQ ID NO: 2649 - DNA, 20 bp, synthetic construct
  misc_feature 1..20: note = chemically synthesized
  source 1..20: mol_type = other DNA
catatgacaatctattttgg

SEQ ID NO: 2650 - DNA, 20 bp, synthetic construct
  misc_feature 1..20: note = chemically synthesized
  source 1..20: mol_type = other DNA
tattttggaagtaactcctt

SEQ ID NO: 2651 - DNA, 20 bp, synthetic construct
  misc_feature 1..20: note = chemically synthesized
  source 1..20: mol_type = other DNA
taactccttcagtacttaaa

SEQ ID NO: 2652 - DNA, 20 bp, synthetic construct
  misc_feature 1..20: note = chemically synthesized
  source 1..20: mol_type = other DNA
tccttcagtacttaaaaagt

SEQ ID NO: 2653 - DNA, 20 bp, synthetic construct
  misc_feature 1..20: note = chemically synthesized
  source 1..20: mol_type = other DNA
ccttcagtacttaaaaagta

SEQ ID NO: 2654 - DNA, 20 bp, synthetic construct
  misc_feature 1..20: note = chemically synthesized
  source 1..20: mol_type = other DNA
cttcagtacttaaaaagtaa

SEQ ID NO: 2655 - DNA, 20 bp, synthetic construct
  misc_feature 1..20: note = chemically synthesized
  source 1..20: mol_type = other DNA
taaaaagtaagggcaatttc

SEQ ID NO: 2656 - DNA, 20 bp, synthetic construct
  misc_feature 1..20: note = chemically synthesized
  source 1..20: mol_type = other DNA
aattctcatctctatacaca

SEQ ID NO: 2657 - DNA, 20 bp, synthetic construct
  misc_feature 1..20: note = chemically synthesized
  source 1..20: mol_type = other DNA
tctatacacatggacatttg

SEQ ID NO: 2658 - DNA, 20 bp, synthetic construct
  misc_feature 1..20: note = chemically synthesized
  source 1..20: mol_type = other DNA
atacacatggacatttgtag

SEQ ID NO: 2659 - DNA, 20 bp, synthetic construct
  misc_feature 1..20: note = chemically synthesized
  source 1..20: mol_type = other DNA
tggacatttgtagaagaaat

SEQ ID NO: 2660 - DNA, 20 bp, synthetic construct
  misc_feature 1..20: note = chemically synthesized
  source 1..20: mol_type = other DNA
ggacatttgtagaagaaata

SEQ ID NO: 2661 - DNA, 20 bp, synthetic construct
  misc_feature 1..20: note = chemically synthesized
  source 1..20: mol_type = other DNA
ctcaacttacaaataccctg

SEQ ID NO: 2662 - DNA, 20 bp, synthetic construct
  misc_feature 1..20: note = chemically synthesized
  source 1..20: mol_type = other DNA
tcaacttacaaataccctgc

SEQ ID NO: 2663 - DNA, 20 bp, synthetic construct
  misc_feature 1..20: note = chemically synthesized
  source 1..20: mol_type = other DNA
caacttacaaataccctgcg

SEQ ID NO: 2664 - DNA, 20 bp, synthetic construct
  misc_feature 1..20: note = chemically synthesized
  source 1..20: mol_type = other DNA
ggcatattctgcactcatcc

SEQ ID NO: 2665 - DNA, 20 bp, synthetic construct
  misc_feature 1..20: note = chemically synthesized
  source 1..20: mol_type = other DNA
gcatattctgcactcatccc

SEQ ID NO: 2666 - DNA, 20 bp, synthetic construct
  misc_feature 1..20: note = chemically synthesized
  source 1..20: mol_type = other DNA
ttctgcactcatcccaggcg

SEQ ID NO: 2667 - DNA, 20 bp, synthetic construct
  misc_feature 1..20: note = chemically synthesized
  source 1..20: mol_type = other DNA
tctgcactcatcccaggcgt

SEQ ID NO: 2668 - DNA, 20 bp, synthetic construct
  misc_feature 1..20: note = chemically synthesized
  source 1..20: mol_type = other DNA
ctgcactcatcccaggcgtg

SEQ ID NO: 2669 - DNA, 20 bp, synthetic construct
  misc_feature 1..20: note = chemically synthesized
  source 1..20: mol_type = other DNA
ctcatcccaggcgtggggat

SEQ ID NO: 2670 - DNA, 20 bp, synthetic construct
  misc_feature 1..20: note = chemically synthesized
  source 1..20: mol_type = other DNA
catcccaggcgtggggatta

SEQ ID NO: 2671 - DNA, 20 bp, synthetic construct
  misc_feature 1..20: note = chemically synthesized
  source 1..20: mol_type = other DNA
ggggattagagctccatgtg

SEQ ID NO: 2672 - DNA, 20 bp, synthetic construct
  misc_feature 1..20: note = chemically synthesized
  source 1..20: mol_type = other DNA
tagagctccatgtgcagaac

SEQ ID NO: 2673 - DNA, 20 bp, synthetic construct
  misc_feature 1..20: note = chemically synthesized
  source 1..20: mol_type = other DNA
agagctccatgtgcagaacg

SEQ ID NO: 2674 - DNA, 20 bp, synthetic construct
  misc_feature 1..20: note = chemically synthesized
  source 1..20: mol_type = other DNA
gagctccatgtgcagaacga

SEQ ID NO: 2675 - DNA, 20 bp, synthetic construct
  misc_feature 1..20: note = chemically synthesized
  source 1..20: mol_type = other DNA
agctccatgtgcagaacgag

SEQ ID NO: 2676 - DNA, 20 bp, synthetic construct
  misc_feature 1..20: note = chemically synthesized
  source 1..20: mol_type = other DNA
ctccatgtgcagaacgaggg

SEQ ID NO: 2677 - DNA, 20 bp, synthetic construct
  misc_feature 1..20: note = chemically synthesized
  source 1..20: mol_type = other DNA
tccatgtgcagaacgagggg

SEQ ID NO: 2678 - DNA, 20 bp, synthetic construct
  misc_feature 1..20: note = chemically synthesized
  source 1..20: mol_type = other DNA
catgtgcagaacgaggggag

SEQ ID NO: 2679 - DNA, 20 bp, synthetic construct
  misc_feature 1..20: note = chemically synthesized
  source 1..20: mol_type = other DNA
tgtgcagaacgaggggagga

SEQ ID NO: 2680 - DNA, 20 bp, synthetic construct
  misc_feature 1..20: note = chemically synthesized
  source 1..20: mol_type = other DNA
gtgcagaacgaggggaggag

SEQ ID NO: 2681 - DNA, 20 bp, synthetic construct
  misc_feature 1..20: note = chemically synthesized
  source 1..20: mol_type = other DNA
gaggggaggagaggcccctc

SEQ ID NO: 2682 - DNA, 20 bp, synthetic construct
  misc_feature 1..20: note = chemically synthesized
  source 1..20: mol_type = other DNA
gaggagaggcccctccagtg

SEQ ID NO: 2683 - DNA, 20 bp, synthetic construct
  misc_feature 1..20: note = chemically synthesized
  source 1..20: mol_type = other DNA
gagaggcccctccagtgcag

SEQ ID NO: 2684 - DNA, 20 bp, synthetic construct
  misc_feature 1..20: note = chemically synthesized
  source 1..20: mol_type = other DNA
gtgcagaagtttatctgtga

SEQ ID NO: 2685 - DNA, 20 bp, synthetic construct
  misc_feature 1..20: note = chemically synthesized
  source 1..20: mol_type = other DNA
tgtgaaagaaacccaaaatc

SEQ ID NO: 2686 - DNA, 20 bp, synthetic construct
  misc_feature 1..20: note = chemically synthesized
  source 1..20: mol_type = other DNA
aaacccaaaatcaagcacta

SEQ ID NO: 2687 - DNA, 20 bp, synthetic construct
  misc_feature 1..20: note = chemically synthesized
  source 1..20: mol_type = other DNA
acaacgtgcatcataaacca

SEQ ID NO: 2688 - DNA, 20 bp, synthetic construct
  misc_feature 1..20: note = chemically synthesized
  source 1..20: mol_type = other DNA
caacgtgcatcataaaccac

SEQ ID NO: 2689 - DNA, 20 bp, synthetic construct
  misc_feature 1..20: note = chemically synthesized
  source 1..20: mol_type = other DNA
acatttcaattccattaaaa

SEQ ID NO: 2690 - DNA, 20 bp, synthetic construct
  misc_feature 1..20: note = chemically synthesized
  source 1..20: mol_type = other DNA
agattacaacatcattacaa

SEQ ID NO: 2691 - DNA, 20 bp, synthetic construct
  misc_feature 1..20: note = chemically synthesized
  source 1..20: mol_type = other DNA
acatcattacaacagccttg

SEQ ID NO: 2692 - DNA, 20 bp, synthetic construct
  misc_feature 1..20: note = chemically synthesized
  source 1..20: mol_type = other DNA
cattacaacagccttgcaga

SEQ ID NO: 2693 - DNA, 20 bp, synthetic construct
  misc_feature 1..20: note = chemically synthesized
  source 1..20: mol_type = other DNA
acagccttgcagatagttaa

SEQ ID NO: 2694 - DNA, 20 bp, synthetic construct
  misc_feature 1..20: note = chemically synthesized
  source 1..20: mol_type = other DNA
cagccttgcagatagttaac

SEQ ID NO: 2695 - DNA, 20 bp, synthetic construct
  misc_feature 1..20: note = chemically synthesized
  source 1..20: mol_type = other DNA
tgcagatagttaacaggccc

SEQ ID NO: 2696 - DNA, 20 bp, synthetic construct
  misc_feature 1..20: note = chemically synthesized
  source 1..20: mol_type = other DNA
gcagatagttaacaggccca

SEQ ID NO: 2697 - DNA, 20 bp, synthetic construct
  misc_feature 1..20: note = chemically synthesized
  source 1..20: mol_type = other DNA
aggcccaaggcctgaaacaa

SEQ ID NO: 2698 - DNA, 20 bp, synthetic construct
  misc_feature 1..20: note = chemically synthesized
  source 1..20: mol_type = other DNA
cccaaggcctgaaacaaaag

SEQ ID NO: 2699 - DNA, 20 bp, synthetic construct
  misc_feature 1..20: note = chemically synthesized
  source 1..20: mol_type = other DNA
caaggcctgaaacaaaagaa

SEQ ID NO: 2700 - DNA, 20 bp, synthetic construct
  misc_feature 1..20: note = chemically synthesized
  source 1..20: mol_type = other DNA
ggcctgaaacaaaagaagag

SEQ ID NO: 2701 - DNA, 20 bp, synthetic construct
  misc_feature 1..20: note = chemically synthesized
  source 1..20: mol_type = other DNA
tgaaacaaaagaagagtggt

SEQ ID NO: 2702 - DNA, 20 bp, synthetic construct
  misc_feature 1..20: note = chemically synthesized
  source 1..20: mol_type = other DNA
aagagtggtgagttatttcc

SEQ ID NO: 2703 - DNA, 20 bp, synthetic construct
  misc_feature 1..20: note = chemically synthesized
  source 1..20: mol_type = other DNA
gagtggtgagttatttccca

SEQ ID NO: 2704 - DNA, 20 bp, synthetic construct
  misc_feature 1..20: note = chemically synthesized
  source 1..20: mol_type = other DNA
ttctgttttgttttcaattt

SEQ ID NO: 2705 - DNA, 20 bp, synthetic construct
  misc_feature 1..20: note = chemically synthesized
  source 1..20: mol_type = other DNA
aatttcggtctttttgacaa

SEQ ID NO: 2706 - DNA, 20 bp, synthetic construct
  misc_feature 1..20: note = chemically synthesized
  source 1..20: mol_type = other DNA
ggtctttttgacaaaagtga

SEQ ID NO: 2707 - DNA, 20 bp, synthetic construct
  misc_feature 1..20: note = chemically synthesized
  source 1..20: mol_type = other DNA
gtctttttgacaaaagtgaa

SEQ ID NO: 2708 - DNA, 20 bp, synthetic construct
  misc_feature 1..20: note = chemically synthesized
  source 1..20: mol_type = other DNA
tctttttgacaaaagtgaaa

SEQ ID NO: 2709 - DNA, 20 bp, synthetic construct
  misc_feature 1..20: note = chemically synthesized
  source 1..20: mol_type = other DNA
aaaagtgaaagggtttgttt

SEQ ID NO: 2710 - DNA, 20 bp, synthetic construct
  misc_feature 1..20: note = chemically synthesized
  source 1..20: mol_type = other DNA
aaagtgaaagggtttgtttt

SEQ ID NO: 2711 - DNA, 20 bp, synthetic construct
  misc_feature 1..20: note = chemically synthesized
  source 1..20: mol_type = other DNA
tgaaagggtttgttttagga

SEQ ID NO: 2712 - DNA, 20 bp, synthetic construct
  misc_feature 1..20: note = chemically synthesized
  source 1..20: mol_type = other DNA
gaaagggtttgttttaggaa

SEQ ID NO: 2713 - DNA, 20 bp, synthetic construct
  misc_feature 1..20: note = chemically synthesized
  source 1..20: mol_type = other DNA
aaagggtttgttttaggaaa

SEQ ID NO: 2714 - DNA, 20 bp, synthetic construct
  misc_feature 1..20: note = chemically synthesized
  source 1..20: mol_type = other DNA
aagggtttgttttaggaaag

SEQ ID NO: 2715 - DNA, 20 bp, synthetic construct
  misc_feature 1..20: note = chemically synthesized
  source 1..20: mol_type = other DNA
gggtttgttttaggaaaggg

SEQ ID NO: 2716 - DNA, 20 bp, synthetic construct
  misc_feature 1..20: note = chemically synthesized
  source 1..20: mol_type = other DNA
gtttgttttaggaaagggga

SEQ ID NO: 2717 - DNA, 20 bp, synthetic construct
  misc_feature 1..20: note = chemically synthesized
  source 1..20: mol_type = other DNA
tttgttttaggaaaggggag

SEQ ID NO: 2718 - DNA, 20 bp, synthetic construct
  misc_feature 1..20: note = chemically synthesized
  source 1..20: mol_type = other DNA
gttttaggaaaggggagagg

SEQ ID NO: 2719 - DNA, 20 bp, synthetic construct
  misc_feature 1..20: note = chemically synthesized
  source 1..20: mol_type = other DNA
gaaaggggagaggtggtctt

SEQ ID NO: 2720 - DNA, 20 bp, synthetic construct
  misc_feature 1..20: note = chemically synthesized
  source 1..20: mol_type = other DNA
gttgtttgattattgtcttg

SEQ ID NO: 2721 - DNA, 20 bp, synthetic construct
  misc_feature 1..20: note = chemically synthesized
  source 1..20: mol_type = other DNA
tttgattattgtcttgtgga

SEQ ID NO: 2722 - DNA, 20 bp, synthetic construct
  misc_feature 1..20: note = chemically synthesized
  source 1..20: mol_type = other DNA
gattattgtcttgtggaaag

SEQ ID NO: 2723 - DNA, 20 bp, synthetic construct
  misc_feature 1..20: note = chemically synthesized
  source 1..20: mol_type = other DNA
cttgtggaaagaagatgtgt

SEQ ID NO: 2724 - DNA, 20 bp, synthetic construct
  misc_feature 1..20: note = chemically synthesized
  source 1..20: mol_type = other DNA
gtggaaagaagatgtgtaag

SEQ ID NO: 2725 - DNA, 20 bp, synthetic construct
  misc_feature 1..20: note = chemically synthesized
  source 1..20: mol_type = other DNA
aaagaagatgtgtaagcagc

SEQ ID NO: 2726 - DNA, 20 bp, synthetic construct
  misc_feature 1..20: note = chemically synthesized
  source 1..20: mol_type = other DNA
aagaagatgtgtaagcagca

SEQ ID NO: 2727 - DNA, 20 bp, synthetic construct
  misc_feature 1..20: note = chemically synthesized
  source 1..20: mol_type = other DNA
agaagatgtgtaagcagcaa

SEQ ID NO: 2728 - DNA, 20 bp, synthetic construct
  misc_feature 1..20: note = chemically synthesized
  source 1..20: mol_type = other DNA
gaagatgtgtaagcagcaag

SEQ ID NO: 2729 - DNA, 20 bp, synthetic construct
  misc_feature 1..20: note = chemically synthesized
  source 1..20: mol_type = other DNA
gtaagcagcaaggggaaaac

SEQ ID NO: 2730 - DNA, 20 bp, synthetic construct
  misc_feature 1..20: note = chemically synthesized
  source 1..20: mol_type = other DNA
ggggaaaactggtaatattg

SEQ ID NO: 2731 - DNA, 20 bp, synthetic construct
  misc_feature 1..20: note = chemically synthesized
  source 1..20: mol_type = other DNA
gggaaaactggtaatattgt

SEQ ID NO: 2732 - DNA, 20 bp, synthetic construct
  misc_feature 1..20: note = chemically synthesized
  source 1..20: mol_type = other DNA
aaaactggtaatattgtggg

SEQ ID NO: 2733 - DNA, 20 bp, synthetic construct
  misc_feature 1..20: note = chemically synthesized
  source 1..20: mol_type = other DNA
tggtaatattgtgggtagcc

SEQ ID NO: 2734 - DNA, 20 bp, synthetic construct
  misc_feature 1..20: note = chemically synthesized
  source 1..20: mol_type = other DNA
ttgtgggtagcctggaaaca

SEQ ID NO: 2735 - DNA, 20 bp, synthetic construct
  misc_feature 1..20: note = chemically synthesized
  source 1..20: mol_type = other DNA
tgtgggtagcctggaaacat

SEQ ID NO: 2736 - DNA, 20 bp, synthetic construct
  misc_feature 1..20: note = chemically synthesized
  source 1..20: mol_type = other DNA
gtgggtagcctggaaacatg

SEQ ID NO: 2737 - DNA, 20 bp, synthetic construct
  misc_feature 1..20: note = chemically synthesized
  source 1..20: mol_type = other DNA
tgggtagcctggaaacatgg

SEQ ID NO: 2738 - DNA, 20 bp, synthetic construct
  misc_feature 1..20: note = chemically synthesized
  source 1..20: mol_type = other DNA
gggtagcctggaaacatggg

SEQ ID NO: 2739 - DNA, 20 bp, synthetic construct
  misc_feature 1..20: note = chemically synthesized
  source 1..20: mol_type = other DNA
catggggggattttatctgc

SEQ ID NO: 2740 - DNA, 20 bp, synthetic construct
  misc_feature 1..20: note = chemically synthesized
  source 1..20: mol_type = other DNA
atggggggattttatctgca

SEQ ID NO: 2741 - DNA, 20 bp, synthetic construct
  misc_feature 1..20: note = chemically synthesized
  source 1..20: mol_type = other DNA
ggggattttatctgcaaggc

SEQ ID NO: 2742 - DNA, 20 bp, synthetic construct
  misc_feature 1..20: note = chemically synthesized
  source 1..20: mol_type = other DNA
catacattaactttacttta

SEQ ID NO: 2743 - DNA, 20 bp, synthetic construct
  misc_feature 1..20: note = chemically synthesized
  source 1..20: mol_type = other DNA
tttactttatagacaaaccc

SEQ ID NO: 2744 - DNA, 20 bp, synthetic construct
  misc_feature 1..20: note = chemically synthesized
  source 1..20: mol_type = other DNA
tatagacaaacccaagcaaa

SEQ ID NO: 2745 - DNA, 20 bp, synthetic construct
  misc_feature 1..20: note = chemically synthesized
  source 1..20: mol_type = other DNA
agcaaaaagcaaaatgctga

SEQ ID NO: 2746 - DNA, 20 bp, synthetic construct
  misc_feature 1..20: note = chemically synthesized
  source 1..20: mol_type = other DNA
gcaaaaagcaaaatgctgat

SEQ ID NO: 2747 - DNA, 20 bp, synthetic construct
  misc_feature 1..20: note = chemically synthesized
  source 1..20: mol_type = other DNA
gcaaaatgctgataggaaat

SEQ ID NO: 2748 - DNA, 20 bp, synthetic construct
  misc_feature 1..20: note = chemically synthesized
  source 1..20: mol_type = other DNA
aaatgctgataggaaatgag

SEQ ID NO: 2749 - DNA, 20 bp, synthetic construct
  misc_feature 1..20: note = chemically synthesized
  source 1..20: mol_type = other DNA
gatttgtgaatcgtttttta

SEQ ID NO: 2750 - DNA, 20 bp, synthetic construct
  misc_feature 1..20: note = chemically synthesized
  source 1..20: mol_type = other DNA
atttgtgaatcgttttttat

SEQ ID NO: 2751 - DNA, 20 bp, synthetic construct
  misc_feature 1..20: note = chemically synthesized
  source 1..20: mol_type = other DNA
gtgaatcgttttttatggga

SEQ ID NO: 2752 - DNA, 20 bp, synthetic construct
  misc_feature 1..20: note = chemically synthesized
  source 1..20: mol_type = other DNA
gaatcgttttttatgggaca

SEQ ID NO: 2753 - DNA, 20 bp, synthetic construct
  misc_feature 1..20: note = chemically synthesized
  source 1..20: mol_type = other DNA
ttcccatgctatatttatga

SEQ ID NO: 2754 - DNA, 20 bp, synthetic construct
  misc_feature 1..20: note = chemically synthesized
  source 1..20: mol_type = other DNA
tatatttatgatagcgcctt

SEQ ID NO: 2755 - DNA, 20 bp, synthetic construct
  misc_feature 1..20: note = chemically synthesized
  source 1..20: mol_type = other DNA
tatgatagcgccttcagtga

SEQ ID NO: 2756 - DNA, 20 bp, synthetic construct
  misc_feature 1..20: note = chemically synthesized
  source 1..20: mol_type = other DNA
atgatagcgccttcagtgat

SEQ ID NO: 2757 - DNA, 20 bp, synthetic construct
  misc_feature 1..20: note = chemically synthesized
  source 1..20: mol_type = other DNA
tgatagcgccttcagtgata

SEQ ID NO: 2758 - DNA, 20 bp, synthetic construct
  misc_feature 1..20: note = chemically synthesized
  source 1..20: mol_type = other DNA
gatagcgccttcagtgatag

SEQ ID NO: 2759 - DNA, 20 bp, synthetic construct
  misc_feature 1..20: note = chemically synthesized
  source 1..20: mol_type = other DNA
cttcagtgataggggaaacc

SEQ ID NO: 2760 - DNA, 20 bp, synthetic construct
  misc_feature 1..20: note = chemically synthesized
  source 1..20: mol_type = other DNA
ttcagtgataggggaaacct

SEQ ID NO: 2761 - DNA, 20 bp, synthetic construct
  misc_feature 1..20: note = chemically synthesized
  source 1..20: mol_type = other DNA
aggggaaacctgggcatttc

SEQ ID NO: 2762 - DNA, 20 bp, synthetic construct
  misc_feature 1..20: note = chemically synthesized
  source 1..20: mol_type = other DNA
aacctgggcatttctggact

SEQ ID NO: 2763 - DNA, 20 bp, synthetic construct
  misc_feature 1..20: note = chemically synthesized
  source 1..20: mol_type = other DNA
tgggcatttctggactgagc

SEQ ID NO: 2764 - DNA, 20 bp, synthetic construct
  misc_feature 1..20: note = chemically synthesized
  source 1..20: mol_type = other DNA
gggcatttctggactgagct

SEQ ID NO: 2765 - DNA, 20 bp, synthetic construct
  misc_feature 1..20: note = chemically synthesized
  source 1..20: mol_type = other DNA
gactgagctgggccatactc

SEQ ID NO: 2766 - DNA, 20 bp, synthetic construct
  misc_feature 1..20: note = chemically synthesized
  source 1..20: mol_type = other DNA
tactctagaatcctgtcaac

SEQ ID NO: 2767 - DNA, 20 bp, synthetic construct
  misc_feature 1..20: note = chemically synthesized
  source 1..20: mol_type = other DNA
tgtcaactggaaaccttaca

SEQ ID NO: 2768 - DNA, 20 bp, synthetic construct
  misc_feature 1..20: note = chemically synthesized
  source 1..20: mol_type = other DNA
ctggaaaccttacacagatg

SEQ ID NO: 2769 - DNA, 20 bp, synthetic construct
  misc_feature 1..20: note = chemically synthesized
  source 1..20: mol_type = other DNA
atgtggcttctcacaataca

SEQ ID NO: 2770 - DNA, 20 bp, synthetic construct
  misc_feature 1..20: note = chemically synthesized
  source 1..20: mol_type = other DNA
cttctcacaatacaaagcaa

SEQ ID NO: 2771 - DNA, 20 bp, synthetic construct
  misc_feature 1..20: note = chemically synthesized
  source 1..20: mol_type = other DNA
ctcacaatacaaagcaatgg

SEQ ID NO: 2772 - DNA, 20 bp, synthetic construct
  misc_feature 1..20: note = chemically synthesized
  source 1..20: mol_type = other DNA
atacaaagcaatggaagata

SEQ ID NO: 2773 - DNA, 20 bp, synthetic construct
  misc_feature 1..20: note = chemically synthesized
  source 1..20: mol_type = other DNA
aagcaatggaagataaagat

SEQ ID NO: 2774 - DNA, 20 bp, synthetic construct
  misc_feature 1..20: note = chemically synthesized
  source 1..20: mol_type = other DNA
gaagataaagattagacttc

SEQ ID NO: 2775 - DNA, 20 bp, synthetic construct
  misc_feature 1..20: note = chemically synthesized
  source 1..20: mol_type = other DNA
aagataaagattagacttct

SEQ ID NO: 2776 - DNA, 20 bp, synthetic construct
  misc_feature 1..20: note = chemically synthesized
  source 1..20: mol_type = other DNA
agataaagattagacttctg

SEQ ID NO: 2777 - DNA, 20 bp, synthetic construct
  misc_feature 1..20: note = chemically synthesized
  source 1..20: mol_type = other DNA
aactttgaccattaaatgac

SEQ ID NO: 2778 - DNA, 20 bp, synthetic construct
  misc_feature 1..20: note = chemically synthesized
  source 1..20: mol_type = other DNA
actttgaccattaaatgaca

SEQ ID NO: 2779 - DNA, 20 bp, synthetic construct
  misc_feature 1..20: note = chemically synthesized
  source 1..20: mol_type = other DNA
tgaccattaaatgacaagga

SEQ ID NO: 2780 - DNA, 20 bp, synthetic construct
  misc_feature 1..20: note = chemically synthesized
  source 1..20: mol_type = other DNA
ttaaatgacaaggaaagaac

SEQ ID NO: 2781 - DNA, 20 bp, synthetic construct
  misc_feature 1..20: note = chemically synthesized
  source 1..20: mol_type = other DNA
aaccagcattccaataatgc

SEQ ID NO: 2782 - DNA, 20 bp, synthetic construct
  misc_feature 1..20: note = chemically synthesized
  source 1..20: mol_type = other DNA
attccaataatgccagcacc

SEQ ID NO: 2783 - DNA, 20 bp, synthetic construct
  misc_feature 1..20: note = chemically synthesized
  source 1..20: mol_type = other DNA
tactgcactttgttgtactc

SEQ ID NO: 2784 - DNA, 20 bp, synthetic construct
  misc_feature 1..20: note = chemically synthesized
  source 1..20: mol_type = other DNA
cactttgttgtactctggtg

SEQ ID NO: 2785 - DNA, 20 bp, synthetic construct
  misc_feature 1..20: note = chemically synthesized
  source 1..20: mol_type = other DNA
tgttgtactctggtgaagac

SEQ ID NO: 2786 - DNA, 20 bp, synthetic construct
  misc_feature 1..20: note = chemically synthesized
  source 1..20: mol_type = other DNA
cactaataaaatgaatctaa

SEQ ID NO: 2787 - DNA, 20 bp, synthetic construct
  misc_feature 1..20: note = chemically synthesized
  source 1..20: mol_type = other DNA
aatagtcaatgaaacatttg

SEQ ID NO: 2788 - DNA, 20 bp, synthetic construct
  misc_feature 1..20: note = chemically synthesized
  source 1..20: mol_type = other DNA
aatgaaacatttgtagcact

SEQ ID NO: 2789 - DNA, 20 bp, synthetic construct
  misc_feature 1..20: note = chemically synthesized
  source 1..20: mol_type = other DNA
tgtagcactgagattttttt

SEQ ID NO: 2790 - DNA, 20 bp, synthetic construct
  misc_feature 1..20: note = chemically synthesized
  source 1..20: mol_type = other DNA
agcactgagatttttttgag

SEQ ID NO: 2791 - DNA, 20 bp, synthetic construct
  misc_feature 1..20: note = chemically synthesized
  source 1..20: mol_type = other DNA
cactgagatttttttgagaa

SEQ ID NO: 2792 - DNA, 20 bp, synthetic construct
  misc_feature 1..20: note = chemically synthesized
  source 1..20: mol_type = other DNA
actgagatttttttgagaag

SEQ ID NO: 2793 - DNA, 20 bp, synthetic construct
  misc_feature 1..20: note = chemically synthesized
  source 1..20: mol_type = other DNA
tttttgagaagaggaaaatt

SEQ ID NO: 2794 - DNA, 20 bp, synthetic construct
  misc_feature 1..20: note = chemically synthesized
  source 1..20: mol_type = other DNA
aaaatttggtttgtgcaatc

SEQ ID NO: 2795 - DNA, 20 bp, synthetic construct
  misc_feature 1..20: note = chemically synthesized
  source 1..20: mol_type = other DNA
aaatttggtttgtgcaatct

SEQ ID NO: 2796 - DNA, 20 bp, synthetic construct
  misc_feature 1..20: note = chemically synthesized
  source 1..20: mol_type = other DNA
aatttggtttgtgcaatctg

SEQ ID NO: 2797 - DNA, 20 bp, synthetic construct
  misc_feature 1..20: note = chemically synthesized
  source 1..20: mol_type = other DNA
tgtgcaatctggggatttta

SEQ ID NO: 2798 - DNA, 20 bp, synthetic construct
  misc_feature 1..20: note = chemically synthesized
  source 1..20: mol_type = other DNA
tggggattttacggtttatg

SEQ ID NO: 2799 - DNA, 20 bp, synthetic construct
  misc_feature 1..20: note = chemically synthesized
  source 1..20: mol_type = other DNA
gattttacggtttatgtggt

SEQ ID NO: 2800 - DNA, 20 bp, synthetic construct
  misc_feature 1..20: note = chemically synthesized
  source 1..20: mol_type = other DNA
cggtttatgtggtaagtgcc

SEQ ID NO: 2801 - DNA, 20 bp, synthetic construct
  misc_feature 1..20: note = chemically synthesized
  source 1..20: mol_type = other DNA
ggtaagtgcctagcttttcc

SEQ ID NO: 2802 - DNA, 20 bp, synthetic construct
  misc_feature 1..20: note = chemically synthesized
  source 1..20: mol_type = other DNA
agcttttccaagtcctcctc

SEQ ID NO: 2803 - DNA, 20 bp, synthetic construct
  misc_feature 1..20: note = chemically synthesized
  source 1..20: mol_type = other DNA
cctctagctaactaaccatg

SEQ ID NO: 2804 - DNA, 20 bp, synthetic construct
  misc_feature 1..20: note = chemically synthesized
  source 1..20: mol_type = other DNA
accatgtagctgtccatctt

SEQ ID NO: 2805 - DNA, 20 bp, synthetic construct
  misc_feature 1..20: note = chemically synthesized
  source 1..20: mol_type = other DNA
tgtagctgtccatcttgaga

SEQ ID NO: 2806 - DNA, 20 bp, synthetic construct
  misc_feature 1..20: note = chemically synthesized
  source 1..20: mol_type = other DNA
ctgtccatcttgagacagac

SEQ ID NO: 2807 - DNA, 20 bp, synthetic construct
  misc_feature 1..20: note = chemically synthesized
  source 1..20: mol_type = other DNA
gtccatcttgagacagactg

SEQ ID NO: 2808 - DNA, 20 bp, synthetic construct
  misc_feature 1..20: note = chemically synthesized
  source 1..20: mol_type = other DNA
tccatcttgagacagactgg

SEQ ID NO: 2809 - DNA, 20 bp, synthetic construct
  misc_feature 1..20: note = chemically synthesized
  source 1..20: mol_type = other DNA
tcttgagacagactggagga

SEQ ID NO: 2810 - DNA, 20 bp, synthetic construct
  misc_feature 1..20: note = chemically synthesized
  source 1..20: mol_type = other DNA
gagacagactggaggataga

SEQ ID NO: 2811 - DNA, 20 bp, synthetic construct
  misc_feature 1..20: note = chemically synthesized
  source 1..20: mol_type = other DNA
agactggaggatagatggtg

SEQ ID NO: 2812 - DNA, 20 bp, synthetic construct
  misc_feature 1..20: note = chemically synthesized
  source 1..20: mol_type = other DNA
gactggaggatagatggtgc

SEQ ID NO: 2813 - DNA, 20 bp, synthetic construct
  misc_feature 1..20: note = chemically synthesized
  source 1..20: mol_type = other DNA
ctggaggatagatggtgcag

SEQ ID NO: 2814 - DNA, 20 bp, synthetic construct
  misc_feature 1..20: note = chemically synthesized
  source 1..20: mol_type = other DNA
aggagacgctctgtgtgttc

SEQ ID NO: 2815 - DNA, 20 bp, synthetic construct
  misc_feature 1..20: note = chemically synthesized
  source 1..20: mol_type = other DNA
gagacgctctgtgtgttcta

SEQ ID NO: 2816 - DNA, 20 bp, synthetic construct
  misc_feature 1..20: note = chemically synthesized
  source 1..20: mol_type = other DNA
agacgctctgtgtgttctag

SEQ ID NO: 2817 - DNA, 20 bp, synthetic construct
  misc_feature 1..20: note = chemically synthesized
  source 1..20: mol_type = other DNA
ctctgtgtgttctagaggtt

SEQ ID NO: 2818 - DNA, 20 bp, synthetic construct
  misc_feature 1..20: note = chemically synthesized
  source 1..20: mol_type = other DNA
ctgtgtgttctagaggtttg

SEQ ID NO: 2819 - DNA, 20 bp, synthetic construct
  misc_feature 1..20: note = chemically synthesized
  source 1..20: mol_type = other DNA
ggtttggagttcatgatgat

SEQ ID NO: 2820 - DNA, 20 bp, synthetic construct
  misc_feature 1..20: note = chemically synthesized
  source 1..20: mol_type = other DNA
gtttggagttcatgatgatt

SEQ ID NO: 2821 - DNA, 20 bp, synthetic construct
  misc_feature 1..20: note = chemically synthesized
  source 1..20: mol_type = other DNA
tttggagttcatgatgattg

SEQ ID NO: 2822 - DNA, 20 bp, synthetic construct
  misc_feature 1..20: note = chemically synthesized
  source 1..20: mol_type = other DNA
tggagttcatgatgattggg

SEQ ID NO: 2823 - DNA, 20 bp, synthetic construct
  misc_feature 1..20: note = chemically synthesized
  source 1..20: mol_type = other DNA
ggagttcatgatgattgggg

SEQ ID NO: 2824 - DNA, 20 bp, synthetic construct
  misc_feature 1..20: note = chemically synthesized
  source 1..20: mol_type = other DNA
gagttcatgatgattgggga

SEQ ID NO: 2825 - DNA, 20 bp, synthetic construct
  misc_feature 1..20: note = chemically synthesized
  source 1..20: mol_type = other DNA
ttcatgatgattggggaggg

SEQ ID NO: 2826 - DNA, 20 bp, synthetic construct
  misc_feature 1..20: note = chemically synthesized
  source 1..20: mol_type = other DNA
tcatgatgattggggagggc

SEQ ID NO: 2827 - DNA, 20 bp, synthetic construct
  misc_feature 1..20: note = chemically synthesized
  source 1..20: mol_type = other DNA
atgatgattggggagggcgg

SEQ ID NO: 2828 - DNA, 20 bp, synthetic construct
  misc_feature 1..20: note = chemically synthesized
  source 1..20: mol_type = other DNA
gattggggagggcgggagac

SEQ ID NO: 2829 - DNA, 20 bp, synthetic construct
  misc_feature 1..20: note = chemically synthesized
  source 1..20: mol_type = other DNA
agggcgggagacaagaaaaa

SEQ ID NO: 2830 - DNA, 20 bp, synthetic construct
  misc_feature 1..20: note = chemically synthesized
  source 1..20: mol_type = other DNA
acaagaaaaacagactttga

SEQ ID NO: 2831 - DNA, 20 bp, synthetic construct
  misc_feature 1..20: note = chemically synthesized
  source 1..20: mol_type = other DNA
agactttgatggtgaacaaa

SEQ ID NO: 2832 - DNA, 20 bp, synthetic construct
  misc_feature 1..20: note = chemically synthesized
  source 1..20: mol_type = other DNA
acaaacagtatgttttccat

SEQ ID NO: 2833 - DNA, 20 bp, synthetic construct
  misc_feature 1..20: note = chemically synthesized
  source 1..20: mol_type = other DNA
ttttccattagcttaatatt

SEQ ID NO: 2834 - DNA, 20 bp, synthetic construct
  misc_feature 1..20: note = chemically synthesized
  source 1..20: mol_type = other DNA
ttccattagcttaatattaa

SEQ ID NO: 2835 - DNA, 20 bp, synthetic construct
  misc_feature 1..20: note = chemically synthesized
  source 1..20: mol_type = other DNA
agcttaatattaagagcact

SEQ ID NO: 2836 - DNA, 20 bp, synthetic construct
  misc_feature 1..20: note = chemically synthesized
  source 1..20: mol_type = other DNA
ttaatattaagagcacttag

SEQ ID NO: 2837 - DNA, 20 bp, synthetic construct
  misc_feature 1..20: note = chemically synthesized
  source 1..20: mol_type = other DNA
gaagtgttgttgttgtactc

SEQ ID NO: 2838 - DNA, 20 bp, synthetic construct
  misc_feature 1..20: note = chemically synthesized
  source 1..20: mol_type = other DNA
aagtgttgttgttgtactct

SEQ ID NO: 2839 - DNA, 20 bp, synthetic construct
  misc_feature 1..20: note = chemically synthesized
  source 1..20: mol_type = other DNA
gttgttgttgtactctagga

SEQ ID NO: 2840 - DNA, 20 bp, synthetic construct
  misc_feature 1..20: note = chemically synthesized
  source 1..20: mol_type = other DNA
gttgttgtactctaggatag

SEQ ID NO: 2841 - DNA, 20 bp, synthetic construct
  misc_feature 1..20: note = chemically synthesized
  source 1..20: mol_type = other DNA
ttgttgtactctaggatagc

SEQ ID NO: 2842 - DNA, 20 bp, synthetic construct
  misc_feature 1..20: note = chemically synthesized
  source 1..20: mol_type = other DNA
actctaggatagcaggtctc

SEQ ID NO: 2843 - DNA, 20 bp, synthetic construct
  misc_feature 1..20: note = chemically synthesized
  source 1..20: mol_type = other DNA
tacatcctgttctccttata

SEQ ID NO: 2844 - DNA, 20 bp, synthetic construct
  misc_feature 1..20: note = chemically synthesized
  source 1..20: mol_type = other DNA
catcctgttctccttatata

SEQ ID NO: 2845 - DNA, 20 bp, synthetic construct
  misc_feature 1..20: note = chemically synthesized
  source 1..20: mol_type = other DNA
cttatatagagcacactgcc

SEQ ID NO: 2846 - DNA, 20 bp, synthetic construct
  misc_feature 1..20: note = chemically synthesized
  source 1..20: mol_type = other DNA
atagagcacactgccaagca

SEQ ID NO: 2847 - DNA, 20 bp, synthetic construct
  misc_feature 1..20: note = chemically synthesized
  source 1..20: mol_type = other DNA
gcacactgccaagcacagcc

SEQ ID NO: 2848 - DNA, 20 bp, synthetic construct
  misc_feature 1..20: note = chemically synthesized
  source 1..20: mol_type = other DNA
cacactgccaagcacagcca

SEQ ID NO: 2849 - DNA, 20 bp, synthetic construct
  misc_feature 1..20: note = chemically synthesized
  source 1..20: mol_type = other DNA
actgccaagcacagccaagg

SEQ ID NO: 2850 - DNA, 20 bp, synthetic construct
  misc_feature 1..20: note = chemically synthesized
  source 1..20: mol_type = other DNA
ccaagcacagccaaggcagt

SEQ ID NO: 2851 - DNA, 20 bp, synthetic construct
  misc_feature 1..20: note = chemically synthesized
  source 1..20: mol_type = other DNA
caagcacagccaaggcagtt

SEQ ID NO: 2852 - DNA, 20 bp, synthetic construct
  misc_feature 1..20: note = chemically synthesized
  source 1..20: mol_type = other DNA
acagccaaggcagttgggac

SEQ ID NO: 2853 - DNA, 20 bp, synthetic construct
  misc_feature 1..20: note = chemically synthesized
  source 1..20: mol_type = other DNA
gggacaagatttcctttcgc

SEQ ID NO: 2854 - DNA, 20 bp, synthetic construct
  misc_feature 1..20: note = chemically synthesized
  source 1..20: mol_type = other DNA
ggacaagatttcctttcgca

SEQ ID NO: 2855 - DNA, 20 bp, synthetic construct
  misc_feature 1..20: note = chemically synthesized
  source 1..20: mol_type = other DNA
acaagatttcctttcgcaag

SEQ ID NO: 2856 - DNA, 20 bp, synthetic construct
  misc_feature 1..20: note = chemically synthesized
  source 1..20: mol_type = other DNA
atttcctttcgcaaggagcc

SEQ ID NO: 2857 - DNA, 20 bp, synthetic construct
  misc_feature 1..20: note = chemically synthesized
  source 1..20: mol_type = other DNA
tcctttcgcaaggagcctgg

SEQ ID NO: 2858 - DNA, 20 bp, synthetic construct
  misc_feature 1..20: note = chemically synthesized
  source 1..20: mol_type = other DNA
cctttcgcaaggagcctggt

SEQ ID NO: 2859 - DNA, 20 bp, synthetic construct
  misc_feature 1..20: note = chemically synthesized
  source 1..20: mol_type = other DNA
aggagcctggtgggtaacga

SEQ ID NO: 2860 - DNA, 20 bp, synthetic construct
  misc_feature 1..20: note = chemically synthesized
  source 1..20: mol_type = other DNA
ggtaacgatggtgtgctgct

SEQ ID NO: 2861 - DNA, 20 bp, synthetic construct
  misc_feature 1..20: note = chemically synthesized
  source 1..20: mol_type = other DNA
aacgatggtgtgctgctgag

SEQ ID NO: 2862 - DNA, 20 bp, synthetic construct
  misc_feature 1..20: note = chemically synthesized
  source 1..20: mol_type = other DNA
acgatggtgtgctgctgaga

SEQ ID NO: 2863 - DNA, 20 bp, synthetic construct
  misc_feature 1..20: note = chemically synthesized
  source 1..20: mol_type = other DNA
ctgctgagaaggctcttaca

SEQ ID NO: 2864 - DNA, 20 bp, synthetic construct
  misc_feature 1..20: note = chemically synthesized
  source 1..20: mol_type = other DNA
tgagaaggctcttacacaga

SEQ ID NO: 2865 - DNA, 20 bp, synthetic construct
  misc_feature 1..20: note = chemically synthesized
  source 1..20: mol_type = other DNA
aggctcttacacagacagca

SEQ ID NO: 2866 - DNA, 20 bp, synthetic construct
  misc_feature 1..20: note = chemically synthesized
  source 1..20: mol_type = other DNA
ggctcttacacagacagcat

SEQ ID NO: 2867 - DNA, 20 bp, synthetic construct
  misc_feature 1..20: note = chemically synthesized
  source 1..20: mol_type = other DNA
cagcataggtctgctgttac

SEQ ID NO: 2868 - DNA, 20 bp, synthetic construct
  misc_feature 1..20: note = chemically synthesized
  source 1..20: mol_type = other DNA
agcataggtctgctgttacc

SEQ ID NO: 2869 - DNA, 20 bp, synthetic construct
  misc_feature 1..20: note = chemically synthesized
  source 1..20: mol_type = other DNA
gtctgctgttaccaggcctg

SEQ ID NO: 2870 - DNA, 20 bp, synthetic construct
  misc_feature 1..20: note = chemically synthesized
  source 1..20: mol_type = other DNA
ctgctgttaccaggcctgca

SEQ ID NO: 2871 - DNA, 20 bp, synthetic construct
  misc_feature 1..20: note = chemically synthesized
  source 1..20: mol_type = other DNA
tgctgttaccaggcctgcag

SEQ ID NO: 2872 - DNA, 20 bp, synthetic construct
  misc_feature 1..20: note = chemically synthesized
  source 1..20: mol_type = other DNA
gctgttaccaggcctgcaga

SEQ ID NO: 2873 - DNA, 20 bp, synthetic construct
  misc_feature 1..20: note = chemically synthesized
  source 1..20: mol_type = other DNA
gttaccaggcctgcagaggg

SEQ ID NO: 2874 - DNA, 20 bp, synthetic construct
  misc_feature 1..20: note = chemically synthesized
  source 1..20: mol_type = other DNA
aggcctgcagagggaagccc

SEQ ID NO: 2875 - DNA, 20 bp, synthetic construct
  misc_feature 1..20: note = chemically synthesized
  source 1..20: mol_type = other DNA
cctgcagagggaagccctgg

SEQ ID NO: 2876 - DNA, 20 bp, synthetic construct
  misc_feature 1..20: note = chemically synthesized
  source 1..20: mol_type = other DNA
gcagagggaagccctggtgg

SEQ ID NO: 2877 - DNA, 20 bp, synthetic construct
  misc_feature 1..20: note = chemically synthesized
  source 1..20: mol_type = other DNA
gccctggtggaagcaccacc

SEQ ID NO: 2878 - DNA, 20 bp, synthetic construct
  misc_feature 1..20: note = chemically synthesized
  source 1..20: mol_type = other DNA
gtggaagcaccacctagcct

SEQ ID NO: 2879 - DNA, 20 bp, synthetic construct
  misc_feature 1..20: note = chemically synthesized
  source 1..20: mol_type = other DNA
acctagcctgagaacatcta

SEQ ID NO: 2880 - DNA, 20 bp, synthetic construct
  misc_feature 1..20: note = chemically synthesized
  source 1..20: mol_type = other DNA
ctagcctgagaacatctaca

SEQ ID NO: 2881 - DNA, 20 bp, synthetic construct
  misc_feature 1..20: note = chemically synthesized
  source 1..20: mol_type = other DNA
aaaacaaaataaacaccaca

SEQ ID NO: 2882 - DNA, 20 bp, synthetic construct
  misc_feature 1..20: note = chemically synthesized
  source 1..20: mol_type = other DNA
accacaaagtgaaccaacac

SEQ ID NO: 2883 - DNA, 20 bp, synthetic construct
  misc_feature 1..20: note = chemically synthesized
  source 1..20: mol_type = other DNA
acaaagtgaaccaacacaag

SEQ ID NO: 2884 - DNA, 20 bp, synthetic construct
  misc_feature 1..20: note = chemically synthesized
  source 1..20: mol_type = other DNA
caaagtgaaccaacacaagc

SEQ ID NO: 2885 - DNA, 20 bp, synthetic construct
  misc_feature 1..20: note = chemically synthesized
  source 1..20: mol_type = other DNA
agtgaaccaacacaagcagg

SEQ ID NO: 2886 - DNA, 20 bp, synthetic construct
  misc_feature 1..20: note = chemically synthesized
  source 1..20: mol_type = other DNA
accaacacaagcaggaagac

SEQ ID NO: 2887 - DNA, 20 bp, synthetic construct
  misc_feature 1..20: note = chemically synthesized
  source 1..20: mol_type = other DNA
gaagaccggacttaacaaac

SEQ ID NO: 2888 - DNA, 20 bp, synthetic construct
  misc_feature 1..20: note = chemically synthesized
  source 1..20: mol_type = other DNA
tacatttgactgtttacgtc

SEQ ID NO: 2889 - DNA, 20 bp, synthetic construct
  misc_feature 1..20: note = chemically synthesized
  source 1..20: mol_type = other DNA
ctgtttacgtcaagtgaatt

SEQ ID NO: 2890 - DNA, 20 bp, synthetic construct
  misc_feature 1..20: note = chemically synthesized
  source 1..20: mol_type = other DNA
gtttacgtcaagtgaattga

SEQ ID NO: 2891 - DNA, 20 bp, synthetic construct
  misc_feature 1..20: note = chemically synthesized
  source 1..20: mol_type = other DNA
cgtcaagtgaattgagagtg

SEQ ID NO: 2892 - DNA, 20 bp, synthetic construct
  misc_feature 1..20: note = chemically synthesized
  source 1..20: mol_type = other DNA
agtgtggcgtaaaattacta

SEQ ID NO: 2893 - DNA, 20 bp, synthetic construct
  misc_feature 1..20: note = chemically synthesized
  source 1..20: mol_type = other DNA
aattactacagattttgtca

SEQ ID NO: 2894 - DNA, 20 bp, synthetic construct
  misc_feature 1..20: note = chemically synthesized
  source 1..20: mol_type = other DNA
ttgtcatggtatttttcaat

SEQ ID NO: 2895 - DNA, 20 bp, synthetic construct
  misc_feature 1..20: note = chemically synthesized
  source 1..20: mol_type = other DNA
tatttttcaatgagaaatct

SEQ ID NO: 2896 - DNA, 20 bp, synthetic construct
  misc_feature 1..20: note = chemically synthesized
  source 1..20: mol_type = other DNA
ctttgcacttgtttttgcct

SEQ ID NO: 2897 - DNA, 20 bp, synthetic construct
  misc_feature 1..20: note = chemically synthesized
  source 1..20: mol_type = other DNA
ttttgcctcagccgttcact

SEQ ID NO: 2898 - DNA, 20 bp, synthetic construct
  misc_feature 1..20: note = chemically synthesized
  source 1..20: mol_type = other DNA
cactaagtttgctgccaaaa

SEQ ID NO: 2899 - DNA, 20 bp, synthetic construct
  misc_feature 1..20: note = chemically synthesized
  source 1..20: mol_type = other DNA
caaaacagacatccttttct

SEQ ID NO: 2900 - DNA, 20 bp, synthetic construct
  misc_feature 1..20: note = chemically synthesized
  source 1..20: mol_type = other DNA
aaaacagacatccttttctt

SEQ ID NO: 2901 - DNA, 20 bp, synthetic construct
  misc_feature 1..20: note = chemically synthesized
  source 1..20: mol_type = other DNA
catccttttcttaggaaaca

SEQ ID NO: 2902 - DNA, 20 bp, synthetic construct
  misc_feature 1..20: note = chemically synthesized
  source 1..20: mol_type = other DNA
atccttttcttaggaaacac

SEQ ID NO: 2903 - DNA, 20 bp, synthetic construct
  misc_feature 1..20: note = chemically synthesized
  source 1..20: mol_type = other DNA
cttaggaaacacaggcaacc

SEQ ID NO: 2904 - DNA, 20 bp, synthetic construct
  misc_feature 1..20: note = chemically synthesized
  source 1..20: mol_type = other DNA
ttaggaaacacaggcaaccc

SEQ ID NO: 2905 - DNA, 20 bp, synthetic construct
  misc_feature 1..20: note = chemically synthesized
  source 1..20: mol_type = other DNA
cccaggtatctctgtgatcc

SEQ ID NO: 2906 - DNA, 20 bp, synthetic construct
  misc_feature 1..20: note = chemically synthesized
  source 1..20: mol_type = other DNA
tgatcccagcataaacgcaa

SEQ ID NO: 2907 - DNA, 20 bp, synthetic construct
  misc_feature 1..20: note = chemically synthesized
  source 1..20: mol_type = other DNA
gatcccagcataaacgcaac

SEQ ID NO: 2908 - DNA, 20 bp, synthetic construct
  misc_feature 1..20: note = chemically synthesized
  source 1..20: mol_type = other DNA
gcataaacgcaacaggtact

SEQ ID NO: 2909 - DNA, 20 bp, synthetic construct
  misc_feature 1..20: note = chemically synthesized
  source 1..20: mol_type = other DNA
caggtacttggatccttgta

SEQ ID NO: 2910 - DNA, 20 bp, synthetic construct
  misc_feature 1..20: note = chemically synthesized
  source 1..20: mol_type = other DNA
aggtacttggatccttgtat

SEQ ID NO: 2911 - DNA, 20 bp, synthetic construct
  misc_feature 1..20: note = chemically synthesized
  source 1..20: mol_type = other DNA
ggtacttggatccttgtatg

SEQ ID NO: 2912 - DNA, 20 bp, synthetic construct
  misc_feature 1..20: note = chemically synthesized
  source 1..20: mol_type = other DNA
tacttggatccttgtatggg

SEQ ID NO: 2913 - DNA, 20 bp, synthetic construct
  misc_feature 1..20: note = chemically synthesized
  source 1..20: mol_type = other DNA
aaattctctgccacttactc

SEQ ID NO: 2914 - DNA, 20 bp, synthetic construct
  misc_feature 1..20: note = chemically synthesized
  source 1..20: mol_type = other DNA
aattctctgccacttactct

SEQ ID NO: 2915 - DNA, 20 bp, synthetic construct
  misc_feature 1..20: note = chemically synthesized
  source 1..20: mol_type = other DNA
tctctgccacttactctggg

SEQ ID NO: 2916 - DNA, 20 bp, synthetic construct
  misc_feature 1..20: note = chemically synthesized
  source 1..20: mol_type = other DNA
tctgccacttactctgggaa

SEQ ID NO: 2917 - DNA, 20 bp, synthetic construct
  misc_feature 1..20: note = chemically synthesized
  source 1..20: mol_type = other DNA
tactctgggaagagaccctg

SEQ ID NO: 2918 - DNA, 20 bp, synthetic construct
  misc_feature 1..20: note = chemically synthesized
  source 1..20: mol_type = other DNA
gaagagaccctgaagtgctt

SEQ ID NO: 2919 - DNA, 20 bp, synthetic construct
  misc_feature 1..20: note = chemically synthesized
  source 1..20: mol_type = other DNA
gagaccctgaagtgcttcag

SEQ ID NO: 2920 - DNA, 20 bp, synthetic construct
  misc_feature 1..20: note = chemically synthesized
  source 1..20: mol_type = other DNA
agaccctgaagtgcttcagc

SEQ ID NO: 2921 - DNA, 20 bp, synthetic construct
  misc_feature 1..20: note = chemically synthesized
  source 1..20: mol_type = other DNA
gaagtgcttcagcaggcctc

SEQ ID NO: 2922 - DNA, 20 bp, synthetic construct
  misc_feature 1..20: note = chemically synthesized
  source 1..20: mol_type = other DNA
tgcttcagcaggcctccagc

SEQ ID NO: 2923 - DNA, 20 bp, synthetic construct
  misc_feature 1..20: note = chemically synthesized
  source 1..20: mol_type = other DNA
agcaggcctccagcaagaaa

SEQ ID NO: 2924 - DNA, 20 bp, synthetic construct
  misc_feature 1..20: note = chemically synthesized
  source 1..20: mol_type = other DNA
gcaggcctccagcaagaaat

SEQ ID NO: 2925 - DNA, 20 bp, synthetic construct
  misc_feature 1..20: note = chemically synthesized
  source 1..20: mol_type = other DNA
aggcctccagcaagaaatgg

SEQ ID NO: 2926 - DNA, 20 bp, synthetic construct
  misc_feature 1..20: note = chemically synthesized
  source 1..20: mol_type = other DNA
ctgctaacctaatccatgcc

SEQ ID NO: 2927 - DNA, 20 bp, synthetic construct
  misc_feature 1..20: note = chemically synthesized
  source 1..20: mol_type = other DNA
ccctcgcatgaatctcttgt

SEQ ID NO: 2928 - DNA, 20 bp, synthetic construct
  misc_feature 1..20: note = chemically synthesized
  source 1..20: mol_type = other DNA
aaacttgtctacaaacccat

SEQ ID NO: 2929 - DNA, 20 bp, synthetic construct
  misc_feature 1..20: note = chemically synthesized
  source 1..20: mol_type = other DNA
caaacccattagccctaaac

SEQ ID NO: 2930 - DNA, 20 bp, synthetic construct
  misc_feature 1..20: note = chemically synthesized
  source 1..20: mol_type = other DNA
attagccctaaacaagctga

SEQ ID NO: 2931 - DNA, 20 bp, synthetic construct
  misc_feature 1..20: note = chemically synthesized
  source 1..20: mol_type = other DNA
agccctaaacaagctgacgg

SEQ ID NO: 2932 - DNA, 20 bp, synthetic construct
  misc_feature 1..20: note = chemically synthesized
  source 1..20: mol_type = other DNA
gccctaaacaagctgacggc

SEQ ID NO: 2933 - DNA, 20 bp, synthetic construct
  misc_feature 1..20: note = chemically synthesized
  source 1..20: mol_type = other DNA
aaacaagctgacggcaggac

SEQ ID NO: 2934 - DNA, 20 bp, synthetic construct
  misc_feature 1..20: note = chemically synthesized
  source 1..20: mol_type = other DNA
acggcaggaccagatctcta

SEQ ID NO: 2935 - DNA, 20 bp, synthetic construct
  misc_feature 1..20: note = chemically synthesized
  source 1..20: mol_type = other DNA
gaccagatctctacagtgtc

SEQ ID NO: 2936 - DNA, 20 bp, synthetic construct
  misc_feature 1..20: note = chemically synthesized
  source 1..20: mol_type = other DNA
ctctacagtgtctggccgtg

SEQ ID NO: 2937 - DNA, 20 bp, synthetic construct
  misc_feature 1..20: note = chemically synthesized
  source 1..20: mol_type = other DNA
cagtgtctggccgtgtggca

SEQ ID NO: 2938 - DNA, 20 bp, synthetic construct
  misc_feature 1..20: note = chemically synthesized
  source 1..20: mol_type = other DNA
gtctggccgtgtggcaaagt

SEQ ID NO: 2939 - DNA, 20 bp, synthetic construct
  misc_feature 1..20: note = chemically synthesized
  source 1..20: mol_type = other DNA
tctggccgtgtggcaaagtg

SEQ ID NO: 2940 - DNA, 20 bp, synthetic construct
  misc_feature 1..20: note = chemically synthesized
  source 1..20: mol_type = other DNA
tgaggtctcatctgactatc

SEQ ID NO: 2941 - DNA, 20 bp, synthetic construct
  misc_feature 1..20: note = chemically synthesized
  source 1..20: mol_type = other DNA
ggtctcatctgactatctgg

SEQ ID NO: 2942 - DNA, 20 bp, synthetic construct
  misc_feature 1..20: note = chemically synthesized
  source 1..20: mol_type = other DNA
catctgactatctggcagca

SEQ ID NO: 2943 - DNA, 20 bp, synthetic construct
  misc_feature 1..20: note = chemically synthesized
  source 1..20: mol_type = other DNA
tgtttttgtttttgttttct

SEQ ID NO: 2944 - DNA, 20 bp, synthetic construct
  misc_feature 1..20: note = chemically synthesized
  source 1..20: mol_type = other DNA
ttctaagttgtaaaaaaccc

SEQ ID NO: 2945 - DNA, 20 bp, synthetic construct
  misc_feature 1..20: note = chemically synthesized
  source 1..20: mol_type = other DNA
aaaaaaccctagctatcatc

SEQ ID NO: 2946 - DNA, 20 bp, synthetic construct
  misc_feature 1..20: note = chemically synthesized
  source 1..20: mol_type = other DNA
aagtctgtcccttcatttta

SEQ ID NO: 2947 - DNA, 20 bp, synthetic construct
  misc_feature 1..20: note = chemically synthesized
  source 1..20: mol_type = other DNA
ctgtcccttcattttacaga

SEQ ID NO: 2948 - DNA, 20 bp, synthetic construct
  misc_feature 1..20: note = chemically synthesized
  source 1..20: mol_type = other DNA
tgtcccttcattttacagat

SEQ ID NO: 2949 - DNA, 20 bp, synthetic construct
  misc_feature 1..20: note = chemically synthesized
  source 1..20: mol_type = other DNA
gtcccttcattttacagatg

SEQ ID NO: 2950 - DNA, 20 bp, synthetic construct
  misc_feature 1..20: note = chemically synthesized
  source 1..20: mol_type = other DNA
attttacagatggggaaact

SEQ ID NO: 2951 - DNA, 20 bp, synthetic construct
  misc_feature 1..20: note = chemically synthesized
  source 1..20: mol_type = other DNA
ttttacagatggggaaactg

SEQ ID NO: 2952 - DNA, 20 bp, synthetic construct
  misc_feature 1..20: note = chemically synthesized
  source 1..20: mol_type = other DNA
gatggggaaactgaggccat

SEQ ID NO: 2953 - DNA, 20 bp, synthetic construct
  misc_feature 1..20: note = chemically synthesized
  source 1..20: mol_type = other DNA
aactgaggccatgagaaatt

SEQ ID NO: 2954 - DNA, 20 bp, synthetic construct
  misc_feature 1..20: note = chemically synthesized
  source 1..20: mol_type = other DNA
gaaattaagtgacttgccca

SEQ ID NO: 2955 - DNA, 20 bp, synthetic construct
  misc_feature 1..20: note = chemically synthesized
  source 1..20: mol_type = other DNA
tgatgattaaccacaatgtg

SEQ ID NO: 2956 - DNA, 20 bp, synthetic construct
  misc_feature 1..20: note = chemically synthesized
  source 1..20: mol_type = other DNA
attaaccacaatgtgaagat

SEQ ID NO: 2957 - DNA, 20 bp, synthetic construct
  misc_feature 1..20: note = chemically synthesized
  source 1..20: mol_type = other DNA
taatctcctgactcctgatc

SEQ ID NO: 2958 - DNA, 20 bp, synthetic construct
  misc_feature 1..20: note = chemically synthesized
  source 1..20: mol_type = other DNA
tctcctgactcctgatccag

SEQ ID NO: 2959 - DNA, 20 bp, synthetic construct
  misc_feature 1..20: note = chemically synthesized
  source 1..20: mol_type = other DNA
cctgatccagtggtctttcc

SEQ ID NO: 2960 - DNA, 20 bp, synthetic construct
  misc_feature 1..20: note = chemically synthesized
  source 1..20: mol_type = other DNA
ctgatccagtggtctttcct

SEQ ID NO: 2961 - DNA, 20 bp, synthetic construct
  misc_feature 1..20: note = chemically synthesized
  source 1..20: mol_type = other DNA
cccccctgctgctcctgccg

SEQ ID NO: 2962 - DNA, 20 bp, synthetic construct
  misc_feature 1..20: note = chemically synthesized
  source 1..20: mol_type = other DNA
cgtggtcttcactgcccaac

SEQ ID NO: 2963 - DNA, 20 bp, synthetic construct
  misc_feature 1..20: note = chemically synthesized
  source 1..20: mol_type = other DNA
ggtcttcactgcccaacaag

SEQ ID NO: 2964 - DNA, 20 bp, synthetic construct
  misc_feature 1..20: note = chemically synthesized
  source 1..20: mol_type = other DNA
gtcttcactgcccaacaaga

SEQ ID NO: 2965 - DNA, 20 bp, synthetic construct
  misc_feature 1..20: note = chemically synthesized
  source 1..20: mol_type = other DNA
cctgtttctactgatccatt

SEQ ID NO: 2966 - DNA, 20 bp, synthetic construct
  misc_feature 1..20: note = chemically synthesized
  source 1..20: mol_type = other DNA
gtttctactgatccattaag

SEQ ID NO: 2967 - DNA, 20 bp, synthetic construct
  misc_feature 1..20: note = chemically synthesized
  source 1..20: mol_type = other DNA
taagcagtacttaaccgtct

SEQ ID NO: 2968 - DNA, 20 bp, synthetic construct
  misc_feature 1..20: note = chemically synthesized
  source 1..20: mol_type = other DNA
aagcagtacttaaccgtctt

SEQ ID NO: 2969 - DNA, 20 bp, synthetic construct
  misc_feature 1..20: note = chemically synthesized
  source 1..20: mol_type = other DNA
agcagtacttaaccgtcttg

SEQ ID NO: 2970 - DNA, 20 bp, synthetic construct
  misc_feature 1..20: note = chemically synthesized
  source 1..20: mol_type = other DNA
gcagtacttaaccgtcttgg

SEQ ID NO: 2971 - DNA, 20 bp, synthetic construct
  misc_feature 1..20: note = chemically synthesized
  source 1..20: mol_type = other DNA
agtacttaaccgtcttgggg

SEQ ID NO: 2972 - DNA, 20 bp, synthetic construct
  misc_feature 1..20: note = chemically synthesized
  source 1..20: mol_type = other DNA
gtacttaaccgtcttggggg

SEQ ID NO: 2973 - DNA, 20 bp, synthetic construct
  misc_feature 1..20: note = chemically synthesized
  source 1..20: mol_type = other DNA
tacttaaccgtcttggggga

SEQ ID NO: 2974 - DNA, 20 bp, synthetic construct
  misc_feature 1..20: note = chemically synthesized
  source 1..20: mol_type = other DNA
aaccgtcttgggggagggtc

SEQ ID NO: 2975 - DNA, 20 bp, synthetic construct
  misc_feature 1..20: note = chemically synthesized
  source 1..20: mol_type = other DNA
tcttgggggagggtccagcc

SEQ ID NO: 2976 - DNA, 20 bp, synthetic construct
  misc_feature 1..20: note = chemically synthesized
  source 1..20: mol_type = other DNA
tgggggagggtccagcccag

SEQ ID NO: 2977 - DNA, 20 bp, synthetic construct
  misc_feature 1..20: note = chemically synthesized
  source 1..20: mol_type = other DNA
tccagcccagcagcgctaca

SEQ ID NO: 2978 - DNA, 20 bp, synthetic construct
  misc_feature 1..20: note = chemically synthesized
  source 1..20: mol_type = other DNA
ccagcccagcagcgctacat

SEQ ID NO: 2979 - DNA, 20 bp, synthetic construct
  misc_feature 1..20: note = chemically synthesized
  source 1..20: mol_type = other DNA
cagcccagcagcgctacatg

SEQ ID NO: 2980 - DNA, 20 bp, synthetic construct
  misc_feature 1..20: note = chemically synthesized
  source 1..20: mol_type = other DNA
gcgctacatggggctttcga

SEQ ID NO: 2981 - DNA, 20 bp, synthetic construct
  misc_feature 1..20: note = chemically synthesized
  source 1..20: mol_type = other DNA
cgctacatggggctttcgaa

SEQ ID NO: 2982 - DNA, 20 bp, synthetic construct
  misc_feature 1..20: note = chemically synthesized
  source 1..20: mol_type = other DNA
aaggtgccaatgaactgact

SEQ ID NO: 2983 - DNA, 20 bp, synthetic construct
  misc_feature 1..20: note = chemically synthesized
  source 1..20: mol_type = other DNA
aactgacttggtctcacaat

SEQ ID NO: 2984 - DNA, 20 bp, synthetic construct
  misc_feature 1..20: note = chemically synthesized
  source 1..20: mol_type = other DNA
tggtctcacaattggaaaac

SEQ ID NO: 2985 - DNA, 20 bp, synthetic construct
  misc_feature 1..20: note = chemically synthesized
  source 1..20: mol_type = other DNA
ggtctcacaattggaaaaca

SEQ ID NO: 2986 - DNA, 20 bp, synthetic construct
  misc_feature 1..20: note = chemically synthesized
  source 1..20: mol_type = other DNA
acaaggcctgctctgctgcc

SEQ ID NO: 2987 - DNA, 20 bp, synthetic construct
  misc_feature 1..20: note = chemically synthesized
  source 1..20: mol_type = other DNA
caaggcctgctctgctgcct

SEQ ID NO: 2988 - DNA, 20 bp, synthetic construct
  misc_feature 1..20: note = chemically synthesized
  source 1..20: mol_type = other DNA
gctctgctgcctgggcctcc

SEQ ID NO: 2989 - DNA, 20 bp, synthetic construct
  misc_feature 1..20: note = chemically synthesized
  source 1..20: mol_type = other DNA
ctctacctctgcttcccctg

SEQ ID NO: 2990 - DNA, 20 bp, synthetic construct
  misc_feature 1..20: note = chemically synthesized
  source 1..20: mol_type = other DNA
ctctgcttcccctgcagaat

SEQ ID NO: 2991 - DNA, 20 bp, synthetic construct
  misc_feature 1..20: note = chemically synthesized
  source 1..20: mol_type = other DNA
gcttcccctgcagaattaga

SEQ ID NO: 2992 - DNA, 20 bp, synthetic construct
  misc_feature 1..20: note = chemically synthesized
  source 1..20: mol_type = other DNA
acagctaaaaacatttctat

SEQ ID NO: 2993 - DNA, 20 bp, synthetic construct
  misc_feature 1..20: note = chemically synthesized
  source 1..20: mol_type = other DNA
aaaaacatttctatcagcct

SEQ ID NO: 2994 - DNA, 20 bp, synthetic construct
  misc_feature 1..20: note = chemically synthesized
  source 1..20: mol_type = other DNA
aacatttctatcagcctaag

SEQ ID NO: 2995 - DNA, 20 bp, synthetic construct
  misc_feature 1..20: note = chemically synthesized
  source 1..20: mol_type = other DNA
gcctaagaagctatttactt

SEQ ID NO: 2996 - DNA, 20 bp, synthetic construct
  misc_feature 1..20: note = chemically synthesized
  source 1..20: mol_type = other DNA
agctatttactttagaaaaa

SEQ ID NO: 2997 - DNA, 20 bp, synthetic construct
  misc_feature 1..20: note = chemically synthesized
  source 1..20: mol_type = other DNA
aaaaagcacactgtctttgt

SEQ ID NO: 2998 - DNA, 20 bp, synthetic construct
  misc_feature 1..20: note = chemically synthesized
  source 1..20: mol_type = other DNA
cccttgcatttatcttcctt

SEQ ID NO: 2999 - DNA, 20 bp, synthetic construct
  misc_feature 1..20: note = chemically synthesized
  source 1..20: mol_type = other DNA
ccttgcatttatcttccttc

SEQ ID NO: 3000 - DNA, 20 bp, synthetic construct
  misc_feature 1..20: note = chemically synthesized
  source 1..20: mol_type = other DNA
tgcatttatcttccttcagg

SEQ ID NO: 3001 - DNA, 20 bp, synthetic construct
  misc_feature 1..20: note = chemically synthesized
  source 1..20: mol_type = other DNA
catttatcttccttcaggaa

SEQ ID NO: 3002 - DNA, 20 bp, synthetic construct
  misc_feature 1..20: note = chemically synthesized
  source 1..20: mol_type = other DNA
atttatcttccttcaggaag

SEQ ID NO: 3003 - DNA, 20 bp, synthetic construct
  misc_feature 1..20: note = chemically synthesized
  source 1..20: mol_type = other DNA
tttatcttccttcaggaaga

SEQ ID NO: 3004 - DNA, 20 bp, synthetic construct
  misc_feature 1..20: note = chemically synthesized
  source 1..20: mol_type = other DNA
ttccttcaggaagagggtca

SEQ ID NO: 3005 - DNA, 20 bp, synthetic construct
  misc_feature 1..20: note = chemically synthesized
  source 1..20: mol_type = other DNA
tcaggaagagggtcaaagca

SEQ ID NO: 3006 - DNA, 20 bp, synthetic construct
  misc_feature 1..20: note = chemically synthesized
  source 1..20: mol_type = other DNA
agggtcaaagcaaagccaac

SEQ ID NO: 3007 - DNA, 20 bp, synthetic construct
  misc_feature 1..20: note = chemically synthesized
  source 1..20: mol_type = other DNA
gggtcaaagcaaagccaact

SEQ ID NO: 3008 - DNA, 20 bp, synthetic construct
  misc_feature 1..20: note = chemically synthesized
  source 1..20: mol_type = other DNA
ggtcaaagcaaagccaactg

SEQ ID NO: 3009 - DNA, 20 bp, synthetic construct
  misc_feature 1..20: note = chemically synthesized
  source 1..20: mol_type = other DNA
gcaaagccaactggggaccc

SEQ ID NO: 3010 - DNA, 20 bp, synthetic construct
  misc_feature 1..20: note = chemically synthesized
  source 1..20: mol_type = other DNA
cacatccataatattctctt

SEQ ID NO: 3011 - DNA, 20 bp, synthetic construct
  misc_feature 1..20: note = chemically synthesized
  source 1..20: mol_type = other DNA
tccataatattctctttggt

SEQ ID NO: 3012 - DNA, 20 bp, synthetic construct
  misc_feature 1..20: note = chemically synthesized
  source 1..20: mol_type = other DNA
atcgacattcccacatgaac

SEQ ID NO: 3013 - DNA, 20 bp, synthetic construct
  misc_feature 1..20: note = chemically synthesized
  source 1..20: mol_type = other DNA
tggaaatgctaaattgttaa

SEQ ID NO: 3014 - DNA, 20 bp, synthetic construct
  misc_feature 1..20: note = chemically synthesized
  source 1..20: mol_type = other DNA
taaattgttaatagcctccc

SEQ ID NO: 3015 - DNA, 20 bp, synthetic construct
  misc_feature 1..20: note = chemically synthesized
  source 1..20: mol_type = other DNA
aaattgttaatagcctccct

SEQ ID NO: 3016 - DNA, 20 bp, synthetic construct
  misc_feature 1..20: note = chemically synthesized
  source 1..20: mol_type = other DNA
aattgttaatagcctcccta

SEQ ID NO: 3017 - DNA, 20 bp, synthetic construct
  misc_feature 1..20: note = chemically synthesized
  source 1..20: mol_type = other DNA
tgccttcaattatttcatca

SEQ ID NO: 3018 - DNA, 20 bp, synthetic construct
  misc_feature 1..20: note = chemically synthesized
  source 1..20: mol_type = other DNA
tcaattatttcatcacggct

SEQ ID NO: 3019 - DNA, 20 bp, synthetic construct
  misc_feature 1..20: note = chemically synthesized
  source 1..20: mol_type = other DNA
caattatttcatcacggctt

SEQ ID NO: 3020 - DNA, 20 bp, synthetic construct
  misc_feature 1..20: note = chemically synthesized
  source 1..20: mol_type = other DNA
atttcatcacggcttaggca

SEQ ID NO: 3021 - DNA, 20 bp, synthetic construct
  misc_feature 1..20: note = chemically synthesized
  source 1..20: mol_type = other DNA
atcacggcttaggcaaagta

SEQ ID NO: 3022 - DNA, 20 bp, synthetic construct
  misc_feature 1..20: note = chemically synthesized
  source 1..20: mol_type = other DNA
gtatcacaattaatgcttct

SEQ ID NO: 3023 - DNA, 20 bp, synthetic construct
  misc_feature 1..20: note = chemically synthesized
  source 1..20: mol_type = other DNA
tgcttctgagcgtcaaactc

SEQ ID NO: 3024 - DNA, 20 bp, synthetic construct
  misc_feature 1..20: note = chemically synthesized
  source 1..20: mol_type = other DNA
gcttctgagcgtcaaactcg

SEQ ID NO: 3025 - DNA, 20 bp, synthetic construct
  misc_feature 1..20: note = chemically synthesized
  source 1..20: mol_type = other DNA
ttctgagcgtcaaactcgag

SEQ ID NO: 3026 - DNA, 20 bp, synthetic construct
  misc_feature 1..20: note = chemically synthesized
  source 1..20: mol_type = other DNA
tgagcgtcaaactcgaggag

SEQ ID NO: 3027 - DNA, 20 bp, synthetic construct
  misc_feature 1..20: note = chemically synthesized
  source 1..20: mol_type = other DNA
gaggagcagctctgccttcc

SEQ ID NO: 3028 - DNA, 20 bp, synthetic construct
  misc_feature 1..20: note = chemically synthesized
  source 1..20: mol_type = other DNA
aggagcagctctgccttccc

SEQ ID NO: 3029 - DNA, 20 bp, synthetic construct
  misc_feature 1..20: note = chemically synthesized
  source 1..20: mol_type = other DNA
cagctctgccttcccaggcc

SEQ ID NO: 3030 - DNA, 20 bp, synthetic construct
  misc_feature 1..20: note = chemically synthesized
  source 1..20: mol_type = other DNA
agctctgccttcccaggcca

SEQ ID NO: 3031 - DNA, 20 bp, synthetic construct
  misc_feature 1..20: note = chemically synthesized
  source 1..20: mol_type = other DNA
tctgccttcccaggccaagg

SEQ ID NO: 3032 - DNA, 20 bp, synthetic construct
  misc_feature 1..20: note = chemically synthesized
  source 1..20: mol_type = other DNA
ctgccttcccaggccaaggt

SEQ ID NO: 3033 - DNA, 20 bp, synthetic construct
  misc_feature 1..20: note = chemically synthesized
  source 1..20: mol_type = other DNA
tgccttcccaggccaaggtg

SEQ ID NO: 3034 - DNA, 20 bp, synthetic construct
  misc_feature 1..20: note = chemically synthesized
  source 1..20: mol_type = other DNA
tcccaggccaaggtggggaa

SEQ ID NO: 3035 - DNA, 20 bp, synthetic construct
  misc_feature 1..20: note = chemically synthesized
  source 1..20: mol_type = other DNA
cccaggccaaggtggggaaa

SEQ ID NO: 3036 - DNA, 20 bp, synthetic construct
  misc_feature 1..20: note = chemically synthesized
  source 1..20: mol_type = other DNA
caggccaaggtggggaaaag

SEQ ID NO: 3037 - DNA, 20 bp, synthetic construct
  misc_feature 1..20: note = chemically synthesized
  source 1..20: mol_type = other DNA
tggggaaaaggagctgcccc

SEQ ID NO: 3038 - DNA, 20 bp, synthetic construct
  misc_feature 1..20: note = chemically synthesized
  source 1..20: mol_type = other DNA
aaaaggagctgcccctggtt

SEQ ID NO: 3039 - DNA, 20 bp, synthetic construct
  misc_feature 1..20: note = chemically synthesized
  source 1..20: mol_type = other DNA
aaaggagctgcccctggttg

SEQ ID NO: 3040 - DNA, 20 bp, synthetic construct
  misc_feature 1..20: note = chemically synthesized
  source 1..20: mol_type = other DNA
aaggagctgcccctggttga

SEQ ID NO: 3041 - DNA, 20 bp, synthetic construct
  misc_feature 1..20: note = chemically synthesized
  source 1..20: mol_type = other DNA
accttcgctttcattctccc

SEQ ID NO: 3042 - DNA, 20 bp, synthetic construct
  misc_feature 1..20: note = chemically synthesized
  source 1..20: mol_type = other DNA
tcgctttcattctccccagc

SEQ ID NO: 3043 - DNA, 20 bp, synthetic construct
  misc_feature 1..20: note = chemically synthesized
  source 1..20: mol_type = other DNA
gctttcattctccccagcca

SEQ ID NO: 3044 - DNA, 20 bp, synthetic construct
  misc_feature 1..20: note = chemically synthesized
  source 1..20: mol_type = other DNA
tcattctccccagccagaga

SEQ ID NO: 3045 - DNA, 20 bp, synthetic construct
  misc_feature 1..20: note = chemically synthesized
  source 1..20: mol_type = other DNA
cattctccccagccagagat

SEQ ID NO: 3046 - DNA, 20 bp, synthetic construct
  misc_feature 1..20: note = chemically synthesized
  source 1..20: mol_type = other DNA
ccccagccagagatgggctc

SEQ ID NO: 3047 - DNA, 20 bp, synthetic construct
  misc_feature 1..20: note = chemically synthesized
  source 1..20: mol_type = other DNA
cagagatgggctctggttgc

SEQ ID NO: 3048 - DNA, 20 bp, synthetic construct
  misc_feature 1..20: note = chemically synthesized
  source 1..20: mol_type = other DNA
gatgggctctggttgctggc

SEQ ID NO: 3049 - DNA, 20 bp, synthetic construct
  misc_feature 1..20: note = chemically synthesized
  source 1..20: mol_type = other DNA
atgggctctggttgctggct

SEQ ID NO: 3050 - DNA, 20 bp, synthetic construct
  misc_feature 1..20: note = chemically synthesized
  source 1..20: mol_type = other DNA
ggctctggttgctggctagg

SEQ ID NO: 3051 - DNA, 20 bp, synthetic construct
  misc_feature 1..20: note = chemically synthesized
  source 1..20: mol_type = other DNA
tctggttgctggctaggaag

SEQ ID NO: 3052 - DNA, 20 bp, synthetic construct
  misc_feature 1..20: note = chemically synthesized
  source 1..20: mol_type = other DNA
ctggttgctggctaggaagt

SEQ ID NO: 3053 - DNA, 20 bp, synthetic construct
  misc_feature 1..20: note = chemically synthesized
  source 1..20: mol_type = other DNA
tggctaggaagtgggtgatc

SEQ ID NO: 3054 - DNA, 20 bp, synthetic construct
  misc_feature 1..20: note = chemically synthesized
  source 1..20: mol_type = other DNA
tgtcctctttttttctttgt

SEQ ID NO: 3055 - DNA, 20 bp, synthetic construct
  misc_feature 1..20: note = chemically synthesized
  source 1..20: mol_type = other DNA
tttttctttgttagtgctct

SEQ ID NO: 3056 - DNA, 20 bp, synthetic construct
  misc_feature 1..20: note = chemically synthesized
  source 1..20: mol_type = other DNA
ttttctttgttagtgctctt

SEQ ID NO: 3057 - DNA, 20 bp, synthetic construct
  misc_feature 1..20: note = chemically synthesized
  source 1..20: mol_type = other DNA
ctttgttagtgctcttaggc

SEQ ID NO: 3058 - DNA, 20 bp, synthetic construct
  misc_feature 1..20: note = chemically synthesized
  source 1..20: mol_type = other DNA
tcttaggcaagtgattctca

SEQ ID NO: 3059 - DNA, 20 bp, synthetic construct
  misc_feature 1..20: note = chemically synthesized
  source 1..20: mol_type = other DNA
ggcaagtgattctcacagcg

SEQ ID NO: 3060 - DNA, 20 bp, synthetic construct
  misc_feature 1..20: note = chemically synthesized
  source 1..20: mol_type = other DNA
tgattctcacagcgcagacc

SEQ ID NO: 3061 - DNA, 20 bp, synthetic construct
  misc_feature 1..20: note = chemically synthesized
  source 1..20: mol_type = other DNA
gattctcacagcgcagaccc

SEQ ID NO: 3062 - DNA, 20 bp, synthetic construct
  misc_feature 1..20: note = chemically synthesized
  source 1..20: mol_type = other DNA
gacccaggcccacccccgat

SEQ ID NO: 3063 - DNA, 20 bp, synthetic construct
  misc_feature 1..20: note = chemically synthesized
  source 1..20: mol_type = other DNA
cacccccgatcagcatcacc

SEQ ID NO: 3064 - DNA, 20 bp, synthetic construct
  misc_feature 1..20: note = chemically synthesized
  source 1..20: mol_type = other DNA
acccccgatcagcatcacct

SEQ ID NO: 3065 - DNA, 20 bp, synthetic construct
  misc_feature 1..20: note = chemically synthesized
  source 1..20: mol_type = other DNA
ccccgatcagcatcacctgg

SEQ ID NO: 3066 - DNA, 20 bp, synthetic construct
  misc_feature 1..20: note = chemically synthesized
  source 1..20: mol_type = other DNA
ttgttcaaaatgcaaattct

SEQ ID NO: 3067 - DNA, 20 bp, synthetic construct
  misc_feature 1..20: note = chemically synthesized
  source 1..20: mol_type = other DNA
tgttcaaaatgcaaattctt

SEQ ID NO: 3068 - DNA, 20 bp, synthetic construct
  misc_feature 1..20: note = chemically synthesized
  source 1..20: mol_type = other DNA
caaattcttgggcaccacct

SEQ ID NO: 3069 - DNA, 20 bp, synthetic construct
  misc_feature 1..20: note = chemically synthesized
  source 1..20: mol_type = other DNA
ccacctcagacttactgaat

SEQ ID NO: 3070 - DNA, 20 bp, synthetic construct
  misc_feature 1..20: note = chemically synthesized
  source 1..20: mol_type = other DNA
gacttactgaatcagaaatt

SEQ ID NO: 3071 - DNA, 20 bp, synthetic construct
  misc_feature 1..20: note = chemically synthesized
  source 1..20: mol_type = other DNA
acttactgaatcagaaattg

SEQ ID NO: 3072 - DNA, 20 bp, synthetic construct
  misc_feature 1..20: note = chemically synthesized
  source 1..20: mol_type = other DNA
cttactgaatcagaaattga

SEQ ID NO: 3073 - DNA, 20 bp, synthetic construct
  misc_feature 1..20: note = chemically synthesized
  source 1..20: mol_type = other DNA
actgaatcagaaattgaggg

SEQ ID NO: 3074 - DNA, 20 bp, synthetic construct
  misc_feature 1..20: note = chemically synthesized
  source 1..20: mol_type = other DNA
ctgaatcagaaattgagggt

SEQ ID NO: 3075 - DNA, 20 bp, synthetic construct
  misc_feature 1..20: note = chemically synthesized
  source 1..20: mol_type = other DNA
tgaatcagaaattgagggtg

SEQ ID NO: 3076 - DNA, 20 bp, synthetic construct
  misc_feature 1..20: note = chemically synthesized
  source 1..20: mol_type = other DNA
atcagaaattgagggtgggg

SEQ ID NO: 3077 - DNA, 20 bp, synthetic construct
  misc_feature 1..20: note = chemically synthesized
  source 1..20: mol_type = other DNA
agaaattgagggtggggaag

SEQ ID NO: 3078 - DNA, 20 bp, synthetic construct
  misc_feature 1..20: note = chemically synthesized
  source 1..20: mol_type = other DNA
tctatgttgaataaattctc

SEQ ID NO: 3079 - DNA, 20 bp, synthetic construct
  misc_feature 1..20: note = chemically synthesized
  source 1..20: mol_type = other DNA
ctatgttgaataaattctcc

SEQ ID NO: 3080 - DNA, 20 bp, synthetic construct
  misc_feature 1..20: note = chemically synthesized
  source 1..20: mol_type = other DNA
ggtgattctcatgcacactc

SEQ ID NO: 3081 - DNA, 20 bp, synthetic construct
  misc_feature 1..20: note = chemically synthesized
  source 1..20: mol_type = other DNA
catgcacactcaagctgaat

SEQ ID NO: 3082 - DNA, 20 bp, synthetic construct
  misc_feature 1..20: note = chemically synthesized
  source 1..20: mol_type = other DNA
ctgaatcagcactgctgtct

SEQ ID NO: 3083 - DNA, 20 bp, synthetic construct
  misc_feature 1..20: note = chemically synthesized
  source 1..20: mol_type = other DNA
tgaatcagcactgctgtctt

SEQ ID NO: 3084 - DNA, 20 bp, synthetic construct
  misc_feature 1..20: note = chemically synthesized
  source 1..20: mol_type = other DNA
gaatcagcactgctgtctta

SEQ ID NO: 3085 - DNA, 20 bp, synthetic construct
  misc_feature 1..20: note = chemically synthesized
  source 1..20: mol_type = other DNA
cagcactgctgtcttagggt

SEQ ID NO: 3086 - DNA, 20 bp, synthetic construct
  misc_feature 1..20: note = chemically synthesized
  source 1..20: mol_type = other DNA
agcactgctgtcttagggta

SEQ ID NO: 3087 - DNA, 20 bp, synthetic construct
  misc_feature 1..20: note = chemically synthesized
  source 1..20: mol_type = other DNA
gcactgctgtcttagggtaa

SEQ ID NO: 3088 - DNA, 20 bp, synthetic construct
  misc_feature 1..20: note = chemically synthesized
  source 1..20: mol_type = other DNA
ctgctgtcttagggtaaggg

SEQ ID NO: 3089 - DNA, 20 bp, synthetic construct
  misc_feature 1..20: note = chemically synthesized
  source 1..20: mol_type = other DNA
ggtaagggaagtatgaacgc

SEQ ID NO: 3090 - DNA, 20 bp, synthetic construct
  misc_feature 1..20: note = chemically synthesized
  source 1..20: mol_type = other DNA
aagggaagtatgaacgctgg

SEQ ID NO: 3091 - DNA, 20 bp, synthetic construct
  misc_feature 1..20: note = chemically synthesized
  source 1..20: mol_type = other DNA
ctggaagctttgaaattccc

SEQ ID NO: 3092 - DNA, 20 bp, synthetic construct
  misc_feature 1..20: note = chemically synthesized
  source 1..20: mol_type = other DNA
tggaagctttgaaattccct

SEQ ID NO: 3093 - DNA, 20 bp, synthetic construct
  misc_feature 1..20: note = chemically synthesized
  source 1..20: mol_type = other DNA
aagctttgaaattccctggg

SEQ ID NO: 3094 - DNA, 20 bp, synthetic construct
  misc_feature 1..20: note = chemically synthesized
  source 1..20: mol_type = other DNA
gctttgaaattccctgggca

SEQ ID NO: 3095 - DNA, 20 bp, synthetic construct
  misc_feature 1..20: note = chemically synthesized
  source 1..20: mol_type = other DNA
attccctgggcagagaccca

SEQ ID NO: 3096 - DNA, 20 bp, synthetic construct
  misc_feature 1..20: note = chemically synthesized
  source 1..20: mol_type = other DNA
ttccctgggcagagacccat

SEQ ID NO: 3097 - DNA, 20 bp, synthetic construct
  misc_feature 1..20: note = chemically synthesized
  source 1..20: mol_type = other DNA
ggcagagacccatgggccat

SEQ ID NO: 3098 - DNA, 20 bp, synthetic construct
  misc_feature 1..20: note = chemically synthesized
  source 1..20: mol_type = other DNA
gcagagacccatgggccatg

SEQ ID NO: 3099 - DNA, 20 bp, synthetic construct
  misc_feature 1..20: note = chemically synthesized
  source 1..20: mol_type = other DNA
aggctgttttccctcctgtc

SEQ ID NO: 3100 - DNA, 20 bp, synthetic construct
  misc_feature 1..20: note = chemically synthesized
  source 1..20: mol_type = other DNA
ggctgttttccctcctgtcc

SEQ ID NO: 3101 - DNA, 20 bp, synthetic construct
  misc_feature 1..20: note = chemically synthesized
  source 1..20: mol_type = other DNA
tgtccaggacccacctcctt

SEQ ID NO: 3102 - DNA, 20 bp, synthetic construct
  misc_feature 1..20: note = chemically synthesized
  source 1..20: mol_type = other DNA
gtccaggacccacctccttt

SEQ ID NO: 3103 - DNA, 20 bp, synthetic construct
  misc_feature 1..20: note = chemically synthesized
  source 1..20: mol_type = other DNA
ggacccacctcctttaggac

SEQ ID NO: 3104 - DNA, 20 bp, synthetic construct
  misc_feature 1..20: note = chemically synthesized
  source 1..20: mol_type = other DNA
cacctcctttaggactggaa

SEQ ID NO: 3105 - DNA, 20 bp, synthetic construct
  misc_feature 1..20: note = chemically synthesized
  source 1..20: mol_type = other DNA
ggaacagtcaaaaacaaatt

SEQ ID NO: 3106 - DNA, 20 bp, synthetic construct
  misc_feature 1..20: note = chemically synthesized
  source 1..20: mol_type = other DNA
agtcaaaaacaaattaagct

SEQ ID NO: 3107 - DNA, 20 bp, synthetic construct
  misc_feature 1..20: note = chemically synthesized
  source 1..20: mol_type = other DNA
gtcaaaaacaaattaagctt

SEQ ID NO: 3108 - DNA, 20 bp, synthetic construct
  misc_feature 1..20: note = chemically synthesized
  source 1..20: mol_type = other DNA
tcaaaaacaaattaagctta

SEQ ID NO: 3109 - DNA, 20 bp, synthetic construct
  misc_feature 1..20: note = chemically synthesized
  source 1..20: mol_type = other DNA
attaagcttagggaatccct

SEQ ID NO: 3110 - DNA, 20 bp, synthetic construct
  misc_feature 1..20: note = chemically synthesized
  source 1..20: mol_type = other DNA
ttaagcttagggaatcccta

SEQ ID NO: 3111 - DNA, 20 bp, synthetic construct
  misc_feature 1..20: note = chemically synthesized
  source 1..20: mol_type = other DNA
atccctaaggatccctccat

SEQ ID NO: 3112 - DNA, 20 bp, synthetic construct
  misc_feature 1..20: note = chemically synthesized
  source 1..20: mol_type = other DNA
tccctaaggatccctccatt

SEQ ID NO: 3113 - DNA, 20 bp, synthetic construct
  misc_feature 1..20: note = chemically synthesized
  source 1..20: mol_type = other DNA
gatccctccattaggaaatt

SEQ ID NO: 3114 - DNA, 20 bp, synthetic construct
  misc_feature 1..20: note = chemically synthesized
  source 1..20: mol_type = other DNA
atccctccattaggaaattc

SEQ ID NO: 3115 - DNA, 20 bp, synthetic construct
  misc_feature 1..20: note = chemically synthesized
  source 1..20: mol_type = other DNA
accctccgtctgtcattgat

SEQ ID NO: 3116 - DNA, 20 bp, synthetic construct
  misc_feature 1..20: note = chemically synthesized
  source 1..20: mol_type = other DNA
ccctccgtctgtcattgata

SEQ ID NO: 3117 - DNA, 20 bp, synthetic construct
  misc_feature 1..20: note = chemically synthesized
  source 1..20: mol_type = other DNA
ccgtctgtcattgataagga

SEQ ID NO: 3118 - DNA, 20 bp, synthetic construct
  misc_feature 1..20: note = chemically synthesized
  source 1..20: mol_type = other DNA
cgtctgtcattgataaggac

SEQ ID NO: 3119 - DNA, 20 bp, synthetic construct
  misc_feature 1..20: note = chemically synthesized
  source 1..20: mol_type = other DNA
gtctgtcattgataaggaca

SEQ ID NO: 3120 - DNA, 20 bp, synthetic construct
  misc_feature 1..20: note = chemically synthesized
  source 1..20: mol_type = other DNA
tcattgataaggacagggaa

SEQ ID NO: 3121 - DNA, 20 bp, synthetic construct
  misc_feature 1..20: note = chemically synthesized
  source 1..20: mol_type = other DNA
cattgataaggacagggaac

SEQ ID NO: 3122 - DNA, 20 bp, synthetic construct
  misc_feature 1..20: note = chemically synthesized
  source 1..20: mol_type = other DNA
ataaggacagggaacaggtc

SEQ ID NO: 3123 - DNA, 20 bp, synthetic construct
  misc_feature 1..20: note = chemically synthesized
  source 1..20: mol_type = other DNA
taaggacagggaacaggtcc

SEQ ID NO: 3124 - DNA, 20 bp, synthetic construct
  misc_feature 1..20: note = chemically synthesized
  source 1..20: mol_type = other DNA
aacaggtccaggctctccat

SEQ ID NO: 3125 - DNA, 20 bp, synthetic construct
  misc_feature 1..20: note = chemically synthesized
  source 1..20: mol_type = other DNA
acaggtccaggctctccatc

SEQ ID NO: 3126 - DNA, 20 bp, synthetic construct
  misc_feature 1..20: note = chemically synthesized
  source 1..20: mol_type = other DNA
tccaggctctccatcaggtc

SEQ ID NO: 3127 - DNA, 20 bp, synthetic construct
  misc_feature 1..20: note = chemically synthesized
  source 1..20: mol_type = other DNA
ccaggctctccatcaggtcc

SEQ ID NO: 3128 - DNA, 20 bp, synthetic construct
  misc_feature 1..20: note = chemically synthesized
  source 1..20: mol_type = other DNA
caggctctccatcaggtcca

SEQ ID NO: 3129 - DNA, 20 bp, synthetic construct
  misc_feature 1..20: note = chemically synthesized
  source 1..20: mol_type = other DNA
catcaggtccagggccttct

SEQ ID NO: 3130 - DNA, 20 bp, synthetic construct
  misc_feature 1..20: note = chemically synthesized
  source 1..20: mol_type = other DNA
gtccagggccttcttagcat

SEQ ID NO: 3131 - DNA, 20 bp, synthetic construct
  misc_feature 1..20: note = chemically synthesized
  source 1..20: mol_type = other DNA
gcatgagacaacacccaaac

SEQ ID NO: 3132 - DNA, 20 bp, synthetic construct
  misc_feature 1..20: note = chemically synthesized
  source 1..20: mol_type = other DNA
acacccaaaccagcttgtgc

SEQ ID NO: 3133 - DNA, 20 bp, synthetic construct
  misc_feature 1..20: note = chemically synthesized
  source 1..20: mol_type = other DNA
ccaaaccagcttgtgccaga

SEQ ID NO: 3134 - DNA, 20 bp, synthetic construct
  misc_feature 1..20: note = chemically synthesized
  source 1..20: mol_type = other DNA
tgtcctcactgcttccatta

SEQ ID NO: 3135 - DNA, 20 bp, synthetic construct
  misc_feature 1..20: note = chemically synthesized
  source 1..20: mol_type = other DNA
ttccattaaagccgacatgt

SEQ ID NO: 3136 - DNA, 20 bp, synthetic construct
  misc_feature 1..20: note = chemically synthesized
  source 1..20: mol_type = other DNA
agccgacatgtcagcgaacg

SEQ ID NO: 3137 - DNA, 20 bp, synthetic construct
  misc_feature 1..20: note = chemically synthesized
  source 1..20: mol_type = other DNA
catgtcagcgaacgcagctg

SEQ ID NO: 3138 - DNA, 20 bp, synthetic construct
  misc_feature 1..20: note = chemically synthesized
  source 1..20: mol_type = other DNA
acgcagctgtggcaactgca

SEQ ID NO: 3139 - DNA, 20 bp, synthetic construct
  misc_feature 1..20: note = chemically synthesized
  source 1..20: mol_type = other DNA
ctgtggcaactgcacggaca

SEQ ID NO: 3140 - DNA, 20 bp, synthetic construct
  misc_feature 1..20: note = chemically synthesized
  source 1..20: mol_type = other DNA
tggcaactgcacggacacag

SEQ ID NO: 3141 - DNA, 20 bp, synthetic construct
  misc_feature 1..20: note = chemically synthesized
  source 1..20: mol_type = other DNA
ggcaactgcacggacacagc

SEQ ID NO: 3142 - DNA, 20 bp, synthetic construct
  misc_feature 1..20: note = chemically synthesized
  source 1..20: mol_type = other DNA
tgcacggacacagcaggaac

SEQ ID NO: 3143 - DNA, 20 bp, synthetic construct
  misc_feature 1..20: note = chemically synthesized
  source 1..20: mol_type = other DNA
tggactcttgtttccctttc

SEQ ID NO: 3144 - DNA, 20 bp, synthetic construct
  misc_feature 1..20: note = chemically synthesized
  source 1..20: mol_type = other DNA
tccctttctggtctctcaaa

SEQ ID NO: 3145 - DNA, 20 bp, synthetic construct
  misc_feature 1..20: note = chemically synthesized
  source 1..20: mol_type = other DNA
ccctttctggtctctcaaat

SEQ ID NO: 3146 - DNA, 20 bp, synthetic construct
  misc_feature 1..20: note = chemically synthesized
  source 1..20: mol_type = other DNA
tcaaatgtcttacacttttc

SEQ ID NO: 3147 - DNA, 20 bp, synthetic construct
  misc_feature 1..20: note = chemically synthesized
  source 1..20: mol_type = other DNA
aatgtcttacacttttctgg

SEQ ID NO: 3148 - DNA, 20 bp, synthetic construct
  misc_feature 1..20: note = chemically synthesized
  source 1..20: mol_type = other DNA
gtcttacacttttctggtgg

SEQ ID NO: 3149 - DNA, 20 bp, synthetic construct
  misc_feature 1..20: note = chemically synthesized
  source 1..20: mol_type = other DNA
tcttacacttttctggtgga

SEQ ID NO: 3150 - DNA, 20 bp, synthetic construct
  misc_feature 1..20: note = chemically synthesized
  source 1..20: mol_type = other DNA
tcaacctgttctatttcata

SEQ ID NO: 3151 - DNA, 20 bp, synthetic construct
  misc_feature 1..20: note = chemically synthesized
  source 1..20: mol_type = other DNA
caacctgttctatttcataa

SEQ ID NO: 3152 - DNA, 20 bp, synthetic construct
  misc_feature 1..20: note = chemically synthesized
  source 1..20: mol_type = other DNA
ctatttcataaaggtctctc

SEQ ID NO: 3153 - DNA, 20 bp, synthetic construct
  misc_feature 1..20: note = chemically synthesized
  source 1..20: mol_type = other DNA
cataaaggtctctctagacc

SEQ ID NO: 3154 - DNA, 20 bp, synthetic construct
  misc_feature 1..20: note = chemically synthesized
  source 1..20: mol_type = other DNA
ctagacccagtatttccact

SEQ ID NO: 3155 - DNA, 20 bp, synthetic construct
  misc_feature 1..20: note = chemically synthesized
  source 1..20: mol_type = other DNA
tagacccagtatttccactt

SEQ ID NO: 3156 - DNA, 20 bp, synthetic construct
  misc_feature 1..20: note = chemically synthesized
  source 1..20: mol_type = other DNA
agacccagtatttccacttg

SEQ ID NO: 3157 - DNA, 20 bp, synthetic construct
  misc_feature 1..20: note = chemically synthesized
  source 1..20: mol_type = other DNA
agtatttccacttggggcct

SEQ ID NO: 3158 - DNA, 20 bp, synthetic construct
  misc_feature 1..20: note = chemically synthesized
  source 1..20: mol_type = other DNA
agaaatgccttacacattat

SEQ ID NO: 3159 - DNA, 20 bp, synthetic construct
  misc_feature 1..20: note = chemically synthesized
  source 1..20: mol_type = other DNA
gaaatgccttacacattatt

SEQ ID NO: 3160 - DNA, 20 bp, synthetic construct
  misc_feature 1..20: note = chemically synthesized
  source 1..20: mol_type = other DNA
ttacacattattaggttgca

SEQ ID NO: 3161 - DNA, 20 bp, synthetic construct
  misc_feature 1..20: note = chemically synthesized
  source 1..20: mol_type = other DNA
taggttgcaaagtttcctta

SEQ ID NO: 3162 - DNA, 20 bp, synthetic construct
  misc_feature 1..20: note = chemically synthesized
  source 1..20: mol_type = other DNA
cttatggctgaatttaaaaa

SEQ ID NO: 3163 - DNA, 20 bp, synthetic construct
  misc_feature 1..20: note = chemically synthesized
  source 1..20: mol_type = other DNA
aaatagtgactcttattttt

SEQ ID NO: 3164 - DNA, 20 bp, synthetic construct
  misc_feature 1..20: note = chemically synthesized
  source 1..20: mol_type = other DNA
aatagtgactcttatttttc

SEQ ID NO: 3165 - DNA, 20 bp, synthetic construct
  misc_feature 1..20: note = chemically synthesized
  source 1..20: mol_type = other DNA
aggtttcattaaaaaatatg

SEQ ID NO: 3166 - DNA, 20 bp, synthetic construct
  misc_feature 1..20: note = chemically synthesized
  source 1..20: mol_type = other DNA
ttaaaaaatatgcagcaaac

SEQ ID NO: 3167 - DNA, 20 bp, synthetic construct
  misc_feature 1..20: note = chemically synthesized
  source 1..20: mol_type = other DNA
taaaaaatatgcagcaaact

SEQ ID NO: 3168 - DNA, 20 bp, synthetic construct
  misc_feature 1..20: note = chemically synthesized
  source 1..20: mol_type = other DNA
aatatgcagcaaactgggaa

SEQ ID NO: 3169 - DNA, 20 bp, synthetic construct
  misc_feature 1..20: note = chemically synthesized
  source 1..20: mol_type = other DNA
ttgatttaatgttatacatt

SEQ ID NO: 3170 - DNA, 20 bp, synthetic construct
  misc_feature 1..20: note = chemically synthesized
  source 1..20: mol_type = other DNA
ctttacatttctacatatat

SEQ ID NO: 3171 - DNA, 20 bp, synthetic construct
  misc_feature 1..20: note = chemically synthesized
  source 1..20: mol_type = other DNA
tttacatttctacatatatt

SEQ ID NO: 3172 - DNA, 20 bp, synthetic construct
  misc_feature 1..20: note = chemically synthesized
  source 1..20: mol_type = other DNA
ttgggtaccaacttttgaca

SEQ ID NO: 3173 - DNA, 20 bp, synthetic construct
  misc_feature 1..20: note = chemically synthesized
  source 1..20: mol_type = other DNA
gggtaccaacttttgacaaa

SEQ ID NO: 3174 - DNA, 20 bp, synthetic construct
  misc_feature 1..20: note = chemically synthesized
  source 1..20: mol_type = other DNA
aacttttgacaaagagctct

SEQ ID NO: 3175 - DNA, 20 bp, synthetic construct
  misc_feature 1..20: note = chemically synthesized
  source 1..20: mol_type = other DNA
ttgacaaagagctctaagcc

SEQ ID NO: 3176 - DNA, 20 bp, synthetic construct
  misc_feature 1..20: note = chemically synthesized
  source 1..20: mol_type = other DNA
acaaagagctctaagcccag

SEQ ID NO: 3177 - DNA, 20 bp, synthetic construct
  misc_feature 1..20: note = chemically synthesized
  source 1..20: mol_type = other DNA
caaagagctctaagcccagt

SEQ ID NO: 3178 - DNA, 20 bp, synthetic construct
  misc_feature 1..20: note = chemically synthesized
  source 1..20: mol_type = other DNA
taagcccagtgggatgttcc

SEQ ID NO: 3179 - DNA, 20 bp, synthetic construct
  misc_feature 1..20: note = chemically synthesized
  source 1..20: mol_type = other DNA
gtgggatgttcctggaattt

SEQ ID NO: 3180 - DNA, 20 bp, synthetic construct
  misc_feature 1..20: note = chemically synthesized
  source 1..20: mol_type = other DNA
ggaatttaagtcattaaatc

SEQ ID NO: 3181 - DNA, 20 bp, synthetic construct
  misc_feature 1..20: note = chemically synthesized
  source 1..20: mol_type = other DNA
agtcattaaatcaagttttt

SEQ ID NO: 3182 - DNA, 20 bp, synthetic construct
  misc_feature 1..20: note = chemically synthesized
  source 1..20: mol_type = other DNA
tcaagttttttggtttcctc

SEQ ID NO: 3183 - DNA, 20 bp, synthetic construct
  misc_feature 1..20: note = chemically synthesized
  source 1..20: mol_type = other DNA
gtttcctcaagaacatctca

SEQ ID NO: 3184 - DNA, 20 bp, synthetic construct
  misc_feature 1..20: note = chemically synthesized
  source 1..20: mol_type = other DNA
ttgtttctgaaactaatcac

SEQ ID NO: 3185 - DNA, 20 bp, synthetic construct
  misc_feature 1..20: note = chemically synthesized
  source 1..20: mol_type = other DNA
tgtttctgaaactaatcact

SEQ ID NO: 3186 - DNA, 20 bp, synthetic construct
  misc_feature 1..20: note = chemically synthesized
  source 1..20: mol_type = other DNA
taatcactgggtgtgtaata

SEQ ID NO: 3187 - DNA, 20 bp, synthetic construct
  misc_feature 1..20: note = chemically synthesized
  source 1..20: mol_type = other DNA
cattactgtctactaatcaa

SEQ ID NO: 3188 - DNA, 20 bp, synthetic construct
  misc_feature 1..20: note = chemically synthesized
  source 1..20: mol_type = other DNA
attactgtctactaatcaac

SEQ ID NO: 3189 - DNA, 20 bp, synthetic construct
  misc_feature 1..20: note = chemically synthesized
  source 1..20: mol_type = other DNA
ctaatcaacaggtaatactg

SEQ ID NO: 3190 - DNA, 20 bp, synthetic construct
  misc_feature 1..20: note = chemically synthesized
  source 1..20: mol_type = other DNA
gatttccaaatgtgccaaaa

SEQ ID NO: 3191 - DNA, 20 bp, synthetic construct
  misc_feature 1..20: note = chemically synthesized
  source 1..20: mol_type = other DNA
ccaaatgtgccaaaacagct

SEQ ID NO: 3192 - DNA, 20 bp, synthetic construct
  misc_feature 1..20: note = chemically synthesized
  source 1..20: mol_type = other DNA
tgccaaaacagctaagcaaa

SEQ ID NO: 3193 - DNA, 20 bp, synthetic construct
  misc_feature 1..20: note = chemically synthesized
  source 1..20: mol_type = other DNA
aacacgtttaatgactgctt

SEQ ID NO: 3194 - DNA, 20 bp, synthetic construct
  misc_feature 1..20: note = chemically synthesized
  source 1..20: mol_type = other DNA
acacgtttaatgactgcttt

SEQ ID NO: 3195 - DNA, 20 bp, synthetic construct
  misc_feature 1..20: note = chemically synthesized
  source 1..20: mol_type = other DNA
acgtttaatgactgctttgg

SEQ ID NO: 3196 - DNA, 20 bp, synthetic construct
  misc_feature 1..20: note = chemically synthesized
  source 1..20: mol_type = other DNA
ctttgggagcccaactttaa

SEQ ID NO: 3197 - DNA, 20 bp, synthetic construct
  misc_feature 1..20: note = chemically synthesized
  source 1..20: mol_type = other DNA
tttgggagcccaactttaac

SEQ ID NO: 3198 - DNA, 20 bp, synthetic construct
  misc_feature 1..20: note = chemically synthesized
  source 1..20: mol_type = other DNA
tttaacaggtattaaaacca

SEQ ID NO: 3199 - DNA, 20 bp, synthetic construct
  misc_feature 1..20: note = chemically synthesized
  source 1..20: mol_type = other DNA
ttaacaggtattaaaaccac

SEQ ID NO: 3200 - DNA, 20 bp, synthetic construct
  misc_feature 1..20: note = chemically synthesized
  source 1..20: mol_type = other DNA
taaaaccacaggactctcca

SEQ ID NO: 3201 - DNA, 20 bp, synthetic construct
  misc_feature 1..20: note = chemically synthesized
  source 1..20: mol_type = other DNA
aaaaccacaggactctccac

SEQ ID NO: 3202 - DNA, 20 bp, synthetic construct
  misc_feature 1..20: note = chemically synthesized
  source 1..20: mol_type = other DNA
aaccacaggactctccacag

SEQ ID NO: 3203 - DNA, 20 bp, synthetic construct
  misc_feature 1..20: note = chemically synthesized
  source 1..20: mol_type = other DNA
ggactctccacaggagtaca

SEQ ID NO: 3204 - DNA, 20 bp, synthetic construct
  misc_feature 1..20: note = chemically synthesized
  source 1..20: mol_type = other DNA
gtacgtgtgtgtgtgtttgc

SEQ ID NO: 3205 - DNA, 20 bp, synthetic construct
  misc_feature 1..20: note = chemically synthesized
  source 1..20: mol_type = other DNA
ttatgtgtacatatgtgtgt

SEQ ID NO: 3206 - DNA, 20 bp, synthetic construct
  misc_feature 1..20: note = chemically synthesized
  source 1..20: mol_type = other DNA
gtgcatgcatatgtgtttgt

SEQ ID NO: 3207 - DNA, 20 bp, synthetic construct
  misc_feature 1..20: note = chemically synthesized
  source 1..20: mol_type = other DNA
gtgtatgcttgtgcatgtgt

SEQ ID NO: 3208 - DNA, 20 bp, synthetic construct
  misc_feature 1..20: note = chemically synthesized
  source 1..20: mol_type = other DNA
atgtgcatgcacatgtgtgt

SEQ ID NO: 3209 - DNA, 20 bp, synthetic construct
  misc_feature 1..20: note = chemically synthesized
  source 1..20: mol_type = other DNA
gttcatgtgtgtgtatatgt

SEQ ID NO: 3210 - DNA, 20 bp, synthetic construct
  misc_feature 1..20: note = chemically synthesized
  source 1..20: mol_type = other DNA
atttcctaaacatatgtttt

SEQ ID NO: 3211 - DNA, 20 bp, synthetic construct
  misc_feature 1..20: note = chemically synthesized
  source 1..20: mol_type = other DNA
ccctgttttttttttttttt

SEQ ID NO: 3212 - DNA, 20 bp, synthetic construct
  misc_feature 1..20: note = chemically synthesized
  source 1..20: mol_type = other DNA
gtttttttttttttttcagt

SEQ ID NO: 3213 - DNA, 20 bp, synthetic construct
  misc_feature 1..20: note = chemically synthesized
  source 1..20: mol_type = other DNA
ttttttttttttcagtgaga

SEQ ID NO: 3214 - DNA, 20 bp, synthetic construct
  misc_feature 1..20: note = chemically synthesized
  source 1..20: mol_type = other DNA
tttttttttttcagtgagac

SEQ ID NO: 3215 - DNA, 20 bp, synthetic construct
  misc_feature 1..20: note = chemically synthesized
  source 1..20: mol_type = other DNA
tttcagtgagacaggcacaa

SEQ ID NO: 3216 - DNA, 20 bp, synthetic construct
  misc_feature 1..20: note = chemically synthesized
  source 1..20: mol_type = other DNA
cagtgagacaggcacaaaag

SEQ ID NO: 3217 - DNA, 20 bp, synthetic construct
  misc_feature 1..20: note = chemically synthesized
  source 1..20: mol_type = other DNA
tgagacaggcacaaaagcag

SEQ ID NO: 3218 - DNA, 20 bp, synthetic construct
  misc_feature 1..20: note = chemically synthesized
  source 1..20: mol_type = other DNA
agacaggcacaaaagcagta

SEQ ID NO: 3219 - DNA, 20 bp, synthetic construct
  misc_feature 1..20: note = chemically synthesized
  source 1..20: mol_type = other DNA
agcagtagagctgtcccacg

SEQ ID NO: 3220 - DNA, 20 bp, synthetic construct
  misc_feature 1..20: note = chemically synthesized
  source 1..20: mol_type = other DNA
tagagctgtcccacgtggaa

SEQ ID NO: 3221 - DNA, 20 bp, synthetic construct
  misc_feature 1..20: note = chemically synthesized
  source 1..20: mol_type = other DNA
agagctgtcccacgtggaat

SEQ ID NO: 3222 - DNA, 20 bp, synthetic construct
  misc_feature 1..20: note = chemically synthesized
  source 1..20: mol_type = other DNA
tgaccccctttctttcaccc

SEQ ID NO: 3223 - DNA, 20 bp, synthetic construct
  misc_feature 1..20: note = chemically synthesized
  source 1..20: mol_type = other DNA
gaccccctttctttcaccct

SEQ ID NO: 3224 - DNA, 20 bp, synthetic construct
  misc_feature 1..20: note = chemically synthesized
  source 1..20: mol_type = other DNA
tttcaccctgggtcttcaaa

SEQ ID NO: 3225 - DNA, 20 bp, synthetic construct
  misc_feature 1..20: note = chemically synthesized
  source 1..20: mol_type = other DNA
tcaccctgggtcttcaaaaa

SEQ ID NO: 3226 - DNA, 20 bp, synthetic construct
  misc_feature 1..20: note = chemically synthesized
  source 1..20: mol_type = other DNA
ctgggtcttcaaaaagagaa

SEQ ID NO: 3227 - DNA, 20 bp, synthetic construct
  misc_feature 1..20: note = chemically synthesized
  source 1..20: mol_type = other DNA
agaatggatgacactatgat

SEQ ID NO: 3228 - DNA, 20 bp, synthetic construct
  misc_feature 1..20: note = chemically synthesized
  source 1..20: mol_type = other DNA
gaatggatgacactatgatg

SEQ ID NO: 3229 - DNA, 20 bp, synthetic construct
  misc_feature 1..20: note = chemically synthesized
  source 1..20: mol_type = other DNA
atggatgacactatgatgag

SEQ ID NO: 3230 - DNA, 20 bp, synthetic construct
  misc_feature 1..20: note = chemically synthesized
  source 1..20: mol_type = other DNA
tggatgacactatgatgagg

SEQ ID NO: 3231 - DNA, 20 bp, synthetic construct
  misc_feature 1..20: note = chemically synthesized
  source 1..20: mol_type = other DNA
ggatgacactatgatgagga

SEQ ID NO: 3232 - DNA, 20 bp, synthetic construct
  misc_feature 1..20: note = chemically synthesized
  source 1..20: mol_type = other DNA
gatgacactatgatgaggag

SEQ ID NO: 3233 - DNA, 20 bp, synthetic construct
  misc_feature 1..20: note = chemically synthesized
  source 1..20: mol_type = other DNA
atgaggaggggtctctatat

SEQ ID NO: 3234 - DNA, 20 bp, synthetic construct
  misc_feature 1..20: note = chemically synthesized
  source 1..20: mol_type = other DNA
aggggtctctatattggtga

SEQ ID NO: 3235 - DNA, 20 bp, synthetic construct
  misc_feature 1..20: note = chemically synthesized
  source 1..20: mol_type = other DNA
ggggtctctatattggtgac

SEQ ID NO: 3236 - DNA, 20 bp, synthetic construct
  misc_feature 1..20: note = chemically synthesized
  source 1..20: mol_type = other DNA
attggtgacaggccaaaata

SEQ ID NO: 3237 - DNA, 20 bp, synthetic construct
  misc_feature 1..20: note = chemically synthesized
  source 1..20: mol_type = other DNA
ttggtgacaggccaaaatac

SEQ ID NO: 3238 - DNA, 20 bp, synthetic construct
  misc_feature 1..20: note = chemically synthesized
  source 1..20: mol_type = other DNA
ccaaaatacaggactaccta

SEQ ID NO: 3239 - DNA, 20 bp, synthetic construct
  misc_feature 1..20: note = chemically synthesized
  source 1..20: mol_type = other DNA
gactacctacagtcctttcg

SEQ ID NO: 3240 - DNA, 20 bp, synthetic construct
  misc_feature 1..20: note = chemically synthesized
  source 1..20: mol_type = other DNA
tttcgcagtccataatcctc

SEQ ID NO: 3241 - DNA, 20 bp, synthetic construct
  misc_feature 1..20: note = chemically synthesized
  source 1..20: mol_type = other DNA
tccataatcctcaagtccct

SEQ ID NO: 3242 - DNA, 20 bp, synthetic construct
  misc_feature 1..20: note = chemically synthesized
  source 1..20: mol_type = other DNA
ctcttccatgtaccaccttc

SEQ ID NO: 3243 - DNA, 20 bp, synthetic construct
  misc_feature 1..20: note = chemically synthesized
  source 1..20: mol_type = other DNA
atgcatcctgaacgtttgta

SEQ ID NO: 3244 - DNA, 20 bp, synthetic construct
  misc_feature 1..20: note = chemically synthesized
  source 1..20: mol_type = other DNA
aacgtttgtaaagtaccctg

SEQ ID NO: 3245 - DNA, 20 bp, synthetic construct
  misc_feature 1..20: note = chemically synthesized
  source 1..20: mol_type = other DNA
acgtttgtaaagtaccctga

SEQ ID NO: 3246 - DNA, 20 bp, synthetic construct
  misc_feature 1..20: note = chemically synthesized
  source 1..20: mol_type = other DNA
taccctgaaggaacccattc

SEQ ID NO: 3247 - DNA, 20 bp, synthetic construct
  misc_feature 1..20: note = chemically synthesized
  source 1..20: mol_type = other DNA
ccagttctgaatccgattac

SEQ ID NO: 3248 - DNA, 20 bp, synthetic construct
  misc_feature 1..20: note = chemically synthesized
  source 1..20: mol_type = other DNA
cagttctgaatccgattact

SEQ ID NO: 3249 - DNA, 20 bp, synthetic construct
  misc_feature 1..20: note = chemically synthesized
  source 1..20: mol_type = other DNA
tgaatccgattactaggttc

SEQ ID NO: 3250 - DNA, 20 bp, synthetic construct
  misc_feature 1..20: note = chemically synthesized
  source 1..20: mol_type = other DNA
tcaagccacacaaataacaa

SEQ ID NO: 3251 - DNA, 20 bp, synthetic construct
  misc_feature 1..20: note = chemically synthesized
  source 1..20: mol_type = other DNA
ccacacaaataacaacagtg

SEQ ID NO: 3252 - DNA, 20 bp, synthetic construct
  misc_feature 1..20: note = chemically synthesized
  source 1..20: mol_type = other DNA
acaaataacaacagtgcagc

SEQ ID NO: 3253 - DNA, 20 bp, synthetic construct
  misc_feature 1..20: note = chemically synthesized
  source 1..20: mol_type = other DNA
aacaacagtgcagctagtct

SEQ ID NO: 3254 - DNA, 20 bp, synthetic construct
  misc_feature 1..20: note = chemically synthesized
  source 1..20: mol_type = other DNA
acagtgcagctagtctgagc

SEQ ID NO: 3255 - DNA, 20 bp, synthetic construct
  misc_feature 1..20: note = chemically synthesized
  source 1..20: mol_type = other DNA
agtgcagctagtctgagcta

SEQ ID NO: 3256 - DNA, 20 bp, synthetic construct
  misc_feature 1..20: note = chemically synthesized
  source 1..20: mol_type = other DNA
gtgcagctagtctgagctag

SEQ ID NO: 3257 - DNA, 20 bp, synthetic construct
  misc_feature 1..20: note = chemically synthesized
  source 1..20: mol_type = other DNA
ggcttctttacctaactgca

SEQ ID NO: 3258 - DNA, 20 bp, synthetic construct
  misc_feature 1..20: note = chemically synthesized
  source 1..20: mol_type = other DNA
aagtaaatgtcctttctatt

SEQ ID NO: 3259 - DNA, 20 bp, synthetic construct
  misc_feature 1..20: note = chemically synthesized
  source 1..20: mol_type = other DNA
cctttctattcagccgcatc

SEQ ID NO: 3260 - DNA, 20 bp, synthetic construct
  misc_feature 1..20: note = chemically synthesized
  source 1..20: mol_type = other DNA
tcttgaccctatgtttacca

SEQ ID NO: 3261 - DNA, 20 bp, synthetic construct
  misc_feature 1..20: note = chemically synthesized
  source 1..20: mol_type = other DNA
cctatgtttaccatagatac

SEQ ID NO: 3262 - DNA, 20 bp, synthetic construct
  misc_feature 1..20: note = chemically synthesized
  source 1..20: mol_type = other DNA
agataccagttcttctcact

SEQ ID NO: 3263 - DNA, 20 bp, synthetic construct
  misc_feature 1..20: note = chemically synthesized
  source 1..20: mol_type = other DNA
acttagattctctgacttat

SEQ ID NO: 3264 - DNA, 20 bp, synthetic construct
  misc_feature 1..20: note = chemically synthesized
  source 1..20: mol_type = other DNA
ttagattctctgacttatca

SEQ ID NO: 3265 - DNA, 20 bp, synthetic construct
  misc_feature 1..20: note = chemically synthesized
  source 1..20: mol_type = other DNA
tctgacttatcagagtatta

SEQ ID NO: 3266 - DNA, 20 bp, synthetic construct
  misc_feature 1..20: note = chemically synthesized
  source 1..20: mol_type = other DNA
tgacttatcagagtattata

SEQ ID NO: 3267 - DNA, 20 bp, synthetic construct
  misc_feature 1..20: note = chemically synthesized
  source 1..20: mol_type = other DNA
gagtattatagagcaaacat

SEQ ID NO: 3268 - DNA, 20 bp, synthetic construct
  misc_feature 1..20: note = chemically synthesized
  source 1..20: mol_type = other DNA
attagctatgcctgtgactt

SEQ ID NO: 3269 - DNA, 20 bp, synthetic construct
  misc_feature 1..20: note = chemically synthesized
  source 1..20: mol_type = other DNA
aatctgtaatgaaaatgtgc

SEQ ID NO: 3270 - DNA, 20 bp, synthetic construct
  misc_feature 1..20: note = chemically synthesized
  source 1..20: mol_type = other DNA
gccagctttatcatcactca

SEQ ID NO: 3271 - DNA, 20 bp, synthetic construct
  misc_feature 1..20: note = chemically synthesized
  source 1..20: mol_type = other DNA
aatcgcactctcttttgttc

SEQ ID NO: 3272 - DNA, 20 bp, synthetic construct
  misc_feature 1..20: note = chemically synthesized
  source 1..20: mol_type = other DNA
ctctcttttgttctagaaat

SEQ ID NO: 3273 - DNA, 20 bp, synthetic construct
  misc_feature 1..20: note = chemically synthesized
  source 1..20: mol_type = other DNA
ttccttcattgcttttttac

SEQ ID NO: 3274 - DNA, 20 bp, synthetic construct
  misc_feature 1..20: note = chemically synthesized
  source 1..20: mol_type = other DNA
aaatcctgatgttctttaaa

SEQ ID NO: 3275 - DNA, 20 bp, synthetic construct
  misc_feature 1..20: note = chemically synthesized
  source 1..20: mol_type = other DNA
agtgtattctgcaaaaacaa

SEQ ID NO: 3276 - DNA, 20 bp, synthetic construct
  misc_feature 1..20: note = chemically synthesized
  source 1..20: mol_type = other DNA
tattctgcaaaaacaaaaga

SEQ ID NO: 3277 - DNA, 20 bp, synthetic construct
  misc_feature 1..20: note = chemically synthesized
  source 1..20: mol_type = other DNA
acaaaagaaagcaataatta

SEQ ID NO: 3278 - DNA, 20 bp, synthetic construct
  misc_feature 1..20: note = chemically synthesized
  source 1..20: mol_type = other DNA
taattatagacactacaata

SEQ ID NO: 3279 - DNA, 20 bp, synthetic construct
  misc_feature 1..20: note = chemically synthesized
  source 1..20: mol_type = other DNA
tcttccctgaaactctctca

SEQ ID NO: 3280 - DNA, 20 bp, synthetic construct
  misc_feature 1..20: note = chemically synthesized
  source 1..20: mol_type = other DNA
tgaaactctctcatggtcct

SEQ ID NO: 3281 - DNA, 20 bp, synthetic construct
  misc_feature 1..20: note = chemically synthesized
  source 1..20: mol_type = other DNA
tagattccttgatacttcac

SEQ ID NO: 3282 - DNA, 20 bp, synthetic construct
  misc_feature 1..20: note = chemically synthesized
  source 1..20: mol_type = other DNA
tttgatcaatgctatcctct

SEQ ID NO: 3283 - DNA, 20 bp, synthetic construct
  misc_feature 1..20: note = chemically synthesized
  source 1..20: mol_type = other DNA
tgatcaatgctatcctctta

SEQ ID NO: 3284 - DNA, 20 bp, synthetic construct
  misc_feature 1..20: note = chemically synthesized
  source 1..20: mol_type = other DNA
agccttgattactcaaacaa

SEQ ID NO: 3285 - DNA, 20 bp, synthetic construct
  misc_feature 1..20: note = chemically synthesized
  source 1..20: mol_type = other DNA
gccttgattactcaaacaac

SEQ ID NO: 3286 - DNA, 20 bp, synthetic construct
  misc_feature 1..20: note = chemically synthesized
  source 1..20: mol_type = other DNA
ggttactaacttcacctttt

SEQ ID NO: 3287 - DNA, 20 bp, synthetic construct
  misc_feature 1..20: note = chemically synthesized
  source 1..20: mol_type = other DNA
ttactaacttcaccttttaa

SEQ ID NO: 3288 - DNA, 20 bp, synthetic construct
  misc_feature 1..20: note = chemically synthesized
  source 1..20: mol_type = other DNA
ccttttaagagttctcctcc

SEQ ID NO: 3289 - DNA, 20 bp, synthetic construct
  misc_feature 1..20: note = chemically synthesized
  source 1..20: mol_type = other DNA
cttttaagagttctcctcct

SEQ ID NO: 3290 - DNA, 20 bp, synthetic construct
  misc_feature 1..20: note = chemically synthesized
  source 1..20: mol_type = other DNA
tcctaggctttttctcaata

SEQ ID NO: 3291 - DNA, 20 bp, synthetic construct
  misc_feature 1..20: note = chemically synthesized
  source 1..20: mol_type = other DNA
cctaggctttttctcaataa

SEQ ID NO: 3292 - DNA, 20 bp, synthetic construct
  misc_feature 1..20: note = chemically synthesized
  source 1..20: mol_type = other DNA
ctaggctttttctcaataaa

SEQ ID NO: 3293 - DNA, 20 bp, synthetic construct
  misc_feature 1..20: note = chemically synthesized
  source 1..20: mol_type = other DNA
aggctttttctcaataaagg

SEQ ID NO: 3294 - DNA, 20 bp, synthetic construct
  misc_feature 1..20: note = chemically synthesized
  source 1..20: mol_type = other DNA
ggctttttctcaataaaggg

SEQ ID NO: 3295 - DNA, 20 bp, synthetic construct
  misc_feature 1..20: note = chemically synthesized
  source 1..20: mol_type = other DNA
tttttctcaataaagggagg

SEQ ID NO: 3296 - DNA, 20 bp, synthetic construct
  misc_feature 1..20: note = chemically synthesized
  source 1..20: mol_type = other DNA
ttctcaataaagggaggaag

SEQ ID NO: 3297 - DNA, 20 bp, synthetic construct
  misc_feature 1..20: note = chemically synthesized
  source 1..20: mol_type = other DNA
ctcaataaagggaggaagta

SEQ ID NO: 3298 - DNA, 20 bp, synthetic construct
  misc_feature 1..20: note = chemically synthesized
  source 1..20: mol_type = other DNA
ccctttatctataaaaatgc

SEQ ID NO: 3299 - DNA, 20 bp, synthetic construct
  misc_feature 1..20: note = chemically synthesized
  source 1..20: mol_type = other DNA
aatgccagccaccaatctgt

SEQ ID NO: 3300 - DNA, 20 bp, synthetic construct
  misc_feature 1..20: note = chemically synthesized
  source 1..20: mol_type = other DNA
atgccagccaccaatctgtc

SEQ ID NO: 3301 - DNA, 20 bp, synthetic construct
  misc_feature 1..20: note = chemically synthesized
  source 1..20: mol_type = other DNA
cctaaacaaaatttttctgc

SEQ ID NO: 3302 - DNA, 20 bp, synthetic construct
  misc_feature 1..20: note = chemically synthesized
  source 1..20: mol_type = other DNA
gcaagctgtgtctttaacat

SEQ ID NO: 3303 - DNA, 20 bp, synthetic construct
  misc_feature 1..20: note = chemically synthesized
  source 1..20: mol_type = other DNA
ctgtgtctttaacataagca

SEQ ID NO: 3304 - DNA, 20 bp, synthetic construct
  misc_feature 1..20: note = chemically synthesized
  source 1..20: mol_type = other DNA
aaaaatcttgcttttctgaa

SEQ ID NO: 3305 - DNA, 20 bp, synthetic construct
  misc_feature 1..20: note = chemically synthesized
  source 1..20: mol_type = other DNA
tgcttttctgaaaagcaact

SEQ ID NO: 3306 - DNA, 20 bp, synthetic construct
  misc_feature 1..20: note = chemically synthesized
  source 1..20: mol_type = other DNA
tctgaaaagcaactaagcca

SEQ ID NO: 3307 - DNA, 20 bp, synthetic construct
  misc_feature 1..20: note = chemically synthesized
  source 1..20: mol_type = other DNA
tccatctttgtgttgaaatg

SEQ ID NO: 3308 - DNA, 20 bp, synthetic construct
  misc_feature 1..20: note = chemically synthesized
  source 1..20: mol_type = other DNA
aaatgcagatttcccactaa

SEQ ID NO: 3309 - DNA, 20 bp, synthetic construct
  misc_feature 1..20: note = chemically synthesized
  source 1..20: mol_type = other DNA
aatgcagatttcccactaaa

SEQ ID NO: 3310 - DNA, 20 bp, synthetic construct
  misc_feature 1..20: note = chemically synthesized
  source 1..20: mol_type = other DNA
aggcaaatccttcatttcaa

SEQ ID NO: 3311 - DNA, 20 bp, synthetic construct
  misc_feature 1..20: note = chemically synthesized
  source 1..20: mol_type = other DNA
ggcaaatccttcatttcaaa

SEQ ID NO: 3312 - DNA, 20 bp, synthetic construct
  misc_feature 1..20: note = chemically synthesized
  source 1..20: mol_type = other DNA
cttcatttcaaaaggttgaa

SEQ ID NO: 3313 - DNA, 20 bp, synthetic construct
  misc_feature 1..20: note = chemically synthesized
  source 1..20: mol_type = other DNA
ttcatttcaaaaggttgaat

SEQ ID NO: 3314 - DNA, 20 bp, synthetic construct
  misc_feature 1..20: note = chemically synthesized
  source 1..20: mol_type = other DNA
tttcaaaaggttgaatagga

SEQ ID NO: 3315 - DNA, 20 bp, synthetic construct
  misc_feature 1..20: note = chemically synthesized
  source 1..20: mol_type = other DNA
aataggatggtacttaaaaa

SEQ ID NO: 3316 - DNA, 20 bp, synthetic construct
  misc_feature 1..20: note = chemically synthesized
  source 1..20: mol_type = other DNA
ggtacttaaaaaaagaattc

SEQ ID NO: 3317 - DNA, 20 bp, synthetic construct
  misc_feature 1..20: note = chemically synthesized
  source 1..20: mol_type = other DNA
cttaaaaaaagaattccagc

SEQ ID NO: 3318 - DNA, 20 bp, synthetic construct
  misc_feature 1..20: note = chemically synthesized
  source 1..20: mol_type = other DNA
gaattccagctggttaaatt

SEQ ID NO: 3319 - DNA, 20 bp, synthetic construct
  misc_feature 1..20: note = chemically synthesized
  source 1..20: mol_type = other DNA
aattccagctggttaaattt

SEQ ID NO: 3320 - DNA, 20 bp, synthetic construct
  misc_feature 1..20: note = chemically synthesized
  source 1..20: mol_type = other DNA
attccagctggttaaattta

SEQ ID NO: 3321 - DNA, 20 bp, synthetic construct
  misc_feature 1..20: note = chemically synthesized
  source 1..20: mol_type = other DNA
taaatttagggtgttaaaaa

SEQ ID NO: 3322 - DNA, 20 bp, synthetic construct
  misc_feature 1..20: note = chemically synthesized
  source 1..20: mol_type = other DNA
ttcactccaataatattctt

SEQ ID NO: 3323 - DNA, 20 bp, synthetic construct
  misc_feature 1..20: note = chemically synthesized
  source 1..20: mol_type = other DNA
ccaataatattctttggctc

SEQ ID NO: 3324 - DNA, 20 bp, synthetic construct
  misc_feature 1..20: note = chemically synthesized
  source 1..20: mol_type = other DNA
caataatattctttggctct

SEQ ID NO: 3325 - DNA, 20 bp, synthetic construct
  misc_feature 1..20: note = chemically synthesized
  source 1..20: mol_type = other DNA
attctttggctctgggccca

SEQ ID NO: 3326 - DNA, 20 bp, synthetic construct
  misc_feature 1..20: note = chemically synthesized
  source 1..20: mol_type = other DNA
attttcacttgatcgtgaat

SEQ ID NO: 3327 - DNA, 20 bp, synthetic construct
  misc_feature 1..20: note = chemically synthesized
  source 1..20: mol_type = other DNA
ataaatttttattacacttt

SEQ ID NO: 3328 - DNA, 20 bp, synthetic construct
  misc_feature 1..20: note = chemically synthesized
  source 1..20: mol_type = other DNA
tacactttaagcttttgcct

SEQ ID NO: 3329 - DNA, 20 bp, synthetic construct
  misc_feature 1..20: note = chemically synthesized
  source 1..20: mol_type = other DNA
tttaagcttttgccttagaa

SEQ ID NO: 3330 - DNA, 20 bp, synthetic construct
  misc_feature 1..20: note = chemically synthesized
  source 1..20: mol_type = other DNA
aagcttttgccttagaatgg

SEQ ID NO: 3331 - DNA, 20 bp, synthetic construct
  misc_feature 1..20: note = chemically synthesized
  source 1..20: mol_type = other DNA
ttagaatggcggaacttatc

SEQ ID NO: 3332 - DNA, 20 bp, synthetic construct
  misc_feature 1..20: note = chemically synthesized
  source 1..20: mol_type = other DNA
tagaatggcggaacttatct

SEQ ID NO: 3333 - DNA, 20 bp, synthetic construct
  misc_feature 1..20: note = chemically synthesized
  source 1..20: mol_type = other DNA
gaatggcggaacttatctag

SEQ ID NO: 3334 - DNA, 20 bp, synthetic construct
  misc_feature 1..20: note = chemically synthesized
  source 1..20: mol_type = other DNA
cggaacttatctaggagact

SEQ ID NO: 3335 - DNA, 20 bp, synthetic construct
  misc_feature 1..20: note = chemically synthesized
  source 1..20: mol_type = other DNA
gaacttatctaggagactga

SEQ ID NO: 3336 - DNA, 20 bp, synthetic construct
  misc_feature 1..20: note = chemically synthesized
  source 1..20: mol_type = other DNA
aacttatctaggagactgag

SEQ ID NO: 3337 - DNA, 20 bp, synthetic construct
  misc_feature 1..20: note = chemically synthesized
  source 1..20: mol_type = other DNA
acttatctaggagactgaga

SEQ ID NO: 3338 - DNA, 20 bp, synthetic construct
  misc_feature 1..20: note = chemically synthesized
  source 1..20: mol_type = other DNA
tatctaggagactgagaggg

SEQ ID NO: 3339 - DNA, 20 bp, synthetic construct
  misc_feature 1..20: note = chemically synthesized
  source 1..20: mol_type = other DNA
tgagagggcagctgcataaa

SEQ ID NO: 3340 - DNA, 20 bp, synthetic construct
  misc_feature 1..20: note = chemically synthesized
  source 1..20: mol_type = other DNA
cataaaaagacaaattgtct

SEQ ID NO: 3341 - DNA, 20 bp, synthetic construct
  misc_feature 1..20: note = chemically synthesized
  source 1..20: mol_type = other DNA
ataaaaagacaaattgtctt

SEQ ID NO: 3342 - DNA, 20 bp, synthetic construct
  misc_feature 1..20: note = chemically synthesized
  source 1..20: mol_type = other DNA
ctatgcaaaatgtgtgttcc

SEQ ID NO: 3343 - DNA, 20 bp, synthetic construct
  misc_feature 1..20: note = chemically synthesized
  source 1..20: mol_type = other DNA
tatgcaaaatgtgtgttccc

SEQ ID NO: 3344 - DNA, 20 bp, synthetic construct
  misc_feature 1..20: note = chemically synthesized
  source 1..20: mol_type = other DNA
tcattcaacaaatatttacc

SEQ ID NO: 3345 - DNA, 20 bp, synthetic construct
  misc_feature 1..20: note = chemically synthesized
  source 1..20: mol_type = other DNA
ccgagtgcctacaatgccca

SEQ ID NO: 3346 - DNA, 20 bp, synthetic construct
  misc_feature 1..20: note = chemically synthesized
  source 1..20: mol_type = other DNA
gcctacaatgcccaaagcaa

SEQ ID NO: 3347 - DNA, 20 bp, synthetic construct
  misc_feature 1..20: note = chemically synthesized
  source 1..20: mol_type = other DNA
cctacaatgcccaaagcaat

SEQ ID NO: 3348 - DNA, 20 bp, synthetic construct
  misc_feature 1..20: note = chemically synthesized
  source 1..20: mol_type = other DNA
caatgcccaaagcaatgggc

SEQ ID NO: 3349 - DNA, 20 bp, synthetic construct
  misc_feature 1..20: note = chemically synthesized
  source 1..20: mol_type = other DNA
aagcaatgggctagccgctg

SEQ ID NO: 3350 - DNA, 20 bp, synthetic construct
  misc_feature 1..20: note = chemically synthesized
  source 1..20: mol_type = other DNA
agcaatgggctagccgctgt

SEQ ID NO: 3351 - DNA, 20 bp, synthetic construct
  misc_feature 1..20: note = chemically synthesized
  source 1..20: mol_type = other DNA
aatgggctagccgctgtggg

SEQ ID NO: 3352 - DNA, 20 bp, synthetic construct
  misc_feature 1..20: note = chemically synthesized
  source 1..20: mol_type = other DNA
tagccgctgtgggcagtaca

SEQ ID NO: 3353 - DNA, 20 bp, synthetic construct
  misc_feature 1..20: note = chemically synthesized
  source 1..20: mol_type = other DNA
tgggcagtacaaagaaaaca

SEQ ID NO: 3354 - DNA, 20 bp, synthetic construct
  misc_feature 1..20: note = chemically synthesized
  source 1..20: mol_type = other DNA
gtacaaagaaaacacggaca

SEQ ID NO: 3355 - DNA, 20 bp, synthetic construct
  misc_feature 1..20: note = chemically synthesized
  source 1..20: mol_type = other DNA
acggacacagatttctccca

SEQ ID NO: 3356 - DNA, 20 bp, synthetic construct
  misc_feature 1..20: note = chemically synthesized
  source 1..20: mol_type = other DNA
gacacagatttctcccacag

SEQ ID NO: 3357 - DNA, 20 bp, synthetic construct
  misc_feature 1..20: note = chemically synthesized
  source 1..20: mol_type = other DNA
acacagatttctcccacagc

SEQ ID NO: 3358 - DNA, 20 bp, synthetic construct
  misc_feature 1..20: note = chemically synthesized
  source 1..20: mol_type = other DNA
ctcccacagcaggcttcatt

SEQ ID NO: 3359 - DNA, 20 bp, synthetic construct
  misc_feature 1..20: note = chemically synthesized
  source 1..20: mol_type = other DNA
ccacagcaggcttcatttag

SEQ ID NO: 3360 - DNA, 20 bp, synthetic construct
  misc_feature 1..20: note = chemically synthesized
  source 1..20: mol_type = other DNA
gcaggcttcatttagtagaa

SEQ ID NO: 3361 - DNA, 20 bp, synthetic construct
  misc_feature 1..20: note = chemically synthesized
  source 1..20: mol_type = other DNA
caggcttcatttagtagaaa

SEQ ID NO: 3362 - DNA, 20 bp, synthetic construct
  misc_feature 1..20: note = chemically synthesized
  source 1..20: mol_type = other DNA
cttcatttagtagaaaaggt

SEQ ID NO: 3363 - DNA, 20 bp, synthetic construct
  misc_feature 1..20: note = chemically synthesized
  source 1..20: mol_type = other DNA
ttcatttagtagaaaaggta

SEQ ID NO: 3364 - DNA, 20 bp, synthetic construct
  misc_feature 1..20: note = chemically synthesized
  source 1..20: mol_type = other DNA
tagaaaaggtaaggcctgca

SEQ ID NO: 3365 - DNA, 20 bp, synthetic construct
  misc_feature 1..20: note = chemically synthesized
  source 1..20: mol_type = other DNA
gaaattgctctacccccatg

SEQ ID NO: 3366 - DNA, 20 bp, synthetic construct
  misc_feature 1..20: note = chemically synthesized
  source 1..20: mol_type = other DNA
ttgctctacccccatgtaga

SEQ ID NO: 3367 - DNA, 20 bp, synthetic construct
  misc_feature 1..20: note = chemically synthesized
  source 1..20: mol_type = other DNA
ccatgtagaaagtgtgtcat

SEQ ID NO: 3368 - DNA, 20 bp, synthetic construct
  misc_feature 1..20: note = chemically synthesized
  source 1..20: mol_type = other DNA
atgtagaaagtgtgtcatga

SEQ ID NO: 3369 - DNA, 20 bp, synthetic construct
  misc_feature 1..20: note = chemically synthesized
  source 1..20: mol_type = other DNA
gtagaaagtgtgtcatgaga

SEQ ID NO: 3370 - DNA, 20 bp, synthetic construct
  misc_feature 1..20: note = chemically synthesized
  source 1..20: mol_type = other DNA
tagaaagtgtgtcatgagag

SEQ ID NO: 3371 - DNA, 20 bp, synthetic construct
  misc_feature 1..20: note = chemically synthesized
  source 1..20: mol_type = other DNA
agtgtgtcatgagagaggta

SEQ ID NO: 3372 - DNA, 20 bp, synthetic construct
  misc_feature 1..20: note = chemically synthesized
  source 1..20: mol_type = other DNA
gtcatgagagaggtacagat

SEQ ID NO: 3373 - DNA, 20 bp, synthetic construct
  misc_feature 1..20: note = chemically synthesized
  source 1..20: mol_type = other DNA
gaggtacagatgagctgcta

SEQ ID NO: 3374 - DNA, 20 bp, synthetic construct
  misc_feature 1..20: note = chemically synthesized
  source 1..20: mol_type = other DNA
tgagctgctatggaaattca

SEQ ID NO: 3375 - DNA, 20 bp, synthetic construct
  misc_feature 1..20: note = chemically synthesized
  source 1..20: mol_type = other DNA
gagctgctatggaaattcaa

SEQ ID NO: 3376 - DNA, 20 bp, synthetic construct
  misc_feature 1..20: note = chemically synthesized
  source 1..20: mol_type = other DNA
ctgctatggaaattcaaagg

SEQ ID NO: 3377 - DNA, 20 bp, synthetic construct
  misc_feature 1..20: note = chemically synthesized
  source 1..20: mol_type = other DNA
gctatggaaattcaaaggaa

SEQ ID NO: 3378 - DNA, 20 bp, synthetic construct
  misc_feature 1..20: note = chemically synthesized
  source 1..20: mol_type = other DNA
gaagagaaattatttccatt

SEQ ID NO: 3379 - DNA, 20 bp, synthetic construct
  misc_feature 1..20: note = chemically synthesized
  source 1..20: mol_type = other DNA
gagaaattatttccatttgg

SEQ ID NO: 3380 - DNA, 20 bp, synthetic construct
  misc_feature 1..20: note = chemically synthesized
  source 1..20: mol_type = other DNA
agaaattatttccatttgga

SEQ ID NO: 3381 - DNA, 20 bp, synthetic construct
  misc_feature 1..20: note = chemically synthesized
  source 1..20: mol_type = other DNA
gaaattatttccatttggaa

SEQ ID NO: 3382 - DNA, 20 bp, synthetic construct
  misc_feature 1..20: note = chemically synthesized
  source 1..20: mol_type = other DNA
aattatttccatttggaagg

SEQ ID NO: 3383 - DNA, 20 bp, synthetic construct
  misc_feature 1..20: note = chemically synthesized
  source 1..20: mol_type = other DNA
attatttccatttggaaggg

SEQ ID NO: 3384 - DNA, 20 bp, synthetic construct
  misc_feature 1..20: note = chemically synthesized
  source 1..20: mol_type = other DNA
ttatttccatttggaaggga

SEQ ID NO: 3385 - DNA, 20 bp, synthetic construct
  misc_feature 1..20: note = chemically synthesized
  source 1..20: mol_type = other DNA
atttccatttggaagggagg

SEQ ID NO: 3386 - DNA, 20 bp, synthetic construct
  misc_feature 1..20: note = chemically synthesized
  source 1..20: mol_type = other DNA
ttccatttggaagggaggga

SEQ ID NO: 3387 - DNA, 20 bp, synthetic construct
  misc_feature 1..20: note = chemically synthesized
  source 1..20: mol_type = other DNA
ccatttggaagggagggaga

SEQ ID NO: 3388 - DNA, 20 bp, synthetic construct
  misc_feature 1..20: note = chemically synthesized
  source 1..20: mol_type = other DNA
catttggaagggagggagag

SEQ ID NO: 3389 - DNA, 20 bp, synthetic construct
  misc_feature 1..20: note = chemically synthesized
  source 1..20: mol_type = other DNA
gaagggagggagagaggctt

SEQ ID NO: 3390 - DNA, 20 bp, synthetic construct
  misc_feature 1..20: note = chemically synthesized
  source 1..20: mol_type = other DNA
aagggagggagagaggcttt

SEQ ID NO: 3391 - DNA, 20 bp, synthetic construct
  misc_feature 1..20: note = chemically synthesized
  source 1..20: mol_type = other DNA
gagggagagaggctttggga

SEQ ID NO: 3392 - DNA, 20 bp, synthetic construct
  misc_feature 1..20: note = chemically synthesized
  source 1..20: mol_type = other DNA
gggagagaggctttgggaaa

SEQ ID NO: 3393 - DNA, 20 bp, synthetic construct
  misc_feature 1..20: note = chemically synthesized
  source 1..20: mol_type = other DNA
ggagagaggctttgggaaag

SEQ ID NO: 3394 - DNA, 20 bp, synthetic construct
  misc_feature 1..20: note = chemically synthesized
  source 1..20: mol_type = other DNA
tgggaaagaggaaaacttat

SEQ ID NO: 3395 - DNA, 20 bp, synthetic construct
  misc_feature 1..20: note = chemically synthesized
  source 1..20: mol_type = other DNA
gaaaacttatgagttaaacc

SEQ ID NO: 3396 - DNA, 20 bp, synthetic construct
  misc_feature 1..20: note = chemically synthesized
  source 1..20: mol_type = other DNA
aaacttatgagttaaacctg

SEQ ID NO: 3397 - DNA, 20 bp, synthetic construct
  misc_feature 1..20: note = chemically synthesized
  source 1..20: mol_type = other DNA
acttatgagttaaacctgga

SEQ ID NO: 3398 - DNA, 20 bp, synthetic construct
  misc_feature 1..20: note = chemically synthesized
  source 1..20: mol_type = other DNA
tgagttaaacctggagagcc

SEQ ID NO: 3399 - DNA, 20 bp, synthetic construct
  misc_feature 1..20: note = chemically synthesized
  source 1..20: mol_type = other DNA
agttaaacctggagagccaa

SEQ ID NO: 3400 - DNA, 20 bp, synthetic construct
  misc_feature 1..20: note = chemically synthesized
  source 1..20: mol_type = other DNA
aaacctggagagccaagaga

SEQ ID NO: 3401 - DNA, 20 bp, synthetic construct
  misc_feature 1..20: note = chemically synthesized
  source 1..20: mol_type = other DNA
aacctggagagccaagagaa

SEQ ID NO: 3402 - DNA, 20 bp, synthetic construct
  misc_feature 1..20: note = chemically synthesized
  source 1..20: mol_type = other DNA
agccaagagaaaggatatcc

SEQ ID NO: 3403 - DNA, 20 bp, synthetic construct
  misc_feature 1..20: note = chemically synthesized
  source 1..20: mol_type = other DNA
gaaaggatatcctagataaa

SEQ ID NO: 3404 - DNA, 20 bp, synthetic construct
  misc_feature 1..20: note = chemically synthesized
  source 1..20: mol_type = other DNA
atatcctagataaaaagaaa

SEQ ID NO: 3405 - DNA, 20 bp, synthetic construct
  misc_feature 1..20: note = chemically synthesized
  source 1..20: mol_type = other DNA
tcctagataaaaagaaaaag

SEQ ID NO: 3406 - DNA, 20 bp, synthetic construct
  misc_feature 1..20: note = chemically synthesized
  source 1..20: mol_type = other DNA
cctagataaaaagaaaaagc

SEQ ID NO: 3407 - DNA, 20 bp, synthetic construct
  misc_feature 1..20: note = chemically synthesized
  source 1..20: mol_type = other DNA
ataaaaagaaaaagcaggta

SEQ ID NO: 3408 - DNA, 20 bp, synthetic construct
  misc_feature 1..20: note = chemically synthesized
  source 1..20: mol_type = other DNA
aaaaagcaggtaaagatgct

SEQ ID NO: 3409 - DNA, 20 bp, synthetic construct
  misc_feature 1..20: note = chemically synthesized
  source 1..20: mol_type = other DNA
aaagcaggtaaagatgctta

SEQ ID NO: 3410 - DNA, 20 bp, synthetic construct
  misc_feature 1..20: note = chemically synthesized
  source 1..20: mol_type = other DNA
agcaggtaaagatgcttaga

SEQ ID NO: 3411 - DNA, 20 bp, synthetic construct
  misc_feature 1..20: note = chemically synthesized
  source 1..20: mol_type = other DNA
aggtaaagatgcttagagag

SEQ ID NO: 3412 - DNA, 20 bp, synthetic construct
  misc_feature 1..20: note = chemically synthesized
  source 1..20: mol_type = other DNA
aagatgcttagagagaagca

SEQ ID NO: 3413 - DNA, 20 bp, synthetic construct
  misc_feature 1..20: note = chemically synthesized
  source 1..20: mol_type = other DNA
cttagagagaagcaaagccc

SEQ ID NO: 3414 - DNA, 20 bp, synthetic construct
  misc_feature 1..20: note = chemically synthesized
  source 1..20: mol_type = other DNA
ttagagagaagcaaagccca

SEQ ID NO: 3415 - DNA, 20 bp, synthetic construct
  misc_feature 1..20: note = chemically synthesized
  source 1..20: mol_type = other DNA
gagagaagcaaagcccaagg

SEQ ID NO: 3416 - DNA, 20 bp, synthetic construct
  misc_feature 1..20: note = chemically synthesized
  source 1..20: mol_type = other DNA
agagaagcaaagcccaaggt

SEQ ID NO: 3417 - DNA, 20 bp, synthetic construct
  misc_feature 1..20: note = chemically synthesized
  source 1..20: mol_type = other DNA
agcaaagcccaaggtgggca

SEQ ID NO: 3418 - DNA, 20 bp, synthetic construct
  misc_feature 1..20: note = chemically synthesized
  source 1..20: mol_type = other DNA
caaagcccaaggtgggcaca

SEQ ID NO: 3419 - DNA, 20 bp, synthetic construct
  misc_feature 1..20: note = chemically synthesized
  source 1..20: mol_type = other DNA
caaggtgggcacagagtaaa

SEQ ID NO: 3420 - DNA, 20 bp, synthetic construct
  misc_feature 1..20: note = chemically synthesized
  source 1..20: mol_type = other DNA
aaggtgggcacagagtaaat

SEQ ID NO: 3421 - DNA, 20 bp, synthetic construct
  misc_feature 1..20: note = chemically synthesized
  source 1..20: mol_type = other DNA
aggtgggcacagagtaaatg

SEQ ID NO: 3422 - DNA, 20 bp, synthetic construct
  misc_feature 1..20: note = chemically synthesized
  source 1..20: mol_type = other DNA
acagagtaaatggggcccaa

SEQ ID NO: 3423 - DNA, 20 bp, synthetic construct
  misc_feature 1..20: note = chemically synthesized
  source 1..20: mol_type = other DNA
cagagtaaatggggcccaat

SEQ ID NO: 3424 - DNA, 20 bp, synthetic construct
  misc_feature 1..20: note = chemically synthesized
  source 1..20: mol_type = other DNA
agtaaatggggcccaatagg

SEQ ID NO: 3425 - DNA, 20 bp, synthetic construct
  misc_feature 1..20: note = chemically synthesized
  source 1..20: mol_type = other DNA
atattgcacactgattcatc

SEQ ID NO: 3426 - DNA, 20 bp, synthetic construct
  misc_feature 1..20: note = chemically synthesized
  source 1..20: mol_type = other DNA
acactgattcatccagttga

SEQ ID NO: 3427 - DNA, 20 bp, synthetic construct
  misc_feature 1..20: note = chemically synthesized
  source 1..20: mol_type = other DNA
ctgattcatccagttgacag

SEQ ID NO: 3428 - DNA, 20 bp, synthetic construct
  misc_feature 1..20: note = chemically synthesized
  source 1..20: mol_type = other DNA
gattcatccagttgacagcg

SEQ ID NO: 3429 - DNA, 20 bp, synthetic construct
  misc_feature 1..20: note = chemically synthesized
  source 1..20: mol_type = other DNA
attcatccagttgacagcgg

SEQ ID NO: 3430 - DNA, 20 bp, synthetic construct
  misc_feature 1..20: note = chemically synthesized
  source 1..20: mol_type = other DNA
ccatctaaataaatcctctg

SEQ ID NO: 3431 - DNA, 20 bp, synthetic construct
  misc_feature 1..20: note = chemically synthesized
  source 1..20: mol_type = other DNA
gaagatttctgtgacatctt

SEQ ID NO: 3432 - DNA, 20 bp, synthetic construct
  misc_feature 1..20: note = chemically synthesized
  source 1..20: mol_type = other DNA
gtgacatcttcagctttcac

SEQ ID NO: 3433 - DNA, 20 bp, synthetic construct
  misc_feature 1..20: note = chemically synthesized
  source 1..20: mol_type = other DNA
atttcacattttctgaaaat

SEQ ID NO: 3434 - DNA, 20 bp, synthetic construct
  misc_feature 1..20: note = chemically synthesized
  source 1..20: mol_type = other DNA
tttcacattttctgaaaata

SEQ ID NO: 3435 - DNA, 20 bp, synthetic construct
  misc_feature 1..20: note = chemically synthesized
  source 1..20: mol_type = other DNA
ttcacattttctgaaaataa

SEQ ID NO: 3436 - DNA, 20 bp, synthetic construct
  misc_feature 1..20: note = chemically synthesized
  source 1..20: mol_type = other DNA
aaataagggacacaaccatg

SEQ ID NO: 3437 - DNA, 20 bp, synthetic construct
  misc_feature 1..20: note = chemically synthesized
  source 1..20: mol_type = other DNA
gactcttgtgaaactccatg

SEQ ID NO: 3438 - DNA, 20 bp, synthetic construct
  misc_feature 1..20: note = chemically synthesized
  source 1..20: mol_type = other DNA
actcttgtgaaactccatga

SEQ ID NO: 3439 - DNA, 20 bp, synthetic construct
  misc_feature 1..20: note = chemically synthesized
  source 1..20: mol_type = other DNA
gtttcttcccccaatgaatg

SEQ ID NO: 3440 - DNA, 20 bp, synthetic construct
  misc_feature 1..20: note = chemically synthesized
  source 1..20: mol_type = other DNA
tttcttcccccaatgaatgt

SEQ ID NO: 3441 - DNA, 20 bp, synthetic construct
  misc_feature 1..20: note = chemically synthesized
  source 1..20: mol_type = other DNA
cttcccccaatgaatgtggg

SEQ ID NO: 3442 - DNA, 20 bp, synthetic construct
  misc_feature 1..20: note = chemically synthesized
  source 1..20: mol_type = other DNA
atgaatgtgggtggcccgct

SEQ ID NO: 3443 - DNA, 20 bp, synthetic construct
  misc_feature 1..20: note = chemically synthesized
  source 1..20: mol_type = other DNA
tgaatgtgggtggcccgcta

SEQ ID NO: 3444 - DNA, 20 bp, synthetic construct
  misc_feature 1..20: note = chemically synthesized
  source 1..20: mol_type = other DNA
ttactatgttttattcctct

SEQ ID NO: 3445 - DNA, 20 bp, synthetic construct
  misc_feature 1..20: note = chemically synthesized
  source 1..20: mol_type = other DNA
tatgttttattcctctgagt

SEQ ID NO: 3446 - DNA, 20 bp, synthetic construct
  misc_feature 1..20: note = chemically synthesized
  source 1..20: mol_type = other DNA
ttcctctgagtcagacaaac

SEQ ID NO: 3447 - DNA, 20 bp, synthetic construct
  misc_feature 1..20: note = chemically synthesized
  source 1..20: mol_type = other DNA
gtcagacaaacaagtgttga

SEQ ID NO: 3448 - DNA, 20 bp, synthetic construct
  misc_feature 1..20: note = chemically synthesized
  source 1..20: mol_type = other DNA
tccttgcaatactgcctccc

SEQ ID NO: 3449 - DNA, 20 bp, synthetic construct
  misc_feature 1..20: note = chemically synthesized
  source 1..20: mol_type = other DNA
ctggcttaaataatctattt

SEQ ID NO: 3450 - DNA, 20 bp, synthetic construct
  misc_feature 1..20: note = chemically synthesized
  source 1..20: mol_type = other DNA
tatttcagatgtctcattgc

SEQ ID NO: 3451 - DNA, 20 bp, synthetic construct
  misc_feature 1..20: note = chemically synthesized
  source 1..20: mol_type = other DNA
agatgtctcattgccagttt

SEQ ID NO: 3452 - DNA, 20 bp, synthetic construct
  misc_feature 1..20: note = chemically synthesized
  source 1..20: mol_type = other DNA
gtctcattgccagtttaaga

SEQ ID NO: 3453 - DNA, 20 bp, synthetic construct
  misc_feature 1..20: note = chemically synthesized
  source 1..20: mol_type = other DNA
tctcattgccagtttaagat

SEQ ID NO: 3454 - DNA, 20 bp, synthetic construct
  misc_feature 1..20: note = chemically synthesized
  source 1..20: mol_type = other DNA
ttttcaacaaatgactgtgc

SEQ ID NO: 3455 - DNA, 20 bp, synthetic construct
  misc_feature 1..20: note = chemically synthesized
  source 1..20: mol_type = other DNA
atgactgtgcaagaaacatt

SEQ ID NO: 3456 - DNA, 20 bp, synthetic construct
  misc_feature 1..20: note = chemically synthesized
  source 1..20: mol_type = other DNA
tcccctctttcttcttttca

SEQ ID NO: 3457 - DNA, 20 bp, synthetic construct
  misc_feature 1..20: note = chemically synthesized
  source 1..20: mol_type = other DNA
ctttcttcttttcaaagcca

SEQ ID NO: 3458 - DNA, 20 bp, synthetic construct
  misc_feature 1..20: note = chemically synthesized
  source 1..20: mol_type = other DNA
tttcttcttttcaaagccat

SEQ ID NO: 3459 - DNA, 20 bp, synthetic construct
  misc_feature 1..20: note = chemically synthesized
  source 1..20: mol_type = other DNA
ttcttcttttcaaagccatg

SEQ ID NO: 3460 - DNA, 20 bp, synthetic construct
  misc_feature 1..20: note = chemically synthesized
  source 1..20: mol_type = other DNA
cttcttttcaaagccatggg

SEQ ID NO: 3461 - DNA, 20 bp, synthetic construct
  misc_feature 1..20: note = chemically synthesized
  source 1..20: mol_type = other DNA
ttcttttcaaagccatgggg

SEQ ID NO: 3462 - DNA, 20 bp, synthetic construct
  misc_feature 1..20: note = chemically synthesized
  source 1..20: mol_type = other DNA
tttcaaagccatggggagga

SEQ ID NO: 3463 - DNA, 20 bp, synthetic construct
  misc_feature 1..20: note = chemically synthesized
  source 1..20: mol_type = other DNA
ttcaaagccatggggaggat

SEQ ID NO: 3464 - DNA, 20 bp, synthetic construct
  misc_feature 1..20: note = chemically synthesized
  source 1..20: mol_type = other DNA
tcaaagccatggggaggata

SEQ ID NO: 3465 - DNA, 20 bp, synthetic construct
  misc_feature 1..20: note = chemically synthesized
  source 1..20: mol_type = other DNA
caaagccatggggaggatag

SEQ ID NO: 3466 - DNA, 20 bp, synthetic construct
  misc_feature 1..20: note = chemically synthesized
  source 1..20: mol_type = other DNA
ggtgcccttactcctgctct

SEQ ID NO: 3467 - DNA, 20 bp, synthetic construct
  misc_feature 1..20: note = chemically synthesized
  source 1..20: mol_type = other DNA
ttactcctgctctgagtcct

SEQ ID NO: 3468 - DNA, 20 bp, synthetic construct
  misc_feature 1..20: note = chemically synthesized
  source 1..20: mol_type = other DNA
cctgctctgagtcctcagct

SEQ ID NO: 3469 - DNA, 20 bp, synthetic construct
  misc_feature 1..20: note = chemically synthesized
  source 1..20: mol_type = other DNA
ctgctctgagtcctcagctg

SEQ ID NO: 3470 - DNA, 20 bp, synthetic construct
  misc_feature 1..20: note = chemically synthesized
  source 1..20: mol_type = other DNA
ctgaggatcttgtttgtgtg

SEQ ID NO: 3471 - DNA, 20 bp, synthetic construct
  misc_feature 1..20: note = chemically synthesized
  source 1..20: mol_type = other DNA
aggatcttgtttgtgtgtag

SEQ ID NO: 3472 - DNA, 20 bp, synthetic construct
  misc_feature 1..20: note = chemically synthesized
  source 1..20: mol_type = other DNA
ggatcttgtttgtgtgtagt

SEQ ID NO: 3473 - DNA, 20 bp, synthetic construct
  misc_feature 1..20: note = chemically synthesized
  source 1..20: mol_type = other DNA
gatcttgtttgtgtgtagtg

SEQ ID NO: 3474 - DNA, 20 bp, synthetic construct
  misc_feature 1..20: note = chemically synthesized
  source 1..20: mol_type = other DNA
atcttgtttgtgtgtagtgg

SEQ ID NO: 3475 - DNA, 20 bp, synthetic construct
  misc_feature 1..20: note = chemically synthesized
  source 1..20: mol_type = other DNA
ttgtttgtgtgtagtggggg

SEQ ID NO: 3476 - DNA, 20 bp, synthetic construct
  misc_feature 1..20: note = chemically synthesized
  source 1..20: mol_type = other DNA
tgtttgtgtgtagtgggggc

SEQ ID NO: 3477 - DNA, 20 bp, synthetic construct
  misc_feature 1..20: note = chemically synthesized
  source 1..20: mol_type = other DNA
gtttgtgtgtagtgggggca

SEQ ID NO: 3478 - DNA, 20 bp, synthetic construct
  misc_feature 1..20: note = chemically synthesized
  source 1..20: mol_type = other DNA
tttgtgtgtagtgggggcag

SEQ ID NO: 3479 - DNA, 20 bp, synthetic construct
  misc_feature 1..20: note = chemically synthesized
  source 1..20: mol_type = other DNA
ttgtgtgtagtgggggcagg

SEQ ID NO: 3480 - DNA, 20 bp, synthetic construct
  misc_feature 1..20: note = chemically synthesized
  source 1..20: mol_type = other DNA
gtgtgtagtgggggcagggg

SEQ ID NO: 3481 - DNA, 20 bp, synthetic construct
  misc_feature 1..20: note = chemically synthesized
  source 1..20: mol_type = other DNA
tgtgtagtgggggcaggggg

SEQ ID NO: 3482 - DNA, 20 bp, synthetic construct
  misc_feature 1..20: note = chemically synthesized
  source 1..20: mol_type = other DNA
gtgtagtgggggcaggggga

SEQ ID NO: 3483 - DNA, 20 bp, synthetic construct
  misc_feature 1..20: note = chemically synthesized
  source 1..20: mol_type = other DNA
tgtagtgggggcagggggag

SEQ ID NO: 3484 - DNA, 20 bp, synthetic construct
  misc_feature 1..20: note = chemically synthesized
  source 1..20: mol_type = other DNA
tgggggcagggggaggggtg

SEQ ID NO: 3485 - DNA, 20 bp, synthetic construct
  misc_feature 1..20: note = chemically synthesized
  source 1..20: mol_type = other DNA
gtgtagccttgcctctatcc

SEQ ID NO: 3486 - DNA, 20 bp, synthetic construct
  misc_feature 1..20: note = chemically synthesized
  source 1..20: mol_type = other DNA
tgtagccttgcctctatccg

SEQ ID NO: 3487 - DNA, 20 bp, synthetic construct
  misc_feature 1..20: note = chemically synthesized
  source 1..20: mol_type = other DNA
cctctatccgaggtatttat

SEQ ID NO: 3488 - DNA, 20 bp, synthetic construct
  misc_feature 1..20: note = chemically synthesized
  source 1..20: mol_type = other DNA
ctctatccgaggtatttatc

SEQ ID NO: 3489 - DNA, 20 bp, synthetic construct
  misc_feature 1..20: note = chemically synthesized
  source 1..20: mol_type = other DNA
gaggtatttatcaggttatt

SEQ ID NO: 3490 - DNA, 20 bp, synthetic construct
  misc_feature 1..20: note = chemically synthesized
  source 1..20: mol_type = other DNA
aggtatttatcaggttattt

SEQ ID NO: 3491 - DNA, 20 bp, synthetic construct
  misc_feature 1..20: note = chemically synthesized
  source 1..20: mol_type = other DNA
gtatttatcaggttatttgg

SEQ ID NO: 3492 - DNA, 20 bp, synthetic construct
  misc_feature 1..20: note = chemically synthesized
  source 1..20: mol_type = other DNA
ggttatttgggagctacttt

SEQ ID NO: 3493 - DNA, 20 bp, synthetic construct
  misc_feature 1..20: note = chemically synthesized
  source 1..20: mol_type = other DNA
ttatttgggagctactttca

SEQ ID NO: 3494 - DNA, 20 bp, synthetic construct
  misc_feature 1..20: note = chemically synthesized
  source 1..20: mol_type = other DNA
ttcccactgccaccactccc

SEQ ID NO: 3495 - DNA, 20 bp, synthetic construct
  misc_feature 1..20: note = chemically synthesized
  source 1..20: mol_type = other DNA
cccggattcttttcttcctt

SEQ ID NO: 3496 - DNA, 20 bp, synthetic construct
  misc_feature 1..20: note = chemically synthesized
  source 1..20: mol_type = other DNA
ccggattcttttcttccttt

SEQ ID NO: 3497 - DNA, 20 bp, synthetic construct
  misc_feature 1..20: note = chemically synthesized
  source 1..20: mol_type = other DNA
gattcttttcttcctttagg

SEQ ID NO: 3498 - DNA, 20 bp, synthetic construct
  misc_feature 1..20: note = chemically synthesized
  source 1..20: mol_type = other DNA
tcttttcttcctttaggaag

SEQ ID NO: 3499 - DNA, 20 bp, synthetic construct
  misc_feature 1..20: note = chemically synthesized
  source 1..20: mol_type = other DNA
cttttcttcctttaggaagc

SEQ ID NO: 3500 - DNA, 20 bp, synthetic construct
  misc_feature 1..20: note = chemically synthesized
  source 1..20: mol_type = other DNA
ttttcttcctttaggaagca

SEQ ID NO: 3501 - DNA, 20 bp, synthetic construct
  misc_feature 1..20: note = chemically synthesized
  source 1..20: mol_type = other DNA
gaagcagggacttgttcctc

SEQ ID NO: 3502 - DNA, 20 bp, synthetic construct
  misc_feature 1..20: note = chemically synthesized
  source 1..20: mol_type = other DNA
agcagggacttgttcctctg

SEQ ID NO: 3503 - DNA, 20 bp, synthetic construct
  misc_feature 1..20: note = chemically synthesized
  source 1..20: mol_type = other DNA
cagggacttgttcctctgga

SEQ ID NO: 3504 - DNA, 20 bp, synthetic construct
  misc_feature 1..20: note = chemically synthesized
  source 1..20: mol_type = other DNA
tgttcctctggagagactgc

SEQ ID NO: 3505 - DNA, 20 bp, synthetic construct
  misc_feature 1..20: note = chemically synthesized
  source 1..20: mol_type = other DNA
ttcctctggagagactgcta

SEQ ID NO: 3506 - DNA, 20 bp, synthetic construct
  misc_feature 1..20: note = chemically synthesized
  source 1..20: mol_type = other DNA
tcctctggagagactgctag

SEQ ID NO: 3507 - DNA, 20 bp, synthetic construct
  misc_feature 1..20: note = chemically synthesized
  source 1..20: mol_type = other DNA
ctggagagactgctagagga

SEQ ID NO: 3508 - DNA, 20 bp, synthetic construct
  misc_feature 1..20: note = chemically synthesized
  source 1..20: mol_type = other DNA
agagactgctagaggaaagt

SEQ ID NO: 3509 - DNA, 20 bp, synthetic construct
  misc_feature 1..20: note = chemically synthesized
  source 1..20: mol_type = other DNA
gagactgctagaggaaagtc

SEQ ID NO: 3510 - DNA, 20 bp, synthetic construct
  misc_feature 1..20: note = chemically synthesized
  source 1..20: mol_type = other DNA
tagaggaaagtcaggaacct

SEQ ID NO: 3511 - DNA, 20 bp, synthetic construct
  misc_feature 1..20: note = chemically synthesized
  source 1..20: mol_type = other DNA
accccaactctgccactcac

SEQ ID NO: 3512 - DNA, 20 bp, synthetic construct
  misc_feature 1..20: note = chemically synthesized
  source 1..20: mol_type = other DNA
ttgaataaatcctttctttc

SEQ ID NO: 3513 - DNA, 20 bp, synthetic construct
  misc_feature 1..20: note = chemically synthesized
  source 1..20: mol_type = other DNA
aatcctttctttctggccct

SEQ ID NO: 3514 - DNA, 20 bp, synthetic construct
  misc_feature 1..20: note = chemically synthesized
  source 1..20: mol_type = other DNA
ctaagtgtttccatctttaa

SEQ ID NO: 3515 - DNA, 20 bp, synthetic construct
  misc_feature 1..20: note = chemically synthesized
  source 1..20: mol_type = other DNA
taagtgtttccatctttaaa

SEQ ID NO: 3516 - DNA, 20 bp, synthetic construct
  misc_feature 1..20: note = chemically synthesized
  source 1..20: mol_type = other DNA
agtgtttccatctttaaaag

SEQ ID NO: 3517 - DNA, 20 bp, synthetic construct
  misc_feature 1..20: note = chemically synthesized
  source 1..20: mol_type = other DNA
gtttccatctttaaaaggag

SEQ ID NO: 3518 - DNA, 20 bp, synthetic construct
  misc_feature 1..20: note = chemically synthesized
  source 1..20: mol_type = other DNA
catctttaaaaggagaagac

SEQ ID NO: 3519 - DNA, 20 bp, synthetic construct
  misc_feature 1..20: note = chemically synthesized
  source 1..20: mol_type = other DNA
ttaaaaggagaagactggat

SEQ ID NO: 3520 - DNA, 20 bp, synthetic construct
  misc_feature 1..20: note = chemically synthesized
  source 1..20: mol_type = other DNA
aaggagaagactggattaga

SEQ ID NO: 3521 - DNA, 20 bp, synthetic construct
  misc_feature 1..20: note = chemically synthesized
  source 1..20: mol_type = other DNA
aggagaagactggattagat

SEQ ID NO: 3522 - DNA, 20 bp, synthetic construct
  misc_feature 1..20: note = chemically synthesized
  source 1..20: mol_type = other DNA
ggagaagactggattagatg

SEQ ID NO: 3523 - DNA, 20 bp, synthetic construct
  misc_feature 1..20: note = chemically synthesized
  source 1..20: mol_type = other DNA
gaagactggattagatgggg

SEQ ID NO: 3524 - DNA, 20 bp, synthetic construct
  misc_feature 1..20: note = chemically synthesized
  source 1..20: mol_type = other DNA
ctctctcctgcctcccatgc

SEQ ID NO: 3525 - DNA, 20 bp, synthetic construct
  misc_feature 1..20: note = chemically synthesized
  source 1..20: mol_type = other DNA
tcctgcctcccatgcaagtc

SEQ ID NO: 3526 - DNA, 20 bp, synthetic construct
  misc_feature 1..20: note = chemically synthesized
  source 1..20: mol_type = other DNA
cctgcctcccatgcaagtcc

SEQ ID NO: 3527 - DNA, 20 bp, synthetic construct
  misc_feature 1..20: note = chemically synthesized
  source 1..20: mol_type = other DNA
atgcaagtccaggcctcctt

SEQ ID NO: 3528 - DNA, 20 bp, synthetic construct
  misc_feature 1..20: note = chemically synthesized
  source 1..20: mol_type = other DNA
aggcctcctttggaccaacc

SEQ ID NO: 3529 - DNA, 20 bp, synthetic construct
  misc_feature 1..20: note = chemically synthesized
  source 1..20: mol_type = other DNA
gcctcctttggaccaaccaa

SEQ ID NO: 3530 - DNA, 20 bp, synthetic construct
  misc_feature 1..20: note = chemically synthesized
  source 1..20: mol_type = other DNA
accaaccaagagacctacta

SEQ ID NO: 3531 - DNA, 20 bp, synthetic construct
  misc_feature 1..20: note = chemically synthesized
  source 1..20: mol_type = other DNA
ccaaccaagagacctactat

SEQ ID NO: 3532 - DNA, 20 bp, synthetic construct
  misc_feature 1..20: note = chemically synthesized
  source 1..20: mol_type = other DNA
agacctactataggccgtgc

SEQ ID NO: 3533 - DNA, 20 bp, synthetic construct
  misc_feature 1..20: note = chemically synthesized
  source 1..20: mol_type = other DNA
cctactataggccgtgctag

SEQ ID NO: 3534 - DNA, 20 bp, synthetic construct
  misc_feature 1..20: note = chemically synthesized
  source 1..20: mol_type = other DNA
ctataggccgtgctagaagc

SEQ ID NO: 3535 - DNA, 20 bp, synthetic construct
  misc_feature 1..20: note = chemically synthesized
  source 1..20: mol_type = other DNA
aggccgtgctagaagctggc

SEQ ID NO: 3536 - DNA, 20 bp, synthetic construct
  misc_feature 1..20: note = chemically synthesized
  source 1..20: mol_type = other DNA
ggccgtgctagaagctggcc

SEQ ID NO: 3537 - DNA, 20 bp, synthetic construct
  misc_feature 1..20: note = chemically synthesized
  source 1..20: mol_type = other DNA
ttcccctcatgaccttgacc

SEQ ID NO: 3538 - DNA, 20 bp, synthetic construct
  misc_feature 1..20: note = chemically synthesized
  source 1..20: mol_type = other DNA
ctcatgaccttgacctggat

SEQ ID NO: 3539 - DNA, 20 bp, synthetic construct
  misc_feature 1..20: note = chemically synthesized
  source 1..20: mol_type = other DNA
tcatgaccttgacctggatg

SEQ ID NO: 3540 - DNA, 20 bp, synthetic construct
  misc_feature 1..20: note = chemically synthesized
  source 1..20: mol_type = other DNA
atgaccttgacctggatgag

SEQ ID NO: 3541 - DNA, 20 bp, synthetic construct
  misc_feature 1..20: note = chemically synthesized
  source 1..20: mol_type = other DNA
tgaccttgacctggatgagg

SEQ ID NO: 3542 - DNA, 20 bp, synthetic construct
  misc_feature 1..20: note = chemically synthesized
  source 1..20: mol_type = other DNA
gaccttgacctggatgagga

SEQ ID NO: 3543 - DNA, 20 bp, synthetic construct
  misc_feature 1..20: note = chemically synthesized
  source 1..20: mol_type = other DNA
cctggatgaggagggcctta

SEQ ID NO: 3544 - DNA, 20 bp, synthetic construct
  misc_feature 1..20: note = chemically synthesized
  source 1..20: mol_type = other DNA
ctggatgaggagggccttat

SEQ ID NO: 3545 - DNA, 20 bp, synthetic construct
  misc_feature 1..20: note = chemically synthesized
  source 1..20: mol_type = other DNA
ggatgaggagggccttatag

SEQ ID NO: 3546 - DNA, 20 bp, synthetic construct
  misc_feature 1..20: note = chemically synthesized
  source 1..20: mol_type = other DNA
atgaggagggccttatagga

SEQ ID NO: 3547 - DNA, 20 bp, synthetic construct
  misc_feature 1..20: note = chemically synthesized
  source 1..20: mol_type = other DNA
gagggccttataggagagtt

SEQ ID NO: 3548 - DNA, 20 bp, synthetic construct
  misc_feature 1..20: note = chemically synthesized
  source 1..20: mol_type = other DNA
agggccttataggagagttc

SEQ ID NO: 3549 - DNA, 20 bp, synthetic construct
  misc_feature 1..20: note = chemically synthesized
  source 1..20: mol_type = other DNA
gggccttataggagagttca

SEQ ID NO: 3550 - DNA, 20 bp, synthetic construct
  misc_feature 1..20: note = chemically synthesized
  source 1..20: mol_type = other DNA
cttataggagagttcagggc

SEQ ID NO: 3551 - DNA, 20 bp, synthetic construct
  misc_feature 1..20: note = chemically synthesized
  source 1..20: mol_type = other DNA
ttataggagagttcagggct

SEQ ID NO: 3552 - DNA, 20 bp, synthetic construct
  misc_feature 1..20: note = chemically synthesized
  source 1..20: mol_type = other DNA
ggagagttcagggctgggct

SEQ ID NO: 3553 - DNA, 20 bp, synthetic construct
  misc_feature 1..20: note = chemically synthesized
  source 1..20: mol_type = other DNA
tcagggctgggcttggtccc

SEQ ID NO: 3554 - DNA, 20 bp, synthetic construct
  misc_feature 1..20: note = chemically synthesized
  source 1..20: mol_type = other DNA
cagggctgggcttggtcccc

SEQ ID NO: 3555 - DNA, 20 bp, synthetic construct
  misc_feature 1..20: note = chemically synthesized
  source 1..20: mol_type = other DNA
ttggtccccaggctaatcct

SEQ ID NO: 3556 - DNA, 20 bp, synthetic construct
  misc_feature 1..20: note = chemically synthesized
  source 1..20: mol_type = other DNA
tggtccccaggctaatcctt

SEQ ID NO: 3557 - DNA, 20 bp, synthetic construct
  misc_feature 1..20: note = chemically synthesized
  source 1..20: mol_type = other DNA
cccaggctaatccttaggct

SEQ ID NO: 3558 - DNA, 20 bp, synthetic construct
  misc_feature 1..20: note = chemically synthesized
  source 1..20: mol_type = other DNA
caggctaatccttaggctta

SEQ ID NO: 3559 - DNA, 20 bp, synthetic construct
  misc_feature 1..20: note = chemically synthesized
  source 1..20: mol_type = other DNA
ggctaatccttaggcttaga

SEQ ID NO: 3560 - DNA, 20 bp, synthetic construct
  misc_feature 1..20: note = chemically synthesized
  source 1..20: mol_type = other DNA
aatccttaggcttagagagt

SEQ ID NO: 3561 - DNA, 20 bp, synthetic construct
  misc_feature 1..20: note = chemically synthesized
  source 1..20: mol_type = other DNA
ttagagagtgagcctgatga

SEQ ID NO: 3562 - DNA, 20 bp, synthetic construct
  misc_feature 1..20: note = chemically synthesized
  source 1..20: mol_type = other DNA
gatgatggatttcaacctcc

SEQ ID NO: 3563 - DNA, 20 bp, synthetic construct
  misc_feature 1..20: note = chemically synthesized
  source 1..20: mol_type = other DNA
atgatggatttcaacctcct

SEQ ID NO: 3564 - DNA, 20 bp, synthetic construct
  misc_feature 1..20: note = chemically synthesized
  source 1..20: mol_type = other DNA
gatttcaacctcctgggaca

SEQ ID NO: 3565 - DNA, 20 bp, synthetic construct
  misc_feature 1..20: note = chemically synthesized
  source 1..20: mol_type = other DNA
tcctgggacacagtcttgca

SEQ ID NO: 3566 - DNA, 20 bp, synthetic construct
  misc_feature 1..20: note = chemically synthesized
  source 1..20: mol_type = other DNA
cttgcaaagtttacatgtct

SEQ ID NO: 3567 - DNA, 20 bp, synthetic construct
  misc_feature 1..20: note = chemically synthesized
  source 1..20: mol_type = other DNA
agtttacatgtctgagcttc

SEQ ID NO: 3568 - DNA, 20 bp, synthetic construct
  misc_feature 1..20: note = chemically synthesized
  source 1..20: mol_type = other DNA
gtttacatgtctgagcttca

SEQ ID NO: 3569 - DNA, 20 bp, synthetic construct
  misc_feature 1..20: note = chemically synthesized
  source 1..20: mol_type = other DNA
ttacatgtctgagcttcaag

SEQ ID NO: 3570 - DNA, 20 bp, synthetic construct
  misc_feature 1..20: note = chemically synthesized
  source 1..20: mol_type = other DNA
tacatgtctgagcttcaagg

SEQ ID NO: 3571 - DNA, 20 bp, synthetic construct
  misc_feature 1..20: note = chemically synthesized
  source 1..20: mol_type = other DNA
tgagcttcaaggaggaaacc

SEQ ID NO: 3572 - DNA, 20 bp, synthetic construct
  misc_feature 1..20: note = chemically synthesized
  source 1..20: mol_type = other DNA
gagcttcaaggaggaaacct

SEQ ID NO: 3573 - DNA, 20 bp, synthetic construct
  misc_feature 1..20: note = chemically synthesized
  source 1..20: mol_type = other DNA
aggaaacctaggtgtgtcct

SEQ ID NO: 3574 - DNA, 20 bp, synthetic construct
  misc_feature 1..20: note = chemically synthesized
  source 1..20: mol_type = other DNA
taggtgtgtcctgagccaat

SEQ ID NO: 3575 - DNA, 20 bp, synthetic construct
  misc_feature 1..20: note = chemically synthesized
  source 1..20: mol_type = other DNA
gtcctgagccaatgagactg

SEQ ID NO: 3576 - DNA, 20 bp, synthetic construct
  misc_feature 1..20: note = chemically synthesized
  source 1..20: mol_type = other DNA
tcctgagccaatgagactga

SEQ ID NO: 3577 - DNA, 20 bp, synthetic construct
  misc_feature 1..20: note = chemically synthesized
  source 1..20: mol_type = other DNA
gagccaatgagactgaaggt

SEQ ID NO: 3578 - DNA, 20 bp, synthetic construct
  misc_feature 1..20: note = chemically synthesized
  source 1..20: mol_type = other DNA
gccaatgagactgaaggtca

SEQ ID NO: 3579 - DNA, 20 bp, synthetic construct
  misc_feature 1..20: note = chemically synthesized
  source 1..20: mol_type = other DNA
gagactgaaggtcagagaac

SEQ ID NO: 3580 - DNA, 20 bp, synthetic construct
  misc_feature 1..20: note = chemically synthesized
  source 1..20: mol_type = other DNA
agactgaaggtcagagaacc

SEQ ID NO: 3581 - DNA, 20 bp, synthetic construct
  misc_feature 1..20: note = chemically synthesized
  source 1..20: mol_type = other DNA
ctgaaggtcagagaaccagg

SEQ ID NO: 3582 - DNA, 20 bp, synthetic construct
  misc_feature 1..20: note = chemically synthesized
  source 1..20: mol_type = other DNA
ggaagaaacttccccaaacc

SEQ ID NO: 3583 - DNA, 20 bp, synthetic construct
  misc_feature 1..20: note = chemically synthesized
  source 1..20: mol_type = other DNA
gaagaaacttccccaaaccc

SEQ ID NO: 3584 - DNA, 20 bp, synthetic construct
  misc_feature 1..20: note = chemically synthesized
  source 1..20: mol_type = other DNA
ccaaacccaggctaaatgtc

SEQ ID NO: 3585 - DNA, 20 bp, synthetic construct
  misc_feature 1..20: note = chemically synthesized
  source 1..20: mol_type = other DNA
caaacccaggctaaatgtca

SEQ ID NO: 3586 - DNA, 20 bp, synthetic construct
  misc_feature 1..20: note = chemically synthesized
  source 1..20: mol_type = other DNA
aaacccaggctaaatgtcaa

SEQ ID NO: 3587 - DNA, 20 bp, synthetic construct
  misc_feature 1..20: note = chemically synthesized
  source 1..20: mol_type = other DNA
caggctaaatgtcaagggaa

SEQ ID NO: 3588 - DNA, 20 bp, synthetic construct
  misc_feature 1..20: note = chemically synthesized
  source 1..20: mol_type = other DNA
aggctaaatgtcaagggaaa

SEQ ID NO: 3589 - DNA, 20 bp, synthetic construct
  misc_feature 1..20: note = chemically synthesized
  source 1..20: mol_type = other DNA
aatgtcaagggaaaaggtct

SEQ ID NO: 3590 - DNA, 20 bp, synthetic construct
  misc_feature 1..20: note = chemically synthesized
  source 1..20: mol_type = other DNA
gtcaagggaaaaggtctcag

SEQ ID NO: 3591 - DNA, 20 bp, synthetic construct
  misc_feature 1..20: note = chemically synthesized
  source 1..20: mol_type = other DNA
aaggtctcagtggctcatgc

SEQ ID NO: 3592 - DNA, 20 bp, synthetic construct
  misc_feature 1..20: note = chemically synthesized
  source 1..20: mol_type = other DNA
gtctcagtggctcatgccag

SEQ ID NO: 3593 - DNA, 20 bp, synthetic construct
  misc_feature 1..20: note = chemically synthesized
  source 1..20: mol_type = other DNA
agtggctcatgccagaagtc

SEQ ID NO: 3594 - DNA, 20 bp, synthetic construct
  misc_feature 1..20: note = chemically synthesized
  source 1..20: mol_type = other DNA
ggctcatgccagaagtccag

SEQ ID NO: 3595 - DNA, 20 bp, synthetic construct
  misc_feature 1..20: note = chemically synthesized
  source 1..20: mol_type = other DNA
atgccagaagtccagtagca

SEQ ID NO: 3596 - DNA, 20 bp, synthetic construct
  misc_feature 1..20: note = chemically synthesized
  source 1..20: mol_type = other DNA
agaagtccagtagcaaagct

SEQ ID NO: 3597 - DNA, 20 bp, synthetic construct
  misc_feature 1..20: note = chemically synthesized
  source 1..20: mol_type = other DNA
agcaaagctcggcctcatgc

SEQ ID NO: 3598 - DNA, 20 bp, synthetic construct
  misc_feature 1..20: note = chemically synthesized
  source 1..20: mol_type = other DNA
caaagctcggcctcatgcca

SEQ ID NO: 3599 - DNA, 20 bp, synthetic construct
  misc_feature 1..20: note = chemically synthesized
  source 1..20: mol_type = other DNA
ctcggcctcatgccagagcc

SEQ ID NO: 3600 - DNA, 20 bp, synthetic construct
  misc_feature 1..20: note = chemically synthesized
  source 1..20: mol_type = other DNA
cctggcacccattgctcaca

SEQ ID NO: 3601 - DNA, 20 bp, synthetic construct
  misc_feature 1..20: note = chemically synthesized
  source 1..20: mol_type = other DNA
ctggcacccattgctcacaa

SEQ ID NO: 3602 - DNA, 20 bp, synthetic construct
  misc_feature 1..20: note = chemically synthesized
  source 1..20: mol_type = other DNA
attgctcacaaaggcacaca

SEQ ID NO: 3603 - DNA, 20 bp, synthetic construct
  misc_feature 1..20: note = chemically synthesized
  source 1..20: mol_type = other DNA
ttgctcacaaaggcacacac

SEQ ID NO: 3604 - DNA, 20 bp, synthetic construct
  misc_feature 1..20: note = chemically synthesized
  source 1..20: mol_type = other DNA
aaaggcacacacaggactct

SEQ ID NO: 3605 - DNA, 20 bp, synthetic construct
  misc_feature 1..20: note = chemically synthesized
  source 1..20: mol_type = other DNA
cacacacaggactctaagaa

SEQ ID NO: 3606 - DNA, 20 bp, synthetic construct
  misc_feature 1..20: note = chemically synthesized
  source 1..20: mol_type = other DNA
acacacaggactctaagaaa

SEQ ID NO: 3607 - DNA, 20 bp, synthetic construct
  misc_feature 1..20: note = chemically synthesized
  source 1..20: mol_type = other DNA
cacacaggactctaagaaaa

SEQ ID NO: 3608 - DNA, 20 bp, synthetic construct
  misc_feature 1..20: note = chemically synthesized
  source 1..20: mol_type = other DNA
cacaggactctaagaaaagg

SEQ ID NO: 3609 - DNA, 20 bp, synthetic construct
  misc_feature 1..20: note = chemically synthesized
  source 1..20: mol_type = other DNA
agaaaagggagtcctctccc

SEQ ID NO: 3610 - DNA, 20 bp, synthetic construct
  misc_feature 1..20: note = chemically synthesized
  source 1..20: mol_type = other DNA
tctccccagccaccacaaac

SEQ ID NO: 3611 - DNA, 20 bp, synthetic construct
  misc_feature 1..20: note = chemically synthesized
  source 1..20: mol_type = other DNA
ctccccagccaccacaaacc

SEQ ID NO: 3612 - DNA, 20 bp, synthetic construct
  misc_feature 1..20: note = chemically synthesized
  source 1..20: mol_type = other DNA
ccagccaccacaaaccagga

SEQ ID NO: 3613 - DNA, 20 bp, synthetic construct
  misc_feature 1..20: note = chemically synthesized
  source 1..20: mol_type = other DNA
caccacaaaccaggacagca

SEQ ID NO: 3614 - DNA, 20 bp, synthetic construct
  misc_feature 1..20: note = chemically synthesized
  source 1..20: mol_type = other DNA
caaaccaggacagcaaagcc

SEQ ID NO: 3615 - DNA, 20 bp, synthetic construct
  misc_feature 1..20: note = chemically synthesized
  source 1..20: mol_type = other DNA
cagcaaagcccagcaccctg

SEQ ID NO: 3616 - DNA, 20 bp, synthetic construct
  misc_feature 1..20: note = chemically synthesized
  source 1..20: mol_type = other DNA
gacctcccaccacaccccat

SEQ ID NO: 3617 - DNA, 20 bp, synthetic construct
  misc_feature 1..20: note = chemically synthesized
  source 1..20: mol_type = other DNA
cccaccacaccccatcagca

SEQ ID NO: 3618 - DNA, 20 bp, synthetic construct
  misc_feature 1..20: note = chemically synthesized
  source 1..20: mol_type = other DNA
caccacaccccatcagcatg

SEQ ID NO: 3619 - DNA, 20 bp, synthetic construct
  misc_feature 1..20: note = chemically synthesized
  source 1..20: mol_type = other DNA
accacaccccatcagcatgg

SEQ ID NO: 3620 - DNA, 20 bp, synthetic construct
  misc_feature 1..20: note = chemically synthesized
  source 1..20: mol_type = other DNA
ccacaccccatcagcatgga

SEQ ID NO: 3621 - DNA, 20 bp, synthetic construct
  misc_feature 1..20: note = chemically synthesized
  source 1..20: mol_type = other DNA
ccatcagcatggagggttct

SEQ ID NO: 3622 - DNA, 20 bp, synthetic construct
  misc_feature 1..20: note = chemically synthesized
  source 1..20: mol_type = other DNA
cagcatggagggttcttgga

SEQ ID NO: 3623 - DNA, 20 bp, synthetic construct
  misc_feature 1..20: note = chemically synthesized
  source 1..20: mol_type = other DNA
tttgctaaccaacataattt

SEQ ID NO: 3624 - DNA, 20 bp, synthetic construct
  misc_feature 1..20: note = chemically synthesized
  source 1..20: mol_type = other DNA
tgctaaccaacataatttca

SEQ ID NO: 3625 - DNA, 20 bp, synthetic construct
  misc_feature 1..20: note = chemically synthesized
  source 1..20: mol_type = other DNA
gagatgtttcgtcacccttc

SEQ ID NO: 3626 - DNA, 20 bp, synthetic construct
  misc_feature 1..20: note = chemically synthesized
  source 1..20: mol_type = other DNA
agatgtttcgtcacccttcc

SEQ ID NO: 3627 - DNA, 20 bp, synthetic construct
  misc_feature 1..20: note = chemically synthesized
  source 1..20: mol_type = other DNA
cttccaggctcattgaaaat

SEQ ID NO: 3628 - DNA, 20 bp, synthetic construct
  misc_feature 1..20: note = chemically synthesized
  source 1..20: mol_type = other DNA
ccaggctcattgaaaattgg

SEQ ID NO: 3629 - DNA, 20 bp, synthetic construct
  misc_feature 1..20: note = chemically synthesized
  source 1..20: mol_type = other DNA
caggctcattgaaaattggc

SEQ ID NO: 3630 - DNA, 20 bp, synthetic construct
  misc_feature 1..20: note = chemically synthesized
  source 1..20: mol_type = other DNA
aggctcattgaaaattggca

SEQ ID NO: 3631 - DNA, 20 bp, synthetic construct
  misc_feature 1..20: note = chemically synthesized
  source 1..20: mol_type = other DNA
cttctaacattttacctttt

SEQ ID NO: 3632 - DNA, 20 bp, synthetic construct
  misc_feature 1..20: note = chemically synthesized
  source 1..20: mol_type = other DNA
cccccaatatcctctctgtc

SEQ ID NO: 3633 - DNA, 20 bp, synthetic construct
  misc_feature 1..20: note = chemically synthesized
  source 1..20: mol_type = other DNA
ccaatatcctctctgtcaag

SEQ ID NO: 3634 - DNA, 20 bp, synthetic construct
  misc_feature 1..20: note = chemically synthesized
  source 1..20: mol_type = other DNA
gtaaacaaacactttaaatt

SEQ ID NO: 3635 - DNA, 20 bp, synthetic construct
  misc_feature 1..20: note = chemically synthesized
  source 1..20: mol_type = other DNA
aacaaacactttaaattcag

SEQ ID NO: 3636 - DNA, 20 bp, synthetic construct
  misc_feature 1..20: note = chemically synthesized
  source 1..20: mol_type = other DNA
acaaacactttaaattcagt

SEQ ID NO: 3637 - DNA, 20 bp, synthetic construct
  misc_feature 1..20: note = chemically synthesized
  source 1..20: mol_type = other DNA
caaacactttaaattcagtg

SEQ ID NO: 3638 - DNA, 20 bp, synthetic construct
  misc_feature 1..20: note = chemically synthesized
  source 1..20: mol_type = other DNA
aaacactttaaattcagtgg

SEQ ID NO: 3639 - DNA, 20 bp, synthetic construct
  misc_feature 1..20: note = chemically synthesized
  source 1..20: mol_type = other DNA
acactttaaattcagtgggg

SEQ ID NO: 3640 - DNA, 20 bp, synthetic construct
  misc_feature 1..20: note = chemically synthesized
  source 1..20: mol_type = other DNA
gtgggggagctcactattta

SEQ ID NO: 3641 - DNA, 20 bp, synthetic construct
  misc_feature 1..20: note = chemically synthesized
  source 1..20: mol_type = other DNA
cactatttaaagaaaccctg

SEQ ID NO: 3642 - DNA, 20 bp, synthetic construct
  misc_feature 1..20: note = chemically synthesized
  source 1..20: mol_type = other DNA
ctgtggtgaaaccttttgaa

SEQ ID NO: 3643 - DNA, 20 bp, synthetic construct
  misc_feature 1..20: note = chemically synthesized
  source 1..20: mol_type = other DNA
aaaatcactctctaatttat

SEQ ID NO: 3644 - DNA, 20 bp, synthetic construct
  misc_feature 1..20: note = chemically synthesized
  source 1..20: mol_type = other DNA
atttatcagtttccattaat

SEQ ID NO: 3645 - DNA, 20 bp, synthetic construct
  misc_feature 1..20: note = chemically synthesized
  source 1..20: mol_type = other DNA
aatgagatttttgtgtgtat

SEQ ID NO: 3646 - DNA, 20 bp, synthetic construct
  misc_feature 1..20: note = chemically synthesized
  source 1..20: mol_type = other DNA
atgagatttttgtgtgtatt

SEQ ID NO: 3647 - DNA, 20 bp, synthetic construct
  misc_feature 1..20: note = chemically synthesized
  source 1..20: mol_type = other DNA
gtgtgtattgggccttctga

SEQ ID NO: 3648 - DNA, 20 bp, synthetic construct
  misc_feature 1..20: note = chemically synthesized
  source 1..20: mol_type = other DNA
tgtattgggccttctgaaag

SEQ ID NO: 3649 - DNA, 20 bp, synthetic construct
  misc_feature 1..20: note = chemically synthesized
  source 1..20: mol_type = other DNA
gtattgggccttctgaaagt

SEQ ID NO: 3650 - DNA, 20 bp, synthetic construct
  misc_feature 1..20: note = chemically synthesized
  source 1..20: mol_type = other DNA
tattgggccttctgaaagtg

SEQ ID NO: 3651 - DNA, 20 bp, synthetic construct
  misc_feature 1..20: note = chemically synthesized
  source 1..20: mol_type = other DNA
aactgcaatccatgcctttg

SEQ ID NO: 3652 - DNA, 20 bp, synthetic construct
  misc_feature 1..20: note = chemically synthesized
  source 1..20: mol_type = other DNA
gcaatccatgcctttgtagt

SEQ ID NO: 3653 - DNA, 20 bp, synthetic construct
  misc_feature 1..20: note = chemically synthesized
  source 1..20: mol_type = other DNA
atccatgcctttgtagttag

SEQ ID NO: 3654 - DNA, 20 bp, synthetic construct
  misc_feature 1..20: note = chemically synthesized
  source 1..20: mol_type = other DNA
tccatgcctttgtagttaga

SEQ ID NO: 3655 - DNA, 20 bp, synthetic construct
  misc_feature 1..20: note = chemically synthesized
  source 1..20: mol_type = other DNA
ccatgcctttgtagttagaa

SEQ ID NO: 3656 - DNA, 20 bp, synthetic construct
  misc_feature 1..20: note = chemically synthesized
  source 1..20: mol_type = other DNA
gtagttagaagggacgataa

SEQ ID NO: 3657 - DNA, 20 bp, synthetic construct
  misc_feature 1..20: note = chemically synthesized
  source 1..20: mol_type = other DNA
tttctgtcacccgaattgtc

SEQ ID NO: 3658 - DNA, 20 bp, synthetic construct
  misc_feature 1..20: note = chemically synthesized
  source 1..20: mol_type = other DNA
gatgcctccctgccccactc

SEQ ID NO: 3659 - DNA, 20 bp, synthetic construct
  misc_feature 1..20: note = chemically synthesized
  source 1..20: mol_type = other DNA
cctgccccactcgagaaatg

SEQ ID NO: 3660 - DNA, 20 bp, synthetic construct
  misc_feature 1..20: note = chemically synthesized
  source 1..20: mol_type = other DNA
cccactcgagaaatgaagaa

SEQ ID NO: 3661 - DNA, 20 bp, synthetic construct
  misc_feature 1..20: note = chemically synthesized
  source 1..20: mol_type = other DNA
ccactcgagaaatgaagaaa

SEQ ID NO: 3662 - DNA, 20 bp, synthetic construct
  misc_feature 1..20: note = chemically synthesized
  source 1..20: mol_type = other DNA
tcgagaaatgaagaaaagga

SEQ ID NO: 3663 - DNA, 20 bp, synthetic construct
  misc_feature 1..20: note = chemically synthesized
  source 1..20: mol_type = other DNA
cgagaaatgaagaaaaggat

SEQ ID NO: 3664 - DNA, 20 bp, synthetic construct
  misc_feature 1..20: note = chemically synthesized
  source 1..20: mol_type = other DNA
aaggatgggaaatcatcatt

SEQ ID NO: 3665 - DNA, 20 bp, synthetic construct
  misc_feature 1..20: note = chemically synthesized
  source 1..20: mol_type = other DNA
gaaatcatcatttggacacc

SEQ ID NO: 3666 - DNA, 20 bp, synthetic construct
  misc_feature 1..20: note = chemically synthesized
  source 1..20: mol_type = other DNA
tcatcatttggacacctgga

SEQ ID NO: 3667 - DNA, 20 bp, synthetic construct
  misc_feature 1..20: note = chemically synthesized
  source 1..20: mol_type = other DNA
aaccacacttgcgtttctcc

SEQ ID NO: 3668 - DNA, 20 bp, synthetic construct
  misc_feature 1..20: note = chemically synthesized
  source 1..20: mol_type = other DNA
accacacttgcgtttctccc

SEQ ID NO: 3669 - DNA, 20 bp, synthetic construct
  misc_feature 1..20: note = chemically synthesized
  source 1..20: mol_type = other DNA
acttgcgtttctcccaggtt

SEQ ID NO: 3670 - DNA, 20 bp, synthetic construct
  misc_feature 1..20: note = chemically synthesized
  source 1..20: mol_type = other DNA
gtttctcccaggttaagtat

SEQ ID NO: 3671 - DNA, 20 bp, synthetic construct
  misc_feature 1..20: note = chemically synthesized
  source 1..20: mol_type = other DNA
aggttaagtattagatacct

SEQ ID NO: 3672 - DNA, 20 bp, synthetic construct
  misc_feature 1..20: note = chemically synthesized
  source 1..20: mol_type = other DNA
ggttaagtattagatacctg

SEQ ID NO: 3673 - DNA, 20 bp, synthetic construct
  misc_feature 1..20: note = chemically synthesized
  source 1..20: mol_type = other DNA
taagtattagatacctgagg

SEQ ID NO: 3674 - DNA, 20 bp, synthetic construct
  misc_feature 1..20: note = chemically synthesized
  source 1..20: mol_type = other DNA
aagtattagatacctgagga

SEQ ID NO: 3675 - DNA, 20 bp, synthetic construct
  misc_feature 1..20: note = chemically synthesized
  source 1..20: mol_type = other DNA
tgaaatacgcattttcaact

SEQ ID NO: 3676 - DNA, 20 bp, synthetic construct
  misc_feature 1..20: note = chemically synthesized
  source 1..20: mol_type = other DNA
cgcattttcaactgagcatt

SEQ ID NO: 3677 - DNA, 20 bp, synthetic construct
  misc_feature 1..20: note = chemically synthesized
  source 1..20: mol_type = other DNA
gcattttcaactgagcattc

SEQ ID NO: 3678 - DNA, 20 bp, synthetic construct
  misc_feature 1..20: note = chemically synthesized
  source 1..20: mol_type = other DNA
ttttcaactgagcattcagg

SEQ ID NO: 3679 - DNA, 20 bp, synthetic construct
  misc_feature 1..20: note = chemically synthesized
  source 1..20: mol_type = other DNA
ttcaactgagcattcaggaa

SEQ ID NO: 3680 - DNA, 20 bp, synthetic construct
  misc_feature 1..20: note = chemically synthesized
  source 1..20: mol_type = other DNA
tcaactgagcattcaggaag

SEQ ID NO: 3681 - DNA, 20 bp, synthetic construct
  misc_feature 1..20: note = chemically synthesized
  source 1..20: mol_type = other DNA
tgagcattcaggaagaggca

SEQ ID NO: 3682 - DNA, 20 bp, synthetic construct
  misc_feature 1..20: note = chemically synthesized
  source 1..20: mol_type = other DNA
gagcattcaggaagaggcat

SEQ ID NO: 3683 - DNA, 20 bp, synthetic construct
  misc_feature 1..20: note = chemically synthesized
  source 1..20: mol_type = other DNA
agcattcaggaagaggcatg

SEQ ID NO: 3684 - DNA, 20 bp, synthetic construct
  misc_feature 1..20: note = chemically synthesized
  source 1..20: mol_type = other DNA
ggaagaggcatggggctgtg

SEQ ID NO: 3685 - DNA, 20 bp, synthetic construct
  misc_feature 1..20: note = chemically synthesized
  source 1..20: mol_type = other DNA
gaggcatggggctgtgaaga

SEQ ID NO: 3686 - DNA, 20 bp, synthetic construct
  misc_feature 1..20: note = chemically synthesized
  source 1..20: mol_type = other DNA
gctgtgaagatggatgcgat

SEQ ID NO: 3687 - DNA, 20 bp, synthetic construct
  misc_feature 1..20: note = chemically synthesized
  source 1..20: mol_type = other DNA
ttgattctgataacacctgc

SEQ ID NO: 3688 - DNA, 20 bp, synthetic construct
  misc_feature 1..20: note = chemically synthesized
  source 1..20: mol_type = other DNA
gattctgataacacctgcca

SEQ ID NO: 3689 - DNA, 20 bp, synthetic construct
  misc_feature 1..20: note = chemically synthesized
  source 1..20: mol_type = other DNA
tctgataacacctgccagag

SEQ ID NO: 3690 - DNA, 20 bp, synthetic construct
  misc_feature 1..20: note = chemically synthesized
  source 1..20: mol_type = other DNA
tgataacacctgccagagca

SEQ ID NO: 3691 - DNA, 20 bp, synthetic construct
  misc_feature 1..20: note = chemically synthesized
  source 1..20: mol_type = other DNA
taacacctgccagagcagag

SEQ ID NO: 3692 - DNA, 20 bp, synthetic construct
  misc_feature 1..20: note = chemically synthesized
  source 1..20: mol_type = other DNA
aacacctgccagagcagaga

SEQ ID NO: 3693 - DNA, 20 bp, synthetic construct
  misc_feature 1..20: note = chemically synthesized
  source 1..20: mol_type = other DNA
acacctgccagagcagagaa

SEQ ID NO: 3694 - DNA, 20 bp, synthetic construct
  misc_feature 1..20: note = chemically synthesized
  source 1..20: mol_type = other DNA
agagaagggcttgtctatca

SEQ ID NO: 3695 - DNA, 20 bp, synthetic construct
  misc_feature 1..20: note = chemically synthesized
  source 1..20: mol_type = other DNA
aagggcttgtctatcaaagc

SEQ ID NO: 3696 - DNA, 20 bp, synthetic construct
  misc_feature 1..20: note = chemically synthesized
  source 1..20: mol_type = other DNA
ggcttgtctatcaaagccag

SEQ ID NO: 3697 - DNA, 20 bp, synthetic construct
  misc_feature 1..20: note = chemically synthesized
  source 1..20: mol_type = other DNA
acaactcccaaattactctg

SEQ ID NO: 3698 - DNA, 20 bp, synthetic construct
  misc_feature 1..20: note = chemically synthesized
  source 1..20: mol_type = other DNA
attactctgaagaccacccc

SEQ ID NO: 3699 - DNA, 20 bp, synthetic construct
  misc_feature 1..20: note = chemically synthesized
  source 1..20: mol_type = other DNA
ctctatattatcatttcgat

SEQ ID NO: 3700 - DNA, 20 bp, synthetic construct
  misc_feature 1..20: note = chemically synthesized
  source 1..20: mol_type = other DNA
ttatcatttcgatcggtctt

SEQ ID NO: 3701 - DNA, 20 bp, synthetic construct
  misc_feature 1..20: note = chemically synthesized
  source 1..20: mol_type = other DNA
gatcggtcttgagaaaatac

SEQ ID NO: 3702 - DNA, 20 bp, synthetic construct
  misc_feature 1..20: note = chemically synthesized
  source 1..20: mol_type = other DNA
tcttgagaaaatactagaat

SEQ ID NO: 3703 - DNA, 20 bp, synthetic construct
  misc_feature 1..20: note = chemically synthesized
  source 1..20: mol_type = other DNA
gaaaatactagaataagcta

SEQ ID NO: 3704 - DNA, 20 bp, synthetic construct
  misc_feature 1..20: note = chemically synthesized
  source 1..20: mol_type = other DNA
aagctaaagaaaaccaaaca

SEQ ID NO: 3705 - DNA, 20 bp, synthetic construct
  misc_feature 1..20: note = chemically synthesized
  source 1..20: mol_type = other DNA
agctaaagaaaaccaaacat

SEQ ID NO: 3706 - DNA, 20 bp, synthetic construct
  misc_feature 1..20: note = chemically synthesized
  source 1..20: mol_type = other DNA
taaagaaaaccaaacatggg

SEQ ID NO: 3707 - DNA, 20 bp, synthetic construct
  misc_feature 1..20: note = chemically synthesized
  source 1..20: mol_type = other DNA
aagaaaaccaaacatgggtg

SEQ ID NO: 3708 - DNA, 20 bp, synthetic construct
  misc_feature 1..20: note = chemically synthesized
  source 1..20: mol_type = other DNA
agaaaaccaaacatgggtgg

SEQ ID NO: 3709 - DNA, 20 bp, synthetic construct
  misc_feature 1..20: note = chemically synthesized
  source 1..20: mol_type = other DNA
gaaaaccaaacatgggtgga

SEQ ID NO: 3710 - DNA, 20 bp, synthetic construct
  misc_feature 1..20: note = chemically synthesized
  source 1..20: mol_type = other DNA
aaaaccaaacatgggtggag

SEQ ID NO: 3711 - DNA, 20 bp, synthetic construct
  misc_feature 1..20: note = chemically synthesized
  source 1..20: mol_type = other DNA
ccaaacatgggtggaggggc

SEQ ID NO: 3712 - DNA, 20 bp, synthetic construct
  misc_feature 1..20: note = chemically synthesized
  source 1..20: mol_type = other DNA
caaacatgggtggaggggca

SEQ ID NO: 3713 - DNA, 20 bp, synthetic construct
  misc_feature 1..20: note = chemically synthesized
  source 1..20: mol_type = other DNA
aaacatgggtggaggggcaa

SEQ ID NO: 3714 - DNA, 20 bp, synthetic construct
  misc_feature 1..20: note = chemically synthesized
  source 1..20: mol_type = other DNA
aacatgggtggaggggcaag

SEQ ID NO: 3715 - DNA, 20 bp, synthetic construct
  misc_feature 1..20: note = chemically synthesized
  source 1..20: mol_type = other DNA
catgggtggaggggcaaggg

SEQ ID NO: 3716 - DNA, 20 bp, synthetic construct
  misc_feature 1..20: note = chemically synthesized
  source 1..20: mol_type = other DNA
atgggtggaggggcaagggg

SEQ ID NO: 3717 - DNA, 20 bp, synthetic construct
  misc_feature 1..20: note = chemically synthesized
  source 1..20: mol_type = other DNA
tgggtggaggggcaagggga

SEQ ID NO: 3718 - DNA, 20 bp, synthetic construct
  misc_feature 1..20: note = chemically synthesized
  source 1..20: mol_type = other DNA
tggaggggcaaggggaggga

SEQ ID NO: 3719 - DNA, 20 bp, synthetic construct
  misc_feature 1..20: note = chemically synthesized
  source 1..20: mol_type = other DNA
ggcaaggggagggatagcat

SEQ ID NO: 3720 - DNA, 20 bp, synthetic construct
  misc_feature 1..20: note = chemically synthesized
  source 1..20: mol_type = other DNA
gcaaggggagggatagcatt

SEQ ID NO: 3721 - DNA, 20 bp, synthetic construct
  misc_feature 1..20: note = chemically synthesized
  source 1..20: mol_type = other DNA
aaggggagggatagcattag

SEQ ID NO: 3722 - DNA, 20 bp, synthetic construct
  misc_feature 1..20: note = chemically synthesized
  source 1..20: mol_type = other DNA
attaggagaaatgcctaatg

SEQ ID NO: 3723 - DNA, 20 bp, synthetic construct
  misc_feature 1..20: note = chemically synthesized
  source 1..20: mol_type = other DNA
gaaatgcctaatgtagatga

SEQ ID NO: 3724 - DNA, 20 bp, synthetic construct
  misc_feature 1..20: note = chemically synthesized
  source 1..20: mol_type = other DNA
aaatgcctaatgtagatgat

SEQ ID NO: 3725 - DNA, 20 bp, synthetic construct
  misc_feature 1..20: note = chemically synthesized
  source 1..20: mol_type = other DNA
taatgtagatgatgggttga

SEQ ID NO: 3726 - DNA, 20 bp, synthetic construct
  misc_feature 1..20: note = chemically synthesized
  source 1..20: mol_type = other DNA
aatgtagatgatgggttgat

SEQ ID NO: 3727 - DNA, 20 bp, synthetic construct
  misc_feature 1..20: note = chemically synthesized
  source 1..20: mol_type = other DNA
agatgatgggttgataggtg

SEQ ID NO: 3728 - DNA, 20 bp, synthetic construct
  misc_feature 1..20: note = chemically synthesized
  source 1..20: mol_type = other DNA
ataggtgcagcaaaccacca

SEQ ID NO: 3729 - DNA, 20 bp, synthetic construct
  misc_feature 1..20: note = chemically synthesized
  source 1..20: mol_type = other DNA
cacattctgcacatgtatcc

SEQ ID NO: 3730 - DNA, 20 bp, synthetic construct
  misc_feature 1..20: note = chemically synthesized
  source 1..20: mol_type = other DNA
tgcacatgtatcccagaact

SEQ ID NO: 3731 - DNA, 20 bp, synthetic construct
  misc_feature 1..20: note = chemically synthesized
  source 1..20: mol_type = other DNA
cacatgtatcccagaactta

SEQ ID NO: 3732 - DNA, 20 bp, synthetic construct
  misc_feature 1..20: note = chemically synthesized
  source 1..20: mol_type = other DNA
aacttagagtaaaataaata

SEQ ID NO: 3733 - DNA, 20 bp, synthetic construct
  misc_feature 1..20: note = chemically synthesized
  source 1..20: mol_type = other DNA
tagagtaaaataaataaaga

SEQ ID NO: 3734 - DNA, 20 bp, synthetic construct
  misc_feature 1..20: note = chemically synthesized
  source 1..20: mol_type = other DNA
gtaaaataaataaagaaaga

SEQ ID NO: 3735 - DNA, 20 bp, synthetic construct
  misc_feature 1..20: note = chemically synthesized
  source 1..20: mol_type = other DNA
aataaataaagaaagaaaga

SEQ ID NO: 3736 - DNA, 20 bp, synthetic construct
  misc_feature 1..20: note = chemically synthesized
  source 1..20: mol_type = other DNA
aataaagaaagaaagaaaga

SEQ ID NO: 3737 - DNA, 20 bp, synthetic construct
  misc_feature 1..20: note = chemically synthesized
  source 1..20: mol_type = other DNA
aagaaagaaataatcaaaca

SEQ ID NO: 3738 - DNA, 20 bp, synthetic construct
  misc_feature 1..20: note = chemically synthesized
  source 1..20: mol_type = other DNA
taatcaaacatggtgtttcc

SEQ ID NO: 3739 - DNA, 20 bp, synthetic construct
  misc_feature 1..20: note = chemically synthesized
  source 1..20: mol_type = other DNA
atcaaacatggtgtttccaa

SEQ ID NO: 3740 - DNA, 20 bp, synthetic construct
  misc_feature 1..20: note = chemically synthesized
  source 1..20: mol_type = other DNA
gactcctgatgttttgttcg

SEQ ID NO: 3741 - DNA, 20 bp, synthetic construct
  misc_feature 1..20: note = chemically synthesized
  source 1..20: mol_type = other DNA
actcctgatgttttgttcgt

SEQ ID NO: 3742 - DNA, 20 bp, synthetic construct
  misc_feature 1..20: note = chemically synthesized
  source 1..20: mol_type = other DNA
tgttttgttcgtgggcactg

SEQ ID NO: 3743 - DNA, 20 bp, synthetic construct
  misc_feature 1..20: note = chemically synthesized
  source 1..20: mol_type = other DNA
gttcgtgggcactgtggaaa

SEQ ID NO: 3744 - DNA, 20 bp, synthetic construct
  misc_feature 1..20: note = chemically synthesized
  source 1..20: mol_type = other DNA
ttcgtgggcactgtggaaac

SEQ ID NO: 3745 - DNA, 20 bp, synthetic construct
  misc_feature 1..20: note = chemically synthesized
  source 1..20: mol_type = other DNA
tcgtgggcactgtggaaaca

SEQ ID NO: 3746 - DNA, 20 bp, synthetic construct
  misc_feature 1..20: note = chemically synthesized
  source 1..20: mol_type = other DNA
cgtgggcactgtggaaacag

SEQ ID NO: 3747 - DNA, 20 bp, synthetic construct
  misc_feature 1..20: note = chemically synthesized
  source 1..20: mol_type = other DNA
gggcactgtggaaacagggg

SEQ ID NO: 3748 - DNA, 20 bp, synthetic construct
  misc_feature 1..20: note = chemically synthesized
  source 1..20: mol_type = other DNA
cactgtggaaacaggggcag

SEQ ID NO: 3749 - DNA, 20 bp, synthetic construct
  misc_feature 1..20: note = chemically synthesized
  source 1..20: mol_type = other DNA
aacaggggcagtggtgctgt

SEQ ID NO: 3750 - DNA, 20 bp, synthetic construct
  misc_feature 1..20: note = chemically synthesized
  source 1..20: mol_type = other DNA
caggggcagtggtgctgtga

SEQ ID NO: 3751 - DNA, 20 bp, synthetic construct
  misc_feature 1..20: note = chemically synthesized
  source 1..20: mol_type = other DNA
gcagtggtgctgtgagagac

SEQ ID NO: 3752 - DNA, 20 bp, synthetic construct
  misc_feature 1..20: note = chemically synthesized
  source 1..20: mol_type = other DNA
cagtggtgctgtgagagaca

SEQ ID NO: 3753 - DNA, 20 bp, synthetic construct
  misc_feature 1..20: note = chemically synthesized
  source 1..20: mol_type = other DNA
agtggtgctgtgagagacaa

SEQ ID NO: 3754 - DNA, 20 bp, synthetic construct
  misc_feature 1..20: note = chemically synthesized
  source 1..20: mol_type = other DNA
tggtgctgtgagagacaagg

SEQ ID NO: 3755 - DNA, 20 bp, synthetic construct
  misc_feature 1..20: note = chemically synthesized
  source 1..20: mol_type = other DNA
tgctgtgagagacaagggag

SEQ ID NO: 3756 - DNA, 20 bp, synthetic construct
  misc_feature 1..20: note = chemically synthesized
  source 1..20: mol_type = other DNA
gctgtgagagacaagggagt

SEQ ID NO: 3757 - DNA, 20 bp, synthetic construct
  misc_feature 1..20: note = chemically synthesized
  source 1..20: mol_type = other DNA
ctgtgagagacaagggagtg

SEQ ID NO: 3758 - DNA, 20 bp, synthetic construct
  misc_feature 1..20: note = chemically synthesized
  source 1..20: mol_type = other DNA
gtgagagacaagggagtggg

SEQ ID NO: 3759 - DNA, 20 bp, synthetic construct
  misc_feature 1..20: note = chemically synthesized
  source 1..20: mol_type = other DNA
gacaagggagtggggagcca

SEQ ID NO: 3760 - DNA, 20 bp, synthetic construct
  misc_feature 1..20: note = chemically synthesized
  source 1..20: mol_type = other DNA
agggagtggggagccatggt

SEQ ID NO: 3761 - DNA, 20 bp, synthetic construct
  misc_feature 1..20: note = chemically synthesized
  source 1..20: mol_type = other DNA
agtggggagccatggtcagc

SEQ ID NO: 3762 - DNA, 20 bp, synthetic construct
  misc_feature 1..20: note = chemically synthesized
  source 1..20: mol_type = other DNA
ggagccatggtcagcaagtg

SEQ ID NO: 3763 - DNA, 20 bp, synthetic construct
  misc_feature 1..20: note = chemically synthesized
  source 1..20: mol_type = other DNA
gagccatggtcagcaagtgt

SEQ ID NO: 3764 - DNA, 20 bp, synthetic construct
  misc_feature 1..20: note = chemically synthesized
  source 1..20: mol_type = other DNA
ccatggtcagcaagtgtggg

SEQ ID NO: 3765 - DNA, 20 bp, synthetic construct
  misc_feature 1..20: note = chemically synthesized
  source 1..20: mol_type = other DNA
tcagcaagtgtgggcagccc

SEQ ID NO: 3766 - DNA, 20 bp, synthetic construct
  misc_feature 1..20: note = chemically synthesized
  source 1..20: mol_type = other DNA
gggcagccccagcgacactg

SEQ ID NO: 3767 - DNA, 20 bp, synthetic construct
  misc_feature 1..20: note = chemically synthesized
  source 1..20: mol_type = other DNA
gccccagcgacactgcagcc

SEQ ID NO: 3768 - DNA, 20 bp, synthetic construct
  misc_feature 1..20: note = chemically synthesized
  source 1..20: mol_type = other DNA
cagcgacactgcagcccggc

SEQ ID NO: 3769 - DNA, 20 bp, synthetic construct
  misc_feature 1..20: note = chemically synthesized
  source 1..20: mol_type = other DNA
agcgacactgcagcccggcc

SEQ ID NO: 3770 - DNA, 20 bp, synthetic construct
  misc_feature 1..20: note = chemically synthesized
  source 1..20: mol_type = other DNA
gacactgcagcccggccagg

SEQ ID NO: 3771 - DNA, 20 bp, synthetic construct
  misc_feature 1..20: note = chemically synthesized
  source 1..20: mol_type = other DNA
cactgcagcccggccaggtg

SEQ ID NO: 3772 - DNA, 20 bp, synthetic construct
  misc_feature 1..20: note = chemically synthesized
  source 1..20: mol_type = other DNA
actgcagcccggccaggtgg

SEQ ID NO: 3773 - DNA, 20 bp, synthetic construct
  misc_feature 1..20: note = chemically synthesized
  source 1..20: mol_type = other DNA
ctgcagcccggccaggtgga

SEQ ID NO: 3774 - DNA, 20 bp, synthetic construct
  misc_feature 1..20: note = chemically synthesized
  source 1..20: mol_type = other DNA
gctttcctgacttatcatcc

SEQ ID NO: 3775 - DNA, 20 bp, synthetic construct
  misc_feature 1..20: note = chemically synthesized
  source 1..20: mol_type = other DNA
cctgacttatcatccaagac

SEQ ID NO: 3776 - DNA, 20 bp, synthetic construct
  misc_feature 1..20: note = chemically synthesized
  source 1..20: mol_type = other DNA
atccaagactggtctgtgca

SEQ ID NO: 3777 - DNA, 20 bp, synthetic construct
  misc_feature 1..20: note = chemically synthesized
  source 1..20: mol_type = other DNA
ccaagactggtctgtgcacg

SEQ ID NO: 3778 - DNA, 20 bp, synthetic construct
  misc_feature 1..20: note = chemically synthesized
  source 1..20: mol_type = other DNA
agactggtctgtgcacggag

SEQ ID NO: 3779 - DNA, 20 bp, synthetic construct
  misc_feature 1..20: note = chemically synthesized
  source 1..20: mol_type = other DNA
gactggtctgtgcacggaga

SEQ ID NO: 3780 - DNA, 20 bp, synthetic construct
  misc_feature 1..20: note = chemically synthesized
  source 1..20: mol_type = other DNA
actggtctgtgcacggagaa

SEQ ID NO: 3781 - DNA, 20 bp, synthetic construct
  misc_feature 1..20: note = chemically synthesized
  source 1..20: mol_type = other DNA
ctggtctgtgcacggagaag

SEQ ID NO: 3782 - DNA, 20 bp, synthetic construct
  misc_feature 1..20: note = chemically synthesized
  source 1..20: mol_type = other DNA
tctgtgcacggagaaggggc

SEQ ID NO: 3783 - DNA, 20 bp, synthetic construct
  misc_feature 1..20: note = chemically synthesized
  source 1..20: mol_type = other DNA
gtgcacggagaaggggccag

SEQ ID NO: 3784 - DNA, 20 bp, synthetic construct
  misc_feature 1..20: note = chemically synthesized
  source 1..20: mol_type = other DNA
cggagaaggggccagaagaa

SEQ ID NO: 3785 - DNA, 20 bp, synthetic construct
  misc_feature 1..20: note = chemically synthesized
  source 1..20: mol_type = other DNA
ggagaaggggccagaagaac

SEQ ID NO: 3786 - DNA, 20 bp, synthetic construct
  misc_feature 1..20: note = chemically synthesized
  source 1..20: mol_type = other DNA
gaaggggccagaagaacagg

SEQ ID NO: 3787 - DNA, 20 bp, synthetic construct
  misc_feature 1..20: note = chemically synthesized
  source 1..20: mol_type = other DNA
gccagaagaacaggcagccc

SEQ ID NO: 3788 - DNA, 20 bp, synthetic construct
  misc_feature 1..20: note = chemically synthesized
  source 1..20: mol_type = other DNA
ccagaagaacaggcagcccc

SEQ ID NO: 3789 - DNA, 20 bp, synthetic construct
  misc_feature 1..20: note = chemically synthesized
  source 1..20: mol_type = other DNA
gaagaacaggcagccccagg

SEQ ID NO: 3790 - DNA, 20 bp, synthetic construct
  misc_feature 1..20: note = chemically synthesized
  source 1..20: mol_type = other DNA
aagaacaggcagccccagga

SEQ ID NO: 3791 - DNA, 20 bp, synthetic construct
  misc_feature 1..20: note = chemically synthesized
  source 1..20: mol_type = other DNA
cagccccaggaaggctctgt

SEQ ID NO: 3792 - DNA, 20 bp, synthetic construct
  misc_feature 1..20: note = chemically synthesized
  source 1..20: mol_type = other DNA
agccccaggaaggctctgtc

SEQ ID NO: 3793 - DNA, 20 bp, synthetic construct
  misc_feature 1..20: note = chemically synthesized
  source 1..20: mol_type = other DNA
ggctctgtcaggcctccccc

SEQ ID NO: 3794 - DNA, 20 bp, synthetic construct
  misc_feature 1..20: note = chemically synthesized
  source 1..20: mol_type = other DNA
gctctgtcaggcctccccca

SEQ ID NO: 3795 - DNA, 20 bp, synthetic construct
  misc_feature 1..20: note = chemically synthesized
  source 1..20: mol_type = other DNA
aggcctcccccaaggccaac

SEQ ID NO: 3796 - DNA, 20 bp, synthetic construct
  misc_feature 1..20: note = chemically synthesized
  source 1..20: mol_type = other DNA
tcccccaaggccaacaagcc

SEQ ID NO: 3797 - DNA, 20 bp, synthetic construct
  misc_feature 1..20: note = chemically synthesized
  source 1..20: mol_type = other DNA
ccccaaggccaacaagccca

SEQ ID NO: 3798 - DNA, 20 bp, synthetic construct
  misc_feature 1..20: note = chemically synthesized
  source 1..20: mol_type = other DNA
cccaaggccaacaagcccag

SEQ ID NO: 3799 - DNA, 20 bp, synthetic construct
  misc_feature 1..20: note = chemically synthesized
  source 1..20: mol_type = other DNA
caaggccaacaagcccagag

SEQ ID NO: 3800 - DNA, 20 bp, synthetic construct
  misc_feature 1..20: note = chemically synthesized
  source 1..20: mol_type = other DNA
aaggccaacaagcccagagg

SEQ ID NO: 3801 - DNA, 20 bp, synthetic construct
  misc_feature 1..20: note = chemically synthesized
  source 1..20: mol_type = other DNA
aggccaacaagcccagagga

SEQ ID NO: 3802 - DNA, 20 bp, synthetic construct
  misc_feature 1..20: note = chemically synthesized
  source 1..20: mol_type = other DNA
caacaagcccagaggagggc

SEQ ID NO: 3803 - DNA, 20 bp, synthetic construct
  misc_feature 1..20: note = chemically synthesized
  source 1..20: mol_type = other DNA
aacaagcccagaggagggca

SEQ ID NO: 3804 - DNA, 20 bp, synthetic construct
  misc_feature 1..20: note = chemically synthesized
  source 1..20: mol_type = other DNA
gagggcaaggcctccaactc

SEQ ID NO: 3805 - DNA, 20 bp, synthetic construct
  misc_feature 1..20: note = chemically synthesized
  source 1..20: mol_type = other DNA
ctccaactctagcccttctt

SEQ ID NO: 3806 - DNA, 20 bp, synthetic construct
  misc_feature 1..20: note = chemically synthesized
  source 1..20: mol_type = other DNA
tccaactctagcccttctta

SEQ ID NO: 3807 - DNA, 20 bp, synthetic construct
  misc_feature 1..20: note = chemically synthesized
  source 1..20: mol_type = other DNA
aactctagcccttcttaagg

SEQ ID NO: 3808 - DNA, 20 bp, synthetic construct
  misc_feature 1..20: note = chemically synthesized
  source 1..20: mol_type = other DNA
ttaaggaagcacatctgtcc

SEQ ID NO: 3809 - DNA, 20 bp, synthetic construct
  misc_feature 1..20: note = chemically synthesized
  source 1..20: mol_type = other DNA
cacatctgtcctggccttta

SEQ ID NO: 3810 - DNA, 20 bp, synthetic construct
  misc_feature 1..20: note = chemically synthesized
  source 1..20: mol_type = other DNA
tctgtcctggcctttatgga

SEQ ID NO: 3811 - DNA, 20 bp, synthetic construct
  misc_feature 1..20: note = chemically synthesized
  source 1..20: mol_type = other DNA
ttttttttttttttttaatt

SEQ ID NO: 3812 - DNA, 20 bp, synthetic construct
  misc_feature 1..20: note = chemically synthesized
  source 1..20: mol_type = other DNA
ttttttttttaattgagaca

SEQ ID NO: 3813 - DNA, 20 bp, synthetic construct
  misc_feature 1..20: note = chemically synthesized
  source 1..20: mol_type = other DNA
catggtctcactctgttgcc

SEQ ID NO: 3814 - DNA, 20 bp, synthetic construct
  misc_feature 1..20: note = chemically synthesized
  source 1..20: mol_type = other DNA
atggtctcactctgttgccc

SEQ ID NO: 3815 - DNA, 20 bp, synthetic construct
  misc_feature 1..20: note = chemically synthesized
  source 1..20: mol_type = other DNA
tctcactctgttgcccaggc

SEQ ID NO: 3816 - DNA, 20 bp, synthetic construct
  misc_feature 1..20: note = chemically synthesized
  source 1..20: mol_type = other DNA
tcactctgttgcccaggctg

SEQ ID NO: 3817 - DNA, 20 bp, synthetic construct
  misc_feature 1..20: note = chemically synthesized
  source 1..20: mol_type = other DNA
ctgttgcccaggctggagtg

SEQ ID NO: 3818 - DNA, 20 bp, synthetic construct
  misc_feature 1..20: note = chemically synthesized
  source 1..20: mol_type = other DNA
ttgcccaggctggagtgcag

SEQ ID NO: 3819 - DNA, 20 bp, synthetic construct
  misc_feature 1..20: note = chemically synthesized
  source 1..20: mol_type = other DNA
ggagtgcagtggtgcaatct

SEQ ID NO: 3820 - DNA, 20 bp, synthetic construct
  misc_feature 1..20: note = chemically synthesized
  source 1..20: mol_type = other DNA
cactgcaacctccgcctccc

SEQ ID NO: 3821 - DNA, 20 bp, synthetic construct
  misc_feature 1..20: note = chemically synthesized
  source 1..20: mol_type = other DNA
aacctccgcctcccgagttc

SEQ ID NO: 3822 - DNA, 20 bp, synthetic construct
  misc_feature 1..20: note = chemically synthesized
  source 1..20: mol_type = other DNA
ctccgcctcccgagttcaag

SEQ ID NO: 3823 - DNA, 20 bp, synthetic construct
  misc_feature 1..20: note = chemically synthesized
  source 1..20: mol_type = other DNA
ttcaagcagtcctcctgcct

SEQ ID NO: 3824 - DNA, 20 bp, synthetic construct
  misc_feature 1..20: note = chemically synthesized
  source 1..20: mol_type = other DNA
gtcctcctgcctcagctctc

SEQ ID NO: 3825 - DNA, 20 bp, synthetic construct
  misc_feature 1..20: note = chemically synthesized
  source 1..20: mol_type = other DNA
ctcctgcctcagctctcaag

SEQ ID NO: 3826 - DNA, 20 bp, synthetic construct
  misc_feature 1..20: note = chemically synthesized
  source 1..20: mol_type = other DNA
tgcctcagctctcaagtagc

SEQ ID NO: 3827 - DNA, 20 bp, synthetic construct
  misc_feature 1..20: note = chemically synthesized
  source 1..20: mol_type = other DNA
gcctcagctctcaagtagct

SEQ ID NO: 3828 - DNA, 20 bp, synthetic construct
  misc_feature 1..20: note = chemically synthesized
  source 1..20: mol_type = other DNA
ctctcaagtagctaggacta

SEQ ID NO: 3829 - DNA, 20 bp, synthetic construct
  misc_feature 1..20: note = chemically synthesized
  source 1..20: mol_type = other DNA
tctcaagtagctaggactac

SEQ ID NO: 3830 - DNA, 20 bp, synthetic construct
  misc_feature 1..20: note = chemically synthesized
  source 1..20: mol_type = other DNA
gcatgcgccaccaccacacc

SEQ ID NO: 3831 - DNA, 20 bp, synthetic construct
  misc_feature 1..20: note = chemically synthesized
  source 1..20: mol_type = other DNA
gctaatttttgtattttttg

SEQ ID NO: 3832 - DNA, 20 bp, synthetic construct
  misc_feature 1..20: note = chemically synthesized
  source 1..20: mol_type = other DNA
taatttttgtattttttgta

SEQ ID NO: 3833 - DNA, 20 bp, synthetic construct
  misc_feature 1..20: note = chemically synthesized
  source 1..20: mol_type = other DNA
ttttgtattttttgtagaga

SEQ ID NO: 3834 - DNA, 20 bp, synthetic construct
  misc_feature 1..20: note = chemically synthesized
  source 1..20: mol_type = other DNA
tttgtattttttgtagagat

SEQ ID NO: 3835 - DNA, 20 bp, synthetic construct
  misc_feature 1..20: note = chemically synthesized
  source 1..20: mol_type = other DNA
tgggatctcaccatgttgcc

SEQ ID NO: 3836 - DNA, 20 bp, synthetic construct
  misc_feature 1..20: note = chemically synthesized
  source 1..20: mol_type = other DNA
gggatctcaccatgttgccc

SEQ ID NO: 3837 - DNA, 20 bp, synthetic construct
  misc_feature 1..20: note = chemically synthesized
  source 1..20: mol_type = other DNA
tctcaccatgttgcccaggc

SEQ ID NO: 3838 - DNA, 20 bp, synthetic construct
  misc_feature 1..20: note = chemically synthesized
  source 1..20: mol_type = other DNA
ctcaccatgttgcccaggct

SEQ ID NO: 3839 - DNA, 20 bp, synthetic construct
  misc_feature 1..20: note = chemically synthesized
  source 1..20: mol_type = other DNA
accatgttgcccaggctggg

SEQ ID NO: 3840 - DNA, 20 bp, synthetic construct
  misc_feature 1..20: note = chemically synthesized
  source 1..20: mol_type = other DNA
tgttgcccaggctgggtgga

SEQ ID NO: 3841 - DNA, 20 bp, synthetic construct
  misc_feature 1..20: note = chemically synthesized
  source 1..20: mol_type = other DNA
aaagtgttatgttcttccca

SEQ ID NO: 3842 - DNA, 20 bp, synthetic construct
  misc_feature 1..20: note = chemically synthesized
  source 1..20: mol_type = other DNA
ctcctcacatcctgccccaa

SEQ ID NO: 3843 - DNA, 20 bp, synthetic construct
  misc_feature 1..20: note = chemically synthesized
  source 1..20: mol_type = other DNA
ctgccccaacagtcgccctg

SEQ ID NO: 3844 - DNA, 20 bp, synthetic construct
  misc_feature 1..20: note = chemically synthesized
  source 1..20: mol_type = other DNA
caacagtcgccctgtggaat

SEQ ID NO: 3845 - DNA, 20 bp, synthetic construct
  misc_feature 1..20: note = chemically synthesized
  source 1..20: mol_type = other DNA
aacagtcgccctgtggaatg

SEQ ID NO: 3846 - DNA, 20 bp, synthetic construct
  misc_feature 1..20: note = chemically synthesized
  source 1..20: mol_type = other DNA
acagtcgccctgtggaatga

SEQ ID NO: 3847 - DNA, 20 bp, synthetic construct
  misc_feature 1..20: note = chemically synthesized
  source 1..20: mol_type = other DNA
gtcgccctgtggaatgaggg

SEQ ID NO: 3848 - DNA, 20 bp, synthetic construct
  misc_feature 1..20: note = chemically synthesized
  source 1..20: mol_type = other DNA
tcgccctgtggaatgaggga

SEQ ID NO: 3849 - DNA, 20 bp, synthetic construct
  misc_feature 1..20: note = chemically synthesized
  source 1..20: mol_type = other DNA
tgtggaatgagggaaggtat

SEQ ID NO: 3850 - DNA, 20 bp, synthetic construct
  misc_feature 1..20: note = chemically synthesized
  source 1..20: mol_type = other DNA
aaggtattagcctcacctcc

SEQ ID NO: 3851 - DNA, 20 bp, synthetic construct
  misc_feature 1..20: note = chemically synthesized
  source 1..20: mol_type = other DNA
tattagcctcacctcccagt

SEQ ID NO: 3852 - DNA, 20 bp, synthetic construct
  misc_feature 1..20: note = chemically synthesized
  source 1..20: mol_type = other DNA
attagcctcacctcccagtg

SEQ ID NO: 3853 - DNA, 20 bp, synthetic construct
  misc_feature 1..20: note = chemically synthesized
  source 1..20: mol_type = other DNA
acctcccagtgaggaactcg

SEQ ID NO: 3854 - DNA, 20 bp, synthetic construct
  misc_feature 1..20: note = chemically synthesized
  source 1..20: mol_type = other DNA
agtgaggaactcgaagatct

SEQ ID NO: 3855 - DNA, 20 bp, synthetic construct
  misc_feature 1..20: note = chemically synthesized
  source 1..20: mol_type = other DNA
gaggaactcgaagatctcag

SEQ ID NO: 3856 - DNA, 20 bp, synthetic construct
  misc_feature 1..20: note = chemically synthesized
  source 1..20: mol_type = other DNA
atctcagaagtgtcctgctg

SEQ ID NO: 3857 - DNA, 20 bp, synthetic construct
  misc_feature 1..20: note = chemically synthesized
  source 1..20: mol_type = other DNA
cagaagtgtcctgctgtgga

SEQ ID NO: 3858 - DNA, 20 bp, synthetic construct
  misc_feature 1..20: note = chemically synthesized
  source 1..20: mol_type = other DNA
agaagtgtcctgctgtggac

SEQ ID NO: 3859 - DNA, 20 bp, synthetic construct
  misc_feature 1..20: note = chemically synthesized
  source 1..20: mol_type = other DNA
gaagtgtcctgctgtggaca

SEQ ID NO: 3860 - DNA, 20 bp, synthetic construct
  misc_feature 1..20: note = chemically synthesized
  source 1..20: mol_type = other DNA
agtgtcctgctgtggacagg

SEQ ID NO: 3861 - DNA, 20 bp, synthetic construct
  misc_feature 1..20: note = chemically synthesized
  source 1..20: mol_type = other DNA
gtgtcctgctgtggacaggg

SEQ ID NO: 3862 - DNA, 20 bp, synthetic construct
  misc_feature 1..20: note = chemically synthesized
  source 1..20: mol_type = other DNA
cctgctgtggacagggagga

SEQ ID NO: 3863 - DNA, 20 bp, synthetic construct
  misc_feature 1..20: note = chemically synthesized
  source 1..20: mol_type = other DNA
ctgctgtggacagggaggac

SEQ ID NO: 3864 - DNA, 20 bp, synthetic construct
  misc_feature 1..20: note = chemically synthesized
  source 1..20: mol_type = other DNA
tgctgtggacagggaggaca

SEQ ID NO: 3865 - DNA, 20 bp, synthetic construct
  misc_feature 1..20: note = chemically synthesized
  source 1..20: mol_type = other DNA
gtggacagggaggacagggc

SEQ ID NO: 3866 - DNA, 20 bp, synthetic construct
  misc_feature 1..20: note = chemically synthesized
  source 1..20: mol_type = other DNA
tggacagggaggacagggct

SEQ ID NO: 3867 - DNA, 20 bp, synthetic construct
  misc_feature 1..20: note = chemically synthesized
  source 1..20: mol_type = other DNA
gggaggacagggctgggctt

SEQ ID NO: 3868 - DNA, 20 bp, synthetic construct
  misc_feature 1..20: note = chemically synthesized
  source 1..20: mol_type = other DNA
ggaggacagggctgggcttc

SEQ ID NO: 3869 - DNA, 20 bp, synthetic construct
  misc_feature 1..20: note = chemically synthesized
  source 1..20: mol_type = other DNA
aacccctcccactgccacct

SEQ ID NO: 3870 - DNA, 20 bp, synthetic construct
  misc_feature 1..20: note = chemically synthesized
  source 1..20: mol_type = other DNA
acccctcccactgccacctc

SEQ ID NO: 3871 - DNA, 20 bp, synthetic construct
  misc_feature 1..20: note = chemically synthesized
  source 1..20: mol_type = other DNA
cccctcccactgccacctca

SEQ ID NO: 3872 - DNA, 20 bp, synthetic construct
  misc_feature 1..20: note = chemically synthesized
  source 1..20: mol_type = other DNA
ccactgccacctcagggccg

SEQ ID NO: 3873 - DNA, 20 bp, synthetic construct
  misc_feature 1..20: note = chemically synthesized
  source 1..20: mol_type = other DNA
ctgccacctcagggccgcgg

SEQ ID NO: 3874 - DNA, 20 bp, synthetic construct
  misc_feature 1..20: note = chemically synthesized
  source 1..20: mol_type = other DNA
cgcggcagaaacctgtcgtc

SEQ ID NO: 3875 - DNA, 20 bp, synthetic construct
  misc_feature 1..20: note = chemically synthesized
  source 1..20: mol_type = other DNA
gaaacctgtcgtctggacac

SEQ ID NO: 3876 - DNA, 20 bp, synthetic construct
  misc_feature 1..20: note = chemically synthesized
  source 1..20: mol_type = other DNA
tcgtctggacactggtcata

SEQ ID NO: 3877 - DNA, 20 bp, synthetic construct
  misc_feature 1..20: note = chemically synthesized
  source 1..20: mol_type = other DNA
actggtcatacagccccttt

SEQ ID NO: 3878 - DNA, 20 bp, synthetic construct
  misc_feature 1..20: note = chemically synthesized
  source 1..20: mol_type = other DNA
ctggtcatacagcccctttc

SEQ ID NO: 3879 - DNA, 20 bp, synthetic construct
  misc_feature 1..20: note = chemically synthesized
  source 1..20: mol_type = other DNA
aatctcctcacttgcctttc

SEQ ID NO: 3880 - DNA, 20 bp, synthetic construct
  misc_feature 1..20: note = chemically synthesized
  source 1..20: mol_type = other DNA
cttgcctttctggcactatt

SEQ ID NO: 3881 - DNA, 20 bp, synthetic construct
  misc_feature 1..20: note = chemically synthesized
  source 1..20: mol_type = other DNA
ttctggcactattgagtgac

SEQ ID NO: 3882 - DNA, 20 bp, synthetic construct
  misc_feature 1..20: note = chemically synthesized
  source 1..20: mol_type = other DNA
actattgagtgactggtgtg

SEQ ID NO: 3883 - DNA, 20 bp, synthetic construct
  misc_feature 1..20: note = chemically synthesized
  source 1..20: mol_type = other DNA
agtgactggtgtgtggactt

SEQ ID NO: 3884 - DNA, 20 bp, synthetic construct
  misc_feature 1..20: note = chemically synthesized
  source 1..20: mol_type = other DNA
gtgactggtgtgtggacttc

SEQ ID NO: 3885 - DNA, 20 bp, synthetic construct
  misc_feature 1..20: note = chemically synthesized
  source 1..20: mol_type = other DNA
tgactggtgtgtggacttca

SEQ ID NO: 3886 - DNA, 20 bp, synthetic construct
  misc_feature 1..20: note = chemically synthesized
  source 1..20: mol_type = other DNA
gactggtgtgtggacttcag

SEQ ID NO: 3887 - DNA, 20 bp, synthetic construct
  misc_feature 1..20: note = chemically synthesized
  source 1..20: mol_type = other DNA
tggtgtgtggacttcagggg

SEQ ID NO: 3888 - DNA, 20 bp, synthetic construct
  misc_feature 1..20: note = chemically synthesized
  source 1..20: mol_type = other DNA
tgtggacttcaggggaagcg

SEQ ID NO: 3889 - DNA, 20 bp, synthetic construct
  misc_feature 1..20: note = chemically synthesized
  source 1..20: mol_type = other DNA
ggacttcaggggaagcgtgg

SEQ ID NO: 3890 - DNA, 20 bp, synthetic construct
  misc_feature 1..20: note = chemically synthesized
  source 1..20: mol_type = other DNA
gacttcaggggaagcgtgga

SEQ ID NO: 3891 - DNA, 20 bp, synthetic construct
  misc_feature 1..20: note = chemically synthesized
  source 1..20: mol_type = other DNA
gaagcgtggaaggcacttca

SEQ ID NO: 3892 - DNA, 20 bp, synthetic construct
  misc_feature 1..20: note = chemically synthesized
  source 1..20: mol_type = other DNA
aagcgtggaaggcacttcac

SEQ ID NO: 3893 - DNA, 20 bp, synthetic construct
  misc_feature 1..20: note = chemically synthesized
  source 1..20: mol_type = other DNA
acaggcctaatactctgtga

SEQ ID NO: 3894 - DNA, 20 bp, synthetic construct
  misc_feature 1..20: note = chemically synthesized
  source 1..20: mol_type = other DNA
ctaatactctgtgacagtct

SEQ ID NO: 3895 - DNA, 20 bp, synthetic construct
  misc_feature 1..20: note = chemically synthesized
  source 1..20: mol_type = other DNA
actctgtgacagtcttggcc

SEQ ID NO: 3896 - DNA, 20 bp, synthetic construct
  misc_feature 1..20: note = chemically synthesized
  source 1..20: mol_type = other DNA
tctgtgacagtcttggccaa

SEQ ID NO: 3897 - DNA, 20 bp, synthetic construct
  misc_feature 1..20: note = chemically synthesized
  source 1..20: mol_type = other DNA
agtcttggccaagagattct

SEQ ID NO: 3898 - DNA, 20 bp, synthetic construct
  misc_feature 1..20: note = chemically synthesized
  source 1..20: mol_type = other DNA
ggccaagagattctgagaac

SEQ ID NO: 3899 - DNA, 20 bp, synthetic construct
  misc_feature 1..20: note = chemically synthesized
  source 1..20: mol_type = other DNA
gagattctgagaaccagaac

SEQ ID NO: 3900 - DNA, 20 bp, synthetic construct
  misc_feature 1..20: note = chemically synthesized
  source 1..20: mol_type = other DNA
aaccagaactggccattctc

SEQ ID NO: 3901 - DNA, 20 bp, synthetic construct
  misc_feature 1..20: note = chemically synthesized
  source 1..20: mol_type = other DNA
ttaaaacctattatgtccta

SEQ ID NO: 3902 - DNA, 20 bp, synthetic construct
  misc_feature 1..20: note = chemically synthesized
  source 1..20: mol_type = other DNA
attatgtcctatggttaaca

SEQ ID NO: 3903 - DNA, 20 bp, synthetic construct
  misc_feature 1..20: note = chemically synthesized
  source 1..20: mol_type = other DNA
tatgtcctatggttaacaca

SEQ ID NO: 3904 - DNA, 20 bp, synthetic construct
  misc_feature 1..20: note = chemically synthesized
  source 1..20: mol_type = other DNA
atggttaacacagagctgct

SEQ ID NO: 3905 - DNA, 20 bp, synthetic construct
  misc_feature 1..20: note = chemically synthesized
  source 1..20: mol_type = other DNA
cagagctgctcagaaattat

SEQ ID NO: 3906 - DNA, 20 bp, synthetic construct
  misc_feature 1..20: note = chemically synthesized
  source 1..20: mol_type = other DNA
gaaattatgagaactaattt

SEQ ID NO: 3907 - DNA, 20 bp, synthetic construct
  misc_feature 1..20: note = chemically synthesized
  source 1..20: mol_type = other DNA
aaattatgagaactaattta

SEQ ID NO: 3908 - DNA, 20 bp, synthetic construct
  misc_feature 1..20: note = chemically synthesized
  source 1..20: mol_type = other DNA
agaactaatttaaggcttca

SEQ ID NO: 3909 - DNA, 20 bp, synthetic construct
  misc_feature 1..20: note = chemically synthesized
  source 1..20: mol_type = other DNA
caaagctctaccaaaaaaaa

SEQ ID NO: 3910 - DNA, 20 bp, synthetic construct
  misc_feature 1..20: note = chemically synthesized
  source 1..20: mol_type = other DNA
ctctaccaaaaaaaatggtc

SEQ ID NO: 3911 - DNA, 20 bp, synthetic construct
  misc_feature 1..20: note = chemically synthesized
  source 1..20: mol_type = other DNA
taccaaaaaaaatggtctag

SEQ ID NO: 3912 - DNA, 20 bp, synthetic construct
  misc_feature 1..20: note = chemically synthesized
  source 1..20: mol_type = other DNA
accaaaaaaaatggtctagc

SEQ ID NO: 3913 - DNA, 20 bp, synthetic construct
  misc_feature 1..20: note = chemically synthesized
  source 1..20: mol_type = other DNA
aaaaaaatggtctagcaggt

SEQ ID NO: 3914 - DNA, 20 bp, synthetic construct
  misc_feature 1..20: note = chemically synthesized
  source 1..20: mol_type = other DNA
aaaaaatggtctagcaggtc

SEQ ID NO: 3915 - DNA, 20 bp, synthetic construct
  misc_feature 1..20: note = chemically synthesized
  source 1..20: mol_type = other DNA
gtcaggctctaacatttctt

SEQ ID NO: 3916 - DNA, 20 bp, synthetic construct
  misc_feature 1..20: note = chemically synthesized
  source 1..20: mol_type = other DNA
tcaggctctaacatttcttc

SEQ ID NO: 3917 - DNA, 20 bp, synthetic construct
  misc_feature 1..20: note = chemically synthesized
  source 1..20: mol_type = other DNA
catttcttcaggaataaaac

SEQ ID NO: 3918 - DNA, 20 bp, synthetic construct
  misc_feature 1..20: note = chemically synthesized
  source 1..20: mol_type = other DNA
atttcttcaggaataaaact

SEQ ID NO: 3919 - DNA, 20 bp, synthetic construct
  misc_feature 1..20: note = chemically synthesized
  source 1..20: mol_type = other DNA
actaggctgccctctcgcct

SEQ ID NO: 3920 - DNA, 20 bp, synthetic construct
  misc_feature 1..20: note = chemically synthesized
  source 1..20: mol_type = other DNA
ctaggctgccctctcgcctg

SEQ ID NO: 3921 - DNA, 20 bp, synthetic construct
  misc_feature 1..20: note = chemically synthesized
  source 1..20: mol_type = other DNA
gctgccctctcgcctgaggt

SEQ ID NO: 3922 - DNA, 20 bp, synthetic construct
  misc_feature 1..20: note = chemically synthesized
  source 1..20: mol_type = other DNA
ctgccctctcgcctgaggtg

SEQ ID NO: 3923 - DNA, 20 bp, synthetic construct
  misc_feature 1..20: note = chemically synthesized
  source 1..20: mol_type = other DNA
gcctgaggtgaggctgaatg

SEQ ID NO: 3924 - DNA, 20 bp, synthetic construct
  misc_feature 1..20: note = chemically synthesized
  source 1..20: mol_type = other DNA
cctgaggtgaggctgaatga

SEQ ID NO: 3925 - DNA, 20 bp, synthetic construct
  misc_feature 1..20: note = chemically synthesized
  source 1..20: mol_type = other DNA
tgaggtgaggctgaatgaag

SEQ ID NO: 3926 - DNA, 20 bp, synthetic construct
  misc_feature 1..20: note = chemically synthesized
  source 1..20: mol_type = other DNA
ggctgaatgaaggagcgctc

SEQ ID NO: 3927 - DNA, 20 bp, synthetic construct
  misc_feature 1..20: note = chemically synthesized
  source 1..20: mol_type = other DNA
aaggagcgctctggtgctgc

SEQ ID NO: 3928 - DNA, 20 bp, synthetic construct
  misc_feature 1..20: note = chemically synthesized
  source 1..20: mol_type = other DNA
aggagcgctctggtgctgcg

SEQ ID NO: 3929 - DNA, 20 bp, synthetic construct
  misc_feature 1..20: note = chemically synthesized
  source 1..20: mol_type = other DNA
gcgctctggtgctgcgaggc

SEQ ID NO: 3930 - DNA, 20 bp, synthetic construct
  misc_feature 1..20: note = chemically synthesized
  source 1..20: mol_type = other DNA
cgctctggtgctgcgaggcc

SEQ ID NO: 3931 - DNA, 20 bp, synthetic construct
  misc_feature 1..20: note = chemically synthesized
  source 1..20: mol_type = other DNA
ggccaggcctcctcccatga

SEQ ID NO: 3932 - DNA, 20 bp, synthetic construct
  misc_feature 1..20: note = chemically synthesized
  source 1..20: mol_type = other DNA
aggcctcctcccatgacggc

SEQ ID NO: 3933 - DNA, 20 bp, synthetic construct
  misc_feature 1..20: note = chemically synthesized
  source 1..20: mol_type = other DNA
atgacggcaagtccttcttt

SEQ ID NO: 3934 - DNA, 20 bp, synthetic construct
  misc_feature 1..20: note = chemically synthesized
  source 1..20: mol_type = other DNA
caagtccttctttcagaaaa

SEQ ID NO: 3935 - DNA, 20 bp, synthetic construct
  misc_feature 1..20: note = chemically synthesized
  source 1..20: mol_type = other DNA
aagtccttctttcagaaaac

SEQ ID NO: 3936 - DNA, 20 bp, synthetic construct
  misc_feature 1..20: note = chemically synthesized
  source 1..20: mol_type = other DNA
tcagaaaacaggcctctgcc

SEQ ID NO: 3937 - DNA, 20 bp, synthetic construct
  misc_feature 1..20: note = chemically synthesized
  source 1..20: mol_type = other DNA
cagaaaacaggcctctgccc

SEQ ID NO: 3938 - DNA, 20 bp, synthetic construct
  misc_feature 1..20: note = chemically synthesized
  source 1..20: mol_type = other DNA
agaaaacaggcctctgcccg

SEQ ID NO: 3939 - DNA, 20 bp, synthetic construct
  misc_feature 1..20: note = chemically synthesized
  source 1..20: mol_type = other DNA
cctctgcccggggcatgctg

SEQ ID NO: 3940 - DNA, 20 bp, synthetic construct
  misc_feature 1..20: note = chemically synthesized
  source 1..20: mol_type = other DNA
atgctgcagctgcttctctg

SEQ ID NO: 3941 - DNA, 20 bp, synthetic construct
  misc_feature 1..20: note = chemically synthesized
  source 1..20: mol_type = other DNA
gctgcttctctgcagtgcct

SEQ ID NO: 3942 - DNA, 20 bp, synthetic construct
  misc_feature 1..20: note = chemically synthesized
  source 1..20: mol_type = other DNA
ctcagcaccttcccgcctcc

SEQ ID NO: 3943 - DNA, 20 bp, synthetic construct
  misc_feature 1..20: note = chemically synthesized
  source 1..20: mol_type = other DNA
tcagcaccttcccgcctccc

SEQ ID NO: 3944 - DNA, 20 bp, synthetic construct
  misc_feature 1..20: note = chemically synthesized
  source 1..20: mol_type = other DNA
cttcccgcctcccaggcaca

SEQ ID NO: 3945 - DNA, 20 bp, synthetic construct
  misc_feature 1..20: note = chemically synthesized
  source 1..20: mol_type = other DNA
cccgcctcccaggcacacag

SEQ ID NO: 3946 - DNA, 20 bp, synthetic construct
  misc_feature 1..20: note = chemically synthesized
  source 1..20: mol_type = other DNA
ctcccaggcacacagcagcc

SEQ ID NO: 3947 - DNA, 20 bp, synthetic construct
  misc_feature 1..20: note = chemically synthesized
  source 1..20: mol_type = other DNA
ggcacacagcagcccagcct

SEQ ID NO: 3948 - DNA, 20 bp, synthetic construct
  misc_feature 1..20: note = chemically synthesized
  source 1..20: mol_type = other DNA
agcctcagtcctcatctctc

SEQ ID NO: 3949 - DNA, 20 bp, synthetic construct
  misc_feature 1..20: note = chemically synthesized
  source 1..20: mol_type = other DNA
cagtcctcatctctctggca

SEQ ID NO: 3950 - DNA, 20 bp, synthetic construct
  misc_feature 1..20: note = chemically synthesized
  source 1..20: mol_type = other DNA
atctctctggcaaagtccca

SEQ ID NO: 3951 - DNA, 20 bp, synthetic construct
  misc_feature 1..20: note = chemically synthesized
  source 1..20: mol_type = other DNA
aagtcccacagaacaaaaca

SEQ ID NO: 3952 - DNA, 20 bp, synthetic construct
  misc_feature 1..20: note = chemically synthesized
  source 1..20: mol_type = other DNA
agtcccacagaacaaaacac

SEQ ID NO: 3953 - DNA, 20 bp, synthetic construct
  misc_feature 1..20: note = chemically synthesized
  source 1..20: mol_type = other DNA
acagaacaaaacacaggcct

SEQ ID NO: 3954 - DNA, 20 bp, synthetic construct
  misc_feature 1..20: note = chemically synthesized
  source 1..20: mol_type = other DNA
ttttttttttccctcctccc

SEQ ID NO: 3955 - DNA, 20 bp, synthetic construct
  misc_feature 1..20: note = chemically synthesized
  source 1..20: mol_type = other DNA
atttataccactgaccaatc

SEQ ID NO: 3956 - DNA, 20 bp, synthetic construct
  misc_feature 1..20: note = chemically synthesized
  source 1..20: mol_type = other DNA
ataccactgaccaatctgga

SEQ ID NO: 3957 - DNA, 20 bp, synthetic construct
  misc_feature 1..20: note = chemically synthesized
  source 1..20: mol_type = other DNA
accactgaccaatctggaaa

SEQ ID NO: 3958 - DNA, 20 bp, synthetic construct
  misc_feature 1..20: note = chemically synthesized
  source 1..20: mol_type = other DNA
caatctggaaagagttccct

SEQ ID NO: 3959 - DNA, 20 bp, synthetic construct
  misc_feature 1..20: note = chemically synthesized
  source 1..20: mol_type = other DNA
aaagagttccctgagcaaat

SEQ ID NO: 3960 - DNA, 20 bp, synthetic construct
  misc_feature 1..20: note = chemically synthesized
  source 1..20: mol_type = other DNA
agagttccctgagcaaattg

SEQ ID NO: 3961 - DNA, 20 bp, synthetic construct
  misc_feature 1..20: note = chemically synthesized
  source 1..20: mol_type = other DNA
gagcaaattggagatgcccg

SEQ ID NO: 3962 - DNA, 20 bp, synthetic construct
  misc_feature 1..20: note = chemically synthesized
  source 1..20: mol_type = other DNA
cagatacaacctgccatcat

SEQ ID NO: 3963 - DNA, 20 bp, synthetic construct
  misc_feature 1..20: note = chemically synthesized
  source 1..20: mol_type = other DNA
gatacaacctgccatcattg

SEQ ID NO: 3964 - DNA, 20 bp, synthetic construct
  misc_feature 1..20: note = chemically synthesized
  source 1..20: mol_type = other DNA
acaacctgccatcattggag

SEQ ID NO: 3965 - DNA, 20 bp, synthetic construct
  misc_feature 1..20: note = chemically synthesized
  source 1..20: mol_type = other DNA
tgccatcattggagcagcct

SEQ ID NO: 3966 - DNA, 20 bp, synthetic construct
  misc_feature 1..20: note = chemically synthesized
  source 1..20: mol_type = other DNA
tcattggagcagcctcagtc

SEQ ID NO: 3967 - DNA, 20 bp, synthetic construct
  misc_feature 1..20: note = chemically synthesized
  source 1..20: mol_type = other DNA
gagcagcctcagtccagcca

SEQ ID NO: 3968 - DNA, 20 bp, synthetic construct
  misc_feature 1..20: note = chemically synthesized
  source 1..20: mol_type = other DNA
agcagcctcagtccagccat

SEQ ID NO: 3969 - DNA, 20 bp, synthetic construct
  misc_feature 1..20: note = chemically synthesized
  source 1..20: mol_type = other DNA
gcagcctcagtccagccatg

SEQ ID NO: 3970 - DNA, 20 bp, synthetic construct
  misc_feature 1..20: note = chemically synthesized
  source 1..20: mol_type = other DNA
ctcagtccagccatggggtg

SEQ ID NO: 3971 - DNA, 20 bp, synthetic construct
  misc_feature 1..20: note = chemically synthesized
  source 1..20: mol_type = other DNA
gtggcactgccgtctgttct

SEQ ID NO: 3972 - DNA, 20 bp, synthetic construct
  misc_feature 1..20: note = chemically synthesized
  source 1..20: mol_type = other DNA
taattctgctgattccatat

SEQ ID NO: 3973 - DNA, 20 bp, synthetic construct
  misc_feature 1..20: note = chemically synthesized
  source 1..20: mol_type = other DNA
tgagtaacatccaatgttcc

SEQ ID NO: 3974 - DNA, 20 bp, synthetic construct
  misc_feature 1..20: note = chemically synthesized
  source 1..20: mol_type = other DNA
caatgttcccagacacctcc

SEQ ID NO: 3975 - DNA, 20 bp, synthetic construct
  misc_feature 1..20: note = chemically synthesized
  source 1..20: mol_type = other DNA
ctccaagctcctccaaccaa

SEQ ID NO: 3976 - DNA, 20 bp, synthetic construct
  misc_feature 1..20: note = chemically synthesized
  source 1..20: mol_type = other DNA
tcaactcctttctacccacc

SEQ ID NO: 3977 - DNA, 20 bp, synthetic construct
  misc_feature 1..20: note = chemically synthesized
  source 1..20: mol_type = other DNA
actcctttctacccacctag

SEQ ID NO: 3978 - DNA, 20 bp, synthetic construct
  misc_feature 1..20: note = chemically synthesized
  source 1..20: mol_type = other DNA
ctcctttctacccacctagc

SEQ ID NO: 3979 - DNA, 20 bp, synthetic construct
  misc_feature 1..20: note = chemically synthesized
  source 1..20: mol_type = other DNA
acccacctagcaggtccacg

SEQ ID NO: 3980 - DNA, 20 bp, synthetic construct
  misc_feature 1..20: note = chemically synthesized
  source 1..20: mol_type = other DNA
cccacctagcaggtccacgt

SEQ ID NO: 3981 - DNA, 20 bp, synthetic construct
  misc_feature 1..20: note = chemically synthesized
  source 1..20: mol_type = other DNA
ccacctagcaggtccacgtg

SEQ ID NO: 3982 - DNA, 20 bp, synthetic construct
  misc_feature 1..20: note = chemically synthesized
  source 1..20: mol_type = other DNA
agcaggtccacgtggggact

SEQ ID NO: 3983 - DNA, 20 bp, synthetic construct
  misc_feature 1..20: note = chemically synthesized
  source 1..20: mol_type = other DNA
ccacgtggggactcagccta

SEQ ID NO: 3984 - DNA, 20 bp, synthetic construct
  misc_feature 1..20: note = chemically synthesized
  source 1..20: mol_type = other DNA
ggactcagcctatggacacc

SEQ ID NO: 3985 - DNA, 20 bp, synthetic construct
  misc_feature 1..20: note = chemically synthesized
  source 1..20: mol_type = other DNA
ctatggacacctggcctctg

SEQ ID NO: 3986 - DNA, 20 bp, synthetic construct
  misc_feature 1..20: note = chemically synthesized
  source 1..20: mol_type = other DNA
tatggacacctggcctctgc

SEQ ID NO: 3987 - DNA, 20 bp, synthetic construct
  misc_feature 1..20: note = chemically synthesized
  source 1..20: mol_type = other DNA
acacctggcctctgcgggca

SEQ ID NO: 3988 - DNA, 20 bp, synthetic construct
  misc_feature 1..20: note = chemically synthesized
  source 1..20: mol_type = other DNA
cctggcctctgcgggcacag

SEQ ID NO: 3989 - DNA, 20 bp, synthetic construct
  misc_feature 1..20: note = chemically synthesized
  source 1..20: mol_type = other DNA
ggcacagcggccacacacca

SEQ ID NO: 3990 - DNA, 20 bp, synthetic construct
  misc_feature 1..20: note = chemically synthesized
  source 1..20: mol_type = other DNA
acagcggccacacaccacgg

SEQ ID NO: 3991 - DNA, 20 bp, synthetic construct
  misc_feature 1..20: note = chemically synthesized
  source 1..20: mol_type = other DNA
cagcggccacacaccacggt

SEQ ID NO: 3992 - DNA, 20 bp, synthetic construct
  misc_feature 1..20: note = chemically synthesized
  source 1..20: mol_type = other DNA
ccacacaccacggtgggacc

SEQ ID NO: 3993 - DNA, 20 bp, synthetic construct
  misc_feature 1..20: note = chemically synthesized
  source 1..20: mol_type = other DNA
acacaccacggtgggacccg

SEQ ID NO: 3994 - DNA, 20 bp, synthetic construct
  misc_feature 1..20: note = chemically synthesized
  source 1..20: mol_type = other DNA
cggagaccattttttgtttt

SEQ ID NO: 3995 - DNA, 20 bp, synthetic construct
  misc_feature 1..20: note = chemically synthesized
  source 1..20: mol_type = other DNA
tttttgttttgagtctctct

SEQ ID NO: 3996 - DNA, 20 bp, synthetic construct
  misc_feature 1..20: note = chemically synthesized
  source 1..20: mol_type = other DNA
tgagtctctctaagactgct

SEQ ID NO: 3997 - DNA, 20 bp, synthetic construct
  misc_feature 1..20: note = chemically synthesized
  source 1..20: mol_type = other DNA
gagtctctctaagactgctt

SEQ ID NO: 3998 - DNA, 20 bp, synthetic construct
  misc_feature 1..20: note = chemically synthesized
  source 1..20: mol_type = other DNA
tctaagactgcttgggaaat

SEQ ID NO: 3999 - DNA, 20 bp, synthetic construct
  misc_feature 1..20: note = chemically synthesized
  source 1..20: mol_type = other DNA
ctaagactgcttgggaaatg

SEQ ID NO: 4000 - DNA, 20 bp, synthetic construct
  misc_feature 1..20: note = chemically synthesized
  source 1..20: mol_type = other DNA
gcttgggaaatgaggtctct

SEQ ID NO: 4001 - DNA, 20 bp, synthetic construct
  misc_feature 1..20: note = chemically synthesized
  source 1..20: mol_type = other DNA
cttgggaaatgaggtctctc

SEQ ID NO: 4002 - DNA, 20 bp, synthetic construct
  misc_feature 1..20: note = chemically synthesized
  source 1..20: mol_type = other DNA
gaaatgaggtctctcaggtc

SEQ ID NO: 4003 - DNA, 20 bp, synthetic construct
  misc_feature 1..20: note = chemically synthesized
  source 1..20: mol_type = other DNA
tcaggtctagcatttccacg

SEQ ID NO: 4004 - DNA, 20 bp, synthetic construct
  misc_feature 1..20: note = chemically synthesized
  source 1..20: mol_type = other DNA
ttccacgcagtcccaaccat

SEQ ID NO: 4005 - DNA, 20 bp, synthetic construct
  misc_feature 1..20: note = chemically synthesized
  source 1..20: mol_type = other DNA
tccacgcagtcccaaccatg

SEQ ID NO: 4006 - DNA, 20 bp, synthetic construct
  misc_feature 1..20: note = chemically synthesized
  source 1..20: mol_type = other DNA
gtcccaaccatgaggctgac

SEQ ID NO: 4007 - DNA, 20 bp, synthetic construct
  misc_feature 1..20: note = chemically synthesized
  source 1..20: mol_type = other DNA
cccaaccatgaggctgacca

SEQ ID NO: 4008 - DNA, 20 bp, synthetic construct
  misc_feature 1..20: note = chemically synthesized
  source 1..20: mol_type = other DNA
ccaaccatgaggctgaccag

SEQ ID NO: 4009 - DNA, 20 bp, synthetic construct
  misc_feature 1..20: note = chemically synthesized
  source 1..20: mol_type = other DNA
gaccagaggccaccaacgtc

SEQ ID NO: 4010 - DNA, 20 bp, synthetic construct
  misc_feature 1..20: note = chemically synthesized
  source 1..20: mol_type = other DNA
ccaccaacgtcaagctctct

SEQ ID NO: 4011 - DNA, 20 bp, synthetic construct
  misc_feature 1..20: note = chemically synthesized
  source 1..20: mol_type = other DNA
caccaacgtcaagctctctc

SEQ ID NO: 4012 - DNA, 20 bp, synthetic construct
  misc_feature 1..20: note = chemically synthesized
  source 1..20: mol_type = other DNA
tcaagctctctcaggtctac

SEQ ID NO: 4013 - DNA, 20 bp, synthetic construct
  misc_feature 1..20: note = chemically synthesized
  source 1..20: mol_type = other DNA
caagctctctcaggtctact

SEQ ID NO: 4014 - DNA, 20 bp, synthetic construct
  misc_feature 1..20: note = chemically synthesized
  source 1..20: mol_type = other DNA
tctctcaggtctactaggaa

SEQ ID NO: 4015 - DNA, 20 bp, synthetic construct
  misc_feature 1..20: note = chemically synthesized
  source 1..20: mol_type = other DNA
ctctcaggtctactaggaac

SEQ ID NO: 4016 - DNA, 20 bp, synthetic construct
  misc_feature 1..20: note = chemically synthesized
  source 1..20: mol_type = other DNA
caggtctactaggaacagga

SEQ ID NO: 4017 - DNA, 20 bp, synthetic construct
  misc_feature 1..20: note = chemically synthesized
  source 1..20: mol_type = other DNA
aagaataactctcccttaac

SEQ ID NO: 4018 - DNA, 20 bp, synthetic construct
  misc_feature 1..20: note = chemically synthesized
  source 1..20: mol_type = other DNA
ctctcccttaacaagcccct

SEQ ID NO: 4019 - DNA, 20 bp, synthetic construct
  misc_feature 1..20: note = chemically synthesized
  source 1..20: mol_type = other DNA
tctcccttaacaagcccctc

SEQ ID NO: 4020 - DNA, 20 bp, synthetic construct
  misc_feature 1..20: note = chemically synthesized
  source 1..20: mol_type = other DNA
ggctgaaatccttttgcttc

SEQ ID NO: 4021 - DNA, 20 bp, synthetic construct
  misc_feature 1..20: note = chemically synthesized
  source 1..20: mol_type = other DNA
gctgaaatccttttgcttcc

SEQ ID NO: 4022 - DNA, 20 bp, synthetic construct
  misc_feature 1..20: note = chemically synthesized
  source 1..20: mol_type = other DNA
ctgaaatccttttgcttcca

SEQ ID NO: 4023 - DNA, 20 bp, synthetic construct
  misc_feature 1..20: note = chemically synthesized
  source 1..20: mol_type = other DNA
gggcctcaaccttctactgc

SEQ ID NO: 4024 - DNA, 20 bp, synthetic construct
  misc_feature 1..20: note = chemically synthesized
  source 1..20: mol_type = other DNA
ggcctcaaccttctactgct

SEQ ID NO: 4025 - DNA, 20 bp, synthetic construct
  misc_feature 1..20: note = chemically synthesized
  source 1..20: mol_type = other DNA
ctcaaccttctactgctggg

SEQ ID NO: 4026 - DNA, 20 bp, synthetic construct
  misc_feature 1..20: note = chemically synthesized
  source 1..20: mol_type = other DNA
accttctactgctgggtaga

SEQ ID NO: 4027 - DNA, 20 bp, synthetic construct
  misc_feature 1..20: note = chemically synthesized
  source 1..20: mol_type = other DNA
tagaaagccccctctgtcac

SEQ ID NO: 4028 - DNA, 20 bp, synthetic construct
  misc_feature 1..20: note = chemically synthesized
  source 1..20: mol_type = other DNA
ccccctctgtcaccggccca

SEQ ID NO: 4029 - DNA, 20 bp, synthetic construct
  misc_feature 1..20: note = chemically synthesized
  source 1..20: mol_type = other DNA
tgtcaccggcccacagatct

SEQ ID NO: 4030 - DNA, 20 bp, synthetic construct
  misc_feature 1..20: note = chemically synthesized
  source 1..20: mol_type = other DNA
ccatcgcactcaaaccctgt

SEQ ID NO: 4031 - DNA, 20 bp, synthetic construct
  misc_feature 1..20: note = chemically synthesized
  source 1..20: mol_type = other DNA
catcgcactcaaaccctgtc

SEQ ID NO: 4032 - DNA, 20 bp, synthetic construct
  misc_feature 1..20: note = chemically synthesized
  source 1..20: mol_type = other DNA
cgcactcaaaccctgtcagg

SEQ ID NO: 4033 - DNA, 20 bp, synthetic construct
  misc_feature 1..20: note = chemically synthesized
  source 1..20: mol_type = other DNA
actcaaaccctgtcaggcgg

SEQ ID NO: 4034 - DNA, 20 bp, synthetic construct
  misc_feature 1..20: note = chemically synthesized
  source 1..20: mol_type = other DNA
tcaaaccctgtcaggcggtg

SEQ ID NO: 4035 - DNA, 20 bp, synthetic construct
  misc_feature 1..20: note = chemically synthesized
  source 1..20: mol_type = other DNA
aaaccctgtcaggcggtgga

SEQ ID NO: 4036 - DNA, 20 bp, synthetic construct
  misc_feature 1..20: note = chemically synthesized
  source 1..20: mol_type = other DNA
ctgtcaggcggtggagagtg

SEQ ID NO: 4037 - DNA, 20 bp, synthetic construct
  misc_feature 1..20: note = chemically synthesized
  source 1..20: mol_type = other DNA
caggcggtggagagtgtgga

SEQ ID NO: 4038 - DNA, 20 bp, synthetic construct
  misc_feature 1..20: note = chemically synthesized
  source 1..20: mol_type = other DNA
gcggtggagagtgtggacgg

SEQ ID NO: 4039 - DNA, 20 bp, synthetic construct
  misc_feature 1..20: note = chemically synthesized
  source 1..20: mol_type = other DNA
cggtggagagtgtggacggc

SEQ ID NO: 4040 - DNA, 20 bp, synthetic construct
  misc_feature 1..20: note = chemically synthesized
  source 1..20: mol_type = other DNA
gtgtggacggcaggctgacg

SEQ ID NO: 4041 - DNA, 20 bp, synthetic construct
  misc_feature 1..20: note = chemically synthesized
  source 1..20: mol_type = other DNA
ggcaggctgacgcggtttca

SEQ ID NO: 4042 - DNA, 20 bp, synthetic construct
  misc_feature 1..20: note = chemically synthesized
  source 1..20: mol_type = other DNA
caggctgacgcggtttcaaa

SEQ ID NO: 4043 - DNA, 20 bp, synthetic construct
  misc_feature 1..20: note = chemically synthesized
  source 1..20: mol_type = other DNA
aggctgacgcggtttcaaag

SEQ ID NO: 4044 - DNA, 20 bp, synthetic construct
  misc_feature 1..20: note = chemically synthesized
  source 1..20: mol_type = other DNA
gcggtttcaaagaggccgac

SEQ ID NO: 4045 - DNA, 20 bp, synthetic construct
  misc_feature 1..20: note = chemically synthesized
  source 1..20: mol_type = other DNA
cggtttcaaagaggccgacc

SEQ ID NO: 4046 - DNA, 20 bp, synthetic construct
  misc_feature 1..20: note = chemically synthesized
  source 1..20: mol_type = other DNA
ttcaaagaggccgaccaggc

SEQ ID NO: 4047 - DNA, 20 bp, synthetic construct
  misc_feature 1..20: note = chemically synthesized
  source 1..20: mol_type = other DNA
accgtcctgtactcctgccc

SEQ ID NO: 4048 - DNA, 20 bp, synthetic construct
  misc_feature 1..20: note = chemically synthesized
  source 1..20: mol_type = other DNA
gtcttttatcaatgtaattc

SEQ ID NO: 4049 - DNA, 20 bp, synthetic construct
  misc_feature 1..20: note = chemically synthesized
  source 1..20: mol_type = other DNA
tcttttatcaatgtaattca

SEQ ID NO: 4050 - DNA, 20 bp, synthetic construct
  misc_feature 1..20: note = chemically synthesized
  source 1..20: mol_type = other DNA
tatcaatgtaattcaaggca

SEQ ID NO: 4051 - DNA, 20 bp, synthetic construct
  misc_feature 1..20: note = chemically synthesized
  source 1..20: mol_type = other DNA
tcaatgtaattcaaggcaaa

SEQ ID NO: 4052 - DNA, 20 bp, synthetic construct
  misc_feature 1..20: note = chemically synthesized
  source 1..20: mol_type = other DNA
gtaattcaaggcaaagagtc

SEQ ID NO: 4053 - DNA, 20 bp, synthetic construct
  misc_feature 1..20: note = chemically synthesized
  source 1..20: mol_type = other DNA
taattcaaggcaaagagtca

SEQ ID NO: 4054 - DNA, 20 bp, synthetic construct
  misc_feature 1..20: note = chemically synthesized
  source 1..20: mol_type = other DNA
aattcaaggcaaagagtcaa

SEQ ID NO: 4055 - DNA, 20 bp, synthetic construct
  misc_feature 1..20: note = chemically synthesized
  source 1..20: mol_type = other DNA
aagggtctgtcaccatttta

SEQ ID NO: 4056 - DNA, 20 bp, synthetic construct
  misc_feature 1..20: note = chemically synthesized
  source 1..20: mol_type = other DNA
gggtctgtcaccattttaaa

SEQ ID NO: 4057 - DNA, 20 bp, synthetic construct
  misc_feature 1..20: note = chemically synthesized
  source 1..20: mol_type = other DNA
ggtctgtcaccattttaaag

SEQ ID NO: 4058 - DNA, 20 bp, synthetic construct
  misc_feature 1..20: note = chemically synthesized
  source 1..20: mol_type = other DNA
ttttaaagaggcttattaca

SEQ ID NO: 4059 - DNA, 20 bp, synthetic construct
  misc_feature 1..20: note = chemically synthesized
  source 1..20: mol_type = other DNA
atggccacaaaaatttgcct

SEQ ID NO: 4060 - DNA, 20 bp, synthetic construct
  misc_feature 1..20: note = chemically synthesized
  source 1..20: mol_type = other DNA
tggccacaaaaatttgcctc

SEQ ID NO: 4061 - DNA, 20 bp, synthetic construct
  misc_feature 1..20: note = chemically synthesized
  source 1..20: mol_type = other DNA
atttgcctcaggctcaaacc

SEQ ID NO: 4062 - DNA, 20 bp, synthetic construct
  misc_feature 1..20: note = chemically synthesized
  source 1..20: mol_type = other DNA
caggctcaaacctggcatgt

SEQ ID NO: 4063 - DNA, 20 bp, synthetic construct
  misc_feature 1..20: note = chemically synthesized
  source 1..20: mol_type = other DNA
aggctcaaacctggcatgta

SEQ ID NO: 4064 - DNA, 20 bp, synthetic construct
  misc_feature 1..20: note = chemically synthesized
  source 1..20: mol_type = other DNA
aaacctggcatgtaaggtat

SEQ ID NO: 4065 - DNA, 20 bp, synthetic construct
  misc_feature 1..20: note = chemically synthesized
  source 1..20: mol_type = other DNA
tggcatgtaaggtatcagcg

SEQ ID NO: 4066 - DNA, 20 bp, synthetic construct
  misc_feature 1..20: note = chemically synthesized
  source 1..20: mol_type = other DNA
ggcatgtaaggtatcagcgt

SEQ ID NO: 4067 - DNA, 20 bp, synthetic construct
  misc_feature 1..20: note = chemically synthesized
  source 1..20: mol_type = other DNA
tgtaaggtatcagcgtggga

SEQ ID NO: 4068 - DNA, 20 bp, synthetic construct
  misc_feature 1..20: note = chemically synthesized
  source 1..20: mol_type = other DNA
gtaaggtatcagcgtgggac

SEQ ID NO: 4069 - DNA, 20 bp, synthetic construct
  misc_feature 1..20: note = chemically synthesized
  source 1..20: mol_type = other DNA
accaaccgttttttgattta

SEQ ID NO: 4070 - DNA, 20 bp, synthetic construct
  misc_feature 1..20: note = chemically synthesized
  source 1..20: mol_type = other DNA
ccaaccgttttttgatttat

SEQ ID NO: 4071 - DNA, 20 bp, synthetic construct
  misc_feature 1..20: note = chemically synthesized
  source 1..20: mol_type = other DNA
caaccgttttttgatttatg

SEQ ID NO: 4072 - DNA, 20 bp, synthetic construct
  misc_feature 1..20: note = chemically synthesized
  source 1..20: mol_type = other DNA
accgttttttgatttatggg

SEQ ID NO: 4073 - DNA, 20 bp, synthetic construct
  misc_feature 1..20: note = chemically synthesized
  source 1..20: mol_type = other DNA
ccgttttttgatttatgggg

SEQ ID NO: 4074 - DNA, 20 bp, synthetic construct
  misc_feature 1..20: note = chemically synthesized
  source 1..20: mol_type = other DNA
gttttttgatttatggggag

SEQ ID NO: 4075 - DNA, 20 bp, synthetic construct
  misc_feature 1..20: note = chemically synthesized
  source 1..20: mol_type = other DNA
ttttttgatttatggggagg

SEQ ID NO: 4076 - DNA, 20 bp, synthetic construct
  misc_feature 1..20: note = chemically synthesized
  source 1..20: mol_type = other DNA
ttgatttatggggaggagga

SEQ ID NO: 4077 - DNA, 20 bp, synthetic construct
  misc_feature 1..20: note = chemically synthesized
  source 1..20: mol_type = other DNA
gggaggaggaaagaaatctg

SEQ ID NO: 4078 - DNA, 20 bp, synthetic construct
  misc_feature 1..20: note = chemically synthesized
  source 1..20: mol_type = other DNA
ggaaagaaatctgaagttga

SEQ ID NO: 4079 - DNA, 20 bp, synthetic construct
  misc_feature 1..20: note = chemically synthesized
  source 1..20: mol_type = other DNA
gaaagaaatctgaagttgac

SEQ ID NO: 4080 - DNA, 20 bp, synthetic construct
  misc_feature 1..20: note = chemically synthesized
  source 1..20: mol_type = other DNA
gaaatctgaagttgacaggt

SEQ ID NO: 4081 - DNA, 20 bp, synthetic construct
  misc_feature 1..20: note = chemically synthesized
  source 1..20: mol_type = other DNA
aaatctgaagttgacaggtt

SEQ ID NO: 4082 - DNA, 20 bp, synthetic construct
  misc_feature 1..20: note = chemically synthesized
  source 1..20: mol_type = other DNA
caggttgggacaactccact

SEQ ID NO: 4083 - DNA, 20 bp, synthetic construct
  misc_feature 1..20: note = chemically synthesized
  source 1..20: mol_type = other DNA
cactcagctttctcactcaa

SEQ ID NO: 4084 - DNA, 20 bp, synthetic construct
  misc_feature 1..20: note = chemically synthesized
  source 1..20: mol_type = other DNA
taaatcatactttgcattta

SEQ ID NO: 4085 - DNA, 20 bp, synthetic construct
  misc_feature 1..20: note = chemically synthesized
  source 1..20: mol_type = other DNA
tactttgcatttatggcctg

SEQ ID NO: 4086 - DNA, 20 bp, synthetic construct
  misc_feature 1..20: note = chemically synthesized
  source 1..20: mol_type = other DNA
catttatggcctgcggctct

SEQ ID NO: 4087 - DNA, 20 bp, synthetic construct
  misc_feature 1..20: note = chemically synthesized
  source 1..20: mol_type = other DNA
ctgcggctcttggctgactt

SEQ ID NO: 4088 - DNA, 20 bp, synthetic construct
  misc_feature 1..20: note = chemically synthesized
  source 1..20: mol_type = other DNA
cggctcttggctgactttgg

SEQ ID NO: 4089 - DNA, 20 bp, synthetic construct
  misc_feature 1..20: note = chemically synthesized
  source 1..20: mol_type = other DNA
gctgactttggcggctcctc

SEQ ID NO: 4090 - DNA, 20 bp, synthetic construct
  misc_feature 1..20: note = chemically synthesized
  source 1..20: mol_type = other DNA
ctttggcggctcctccggtg

SEQ ID NO: 4091 - DNA, 20 bp, synthetic construct
  misc_feature 1..20: note = chemically synthesized
  source 1..20: mol_type = other DNA
ttggcggctcctccggtgtg

SEQ ID NO: 4092 - DNA, 20 bp, synthetic construct
  misc_feature 1..20: note = chemically synthesized
  source 1..20: mol_type = other DNA
cggctcctccggtgtggagc

SEQ ID NO: 4093 - DNA, 20 bp, synthetic construct
  misc_feature 1..20: note = chemically synthesized
  source 1..20: mol_type = other DNA
ctccggtgtggagcaagctg

SEQ ID NO: 4094 - DNA, 20 bp, synthetic construct
  misc_feature 1..20: note = chemically synthesized
  source 1..20: mol_type = other DNA
gagcaagctgtggacttccc

SEQ ID NO: 4095 - DNA, 20 bp, synthetic construct
  misc_feature 1..20: note = chemically synthesized
  source 1..20: mol_type = other DNA
agcaagctgtggacttcccc

SEQ ID NO: 4096 - DNA, 20 bp, synthetic construct
  misc_feature 1..20: note = chemically synthesized
  source 1..20: mol_type = other DNA
caagctgtggacttccccgg

SEQ ID NO: 4097 - DNA, 20 bp, synthetic construct
  misc_feature 1..20: note = chemically synthesized
  source 1..20: mol_type = other DNA
aagctgtggacttccccggg

SEQ ID NO: 4098 - DNA, 20 bp, synthetic construct
  misc_feature 1..20: note = chemically synthesized
  source 1..20: mol_type = other DNA
gctgtggacttccccgggag

SEQ ID NO: 4099 - DNA, 20 bp, synthetic construct
  misc_feature 1..20: note = chemically synthesized
  source 1..20: mol_type = other DNA
ctgtggacttccccgggagg

SEQ ID NO: 4100 - DNA, 20 bp, synthetic construct
  misc_feature 1..20: note = chemically synthesized
  source 1..20: mol_type = other DNA
ccccgggaggaggccccact

SEQ ID NO: 4101 - DNA, 20 bp, synthetic construct
  misc_feature 1..20: note = chemically synthesized
  source 1..20: mol_type = other DNA
tgactgccccactctgcacc

SEQ ID NO: 4102 - DNA, 20 bp, synthetic construct
  misc_feature 1..20: note = chemically synthesized
  source 1..20: mol_type = other DNA
gactgccccactctgcacca

SEQ ID NO: 4103 - DNA, 20 bp, synthetic construct
  misc_feature 1..20: note = chemically synthesized
  source 1..20: mol_type = other DNA
gccccactctgcaccaagga

SEQ ID NO: 4104 - DNA, 20 bp, synthetic construct
  misc_feature 1..20: note = chemically synthesized
  source 1..20: mol_type = other DNA
cactctgcaccaaggacagc

SEQ ID NO: 4105 - DNA, 20 bp, synthetic construct
  misc_feature 1..20: note = chemically synthesized
  source 1..20: mol_type = other DNA
actctgcaccaaggacagcg

SEQ ID NO: 4106 - DNA, 20 bp, synthetic construct
  misc_feature 1..20: note = chemically synthesized
  source 1..20: mol_type = other DNA
tctgcaccaaggacagcgag

SEQ ID NO: 4107 - DNA, 20 bp, synthetic construct
  misc_feature 1..20: note = chemically synthesized
  source 1..20: mol_type = other DNA
ctgcaccaaggacagcgagg

SEQ ID NO: 4108 - DNA, 20 bp, synthetic construct
  misc_feature 1..20: note = chemically synthesized
  source 1..20: mol_type = other DNA
tgcaccaaggacagcgagga

SEQ ID NO: 4109 - DNA, 20 bp, synthetic construct
  misc_feature 1..20: note = chemically synthesized
  source 1..20: mol_type = other DNA
gcaccaaggacagcgaggag

SEQ ID NO: 4110 - DNA, 20 bp, synthetic construct
  misc_feature 1..20: note = chemically synthesized
  source 1..20: mol_type = other DNA
caccaaggacagcgaggagg

SEQ ID NO: 4111 - DNA, 20 bp, synthetic construct
  misc_feature 1..20: note = chemically synthesized
  source 1..20: mol_type = other DNA
accaaggacagcgaggaggg

SEQ ID NO: 4112 - DNA, 20 bp, synthetic construct
  misc_feature 1..20: note = chemically synthesized
  source 1..20: mol_type = other DNA
aaggacagcgaggagggggg

SEQ ID NO: 4113 - DNA, 20 bp, synthetic construct
  misc_feature 1..20: note = chemically synthesized
  source 1..20: mol_type = other DNA
aggacagcgaggagggggga

SEQ ID NO: 4114 - DNA, 20 bp, synthetic construct
  misc_feature 1..20: note = chemically synthesized
  source 1..20: mol_type = other DNA
acagcgaggaggggggaagg

SEQ ID NO: 4115 - DNA, 20 bp, synthetic construct
  misc_feature 1..20: note = chemically synthesized
  source 1..20: mol_type = other DNA
cagcgaggaggggggaaggt

SEQ ID NO: 4116 - DNA, 20 bp, synthetic construct
  misc_feature 1..20: note = chemically synthesized
  source 1..20: mol_type = other DNA
agcgaggaggggggaaggtg

SEQ ID NO: 4117 - DNA, 20 bp, synthetic construct
  misc_feature 1..20: note = chemically synthesized
  source 1..20: mol_type = other DNA
gcgaggaggggggaaggtgg

SEQ ID NO: 4118 - DNA, 20 bp, synthetic construct
  misc_feature 1..20: note = chemically synthesized
  source 1..20: mol_type = other DNA
aggaggggggaaggtggggg

SEQ ID NO: 4119 - DNA, 20 bp, synthetic construct
  misc_feature 1..20: note = chemically synthesized
  source 1..20: mol_type = other DNA
gaggggggaaggtgggggtg

SEQ ID NO: 4120 - DNA, 20 bp, synthetic construct
  misc_feature 1..20: note = chemically synthesized
  source 1..20: mol_type = other DNA
aggggggaaggtgggggtgg

SEQ ID NO: 4121 - DNA, 20 bp, synthetic construct
  misc_feature 1..20: note = chemically synthesized
  source 1..20: mol_type = other DNA
gggggaaggtgggggtggag

SEQ ID NO: 4122 - DNA, 20 bp, synthetic construct
  misc_feature 1..20: note = chemically synthesized
  source 1..20: mol_type = other DNA
gaaggtgggggtggaggagc

SEQ ID NO: 4123 - DNA, 20 bp, synthetic construct
  misc_feature 1..20: note = chemically synthesized
  source 1..20: mol_type = other DNA
aggtgggggtggaggagctg

SEQ ID NO: 4124 - DNA, 20 bp, synthetic construct
  misc_feature 1..20: note = chemically synthesized
  source 1..20: mol_type = other DNA
ggtgggggtggaggagctgg

SEQ ID NO: 4125 - DNA, 20 bp, synthetic construct
  misc_feature 1..20: note = chemically synthesized
  source 1..20: mol_type = other DNA
ggggtggaggagctggaggc

SEQ ID NO: 4126 - DNA, 20 bp, synthetic construct
  misc_feature 1..20: note = chemically synthesized
  source 1..20: mol_type = other DNA
gggtggaggagctggaggcc

SEQ ID NO: 4127 - DNA, 20 bp, synthetic construct
  misc_feature 1..20: note = chemically synthesized
  source 1..20: mol_type = other DNA
ggtggaggagctggaggcca

SEQ ID NO: 4128 - DNA, 20 bp, synthetic construct
  misc_feature 1..20: note = chemically synthesized
  source 1..20: mol_type = other DNA
gtggaggagctggaggccag

SEQ ID NO: 4129 - DNA, 20 bp, synthetic construct
  misc_feature 1..20: note = chemically synthesized
  source 1..20: mol_type = other DNA
tggaggagctggaggccagg

SEQ ID NO: 4130 - DNA, 20 bp, synthetic construct
  misc_feature 1..20: note = chemically synthesized
  source 1..20: mol_type = other DNA
ggagctggaggccagggggc

SEQ ID NO: 4131 - DNA, 20 bp, synthetic construct
  misc_feature 1..20: note = chemically synthesized
  source 1..20: mol_type = other DNA
gagctggaggccagggggct

SEQ ID NO: 4132 - DNA, 20 bp, synthetic construct
  misc_feature 1..20: note = chemically synthesized
  source 1..20: mol_type = other DNA
agctggaggccagggggctg

SEQ ID NO: 4133 - DNA, 20 bp, synthetic construct
  misc_feature 1..20: note = chemically synthesized
  source 1..20: mol_type = other DNA
gccagggggctggggacatg

SEQ ID NO: 4134 - DNA, 20 bp, synthetic construct
  misc_feature 1..20: note = chemically synthesized
  source 1..20: mol_type = other DNA
ccagggggctggggacatga

SEQ ID NO: 4135 - DNA, 20 bp, synthetic construct
  misc_feature 1..20: note = chemically synthesized
  source 1..20: mol_type = other DNA
ggctggggacatgaaggcac

SEQ ID NO: 4136 - DNA, 20 bp, synthetic construct
  misc_feature 1..20: note = chemically synthesized
  source 1..20: mol_type = other DNA
ggggacatgaaggcactggc

SEQ ID NO: 4137 - DNA, 20 bp, synthetic construct
  misc_feature 1..20: note = chemically synthesized
  source 1..20: mol_type = other DNA
gggacatgaaggcactggct

SEQ ID NO: 4138 - DNA, 20 bp, synthetic construct
  misc_feature 1..20: note = chemically synthesized
  source 1..20: mol_type = other DNA
ggcactggctaggtaacaca

SEQ ID NO: 4139 - DNA, 20 bp, synthetic construct
  misc_feature 1..20: note = chemically synthesized
  source 1..20: mol_type = other DNA
gcactggctaggtaacacaa

SEQ ID NO: 4140 - DNA, 20 bp, synthetic construct
  misc_feature 1..20: note = chemically synthesized
  source 1..20: mol_type = other DNA
aggtaacacaaaggcctgta

SEQ ID NO: 4141 - DNA, 20 bp, synthetic construct
  misc_feature 1..20: note = chemically synthesized
  source 1..20: mol_type = other DNA
ggtaacacaaaggcctgtaa

SEQ ID NO: 4142 - DNA, 20 bp, synthetic construct
  misc_feature 1..20: note = chemically synthesized
  source 1..20: mol_type = other DNA
atatgtctctcttctgaacc

SEQ ID NO: 4143 - DNA, 20 bp, synthetic construct
  misc_feature 1..20: note = chemically synthesized
  source 1..20: mol_type = other DNA
gctctccactccatttctcc

SEQ ID NO: 4144 - DNA, 20 bp, synthetic construct
  misc_feature 1..20: note = chemically synthesized
  source 1..20: mol_type = other DNA
actccatttctcctggatcc

SEQ ID NO: 4145 - DNA, 20 bp, synthetic construct
  misc_feature 1..20: note = chemically synthesized
  source 1..20: mol_type = other DNA
gatccaagtctccctgtaat

SEQ ID NO: 4146 - DNA, 20 bp, synthetic construct
  misc_feature 1..20: note = chemically synthesized
  source 1..20: mol_type = other DNA
aatcagcatgtatctaccac

SEQ ID NO: 4147 - DNA, 20 bp, synthetic construct
  misc_feature 1..20: note = chemically synthesized
  source 1..20: mol_type = other DNA
accactggttctccaactaa

SEQ ID NO: 4148 - DNA, 20 bp, synthetic construct
  misc_feature 1..20: note = chemically synthesized
  source 1..20: mol_type = other DNA
ggttctccaactaaaagttc

SEQ ID NO: 4149 - DNA, 20 bp, synthetic construct
  misc_feature 1..20: note = chemically synthesized
  source 1..20: mol_type = other DNA
gttctccaactaaaagttca

SEQ ID NO: 4150 - DNA, 20 bp, synthetic construct
  misc_feature 1..20: note = chemically synthesized
  source 1..20: mol_type = other DNA
actaaaagttcaaggcttct

SEQ ID NO: 4151 - DNA, 20 bp, synthetic construct
  misc_feature 1..20: note = chemically synthesized
  source 1..20: mol_type = other DNA
gttcaaggcttctaagaacc

SEQ ID NO: 4152 - DNA, 20 bp, synthetic construct
  misc_feature 1..20: note = chemically synthesized
  source 1..20: mol_type = other DNA
ggcttctaagaaccaagact

SEQ ID NO: 4153 - DNA, 20 bp, synthetic construct
  misc_feature 1..20: note = chemically synthesized
  source 1..20: mol_type = other DNA
ttctaagaaccaagactcag

SEQ ID NO: 4154 - DNA, 20 bp, synthetic construct
  misc_feature 1..20: note = chemically synthesized
  source 1..20: mol_type = other DNA
gtggtctacctctgactgtc

SEQ ID NO: 4155 - DNA, 20 bp, synthetic construct
  misc_feature 1..20: note = chemically synthesized
  source 1..20: mol_type = other DNA
ctgactgtccagcaccatgc

SEQ ID NO: 4156 - DNA, 20 bp, synthetic construct
  misc_feature 1..20: note = chemically synthesized
  source 1..20: mol_type = other DNA
tgactgtccagcaccatgct

SEQ ID NO: 4157 - DNA, 20 bp, synthetic construct
  misc_feature 1..20: note = chemically synthesized
  source 1..20: mol_type = other DNA
gtccagcaccatgctgggca

SEQ ID NO: 4158 - DNA, 20 bp, synthetic construct
  misc_feature 1..20: note = chemically synthesized
  source 1..20: mol_type = other DNA
cagcaccatgctgggcaaag

SEQ ID NO: 4159 - DNA, 20 bp, synthetic construct
  misc_feature 1..20: note = chemically synthesized
  source 1..20: mol_type = other DNA
gcaccatgctgggcaaagaa

SEQ ID NO: 4160 - DNA, 20 bp, synthetic construct
  misc_feature 1..20: note = chemically synthesized
  source 1..20: mol_type = other DNA
agagcccctcaataaataat

SEQ ID NO: 4161 - DNA, 20 bp, synthetic construct
  misc_feature 1..20: note = chemically synthesized
  source 1..20: mol_type = other DNA
gagcccctcaataaataatt

SEQ ID NO: 4162 - DNA, 20 bp, synthetic construct
  misc_feature 1..20: note = chemically synthesized
  source 1..20: mol_type = other DNA
tcaataaataattaggattc

SEQ ID NO: 4163 - DNA, 20 bp, synthetic construct
  misc_feature 1..20: note = chemically synthesized
  source 1..20: mol_type = other DNA
attaggattcaagcgctgtg

SEQ ID NO: 4164 - DNA, 20 bp, synthetic construct
  misc_feature 1..20: note = chemically synthesized
  source 1..20: mol_type = other DNA
cagtgaacttttcttcctgt

SEQ ID NO: 4165 - DNA, 20 bp, synthetic construct
  misc_feature 1..20: note = chemically synthesized
  source 1..20: mol_type = other DNA
gtgaacttttcttcctgttg

SEQ ID NO: 4166 - DNA, 20 bp, synthetic construct
  misc_feature 1..20: note = chemically synthesized
  source 1..20: mol_type = other DNA
gaacttttcttcctgttgga

SEQ ID NO: 4167 - DNA, 20 bp, synthetic construct
  misc_feature 1..20: note = chemically synthesized
  source 1..20: mol_type = other DNA
gagagccattctaaatgacc

SEQ ID NO: 4168 - DNA, 20 bp, synthetic construct
  misc_feature 1..20: note = chemically synthesized
  source 1..20: mol_type = other DNA
gccattctaaatgacctggc

SEQ ID NO: 4169 - DNA, 20 bp, synthetic construct
  misc_feature 1..20: note = chemically synthesized
  source 1..20: mol_type = other DNA
attctaaatgacctggctgg

SEQ ID NO: 4170 - DNA, 20 bp, synthetic construct
  misc_feature 1..20: note = chemically synthesized
  source 1..20: mol_type = other DNA
ttctaaatgacctggctgga

SEQ ID NO: 4171 - DNA, 20 bp, synthetic construct
  misc_feature 1..20: note = chemically synthesized
  source 1..20: mol_type = other DNA
aatgacctggctggaaggac

SEQ ID NO: 4172 - DNA, 20 bp, synthetic construct
  misc_feature 1..20: note = chemically synthesized
  source 1..20: mol_type = other DNA
atgacctggctggaaggacc

SEQ ID NO: 4173 - DNA, 20 bp, synthetic construct
  misc_feature 1..20: note = chemically synthesized
  source 1..20: mol_type = other DNA
tggctggaaggaccaggcca

SEQ ID NO: 4174 - DNA, 20 bp, synthetic construct
  misc_feature 1..20: note = chemically synthesized
  source 1..20: mol_type = other DNA
gctggaaggaccaggccatg

SEQ ID NO: 4175 - DNA, 20 bp, synthetic construct
  misc_feature 1..20: note = chemically synthesized
  source 1..20: mol_type = other DNA
gaaggaccaggccatggagc

SEQ ID NO: 4176 - DNA, 20 bp, synthetic construct
  misc_feature 1..20: note = chemically synthesized
  source 1..20: mol_type = other DNA
ggaccaggccatggagccag

SEQ ID NO: 4177 - DNA, 20 bp, synthetic construct
  misc_feature 1..20: note = chemically synthesized
  source 1..20: mol_type = other DNA
gccatggagccagcagtgac

SEQ ID NO: 4178 - DNA, 20 bp, synthetic construct
  misc_feature 1..20: note = chemically synthesized
  source 1..20: mol_type = other DNA
ccatggagccagcagtgacc

SEQ ID NO: 4179 - DNA, 20 bp, synthetic construct
  misc_feature 1..20: note = chemically synthesized
  source 1..20: mol_type = other DNA
catggagccagcagtgacca

SEQ ID NO: 4180 - DNA, 20 bp, synthetic construct
  misc_feature 1..20: note = chemically synthesized
  source 1..20: mol_type = other DNA
atggagccagcagtgaccag

SEQ ID NO: 4181 - DNA, 20 bp, synthetic construct
  misc_feature 1..20: note = chemically synthesized
  source 1..20: mol_type = other DNA
tgaccaggggaaaccttccc

SEQ ID NO: 4182 - DNA, 20 bp, synthetic construct
  misc_feature 1..20: note = chemically synthesized
  source 1..20: mol_type = other DNA
tagtaaatgattcactaacc

SEQ ID NO: 4183 - DNA, 20 bp, synthetic construct
  misc_feature 1..20: note = chemically synthesized
  source 1..20: mol_type = other DNA
agtaaatgattcactaacca

SEQ ID NO: 4184 - DNA, 20 bp, synthetic construct
  misc_feature 1..20: note = chemically synthesized
  source 1..20: mol_type = other DNA
taaatgattcactaaccaag

SEQ ID NO: 4185 - DNA, 20 bp, synthetic construct
  misc_feature 1..20: note = chemically synthesized
  source 1..20: mol_type = other DNA
ttcactaaccaaggagcctc

SEQ ID NO: 4186 - DNA, 20 bp, synthetic construct
  misc_feature 1..20: note = chemically synthesized
  source 1..20: mol_type = other DNA
tcactaaccaaggagcctct

SEQ ID NO: 4187 - DNA, 20 bp, synthetic construct
  misc_feature 1..20: note = chemically synthesized
  source 1..20: mol_type = other DNA
taaccaaggagcctctgggt

SEQ ID NO: 4188 - DNA, 20 bp, synthetic construct
  misc_feature 1..20: note = chemically synthesized
  source 1..20: mol_type = other DNA
cctctgggtcagccttgacc

SEQ ID NO: 4189 - DNA, 20 bp, synthetic construct
  misc_feature 1..20: note = chemically synthesized
  source 1..20: mol_type = other DNA
ctctgggtcagccttgaccc

SEQ ID NO: 4190 - DNA, 20 bp, synthetic construct
  misc_feature 1..20: note = chemically synthesized
  source 1..20: mol_type = other DNA
ctgggtcagccttgacccag

SEQ ID NO: 4191 - DNA, 20 bp, synthetic construct
  misc_feature 1..20: note = chemically synthesized
  source 1..20: mol_type = other DNA
gggtcagccttgacccagga

SEQ ID NO: 4192 - DNA, 20 bp, synthetic construct
  misc_feature 1..20: note = chemically synthesized
  source 1..20: mol_type = other DNA
ggtcagccttgacccaggag

SEQ ID NO: 4193 - DNA, 20 bp, synthetic construct
  misc_feature 1..20: note = chemically synthesized
  source 1..20: mol_type = other DNA
cttgacccaggagaggatta

SEQ ID NO: 4194 - DNA, 20 bp, synthetic construct
  misc_feature 1..20: note = chemically synthesized
  source 1..20: mol_type = other DNA
agaggattacagccccttga

SEQ ID NO: 4195 - DNA, 20 bp, synthetic construct
  misc_feature 1..20: note = chemically synthesized
  source 1..20: mol_type = other DNA
ggattacagccccttgaaag

SEQ ID NO: 4196 - DNA, 20 bp, synthetic construct
  misc_feature 1..20: note = chemically synthesized
  source 1..20: mol_type = other DNA
agccccttgaaagtggctgc

SEQ ID NO: 4197 - DNA, 20 bp, synthetic construct
  misc_feature 1..20: note = chemically synthesized
  source 1..20: mol_type = other DNA
atcgcttcactgtactattt

SEQ ID NO: 4198 - DNA, 20 bp, synthetic construct
  misc_feature 1..20: note = chemically synthesized
  source 1..20: mol_type = other DNA
actattttggcaatctgtaa

SEQ ID NO: 4199 - DNA, 20 bp, synthetic construct
  misc_feature 1..20: note = chemically synthesized
  source 1..20: mol_type = other DNA
gtaatagtgtatttactcaa

SEQ ID NO: 4200 - DNA, 20 bp, synthetic construct
  misc_feature 1..20: note = chemically synthesized
  source 1..20: mol_type = other DNA
tatttactcaatggttgtta

SEQ ID NO: 4201 - DNA, 20 bp, synthetic construct
  misc_feature 1..20: note = chemically synthesized
  source 1..20: mol_type = other DNA
caatggttgttatggacaat

SEQ ID NO: 4202 - DNA, 20 bp, synthetic construct
  misc_feature 1..20: note = chemically synthesized
  source 1..20: mol_type = other DNA
aatggttgttatggacaatc

SEQ ID NO: 4203 - DNA, 20 bp, synthetic construct
  misc_feature 1..20: note = chemically synthesized
  source 1..20: mol_type = other DNA
ccaaatgctgtgtaattaca

SEQ ID NO: 4204 - DNA, 20 bp, synthetic construct
  misc_feature 1..20: note = chemically synthesized
  source 1..20: mol_type = other DNA
ctgtgtaattacacagttaa

SEQ ID NO: 4205 - DNA, 20 bp, synthetic construct
  misc_feature 1..20: note = chemically synthesized
  source 1..20: mol_type = other DNA
gtgtaattacacagttaaaa

SEQ ID NO: 4206 - DNA, 20 bp, synthetic construct
  misc_feature 1..20: note = chemically synthesized
  source 1..20: mol_type = other DNA
ttacacagttaaaagagcta

SEQ ID NO: 4207 - DNA, 20 bp, synthetic construct
  misc_feature 1..20: note = chemically synthesized
  source 1..20: mol_type = other DNA
cacagttaaaagagctacag

SEQ ID NO: 4208 - DNA, 20 bp, synthetic construct
  misc_feature 1..20: note = chemically synthesized
  source 1..20: mol_type = other DNA
agcggatgtcaaatttcctt

SEQ ID NO: 4209 - DNA, 20 bp, synthetic construct
  misc_feature 1..20: note = chemically synthesized
  source 1..20: mol_type = other DNA
tcaaatttccttaagtcttc

SEQ ID NO: 4210 - DNA, 20 bp, synthetic construct
  misc_feature 1..20: note = chemically synthesized
  source 1..20: mol_type = other DNA
ccttaagtcttctggtgaat

SEQ ID NO: 4211 - DNA, 20 bp, synthetic construct
  misc_feature 1..20: note = chemically synthesized
  source 1..20: mol_type = other DNA
ggtgaattggtctcaattac

SEQ ID NO: 4212 - DNA, 20 bp, synthetic construct
  misc_feature 1..20: note = chemically synthesized
  source 1..20: mol_type = other DNA
attggtctcaattactagtc

SEQ ID NO: 4213 - DNA, 20 bp, synthetic construct
  misc_feature 1..20: note = chemically synthesized
  source 1..20: mol_type = other DNA
ttggtctcaattactagtct

SEQ ID NO: 4214 - DNA, 20 bp, synthetic construct
  misc_feature 1..20: note = chemically synthesized
  source 1..20: mol_type = other DNA
cttcctctctcaatttgttt

SEQ ID NO: 4215 - DNA, 20 bp, synthetic construct
  misc_feature 1..20: note = chemically synthesized
  source 1..20: mol_type = other DNA
tgcacccccatctctgtccc

SEQ ID NO: 4216 - DNA, 20 bp, synthetic construct
  misc_feature 1..20: note = chemically synthesized
  source 1..20: mol_type = other DNA
cacccccatctctgtcccaa

SEQ ID NO: 4217 - DNA, 20 bp, synthetic construct
  misc_feature 1..20: note = chemically synthesized
  source 1..20: mol_type = other DNA
cccatctctgtcccaagaga

SEQ ID NO: 4218 - DNA, 20 bp, synthetic construct
  misc_feature 1..20: note = chemically synthesized
  source 1..20: mol_type = other DNA
ctctgtcccaagagaaagaa

SEQ ID NO: 4219 - DNA, 20 bp, synthetic construct
  misc_feature 1..20: note = chemically synthesized
  source 1..20: mol_type = other DNA
ccaagagaaagaacagtgtg

SEQ ID NO: 4220 - DNA, 20 bp, synthetic construct
  misc_feature 1..20: note = chemically synthesized
  source 1..20: mol_type = other DNA
taatcctatttttgaactca

SEQ ID NO: 4221 - DNA, 20 bp, synthetic construct
  misc_feature 1..20: note = chemically synthesized
  source 1..20: mol_type = other DNA
tttgaactcatagttctaaa

SEQ ID NO: 4222 - DNA, 20 bp, synthetic construct
  misc_feature 1..20: note = chemically synthesized
  source 1..20: mol_type = other DNA
aatagtttttgctccactaa

SEQ ID NO: 4223 - DNA, 20 bp, synthetic construct
  misc_feature 1..20: note = chemically synthesized
  source 1..20: mol_type = other DNA
atagtttttgctccactaaa

SEQ ID NO: 4224 - DNA, 20 bp, synthetic construct
  misc_feature 1..20: note = chemically synthesized
  source 1..20: mol_type = other DNA
tagtttttgctccactaaaa

SEQ ID NO: 4225 - DNA, 20 bp, synthetic construct
  misc_feature 1..20: note = chemically synthesized
  source 1..20: mol_type = other DNA
cactaaaagggcttaaaaat

SEQ ID NO: 4226 - DNA, 20 bp, synthetic construct
  misc_feature 1..20: note = chemically synthesized
  source 1..20: mol_type = other DNA
actaaaagggcttaaaaata

SEQ ID NO: 4227 - DNA, 20 bp, synthetic construct
  misc_feature 1..20: note = chemically synthesized
  source 1..20: mol_type = other DNA
aaagggcttaaaaataaggc

SEQ ID NO: 4228 - DNA, 20 bp, synthetic construct
  misc_feature 1..20: note = chemically synthesized
  source 1..20: mol_type = other DNA
aagggcttaaaaataaggct

SEQ ID NO: 4229 - DNA, 20 bp, synthetic construct
  misc_feature 1..20: note = chemically synthesized
  source 1..20: mol_type = other DNA
ggcttaaaaataaggctagg

SEQ ID NO: 4230 - DNA, 20 bp, synthetic construct
  misc_feature 1..20: note = chemically synthesized
  source 1..20: mol_type = other DNA
taaaaataaggctaggaagc

SEQ ID NO: 4231 - DNA, 20 bp, synthetic construct
  misc_feature 1..20: note = chemically synthesized
  source 1..20: mol_type = other DNA
taaggctaggaagctagacc

SEQ ID NO: 4232 - DNA, 20 bp, synthetic construct
  misc_feature 1..20: note = chemically synthesized
  source 1..20: mol_type = other DNA
aaggctaggaagctagacct

SEQ ID NO: 4233 - DNA, 20 bp, synthetic construct
  misc_feature 1..20: note = chemically synthesized
  source 1..20: mol_type = other DNA
ggctaggaagctagacctgg

SEQ ID NO: 4234 - DNA, 20 bp, synthetic construct
  misc_feature 1..20: note = chemically synthesized
  source 1..20: mol_type = other DNA
gctaggaagctagacctggg

SEQ ID NO: 4235 - DNA, 20 bp, synthetic construct
  misc_feature 1..20: note = chemically synthesized
  source 1..20: mol_type = other DNA
ctaggaagctagacctggga

SEQ ID NO: 4236 - DNA, 20 bp, synthetic construct
  misc_feature 1..20: note = chemically synthesized
  source 1..20: mol_type = other DNA
taggaagctagacctgggag

SEQ ID NO: 4237 - DNA, 20 bp, synthetic construct
  misc_feature 1..20: note = chemically synthesized
  source 1..20: mol_type = other DNA
tagacctgggaggggcatta

SEQ ID NO: 4238 - DNA, 20 bp, synthetic construct
  misc_feature 1..20: note = chemically synthesized
  source 1..20: mol_type = other DNA
agacctgggaggggcattac

SEQ ID NO: 4239 - DNA, 20 bp, synthetic construct
  misc_feature 1..20: note = chemically synthesized
  source 1..20: mol_type = other DNA
ctgggaggggcattacaggc

SEQ ID NO: 4240 - DNA, 20 bp, synthetic construct
  misc_feature 1..20: note = chemically synthesized
  source 1..20: mol_type = other DNA
gaggggcattacaggctggc

SEQ ID NO: 4241 - DNA, 20 bp, synthetic construct
  misc_feature 1..20: note = chemically synthesized
  source 1..20: mol_type = other DNA
gggcattacaggctggctgg

SEQ ID NO: 4242 - DNA, 20 bp, synthetic construct
  misc_feature 1..20: note = chemically synthesized
  source 1..20: mol_type = other DNA
acaggctggctggaagcccc

SEQ ID NO: 4243 - DNA, 20 bp, synthetic construct
  misc_feature 1..20: note = chemically synthesized
  source 1..20: mol_type = other DNA
ccccagctgcctccctgcct

SEQ ID NO: 4244 - DNA, 20 bp, synthetic construct
  misc_feature 1..20: note = chemically synthesized
  source 1..20: mol_type = other DNA
ctgcctccctgcctcagatg

SEQ ID NO: 4245 - DNA, 20 bp, synthetic construct
  misc_feature 1..20: note = chemically synthesized
  source 1..20: mol_type = other DNA
tgcctccctgcctcagatgc

SEQ ID NO: 4246 - DNA, 20 bp, synthetic construct
  misc_feature 1..20: note = chemically synthesized
  source 1..20: mol_type = other DNA
gcctccctgcctcagatgca

SEQ ID NO: 4247 - DNA, 20 bp, synthetic construct
  misc_feature 1..20: note = chemically synthesized
  source 1..20: mol_type = other DNA
ctccctgcctcagatgcagg

SEQ ID NO: 4248 - DNA, 20 bp, synthetic construct
  misc_feature 1..20: note = chemically synthesized
  source 1..20: mol_type = other DNA
agatgcagggagaacacctg

SEQ ID NO: 4249 - DNA, 20 bp, synthetic construct
  misc_feature 1..20: note = chemically synthesized
  source 1..20: mol_type = other DNA
ccacccacaccttgtcaccc

SEQ ID NO: 4250 - DNA, 20 bp, synthetic construct
  misc_feature 1..20: note = chemically synthesized
  source 1..20: mol_type = other DNA
ccttgtcacccaagttgcac

SEQ ID NO: 4251 - DNA, 20 bp, synthetic construct
  misc_feature 1..20: note = chemically synthesized
  source 1..20: mol_type = other DNA
acccaagttgcactagatcc

SEQ ID NO: 4252 - DNA, 20 bp, synthetic construct
  misc_feature 1..20: note = chemically synthesized
  source 1..20: mol_type = other DNA
agttgcactagatcctggta

SEQ ID NO: 4253 - DNA, 20 bp, synthetic construct
  misc_feature 1..20: note = chemically synthesized
  source 1..20: mol_type = other DNA
cactagatcctggtacagcc

SEQ ID NO: 4254 - DNA, 20 bp, synthetic construct
  misc_feature 1..20: note = chemically synthesized
  source 1..20: mol_type = other DNA
tagatcctggtacagcccag

SEQ ID NO: 4255 - DNA, 20 bp, synthetic construct
  misc_feature 1..20: note = chemically synthesized
  source 1..20: mol_type = other DNA
atcctggtacagcccagtgg

SEQ ID NO: 4256 - DNA, 20 bp, synthetic construct
  misc_feature 1..20: note = chemically synthesized
  source 1..20: mol_type = other DNA
gtacagcccagtggtggccg

SEQ ID NO: 4257 - DNA, 20 bp, synthetic construct
  misc_feature 1..20: note = chemically synthesized
  source 1..20: mol_type = other DNA
gcccagtggtggccgcagct

SEQ ID NO: 4258 - DNA, 20 bp, synthetic construct
  misc_feature 1..20: note = chemically synthesized
  source 1..20: mol_type = other DNA
cccagtggtggccgcagctc

SEQ ID NO: 4259 - DNA, 20 bp, synthetic construct
  misc_feature 1..20: note = chemically synthesized
  source 1..20: mol_type = other DNA
ccagtggtggccgcagctca

SEQ ID NO: 4260 - DNA, 20 bp, synthetic construct
  misc_feature 1..20: note = chemically synthesized
  source 1..20: mol_type = other DNA
gtggtggccgcagctcaggg

SEQ ID NO: 4261 - DNA, 20 bp, synthetic construct
  misc_feature 1..20: note = chemically synthesized
  source 1..20: mol_type = other DNA
tggccgcagctcagggaaga

SEQ ID NO: 4262 - DNA, 20 bp, synthetic construct
  misc_feature 1..20: note = chemically synthesized
  source 1..20: mol_type = other DNA
ccgcagctcagggaagaaag

SEQ ID NO: 4263 - DNA, 20 bp, synthetic construct
  misc_feature 1..20: note = chemically synthesized
  source 1..20: mol_type = other DNA
cgcagctcagggaagaaaga

SEQ ID NO: 4264 - DNA, 20 bp, synthetic construct
  misc_feature 1..20: note = chemically synthesized
  source 1..20: mol_type = other DNA
ctcagggaagaaagaaggca

SEQ ID NO: 4265 - DNA, 20 bp, synthetic construct
  misc_feature 1..20: note = chemically synthesized
  source 1..20: mol_type = other DNA
ggcaaagccctgctgtgctc

SEQ ID NO: 4266 - DNA, 20 bp, synthetic construct
  misc_feature 1..20: note = chemically synthesized
  source 1..20: mol_type = other DNA
gcaaagccctgctgtgctca

SEQ ID NO: 4267 - DNA, 20 bp, synthetic construct
  misc_feature 1..20: note = chemically synthesized
  source 1..20: mol_type = other DNA
aaagccctgctgtgctcaag

SEQ ID NO: 4268 - DNA, 20 bp, synthetic construct
  misc_feature 1..20: note = chemically synthesized
  source 1..20: mol_type = other DNA
ctgctgtgctcaaggagatt

SEQ ID NO: 4269 - DNA, 20 bp, synthetic construct
  misc_feature 1..20: note = chemically synthesized
  source 1..20: mol_type = other DNA
tgctgtgctcaaggagattg

SEQ ID NO: 4270 - DNA, 20 bp, synthetic construct
  misc_feature 1..20: note = chemically synthesized
  source 1..20: mol_type = other DNA
tcaaggagattgaggcttcc

SEQ ID NO: 4271 - DNA, 20 bp, synthetic construct
  misc_feature 1..20: note = chemically synthesized
  source 1..20: mol_type = other DNA
aggcttcccagccccaaaac

SEQ ID NO: 4272 - DNA, 20 bp, synthetic construct
  misc_feature 1..20: note = chemically synthesized
  source 1..20: mol_type = other DNA
ggcttcccagccccaaaact

SEQ ID NO: 4273 - DNA, 20 bp, synthetic construct
  misc_feature 1..20: note = chemically synthesized
  source 1..20: mol_type = other DNA
ttcccagccccaaaactggg

SEQ ID NO: 4274 - DNA, 20 bp, synthetic construct
  misc_feature 1..20: note = chemically synthesized
  source 1..20: mol_type = other DNA
tcccagccccaaaactggga

SEQ ID NO: 4275 - DNA, 20 bp, synthetic construct
  misc_feature 1..20: note = chemically synthesized
  source 1..20: mol_type = other DNA
cccagccccaaaactgggaa

SEQ ID NO: 4276 - DNA, 20 bp, synthetic construct
  misc_feature 1..20: note = chemically synthesized
  source 1..20: mol_type = other DNA
cccaaaactgggaagggccc

SEQ ID NO: 4277 - DNA, 20 bp, synthetic construct
  misc_feature 1..20: note = chemically synthesized
  source 1..20: mol_type = other DNA
aactgggaagggccctggaa

SEQ ID NO: 4278 - DNA, 20 bp, synthetic construct
  misc_feature 1..20: note = chemically synthesized
  source 1..20: mol_type = other DNA
actgggaagggccctggaat

SEQ ID NO: 4279 - DNA, 20 bp, synthetic construct
  misc_feature 1..20: note = chemically synthesized
  source 1..20: mol_type = other DNA
tgggatatcccctcccctcc

SEQ ID NO: 4280 - DNA, 20 bp, synthetic construct
  misc_feature 1..20: note = chemically synthesized
  source 1..20: mol_type = other DNA
cagcaccccattcccaaacc

SEQ ID NO: 4281 - DNA, 20 bp, synthetic construct
  misc_feature 1..20: note = chemically synthesized
  source 1..20: mol_type = other DNA
cctagccacccatctctgct

SEQ ID NO: 4282 - DNA, 20 bp, synthetic construct
  misc_feature 1..20: note = chemically synthesized
  source 1..20: mol_type = other DNA
ctagccacccatctctgctt

SEQ ID NO: 4283 - DNA, 20 bp, synthetic construct
  misc_feature 1..20: note = chemically synthesized
  source 1..20: mol_type = other DNA
catctctgcttgggacatgc

SEQ ID NO: 4284 - DNA, 20 bp, synthetic construct
  misc_feature 1..20: note = chemically synthesized
  source 1..20: mol_type = other DNA
ctctgcttgggacatgctgg

SEQ ID NO: 4285 - DNA, 20 bp, synthetic construct
  misc_feature 1..20: note = chemically synthesized
  source 1..20: mol_type = other DNA
tctgcttgggacatgctgga

SEQ ID NO: 4286 - DNA, 20 bp, synthetic construct
  misc_feature 1..20: note = chemically synthesized
  source 1..20: mol_type = other DNA
cttgggacatgctggaaggc

SEQ ID NO: 4287 - DNA, 20 bp, synthetic construct
  misc_feature 1..20: note = chemically synthesized
  source 1..20: mol_type = other DNA
gggacatgctggaaggcaag

SEQ ID NO: 4288 - DNA, 20 bp, synthetic construct
  misc_feature 1..20: note = chemically synthesized
  source 1..20: mol_type = other DNA
gacatgctggaaggcaagaa

SEQ ID NO: 4289 - DNA, 20 bp, synthetic construct
  misc_feature 1..20: note = chemically synthesized
  source 1..20: mol_type = other DNA
catgctggaaggcaagaaga

SEQ ID NO: 4290 - DNA, 20 bp, synthetic construct
  misc_feature 1..20: note = chemically synthesized
  source 1..20: mol_type = other DNA
gaaggcaagaagagagaaac

SEQ ID NO: 4291 - DNA, 20 bp, synthetic construct
  misc_feature 1..20: note = chemically synthesized
  source 1..20: mol_type = other DNA
actccttgaaaacaaaaatg

SEQ ID NO: 4292 - DNA, 20 bp, synthetic construct
  misc_feature 1..20: note = chemically synthesized
  source 1..20: mol_type = other DNA
ccttgaaaacaaaaatgaag

SEQ ID NO: 4293 - DNA, 20 bp, synthetic construct
  misc_feature 1..20: note = chemically synthesized
  source 1..20: mol_type = other DNA
cttgaaaacaaaaatgaagc

SEQ ID NO: 4294 - DNA, 20 bp, synthetic construct
  misc_feature 1..20: note = chemically synthesized
  source 1..20: mol_type = other DNA
ttgaaaacaaaaatgaagca

SEQ ID NO: 4295 - DNA, 20 bp, synthetic construct
  misc_feature 1..20: note = chemically synthesized
  source 1..20: mol_type = other DNA
caaaaatgaagcagggatcc

SEQ ID NO: 4296 - DNA, 20 bp, synthetic construct
  misc_feature 1..20: note = chemically synthesized
  source 1..20: mol_type = other DNA
aaaaatgaagcagggatcct

SEQ ID NO: 4297 - DNA, 20 bp, synthetic construct
  misc_feature 1..20: note = chemically synthesized
  source 1..20: mol_type = other DNA
tgaagcagggatcctaggaa

SEQ ID NO: 4298 - DNA, 20 bp, synthetic construct
  misc_feature 1..20: note = chemically synthesized
  source 1..20: mol_type = other DNA
ctaggaaaagtaaaaacatt

SEQ ID NO: 4299 - DNA, 20 bp, synthetic construct
  misc_feature 1..20: note = chemically synthesized
  source 1..20: mol_type = other DNA
aagtaaaaacattcagaacc

SEQ ID NO: 4300 - DNA, 20 bp, synthetic construct
  misc_feature 1..20: note = chemically synthesized
  source 1..20: mol_type = other DNA
agtaaaaacattcagaaccc

SEQ ID NO: 4301 - DNA, 20 bp, synthetic construct
  misc_feature 1..20: note = chemically synthesized
  source 1..20: mol_type = other DNA
gtaaaaacattcagaaccca

SEQ ID NO: 4302 - DNA, 20 bp, synthetic construct
  misc_feature 1..20: note = chemically synthesized
  source 1..20: mol_type = other DNA
ctgtctcccacgacctacac

SEQ ID NO: 4303 - DNA, 20 bp, synthetic construct
  misc_feature 1..20: note = chemically synthesized
  source 1..20: mol_type = other DNA
tgtctcccacgacctacacc

SEQ ID NO: 4304 - DNA, 20 bp, synthetic construct
  misc_feature 1..20: note = chemically synthesized
  source 1..20: mol_type = other DNA
cccttcgcacctctgctttg

SEQ ID NO: 4305 - DNA, 20 bp, synthetic construct
  misc_feature 1..20: note = chemically synthesized
  source 1..20: mol_type = other DNA
cactacaccccacccaccac

SEQ ID NO: 4306 - DNA, 20 bp, synthetic construct
  misc_feature 1..20: note = chemically synthesized
  source 1..20: mol_type = other DNA
caagcacatacacatgctct

SEQ ID NO: 4307 - DNA, 20 bp, synthetic construct
  misc_feature 1..20: note = chemically synthesized
  source 1..20: mol_type = other DNA
aagcacatacacatgctctc

SEQ ID NO: 4308 - DNA, 20 bp, synthetic construct
  misc_feature 1..20: note = chemically synthesized
  source 1..20: mol_type = other DNA
gcacatacacatgctctcag

SEQ ID NO: 4309 - DNA, 20 bp, synthetic construct
  misc_feature 1..20: note = chemically synthesized
  source 1..20: mol_type = other DNA
atacacatgctctcaggagt

SEQ ID NO: 4310 - DNA, 20 bp, synthetic construct
  misc_feature 1..20: note = chemically synthesized
  source 1..20: mol_type = other DNA
acacatgctctcaggagtca

SEQ ID NO: 4311 - DNA, 20 bp, synthetic construct
  misc_feature 1..20: note = chemically synthesized
  source 1..20: mol_type = other DNA
cacatgctctcaggagtcag

SEQ ID NO: 4312 - DNA, 20 bp, synthetic construct
  misc_feature 1..20: note = chemically synthesized
  source 1..20: mol_type = other DNA
acatgctctcaggagtcaga

SEQ ID NO: 4313 - DNA, 20 bp, synthetic construct
  misc_feature 1..20: note = chemically synthesized
  source 1..20: mol_type = other DNA
tcaggagtcagagggtcacc

SEQ ID NO: 4314 - DNA, 20 bp, synthetic construct
  misc_feature 1..20: note = chemically synthesized
  source 1..20: mol_type = other DNA
caggagtcagagggtcaccc

SEQ ID NO: 4315 - DNA, 20 bp, synthetic construct
  misc_feature 1..20: note = chemically synthesized
  source 1..20: mol_type = other DNA
aggagtcagagggtcaccca

SEQ ID NO: 4316 - DNA, 20 bp, synthetic construct
  misc_feature 1..20: note = chemically synthesized
  source 1..20: mol_type = other DNA
gtcagagggtcacccagggc

SEQ ID NO: 4317 - DNA, 20 bp, synthetic construct
  misc_feature 1..20: note = chemically synthesized
  source 1..20: mol_type = other DNA
gtcacccagggctagaactt

SEQ ID NO: 4318 - DNA, 20 bp, synthetic construct
  misc_feature 1..20: note = chemically synthesized
  source 1..20: mol_type = other DNA
gggctagaacttaagccacc

SEQ ID NO: 4319 - DNA, 20 bp, synthetic construct
  misc_feature 1..20: note = chemically synthesized
  source 1..20: mol_type = other DNA
acttaagccacccagcccac

SEQ ID NO: 4320 - DNA, 20 bp, synthetic construct
  misc_feature 1..20: note = chemically synthesized
  source 1..20: mol_type = other DNA
aagccacccagcccacaagc

SEQ ID NO: 4321 - DNA, 20 bp, synthetic construct
  misc_feature 1..20: note = chemically synthesized
  source 1..20: mol_type = other DNA
ccacccagcccacaagctgg

SEQ ID NO: 4322 - DNA, 20 bp, synthetic construct
  misc_feature 1..20: note = chemically synthesized
  source 1..20: mol_type = other DNA
cacccagcccacaagctggc

SEQ ID NO: 4323 - DNA, 20 bp, synthetic construct
  misc_feature 1..20: note = chemically synthesized
  source 1..20: mol_type = other DNA
agcccacaagctggcaggtg

SEQ ID NO: 4324 - DNA, 20 bp, synthetic construct
  misc_feature 1..20: note = chemically synthesized
  source 1..20: mol_type = other DNA
gcccacaagctggcaggtga

SEQ ID NO: 4325 - DNA, 20 bp, synthetic construct
  misc_feature 1..20: note = chemically synthesized
  source 1..20: mol_type = other DNA
ccacaagctggcaggtgaag

SEQ ID NO: 4326 - DNA, 20 bp, synthetic construct
  misc_feature 1..20: note = chemically synthesized
  source 1..20: mol_type = other DNA
cacaagctggcaggtgaagg

SEQ ID NO: 4327 - DNA, 20 bp, synthetic construct
  misc_feature 1..20: note = chemically synthesized
  source 1..20: mol_type = other DNA
agctggcaggtgaaggagga

SEQ ID NO: 4328 - DNA, 20 bp, synthetic construct
  misc_feature 1..20: note = chemically synthesized
  source 1..20: mol_type = other DNA
gctggcaggtgaaggaggac

SEQ ID NO: 4329 - DNA, 20 bp, synthetic construct
  misc_feature 1..20: note = chemically synthesized
  source 1..20: mol_type = other DNA
ctggcaggtgaaggaggaca

SEQ ID NO: 4330 - DNA, 20 bp, synthetic construct
  misc_feature 1..20: note = chemically synthesized
  source 1..20: mol_type = other DNA
ggtgaaggaggacagggatc

SEQ ID NO: 4331 - DNA, 20 bp, synthetic construct
  misc_feature 1..20: note = chemically synthesized
  source 1..20: mol_type = other DNA
gtgaaggaggacagggatca

SEQ ID NO: 4332 - DNA, 20 bp, synthetic construct
  misc_feature 1..20: note = chemically synthesized
  source 1..20: mol_type = other DNA
gaggacagggatcaaggtga

SEQ ID NO: 4333 - DNA, 20 bp, synthetic construct
  misc_feature 1..20: note = chemically synthesized
  source 1..20: mol_type = other DNA
ggtgacagtgctgtccacgc

SEQ ID NO: 4334 - DNA, 20 bp, synthetic construct
  misc_feature 1..20: note = chemically synthesized
  source 1..20: mol_type = other DNA
gtgctgtccacgctggcccc

SEQ ID NO: 4335 - DNA, 20 bp, synthetic construct
  misc_feature 1..20: note = chemically synthesized
  source 1..20: mol_type = other DNA
gtccacgctggcccctggct

SEQ ID NO: 4336 - DNA, 20 bp, synthetic construct
  misc_feature 1..20: note = chemically synthesized
  source 1..20: mol_type = other DNA
ccacgctggcccctggctaa

SEQ ID NO: 4337 - DNA, 20 bp, synthetic construct
  misc_feature 1..20: note = chemically synthesized
  source 1..20: mol_type = other DNA
cccctggctaagagcaactg

SEQ ID NO: 4338 - DNA, 20 bp, synthetic construct
  misc_feature 1..20: note = chemically synthesized
  source 1..20: mol_type = other DNA
ctggctaagagcaactgcag

SEQ ID NO: 4339 - DNA, 20 bp, synthetic construct
  misc_feature 1..20: note = chemically synthesized
  source 1..20: mol_type = other DNA
aagagcaactgcagcagaaa

SEQ ID NO: 4340 - DNA, 20 bp, synthetic construct
  misc_feature 1..20: note = chemically synthesized
  source 1..20: mol_type = other DNA
gtgtttcttctccatttcca

SEQ ID NO: 4341 - DNA, 20 bp, synthetic construct
  misc_feature 1..20: note = chemically synthesized
  source 1..20: mol_type = other DNA
tttcttttccccacatgctc

SEQ ID NO: 4342 - DNA, 20 bp, synthetic construct
  misc_feature 1..20: note = chemically synthesized
  source 1..20: mol_type = other DNA
atgctccagcacatacaact

SEQ ID NO: 4343 - DNA, 20 bp, synthetic construct
  misc_feature 1..20: note = chemically synthesized
  source 1..20: mol_type = other DNA
tgctccagcacatacaactc

SEQ ID NO: 4344 - DNA, 20 bp, synthetic construct
  misc_feature 1..20: note = chemically synthesized
  source 1..20: mol_type = other DNA
gctccagcacatacaactca

SEQ ID NO: 4345 - DNA, 20 bp, synthetic construct
  misc_feature 1..20: note = chemically synthesized
  source 1..20: mol_type = other DNA
gcacatacaactcagggctc

SEQ ID NO: 4346 - DNA, 20 bp, synthetic construct
  misc_feature 1..20: note = chemically synthesized
  source 1..20: mol_type = other DNA
actcagggctccagtgtttt

SEQ ID NO: 4347 - DNA, 20 bp, synthetic construct
  misc_feature 1..20: note = chemically synthesized
  source 1..20: mol_type = other DNA
ctcagggctccagtgtttta

SEQ ID NO: 4348 - DNA, 20 bp, synthetic construct
  misc_feature 1..20: note = chemically synthesized
  source 1..20: mol_type = other DNA
tcagggctccagtgttttaa

SEQ ID NO: 4349 - DNA, 20 bp, synthetic construct
  misc_feature 1..20: note = chemically synthesized
  source 1..20: mol_type = other DNA
taagggcattttttttccac

SEQ ID NO: 4350 - DNA, 20 bp, synthetic construct
  misc_feature 1..20: note = chemically synthesized
  source 1..20: mol_type = other DNA
ggcattttttttccacaagt

SEQ ID NO: 4351 - DNA, 20 bp, synthetic construct
  misc_feature 1..20: note = chemically synthesized
  source 1..20: mol_type = other DNA
aagtgagattaattttctaa

SEQ ID NO: 4352 - DNA, 20 bp, synthetic construct
  misc_feature 1..20: note = chemically synthesized
  source 1..20: mol_type = other DNA
ttaattttctaacagaaccc

SEQ ID NO: 4353 - DNA, 20 bp, synthetic construct
  misc_feature 1..20: note = chemically synthesized
  source 1..20: mol_type = other DNA
ccctagtacattctgtgtga

SEQ ID NO: 4354 - DNA, 20 bp, synthetic construct
  misc_feature 1..20: note = chemically synthesized
  source 1..20: mol_type = other DNA
tagtacattctgtgtgatgg

SEQ ID NO: 4355 - DNA, 20 bp, synthetic construct
  misc_feature 1..20: note = chemically synthesized
  source 1..20: mol_type = other DNA
agtacattctgtgtgatggt

SEQ ID NO: 4356 - DNA, 20 bp, synthetic construct
  misc_feature 1..20: note = chemically synthesized
  source 1..20: mol_type = other DNA
tacattctgtgtgatggtgg

SEQ ID NO: 4357 - DNA, 20 bp, synthetic construct
  misc_feature 1..20: note = chemically synthesized
  source 1..20: mol_type = other DNA
cattctgtgtgatggtggga

SEQ ID NO: 4358 - DNA, 20 bp, synthetic construct
  misc_feature 1..20: note = chemically synthesized
  source 1..20: mol_type = other DNA
ggagagccttttgaccatca

SEQ ID NO: 4359 - DNA, 20 bp, synthetic construct
  misc_feature 1..20: note = chemically synthesized
  source 1..20: mol_type = other DNA
ttttgaccatcacagtgtcc

SEQ ID NO: 4360 - DNA, 20 bp, synthetic construct
  misc_feature 1..20: note = chemically synthesized
  source 1..20: mol_type = other DNA
ccatcacagtgtcctggaat

SEQ ID NO: 4361 - DNA, 20 bp, synthetic construct
  misc_feature 1..20: note = chemically synthesized
  source 1..20: mol_type = other DNA
acagtgtcctggaatgagct

SEQ ID NO: 4362 - DNA, 20 bp, synthetic construct
  misc_feature 1..20: note = chemically synthesized
  source 1..20: mol_type = other DNA
aatgagctcagcatgctctc

SEQ ID NO: 4363 - DNA, 20 bp, synthetic construct
  misc_feature 1..20: note = chemically synthesized
  source 1..20: mol_type = other DNA
atgagctcagcatgctctct

SEQ ID NO: 4364 - DNA, 20 bp, synthetic construct
  misc_feature 1..20: note = chemically synthesized
  source 1..20: mol_type = other DNA
agctcagcatgctctctggg

SEQ ID NO: 4365 - DNA, 20 bp, synthetic construct
  misc_feature 1..20: note = chemically synthesized
  source 1..20: mol_type = other DNA
atgctctctgggaagtgaat

SEQ ID NO: 4366 - DNA, 20 bp, synthetic construct
  misc_feature 1..20: note = chemically synthesized
  source 1..20: mol_type = other DNA
tgctctctgggaagtgaatt

SEQ ID NO: 4367 - DNA, 20 bp, synthetic construct
  misc_feature 1..20: note = chemically synthesized
  source 1..20: mol_type = other DNA
ctctgggaagtgaattggga

SEQ ID NO: 4368 - DNA, 20 bp, synthetic construct
  misc_feature 1..20: note = chemically synthesized
  source 1..20: mol_type = other DNA
aagtgaattgggaaagtgaa

SEQ ID NO: 4369 - DNA, 20 bp, synthetic construct
  misc_feature 1..20: note = chemically synthesized
  source 1..20: mol_type = other DNA
agtgaattgggaaagtgaat

SEQ ID NO: 4370 - DNA, 20 bp, synthetic construct
  misc_feature 1..20: note = chemically synthesized
  source 1..20: mol_type = other DNA
gtgaattgggaaagtgaatg

SEQ ID NO: 4371 - DNA, 20 bp, synthetic construct
  misc_feature 1..20: note = chemically synthesized
  source 1..20: mol_type = other DNA
ttgggaaagtgaatggggaa

SEQ ID NO: 4372 - DNA, 20 bp, synthetic construct
  misc_feature 1..20: note = chemically synthesized
  source 1..20: mol_type = other DNA
tggggaaaagcctcaacaca

SEQ ID NO: 4373 - DNA, 20 bp, synthetic construct
  misc_feature 1..20: note = chemically synthesized
  source 1..20: mol_type = other DNA
gaaaagcctcaacacacaga

SEQ ID NO: 4374 - DNA, 20 bp, synthetic construct
  misc_feature 1..20: note = chemically synthesized
  source 1..20: mol_type = other DNA
tcaacacacagacagcccca

SEQ ID NO: 4375 - DNA, 20 bp, synthetic construct
  misc_feature 1..20: note = chemically synthesized
  source 1..20: mol_type = other DNA
cagccccatggaaaattctc

SEQ ID NO: 4376 - DNA, 20 bp, synthetic construct
  misc_feature 1..20: note = chemically synthesized
  source 1..20: mol_type = other DNA
ccatggaaaattctccagct

SEQ ID NO: 4377 - DNA, 20 bp, synthetic construct
  misc_feature 1..20: note = chemically synthesized
  source 1..20: mol_type = other DNA
catggaaaattctccagctc

SEQ ID NO: 4378 - DNA, 20 bp, synthetic construct
  misc_feature 1..20: note = chemically synthesized
  source 1..20: mol_type = other DNA
tccagctcaggaaacccacc

SEQ ID NO: 4379 - DNA, 20 bp, synthetic construct
  misc_feature 1..20: note = chemically synthesized
  source 1..20: mol_type = other DNA
ccagctcaggaaacccacct

SEQ ID NO: 4380 - DNA, 20 bp, synthetic construct
  misc_feature 1..20: note = chemically synthesized
  source 1..20: mol_type = other DNA
tcaggaaacccacctaggta

SEQ ID NO: 4381 - DNA, 20 bp, synthetic construct
  misc_feature 1..20: note = chemically synthesized
  source 1..20: mol_type = other DNA
aggaaacccacctaggtata

SEQ ID NO: 4382 - DNA, 20 bp, synthetic construct
  misc_feature 1..20: note = chemically synthesized
  source 1..20: mol_type = other DNA
ctaggtatagagaccttctc

SEQ ID NO: 4383 - DNA, 20 bp, synthetic construct
  misc_feature 1..20: note = chemically synthesized
  source 1..20: mol_type = other DNA
gagaccttctccggaacctc

SEQ ID NO: 4384 - DNA, 20 bp, synthetic construct
  misc_feature 1..20: note = chemically synthesized
  source 1..20: mol_type = other DNA
ccggaacctctggtctgttc

SEQ ID NO: 4385 - DNA, 20 bp, synthetic construct
  misc_feature 1..20: note = chemically synthesized
  source 1..20: mol_type = other DNA
tgttctagtcctgctgtcaa

SEQ ID NO: 4386 - DNA, 20 bp, synthetic construct
  misc_feature 1..20: note = chemically synthesized
  source 1..20: mol_type = other DNA
ctagtcctgctgtcaaaaga

SEQ ID NO: 4387 - DNA, 20 bp, synthetic construct
  misc_feature 1..20: note = chemically synthesized
  source 1..20: mol_type = other DNA
tagtcctgctgtcaaaagaa

SEQ ID NO: 4388 - DNA, 20 bp, synthetic construct
  misc_feature 1..20: note = chemically synthesized
  source 1..20: mol_type = other DNA
agtcctgctgtcaaaagaaa

SEQ ID NO: 4389 - DNA, 20 bp, synthetic construct
  misc_feature 1..20: note = chemically synthesized
  source 1..20: mol_type = other DNA
gtcctgctgtcaaaagaaag

SEQ ID NO: 4390 - DNA, 20 bp, synthetic construct
  misc_feature 1..20: note = chemically synthesized
  source 1..20: mol_type = other DNA
tgctgtcaaaagaaaggggt

SEQ ID NO: 4391 - DNA, 20 bp, synthetic construct
  misc_feature 1..20: note = chemically synthesized
  source 1..20: mol_type = other DNA
ggggttggactgatgtttcc

SEQ ID NO: 4392 - DNA, 20 bp, synthetic construct
  misc_feature 1..20: note = chemically synthesized
  source 1..20: mol_type = other DNA
gttggactgatgtttcccag

SEQ ID NO: 4393 - DNA, 20 bp, synthetic construct
  misc_feature 1..20: note = chemically synthesized
  source 1..20: mol_type = other DNA
tggactgatgtttcccagtg

SEQ ID NO: 4394 - DNA, 20 bp, synthetic construct
  misc_feature 1..20: note = chemically synthesized
  source 1..20: mol_type = other DNA
ggactgatgtttcccagtgg

SEQ ID NO: 4395 - DNA, 20 bp, synthetic construct
  misc_feature 1..20: note = chemically synthesized
  source 1..20: mol_type = other DNA
gactgatgtttcccagtgga

SEQ ID NO: 4396 - DNA, 20 bp, synthetic construct
  misc_feature 1..20: note = chemically synthesized
  source 1..20: mol_type = other DNA
gagggcttgtttgtcatttt

SEQ ID NO: 4397 - DNA, 20 bp, synthetic construct
  misc_feature 1..20: note = chemically synthesized
  source 1..20: mol_type = other DNA
tcatttttggacctaacatc

SEQ ID NO: 4398 - DNA, 20 bp, synthetic construct
  misc_feature 1..20: note = chemically synthesized
  source 1..20: mol_type = other DNA
gacctaacatccagttcatc

SEQ ID NO: 4399 - DNA, 20 bp, synthetic construct
  misc_feature 1..20: note = chemically synthesized
  source 1..20: mol_type = other DNA
acctaacatccagttcatca

SEQ ID NO: 4400 - DNA, 20 bp, synthetic construct
  misc_feature 1..20: note = chemically synthesized
  source 1..20: mol_type = other DNA
tcaaggtcacttctgactcc

SEQ ID NO: 4401 - DNA, 20 bp, synthetic construct
  misc_feature 1..20: note = chemically synthesized
  source 1..20: mol_type = other DNA
caaggtcacttctgactccc

SEQ ID NO: 4402 - DNA, 20 bp, synthetic construct
  misc_feature 1..20: note = chemically synthesized
  source 1..20: mol_type = other DNA
ggtcacttctgactcccagg

SEQ ID NO: 4403 - DNA, 20 bp, synthetic construct
  misc_feature 1..20: note = chemically synthesized
  source 1..20: mol_type = other DNA
tcacttctgactcccaggaa

SEQ ID NO: 4404 - DNA, 20 bp, synthetic construct
  misc_feature 1..20: note = chemically synthesized
  source 1..20: mol_type = other DNA
acttctgactcccaggaaga

SEQ ID NO: 4405 - DNA, 20 bp, synthetic construct
  misc_feature 1..20: note = chemically synthesized
  source 1..20: mol_type = other DNA
cttctgactcccaggaagag

SEQ ID NO: 4406 - DNA, 20 bp, synthetic construct
  misc_feature 1..20: note = chemically synthesized
  source 1..20: mol_type = other DNA
ctgactcccaggaagagagg

SEQ ID NO: 4407 - DNA, 20 bp, synthetic construct
  misc_feature 1..20: note = chemically synthesized
  source 1..20: mol_type = other DNA
ggaagagaggcagacctgtt

SEQ ID NO: 4408 - DNA, 20 bp, synthetic construct
  misc_feature 1..20: note = chemically synthesized
  source 1..20: mol_type = other DNA
gaagagaggcagacctgtta

SEQ ID NO: 4409 - DNA, 20 bp, synthetic construct
  misc_feature 1..20: note = chemically synthesized
  source 1..20: mol_type = other DNA
aagagaggcagacctgttaa

SEQ ID NO: 4410 - DNA, 20 bp, synthetic construct
  misc_feature 1..20: note = chemically synthesized
  source 1..20: mol_type = other DNA
agagaggcagacctgttaag

SEQ ID NO: 4411 - DNA, 20 bp, synthetic construct
  misc_feature 1..20: note = chemically synthesized
  source 1..20: mol_type = other DNA
gaggcagacctgttaagggg

SEQ ID NO: 4412 - DNA, 20 bp, synthetic construct
  misc_feature 1..20: note = chemically synthesized
  source 1..20: mol_type = other DNA
aggcagacctgttaaggggc

SEQ ID NO: 4413 - DNA, 20 bp, synthetic construct
  misc_feature 1..20: note = chemically synthesized
  source 1..20: mol_type = other DNA
cagacctgttaaggggcggg

SEQ ID NO: 4414 - DNA, 20 bp, synthetic construct
  misc_feature 1..20: note = chemically synthesized
  source 1..20: mol_type = other DNA
tgttaaggggcgggtggttt

SEQ ID NO: 4415 - DNA, 20 bp, synthetic construct
  misc_feature 1..20: note = chemically synthesized
  source 1..20: mol_type = other DNA
ggcgggtggtttgagccact

SEQ ID NO: 4416 - DNA, 20 bp, synthetic construct
  misc_feature 1..20: note = chemically synthesized
  source 1..20: mol_type = other DNA
gcgggtggtttgagccactt

SEQ ID NO: 4417 - DNA, 20 bp, synthetic construct
  misc_feature 1..20: note = chemically synthesized
  source 1..20: mol_type = other DNA
ttgagccacttaggacattt

SEQ ID NO: 4418 - DNA, 20 bp, synthetic construct
  misc_feature 1..20: note = chemically synthesized
  source 1..20: mol_type = other DNA
atctctcatgattctatctt

SEQ ID NO: 4419 - DNA, 20 bp, synthetic construct
  misc_feature 1..20: note = chemically synthesized
  source 1..20: mol_type = other DNA
ctctcatgattctatcttga

SEQ ID NO: 4420 - DNA, 20 bp, synthetic construct
  misc_feature 1..20: note = chemically synthesized
  source 1..20: mol_type = other DNA
atgattctatcttgagagtt

SEQ ID NO: 4421 - DNA, 20 bp, synthetic construct
  misc_feature 1..20: note = chemically synthesized
  source 1..20: mol_type = other DNA
tctatcttgagagtttagtt

SEQ ID NO: 4422 - DNA, 20 bp, synthetic construct
  misc_feature 1..20: note = chemically synthesized
  source 1..20: mol_type = other DNA
tcttgagagtttagtttggt

SEQ ID NO: 4423 - DNA, 20 bp, synthetic construct
  misc_feature 1..20: note = chemically synthesized
  source 1..20: mol_type = other DNA
ttgagagtttagtttggttg

SEQ ID NO: 4424 - DNA, 20 bp, synthetic construct
  misc_feature 1..20: note = chemically synthesized
  source 1..20: mol_type = other DNA
agtttagtttggttggagtt

SEQ ID NO: 4425 - DNA, 20 bp, synthetic construct
  misc_feature 1..20: note = chemically synthesized
  source 1..20: mol_type = other DNA
ttggttggagtttagttttt

SEQ ID NO: 4426 - DNA, 20 bp, synthetic construct
  misc_feature 1..20: note = chemically synthesized
  source 1..20: mol_type = other DNA
tagtttttgagttttttgtt

SEQ ID NO: 4427 - DNA, 20 bp, synthetic construct
  misc_feature 1..20: note = chemically synthesized
  source 1..20: mol_type = other DNA
agtttttgagttttttgttc

SEQ ID NO: 4428 - DNA, 20 bp, synthetic construct
  misc_feature 1..20: note = chemically synthesized
  source 1..20: mol_type = other DNA
tgagttttttgttcgggttg

SEQ ID NO: 4429 - DNA, 20 bp, synthetic construct
  misc_feature 1..20: note = chemically synthesized
  source 1..20: mol_type = other DNA
cctccattaaaaaaaaaaat

SEQ ID NO: 4430 - DNA, 20 bp, synthetic construct
  misc_feature 1..20: note = chemically synthesized
  source 1..20: mol_type = other DNA
tccattaaaaaaaaaaattg

SEQ ID NO: 4431 - DNA, 20 bp, synthetic construct
  misc_feature 1..20: note = chemically synthesized
  source 1..20: mol_type = other DNA
gtatttctgtttcctgttca

SEQ ID NO: 4432 - DNA, 20 bp, synthetic construct
  misc_feature 1..20: note = chemically synthesized
  source 1..20: mol_type = other DNA
atttctgtttcctgttcacg

SEQ ID NO: 4433 - DNA, 20 bp, synthetic construct
  misc_feature 1..20: note = chemically synthesized
  source 1..20: mol_type = other DNA
tctgtttcctgttcacggag

SEQ ID NO: 4434 - DNA, 20 bp, synthetic construct
  misc_feature 1..20: note = chemically synthesized
  source 1..20: mol_type = other DNA
tttcctgttcacggagcgga

SEQ ID NO: 4435 - DNA, 20 bp, synthetic construct
  misc_feature 1..20: note = chemically synthesized
  source 1..20: mol_type = other DNA
cctgttcacggagcggacag

SEQ ID NO: 4436 - DNA, 20 bp, synthetic construct
  misc_feature 1..20: note = chemically synthesized
  source 1..20: mol_type = other DNA
ctgttcacggagcggacaga

SEQ ID NO: 4437 - DNA, 20 bp, synthetic construct
  misc_feature 1..20: note = chemically synthesized
  source 1..20: mol_type = other DNA
gttcacggagcggacagaag

SEQ ID NO: 4438 - DNA, 20 bp, synthetic construct
  misc_feature 1..20: note = chemically synthesized
  source 1..20: mol_type = other DNA
ttcacggagcggacagaagg

SEQ ID NO: 4439 - DNA, 20 bp, synthetic construct
  misc_feature 1..20: note = chemically synthesized
  source 1..20: mol_type = other DNA
tcacggagcggacagaagga

SEQ ID NO: 4440 - DNA, 20 bp, synthetic construct
  misc_feature 1..20: note = chemically synthesized
  source 1..20: mol_type = other DNA
gcggacagaaggagggtgtg

SEQ ID NO: 4441 - DNA, 20 bp, synthetic construct
  misc_feature 1..20: note = chemically synthesized
  source 1..20: mol_type = other DNA
gacagaaggagggtgtgcag

SEQ ID NO: 4442 - DNA, 20 bp, synthetic construct
  misc_feature 1..20: note = chemically synthesized
  source 1..20: mol_type = other DNA
cagaaggagggtgtgcagtg

SEQ ID NO: 4443 - DNA, 20 bp, synthetic construct
  misc_feature 1..20: note = chemically synthesized
  source 1..20: mol_type = other DNA
agaaggagggtgtgcagtgg

SEQ ID NO: 4444 - DNA, 20 bp, synthetic construct
  misc_feature 1..20: note = chemically synthesized
  source 1..20: mol_type = other DNA
aaggagggtgtgcagtggag

SEQ ID NO: 4445 - DNA, 20 bp, synthetic construct
  misc_feature 1..20: note = chemically synthesized
  source 1..20: mol_type = other DNA
aggagggtgtgcagtggagg

SEQ ID NO: 4446 - DNA, 20 bp, synthetic construct
  misc_feature 1..20: note = chemically synthesized
  source 1..20: mol_type = other DNA
tgtgcagtggaggaggtgtg

SEQ ID NO: 4447 - DNA, 20 bp, synthetic construct
  misc_feature 1..20: note = chemically synthesized
  source 1..20: mol_type = other DNA
gtgcagtggaggaggtgtgt

SEQ ID NO: 4448 - DNA, 20 bp, synthetic construct
  misc_feature 1..20: note = chemically synthesized
  source 1..20: mol_type = other DNA
tgcagtggaggaggtgtgtg

SEQ ID NO: 4449 - DNA, 20 bp, synthetic construct
  misc_feature 1..20: note = chemically synthesized
  source 1..20: mol_type = other DNA
cagtggaggaggtgtgtggg

SEQ ID NO: 4450 - DNA, 20 bp, synthetic construct
  misc_feature 1..20: note = chemically synthesized
  source 1..20: mol_type = other DNA
agtggaggaggtgtgtgggg

SEQ ID NO: 4451 - DNA, 20 bp, synthetic construct
  misc_feature 1..20: note = chemically synthesized
  source 1..20: mol_type = other DNA
tggaggaggtgtgtggggag

SEQ ID NO: 4452 - DNA, 20 bp, synthetic construct
  misc_feature 1..20: note = chemically synthesized
  source 1..20: mol_type = other DNA
ggaggaggtgtgtggggagg

SEQ ID NO: 4453 - DNA, 20 bp, synthetic construct
  misc_feature 1..20: note = chemically synthesized
  source 1..20: mol_type = other DNA
gtggggaggaggctgataca

SEQ ID NO: 4454 - DNA, 20 bp, synthetic construct
  misc_feature 1..20: note = chemically synthesized
  source 1..20: mol_type = other DNA
ggggaggaggctgatacatg

SEQ ID NO: 4455 - DNA, 20 bp, synthetic construct
  misc_feature 1..20: note = chemically synthesized
  source 1..20: mol_type = other DNA
gaggaggctgatacatggag

SEQ ID NO: 4456 - DNA, 20 bp, synthetic construct
  misc_feature 1..20: note = chemically synthesized
  source 1..20: mol_type = other DNA
ggaggctgatacatggagca

SEQ ID NO: 4457 - DNA, 20 bp, synthetic construct
  misc_feature 1..20: note = chemically synthesized
  source 1..20: mol_type = other DNA
ctgatacatggagcagagcc

SEQ ID NO: 4458 - DNA, 20 bp, synthetic construct
  misc_feature 1..20: note = chemically synthesized
  source 1..20: mol_type = other DNA
ggagcagagccgagaatatc

SEQ ID NO: 4459 - DNA, 20 bp, synthetic construct
  misc_feature 1..20: note = chemically synthesized
  source 1..20: mol_type = other DNA
gagccgagaatatccggaac

SEQ ID NO: 4460 - DNA, 20 bp, synthetic construct
  misc_feature 1..20: note = chemically synthesized
  source 1..20: mol_type = other DNA
gccgagaatatccggaactg

SEQ ID NO: 4461 - DNA, 20 bp, synthetic construct
  misc_feature 1..20: note = chemically synthesized
  source 1..20: mol_type = other DNA
gaatatccggaactggagaa

SEQ ID NO: 4462 - DNA, 20 bp, synthetic construct
  misc_feature 1..20: note = chemically synthesized
  source 1..20: mol_type = other DNA
atccggaactggagaaaagt

SEQ ID NO: 4463 - DNA, 20 bp, synthetic construct
  misc_feature 1..20: note = chemically synthesized
  source 1..20: mol_type = other DNA
aactggagaaaagtgagaaa

SEQ ID NO: 4464 - DNA, 20 bp, synthetic construct
  misc_feature 1..20: note = chemically synthesized
  source 1..20: mol_type = other DNA
ctggagaaaagtgagaaatg

SEQ ID NO: 4465 - DNA, 20 bp, synthetic construct
  misc_feature 1..20: note = chemically synthesized
  source 1..20: mol_type = other DNA
gagaaatggagcttttttct

SEQ ID NO: 4466 - DNA, 20 bp, synthetic construct
  misc_feature 1..20: note = chemically synthesized
  source 1..20: mol_type = other DNA
cttttttcttggcttccaaa

SEQ ID NO: 4467 - DNA, 20 bp, synthetic construct
  misc_feature 1..20: note = chemically synthesized
  source 1..20: mol_type = other DNA
taatttccactgccactgct

SEQ ID NO: 4468 - DNA, 20 bp, synthetic construct
  misc_feature 1..20: note = chemically synthesized
  source 1..20: mol_type = other DNA
cactgccactgcttagttcc

SEQ ID NO: 4469 - DNA, 20 bp, synthetic construct
  misc_feature 1..20: note = chemically synthesized
  source 1..20: mol_type = other DNA
actgccactgcttagttcct

SEQ ID NO: 4470 - DNA, 20 bp, synthetic construct
  misc_feature 1..20: note = chemically synthesized
  source 1..20: mol_type = other DNA
actgcttagttcctgggcac

SEQ ID NO: 4471 - DNA, 20 bp, synthetic construct
  misc_feature 1..20: note = chemically synthesized
  source 1..20: mol_type = other DNA
ctgcttagttcctgggcacc

SEQ ID NO: 4472 - DNA, 20 bp, synthetic construct
  misc_feature 1..20: note = chemically synthesized
  source 1..20: mol_type = other DNA
gttcctgggcaccaggcata

SEQ ID NO: 4473 - DNA, 20 bp, synthetic construct
  misc_feature 1..20: note = chemically synthesized
  source 1..20: mol_type = other DNA
tcctgggcaccaggcataca

SEQ ID NO: 4474 - DNA, 20 bp, synthetic construct
  misc_feature 1..20: note = chemically synthesized
  source 1..20: mol_type = other DNA
tgggcaccaggcatacagag

SEQ ID NO: 4475 - DNA, 20 bp, synthetic construct
  misc_feature 1..20: note = chemically synthesized
  source 1..20: mol_type = other DNA
gggcaccaggcatacagagt

SEQ ID NO: 4476 - DNA, 20 bp, synthetic construct
  misc_feature 1..20: note = chemically synthesized
  source 1..20: mol_type = other DNA
accaggcatacagagtggga

SEQ ID NO: 4477 - DNA, 20 bp, synthetic construct
  misc_feature 1..20: note = chemically synthesized
  source 1..20: mol_type = other DNA
ccaggcatacagagtgggaa

SEQ ID NO: 4478 - DNA, 20 bp, synthetic construct
  misc_feature 1..20: note = chemically synthesized
  source 1..20: mol_type = other DNA
caggcatacagagtgggaaa

SEQ ID NO: 4479 - DNA, 20 bp, synthetic construct
  misc_feature 1..20: note = chemically synthesized
  source 1..20: mol_type = other DNA
aggcatacagagtgggaaag

SEQ ID NO: 4480 - DNA, 20 bp, synthetic construct
  misc_feature 1..20: note = chemically synthesized
  source 1..20: mol_type = other DNA
gtgacaactttgccacaaat

SEQ ID NO: 4481 - DNA, 20 bp, synthetic construct
  misc_feature 1..20: note = chemically synthesized
  source 1..20: mol_type = other DNA
tgacaactttgccacaaatc

SEQ ID NO: 4482 - DNA, 20 bp, synthetic construct
  misc_feature 1..20: note = chemically synthesized
  source 1..20: mol_type = other DNA
ctttgccacaaatcaggatt

SEQ ID NO: 4483 - DNA, 20 bp, synthetic construct
  misc_feature 1..20: note = chemically synthesized
  source 1..20: mol_type = other DNA
ggatttggcatttaaatcca

SEQ ID NO: 4484 - DNA, 20 bp, synthetic construct
  misc_feature 1..20: note = chemically synthesized
  source 1..20: mol_type = other DNA
gatttggcatttaaatccac

SEQ ID NO: 4485 - DNA, 20 bp, synthetic construct
  misc_feature 1..20: note = chemically synthesized
  source 1..20: mol_type = other DNA
ttggcatttaaatccacagg

SEQ ID NO: 4486 - DNA, 20 bp, synthetic construct
  misc_feature 1..20: note = chemically synthesized
  source 1..20: mol_type = other DNA
catttaaatccacaggaagc

SEQ ID NO: 4487 - DNA, 20 bp, synthetic construct
  misc_feature 1..20: note = chemically synthesized
  source 1..20: mol_type = other DNA
ttaaatccacaggaagcaag

SEQ ID NO: 4488 - DNA, 20 bp, synthetic construct
  misc_feature 1..20: note = chemically synthesized
  source 1..20: mol_type = other DNA
tccacaggaagcaagaagaa

SEQ ID NO: 4489 - DNA, 20 bp, synthetic construct
  misc_feature 1..20: note = chemically synthesized
  source 1..20: mol_type = other DNA
cacaggaagcaagaagaata

SEQ ID NO: 4490 - DNA, 20 bp, synthetic construct
  misc_feature 1..20: note = chemically synthesized
  source 1..20: mol_type = other DNA
acaggaagcaagaagaatag

SEQ ID NO: 4491 - DNA, 20 bp, synthetic construct
  misc_feature 1..20: note = chemically synthesized
  source 1..20: mol_type = other DNA
caggaagcaagaagaataga

SEQ ID NO: 4492 - DNA, 20 bp, synthetic construct
  misc_feature 1..20: note = chemically synthesized
  source 1..20: mol_type = other DNA
atagagggactgcttattta

SEQ ID NO: 4493 - DNA, 20 bp, synthetic construct
  misc_feature 1..20: note = chemically synthesized
  source 1..20: mol_type = other DNA
actgcttatttatagatttg

SEQ ID NO: 4494 - DNA, 20 bp, synthetic construct
  misc_feature 1..20: note = chemically synthesized
  source 1..20: mol_type = other DNA
ttatagatttgcagatgaat

SEQ ID NO: 4495 - DNA, 20 bp, synthetic construct
  misc_feature 1..20: note = chemically synthesized
  source 1..20: mol_type = other DNA
atgcacttctcgcgtatgtg

SEQ ID NO: 4496 - DNA, 20 bp, synthetic construct
  misc_feature 1..20: note = chemically synthesized
  source 1..20: mol_type = other DNA
tgcacttctcgcgtatgtga

SEQ ID NO: 4497 - DNA, 20 bp, synthetic construct
  misc_feature 1..20: note = chemically synthesized
  source 1..20: mol_type = other DNA
cacttctcgcgtatgtgaag

SEQ ID NO: 4498 - DNA, 20 bp, synthetic construct
  misc_feature 1..20: note = chemically synthesized
  source 1..20: mol_type = other DNA
tgaaggagcaattccatttt

SEQ ID NO: 4499 - DNA, 20 bp, synthetic construct
  misc_feature 1..20: note = chemically synthesized
  source 1..20: mol_type = other DNA
agcaattccattttcagact

SEQ ID NO: 4500 - DNA, 20 bp, synthetic construct
  misc_feature 1..20: note = chemically synthesized
  source 1..20: mol_type = other DNA
attccattttcagacttgga

SEQ ID NO: 4501 - DNA, 20 bp, synthetic construct
  misc_feature 1..20: note = chemically synthesized
  source 1..20: mol_type = other DNA
ttggaaagttctccataatt

SEQ ID NO: 4502 - DNA, 20 bp, synthetic construct
  misc_feature 1..20: note = chemically synthesized
  source 1..20: mol_type = other DNA
taagtatcacccaaccctga

SEQ ID NO: 4503 - DNA, 20 bp, synthetic construct
  misc_feature 1..20: note = chemically synthesized
  source 1..20: mol_type = other DNA
ctgaaagcacactgcatccc

SEQ ID NO: 4504 - DNA, 20 bp, synthetic construct
  misc_feature 1..20: note = chemically synthesized
  source 1..20: mol_type = other DNA
tgaaagcacactgcatccca

SEQ ID NO: 4505 - DNA, 20 bp, synthetic construct
  misc_feature 1..20: note = chemically synthesized
  source 1..20: mol_type = other DNA
gcacactgcatcccaaggtt

SEQ ID NO: 4506 - DNA, 20 bp, synthetic construct
  misc_feature 1..20: note = chemically synthesized
  source 1..20: mol_type = other DNA
ctgcatcccaaggttaagat

SEQ ID NO: 4507 - DNA, 20 bp, synthetic construct
  misc_feature 1..20: note = chemically synthesized
  source 1..20: mol_type = other DNA
taagatcagcttcctgaaaa

SEQ ID NO: 4508 - DNA, 20 bp, synthetic construct
  misc_feature 1..20: note = chemically synthesized
  source 1..20: mol_type = other DNA
aagatcagcttcctgaaaac

SEQ ID NO: 4509 - DNA, 20 bp, synthetic construct
  misc_feature 1..20: note = chemically synthesized
  source 1..20: mol_type = other DNA
agatcagcttcctgaaaaca

SEQ ID NO: 4510 - DNA, 20 bp, synthetic construct
  misc_feature 1..20: note = chemically synthesized
  source 1..20: mol_type = other DNA
tcagcttcctgaaaacaggg

SEQ ID NO: 4511 - DNA, 20 bp, synthetic construct
  misc_feature 1..20: note = chemically synthesized
  source 1..20: mol_type = other DNA
gcttcctgaaaacagggcag

SEQ ID NO: 4512 - DNA, 20 bp, synthetic construct
  misc_feature 1..20: note = chemically synthesized
  source 1..20: mol_type = other DNA
agggcagaagactgctgctt

SEQ ID NO: 4513 - DNA, 20 bp, synthetic construct
  misc_feature 1..20: note = chemically synthesized
  source 1..20: mol_type = other DNA
gcagaagactgctgcttcag

SEQ ID NO: 4514 - DNA, 20 bp, synthetic construct
  misc_feature 1..20: note = chemically synthesized
  source 1..20: mol_type = other DNA
gaagactgctgcttcagtgg

SEQ ID NO: 4515 - DNA, 20 bp, synthetic construct
  misc_feature 1..20: note = chemically synthesized
  source 1..20: mol_type = other DNA
agctcaaaaattctattttg

SEQ ID NO: 4516 - DNA, 20 bp, synthetic construct
  misc_feature 1..20: note = chemically synthesized
  source 1..20: mol_type = other DNA
gctcaaaaattctattttga

SEQ ID NO: 4517 - DNA, 20 bp, synthetic construct
  misc_feature 1..20: note = chemically synthesized
  source 1..20: mol_type = other DNA
aaaaattctattttgaagga

SEQ ID NO: 4518 - DNA, 20 bp, synthetic construct
  misc_feature 1..20: note = chemically synthesized
  source 1..20: mol_type = other DNA
aaaattctattttgaaggac

SEQ ID NO: 4519 - DNA, 20 bp, synthetic construct
  misc_feature 1..20: note = chemically synthesized
  source 1..20: mol_type = other DNA
ttctattttgaaggacaggt

SEQ ID NO: 4520 - DNA, 20 bp, synthetic construct
  misc_feature 1..20: note = chemically synthesized
  source 1..20: mol_type = other DNA
agtaccacactacatttaac

SEQ ID NO: 4521 - DNA, 20 bp, synthetic construct
  misc_feature 1..20: note = chemically synthesized
  source 1..20: mol_type = other DNA
acactacatttaactggatt

SEQ ID NO: 4522 - DNA, 20 bp, synthetic construct
  misc_feature 1..20: note = chemically synthesized
  source 1..20: mol_type = other DNA
attcagttcatgtgattata

SEQ ID NO: 4523 - DNA, 20 bp, synthetic construct
  misc_feature 1..20: note = chemically synthesized
  source 1..20: mol_type = other DNA
ttatacagtgccttgctttc

SEQ ID NO: 4524 - DNA, 20 bp, synthetic construct
  misc_feature 1..20: note = chemically synthesized
  source 1..20: mol_type = other DNA
tgacattttaaatatccaac

SEQ ID NO: 4525 - DNA, 20 bp, synthetic construct
  misc_feature 1..20: note = chemically synthesized
  source 1..20: mol_type = other DNA
tccaactagacaaataattg

SEQ ID NO: 4526 - DNA, 20 bp, synthetic construct
  misc_feature 1..20: note = chemically synthesized
  source 1..20: mol_type = other DNA
ataattgcagcaataattga

SEQ ID NO: 4527 - DNA, 20 bp, synthetic construct
  misc_feature 1..20: note = chemically synthesized
  source 1..20: mol_type = other DNA
attgcagcaataattgatag

SEQ ID NO: 4528 - DNA, 20 bp, synthetic construct
  misc_feature 1..20: note = chemically synthesized
  source 1..20: mol_type = other DNA
tgcagcaataattgatagca

SEQ ID NO: 4529 - DNA, 20 bp, synthetic construct
  misc_feature 1..20: note = chemically synthesized
  source 1..20: mol_type = other DNA
caataattgatagcagagtc

SEQ ID NO: 4530 - DNA, 20 bp, synthetic construct
  misc_feature 1..20: note = chemically synthesized
  source 1..20: mol_type = other DNA
aattgatagcagagtcaagc

SEQ ID NO: 4531 - DNA, 20 bp, synthetic construct
  misc_feature 1..20: note = chemically synthesized
  source 1..20: mol_type = other DNA
tgatagcagagtcaagctgg

SEQ ID NO: 4532 - DNA, 20 bp, synthetic construct
  misc_feature 1..20: note = chemically synthesized
  source 1..20: mol_type = other DNA
caagctggaagatcattgat

SEQ ID NO: 4533 - DNA, 20 bp, synthetic construct
  misc_feature 1..20: note = chemically synthesized
  source 1..20: mol_type = other DNA
gctggaagatcattgattgg

SEQ ID NO: 4534 - DNA, 20 bp, synthetic construct
  misc_feature 1..20: note = chemically synthesized
  source 1..20: mol_type = other DNA
tggaagatcattgattggca

SEQ ID NO: 4535 - DNA, 20 bp, synthetic construct
  misc_feature 1..20: note = chemically synthesized
  source 1..20: mol_type = other DNA
aatctttctttcaaacatta

SEQ ID NO: 4536 - DNA, 20 bp, synthetic construct
  misc_feature 1..20: note = chemically synthesized
  source 1..20: mol_type = other DNA
ttacagaaatgatgatgttt

SEQ ID NO: 4537 - DNA, 20 bp, synthetic construct
  misc_feature 1..20: note = chemically synthesized
  source 1..20: mol_type = other DNA
caaaatctgatttactgata

SEQ ID NO: 4538 - DNA, 20 bp, synthetic construct
  misc_feature 1..20: note = chemically synthesized
  source 1..20: mol_type = other DNA
aaaatctgatttactgataa

SEQ ID NO: 4539 - DNA, 20 bp, synthetic construct
  misc_feature 1..20: note = chemically synthesized
  source 1..20: mol_type = other DNA
tttactgataaaggcactgc

SEQ ID NO: 4540 - DNA, 20 bp, synthetic construct
  misc_feature 1..20: note = chemically synthesized
  source 1..20: mol_type = other DNA
ctgcaagaaaacctgcactt

SEQ ID NO: 4541 - DNA, 20 bp, synthetic construct
  misc_feature 1..20: note = chemically synthesized
  source 1..20: mol_type = other DNA
tcagcccatgattactttgc

SEQ ID NO: 4542 - DNA, 20 bp, synthetic construct
  misc_feature 1..20: note = chemically synthesized
  source 1..20: mol_type = other DNA
gattactttgcgagatgttt

SEQ ID NO: 4543 - DNA, 20 bp, synthetic construct
  misc_feature 1..20: note = chemically synthesized
  source 1..20: mol_type = other DNA
tactttgcgagatgtttgag

SEQ ID NO: 4544 - DNA, 20 bp, synthetic construct
  misc_feature 1..20: note = chemically synthesized
  source 1..20: mol_type = other DNA
gcgagatgtttgagaagaat

SEQ ID NO: 4545 - DNA, 20 bp, synthetic construct
  misc_feature 1..20: note = chemically synthesized
  source 1..20: mol_type = other DNA
cgagatgtttgagaagaatc

SEQ ID NO: 4546 - DNA, 20 bp, synthetic construct
  misc_feature 1..20: note = chemically synthesized
  source 1..20: mol_type = other DNA
gatgtttgagaagaatcagg

SEQ ID NO: 4547 - DNA, 20 bp, synthetic construct
  misc_feature 1..20: note = chemically synthesized
  source 1..20: mol_type = other DNA
tatttcccatgaataactgc

SEQ ID NO: 4548 - DNA, 20 bp, synthetic construct
  misc_feature 1..20: note = chemically synthesized
  source 1..20: mol_type = other DNA
atttcccatgaataactgca

SEQ ID NO: 4549 - DNA, 20 bp, synthetic construct
  misc_feature 1..20: note = chemically synthesized
  source 1..20: mol_type = other DNA
cccatgaataactgcaagga

SEQ ID NO: 4550 - DNA, 20 bp, synthetic construct
  misc_feature 1..20: note = chemically synthesized
  source 1..20: mol_type = other DNA
gaataactgcaaggatagtg

SEQ ID NO: 4551 - DNA, 20 bp, synthetic construct
  misc_feature 1..20: note = chemically synthesized
  source 1..20: mol_type = other DNA
aataactgcaaggatagtgt

SEQ ID NO: 4552 - DNA, 20 bp, synthetic construct
  misc_feature 1..20: note = chemically synthesized
  source 1..20: mol_type = other DNA
aactgcaaggatagtgtggg

SEQ ID NO: 4553 - DNA, 20 bp, synthetic construct
  misc_feature 1..20: note = chemically synthesized
  source 1..20: mol_type = other DNA
gcaaggatagtgtgggtagt

SEQ ID NO: 4554 - DNA, 20 bp, synthetic construct
  misc_feature 1..20: note = chemically synthesized
  source 1..20: mol_type = other DNA
aaggatagtgtgggtagttg

SEQ ID NO: 4555 - DNA, 20 bp, synthetic construct
  misc_feature 1..20: note = chemically synthesized
  source 1..20: mol_type = other DNA
aggatagtgtgggtagttgg

SEQ ID NO: 4556 - DNA, 20 bp, synthetic construct
  misc_feature 1..20: note = chemically synthesized
  source 1..20: mol_type = other DNA
gatagtgtgggtagttggag

SEQ ID NO: 4557 - DNA, 20 bp, synthetic construct
  misc_feature 1..20: note = chemically synthesized
  source 1..20: mol_type = other DNA
tagttggaggagaatcaaca

SEQ ID NO: 4558 - DNA, 20 bp, synthetic construct
  misc_feature 1..20: note = chemically synthesized
  source 1..20: mol_type = other DNA
agttggaggagaatcaacac

SEQ ID NO: 4559 - DNA, 20 bp, synthetic construct
  misc_feature 1..20: note = chemically synthesized
  source 1..20: mol_type = other DNA
ggaggagaatcaacacaggc

SEQ ID NO: 4560 - DNA, 20 bp, synthetic construct
  misc_feature 1..20: note = chemically synthesized
  source 1..20: mol_type = other DNA
aggagaatcaacacaggcga

SEQ ID NO: 4561 - DNA, 20 bp, synthetic construct
  misc_feature 1..20: note = chemically synthesized
  source 1..20: mol_type = other DNA
agaatcaacacaggcgagag

SEQ ID NO: 4562 - DNA, 20 bp, synthetic construct
  misc_feature 1..20: note = chemically synthesized
  source 1..20: mol_type = other DNA
ctacacttcctgaacaatgc

SEQ ID NO: 4563 - DNA, 20 bp, synthetic construct
  misc_feature 1..20: note = chemically synthesized
  source 1..20: mol_type = other DNA
gaacaatgctagccaacaat

SEQ ID NO: 4564 - DNA, 20 bp, synthetic construct
  misc_feature 1..20: note = chemically synthesized
  source 1..20: mol_type = other DNA
aacaatgctagccaacaatc

SEQ ID NO: 4565 - DNA, 20 bp, synthetic construct
  misc_feature 1..20: note = chemically synthesized
  source 1..20: mol_type = other DNA
acaatgctagccaacaatca

SEQ ID NO: 4566 - DNA, 20 bp, synthetic construct
  misc_feature 1..20: note = chemically synthesized
  source 1..20: mol_type = other DNA
tagccaacaatcagggttta

SEQ ID NO: 4567 - DNA, 20 bp, synthetic construct
  misc_feature 1..20: note = chemically synthesized
  source 1..20: mol_type = other DNA
cccctctaatatatatcccg

SEQ ID NO: 4568 - DNA, 20 bp, synthetic construct
  misc_feature 1..20: note = chemically synthesized
  source 1..20: mol_type = other DNA
ctctaatatatatcccgtgg

SEQ ID NO: 4569 - DNA, 20 bp, synthetic construct
  misc_feature 1..20: note = chemically synthesized
  source 1..20: mol_type = other DNA
ctaatatatatcccgtggta

SEQ ID NO: 4570 - DNA, 20 bp, synthetic construct
  misc_feature 1..20: note = chemically synthesized
  source 1..20: mol_type = other DNA
tatatcccgtggtagagaaa

SEQ ID NO: 4571 - DNA, 20 bp, synthetic construct
  misc_feature 1..20: note = chemically synthesized
  source 1..20: mol_type = other DNA
ggtagagaaatggtcttgac

SEQ ID NO: 4572 - DNA, 20 bp, synthetic construct
  misc_feature 1..20: note = chemically synthesized
  source 1..20: mol_type = other DNA
gtagagaaatggtcttgaca

SEQ ID NO: 4573 - DNA, 20 bp, synthetic construct
  misc_feature 1..20: note = chemically synthesized
  source 1..20: mol_type = other DNA
tagagaaatggtcttgacaa

SEQ ID NO: 4574 - DNA, 20 bp, synthetic construct
  misc_feature 1..20: note = chemically synthesized
  source 1..20: mol_type = other DNA
agagaaatggtcttgacaag

SEQ ID NO: 4575 - DNA, 20 bp, synthetic construct
  misc_feature 1..20: note = chemically synthesized
  source 1..20: mol_type = other DNA
gaaatggtcttgacaagggg

SEQ ID NO: 4576 - DNA, 20 bp, synthetic construct
  misc_feature 1..20: note = chemically synthesized
  source 1..20: mol_type = other DNA
ggtcttgacaaggggaagac

SEQ ID NO: 4577 - DNA, 20 bp, synthetic construct
  misc_feature 1..20: note = chemically synthesized
  source 1..20: mol_type = other DNA
gtcttgacaaggggaagacc

SEQ ID NO: 4578 - DNA, 20 bp, synthetic construct
  misc_feature 1..20: note = chemically synthesized
  source 1..20: mol_type = other DNA
gacaaggggaagaccaggaa

SEQ ID NO: 4579 - DNA, 20 bp, synthetic construct
  misc_feature 1..20: note = chemically synthesized
  source 1..20: mol_type = other DNA
aaggggaagaccaggaaaag

SEQ ID NO: 4580 - DNA, 20 bp, synthetic construct
  misc_feature 1..20: note = chemically synthesized
  source 1..20: mol_type = other DNA
aaagaagacacacaaataat

SEQ ID NO: 4581 - DNA, 20 bp, synthetic construct
  misc_feature 1..20: note = chemically synthesized
  source 1..20: mol_type = other DNA
cacaaataatcagctccatt

SEQ ID NO: 4582 - DNA, 20 bp, synthetic construct
  misc_feature 1..20: note = chemically synthesized
  source 1..20: mol_type = other DNA
acaaataatcagctccattc

SEQ ID NO: 4583 - DNA, 20 bp, synthetic construct
  misc_feature 1..20: note = chemically synthesized
  source 1..20: mol_type = other DNA
gctccattcaggcctttgaa

SEQ ID NO: 4584 - DNA, 20 bp, synthetic construct
  misc_feature 1..20: note = chemically synthesized
  source 1..20: mol_type = other DNA
ccattcaggcctttgaaaag

SEQ ID NO: 4585 - DNA, 20 bp, synthetic construct
  misc_feature 1..20: note = chemically synthesized
  source 1..20: mol_type = other DNA
tttaaatcgatgcctcaaat

SEQ ID NO: 4586 - DNA, 20 bp, synthetic construct
  misc_feature 1..20: note = chemically synthesized
  source 1..20: mol_type = other DNA
ttaaatcgatgcctcaaatt

SEQ ID NO: 4587 - DNA, 20 bp, synthetic construct
  misc_feature 1..20: note = chemically synthesized
  source 1..20: mol_type = other DNA
gggactcaaattcccctgcc

SEQ ID NO: 4588 - DNA, 20 bp, synthetic construct
  misc_feature 1..20: note = chemically synthesized
  source 1..20: mol_type = other DNA
aaattcccctgcccagtgca

SEQ ID NO: 4589 - DNA, 20 bp, synthetic construct
  misc_feature 1..20: note = chemically synthesized
  source 1..20: mol_type = other DNA
ctgcccagtgcaaagatccc

SEQ ID NO: 4590 - DNA, 20 bp, synthetic construct
  misc_feature 1..20: note = chemically synthesized
  source 1..20: mol_type = other DNA
cagtgcaaagatccctggcc

SEQ ID NO: 4591 - DNA, 20 bp, synthetic construct
  misc_feature 1..20: note = chemically synthesized
  source 1..20: mol_type = other DNA
agtgcaaagatccctggcca

SEQ ID NO: 4592 - DNA, 20 bp, synthetic construct
  misc_feature 1..20: note = chemically synthesized
  source 1..20: mol_type = other DNA
caaagatccctggccaaggt

SEQ ID NO: 4593 - DNA, 20 bp, synthetic construct
  misc_feature 1..20: note = chemically synthesized
  source 1..20: mol_type = other DNA
agatccctggccaaggtcag

SEQ ID NO: 4594 - DNA, 20 bp, synthetic construct
  misc_feature 1..20: note = chemically synthesized
  source 1..20: mol_type = other DNA
tggccaaggtcagaagactt

SEQ ID NO: 4595 - DNA, 20 bp, synthetic construct
  misc_feature 1..20: note = chemically synthesized
  source 1..20: mol_type = other DNA
aaggtcagaagacttgagac

SEQ ID NO: 4596 - DNA, 20 bp, synthetic construct
  misc_feature 1..20: note = chemically synthesized
  source 1..20: mol_type = other DNA
aggtcagaagacttgagacc

SEQ ID NO: 4597 - DNA, 20 bp, synthetic construct
  misc_feature 1..20: note = chemically synthesized
  source 1..20: mol_type = other DNA
cagaagacttgagaccaggc

SEQ ID NO: 4598 - DNA, 20 bp, synthetic construct
  misc_feature 1..20: note = chemically synthesized
  source 1..20: mol_type = other DNA
acttgagaccaggcaagtcc

SEQ ID NO: 4599 - DNA, 20 bp, synthetic construct
  misc_feature 1..20: note = chemically synthesized
  source 1..20: mol_type = other DNA
aggcaagtcccagatgatct

SEQ ID NO: 4600 - DNA, 20 bp, synthetic construct
  misc_feature 1..20: note = chemically synthesized
  source 1..20: mol_type = other DNA
ggcaagtcccagatgatctc

SEQ ID NO: 4601 - DNA, 20 bp, synthetic construct
  misc_feature 1..20: note = chemically synthesized
  source 1..20: mol_type = other DNA
agtcccagatgatctcaggc

SEQ ID NO: 4602 - DNA, 20 bp, synthetic construct
  misc_feature 1..20: note = chemically synthesized
  source 1..20: mol_type = other DNA
gatgatctcaggcaagtccc

SEQ ID NO: 4603 - DNA, 20 bp, synthetic construct
  misc_feature 1..20: note = chemically synthesized
  source 1..20: mol_type = other DNA
atgatctcaggcaagtcccc

SEQ ID NO: 4604 - DNA, 20 bp, synthetic construct
  misc_feature 1..20: note = chemically synthesized
  source 1..20: mol_type = other DNA
ctcaggcaagtccccaggta

SEQ ID NO: 4605 - DNA, 20 bp, synthetic construct
  misc_feature 1..20: note = chemically synthesized
  source 1..20: mol_type = other DNA
caagtccccaggtatagctg

SEQ ID NO: 4606 - DNA, 20 bp, synthetic construct
  misc_feature 1..20: note = chemically synthesized
  source 1..20: mol_type = other DNA
aggtatagctgcagtccctt

SEQ ID NO: 4607 - DNA, 20 bp, synthetic construct
  misc_feature 1..20: note = chemically synthesized
  source 1..20: mol_type = other DNA
agctgcagtccctttagccc

SEQ ID NO: 4608 - DNA, 20 bp, synthetic construct
  misc_feature 1..20: note = chemically synthesized
  source 1..20: mol_type = other DNA
cccagtctgtttctctgtcc

SEQ ID NO: 4609 - DNA, 20 bp, synthetic construct
  misc_feature 1..20: note = chemically synthesized
  source 1..20: mol_type = other DNA
ccagtctgtttctctgtcca

SEQ ID NO: 4610 - DNA, 20 bp, synthetic construct
  misc_feature 1..20: note = chemically synthesized
  source 1..20: mol_type = other DNA
gtctgtttctctgtccaagg

SEQ ID NO: 4611 - DNA, 20 bp, synthetic construct
  misc_feature 1..20: note = chemically synthesized
  source 1..20: mol_type = other DNA
gtgttttgattgtaatattt

SEQ ID NO: 4612 - DNA, 20 bp, synthetic construct
  misc_feature 1..20: note = chemically synthesized
  source 1..20: mol_type = other DNA
tttgattgtaatatttaagt

SEQ ID NO: 4613 - DNA, 20 bp, synthetic construct
  misc_feature 1..20: note = chemically synthesized
  source 1..20: mol_type = other DNA
ttgattgtaatatttaagtt

SEQ ID NO: 4614 - DNA, 20 bp, synthetic construct
  misc_feature 1..20: note = chemically synthesized
  source 1..20: mol_type = other DNA
tgattgtaatatttaagtta

SEQ ID NO: 4615 - DNA, 20 bp, synthetic construct
  misc_feature 1..20: note = chemically synthesized
  source 1..20: mol_type = other DNA
gggcactgtgttcaacaact

SEQ ID NO: 4616 - DNA, 20 bp, synthetic construct
  misc_feature 1..20: note = chemically synthesized
  source 1..20: mol_type = other DNA
gttcaacaactcagaccctg

SEQ ID NO: 4617 - DNA, 20 bp, synthetic construct
  misc_feature 1..20: note = chemically synthesized
  source 1..20: mol_type = other DNA
tcagaccctgtggaatgctg

SEQ ID NO: 4618 - DNA, 20 bp, synthetic construct
  misc_feature 1..20: note = chemically synthesized
  source 1..20: mol_type = other DNA
ctgtggaatgctgcagttgt

SEQ ID NO: 4619 - DNA, 20 bp, synthetic construct
  misc_feature 1..20: note = chemically synthesized
  source 1..20: mol_type = other DNA
gcagttgtcagaaataactc

SEQ ID NO: 4620 - DNA, 20 bp, synthetic construct
  misc_feature 1..20: note = chemically synthesized
  source 1..20: mol_type = other DNA
agttgtcagaaataactcaa

SEQ ID NO: 4621 - DNA, 20 bp, synthetic construct
  misc_feature 1..20: note = chemically synthesized
  source 1..20: mol_type = other DNA
ttgtcagaaataactcaaga

SEQ ID NO: 4622 - DNA, 20 bp, synthetic construct
  misc_feature 1..20: note = chemically synthesized
  source 1..20: mol_type = other DNA
tgtcagaaataactcaagag

SEQ ID NO: 4623 - DNA, 20 bp, synthetic construct
  misc_feature 1..20: note = chemically synthesized
  source 1..20: mol_type = other DNA
caagagaggatgctcgtccc

SEQ ID NO: 4624 - DNA, 20 bp, synthetic construct
  misc_feature 1..20: note = chemically synthesized
  source 1..20: mol_type = other DNA
aagagaggatgctcgtcccc

SEQ ID NO: 4625 - DNA, 20 bp, synthetic construct
  misc_feature 1..20: note = chemically synthesized
  source 1..20: mol_type = other DNA
ccaggaaacatcaaatgaat

SEQ ID NO: 4626 - DNA, 20 bp, synthetic construct
  misc_feature 1..20: note = chemically synthesized
  source 1..20: mol_type = other DNA
gaaacatcaaatgaatgagc

SEQ ID NO: 4627 - DNA, 20 bp, synthetic construct
  misc_feature 1..20: note = chemically synthesized
  source 1..20: mol_type = other DNA
aaatgaatgagctggcatat

SEQ ID NO: 4628 - DNA, 20 bp, synthetic construct
  misc_feature 1..20: note = chemically synthesized
  source 1..20: mol_type = other DNA
tgaatgagctggcatattag

SEQ ID NO: 4629 - DNA, 20 bp, synthetic construct
  misc_feature 1..20: note = chemically synthesized
  source 1..20: mol_type = other DNA
agctggcatattagcagacg

SEQ ID NO: 4630 - DNA, 20 bp, synthetic construct
  misc_feature 1..20: note = chemically synthesized
  source 1..20: mol_type = other DNA
atattagcagacgtggatta

SEQ ID NO: 4631 - DNA, 20 bp, synthetic construct
  misc_feature 1..20: note = chemically synthesized
  source 1..20: mol_type = other DNA
tagcagacgtggattacagt

SEQ ID NO: 4632 - DNA, 20 bp, synthetic construct
  misc_feature 1..20: note = chemically synthesized
  source 1..20: mol_type = other DNA
agcagacgtggattacagta

SEQ ID NO: 4633 - DNA, 20 bp, synthetic construct
  misc_feature 1..20: note = chemically synthesized
  source 1..20: mol_type = other DNA
acagtaaggaaaatctaaaa

SEQ ID NO: 4634 - DNA, 20 bp, synthetic construct
  misc_feature 1..20: note = chemically synthesized
  source 1..20: mol_type = other DNA
gtaaggaaaatctaaaacag

SEQ ID NO: 4635 - DNA, 20 bp, synthetic construct
  misc_feature 1..20: note = chemically synthesized
  source 1..20: mol_type = other DNA
tctaaaacagaagatgtatc

SEQ ID NO: 4636 - DNA, 20 bp, synthetic construct
  misc_feature 1..20: note = chemically synthesized
  source 1..20: mol_type = other DNA
gaagatgtatctggatgctt

SEQ ID NO: 4637 - DNA, 20 bp, synthetic construct
  misc_feature 1..20: note = chemically synthesized
  source 1..20: mol_type = other DNA
gatgtatctggatgcttcag

SEQ ID NO: 4638 - DNA, 20 bp, synthetic construct
  misc_feature 1..20: note = chemically synthesized
  source 1..20: mol_type = other DNA
ggatgcttcagcagacaaca

SEQ ID NO: 4639 - DNA, 20 bp, synthetic construct
  misc_feature 1..20: note = chemically synthesized
  source 1..20: mol_type = other DNA
gatgcttcagcagacaacaa

SEQ ID NO: 4640 - DNA, 20 bp, synthetic construct
  misc_feature 1..20: note = chemically synthesized
  source 1..20: mol_type = other DNA
gcttcagcagacaacaaagg

SEQ ID NO: 4641 - DNA, 20 bp, synthetic construct
  misc_feature 1..20: note = chemically synthesized
  source 1..20: mol_type = other DNA
cagacaacaaaggaagaatt

SEQ ID NO: 4642 - DNA, 20 bp, synthetic construct
  misc_feature 1..20: note = chemically synthesized
  source 1..20: mol_type = other DNA
agacaacaaaggaagaattt

SEQ ID NO: 4643 - DNA, 20 bp, synthetic construct
  misc_feature 1..20: note = chemically synthesized
  source 1..20: mol_type = other DNA
gacaacaaaggaagaatttg

SEQ ID NO: 4644 - DNA, 20 bp, synthetic construct
  misc_feature 1..20: note = chemically synthesized
  source 1..20: mol_type = other DNA
caaaggaagaatttggggac

SEQ ID NO: 4645 - DNA, 20 bp, synthetic construct
  misc_feature 1..20: note = chemically synthesized
  source 1..20: mol_type = other DNA
aaaggaagaatttggggact

SEQ ID NO: 4646 - DNA, 20 bp, synthetic construct
  misc_feature 1..20: note = chemically synthesized
  source 1..20: mol_type = other DNA
agaatttggggactgggtct

SEQ ID NO: 4647 - DNA, 20 bp, synthetic construct
  misc_feature 1..20: note = chemically synthesized
  source 1..20: mol_type = other DNA
tgggtctaagcactcgccca

SEQ ID NO: 4648 - DNA, 20 bp, synthetic construct
  misc_feature 1..20: note = chemically synthesized
  source 1..20: mol_type = other DNA
taagcactcgcccaaagcac

SEQ ID NO: 4649 - DNA, 20 bp, synthetic construct
  misc_feature 1..20: note = chemically synthesized
  source 1..20: mol_type = other DNA
gcactcgcccaaagcactag

SEQ ID NO: 4650 - DNA, 20 bp, synthetic construct
  misc_feature 1..20: note = chemically synthesized
  source 1..20: mol_type = other DNA
cactcgcccaaagcactaga

SEQ ID NO: 4651 - DNA, 20 bp, synthetic construct
  misc_feature 1..20: note = chemically synthesized
  source 1..20: mol_type = other DNA
ctcgcccaaagcactagaag

SEQ ID NO: 4652 - DNA, 20 bp, synthetic construct
  misc_feature 1..20: note = chemically synthesized
  source 1..20: mol_type = other DNA
tcgcccaaagcactagaagg

SEQ ID NO: 4653 - DNA, 20 bp, synthetic construct
  misc_feature 1..20: note = chemically synthesized
  source 1..20: mol_type = other DNA
ctttcctatttttgttcttc

SEQ ID NO: 4654 - DNA, 20 bp, synthetic construct
  misc_feature 1..20: note = chemically synthesized
  source 1..20: mol_type = other DNA
ctttccttctttttctttct

SEQ ID NO: 4655 - DNA, 20 bp, synthetic construct
  misc_feature 1..20: note = chemically synthesized
  source 1..20: mol_type = other DNA
gaaactgaaccattataaat

SEQ ID NO: 4656 - DNA, 20 bp, synthetic construct
  misc_feature 1..20: note = chemically synthesized
  source 1..20: mol_type = other DNA
ctgaaccattataaatgagt

SEQ ID NO: 4657 - DNA, 20 bp, synthetic construct
  misc_feature 1..20: note = chemically synthesized
  source 1..20: mol_type = other DNA
ttataaatgagttggtctca

SEQ ID NO: 4658 - DNA, 20 bp, synthetic construct
  misc_feature 1..20: note = chemically synthesized
  source 1..20: mol_type = other DNA
tcatagcttctgttaaaaat

SEQ ID NO: 4659 - DNA, 20 bp, synthetic construct
  misc_feature 1..20: note = chemically synthesized
  source 1..20: mol_type = other DNA
tagcttctgttaaaaatcag

SEQ ID NO: 4660 - DNA, 20 bp, synthetic construct
  misc_feature 1..20: note = chemically synthesized
  source 1..20: mol_type = other DNA
gttaaaaatcagaagcttgt

SEQ ID NO: 4661 - DNA, 20 bp, synthetic construct
  misc_feature 1..20: note = chemically synthesized
  source 1..20: mol_type = other DNA
ttgtgacacttaccgcgtat

SEQ ID NO: 4662 - DNA, 20 bp, synthetic construct
  misc_feature 1..20: note = chemically synthesized
  source 1..20: mol_type = other DNA
tgtgacacttaccgcgtatg

SEQ ID NO: 4663 - DNA, 20 bp, synthetic construct
  misc_feature 1..20: note = chemically synthesized
  source 1..20: mol_type = other DNA
gtgacacttaccgcgtatga

SEQ ID NO: 4664 - DNA, 20 bp, synthetic construct
  misc_feature 1..20: note = chemically synthesized
  source 1..20: mol_type = other DNA
tgacacttaccgcgtatgag

SEQ ID NO: 4665 - DNA, 20 bp, synthetic construct
  misc_feature 1..20: note = chemically synthesized
  source 1..20: mol_type = other DNA
gtatgaggggtcttgtcgaa

SEQ ID NO: 4666 - DNA, 20 bp, synthetic construct
  misc_feature 1..20: note = chemically synthesized
  source 1..20: mol_type = other DNA
cgaacagctttactctaatt

SEQ ID NO: 4667 - DNA, 20 bp, synthetic construct
  misc_feature 1..20: note = chemically synthesized
  source 1..20: mol_type = other DNA
aacagctttactctaattta

SEQ ID NO: 4668 - DNA, 20 bp, synthetic construct
  misc_feature 1..20: note = chemically synthesized
  source 1..20: mol_type = other DNA
tttagagctcctctgttaat

SEQ ID NO: 4669 - DNA, 20 bp, synthetic construct
  misc_feature 1..20: note = chemically synthesized
  source 1..20: mol_type = other DNA
gagctcctctgttaattaga

SEQ ID NO: 4670 - DNA, 20 bp, synthetic construct
  misc_feature 1..20: note = chemically synthesized
  source 1..20: mol_type = other DNA
tctgttaattagaaagccct

SEQ ID NO: 4671 - DNA, 20 bp, synthetic construct
  misc_feature 1..20: note = chemically synthesized
  source 1..20: mol_type = other DNA
cctcagattttctgcaaatg

SEQ ID NO: 4672 - DNA, 20 bp, synthetic construct
  misc_feature 1..20: note = chemically synthesized
  source 1..20: mol_type = other DNA
ctcagattttctgcaaatgc

SEQ ID NO: 4673 - DNA, 20 bp, synthetic construct
  misc_feature 1..20: note = chemically synthesized
  source 1..20: mol_type = other DNA
caaatgcaggtcactatcga

SEQ ID NO: 4674 - DNA, 20 bp, synthetic construct
  misc_feature 1..20: note = chemically synthesized
  source 1..20: mol_type = other DNA
ttttgatgcttcgtctgtga

SEQ ID NO: 4675 - DNA, 20 bp, synthetic construct
  misc_feature 1..20: note = chemically synthesized
  source 1..20: mol_type = other DNA
gcttcgtctgtgacagttgt

SEQ ID NO: 4676 - DNA, 20 bp, synthetic construct
  misc_feature 1..20: note = chemically synthesized
  source 1..20: mol_type = other DNA
cttcgtctgtgacagttgtt

SEQ ID NO: 4677 - DNA, 20 bp, synthetic construct
  misc_feature 1..20: note = chemically synthesized
  source 1..20: mol_type = other DNA
cagttgttgggttgcccttc

SEQ ID NO: 4678 - DNA, 20 bp, synthetic construct
  misc_feature 1..20: note = chemically synthesized
  source 1..20: mol_type = other DNA
agttgttgggttgcccttct

SEQ ID NO: 4679 - DNA, 20 bp, synthetic construct
  misc_feature 1..20: note = chemically synthesized
  source 1..20: mol_type = other DNA
ttgttgggttgcccttctag

SEQ ID NO: 4680 - DNA, 20 bp, synthetic construct
  misc_feature 1..20: note = chemically synthesized
  source 1..20: mol_type = other DNA
tgggttgcccttctaggagc

SEQ ID NO: 4681 - DNA, 20 bp, synthetic construct
  misc_feature 1..20: note = chemically synthesized
  source 1..20: mol_type = other DNA
gttgcccttctaggagctgg

SEQ ID NO: 4682 - DNA, 20 bp, synthetic construct
  misc_feature 1..20: note = chemically synthesized
  source 1..20: mol_type = other DNA
ttgcccttctaggagctggc

SEQ ID NO: 4683 - DNA, 20 bp, synthetic construct
  misc_feature 1..20: note = chemically synthesized
  source 1..20: mol_type = other DNA
tgcccttctaggagctggca

SEQ ID NO: 4684 - DNA, 20 bp, synthetic construct
  misc_feature 1..20: note = chemically synthesized
  source 1..20: mol_type = other DNA
taggagctggcagggttgtc

SEQ ID NO: 4685 - DNA, 20 bp, synthetic construct
  misc_feature 1..20: note = chemically synthesized
  source 1..20: mol_type = other DNA
cagggttgtccagactctga

SEQ ID NO: 4686 - DNA, 20 bp, synthetic construct
  misc_feature 1..20: note = chemically synthesized
  source 1..20: mol_type = other DNA
tgtccagactctgacagtgt

SEQ ID NO: 4687 - DNA, 20 bp, synthetic construct
  misc_feature 1..20: note = chemically synthesized
  source 1..20: mol_type = other DNA
tctgacagtgtcagaaaatg

SEQ ID NO: 4688 - DNA, 20 bp, synthetic construct
  misc_feature 1..20: note = chemically synthesized
  source 1..20: mol_type = other DNA
gtcagaaaatgcagtcacca

SEQ ID NO: 4689 - DNA, 20 bp, synthetic construct
  misc_feature 1..20: note = chemically synthesized
  source 1..20: mol_type = other DNA
cagtcaccacggctgcttca

SEQ ID NO: 4690 - DNA, 20 bp, synthetic construct
  misc_feature 1..20: note = chemically synthesized
  source 1..20: mol_type = other DNA
agtcaccacggctgcttcac

SEQ ID NO: 4691 - DNA, 20 bp, synthetic construct
  misc_feature 1..20: note = chemically synthesized
  source 1..20: mol_type = other DNA
caccacggctgcttcacagg

SEQ ID NO: 4692 - DNA, 20 bp, synthetic construct
  misc_feature 1..20: note = chemically synthesized
  source 1..20: mol_type = other DNA
cttcacaggaagttacacgc

SEQ ID NO: 4693 - DNA, 20 bp, synthetic construct
  misc_feature 1..20: note = chemically synthesized
  source 1..20: mol_type = other DNA
ttcacaggaagttacacgca

SEQ ID NO: 4694 - DNA, 20 bp, synthetic construct
  misc_feature 1..20: note = chemically synthesized
  source 1..20: mol_type = other DNA
ttacacgcaaggtccgcaca

SEQ ID NO: 4695 - DNA, 20 bp, synthetic construct
  misc_feature 1..20: note = chemically synthesized
  source 1..20: mol_type = other DNA
acgcaaggtccgcacacagt

SEQ ID NO: 4696 - DNA, 20 bp, synthetic construct
  misc_feature 1..20: note = chemically synthesized
  source 1..20: mol_type = other DNA
gcacacagtcagtttccctg

SEQ ID NO: 4697 - DNA, 20 bp, synthetic construct
  misc_feature 1..20: note = chemically synthesized
  source 1..20: mol_type = other DNA
cagtcagtttccctgtagcc

SEQ ID NO: 4698 - DNA, 20 bp, synthetic construct
  misc_feature 1..20: note = chemically synthesized
  source 1..20: mol_type = other DNA
tcagtttccctgtagcccag

SEQ ID NO: 4699 - DNA, 20 bp, synthetic construct
  misc_feature 1..20: note = chemically synthesized
  source 1..20: mol_type = other DNA
atgaaatctgcactcacatt

SEQ ID NO: 4700 - DNA, 20 bp, synthetic construct
  misc_feature 1..20: note = chemically synthesized
  source 1..20: mol_type = other DNA
cactcacattcagctgaaaa

SEQ ID NO: 4701 - DNA, 20 bp, synthetic construct
  misc_feature 1..20: note = chemically synthesized
  source 1..20: mol_type = other DNA
ctttctccaacctctgtttc

SEQ ID NO: 4702 - DNA, 20 bp, synthetic construct
  misc_feature 1..20: note = chemically synthesized
  source 1..20: mol_type = other DNA
tttctcatcttctctctctt

SEQ ID NO: 4703 - DNA, 20 bp, synthetic construct
  misc_feature 1..20: note = chemically synthesized
  source 1..20: mol_type = other DNA
tctctttagtcctcaacaac

SEQ ID NO: 4704 - DNA, 20 bp, synthetic construct
  misc_feature 1..20: note = chemically synthesized
  source 1..20: mol_type = other DNA
ctctttagtcctcaacaact

SEQ ID NO: 4705 - DNA, 20 bp, synthetic construct
  misc_feature 1..20: note = chemically synthesized
  source 1..20: mol_type = other DNA
tctttagtcctcaacaactg

SEQ ID NO: 4706 - DNA, 20 bp, synthetic construct
  misc_feature 1..20: note = chemically synthesized
  source 1..20: mol_type = other DNA
gggtcctctgctgtcaaaaa

SEQ ID NO: 4707 - DNA, 20 bp, synthetic construct
  misc_feature 1..20: note = chemically synthesized
  source 1..20: mol_type = other DNA
tcaaaaacagccacattcac

SEQ ID NO: 4708 - DNA, 20 bp, synthetic construct
  misc_feature 1..20: note = chemically synthesized
  source 1..20: mol_type = other DNA
aaacagccacattcaccaga

SEQ ID NO: 4709 - DNA, 20 bp, synthetic construct
  misc_feature 1..20: note = chemically synthesized
  source 1..20: mol_type = other DNA
aacagccacattcaccagaa

SEQ ID NO: 4710 - DNA, 20 bp, synthetic construct
  misc_feature 1..20: note = chemically synthesized
  source 1..20: mol_type = other DNA
acagccacattcaccagaaa

SEQ ID NO: 4711 - DNA, 20 bp, synthetic construct
  misc_feature 1..20: note = chemically synthesized
  source 1..20: mol_type = other DNA
gccacattcaccagaaaggg

SEQ ID NO: 4712 - DNA, 20 bp, synthetic construct
  misc_feature 1..20: note = chemically synthesized
  source 1..20: mol_type = other DNA
acattcaccagaaagggaag

SEQ ID NO: 4713 - DNA, 20 bp, synthetic construct
  misc_feature 1..20: note = chemically synthesized
  source 1..20: mol_type = other DNA
cattcaccagaaagggaagt

SEQ ID NO: 4714 - DNA, 20 bp, synthetic construct
  misc_feature 1..20: note = chemically synthesized
  source 1..20: mol_type = other DNA
agaaagggaagtaggtttta

SEQ ID NO: 4715 - DNA, 20 bp, synthetic construct
  misc_feature 1..20: note = chemically synthesized
  source 1..20: mol_type = other DNA
agtaggttttacagataaac

SEQ ID NO: 4716 - DNA, 20 bp, synthetic construct
  misc_feature 1..20: note = chemically synthesized
  source 1..20: mol_type = other DNA
gtaggttttacagataaacc

SEQ ID NO: 4717 - DNA, 20 bp, synthetic construct
  misc_feature 1..20: note = chemically synthesized
  source 1..20: mol_type = other DNA
cgggttgcttttcactgaaa

SEQ ID NO: 4718 - DNA, 20 bp, synthetic construct
  misc_feature 1..20: note = chemically synthesized
  source 1..20: mol_type = other DNA
gttgcttttcactgaaacag

SEQ ID NO: 4719 - DNA, 20 bp, synthetic construct
  misc_feature 1..20: note = chemically synthesized
  source 1..20: mol_type = other DNA
cactgaaacagcagtgattg

SEQ ID NO: 4720 - DNA, 20 bp, synthetic construct
  misc_feature 1..20: note = chemically synthesized
  source 1..20: mol_type = other DNA
aaacagcagtgattgtggaa

SEQ ID NO: 4721 - DNA, 20 bp, synthetic construct
  misc_feature 1..20: note = chemically synthesized
  source 1..20: mol_type = other DNA
tatttcctatttttttgcac

SEQ ID NO: 4722 - DNA, 20 bp, synthetic construct
  misc_feature 1..20: note = chemically synthesized
  source 1..20: mol_type = other DNA
tcctatttttttgcaccggt

SEQ ID NO: 4723 - DNA, 20 bp, synthetic construct
  misc_feature 1..20: note = chemically synthesized
  source 1..20: mol_type = other DNA
tatttttttgcaccggtcag

SEQ ID NO: 4724 - DNA, 20 bp, synthetic construct
  misc_feature 1..20: note = chemically synthesized
  source 1..20: mol_type = other DNA
caccggtcagcagccgcacc

SEQ ID NO: 4725 - DNA, 20 bp, synthetic construct
  misc_feature 1..20: note = chemically synthesized
  source 1..20: mol_type = other DNA
ggtcagcagccgcacctggt

SEQ ID NO: 4726 - DNA, 20 bp, synthetic construct
  misc_feature 1..20: note = chemically synthesized
  source 1..20: mol_type = other DNA
gtcagcagccgcacctggtg

SEQ ID NO: 4727 - DNA, 20 bp, synthetic construct
  misc_feature 1..20: note = chemically synthesized
  source 1..20: mol_type = other DNA
cagccgcacctggtgaggct

SEQ ID NO: 4728 - DNA, 20 bp, synthetic construct
  misc_feature 1..20: note = chemically synthesized
  source 1..20: mol_type = other DNA
agccgcacctggtgaggctg

SEQ ID NO: 4729 - DNA, 20 bp, synthetic construct
  misc_feature 1..20: note = chemically synthesized
  source 1..20: mol_type = other DNA
cacctggtgaggctgaggtc

SEQ ID NO: 4730 - DNA, 20 bp, synthetic construct
  misc_feature 1..20: note = chemically synthesized
  source 1..20: mol_type = other DNA
acctggtgaggctgaggtca

SEQ ID NO: 4731 - DNA, 20 bp, synthetic construct
  misc_feature 1..20: note = chemically synthesized
  source 1..20: mol_type = other DNA
tcaaggctgtacttccaaca

SEQ ID NO: 4732 - DNA, 20 bp, synthetic construct
  misc_feature 1..20: note = chemically synthesized
  source 1..20: mol_type = other DNA
tggctcacgtgttttttctt

SEQ ID NO: 4733 - DNA, 20 bp, synthetic construct
  misc_feature 1..20: note = chemically synthesized
  source 1..20: mol_type = other DNA
gctcacgtgttttttcttaa

SEQ ID NO: 4734 - DNA, 20 bp, synthetic construct
  misc_feature 1..20: note = chemically synthesized
  source 1..20: mol_type = other DNA
cacgtgttttttcttaagag

SEQ ID NO: 4735 - DNA, 20 bp, synthetic construct
  misc_feature 1..20: note = chemically synthesized
  source 1..20: mol_type = other DNA
acgtgttttttcttaagaga

SEQ ID NO: 4736 - DNA, 20 bp, synthetic construct
  misc_feature 1..20: note = chemically synthesized
  source 1..20: mol_type = other DNA
cgtgttttttcttaagagaa

SEQ ID NO: 4737 - DNA, 20 bp, synthetic construct
  misc_feature 1..20: note = chemically synthesized
  source 1..20: mol_type = other DNA
gtgttttttcttaagagaag

SEQ ID NO: 4738 - DNA, 20 bp, synthetic construct
  misc_feature 1..20: note = chemically synthesized
  source 1..20: mol_type = other DNA
tgttttttcttaagagaagg

SEQ ID NO: 4739 - DNA, 20 bp, synthetic construct
  misc_feature 1..20: note = chemically synthesized
  source 1..20: mol_type = other DNA
tcttaagagaagggggaatt

SEQ ID NO: 4740 - DNA, 20 bp, synthetic construct
  misc_feature 1..20: note = chemically synthesized
  source 1..20: mol_type = other DNA
ttaagagaagggggaatttg

SEQ ID NO: 4741 - DNA, 20 bp, synthetic construct
  misc_feature 1..20: note = chemically synthesized
  source 1..20: mol_type = other DNA
taagagaagggggaatttgg

SEQ ID NO: 4742 - DNA, 20 bp, synthetic construct
  misc_feature 1..20: note = chemically synthesized
  source 1..20: mol_type = other DNA
aagagaagggggaatttgga

SEQ ID NO: 4743 - DNA, 20 bp, synthetic construct
  misc_feature 1..20: note = chemically synthesized
  source 1..20: mol_type = other DNA
agagaagggggaatttggag

SEQ ID NO: 4744 - DNA, 20 bp, synthetic construct
  misc_feature 1..20: note = chemically synthesized
  source 1..20: mol_type = other DNA
gagaagggggaatttggagg

SEQ ID NO: 4745 - DNA, 20 bp, synthetic construct
  misc_feature 1..20: note = chemically synthesized
  source 1..20: mol_type = other DNA
agaagggggaatttggaggg

SEQ ID NO: 4746 - DNA, 20 bp, synthetic construct
  misc_feature 1..20: note = chemically synthesized
  source 1..20: mol_type = other DNA
aatttggaggggggcaaaaa

SEQ ID NO: 4747 - DNA, 20 bp, synthetic construct
  misc_feature 1..20: note = chemically synthesized
  source 1..20: mol_type = other DNA
ttggaggggggcaaaaaaag

SEQ ID NO: 4748 - DNA, 20 bp, synthetic construct
  misc_feature 1..20: note = chemically synthesized
  source 1..20: mol_type = other DNA
tggaggggggcaaaaaaaga

SEQ ID NO: 4749 - DNA, 20 bp, synthetic construct
  misc_feature 1..20: note = chemically synthesized
  source 1..20: mol_type = other DNA
gaggggggcaaaaaaagaag

SEQ ID NO: 4750 - DNA, 20 bp, synthetic construct
  misc_feature 1..20: note = chemically synthesized
  source 1..20: mol_type = other DNA
ggggcaaaaaaagaaggaga

SEQ ID NO: 4751 - DNA, 20 bp, synthetic construct
  misc_feature 1..20: note = chemically synthesized
  source 1..20: mol_type = other DNA
ggcaaaaaaagaaggagaaa

SEQ ID NO: 4752 - DNA, 20 bp, synthetic construct
  misc_feature 1..20: note = chemically synthesized
  source 1..20: mol_type = other DNA
caaaaaaagaaggagaaaga

SEQ ID NO: 4753 - DNA, 20 bp, synthetic construct
  misc_feature 1..20: note = chemically synthesized
  source 1..20: mol_type = other DNA
aaaaaaagaaggagaaagag

SEQ ID NO: 4754 - DNA, 20 bp, synthetic construct
  misc_feature 1..20: note = chemically synthesized
  source 1..20: mol_type = other DNA
aaagaaggagaaagagagga

SEQ ID NO: 4755 - DNA, 20 bp, synthetic construct
  misc_feature 1..20: note = chemically synthesized
  source 1..20: mol_type = other DNA
aagaaggagaaagagaggaa

SEQ ID NO: 4756 - DNA, 20 bp, synthetic construct
  misc_feature 1..20: note = chemically synthesized
  source 1..20: mol_type = other DNA
agaggaaaggttaaccactc

SEQ ID NO: 4757 - DNA, 20 bp, synthetic construct
  misc_feature 1..20: note = chemically synthesized
  source 1..20: mol_type = other DNA
cactcgagaaaaaatgcaca

SEQ ID NO: 4758 - DNA, 20 bp, synthetic construct
  misc_feature 1..20: note = chemically synthesized
  source 1..20: mol_type = other DNA
actcgagaaaaaatgcacat

SEQ ID NO: 4759 - DNA, 20 bp, synthetic construct
  misc_feature 1..20: note = chemically synthesized
  source 1..20: mol_type = other DNA
agaaaaaatgcacatgggct

SEQ ID NO: 4760 - DNA, 20 bp, synthetic construct
  misc_feature 1..20: note = chemically synthesized
  source 1..20: mol_type = other DNA
gaaaaaatgcacatgggctg

SEQ ID NO: 4761 - DNA, 20 bp, synthetic construct
  misc_feature 1..20: note = chemically synthesized
  source 1..20: mol_type = other DNA
tcctgcccttatcaccattc

SEQ ID NO: 4762 - DNA, 20 bp, synthetic construct
  misc_feature 1..20: note = chemically synthesized
  source 1..20: mol_type = other DNA
cagtataaaacctcaaatta

SEQ ID NO: 4763 - DNA, 20 bp, synthetic construct
  misc_feature 1..20: note = chemically synthesized
  source 1..20: mol_type = other DNA
agtataaaacctcaaattat

SEQ ID NO: 4764 - DNA, 20 bp, synthetic construct
  misc_feature 1..20: note = chemically synthesized
  source 1..20: mol_type = other DNA
aaattatgggaattctcact

SEQ ID NO: 4765 - DNA, 20 bp, synthetic construct
  misc_feature 1..20: note = chemically synthesized
  source 1..20: mol_type = other DNA
aattatgggaattctcactt

SEQ ID NO: 4766 - DNA, 20 bp, synthetic construct
  misc_feature 1..20: note = chemically synthesized
  source 1..20: mol_type = other DNA
cacttaggaacacctcatta

SEQ ID NO: 4767 - DNA, 20 bp, synthetic construct
  misc_feature 1..20: note = chemically synthesized
  source 1..20: mol_type = other DNA
tcattatggaacatatgtgc

SEQ ID NO: 4768 - DNA, 20 bp, synthetic construct
  misc_feature 1..20: note = chemically synthesized
  source 1..20: mol_type = other DNA
cattatggaacatatgtgct

SEQ ID NO: 4769 - DNA, 20 bp, synthetic construct
  misc_feature 1..20: note = chemically synthesized
  source 1..20: mol_type = other DNA
attatggaacatatgtgctg

SEQ ID NO: 4770 - DNA, 20 bp, synthetic construct
  misc_feature 1..20: note = chemically synthesized
  source 1..20: mol_type = other DNA
ttatggaacatatgtgctgg

SEQ ID NO: 4771 - DNA, 20 bp, synthetic construct
  misc_feature 1..20: note = chemically synthesized
  source 1..20: mol_type = other DNA
gaacatatgtgctgggggtc

SEQ ID NO: 4772 - DNA, 20 bp, synthetic construct
  misc_feature 1..20: note = chemically synthesized
  source 1..20: mol_type = other DNA
aacatatgtgctgggggtct

SEQ ID NO: 4773 - DNA, 20 bp, synthetic construct
  misc_feature 1..20: note = chemically synthesized
  source 1..20: mol_type = other DNA
acatatgtgctgggggtctg

SEQ ID NO: 4774 - DNA, 20 bp, synthetic construct
  misc_feature 1..20: note = chemically synthesized
  source 1..20: mol_type = other DNA
atatgtgctgggggtctggg

SEQ ID NO: 4775 - DNA, 20 bp, synthetic construct
  misc_feature 1..20: note = chemically synthesized
  source 1..20: mol_type = other DNA
gtgctgggggtctggggaga

SEQ ID NO: 4776 - DNA, 20 bp, synthetic construct
  misc_feature 1..20: note = chemically synthesized
  source 1..20: mol_type = other DNA
tgctgggggtctggggagat

SEQ ID NO: 4777 - DNA, 20 bp, synthetic construct
  misc_feature 1..20: note = chemically synthesized
  source 1..20: mol_type = other DNA
ctgggggtctggggagatgg

SEQ ID NO: 4778 - DNA, 20 bp, synthetic construct
  misc_feature 1..20: note = chemically synthesized
  source 1..20: mol_type = other DNA
ggggtctggggagatgggag

SEQ ID NO: 4779 - DNA, 20 bp, synthetic construct
  misc_feature 1..20: note = chemically synthesized
  source 1..20: mol_type = other DNA
gggtctggggagatgggaga

SEQ ID NO: 4780 - DNA, 20 bp, synthetic construct
  misc_feature 1..20: note = chemically synthesized
  source 1..20: mol_type = other DNA
ggtctggggagatgggagaa

SEQ ID NO: 4781 - DNA, 20 bp, synthetic construct
  misc_feature 1..20: note = chemically synthesized
  source 1..20: mol_type = other DNA
gtctggggagatgggagaag

SEQ ID NO: 4782 - DNA, 20 bp, synthetic construct
  misc_feature 1..20: note = chemically synthesized
  source 1..20: mol_type = other DNA
tgtgtgctccaaattttatc

SEQ ID NO: 4783 - DNA, 20 bp, synthetic construct
  misc_feature 1..20: note = chemically synthesized
  source 1..20: mol_type = other DNA
ctccaaattttatcaagttc

SEQ ID NO: 4784 - DNA, 20 bp, synthetic construct
  misc_feature 1..20: note = chemically synthesized
  source 1..20: mol_type = other DNA
tttatcaagttcaagccaaa

SEQ ID NO: 4785 - DNA, 20 bp, synthetic construct
  misc_feature 1..20: note = chemically synthesized
  source 1..20: mol_type = other DNA
agccaaaaagaaatcctctg

SEQ ID NO: 4786 - DNA, 20 bp, synthetic construct
  misc_feature 1..20: note = chemically synthesized
  source 1..20: mol_type = other DNA
aatcctctgtggcacttgtt

SEQ ID NO: 4787 - DNA, 20 bp, synthetic construct
  misc_feature 1..20: note = chemically synthesized
  source 1..20: mol_type = other DNA
atcctctgtggcacttgttt

SEQ ID NO: 4788 - DNA, 20 bp, synthetic construct
  misc_feature 1..20: note = chemically synthesized
  source 1..20: mol_type = other DNA
ccaaccaaccaaacaaaaaa

SEQ ID NO: 4789 - DNA, 20 bp, synthetic construct
  misc_feature 1..20: note = chemically synthesized
  source 1..20: mol_type = other DNA
aaacagtatttaaatcaaaa

SEQ ID NO: 4790 - DNA, 20 bp, synthetic construct
  misc_feature 1..20: note = chemically synthesized
  source 1..20: mol_type = other DNA
aacagtatttaaatcaaaat

SEQ ID NO: 4791 - DNA, 20 bp, synthetic construct
  misc_feature 1..20: note = chemically synthesized
  source 1..20: mol_type = other DNA
acaccctcaccaccaccacc

SEQ ID NO: 4792 - DNA, 20 bp, synthetic construct
  misc_feature 1..20: note = chemically synthesized
  source 1..20: mol_type = other DNA
caccctcaccaccaccacca

SEQ ID NO: 4793 - DNA, 20 bp, synthetic construct
  misc_feature 1..20: note = chemically synthesized
  source 1..20: mol_type = other DNA
tcaccaccaccaccaaggca

SEQ ID NO: 4794 - DNA, 20 bp, synthetic construct
  misc_feature 1..20: note = chemically synthesized
  source 1..20: mol_type = other DNA
ccaccaccaaggcatagcct

SEQ ID NO: 4795 - DNA, 20 bp, synthetic construct
  misc_feature 1..20: note = chemically synthesized
  source 1..20: mol_type = other DNA
ccaccaaggcatagccttgg

SEQ ID NO: 4796 - DNA, 20 bp, synthetic construct
  misc_feature 1..20: note = chemically synthesized
  source 1..20: mol_type = other DNA
aggcatagccttggaagaaa

SEQ ID NO: 4797 - DNA, 20 bp, synthetic construct
  misc_feature 1..20: note = chemically synthesized
  source 1..20: mol_type = other DNA
ggcatagccttggaagaaaa

SEQ ID NO: 4798 - DNA, 20 bp, synthetic construct
  misc_feature 1..20: note = chemically synthesized
  source 1..20: mol_type = other DNA
gaagaaaaaggcatcccttg

SEQ ID NO: 4799 - DNA, 20 bp, synthetic construct
  misc_feature 1..20: note = chemically synthesized
  source 1..20: mol_type = other DNA
ccttgcagccacaatttcgc

SEQ ID NO: 4800 - DNA, 20 bp, synthetic construct
  misc_feature 1..20: note = chemically synthesized
  source 1..20: mol_type = other DNA
tcgcaagttgaccttttcac

SEQ ID NO: 4801 - DNA, 20 bp, synthetic construct
  misc_feature 1..20: note = chemically synthesized
  source 1..20: mol_type = other DNA
cgcaagttgaccttttcacc

SEQ ID NO: 4802 - DNA, 20 bp, synthetic construct
  misc_feature 1..20: note = chemically synthesized
  source 1..20: mol_type = other DNA
agttgaccttttcaccaggc

SEQ ID NO: 4803 - DNA, 20 bp, synthetic construct
  misc_feature 1..20: note = chemically synthesized
  source 1..20: mol_type = other DNA
ccagtgcctaatttcctaaa

SEQ ID NO: 4804 - DNA, 20 bp, synthetic construct
  misc_feature 1..20: note = chemically synthesized
  source 1..20: mol_type = other DNA
cagtgcctaatttcctaaac

SEQ ID NO: 4805 - DNA, 20 bp, synthetic construct
  misc_feature 1..20: note = chemically synthesized
  source 1..20: mol_type = other DNA
aacaggccccttcttccttg

SEQ ID NO: 4806 - DNA, 20 bp, synthetic construct
  misc_feature 1..20: note = chemically synthesized
  source 1..20: mol_type = other DNA
gaagtcactgcaaataaatg

SEQ ID NO: 4807 - DNA, 20 bp, synthetic construct
  misc_feature 1..20: note = chemically synthesized
  source 1..20: mol_type = other DNA
tgcaaataaatgcagtcatc

SEQ ID NO: 4808 - DNA, 20 bp, synthetic construct
  misc_feature 1..20: note = chemically synthesized
  source 1..20: mol_type = other DNA
caaataaatgcagtcatcca

SEQ ID NO: 4809 - DNA, 20 bp, synthetic construct
  misc_feature 1..20: note = chemically synthesized
  source 1..20: mol_type = other DNA
tgcagtcatccagagtgtaa

SEQ ID NO: 4810 - DNA, 20 bp, synthetic construct
  misc_feature 1..20: note = chemically synthesized
  source 1..20: mol_type = other DNA
agtcatccagagtgtaatgg

SEQ ID NO: 4811 - DNA, 20 bp, synthetic construct
  misc_feature 1..20: note = chemically synthesized
  source 1..20: mol_type = other DNA
tccagagtgtaatggaagtc

SEQ ID NO: 4812 - DNA, 20 bp, synthetic construct
  misc_feature 1..20: note = chemically synthesized
  source 1..20: mol_type = other DNA
gtgtaatggaagtctggcct

SEQ ID NO: 4813 - DNA, 20 bp, synthetic construct
  misc_feature 1..20: note = chemically synthesized
  source 1..20: mol_type = other DNA
gtaatggaagtctggccttg

SEQ ID NO: 4814 - DNA, 20 bp, synthetic construct
  misc_feature 1..20: note = chemically synthesized
  source 1..20: mol_type = other DNA
aagtctggccttggagttac

SEQ ID NO: 4815 - DNA, 20 bp, synthetic construct
  misc_feature 1..20: note = chemically synthesized
  source 1..20: mol_type = other DNA
tactggcttatgaaatgcaa

SEQ ID NO: 4816 - DNA, 20 bp, synthetic construct
  misc_feature 1..20: note = chemically synthesized
  source 1..20: mol_type = other DNA
actggcttatgaaatgcaat

SEQ ID NO: 4817 - DNA, 20 bp, synthetic construct
  misc_feature 1..20: note = chemically synthesized
  source 1..20: mol_type = other DNA
cttatgaaatgcaatgggat

SEQ ID NO: 4818 - DNA, 20 bp, synthetic construct
  misc_feature 1..20: note = chemically synthesized
  source 1..20: mol_type = other DNA
ttatgaaatgcaatgggatg

SEQ ID NO: 4819 - DNA, 20 bp, synthetic construct
  misc_feature 1..20: note = chemically synthesized
  source 1..20: mol_type = other DNA
tgaaatgcaatgggatgagg

SEQ ID NO: 4820 - DNA, 20 bp, synthetic construct
  misc_feature 1..20: note = chemically synthesized
  source 1..20: mol_type = other DNA
gaaatgcaatgggatgaggt

SEQ ID NO: 4821 - DNA, 20 bp, synthetic construct
  misc_feature 1..20: note = chemically synthesized
  source 1..20: mol_type = other DNA
aaatgcaatgggatgaggtg

SEQ ID NO: 4822 - DNA, 20 bp, synthetic construct
  misc_feature 1..20: note = chemically synthesized
  source 1..20: mol_type = other DNA
gcaatgggatgaggtggggt

SEQ ID NO: 4823 - DNA, 20 bp, synthetic construct
  misc_feature 1..20: note = chemically synthesized
  source 1..20: mol_type = other DNA
aatgggatgaggtggggtga

SEQ ID NO: 4824 - DNA, 20 bp, synthetic construct
  misc_feature 1..20: note = chemically synthesized
  source 1..20: mol_type = other DNA
atgggatgaggtggggtgag

SEQ ID NO: 4825 - DNA, 20 bp, synthetic construct
  misc_feature 1..20: note = chemically synthesized
  source 1..20: mol_type = other DNA
tgaggtggggtgagaggcca

SEQ ID NO: 4826 - DNA, 20 bp, synthetic construct
  misc_feature 1..20: note = chemically synthesized
  source 1..20: mol_type = other DNA
tggggtgagaggccatagcc

SEQ ID NO: 4827 - DNA, 20 bp, synthetic construct
  misc_feature 1..20: note = chemically synthesized
  source 1..20: mol_type = other DNA
aggccatagcccagactgaa

SEQ ID NO: 4828 - DNA, 20 bp, synthetic construct
  misc_feature 1..20: note = chemically synthesized
  source 1..20: mol_type = other DNA
atagcccagactgaacggca

SEQ ID NO: 4829 - DNA, 20 bp, synthetic construct
  misc_feature 1..20: note = chemically synthesized
  source 1..20: mol_type = other DNA
agactgaacggcacagtgac

SEQ ID NO: 4830 - DNA, 20 bp, synthetic construct
  misc_feature 1..20: note = chemically synthesized
  source 1..20: mol_type = other DNA
gactgaacggcacagtgacc

SEQ ID NO: 4831 - DNA, 20 bp, synthetic construct
  misc_feature 1..20: note = chemically synthesized
  source 1..20: mol_type = other DNA
tgaacggcacagtgaccagg

SEQ ID NO: 4832 - DNA, 20 bp, synthetic construct
  misc_feature 1..20: note = chemically synthesized
  source 1..20: mol_type = other DNA
gaacggcacagtgaccaggt

SEQ ID NO: 4833 - DNA, 20 bp, synthetic construct
  misc_feature 1..20: note = chemically synthesized
  source 1..20: mol_type = other DNA
aacggcacagtgaccaggta

SEQ ID NO: 4834 - DNA, 20 bp, synthetic construct
  misc_feature 1..20: note = chemically synthesized
  source 1..20: mol_type = other DNA
ggcacagtgaccaggtaggg

SEQ ID NO: 4835 - DNA, 20 bp, synthetic construct
  misc_feature 1..20: note = chemically synthesized
  source 1..20: mol_type = other DNA
cacagtgaccaggtagggtg

SEQ ID NO: 4836 - DNA, 20 bp, synthetic construct
  misc_feature 1..20: note = chemically synthesized
  source 1..20: mol_type = other DNA
gtgaccaggtagggtggagc

SEQ ID NO: 4837 - DNA, 20 bp, synthetic construct
  misc_feature 1..20: note = chemically synthesized
  source 1..20: mol_type = other DNA
tgaccaggtagggtggagca

SEQ ID NO: 4838 - DNA, 20 bp, synthetic construct
  misc_feature 1..20: note = chemically synthesized
  source 1..20: mol_type = other DNA
agggtggagcaaggccactc

SEQ ID NO: 4839 - DNA, 20 bp, synthetic construct
  misc_feature 1..20: note = chemically synthesized
  source 1..20: mol_type = other DNA
tggagcaaggccactccagc

SEQ ID NO: 4840 - DNA, 20 bp, synthetic construct
  misc_feature 1..20: note = chemically synthesized
  source 1..20: mol_type = other DNA
gccactccagcaagaatgcc

SEQ ID NO: 4841 - DNA, 20 bp, synthetic construct
  misc_feature 1..20: note = chemically synthesized
  source 1..20: mol_type = other DNA
ccactccagcaagaatgcca

SEQ ID NO: 4842 - DNA, 20 bp, synthetic construct
  misc_feature 1..20: note = chemically synthesized
  source 1..20: mol_type = other DNA
tccagcaagaatgccaagga

SEQ ID NO: 4843 - DNA, 20 bp, synthetic construct
  misc_feature 1..20: note = chemically synthesized
  source 1..20: mol_type = other DNA
agaatgccaaggatagcctg

SEQ ID NO: 4844 - DNA, 20 bp, synthetic construct
  misc_feature 1..20: note = chemically synthesized
  source 1..20: mol_type = other DNA
atgccaaggatagcctgcag

SEQ ID NO: 4845 - DNA, 20 bp, synthetic construct
  misc_feature 1..20: note = chemically synthesized
  source 1..20: mol_type = other DNA
tgccaaggatagcctgcagt

SEQ ID NO: 4846 - DNA, 20 bp, synthetic construct
  misc_feature 1..20: note = chemically synthesized
  source 1..20: mol_type = other DNA
gatagcctgcagtgggttat

SEQ ID NO: 4847 - DNA, 20 bp, synthetic construct
  misc_feature 1..20: note = chemically synthesized
  source 1..20: mol_type = other DNA
ctgcagtgggttattagccc

SEQ ID NO: 4848 - DNA, 20 bp, synthetic construct
  misc_feature 1..20: note = chemically synthesized
  source 1..20: mol_type = other DNA
cagtgggttattagccccag

SEQ ID NO: 4849 - DNA, 20 bp, synthetic construct
  misc_feature 1..20: note = chemically synthesized
  source 1..20: mol_type = other DNA
agtgggttattagccccagc

SEQ ID NO: 4850 - DNA, 20 bp, synthetic construct
  misc_feature 1..20: note = chemically synthesized
  source 1..20: mol_type = other DNA
gtgggttattagccccagca

SEQ ID NO: 4851 - DNA, 20 bp, synthetic construct
  misc_feature 1..20: note = chemically synthesized
  source 1..20: mol_type = other DNA
cagcagggcccatgcctcta

SEQ ID NO: 4852 - DNA, 20 bp, synthetic construct
  misc_feature 1..20: note = chemically synthesized
  source 1..20: mol_type = other DNA
gttgctgtcatcttcgttct

SEQ ID NO: 4853 - DNA, 20 bp, synthetic construct
  misc_feature 1..20: note = chemically synthesized
  source 1..20: mol_type = other DNA
ctgtcatcttcgttcttggc

SEQ ID NO: 4854 - DNA, 20 bp, synthetic construct
  misc_feature 1..20: note = chemically synthesized
  source 1..20: mol_type = other DNA
tcatcttcgttcttggctag

SEQ ID NO: 4855 - DNA, 20 bp, synthetic construct
  misc_feature 1..20: note = chemically synthesized
  source 1..20: mol_type = other DNA
cgttcttggctagcagatgc

SEQ ID NO: 4856 - DNA, 20 bp, synthetic construct
  misc_feature 1..20: note = chemically synthesized
  source 1..20: mol_type = other DNA
tggctagcagatgctagtcc

SEQ ID NO: 4857 - DNA, 20 bp, synthetic construct
  misc_feature 1..20: note = chemically synthesized
  source 1..20: mol_type = other DNA
ggctagcagatgctagtccc

SEQ ID NO: 4858 - DNA, 20 bp, synthetic construct
  misc_feature 1..20: note = chemically synthesized
  source 1..20: mol_type = other DNA
ggaatgtcctccatgccttt

SEQ ID NO: 4859 - DNA, 20 bp, synthetic construct
  misc_feature 1..20: note = chemically synthesized
  source 1..20: mol_type = other DNA
ctttaagctaactgcaaaaa

SEQ ID NO: 4860 - DNA, 20 bp, synthetic construct
  misc_feature 1..20: note = chemically synthesized
  source 1..20: mol_type = other DNA
agctaactgcaaaaacagaa

SEQ ID NO: 4861 - DNA, 20 bp, synthetic construct
  misc_feature 1..20: note = chemically synthesized
  source 1..20: mol_type = other DNA
ctgcaaaaacagaacggtgt

SEQ ID NO: 4862 - DNA, 20 bp, synthetic construct
  misc_feature 1..20: note = chemically synthesized
  source 1..20: mol_type = other DNA
aaaaacagaacggtgtgagc

SEQ ID NO: 4863 - DNA, 20 bp, synthetic construct
  misc_feature 1..20: note = chemically synthesized
  source 1..20: mol_type = other DNA
aaaacagaacggtgtgagcc

SEQ ID NO: 4864 - DNA, 20 bp, synthetic construct
  misc_feature 1..20: note = chemically synthesized
  source 1..20: mol_type = other DNA
aaacagaacggtgtgagcca

SEQ ID NO: 4865 - DNA, 20 bp, synthetic construct
  misc_feature 1..20: note = chemically synthesized
  source 1..20: mol_type = other DNA
cagaacggtgtgagccaggg

SEQ ID NO: 4866 - DNA, 20 bp, synthetic construct
  misc_feature 1..20: note = chemically synthesized
  source 1..20: mol_type = other DNA
ctcttttatattctacctat

SEQ ID NO: 4867 - DNA, 20 bp, synthetic construct
  misc_feature 1..20: note = chemically synthesized
  source 1..20: mol_type = other DNA
tcttttatattctacctata

SEQ ID NO: 4868 - DNA, 20 bp, synthetic construct
  misc_feature 1..20: note = chemically synthesized
  source 1..20: mol_type = other DNA
cttttatattctacctataa

SEQ ID NO: 4869 - DNA, 20 bp, synthetic construct
  misc_feature 1..20: note = chemically synthesized
  source 1..20: mol_type = other DNA
ctataagggaaaaataaacc

SEQ ID NO: 4870 - DNA, 20 bp, synthetic construct
  misc_feature 1..20: note = chemically synthesized
  source 1..20: mol_type = other DNA
gggaaaaataaacctagacc

SEQ ID NO: 4871 - DNA, 20 bp, synthetic construct
  misc_feature 1..20: note = chemically synthesized
  source 1..20: mol_type = other DNA
gacctggaaaacaatgtgta

SEQ ID NO: 4872 - DNA, 20 bp, synthetic construct
  misc_feature 1..20: note = chemically synthesized
  source 1..20: mol_type = other DNA
ctggaaaacaatgtgtaaag

SEQ ID NO: 4873 - DNA, 20 bp, synthetic construct
  misc_feature 1..20: note = chemically synthesized
  source 1..20: mol_type = other DNA
aacaatgtgtaaagtggcaa

SEQ ID NO: 4874 - DNA, 20 bp, synthetic construct
  misc_feature 1..20: note = chemically synthesized
  source 1..20: mol_type = other DNA
agccaatcaactcatttaaa

SEQ ID NO: 4875 - DNA, 20 bp, synthetic construct
  misc_feature 1..20: note = chemically synthesized
  source 1..20: mol_type = other DNA
accctccatccaacgtcacg

SEQ ID NO: 4876 - DNA, 20 bp, synthetic construct
  misc_feature 1..20: note = chemically synthesized
  source 1..20: mol_type = other DNA
gtcacgaagctgctgaatat

SEQ ID NO: 4877 - DNA, 20 bp, synthetic construct
  misc_feature 1..20: note = chemically synthesized
  source 1..20: mol_type = other DNA
tcacgaagctgctgaatatt

SEQ ID NO: 4878 - DNA, 20 bp, synthetic construct
  misc_feature 1..20: note = chemically synthesized
  source 1..20: mol_type = other DNA
gctgctgaatattaggttcc

SEQ ID NO: 4879 - DNA, 20 bp, synthetic construct
  misc_feature 1..20: note = chemically synthesized
  source 1..20: mol_type = other DNA
ctgctgaatattaggttcct

SEQ ID NO: 4880 - DNA, 20 bp, synthetic construct
  misc_feature 1..20: note = chemically synthesized
  source 1..20: mol_type = other DNA
ctgaatattaggttcctggg

SEQ ID NO: 4881 - DNA, 20 bp, synthetic construct
  misc_feature 1..20: note = chemically synthesized
  source 1..20: mol_type = other DNA
aggttcctgggaagctgtcc

SEQ ID NO: 4882 - DNA, 20 bp, synthetic construct
  misc_feature 1..20: note = chemically synthesized
  source 1..20: mol_type = other DNA
gggaagctgtcccagcaacc

SEQ ID NO: 4883 - DNA, 20 bp, synthetic construct
  misc_feature 1..20: note = chemically synthesized
  source 1..20: mol_type = other DNA
tgtcccagcaacctagatat

SEQ ID NO: 4884 - DNA, 20 bp, synthetic construct
  misc_feature 1..20: note = chemically synthesized
  source 1..20: mol_type = other DNA
agaaacaacgcttgctattc

SEQ ID NO: 4885 - DNA, 20 bp, synthetic construct
  misc_feature 1..20: note = chemically synthesized
  source 1..20: mol_type = other DNA
gaaacaacgcttgctattct

SEQ ID NO: 4886 - DNA, 20 bp, synthetic construct
  misc_feature 1..20: note = chemically synthesized
  source 1..20: mol_type = other DNA
aaacaacgcttgctattctg

SEQ ID NO: 4887 - DNA, 20 bp, synthetic construct
  misc_feature 1..20: note = chemically synthesized
  source 1..20: mol_type = other DNA
aacgcttgctattctggggt

SEQ ID NO: 4888 - DNA, 20 bp, synthetic construct
  misc_feature 1..20: note = chemically synthesized
  source 1..20: mol_type = other DNA
gcttgctattctggggtgag

SEQ ID NO: 4889 - DNA, 20 bp, synthetic construct
  misc_feature 1..20: note = chemically synthesized
  source 1..20: mol_type = other DNA
ctattctggggtgagaagtg

SEQ ID NO: 4890 - DNA, 20 bp, synthetic construct
  misc_feature 1..20: note = chemically synthesized
  source 1..20: mol_type = other DNA
aagtgaagttgcctttcact

SEQ ID NO: 4891 - DNA, 20 bp, synthetic construct
  misc_feature 1..20: note = chemically synthesized
  source 1..20: mol_type = other DNA
agtgaagttgcctttcactc

SEQ ID NO: 4892 - DNA, 20 bp, synthetic construct
  misc_feature 1..20: note = chemically synthesized
  source 1..20: mol_type = other DNA
tcactcgggactgtcaaaca

SEQ ID NO: 4893 - DNA, 20 bp, synthetic construct
  misc_feature 1..20: note = chemically synthesized
  source 1..20: mol_type = other DNA
caaacacagtctataaatac

SEQ ID NO: 4894 - DNA, 20 bp, synthetic construct
  misc_feature 1..20: note = chemically synthesized
  source 1..20: mol_type = other DNA
gcaatgccccttgtgaacta

SEQ ID NO: 4895 - DNA, 20 bp, synthetic construct
  misc_feature 1..20: note = chemically synthesized
  source 1..20: mol_type = other DNA
caatgccccttgtgaactac

SEQ ID NO: 4896 - DNA, 20 bp, synthetic construct
  misc_feature 1..20: note = chemically synthesized
  source 1..20: mol_type = other DNA
ccccttgtgaactacgggct

SEQ ID NO: 4897 - DNA, 20 bp, synthetic construct
  misc_feature 1..20: note = chemically synthesized
  source 1..20: mol_type = other DNA
actacgggctgagctcaacc

SEQ ID NO: 4898 - DNA, 20 bp, synthetic construct
  misc_feature 1..20: note = chemically synthesized
  source 1..20: mol_type = other DNA
tacgggctgagctcaaccca

SEQ ID NO: 4899 - DNA, 20 bp, synthetic construct
  misc_feature 1..20: note = chemically synthesized
  source 1..20: mol_type = other DNA
gggctgagctcaacccagag

SEQ ID NO: 4900 - DNA, 20 bp, synthetic construct
  misc_feature 1..20: note = chemically synthesized
  source 1..20: mol_type = other DNA
ggctgagctcaacccagaga

SEQ ID NO: 4901 - DNA, 20 bp, synthetic construct
  misc_feature 1..20: note = chemically synthesized
  source 1..20: mol_type = other DNA
gagctcaacccagagaaggc

SEQ ID NO: 4902 - DNA, 20 bp, synthetic construct
  misc_feature 1..20: note = chemically synthesized
  source 1..20: mol_type = other DNA
gagaaggcaagtgtttccca

SEQ ID NO: 4903 - DNA, 20 bp, synthetic construct
  misc_feature 1..20: note = chemically synthesized
  source 1..20: mol_type = other DNA
agaaggcaagtgtttcccaa

SEQ ID NO: 4904 - DNA, 20 bp, synthetic construct
  misc_feature 1..20: note = chemically synthesized
  source 1..20: mol_type = other DNA
agtgtttcccaaaggtcaca

SEQ ID NO: 4905 - DNA, 20 bp, synthetic construct
  misc_feature 1..20: note = chemically synthesized
  source 1..20: mol_type = other DNA
caaaggtcacacagcaattc

SEQ ID NO: 4906 - DNA, 20 bp, synthetic construct
  misc_feature 1..20: note = chemically synthesized
  source 1..20: mol_type = other DNA
aaaggtcacacagcaattcc

SEQ ID NO: 4907 - DNA, 20 bp, synthetic construct
  misc_feature 1..20: note = chemically synthesized
  source 1..20: mol_type = other DNA
cacagcaattccaggtcccc

SEQ ID NO: 4908 - DNA, 20 bp, synthetic construct
  misc_feature 1..20: note = chemically synthesized
  source 1..20: mol_type = other DNA
agcaattccaggtcccccag

SEQ ID NO: 4909 - DNA, 20 bp, synthetic construct
  misc_feature 1..20: note = chemically synthesized
  source 1..20: mol_type = other DNA
aattccaggtcccccagaag

SEQ ID NO: 4910 - DNA, 20 bp, synthetic construct
  misc_feature 1..20: note = chemically synthesized
  source 1..20: mol_type = other DNA
ccccagaagtagcccttcac

SEQ ID NO: 4911 - DNA, 20 bp, synthetic construct
  misc_feature 1..20: note = chemically synthesized
  source 1..20: mol_type = other DNA
agaagtagcccttcaccaga

SEQ ID NO: 4912 - DNA, 20 bp, synthetic construct
  misc_feature 1..20: note = chemically synthesized
  source 1..20: mol_type = other DNA
caccagatggatcccatcac

SEQ ID NO: 4913 - DNA, 20 bp, synthetic construct
  misc_feature 1..20: note = chemically synthesized
  source 1..20: mol_type = other DNA
agatggatcccatcaccaga

SEQ ID NO: 4914 - DNA, 20 bp, synthetic construct
  misc_feature 1..20: note = chemically synthesized
  source 1..20: mol_type = other DNA
tcccatcaccagatagctct

SEQ ID NO: 4915 - DNA, 20 bp, synthetic construct
  misc_feature 1..20: note = chemically synthesized
  source 1..20: mol_type = other DNA
atctgattctcattttcaac

SEQ ID NO: 4916 - DNA, 20 bp, synthetic construct
  misc_feature 1..20: note = chemically synthesized
  source 1..20: mol_type = other DNA
tgattctcattttcaacaag

SEQ ID NO: 4917 - DNA, 20 bp, synthetic construct
  misc_feature 1..20: note = chemically synthesized
  source 1..20: mol_type = other DNA
gattctcattttcaacaaga

SEQ ID NO: 4918 - DNA, 20 bp, synthetic construct
  misc_feature 1..20: note = chemically synthesized
  source 1..20: mol_type = other DNA
tcattttcaacaagaaggct

SEQ ID NO: 4919 - DNA, 20 bp, synthetic construct
  misc_feature 1..20: note = chemically synthesized
  source 1..20: mol_type = other DNA
cattttcaacaagaaggctg

SEQ ID NO: 4920 - DNA, 20 bp, synthetic construct
  misc_feature 1..20: note = chemically synthesized
  source 1..20: mol_type = other DNA
caacaagaaggctgaggaat

SEQ ID NO: 4921 - DNA, 20 bp, synthetic construct
  misc_feature 1..20: note = chemically synthesized
  source 1..20: mol_type = other DNA
aggaatgagattgcacattt

SEQ ID NO: 4922 - DNA, 20 bp, synthetic construct
  misc_feature 1..20: note = chemically synthesized
  source 1..20: mol_type = other DNA
ctttctccaaccttctgctc

SEQ ID NO: 4923 - DNA, 20 bp, synthetic construct
  misc_feature 1..20: note = chemically synthesized
  source 1..20: mol_type = other DNA
acgtacaaaaaaaatctttt

SEQ ID NO: 4924 - DNA, 20 bp, synthetic construct
  misc_feature 1..20: note = chemically synthesized
  source 1..20: mol_type = other DNA
aaaaatctttttagtatgtt

SEQ ID NO: 4925 - DNA, 20 bp, synthetic construct
  misc_feature 1..20: note = chemically synthesized
  source 1..20: mol_type = other DNA
aaaatctttttagtatgttt

SEQ ID NO: 4926 - DNA, 20 bp, synthetic construct
  misc_feature 1..20: note = chemically synthesized
  source 1..20: mol_type = other DNA
aaatctttttagtatgttta

SEQ ID NO: 4927 - DNA, 20 bp, synthetic construct
  misc_feature 1..20: note = chemically synthesized
  source 1..20: mol_type = other DNA
catatctacccaaaatctcc

SEQ ID NO: 4928 - DNA, 20 bp, synthetic construct
  misc_feature 1..20: note = chemically synthesized
  source 1..20: mol_type = other DNA
ctccaagccccttgttctat

SEQ ID NO: 4929 - DNA, 20 bp, synthetic construct
  misc_feature 1..20: note = chemically synthesized
  source 1..20: mol_type = other DNA
caagccccttgttctatcag

SEQ ID NO: 4930 - DNA, 20 bp, synthetic construct
  misc_feature 1..20: note = chemically synthesized
  source 1..20: mol_type = other DNA
aagccccttgttctatcagc

SEQ ID NO: 4931 - DNA, 20 bp, synthetic construct
  misc_feature 1..20: note = chemically synthesized
  source 1..20: mol_type = other DNA
ccttgttctatcagcaggtc

SEQ ID NO: 4932 - DNA, 20 bp, synthetic construct
  misc_feature 1..20: note = chemically synthesized
  source 1..20: mol_type = other DNA
ttgttctatcagcaggtcaa

SEQ ID NO: 4933 - DNA, 20 bp, synthetic construct
  misc_feature 1..20: note = chemically synthesized
  source 1..20: mol_type = other DNA
ttctatcagcaggtcaagag

SEQ ID NO: 4934 - DNA, 20 bp, synthetic construct
  misc_feature 1..20: note = chemically synthesized
  source 1..20: mol_type = other DNA
ctatcagcaggtcaagagta

SEQ ID NO: 4935 - DNA, 20 bp, synthetic construct
  misc_feature 1..20: note = chemically synthesized
  source 1..20: mol_type = other DNA
caagagtagagaactgtgac

SEQ ID NO: 4936 - DNA, 20 bp, synthetic construct
  misc_feature 1..20: note = chemically synthesized
  source 1..20: mol_type = other DNA
agctgttctccattctgaaa

SEQ ID NO: 4937 - DNA, 20 bp, synthetic construct
  misc_feature 1..20: note = chemically synthesized
  source 1..20: mol_type = other DNA
ctgaaatggatttgactgaa

SEQ ID NO: 4938 - DNA, 20 bp, synthetic construct
  misc_feature 1..20: note = chemically synthesized
  source 1..20: mol_type = other DNA
tttgactgaacagctgctga

SEQ ID NO: 4939 - DNA, 20 bp, synthetic construct
  misc_feature 1..20: note = chemically synthesized
  source 1..20: mol_type = other DNA
ttgactgaacagctgctgaa

SEQ ID NO: 4940 - DNA, 20 bp, synthetic construct
  misc_feature 1..20: note = chemically synthesized
  source 1..20: mol_type = other DNA
ctgaacagctgctgaaaggc

SEQ ID NO: 4941 - DNA, 20 bp, synthetic construct
  misc_feature 1..20: note = chemically synthesized
  source 1..20: mol_type = other DNA
tgctgaaaggcaagacatcc

SEQ ID NO: 4942 - DNA, 20 bp, synthetic construct
  misc_feature 1..20: note = chemically synthesized
  source 1..20: mol_type = other DNA
gctgaaaggcaagacatcct

SEQ ID NO: 4943 - DNA, 20 bp, synthetic construct
  misc_feature 1..20: note = chemically synthesized
  source 1..20: mol_type = other DNA
ctgaaaggcaagacatccta

SEQ ID NO: 4944 - DNA, 20 bp, synthetic construct
  misc_feature 1..20: note = chemically synthesized
  source 1..20: mol_type = other DNA
gaaaggcaagacatcctagg

SEQ ID NO: 4945 - DNA, 20 bp, synthetic construct
  misc_feature 1..20: note = chemically synthesized
  source 1..20: mol_type = other DNA
gcaagacatcctagggagac

SEQ ID NO: 4946 - DNA, 20 bp, synthetic construct
  misc_feature 1..20: note = chemically synthesized
  source 1..20: mol_type = other DNA
catcctagggagactggtac

SEQ ID NO: 4947 - DNA, 20 bp, synthetic construct
  misc_feature 1..20: note = chemically synthesized
  source 1..20: mol_type = other DNA
atcctagggagactggtact

SEQ ID NO: 4948 - DNA, 20 bp, synthetic construct
  misc_feature 1..20: note = chemically synthesized
  source 1..20: mol_type = other DNA
tcctagggagactggtactg

SEQ ID NO: 4949 - DNA, 20 bp, synthetic construct
  misc_feature 1..20: note = chemically synthesized
  source 1..20: mol_type = other DNA
gagactggtactggggattt

SEQ ID NO: 4950 - DNA, 20 bp, synthetic construct
  misc_feature 1..20: note = chemically synthesized
  source 1..20: mol_type = other DNA
agactggtactggggatttc

SEQ ID NO: 4951 - DNA, 20 bp, synthetic construct
  misc_feature 1..20: note = chemically synthesized
  source 1..20: mol_type = other DNA
gactggtactggggatttca

SEQ ID NO: 4952 - DNA, 20 bp, synthetic construct
  misc_feature 1..20: note = chemically synthesized
  source 1..20: mol_type = other DNA
atttcagggtccttgttctg

SEQ ID NO: 4953 - DNA, 20 bp, synthetic construct
  misc_feature 1..20: note = chemically synthesized
  source 1..20: mol_type = other DNA
tttcagggtccttgttctgt

SEQ ID NO: 4954 - DNA, 20 bp, synthetic construct
  misc_feature 1..20: note = chemically synthesized
  source 1..20: mol_type = other DNA
cagggtccttgttctgtggg

SEQ ID NO: 4955 - DNA, 20 bp, synthetic construct
  misc_feature 1..20: note = chemically synthesized
  source 1..20: mol_type = other DNA
cttgttctgtgggtggacca

SEQ ID NO: 4956 - DNA, 20 bp, synthetic construct
  misc_feature 1..20: note = chemically synthesized
  source 1..20: mol_type = other DNA
ggtggaccatggctcctttc

SEQ ID NO: 4957 - DNA, 20 bp, synthetic construct
  misc_feature 1..20: note = chemically synthesized
  source 1..20: mol_type = other DNA
tggaccatggctcctttcca

SEQ ID NO: 4958 - DNA, 20 bp, synthetic construct
  misc_feature 1..20: note = chemically synthesized
  source 1..20: mol_type = other DNA
gttctctctcctacacatca

SEQ ID NO: 4959 - DNA, 20 bp, synthetic construct
  misc_feature 1..20: note = chemically synthesized
  source 1..20: mol_type = other DNA
tctctcctacacatcaaagt

SEQ ID NO: 4960 - DNA, 20 bp, synthetic construct
  misc_feature 1..20: note = chemically synthesized
  source 1..20: mol_type = other DNA
tcaaagtgagacaccaatca

SEQ ID NO: 4961 - DNA, 20 bp, synthetic construct
  misc_feature 1..20: note = chemically synthesized
  source 1..20: mol_type = other DNA
gacaccaatcacagctctac

SEQ ID NO: 4962 - DNA, 20 bp, synthetic construct
  misc_feature 1..20: note = chemically synthesized
  source 1..20: mol_type = other DNA
accttgccccacctccaatt

SEQ ID NO: 4963 - DNA, 20 bp, synthetic construct
  misc_feature 1..20: note = chemically synthesized
  source 1..20: mol_type = other DNA
ttgcctccttctcacacaat

SEQ ID NO: 4964 - DNA, 20 bp, synthetic construct
  misc_feature 1..20: note = chemically synthesized
  source 1..20: mol_type = other DNA
ctccttctcacacaatgaga

SEQ ID NO: 4965 - DNA, 20 bp, synthetic construct
  misc_feature 1..20: note = chemically synthesized
  source 1..20: mol_type = other DNA
tctcacacaatgagaaagaa

SEQ ID NO: 4966 - DNA, 20 bp, synthetic construct
  misc_feature 1..20: note = chemically synthesized
  source 1..20: mol_type = other DNA
acacaatgagaaagaacgga

SEQ ID NO: 4967 - DNA, 20 bp, synthetic construct
  misc_feature 1..20: note = chemically synthesized
  source 1..20: mol_type = other DNA
agaacggatagccaaattct

SEQ ID NO: 4968 - DNA, 20 bp, synthetic construct
  misc_feature 1..20: note = chemically synthesized
  source 1..20: mol_type = other DNA
aacggatagccaaattctaa

SEQ ID NO: 4969 - DNA, 20 bp, synthetic construct
  misc_feature 1..20: note = chemically synthesized
  source 1..20: mol_type = other DNA
tcactttctgcacatatgtg

SEQ ID NO: 4970 - DNA, 20 bp, synthetic construct
  misc_feature 1..20: note = chemically synthesized
  source 1..20: mol_type = other DNA
ttctgcacatatgtgtagtt

SEQ ID NO: 4971 - DNA, 20 bp, synthetic construct
  misc_feature 1..20: note = chemically synthesized
  source 1..20: mol_type = other DNA
atatgtgtagttaagtactg

SEQ ID NO: 4972 - DNA, 20 bp, synthetic construct
  misc_feature 1..20: note = chemically synthesized
  source 1..20: mol_type = other DNA
gtgtagttaagtactgaagt

SEQ ID NO: 4973 - DNA, 20 bp, synthetic construct
  misc_feature 1..20: note = chemically synthesized
  source 1..20: mol_type = other DNA
agtactgaagtgagaaattc

SEQ ID NO: 4974 - DNA, 20 bp, synthetic construct
  misc_feature 1..20: note = chemically synthesized
  source 1..20: mol_type = other DNA
aaattcaagaaaactatact

SEQ ID NO: 4975 - DNA, 20 bp, synthetic construct
  misc_feature 1..20: note = chemically synthesized
  source 1..20: mol_type = other DNA
aattcaagaaaactatactt

SEQ ID NO: 4976 - DNA, 20 bp, synthetic construct
  misc_feature 1..20: note = chemically synthesized
  source 1..20: mol_type = other DNA
ggcacacacacacacatttt

SEQ ID NO: 4977 - DNA, 20 bp, synthetic construct
  misc_feature 1..20: note = chemically synthesized
  source 1..20: mol_type = other DNA
cacacacacacacattttga

SEQ ID NO: 4978 - DNA, 20 bp, synthetic construct
  misc_feature 1..20: note = chemically synthesized
  source 1..20: mol_type = other DNA
attttgagagataatttcta

SEQ ID NO: 4979 - DNA, 20 bp, synthetic construct
  misc_feature 1..20: note = chemically synthesized
  source 1..20: mol_type = other DNA
ttctaaagacctaccaatct

SEQ ID NO: 4980 - DNA, 20 bp, synthetic construct
  misc_feature 1..20: note = chemically synthesized
  source 1..20: mol_type = other DNA
ctaccaatctaagatactga

SEQ ID NO: 4981 - DNA, 20 bp, synthetic construct
  misc_feature 1..20: note = chemically synthesized
  source 1..20: mol_type = other DNA
tctaagatactgaaagaaaa

SEQ ID NO: 4982 - DNA, 20 bp, synthetic construct
  misc_feature 1..20: note = chemically synthesized
  source 1..20: mol_type = other DNA
ctgaaagaaaatggctacat

SEQ ID NO: 4983 - DNA, 20 bp, synthetic construct
  misc_feature 1..20: note = chemically synthesized
  source 1..20: mol_type = other DNA
tgaaagaaaatggctacatc

SEQ ID NO: 4984 - DNA, 20 bp, synthetic construct
  misc_feature 1..20: note = chemically synthesized
  source 1..20: mol_type = other DNA
gaaaatggctacatcaggcc

SEQ ID NO: 4985 - DNA, 20 bp, synthetic construct
  misc_feature 1..20: note = chemically synthesized
  source 1..20: mol_type = other DNA
tggctacatcaggcccagaa

SEQ ID NO: 4986 - DNA, 20 bp, synthetic construct
  misc_feature 1..20: note = chemically synthesized
  source 1..20: mol_type = other DNA
cttgaaattttccctatcca

SEQ ID NO: 4987 - DNA, 20 bp, synthetic construct
  misc_feature 1..20: note = chemically synthesized
  source 1..20: mol_type = other DNA
ttttccctatccacagacca

SEQ ID NO: 4988 - DNA, 20 bp, synthetic construct
  misc_feature 1..20: note = chemically synthesized
  source 1..20: mol_type = other DNA
cacagaccacagccctgtga

SEQ ID NO: 4989 - DNA, 20 bp, synthetic construct
  misc_feature 1..20: note = chemically synthesized
  source 1..20: mol_type = other DNA
cacagccctgtgatggacat

SEQ ID NO: 4990 - DNA, 20 bp, synthetic construct
  misc_feature 1..20: note = chemically synthesized
  source 1..20: mol_type = other DNA
gtgatggacatgagatcctc

SEQ ID NO: 4991 - DNA, 20 bp, synthetic construct
  misc_feature 1..20: note = chemically synthesized
  source 1..20: mol_type = other DNA
acatgagatcctctggcttt

SEQ ID NO: 4992 - DNA, 20 bp, synthetic construct
  misc_feature 1..20: note = chemically synthesized
  source 1..20: mol_type = other DNA
gctttgagatgaataatgca

SEQ ID NO: 4993 - DNA, 20 bp, synthetic construct
  misc_feature 1..20: note = chemically synthesized
  source 1..20: mol_type = other DNA
gatgaataatgcacagaaat

SEQ ID NO: 4994 - DNA, 20 bp, synthetic construct
  misc_feature 1..20: note = chemically synthesized
  source 1..20: mol_type = other DNA
gaataatgcacagaaatgag

SEQ ID NO: 4995 - DNA, 20 bp, synthetic construct
  misc_feature 1..20: note = chemically synthesized
  source 1..20: mol_type = other DNA
cacagaaatgagcagcatga

SEQ ID NO: 4996 - DNA, 20 bp, synthetic construct
  misc_feature 1..20: note = chemically synthesized
  source 1..20: mol_type = other DNA
aaatgagcagcatgatggat

SEQ ID NO: 4997 - DNA, 20 bp, synthetic construct
  misc_feature 1..20: note = chemically synthesized
  source 1..20: mol_type = other DNA
gagcagcatgatggattagc

SEQ ID NO: 4998 - DNA, 20 bp, synthetic construct
  misc_feature 1..20: note = chemically synthesized
  source 1..20: mol_type = other DNA
cagcatgatggattagctgg

SEQ ID NO: 4999 - DNA, 20 bp, synthetic construct
  misc_feature 1..20: note = chemically synthesized
  source 1..20: mol_type = other DNA
attagctggcagattattac

SEQ ID NO: 5000 - DNA, 20 bp, synthetic construct
  misc_feature 1..20: note = chemically synthesized
  source 1..20: mol_type = other DNA
tgaacatgccaactcaacat

SEQ ID NO: 5001 - DNA, 20 bp, synthetic construct
  misc_feature 1..20: note = chemically synthesized
  source 1..20: mol_type = other DNA
gaacatgccaactcaacatc

SEQ ID NO: 5002 - DNA, 20 bp, synthetic construct
  misc_feature 1..20: note = chemically synthesized
  source 1..20: mol_type = other DNA
tgccaactcaacatcaggat

SEQ ID NO: 5003 - DNA, 20 bp, synthetic construct
  misc_feature 1..20: note = chemically synthesized
  source 1..20: mol_type = other DNA
gccaactcaacatcaggatt

SEQ ID NO: 5004 - DNA, 20 bp, synthetic construct
  misc_feature 1..20: note = chemically synthesized
  source 1..20: mol_type = other DNA
attgggcctgaaacttctct

SEQ ID NO: 5005 - DNA, 20 bp, synthetic construct
  misc_feature 1..20: note = chemically synthesized
  source 1..20: mol_type = other DNA
ttgggcctgaaacttctctc

SEQ ID NO: 5006 - DNA, 20 bp, synthetic construct
  misc_feature 1..20: note = chemically synthesized
  source 1..20: mol_type = other DNA
ggcctgaaacttctctcagg

SEQ ID NO: 5007 - DNA, 20 bp, synthetic construct
  misc_feature 1..20: note = chemically synthesized
  source 1..20: mol_type = other DNA
gcctgaaacttctctcagga

SEQ ID NO: 5008 - DNA, 20 bp, synthetic construct
  misc_feature 1..20: note = chemically synthesized
  source 1..20: mol_type = other DNA
ttctctcaggaaggccttga

SEQ ID NO: 5009 - DNA, 20 bp, synthetic construct
  misc_feature 1..20: note = chemically synthesized
  source 1..20: mol_type = other DNA
caggaaggccttgatagcat

SEQ ID NO: 5010 - DNA, 20 bp, synthetic construct
  misc_feature 1..20: note = chemically synthesized
  source 1..20: mol_type = other DNA
aaggccttgatagcattaga

SEQ ID NO: 5011 - DNA, 20 bp, synthetic construct
  misc_feature 1..20: note = chemically synthesized
  source 1..20: mol_type = other DNA
tgatagcattagatggttga

SEQ ID NO: 5012 - DNA, 20 bp, synthetic construct
  misc_feature 1..20: note = chemically synthesized
  source 1..20: mol_type = other DNA
atagcattagatggttgaca

SEQ ID NO: 5013 - DNA, 20 bp, synthetic construct
  misc_feature 1..20: note = chemically synthesized
  source 1..20: mol_type = other DNA
tagcattagatggttgacag

SEQ ID NO: 5014 - DNA, 20 bp, synthetic construct
  misc_feature 1..20: note = chemically synthesized
  source 1..20: mol_type = other DNA
gatggttgacagaggtatta

SEQ ID NO: 5015 - DNA, 20 bp, synthetic construct
  misc_feature 1..20: note = chemically synthesized
  source 1..20: mol_type = other DNA
acagaggtattacagtgtga

SEQ ID NO: 5016 - DNA, 20 bp, synthetic construct
  misc_feature 1..20: note = chemically synthesized
  source 1..20: mol_type = other DNA
agaggtattacagtgtgaca

SEQ ID NO: 5017 - DNA, 20 bp, synthetic construct
  misc_feature 1..20: note = chemically synthesized
  source 1..20: mol_type = other DNA
attacagtgtgacagagtct

SEQ ID NO: 5018 - DNA, 20 bp, synthetic construct
  misc_feature 1..20: note = chemically synthesized
  source 1..20: mol_type = other DNA
tgtgacagagtctgagccca

SEQ ID NO: 5019 - DNA, 20 bp, synthetic construct
  misc_feature 1..20: note = chemically synthesized
  source 1..20: mol_type = other DNA
agagtctgagcccacagtct

SEQ ID NO: 5020 - DNA, 20 bp, synthetic construct
  misc_feature 1..20: note = chemically synthesized
  source 1..20: mol_type = other DNA
agaatgaccacatcccttcc

SEQ ID NO: 5021 - DNA, 20 bp, synthetic construct
  misc_feature 1..20: note = chemically synthesized
  source 1..20: mol_type = other DNA
gaatgaccacatcccttccc

SEQ ID NO: 5022 - DNA, 20 bp, synthetic construct
  misc_feature 1..20: note = chemically synthesized
  source 1..20: mol_type = other DNA
aatgaccacatcccttccca

SEQ ID NO: 5023 - DNA, 20 bp, synthetic construct
  misc_feature 1..20: note = chemically synthesized
  source 1..20: mol_type = other DNA
tgaccacatcccttcccagg

SEQ ID NO: 5024 - DNA, 20 bp, synthetic construct
  misc_feature 1..20: note = chemically synthesized
  source 1..20: mol_type = other DNA
gacgttcccactcaacaccc

SEQ ID NO: 5025 - DNA, 20 bp, synthetic construct
  misc_feature 1..20: note = chemically synthesized
  source 1..20: mol_type = other DNA
acgttcccactcaacaccct

SEQ ID NO: 5026 - DNA, 20 bp, synthetic construct
  misc_feature 1..20: note = chemically synthesized
  source 1..20: mol_type = other DNA
ttcccactcaacaccctggg

SEQ ID NO: 5027 - DNA, 20 bp, synthetic construct
  misc_feature 1..20: note = chemically synthesized
  source 1..20: mol_type = other DNA
atcactctgtctctcaaacc

SEQ ID NO: 5028 - DNA, 20 bp, synthetic construct
  misc_feature 1..20: note = chemically synthesized
  source 1..20: mol_type = other DNA
ctgtctctcaaacctggcca

SEQ ID NO: 5029 - DNA, 20 bp, synthetic construct
  misc_feature 1..20: note = chemically synthesized
  source 1..20: mol_type = other DNA
tctcaaacctggccatggct

SEQ ID NO: 5030 - DNA, 20 bp, synthetic construct
  misc_feature 1..20: note = chemically synthesized
  source 1..20: mol_type = other DNA
tttgcccttttccctgctaa

SEQ ID NO: 5031 - DNA, 20 bp, synthetic construct
  misc_feature 1..20: note = chemically synthesized
  source 1..20: mol_type = other DNA
cttttccctgctaacagaaa

SEQ ID NO: 5032 - DNA, 20 bp, synthetic construct
  misc_feature 1..20: note = chemically synthesized
  source 1..20: mol_type = other DNA
cctgctaacagaaatggaat

SEQ ID NO: 5033 - DNA, 20 bp, synthetic construct
  misc_feature 1..20: note = chemically synthesized
  source 1..20: mol_type = other DNA
acaaattaatatttaatttt

SEQ ID NO: 5034 - DNA, 20 bp, synthetic construct
  misc_feature 1..20: note = chemically synthesized
  source 1..20: mol_type = other DNA
ttttaagattactattctat

SEQ ID NO: 5035 - DNA, 20 bp, synthetic construct
  misc_feature 1..20: note = chemically synthesized
  source 1..20: mol_type = other DNA
actattctatcagaataaaa

SEQ ID NO: 5036 - DNA, 20 bp, synthetic construct
  misc_feature 1..20: note = chemically synthesized
  source 1..20: mol_type = other DNA
ctatcagaataaaaaagact

SEQ ID NO: 5037 - DNA, 20 bp, synthetic construct
  misc_feature 1..20: note = chemically synthesized
  source 1..20: mol_type = other DNA
tatcagaataaaaaagactc

SEQ ID NO: 5038 - DNA, 20 bp, synthetic construct
  misc_feature 1..20: note = chemically synthesized
  source 1..20: mol_type = other DNA
tcagaataaaaaagactcgg

SEQ ID NO: 5039 - DNA, 20 bp, synthetic construct
  misc_feature 1..20: note = chemically synthesized
  source 1..20: mol_type = other DNA
aaaaagactcgggagattca

SEQ ID NO: 5040 - DNA, 20 bp, synthetic construct
  misc_feature 1..20: note = chemically synthesized
  source 1..20: mol_type = other DNA
gactcgggagattcaaagcg

SEQ ID NO: 5041 - DNA, 20 bp, synthetic construct
  misc_feature 1..20: note = chemically synthesized
  source 1..20: mol_type = other DNA
actcgggagattcaaagcga

SEQ ID NO: 5042 - DNA, 20 bp, synthetic construct
  misc_feature 1..20: note = chemically synthesized
  source 1..20: mol_type = other DNA
aaggcaaatgcccctccttt

SEQ ID NO: 5043 - DNA, 20 bp, synthetic construct
  misc_feature 1..20: note = chemically synthesized
  source 1..20: mol_type = other DNA
ttaagtctaacgttgctatt

SEQ ID NO: 5044 - DNA, 20 bp, synthetic construct
  misc_feature 1..20: note = chemically synthesized
  source 1..20: mol_type = other DNA
taagtctaacgttgctattc

SEQ ID NO: 5045 - DNA, 20 bp, synthetic construct
  misc_feature 1..20: note = chemically synthesized
  source 1..20: mol_type = other DNA
aacgttgctattcaggcatt

SEQ ID NO: 5046 - DNA, 20 bp, synthetic construct
  misc_feature 1..20: note = chemically synthesized
  source 1..20: mol_type = other DNA
acgttgctattcaggcattt

SEQ ID NO: 5047 - DNA, 20 bp, synthetic construct
  misc_feature 1..20: note = chemically synthesized
  source 1..20: mol_type = other DNA
gttgctattcaggcatttag

SEQ ID NO: 5048 - DNA, 20 bp, synthetic construct
  misc_feature 1..20: note = chemically synthesized
  source 1..20: mol_type = other DNA
attcaggcatttaggagcgc

SEQ ID NO: 5049 - DNA, 20 bp, synthetic construct
  misc_feature 1..20: note = chemically synthesized
  source 1..20: mol_type = other DNA
gcatttaggagcgctagaca

SEQ ID NO: 5050 - DNA, 20 bp, synthetic construct
  misc_feature 1..20: note = chemically synthesized
  source 1..20: mol_type = other DNA
ttaggagcgctagacacagt

SEQ ID NO: 5051 - DNA, 20 bp, synthetic construct
  misc_feature 1..20: note = chemically synthesized
  source 1..20: mol_type = other DNA
tccaacctgtgatttgccac

SEQ ID NO: 5052 - DNA, 20 bp, synthetic construct
  misc_feature 1..20: note = chemically synthesized
  source 1..20: mol_type = other DNA
ccaacctgtgatttgccaca

SEQ ID NO: 5053 - DNA, 20 bp, synthetic construct
  misc_feature 1..20: note = chemically synthesized
  source 1..20: mol_type = other DNA
acctgtgatttgccacaagg

SEQ ID NO: 5054 - DNA, 20 bp, synthetic construct
  misc_feature 1..20: note = chemically synthesized
  source 1..20: mol_type = other DNA
cctgtgatttgccacaaggc

SEQ ID NO: 5055 - DNA, 20 bp, synthetic construct
  misc_feature 1..20: note = chemically synthesized
  source 1..20: mol_type = other DNA
gtgatttgccacaaggcagg

SEQ ID NO: 5056 - DNA, 20 bp, synthetic construct
  misc_feature 1..20: note = chemically synthesized
  source 1..20: mol_type = other DNA
tgatttgccacaaggcagga

SEQ ID NO: 5057 - DNA, 20 bp, synthetic construct
  misc_feature 1..20: note = chemically synthesized
  source 1..20: mol_type = other DNA
gatttgccacaaggcaggaa

SEQ ID NO: 5058 - DNA, 20 bp, synthetic construct
  misc_feature 1..20: note = chemically synthesized
  source 1..20: mol_type = other DNA
atttgccacaaggcaggaag

SEQ ID NO: 5059 - DNA, 20 bp, synthetic construct
  misc_feature 1..20: note = chemically synthesized
  source 1..20: mol_type = other DNA
tgccacaaggcaggaagggg

SEQ ID NO: 5060 - DNA, 20 bp, synthetic construct
  misc_feature 1..20: note = chemically synthesized
  source 1..20: mol_type = other DNA
gccacaaggcaggaagggga

SEQ ID NO: 5061 - DNA, 20 bp, synthetic construct
  misc_feature 1..20: note = chemically synthesized
  source 1..20: mol_type = other DNA
caaggcaggaaggggaagga

SEQ ID NO: 5062 - DNA, 20 bp, synthetic construct
  misc_feature 1..20: note = chemically synthesized
  source 1..20: mol_type = other DNA
aaggatagtgcaacacccct

SEQ ID NO: 5063 - DNA, 20 bp, synthetic construct
  misc_feature 1..20: note = chemically synthesized
  source 1..20: mol_type = other DNA
gcaacacccctaagtgtgtg

SEQ ID NO: 5064 - DNA, 20 bp, synthetic construct
  misc_feature 1..20: note = chemically synthesized
  source 1..20: mol_type = other DNA
cttttacccatgtaatgatc

SEQ ID NO: 5065 - DNA, 20 bp, synthetic construct
  misc_feature 1..20: note = chemically synthesized
  source 1..20: mol_type = other DNA
attttgcctttaatcaatga

SEQ ID NO: 5066 - DNA, 20 bp, synthetic construct
  misc_feature 1..20: note = chemically synthesized
  source 1..20: mol_type = other DNA
tttgcctttaatcaatgaaa

SEQ ID NO: 5067 - DNA, 20 bp, synthetic construct
  misc_feature 1..20: note = chemically synthesized
  source 1..20: mol_type = other DNA
cctttaatcaatgaaagagt

SEQ ID NO: 5068 - DNA, 20 bp, synthetic construct
  misc_feature 1..20: note = chemically synthesized
  source 1..20: mol_type = other DNA
ctccctaacctatattttgc

SEQ ID NO: 5069 - DNA, 20 bp, synthetic construct
  misc_feature 1..20: note = chemically synthesized
  source 1..20: mol_type = other DNA
cctatattttgcaagtcgat

SEQ ID NO: 5070 - DNA, 20 bp, synthetic construct
  misc_feature 1..20: note = chemically synthesized
  source 1..20: mol_type = other DNA
attttgcaagtcgattagct

SEQ ID NO: 5071 - DNA, 20 bp, synthetic construct
  misc_feature 1..20: note = chemically synthesized
  source 1..20: mol_type = other DNA
taagctcttcatgctaatgt

SEQ ID NO: 5072 - DNA, 20 bp, synthetic construct
  misc_feature 1..20: note = chemically synthesized
  source 1..20: mol_type = other DNA
gctcttcatgctaatgtcag

SEQ ID NO: 5073 - DNA, 20 bp, synthetic construct
  misc_feature 1..20: note = chemically synthesized
  source 1..20: mol_type = other DNA
tcttcatgctaatgtcagca

SEQ ID NO: 5074 - DNA, 20 bp, synthetic construct
  misc_feature 1..20: note = chemically synthesized
  source 1..20: mol_type = other DNA
cagagcccatgttacatctc

SEQ ID NO: 5075 - DNA, 20 bp, synthetic construct
  misc_feature 1..20: note = chemically synthesized
  source 1..20: mol_type = other DNA
gcccatgttacatctccagt

SEQ ID NO: 5076 - DNA, 20 bp, synthetic construct
  misc_feature 1..20: note = chemically synthesized
  source 1..20: mol_type = other DNA
cccatgttacatctccagtc

SEQ ID NO: 5077 - DNA, 20 bp, synthetic construct
  misc_feature 1..20: note = chemically synthesized
  source 1..20: mol_type = other DNA
tacatctccagtcaggcttt

SEQ ID NO: 5078 - DNA, 20 bp, synthetic construct
  misc_feature 1..20: note = chemically synthesized
  source 1..20: mol_type = other DNA
acatctccagtcaggctttc

SEQ ID NO: 5079 - DNA, 20 bp, synthetic construct
  misc_feature 1..20: note = chemically synthesized
  source 1..20: mol_type = other DNA
accccacaatgccacacacc

SEQ ID NO: 5080 - DNA, 20 bp, synthetic construct
  misc_feature 1..20: note = chemically synthesized
  source 1..20: mol_type = other DNA
cccacaatgccacacaccga

SEQ ID NO: 5081 - DNA, 20 bp, synthetic construct
  misc_feature 1..20: note = chemically synthesized
  source 1..20: mol_type = other DNA
acaatgccacacaccgagag

SEQ ID NO: 5082 - DNA, 20 bp, synthetic construct
  misc_feature 1..20: note = chemically synthesized
  source 1..20: mol_type = other DNA
ccacacaccgagagtggaaa

SEQ ID NO: 5083 - DNA, 20 bp, synthetic construct
  misc_feature 1..20: note = chemically synthesized
  source 1..20: mol_type = other DNA
gagagtggaaaaagaaaatt

SEQ ID NO: 5084 - DNA, 20 bp, synthetic construct
  misc_feature 1..20: note = chemically synthesized
  source 1..20: mol_type = other DNA
agtggaaaaagaaaattcag

SEQ ID NO: 5085 - DNA, 20 bp, synthetic construct
  misc_feature 1..20: note = chemically synthesized
  source 1..20: mol_type = other DNA
gtggaaaaagaaaattcagc

SEQ ID NO: 5086 - DNA, 20 bp, synthetic construct
  misc_feature 1..20: note = chemically synthesized
  source 1..20: mol_type = other DNA
tggaaaaagaaaattcagca

SEQ ID NO: 5087 - DNA, 20 bp, synthetic construct
  misc_feature 1..20: note = chemically synthesized
  source 1..20: mol_type = other DNA
ggaaaaagaaaattcagcag

SEQ ID NO: 5088 - DNA, 20 bp, synthetic construct
  misc_feature 1..20: note = chemically synthesized
  source 1..20: mol_type = other DNA
gaaaaagaaaattcagcagg

SEQ ID NO: 5089 - DNA, 20 bp, synthetic construct
  misc_feature 1..20: note = chemically synthesized
  source 1..20: mol_type = other DNA
aaaagaaaattcagcagggg

SEQ ID NO: 5090 - DNA, 20 bp, synthetic construct
  misc_feature 1..20: note = chemically synthesized
  source 1..20: mol_type = other DNA
agaaaattcagcagggggag

SEQ ID NO: 5091 - DNA, 20 bp, synthetic construct
  misc_feature 1..20: note = chemically synthesized
  source 1..20: mol_type = other DNA
attcagcagggggagcagtg

SEQ ID NO: 5092 - DNA, 20 bp, synthetic construct
  misc_feature 1..20: note = chemically synthesized
  source 1..20: mol_type = other DNA
cagcagggggagcagtgtag

SEQ ID NO: 5093 - DNA, 20 bp, synthetic construct
  misc_feature 1..20: note = chemically synthesized
  source 1..20: mol_type = other DNA
agcagggggagcagtgtagt

SEQ ID NO: 5094 - DNA, 20 bp, synthetic construct
  misc_feature 1..20: note = chemically synthesized
  source 1..20: mol_type = other DNA
agggggagcagtgtagtggg

SEQ ID NO: 5095 - DNA, 20 bp, synthetic construct
  misc_feature 1..20: note = chemically synthesized
  source 1..20: mol_type = other DNA
ttacgttttcgtcatctgta

SEQ ID NO: 5096 - DNA, 20 bp, synthetic construct
  misc_feature 1..20: note = chemically synthesized
  source 1..20: mol_type = other DNA
ttcgtcatctgtatggaaat

SEQ ID NO: 5097 - DNA, 20 bp, synthetic construct
  misc_feature 1..20: note = chemically synthesized
  source 1..20: mol_type = other DNA
tcgtcatctgtatggaaatt

SEQ ID NO: 5098 - DNA, 20 bp, synthetic construct
  misc_feature 1..20: note = chemically synthesized
  source 1..20: mol_type = other DNA
ggaaatcgtcttctcaaatg

SEQ ID NO: 5099 - DNA, 20 bp, synthetic construct
  misc_feature 1..20: note = chemically synthesized
  source 1..20: mol_type = other DNA
aaatgtagattatcttccct

SEQ ID NO: 5100 - DNA, 20 bp, synthetic construct
  misc_feature 1..20: note = chemically synthesized
  source 1..20: mol_type = other DNA
aatgtagattatcttccctt

SEQ ID NO: 5101 - DNA, 20 bp, synthetic construct
  misc_feature 1..20: note = chemically synthesized
  source 1..20: mol_type = other DNA
atcttcccttgggatccttc

SEQ ID NO: 5102 - DNA, 20 bp, synthetic construct
  misc_feature 1..20: note = chemically synthesized
  source 1..20: mol_type = other DNA
cttcccttgggatccttctg

SEQ ID NO: 5103 - DNA, 20 bp, synthetic construct
  misc_feature 1..20: note = chemically synthesized
  source 1..20: mol_type = other DNA
ttcccttgggatccttctgg

SEQ ID NO: 5104 - DNA, 20 bp, synthetic construct
  misc_feature 1..20: note = chemically synthesized
  source 1..20: mol_type = other DNA
tcccttgggatccttctgga

SEQ ID NO: 5105 - DNA, 20 bp, synthetic construct
  misc_feature 1..20: note = chemically synthesized
  source 1..20: mol_type = other DNA
ttctggagggctataaataa

SEQ ID NO: 5106 - DNA, 20 bp, synthetic construct
  misc_feature 1..20: note = chemically synthesized
  source 1..20: mol_type = other DNA
tagaacatactaatcaacat

SEQ ID NO: 5107 - DNA, 20 bp, synthetic construct
  misc_feature 1..20: note = chemically synthesized
  source 1..20: mol_type = other DNA
tagatatttaaaaatgaata

SEQ ID NO: 5108 - DNA, 20 bp, synthetic construct
  misc_feature 1..20: note = chemically synthesized
  source 1..20: mol_type = other DNA
tttaaaaatgaatacagatt

SEQ ID NO: 5109 - DNA, 20 bp, synthetic construct
  misc_feature 1..20: note = chemically synthesized
  source 1..20: mol_type = other DNA
aatgaatacagattcagatt

SEQ ID NO: 5110 - DNA, 20 bp, synthetic construct
  misc_feature 1..20: note = chemically synthesized
  source 1..20: mol_type = other DNA
atgaatacagattcagatta

SEQ ID NO: 5111 - DNA, 20 bp, synthetic construct
  misc_feature 1..20: note = chemically synthesized
  source 1..20: mol_type = other DNA
tgaatacagattcagattaa

SEQ ID NO: 5112 - DNA, 20 bp, synthetic construct
  misc_feature 1..20: note = chemically synthesized
  source 1..20: mol_type = other DNA
aatgatgcctttataaaatc

SEQ ID NO: 5113 - DNA, 20 bp, synthetic construct
  misc_feature 1..20: note = chemically synthesized
  source 1..20: mol_type = other DNA
agaacaaaacaaaacaaaaa

SEQ ID NO: 5114 - DNA, 20 bp, synthetic construct
  misc_feature 1..20: note = chemically synthesized
  source 1..20: mol_type = other DNA
gaacaaaacaaaacaaaaaa

SEQ ID NO: 5115 - DNA, 20 bp, synthetic construct
  misc_feature 1..20: note = chemically synthesized
  source 1..20: mol_type = other DNA
aaacaaaaaaaggcatgaaa

SEQ ID NO: 5116 - DNA, 20 bp, synthetic construct
  misc_feature 1..20: note = chemically synthesized
  source 1..20: mol_type = other DNA
caaaaaaaggcatgaaaaag

SEQ ID NO: 5117 - DNA, 20 bp, synthetic construct
  misc_feature 1..20: note = chemically synthesized
  source 1..20: mol_type = other DNA
aaaaaaaggcatgaaaaaga

SEQ ID NO: 5118 - DNA, 20 bp, synthetic construct
  misc_feature 1..20: note = chemically synthesized
  source 1..20: mol_type = other DNA
aaggcatgaaaaagaaggct

SEQ ID NO: 5119 - DNA, 20 bp, synthetic construct
  misc_feature 1..20: note = chemically synthesized
  source 1..20: mol_type = other DNA
gcatgaaaaagaaggcttag

SEQ ID NO: 5120 - DNA, 20 bp, synthetic construct
  misc_feature 1..20: note = chemically synthesized
  source 1..20: mol_type = other DNA
aggcttagcggatccccctt

SEQ ID NO: 5121 - DNA, 20 bp, synthetic construct
  misc_feature 1..20: note = chemically synthesized
  source 1..20: mol_type = other DNA
ttagcggatcccccttaagt

SEQ ID NO: 5122 - DNA, 20 bp, synthetic construct
  misc_feature 1..20: note = chemically synthesized
  source 1..20: mol_type = other DNA
cttaagttagccctattctc

SEQ ID NO: 5123 - DNA, 20 bp, synthetic construct
  misc_feature 1..20: note = chemically synthesized
  source 1..20: mol_type = other DNA
ctattctctggcaaccacac

SEQ ID NO: 5124 - DNA, 20 bp, synthetic construct
  misc_feature 1..20: note = chemically synthesized
  source 1..20: mol_type = other DNA
caaccacaccagcctttaac

SEQ ID NO: 5125 - DNA, 20 bp, synthetic construct
  misc_feature 1..20: note = chemically synthesized
  source 1..20: mol_type = other DNA
aaccacaccagcctttaacg

SEQ ID NO: 5126 - DNA, 20 bp, synthetic construct
  misc_feature 1..20: note = chemically synthesized
  source 1..20: mol_type = other DNA
accacaccagcctttaacga

SEQ ID NO: 5127 - DNA, 20 bp, synthetic construct
  misc_feature 1..20: note = chemically synthesized
  source 1..20: mol_type = other DNA
gcctttaacgagggtgttca

SEQ ID NO: 5128 - DNA, 20 bp, synthetic construct
  misc_feature 1..20: note = chemically synthesized
  source 1..20: mol_type = other DNA
tttcccactcccttatttat

SEQ ID NO: 5129 - DNA, 20 bp, synthetic construct
  misc_feature 1..20: note = chemically synthesized
  source 1..20: mol_type = other DNA
cccactcccttatttatgag

SEQ ID NO: 5130 - DNA, 20 bp, synthetic construct
  misc_feature 1..20: note = chemically synthesized
  source 1..20: mol_type = other DNA
actcccttatttatgagcag

SEQ ID NO: 5131 - DNA, 20 bp, synthetic construct
  misc_feature 1..20: note = chemically synthesized
  source 1..20: mol_type = other DNA
tatgagcagcagaatgtaaa

SEQ ID NO: 5132 - DNA, 20 bp, synthetic construct
  misc_feature 1..20: note = chemically synthesized
  source 1..20: mol_type = other DNA
agcagcagaatgtaaaaagc

SEQ ID NO: 5133 - DNA, 20 bp, synthetic construct
  misc_feature 1..20: note = chemically synthesized
  source 1..20: mol_type = other DNA
cagcagaatgtaaaaagcaa

SEQ ID NO: 5134 - DNA, 20 bp, synthetic construct
  misc_feature 1..20: note = chemically synthesized
  source 1..20: mol_type = other DNA
agcagaatgtaaaaagcaag

SEQ ID NO: 5135 - DNA, 20 bp, synthetic construct
  misc_feature 1..20: note = chemically synthesized
  source 1..20: mol_type = other DNA
caagaggcttaattttaatg

SEQ ID NO: 5136 - DNA, 20 bp, synthetic construct
  misc_feature 1..20: note = chemically synthesized
  source 1..20: mol_type = other DNA
tctcatcaaccattctatct

SEQ ID NO: 5137 - DNA, 20 bp, synthetic construct
  misc_feature 1..20: note = chemically synthesized
  source 1..20: mol_type = other DNA
ctcatcaaccattctatcta

SEQ ID NO: 5138 - DNA, 20 bp, synthetic construct
  misc_feature 1..20: note = chemically synthesized
  source 1..20: mol_type = other DNA
atcaaccattctatctaagg

SEQ ID NO: 5139 - DNA, 20 bp, synthetic construct
  misc_feature 1..20: note = chemically synthesized
  source 1..20: mol_type = other DNA
cattctatctaaggaagctg

SEQ ID NO: 5140 - DNA, 20 bp, synthetic construct
  misc_feature 1..20: note = chemically synthesized
  source 1..20: mol_type = other DNA
ctatctaaggaagctgcaga

SEQ ID NO: 5141 - DNA, 20 bp, synthetic construct
  misc_feature 1..20: note = chemically synthesized
  source 1..20: mol_type = other DNA
tatctaaggaagctgcagaa

SEQ ID NO: 5142 - DNA, 20 bp, synthetic construct
  misc_feature 1..20: note = chemically synthesized
  source 1..20: mol_type = other DNA
agctgcagaaaggtgaaaac

SEQ ID NO: 5143 - DNA, 20 bp, synthetic construct
  misc_feature 1..20: note = chemically synthesized
  source 1..20: mol_type = other DNA
ggaaatttatgaacctttaa

SEQ ID NO: 5144 - DNA, 20 bp, synthetic construct
  misc_feature 1..20: note = chemically synthesized
  source 1..20: mol_type = other DNA
gaaatttatgaacctttaat

SEQ ID NO: 5145 - DNA, 20 bp, synthetic construct
  misc_feature 1..20: note = chemically synthesized
  source 1..20: mol_type = other DNA
tgaacctttaatgggaaatc

SEQ ID NO: 5146 - DNA, 20 bp, synthetic construct
  misc_feature 1..20: note = chemically synthesized
  source 1..20: mol_type = other DNA
ctttaatgggaaatctggat

SEQ ID NO: 5147 - DNA, 20 bp, synthetic construct
  misc_feature 1..20: note = chemically synthesized
  source 1..20: mol_type = other DNA
gggaaatctggataagaatt

SEQ ID NO: 5148 - DNA, 20 bp, synthetic construct
  misc_feature 1..20: note = chemically synthesized
  source 1..20: mol_type = other DNA
gaatttggtctaaatatatg

SEQ ID NO: 5149 - DNA, 20 bp, synthetic construct
  misc_feature 1..20: note = chemically synthesized
  source 1..20: mol_type = other DNA
atttggtctaaatatatgaa

SEQ ID NO: 5150 - DNA, 20 bp, synthetic construct
  misc_feature 1..20: note = chemically synthesized
  source 1..20: mol_type = other DNA
tttggtctaaatatatgaag

SEQ ID NO: 5151 - DNA, 20 bp, synthetic construct
  misc_feature 1..20: note = chemically synthesized
  source 1..20: mol_type = other DNA
taaatatatgaagaggaaca

SEQ ID NO: 5152 - DNA, 20 bp, synthetic construct
  misc_feature 1..20: note = chemically synthesized
  source 1..20: mol_type = other DNA
tatatgaagaggaacatgga

SEQ ID NO: 5153 - DNA, 20 bp, synthetic construct
  misc_feature 1..20: note = chemically synthesized
  source 1..20: mol_type = other DNA
tgaagaggaacatggacagc

SEQ ID NO: 5154 - DNA, 20 bp, synthetic construct
  misc_feature 1..20: note = chemically synthesized
  source 1..20: mol_type = other DNA
ctggcacaaacacaaaatgc

SEQ ID NO: 5155 - DNA, 20 bp, synthetic construct
  misc_feature 1..20: note = chemically synthesized
  source 1..20: mol_type = other DNA
aaatgcaagtactccaactc

SEQ ID NO: 5156 - DNA, 20 bp, synthetic construct
  misc_feature 1..20: note = chemically synthesized
  source 1..20: mol_type = other DNA
cctgataacatctgccacta

SEQ ID NO: 5157 - DNA, 20 bp, synthetic construct
  misc_feature 1..20: note = chemically synthesized
  source 1..20: mol_type = other DNA
ctgataacatctgccactaa

SEQ ID NO: 5158 - DNA, 20 bp, synthetic construct
  misc_feature 1..20: note = chemically synthesized
  source 1..20: mol_type = other DNA
ccactaaaggtttactgact

SEQ ID NO: 5159 - DNA, 20 bp, synthetic construct
  misc_feature 1..20: note = chemically synthesized
  source 1..20: mol_type = other DNA
tgacttggttttcccaactc

SEQ ID NO: 5160 - DNA, 20 bp, synthetic construct
  misc_feature 1..20: note = chemically synthesized
  source 1..20: mol_type = other DNA
tggttttcccaactctagaa

SEQ ID NO: 5161 - DNA, 20 bp, synthetic construct
  misc_feature 1..20: note = chemically synthesized
  source 1..20: mol_type = other DNA
gttttcccaactctagaatg

SEQ ID NO: 5162 - DNA, 20 bp, synthetic construct
  misc_feature 1..20: note = chemically synthesized
  source 1..20: mol_type = other DNA
atggagccctcatctaaacc

SEQ ID NO: 5163 - DNA, 20 bp, synthetic construct
  misc_feature 1..20: note = chemically synthesized
  source 1..20: mol_type = other DNA
tggagccctcatctaaacct

SEQ ID NO: 5164 - DNA, 20 bp, synthetic construct
  misc_feature 1..20: note = chemically synthesized
  source 1..20: mol_type = other DNA
ggagccctcatctaaacctg

SEQ ID NO: 5165 - DNA, 20 bp, synthetic construct
  misc_feature 1..20: note = chemically synthesized
  source 1..20: mol_type = other DNA
gccctcatctaaacctgggg

SEQ ID NO: 5166 - DNA, 20 bp, synthetic construct
  misc_feature 1..20: note = chemically synthesized
  source 1..20: mol_type = other DNA
ggaagcaatatatgaacaat

SEQ ID NO: 5167 - DNA, 20 bp, synthetic construct
  misc_feature 1..20: note = chemically synthesized
  source 1..20: mol_type = other DNA
aattagatattaaatgctta

SEQ ID NO: 5168 - DNA, 20 bp, synthetic construct
  misc_feature 1..20: note = chemically synthesized
  source 1..20: mol_type = other DNA
ctgtgctattacttttgacc

SEQ ID NO: 5169 - DNA, 20 bp, synthetic construct
  misc_feature 1..20: note = chemically synthesized
  source 1..20: mol_type = other DNA
tgtgctattacttttgacct

SEQ ID NO: 5170 - DNA, 20 bp, synthetic construct
  misc_feature 1..20: note = chemically synthesized
  source 1..20: mol_type = other DNA
tgacctgggttttaaaaaca

SEQ ID NO: 5171 - DNA, 20 bp, synthetic construct
  misc_feature 1..20: note = chemically synthesized
  source 1..20: mol_type = other DNA
tacaatttattctcattatg

SEQ ID NO: 5172 - DNA, 20 bp, synthetic construct
  misc_feature 1..20: note = chemically synthesized
  source 1..20: mol_type = other DNA
tagaaacatttaaattatcc

SEQ ID NO: 5173 - DNA, 20 bp, synthetic construct
  misc_feature 1..20: note = chemically synthesized
  source 1..20: mol_type = other DNA
aaacatttaaattatcctgg

SEQ ID NO: 5174 - DNA, 20 bp, synthetic construct
  misc_feature 1..20: note = chemically synthesized
  source 1..20: mol_type = other DNA
acatttaaattatcctggaa

SEQ ID NO: 5175 - DNA, 20 bp, synthetic construct
  misc_feature 1..20: note = chemically synthesized
  source 1..20: mol_type = other DNA
tcctggaagagtttgtctca

SEQ ID NO: 5176 - DNA, 20 bp, synthetic construct
  misc_feature 1..20: note = chemically synthesized
  source 1..20: mol_type = other DNA
cctggaagagtttgtctcac

SEQ ID NO: 5177 - DNA, 20 bp, synthetic construct
  misc_feature 1..20: note = chemically synthesized
  source 1..20: mol_type = other DNA
tttgtctcacgggctgttca

SEQ ID NO: 5178 - DNA, 20 bp, synthetic construct
  misc_feature 1..20: note = chemically synthesized
  source 1..20: mol_type = other DNA
tgtctcacgggctgttcaaa

SEQ ID NO: 5179 - DNA, 20 bp, synthetic construct
  misc_feature 1..20: note = chemically synthesized
  source 1..20: mol_type = other DNA
agtgtttcttcctttccttc

SEQ ID NO: 5180 - DNA, 20 bp, synthetic construct
  misc_feature 1..20: note = chemically synthesized
  source 1..20: mol_type = other DNA
gtgtttcttcctttccttct

SEQ ID NO: 5181 - DNA, 20 bp, synthetic construct
  misc_feature 1..20: note = chemically synthesized
  source 1..20: mol_type = other DNA
tcctttccttctaggaacat

SEQ ID NO: 5182 - DNA, 20 bp, synthetic construct
  misc_feature 1..20: note = chemically synthesized
  source 1..20: mol_type = other DNA
cctttccttctaggaacatg

SEQ ID NO: 5183 - DNA, 20 bp, synthetic construct
  misc_feature 1..20: note = chemically synthesized
  source 1..20: mol_type = other DNA
tttccttctaggaacatgag

SEQ ID NO: 5184 - DNA, 20 bp, synthetic construct
  misc_feature 1..20: note = chemically synthesized
  source 1..20: mol_type = other DNA
tgaatctgactatttcatca

SEQ ID NO: 5185 - DNA, 20 bp, synthetic construct
  misc_feature 1..20: note = chemically synthesized
  source 1..20: mol_type = other DNA
tatttcatcaaagcctgtaa

SEQ ID NO: 5186 - DNA, 20 bp, synthetic construct
  misc_feature 1..20: note = chemically synthesized
  source 1..20: mol_type = other DNA
aaagcctgtaaaagatacct

SEQ ID NO: 5187 - DNA, 20 bp, synthetic construct
  misc_feature 1..20: note = chemically synthesized
  source 1..20: mol_type = other DNA
tttaactgaacaatgtctcc

SEQ ID NO: 5188 - DNA, 20 bp, synthetic construct
  misc_feature 1..20: note = chemically synthesized
  source 1..20: mol_type = other DNA
gaacaatgtctccaagaatt

SEQ ID NO: 5189 - DNA, 20 bp, synthetic construct
  misc_feature 1..20: note = chemically synthesized
  source 1..20: mol_type = other DNA
tctccaagaattcagactgt

SEQ ID NO: 5190 - DNA, 20 bp, synthetic construct
  misc_feature 1..20: note = chemically synthesized
  source 1..20: mol_type = other DNA
tccaagaattcagactgtga

SEQ ID NO: 5191 - DNA, 20 bp, synthetic construct
  misc_feature 1..20: note = chemically synthesized
  source 1..20: mol_type = other DNA
ccaagaattcagactgtgag

SEQ ID NO: 5192 - DNA, 20 bp, synthetic construct
  misc_feature 1..20: note = chemically synthesized
  source 1..20: mol_type = other DNA
caagaattcagactgtgaga

SEQ ID NO: 5193 - DNA, 20 bp, synthetic construct
  misc_feature 1..20: note = chemically synthesized
  source 1..20: mol_type = other DNA
aagaattcagactgtgagag

SEQ ID NO: 5194 - DNA, 20 bp, synthetic construct
  misc_feature 1..20: note = chemically synthesized
  source 1..20: mol_type = other DNA
agaattcagactgtgagagg

SEQ ID NO: 5195 - DNA, 20 bp, synthetic construct
  misc_feature 1..20: note = chemically synthesized
  source 1..20: mol_type = other DNA
attcagactgtgagaggggg

SEQ ID NO: 5196 - DNA, 20 bp, synthetic construct
  misc_feature 1..20: note = chemically synthesized
  source 1..20: mol_type = other DNA
cagactgtgagagggggaag

SEQ ID NO: 5197 - DNA, 20 bp, synthetic construct
  misc_feature 1..20: note = chemically synthesized
  source 1..20: mol_type = other DNA
ggggaagaagaccgtctctt

SEQ ID NO: 5198 - DNA, 20 bp, synthetic construct
  misc_feature 1..20: note = chemically synthesized
  source 1..20: mol_type = other DNA
agaagaccgtctctttggtg

SEQ ID NO: 5199 - DNA, 20 bp, synthetic construct
  misc_feature 1..20: note = chemically synthesized
  source 1..20: mol_type = other DNA
agaccgtctctttggtgcag

SEQ ID NO: 5200 - DNA, 20 bp, synthetic construct
  misc_feature 1..20: note = chemically synthesized
  source 1..20: mol_type = other DNA
gaccgtctctttggtgcagt

SEQ ID NO: 5201 - DNA, 20 bp, synthetic construct
  misc_feature 1..20: note = chemically synthesized
  source 1..20: mol_type = other DNA
aattgccattgtgtcctccc

SEQ ID NO: 5202 - DNA, 20 bp, synthetic construct
  misc_feature 1..20: note = chemically synthesized
  source 1..20: mol_type = other DNA
tggttcctctcctctgtcct

SEQ ID NO: 5203 - DNA, 20 bp, synthetic construct
  misc_feature 1..20: note = chemically synthesized
  source 1..20: mol_type = other DNA
ctcctctgtccttggcaatc

SEQ ID NO: 5204 - DNA, 20 bp, synthetic construct
  misc_feature 1..20: note = chemically synthesized
  source 1..20: mol_type = other DNA
gcaatccagttacaatttga

SEQ ID NO: 5205 - DNA, 20 bp, synthetic construct
  misc_feature 1..20: note = chemically synthesized
  source 1..20: mol_type = other DNA
ttacaatttgacagcattta

SEQ ID NO: 5206 - DNA, 20 bp, synthetic construct
  misc_feature 1..20: note = chemically synthesized
  source 1..20: mol_type = other DNA
ttgacagcatttaaagatga

SEQ ID NO: 5207 - DNA, 20 bp, synthetic construct
  misc_feature 1..20: note = chemically synthesized
  source 1..20: mol_type = other DNA
atttaaagatgacagtactt

SEQ ID NO: 5208 - DNA, 20 bp, synthetic construct
  misc_feature 1..20: note = chemically synthesized
  source 1..20: mol_type = other DNA
gatgacagtacttgagataa

SEQ ID NO: 5209 - DNA, 20 bp, synthetic construct
  misc_feature 1..20: note = chemically synthesized
  source 1..20: mol_type = other DNA
atgacagtacttgagataat

SEQ ID NO: 5210 - DNA, 20 bp, synthetic construct
  misc_feature 1..20: note = chemically synthesized
  source 1..20: mol_type = other DNA
ataataggacaatgccataa

SEQ ID NO: 5211 - DNA, 20 bp, synthetic construct
  misc_feature 1..20: note = chemically synthesized
  source 1..20: mol_type = other DNA
taataggacaatgccataac

SEQ ID NO: 5212 - DNA, 20 bp, synthetic construct
  misc_feature 1..20: note = chemically synthesized
  source 1..20: mol_type = other DNA
acaatgccataacaggatta

SEQ ID NO: 5213 - DNA, 20 bp, synthetic construct
  misc_feature 1..20: note = chemically synthesized
  source 1..20: mol_type = other DNA
caggattacagcaaatgtga

SEQ ID NO: 5214 - DNA, 20 bp, synthetic construct
  misc_feature 1..20: note = chemically synthesized
  source 1..20: mol_type = other DNA
attacagcaaatgtgaaaga

SEQ ID NO: 5215 - DNA, 20 bp, synthetic construct
  misc_feature 1..20: note = chemically synthesized
  source 1..20: mol_type = other DNA
ttacagcaaatgtgaaagaa

SEQ ID NO: 5216 - DNA, 20 bp, synthetic construct
  misc_feature 1..20: note = chemically synthesized
  source 1..20: mol_type = other DNA
tgtgaaagaaaggacacacg

SEQ ID NO: 5217 - DNA, 20 bp, synthetic construct
  misc_feature 1..20: note = chemically synthesized
  source 1..20: mol_type = other DNA
gtgaaagaaaggacacacgt

SEQ ID NO: 5218 - DNA, 20 bp, synthetic construct
  misc_feature 1..20: note = chemically synthesized
  source 1..20: mol_type = other DNA
cacacgtaggtactgtcatt

SEQ ID NO: 5219 - DNA, 20 bp, synthetic construct
  misc_feature 1..20: note = chemically synthesized
  source 1..20: mol_type = other DNA
acacgtaggtactgtcattt

SEQ ID NO: 5220 - DNA, 20 bp, synthetic construct
  misc_feature 1..20: note = chemically synthesized
  source 1..20: mol_type = other DNA
taggtaatgtcatctatgat

SEQ ID NO: 5221 - DNA, 20 bp, synthetic construct
  misc_feature 1..20: note = chemically synthesized
  source 1..20: mol_type = other DNA
tgtttcattttttgctgaca

SEQ ID NO: 5222 - DNA, 20 bp, synthetic construct
  misc_feature 1..20: note = chemically synthesized
  source 1..20: mol_type = other DNA
ttttttgctgacacagaact

SEQ ID NO: 5223 - DNA, 20 bp, synthetic construct
  misc_feature 1..20: note = chemically synthesized
  source 1..20: mol_type = other DNA
gtgctacttatacaattcac

SEQ ID NO: 5224 - DNA, 20 bp, synthetic construct
  misc_feature 1..20: note = chemically synthesized
  source 1..20: mol_type = other DNA
attcactggaaaccctgtta

SEQ ID NO: 5225 - DNA, 20 bp, synthetic construct
  misc_feature 1..20: note = chemically synthesized
  source 1..20: mol_type = other DNA
aaccctgttatggctgtaaa

SEQ ID NO: 5226 - DNA, 20 bp, synthetic construct
  misc_feature 1..20: note = chemically synthesized
  source 1..20: mol_type = other DNA
tagtttgcttcccccaatga

SEQ ID NO: 5227 - DNA, 20 bp, synthetic construct
  misc_feature 1..20: note = chemically synthesized
  source 1..20: mol_type = other DNA
agaaaatacttactgtactg

SEQ ID NO: 5228 - DNA, 20 bp, synthetic construct
  misc_feature 1..20: note = chemically synthesized
  source 1..20: mol_type = other DNA
gaaaatacttactgtactgc

SEQ ID NO: 5229 - DNA, 20 bp, synthetic construct
  misc_feature 1..20: note = chemically synthesized
  source 1..20: mol_type = other DNA
aaaatacttactgtactgca

SEQ ID NO: 5230 - DNA, 20 bp, synthetic construct
  misc_feature 1..20: note = chemically synthesized
  source 1..20: mol_type = other DNA
aaatacttactgtactgcag

SEQ ID NO: 5231 - DNA, 20 bp, synthetic construct
  misc_feature 1..20: note = chemically synthesized
  source 1..20: mol_type = other DNA
tactgtactgcaggggaatt

SEQ ID NO: 5232 - DNA, 20 bp, synthetic construct
  misc_feature 1..20: note = chemically synthesized
  source 1..20: mol_type = other DNA
gggaattcggtaaaactttc

SEQ ID NO: 5233 - DNA, 20 bp, synthetic construct
  misc_feature 1..20: note = chemically synthesized
  source 1..20: mol_type = other DNA
aataacaaaaaatttcaaat

SEQ ID NO: 5234 - DNA, 20 bp, synthetic construct
  misc_feature 1..20: note = chemically synthesized
  source 1..20: mol_type = other DNA
aaatttcaaatcagtatcaa

SEQ ID NO: 5235 - DNA, 20 bp, synthetic construct
  misc_feature 1..20: note = chemically synthesized
  source 1..20: mol_type = other DNA
caaatcagtatcaatagcca

SEQ ID NO: 5236 - DNA, 20 bp, synthetic construct
  misc_feature 1..20: note = chemically synthesized
  source 1..20: mol_type = other DNA
aatagccaaagatccaaaaa

SEQ ID NO: 5237 - DNA, 20 bp, synthetic construct
  misc_feature 1..20: note = chemically synthesized
  source 1..20: mol_type = other DNA
aaagatccaaaaacagccta

SEQ ID NO: 5238 - DNA, 20 bp, synthetic construct
  misc_feature 1..20: note = chemically synthesized
  source 1..20: mol_type = other DNA
tttgtttgttttttgtttct

SEQ ID NO: 5239 - DNA, 20 bp, synthetic construct
  misc_feature 1..20: note = chemically synthesized
  source 1..20: mol_type = other DNA
ttgtttgttttttgtttctg

SEQ ID NO: 5240 - DNA, 20 bp, synthetic construct
  misc_feature 1..20: note = chemically synthesized
  source 1..20: mol_type = other DNA
tttgttttttgtttctgagg

SEQ ID NO: 5241 - DNA, 20 bp, synthetic construct
  misc_feature 1..20: note = chemically synthesized
  source 1..20: mol_type = other DNA
tgttttttgtttctgaggtg

SEQ ID NO: 5242 - DNA, 20 bp, synthetic construct
  misc_feature 1..20: note = chemically synthesized
  source 1..20: mol_type = other DNA
ggagtttcgctcttgttgcc

SEQ ID NO: 5243 - DNA, 20 bp, synthetic construct
  misc_feature 1..20: note = chemically synthesized
  source 1..20: mol_type = other DNA
gagtttcgctcttgttgccc

SEQ ID NO: 5244 - DNA, 20 bp, synthetic construct
  misc_feature 1..20: note = chemically synthesized
  source 1..20: mol_type = other DNA
ttcgctcttgttgcccgggc

SEQ ID NO: 5245 - DNA, 20 bp, synthetic construct
  misc_feature 1..20: note = chemically synthesized
  source 1..20: mol_type = other DNA
cgctcttgttgcccgggctg

SEQ ID NO: 5246 - DNA, 20 bp, synthetic construct
  misc_feature 1..20: note = chemically synthesized
  source 1..20: mol_type = other DNA
ttgcccgggctggagtgcaa

SEQ ID NO: 5247 - DNA, 20 bp, synthetic construct
  misc_feature 1..20: note = chemically synthesized
  source 1..20: mol_type = other DNA
ggagtgcaatggcgcaatct

SEQ ID NO: 5248 - DNA, 20 bp, synthetic construct
  misc_feature 1..20: note = chemically synthesized
  source 1..20: mol_type = other DNA
tcaccgcaatctccgcctcc

SEQ ID NO: 5249 - DNA, 20 bp, synthetic construct
  misc_feature 1..20: note = chemically synthesized
  source 1..20: mol_type = other DNA
caccgcaatctccgcctccc

SEQ ID NO: 5250 - DNA, 20 bp, synthetic construct
  misc_feature 1..20: note = chemically synthesized
  source 1..20: mol_type = other DNA
aatctccgcctcccgggttc

SEQ ID NO: 5251 - DNA, 20 bp, synthetic construct
  misc_feature 1..20: note = chemically synthesized
  source 1..20: mol_type = other DNA
ttcaagcgattctcctgcct

SEQ ID NO: 5252 - DNA, 20 bp, synthetic construct
  misc_feature 1..20: note = chemically synthesized
  source 1..20: mol_type = other DNA
ttctcctgcctcagcctccc

SEQ ID NO: 5253 - DNA, 20 bp, synthetic construct
  misc_feature 1..20: note = chemically synthesized
  source 1..20: mol_type = other DNA
tcctgcctcagcctcccaag

SEQ ID NO: 5254 - DNA, 20 bp, synthetic construct
  misc_feature 1..20: note = chemically synthesized
  source 1..20: mol_type = other DNA
gcctcagcctcccaagtagc

SEQ ID NO: 5255 - DNA, 20 bp, synthetic construct
  misc_feature 1..20: note = chemically synthesized
  source 1..20: mol_type = other DNA
cctcagcctcccaagtagct

SEQ ID NO: 5256 - DNA, 20 bp, synthetic construct
  misc_feature 1..20: note = chemically synthesized
  source 1..20: mol_type = other DNA
ctcccaagtagctgggatta

SEQ ID NO: 5257 - DNA, 20 bp, synthetic construct
  misc_feature 1..20: note = chemically synthesized
  source 1..20: mol_type = other DNA
tcccaagtagctgggattat

SEQ ID NO: 5258 - DNA, 20 bp, synthetic construct
  misc_feature 1..20: note = chemically synthesized
  source 1..20: mol_type = other DNA
taggcatgcgccaccacacg

SEQ ID NO: 5259 - DNA, 20 bp, synthetic construct
  misc_feature 1..20: note = chemically synthesized
  source 1..20: mol_type = other DNA
gcggctaatttctgtatttt

SEQ ID NO: 5260 - DNA, 20 bp, synthetic construct
  misc_feature 1..20: note = chemically synthesized
  source 1..20: mol_type = other DNA
gctaatttctgtatttttgg

SEQ ID NO: 5261 - DNA, 20 bp, synthetic construct
  misc_feature 1..20: note = chemically synthesized
  source 1..20: mol_type = other DNA
taatttctgtatttttggta

SEQ ID NO: 5262 - DNA, 20 bp, synthetic construct
  misc_feature 1..20: note = chemically synthesized
  source 1..20: mol_type = other DNA
ttctgtatttttggtagaga

SEQ ID NO: 5263 - DNA, 20 bp, synthetic construct
  misc_feature 1..20: note = chemically synthesized
  source 1..20: mol_type = other DNA
tctgtatttttggtagagac

SEQ ID NO: 5264 - DNA, 20 bp, synthetic construct
  misc_feature 1..20: note = chemically synthesized
  source 1..20: mol_type = other DNA
ctgtatttttggtagagacg

SEQ ID NO: 5265 - DNA, 20 bp, synthetic construct
  misc_feature 1..20: note = chemically synthesized
  source 1..20: mol_type = other DNA
gagacggggtttctccatgt

SEQ ID NO: 5266 - DNA, 20 bp, synthetic construct
  misc_feature 1..20: note = chemically synthesized
  source 1..20: mol_type = other DNA
cggggtttctccatgttggt

SEQ ID NO: 5267 - DNA, 20 bp, synthetic construct
  misc_feature 1..20: note = chemically synthesized
  source 1..20: mol_type = other DNA
ggggtttctccatgttggtc

SEQ ID NO: 5268 - DNA, 20 bp, synthetic construct
  misc_feature 1..20: note = chemically synthesized
  source 1..20: mol_type = other DNA
tttctccatgttggtcaggc

SEQ ID NO: 5269 - DNA, 20 bp, synthetic construct
  misc_feature 1..20: note = chemically synthesized
  source 1..20: mol_type = other DNA
tggtctcaaactcccgacct

SEQ ID NO: 5270 - DNA, 20 bp, synthetic construct
  misc_feature 1..20: note = chemically synthesized
  source 1..20: mol_type = other DNA
ggtctcaaactcccgacctt

SEQ ID NO: 5271 - DNA, 20 bp, synthetic construct
  misc_feature 1..20: note = chemically synthesized
  source 1..20: mol_type = other DNA
cttaggtgatccacccacct

SEQ ID NO: 5272 - DNA, 20 bp, synthetic construct
  misc_feature 1..20: note = chemically synthesized
  source 1..20: mol_type = other DNA
ccacccacctcagcctccca

SEQ ID NO: 5273 - DNA, 20 bp, synthetic construct
  misc_feature 1..20: note = chemically synthesized
  source 1..20: mol_type = other DNA
acctcagcctcccaaagtgc

SEQ ID NO: 5274 - DNA, 20 bp, synthetic construct
  misc_feature 1..20: note = chemically synthesized
  source 1..20: mol_type = other DNA
cctcagcctcccaaagtgct

SEQ ID NO: 5275 - DNA, 20 bp, synthetic construct
  misc_feature 1..20: note = chemically synthesized
  source 1..20: mol_type = other DNA
ctcccaaagtgctgggatta

SEQ ID NO: 5276 - DNA, 20 bp, synthetic construct
  misc_feature 1..20: note = chemically synthesized
  source 1..20: mol_type = other DNA
tcccaaagtgctgggattat

SEQ ID NO: 5277 - DNA, 20 bp, synthetic construct
  misc_feature 1..20: note = chemically synthesized
  source 1..20: mol_type = other DNA
agtgctgggattataggcat

SEQ ID NO: 5278 - DNA, 20 bp, synthetic construct
  misc_feature 1..20: note = chemically synthesized
  source 1..20: mol_type = other DNA
taggcataagctaccacacc

SEQ ID NO: 5279 - DNA, 20 bp, synthetic construct
  misc_feature 1..20: note = chemically synthesized
  source 1..20: mol_type = other DNA
ccaaaacaaatttatcttca

SEQ ID NO: 5280 - DNA, 20 bp, synthetic construct
  misc_feature 1..20: note = chemically synthesized
  source 1..20: mol_type = other DNA
atgctgtgtgtcctaaataa

SEQ ID NO: 5281 - DNA, 20 bp, synthetic construct
  misc_feature 1..20: note = chemically synthesized
  source 1..20: mol_type = other DNA
tgctgtgtgtcctaaataat

SEQ ID NO: 5282 - DNA, 20 bp, synthetic construct
  misc_feature 1..20: note = chemically synthesized
  source 1..20: mol_type = other DNA
tgtgtgtcctaaataatagg

SEQ ID NO: 5283 - DNA, 20 bp, synthetic construct
  misc_feature 1..20: note = chemically synthesized
  source 1..20: mol_type = other DNA
aggtggtcaaaatgtttcta

SEQ ID NO: 5284 - DNA, 20 bp, synthetic construct
  misc_feature 1..20: note = chemically synthesized
  source 1..20: mol_type = other DNA
ggtggtcaaaatgtttctaa

SEQ ID NO: 5285 - DNA, 20 bp, synthetic construct
  misc_feature 1..20: note = chemically synthesized
  source 1..20: mol_type = other DNA
gtggtcaaaatgtttctaaa

SEQ ID NO: 5286 - DNA, 20 bp, synthetic construct
  misc_feature 1..20: note = chemically synthesized
  source 1..20: mol_type = other DNA
aatgtttctaaagggtacct

SEQ ID NO: 5287 - DNA, 20 bp, synthetic construct
  misc_feature 1..20: note = chemically synthesized
  source 1..20: mol_type = other DNA
ccccaattaaactgttgctt

SEQ ID NO: 5288 - DNA, 20 bp, synthetic construct
  misc_feature 1..20: note = chemically synthesized
  source 1..20: mol_type = other DNA
ccaattaaactgttgcttta

SEQ ID NO: 5289 - DNA, 20 bp, synthetic construct
  misc_feature 1..20: note = chemically synthesized
  source 1..20: mol_type = other DNA
taaactgttgctttagagtt

SEQ ID NO: 5290 - DNA, 20 bp, synthetic construct
  misc_feature 1..20: note = chemically synthesized
  source 1..20: mol_type = other DNA
aaactgttgctttagagttt

SEQ ID NO: 5291 - DNA, 20 bp, synthetic construct
  misc_feature 1..20: note = chemically synthesized
  source 1..20: mol_type = other DNA
aactgttgctttagagtttg

SEQ ID NO: 5292 - DNA, 20 bp, synthetic construct
  misc_feature 1..20: note = chemically synthesized
  source 1..20: mol_type = other DNA
tttagagtttggggaaaata

SEQ ID NO: 5293 - DNA, 20 bp, synthetic construct
  misc_feature 1..20: note = chemically synthesized
  source 1..20: mol_type = other DNA
agagtttggggaaaataaag

SEQ ID NO: 5294 - DNA, 20 bp, synthetic construct
  misc_feature 1..20: note = chemically synthesized
  source 1..20: mol_type = other DNA
cctaactaaattcacactgt

SEQ ID NO: 5295 - DNA, 20 bp, synthetic construct
  misc_feature 1..20: note = chemically synthesized
  source 1..20: mol_type = other DNA
taactaaattcacactgtga

SEQ ID NO: 5296 - DNA, 20 bp, synthetic construct
  misc_feature 1..20: note = chemically synthesized
  source 1..20: mol_type = other DNA
taaattcacactgtgagagc

SEQ ID NO: 5297 - DNA, 20 bp, synthetic construct
  misc_feature 1..20: note = chemically synthesized
  source 1..20: mol_type = other DNA
ctgtgagagccagtcaacac

SEQ ID NO: 5298 - DNA, 20 bp, synthetic construct
  misc_feature 1..20: note = chemically synthesized
  source 1..20: mol_type = other DNA
aacactagcccacatgccaa

SEQ ID NO: 5299 - DNA, 20 bp, synthetic construct
  misc_feature 1..20: note = chemically synthesized
  source 1..20: mol_type = other DNA
acactagcccacatgccaat

SEQ ID NO: 5300 - DNA, 20 bp, synthetic construct
  misc_feature 1..20: note = chemically synthesized
  source 1..20: mol_type = other DNA
cactagcccacatgccaatg

SEQ ID NO: 5301 - DNA, 20 bp, synthetic construct
  misc_feature 1..20: note = chemically synthesized
  source 1..20: mol_type = other DNA
catgccaatggggtccttgt

SEQ ID NO: 5302 - DNA, 20 bp, synthetic construct
  misc_feature 1..20: note = chemically synthesized
  source 1..20: mol_type = other DNA
acatatccaaattcatacaa

SEQ ID NO: 5303 - DNA, 20 bp, synthetic construct
  misc_feature 1..20: note = chemically synthesized
  source 1..20: mol_type = other DNA
atatccaaattcatacaata

SEQ ID NO: 5304 - DNA, 20 bp, synthetic construct
  misc_feature 1..20: note = chemically synthesized
  source 1..20: mol_type = other DNA
tatccaaattcatacaatag

SEQ ID NO: 5305 - DNA, 20 bp, synthetic construct
  misc_feature 1..20: note = chemically synthesized
  source 1..20: mol_type = other DNA
attcatacaatagaggcatt

SEQ ID NO: 5306 - DNA, 20 bp, synthetic construct
  misc_feature 1..20: note = chemically synthesized
  source 1..20: mol_type = other DNA
caatagaggcatttggaacc

SEQ ID NO: 5307 - DNA, 20 bp, synthetic construct
  misc_feature 1..20: note = chemically synthesized
  source 1..20: mol_type = other DNA
tcctaactaatttctgccgc

SEQ ID NO: 5308 - DNA, 20 bp, synthetic construct
  misc_feature 1..20: note = chemically synthesized
  source 1..20: mol_type = other DNA
taactaatttctgccgctgg

SEQ ID NO: 5309 - DNA, 20 bp, synthetic construct
  misc_feature 1..20: note = chemically synthesized
  source 1..20: mol_type = other DNA
ccgctggaagtttgttccta

SEQ ID NO: 5310 - DNA, 20 bp, synthetic construct
  misc_feature 1..20: note = chemically synthesized
  source 1..20: mol_type = other DNA
agtttgttcctaaagccacc

SEQ ID NO: 5311 - DNA, 20 bp, synthetic construct
  misc_feature 1..20: note = chemically synthesized
  source 1..20: mol_type = other DNA
cctaaagccaccaagtctcc

SEQ ID NO: 5312 - DNA, 20 bp, synthetic construct
  misc_feature 1..20: note = chemically synthesized
  source 1..20: mol_type = other DNA
aaagccaccaagtctcctag

SEQ ID NO: 5313 - DNA, 20 bp, synthetic construct
  misc_feature 1..20: note = chemically synthesized
  source 1..20: mol_type = other DNA
tcctagaagcccttatttct

SEQ ID NO: 5314 - DNA, 20 bp, synthetic construct
  misc_feature 1..20: note = chemically synthesized
  source 1..20: mol_type = other DNA
tagaagcccttatttcttgg

SEQ ID NO: 5315 - DNA, 20 bp, synthetic construct
  misc_feature 1..20: note = chemically synthesized
  source 1..20: mol_type = other DNA
atttcttggcagtaaacaca

SEQ ID NO: 5316 - DNA, 20 bp, synthetic construct
  misc_feature 1..20: note = chemically synthesized
  source 1..20: mol_type = other DNA
tcttggcagtaaacacacgg

SEQ ID NO: 5317 - DNA, 20 bp, synthetic construct
  misc_feature 1..20: note = chemically synthesized
  source 1..20: mol_type = other DNA
ggccctgcgtgccattaaaa

SEQ ID NO: 5318 - DNA, 20 bp, synthetic construct
  misc_feature 1..20: note = chemically synthesized
  source 1..20: mol_type = other DNA
aaaatagctgcctcatcatc

SEQ ID NO: 5319 - DNA, 20 bp, synthetic construct
  misc_feature 1..20: note = chemically synthesized
  source 1..20: mol_type = other DNA
aaatagctgcctcatcatcc

SEQ ID NO: 5320 - DNA, 20 bp, synthetic construct
  misc_feature 1..20: note = chemically synthesized
  source 1..20: mol_type = other DNA
tcatcatccaggatgacaaa

SEQ ID NO: 5321 - DNA, 20 bp, synthetic construct
  misc_feature 1..20: note = chemically synthesized
  source 1..20: mol_type = other DNA
aaacagccacactgtgtgcc

SEQ ID NO: 5322 - DNA, 20 bp, synthetic construct
  misc_feature 1..20: note = chemically synthesized
  source 1..20: mol_type = other DNA
cacactgtgtgccaagtgac

SEQ ID NO: 5323 - DNA, 20 bp, synthetic construct
  misc_feature 1..20: note = chemically synthesized
  source 1..20: mol_type = other DNA
aagtgaccagccacaaacaa

SEQ ID NO: 5324 - DNA, 20 bp, synthetic construct
  misc_feature 1..20: note = chemically synthesized
  source 1..20: mol_type = other DNA
caaacaaaagcttgtttgac

SEQ ID NO: 5325 - DNA, 20 bp, synthetic construct
  misc_feature 1..20: note = chemically synthesized
  source 1..20: mol_type = other DNA
ttgaccagcacctatctcaa

SEQ ID NO: 5326 - DNA, 20 bp, synthetic construct
  misc_feature 1..20: note = chemically synthesized
  source 1..20: mol_type = other DNA
ctatctcaaaagaaaattct

SEQ ID NO: 5327 - DNA, 20 bp, synthetic construct
  misc_feature 1..20: note = chemically synthesized
  source 1..20: mol_type = other DNA
tctcaaaagaaaattctgag

SEQ ID NO: 5328 - DNA, 20 bp, synthetic construct
  misc_feature 1..20: note = chemically synthesized
  source 1..20: mol_type = other DNA
caaaagaaaattctgagtag

SEQ ID NO: 5329 - DNA, 20 bp, synthetic construct
  misc_feature 1..20: note = chemically synthesized
  source 1..20: mol_type = other DNA
aaagaaaattctgagtagaa

SEQ ID NO: 5330 - DNA, 20 bp, synthetic construct
  misc_feature 1..20: note = chemically synthesized
  source 1..20: mol_type = other DNA
aagaaaattctgagtagaag

SEQ ID NO: 5331 - DNA, 20 bp, synthetic construct
  misc_feature 1..20: note = chemically synthesized
  source 1..20: mol_type = other DNA
aaaattctgagtagaagagg

SEQ ID NO: 5332 - DNA, 20 bp, synthetic construct
  misc_feature 1..20: note = chemically synthesized
  source 1..20: mol_type = other DNA
agtagaagaggaagcacctg

SEQ ID NO: 5333 - DNA, 20 bp, synthetic construct
  misc_feature 1..20: note = chemically synthesized
  source 1..20: mol_type = other DNA
gtagaagaggaagcacctga

SEQ ID NO: 5334 - DNA, 20 bp, synthetic construct
  misc_feature 1..20: note = chemically synthesized
  source 1..20: mol_type = other DNA
gaagaggaagcacctgaagg

SEQ ID NO: 5335 - DNA, 20 bp, synthetic construct
  misc_feature 1..20: note = chemically synthesized
  source 1..20: mol_type = other DNA
agcacctgaaggaagctgaa

SEQ ID NO: 5336 - DNA, 20 bp, synthetic construct
  misc_feature 1..20: note = chemically synthesized
  source 1..20: mol_type = other DNA
cctgaaggaagctgaaaaga

SEQ ID NO: 5337 - DNA, 20 bp, synthetic construct
  misc_feature 1..20: note = chemically synthesized
  source 1..20: mol_type = other DNA
tctgacatttgaaattctaa

SEQ ID NO: 5338 - DNA, 20 bp, synthetic construct
  misc_feature 1..20: note = chemically synthesized
  source 1..20: mol_type = other DNA
tgacatttgaaattctaaca

SEQ ID NO: 5339 - DNA, 20 bp, synthetic construct
  misc_feature 1..20: note = chemically synthesized
  source 1..20: mol_type = other DNA
gacatttgaaattctaacag

SEQ ID NO: 5340 - DNA, 20 bp, synthetic construct
  misc_feature 1..20: note = chemically synthesized
  source 1..20: mol_type = other DNA
aacagaggttctttcccctc

SEQ ID NO: 5341 - DNA, 20 bp, synthetic construct
  misc_feature 1..20: note = chemically synthesized
  source 1..20: mol_type = other DNA
acagaggttctttcccctct

SEQ ID NO: 5342 - DNA, 20 bp, synthetic construct
  misc_feature 1..20: note = chemically synthesized
  source 1..20: mol_type = other DNA
ctttcccctctaggacactc

SEQ ID NO: 5343 - DNA, 20 bp, synthetic construct
  misc_feature 1..20: note = chemically synthesized
  source 1..20: mol_type = other DNA
tttcccctctaggacactct

SEQ ID NO: 5344 - DNA, 20 bp, synthetic construct
  misc_feature 1..20: note = chemically synthesized
  source 1..20: mol_type = other DNA
tctaggacactctgggtcac

SEQ ID NO: 5345 - DNA, 20 bp, synthetic construct
  misc_feature 1..20: note = chemically synthesized
  source 1..20: mol_type = other DNA
tctctgctttccttgttccc

SEQ ID NO: 5346 - DNA, 20 bp, synthetic construct
  misc_feature 1..20: note = chemically synthesized
  source 1..20: mol_type = other DNA
tgttccctggctcatctcct

SEQ ID NO: 5347 - DNA, 20 bp, synthetic construct
  misc_feature 1..20: note = chemically synthesized
  source 1..20: mol_type = other DNA
tggctcatctcctgagcccc

SEQ ID NO: 5348 - DNA, 20 bp, synthetic construct
  misc_feature 1..20: note = chemically synthesized
  source 1..20: mol_type = other DNA
ggctcatctcctgagccccc

SEQ ID NO: 5349 - DNA, 20 bp, synthetic construct
  misc_feature 1..20: note = chemically synthesized
  source 1..20: mol_type = other DNA
tatttactaaccacttttat

SEQ ID NO: 5350 - DNA, 20 bp, synthetic construct
  misc_feature 1..20: note = chemically synthesized
  source 1..20: mol_type = other DNA
ccatccaaaaatgtttactc

SEQ ID NO: 5351 - DNA, 20 bp, synthetic construct
  misc_feature 1..20: note = chemically synthesized
  source 1..20: mol_type = other DNA
caaaaatgtttactcaagtt

SEQ ID NO: 5352 - DNA, 20 bp, synthetic construct
  misc_feature 1..20: note = chemically synthesized
  source 1..20: mol_type = other DNA
aaaaatgtttactcaagttc

SEQ ID NO: 5353 - DNA, 20 bp, synthetic construct
  misc_feature 1..20: note = chemically synthesized
  source 1..20: mol_type = other DNA
atgtttactcaagttcaggc

SEQ ID NO: 5354 - DNA, 20 bp, synthetic construct
  misc_feature 1..20: note = chemically synthesized
  source 1..20: mol_type = other DNA
ggctagcttaataaccccca

SEQ ID NO: 5355 - DNA, 20 bp, synthetic construct
  misc_feature 1..20: note = chemically synthesized
  source 1..20: mol_type = other DNA
tagcttaataacccccaaag

SEQ ID NO: 5356 - DNA, 20 bp, synthetic construct
  misc_feature 1..20: note = chemically synthesized
  source 1..20: mol_type = other DNA
agcttaataacccccaaagc

SEQ ID NO: 5357 - DNA, 20 bp, synthetic construct
  misc_feature 1..20: note = chemically synthesized
  source 1..20: mol_type = other DNA
cttaataacccccaaagcag

SEQ ID NO: 5358 - DNA, 20 bp, synthetic construct
  misc_feature 1..20: note = chemically synthesized
  source 1..20: mol_type = other DNA
ttaataacccccaaagcagg

SEQ ID NO: 5359 - DNA, 20 bp, synthetic construct
  misc_feature 1..20: note = chemically synthesized
  source 1..20: mol_type = other DNA
aaagcaggaggacactatta

SEQ ID NO: 5360 - DNA, 20 bp, synthetic construct
  misc_feature 1..20: note = chemically synthesized
  source 1..20: mol_type = other DNA
agcaggaggacactattaaa

SEQ ID NO: 5361 - DNA, 20 bp, synthetic construct
  misc_feature 1..20: note = chemically synthesized
  source 1..20: mol_type = other DNA
caggaggacactattaaaga

SEQ ID NO: 5362 - DNA, 20 bp, synthetic construct
  misc_feature 1..20: note = chemically synthesized
  source 1..20: mol_type = other DNA
acactattaaagagagatca

SEQ ID NO: 5363 - DNA, 20 bp, synthetic construct
  misc_feature 1..20: note = chemically synthesized
  source 1..20: mol_type = other DNA
cactattaaagagagatcac

SEQ ID NO: 5364 - DNA, 20 bp, synthetic construct
  misc_feature 1..20: note = chemically synthesized
  source 1..20: mol_type = other DNA
actattaaagagagatcaca

SEQ ID NO: 5365 - DNA, 20 bp, synthetic construct
  misc_feature 1..20: note = chemically synthesized
  source 1..20: mol_type = other DNA
tgaaacaccatccatgccct

SEQ ID NO: 5366 - DNA, 20 bp, synthetic construct
  misc_feature 1..20: note = chemically synthesized
  source 1..20: mol_type = other DNA
atgccctgagtatcccaaca

SEQ ID NO: 5367 - DNA, 20 bp, synthetic construct
  misc_feature 1..20: note = chemically synthesized
  source 1..20: mol_type = other DNA
cctgagtatcccaacatgga

SEQ ID NO: 5368 - DNA, 20 bp, synthetic construct
  misc_feature 1..20: note = chemically synthesized
  source 1..20: mol_type = other DNA
gtatcccaacatggatggac

SEQ ID NO: 5369 - DNA, 20 bp, synthetic construct
  misc_feature 1..20: note = chemically synthesized
  source 1..20: mol_type = other DNA
atcccaacatggatggactg

SEQ ID NO: 5370 - DNA, 20 bp, synthetic construct
  misc_feature 1..20: note = chemically synthesized
  source 1..20: mol_type = other DNA
tcccaacatggatggactgg

SEQ ID NO: 5371 - DNA, 20 bp, synthetic construct
  misc_feature 1..20: note = chemically synthesized
  source 1..20: mol_type = other DNA
ccaacatggatggactggag

SEQ ID NO: 5372 - DNA, 20 bp, synthetic construct
  misc_feature 1..20: note = chemically synthesized
  source 1..20: mol_type = other DNA
aacatggatggactggagga

SEQ ID NO: 5373 - DNA, 20 bp, synthetic construct
  misc_feature 1..20: note = chemically synthesized
  source 1..20: mol_type = other DNA
acatggatggactggaggag

SEQ ID NO: 5374 - DNA, 20 bp, synthetic construct
  misc_feature 1..20: note = chemically synthesized
  source 1..20: mol_type = other DNA
catggatggactggaggaga

SEQ ID NO: 5375 - DNA, 20 bp, synthetic construct
  misc_feature 1..20: note = chemically synthesized
  source 1..20: mol_type = other DNA
atggactggaggagagggac

SEQ ID NO: 5376 - DNA, 20 bp, synthetic construct
  misc_feature 1..20: note = chemically synthesized
  source 1..20: mol_type = other DNA
tggactggaggagagggaca

SEQ ID NO: 5377 - DNA, 20 bp, synthetic construct
  misc_feature 1..20: note = chemically synthesized
  source 1..20: mol_type = other DNA
ggactggaggagagggacaa

SEQ ID NO: 5378 - DNA, 20 bp, synthetic construct
  misc_feature 1..20: note = chemically synthesized
  source 1..20: mol_type = other DNA
agagggacaagggaccaata

SEQ ID NO: 5379 - DNA, 20 bp, synthetic construct
  misc_feature 1..20: note = chemically synthesized
  source 1..20: mol_type = other DNA
gggaccaatacagaccctga

SEQ ID NO: 5380 - DNA, 20 bp, synthetic construct
  misc_feature 1..20: note = chemically synthesized
  source 1..20: mol_type = other DNA
ggaccaatacagaccctgat

SEQ ID NO: 5381 - DNA, 20 bp, synthetic construct
  misc_feature 1..20: note = chemically synthesized
  source 1..20: mol_type = other DNA
tgcccactccccatctgcaa

SEQ ID NO: 5382 - DNA, 20 bp, synthetic construct
  misc_feature 1..20: note = chemically synthesized
  source 1..20: mol_type = other DNA
gcccactccccatctgcaat

SEQ ID NO: 5383 - DNA, 20 bp, synthetic construct
  misc_feature 1..20: note = chemically synthesized
  source 1..20: mol_type = other DNA
cccactccccatctgcaatg

SEQ ID NO: 5384 - DNA, 20 bp, synthetic construct
  misc_feature 1..20: note = chemically synthesized
  source 1..20: mol_type = other DNA
ccactccccatctgcaatgg

SEQ ID NO: 5385 - DNA, 20 bp, synthetic construct
  misc_feature 1..20: note = chemically synthesized
  source 1..20: mol_type = other DNA
ccccatctgcaatgggggca

SEQ ID NO: 5386 - DNA, 20 bp, synthetic construct
  misc_feature 1..20: note = chemically synthesized
  source 1..20: mol_type = other DNA
cccatctgcaatgggggcaa

SEQ ID NO: 5387 - DNA, 20 bp, synthetic construct
  misc_feature 1..20: note = chemically synthesized
  source 1..20: mol_type = other DNA
tgcaatgggggcaaaggcaa

SEQ ID NO: 5388 - DNA, 20 bp, synthetic construct
  misc_feature 1..20: note = chemically synthesized
  source 1..20: mol_type = other DNA
gcaatgggggcaaaggcaaa

SEQ ID NO: 5389 - DNA, 20 bp, synthetic construct
  misc_feature 1..20: note = chemically synthesized
  source 1..20: mol_type = other DNA
tgggggcaaaggcaaaagga

SEQ ID NO: 5390 - DNA, 20 bp, synthetic construct
  misc_feature 1..20: note = chemically synthesized
  source 1..20: mol_type = other DNA
aggcaaaaggaaagctttcc

SEQ ID NO: 5391 - DNA, 20 bp, synthetic construct
  misc_feature 1..20: note = chemically synthesized
  source 1..20: mol_type = other DNA
aaagctttccaagatttaaa

SEQ ID NO: 5392 - DNA, 20 bp, synthetic construct
  misc_feature 1..20: note = chemically synthesized
  source 1..20: mol_type = other DNA
atttaaacagtcctctatat

SEQ ID NO: 5393 - DNA, 20 bp, synthetic construct
  misc_feature 1..20: note = chemically synthesized
  source 1..20: mol_type = other DNA
acagtcctctatattagtaa

SEQ ID NO: 5394 - DNA, 20 bp, synthetic construct
  misc_feature 1..20: note = chemically synthesized
  source 1..20: mol_type = other DNA
ttagtaacagacccatgtgc

SEQ ID NO: 5395 - DNA, 20 bp, synthetic construct
  misc_feature 1..20: note = chemically synthesized
  source 1..20: mol_type = other DNA
tagtaacagacccatgtgct

SEQ ID NO: 5396 - DNA, 20 bp, synthetic construct
  misc_feature 1..20: note = chemically synthesized
  source 1..20: mol_type = other DNA
tgctaggctcctacaatatc

SEQ ID NO: 5397 - DNA, 20 bp, synthetic construct
  misc_feature 1..20: note = chemically synthesized
  source 1..20: mol_type = other DNA
aatatctggttccattctgc

SEQ ID NO: 5398 - DNA, 20 bp, synthetic construct
  misc_feature 1..20: note = chemically synthesized
  source 1..20: mol_type = other DNA
tggttccattctgctagtga

SEQ ID NO: 5399 - DNA, 20 bp, synthetic construct
  misc_feature 1..20: note = chemically synthesized
  source 1..20: mol_type = other DNA
ggttccattctgctagtgaa

SEQ ID NO: 5400 - DNA, 20 bp, synthetic construct
  misc_feature 1..20: note = chemically synthesized
  source 1..20: mol_type = other DNA
gctagtgaaaggaaacccta

SEQ ID NO: 5401 - DNA, 20 bp, synthetic construct
  misc_feature 1..20: note = chemically synthesized
  source 1..20: mol_type = other DNA
ggtcaaccaactccatcctc

SEQ ID NO: 5402 - DNA, 20 bp, synthetic construct
  misc_feature 1..20: note = chemically synthesized
  source 1..20: mol_type = other DNA
ctccatcctctagaacatat

SEQ ID NO: 5403 - DNA, 20 bp, synthetic construct
  misc_feature 1..20: note = chemically synthesized
  source 1..20: mol_type = other DNA
ctctagaacatataagtcaa

SEQ ID NO: 5404 - DNA, 20 bp, synthetic construct
  misc_feature 1..20: note = chemically synthesized
  source 1..20: mol_type = other DNA
tctagaacatataagtcaac

SEQ ID NO: 5405 - DNA, 20 bp, synthetic construct
  misc_feature 1..20: note = chemically synthesized
  source 1..20: mol_type = other DNA
ctagaacatataagtcaaca

SEQ ID NO: 5406 - DNA, 20 bp, synthetic construct
  misc_feature 1..20: note = chemically synthesized
  source 1..20: mol_type = other DNA
tagaacatataagtcaacag

SEQ ID NO: 5407 - DNA, 20 bp, synthetic construct
  misc_feature 1..20: note = chemically synthesized
  source 1..20: mol_type = other DNA
gaacatataagtcaacaggg

SEQ ID NO: 5408 - DNA, 20 bp, synthetic construct
  misc_feature 1..20: note = chemically synthesized
  source 1..20: mol_type = other DNA
taagtcaacaggggagaact

SEQ ID NO: 5409 - DNA, 20 bp, synthetic construct
  misc_feature 1..20: note = chemically synthesized
  source 1..20: mol_type = other DNA
acaggggagaactcggcatg

SEQ ID NO: 5410 - DNA, 20 bp, synthetic construct
  misc_feature 1..20: note = chemically synthesized
  source 1..20: mol_type = other DNA
caggggagaactcggcatga

SEQ ID NO: 5411 - DNA, 20 bp, synthetic construct
  misc_feature 1..20: note = chemically synthesized
  source 1..20: mol_type = other DNA
aggggagaactcggcatgaa

SEQ ID NO: 5412 - DNA, 20 bp, synthetic construct
  misc_feature 1..20: note = chemically synthesized
  source 1..20: mol_type = other DNA
actcggcatgaagggtataa

SEQ ID NO: 5413 - DNA, 20 bp, synthetic construct
  misc_feature 1..20: note = chemically synthesized
  source 1..20: mol_type = other DNA
tcggcatgaagggtataaca

SEQ ID NO: 5414 - DNA, 20 bp, synthetic construct
  misc_feature 1..20: note = chemically synthesized
  source 1..20: mol_type = other DNA
caactcatccaccccctttg

SEQ ID NO: 5415 - DNA, 20 bp, synthetic construct
  misc_feature 1..20: note = chemically synthesized
  source 1..20: mol_type = other DNA
actcatccaccccctttgca

SEQ ID NO: 5416 - DNA, 20 bp, synthetic construct
  misc_feature 1..20: note = chemically synthesized
  source 1..20: mol_type = other DNA
agtcctcacttaacatcccc

SEQ ID NO: 5417 - DNA, 20 bp, synthetic construct
  misc_feature 1..20: note = chemically synthesized
  source 1..20: mol_type = other DNA
tgctgcctttgtcttctgat

SEQ ID NO: 5418 - DNA, 20 bp, synthetic construct
  misc_feature 1..20: note = chemically synthesized
  source 1..20: mol_type = other DNA
ctgcctttgtcttctgatca

SEQ ID NO: 5419 - DNA, 20 bp, synthetic construct
  misc_feature 1..20: note = chemically synthesized
  source 1..20: mol_type = other DNA
gtcttctgatcagagtattt

SEQ ID NO: 5420 - DNA, 20 bp, synthetic construct
  misc_feature 1..20: note = chemically synthesized
  source 1..20: mol_type = other DNA
ttctgatcagagtatttcag

SEQ ID NO: 5421 - DNA, 20 bp, synthetic construct
  misc_feature 1..20: note = chemically synthesized
  source 1..20: mol_type = other DNA
cagcagccctctgtgatcta

SEQ ID NO: 5422 - DNA, 20 bp, synthetic construct
  misc_feature 1..20: note = chemically synthesized
  source 1..20: mol_type = other DNA
agcagccctctgtgatctat

SEQ ID NO: 5423 - DNA, 20 bp, synthetic construct
  misc_feature 1..20: note = chemically synthesized
  source 1..20: mol_type = other DNA
cctctgtgatctataggata

SEQ ID NO: 5424 - DNA, 20 bp, synthetic construct
  misc_feature 1..20: note = chemically synthesized
  source 1..20: mol_type = other DNA
aggatatggtccaactcctt

SEQ ID NO: 5425 - DNA, 20 bp, synthetic construct
  misc_feature 1..20: note = chemically synthesized
  source 1..20: mol_type = other DNA
aactccttaagccatcattc

SEQ ID NO: 5426 - DNA, 20 bp, synthetic construct
  misc_feature 1..20: note = chemically synthesized
  source 1..20: mol_type = other DNA
ctccttaagccatcattcca

SEQ ID NO: 5427 - DNA, 20 bp, synthetic construct
  misc_feature 1..20: note = chemically synthesized
  source 1..20: mol_type = other DNA
ccaactccaattttctattc

SEQ ID NO: 5428 - DNA, 20 bp, synthetic construct
  misc_feature 1..20: note = chemically synthesized
  source 1..20: mol_type = other DNA
ccaattttctattccagtct

SEQ ID NO: 5429 - DNA, 20 bp, synthetic construct
  misc_feature 1..20: note = chemically synthesized
  source 1..20: mol_type = other DNA
cttagttccccgtacccatc

SEQ ID NO: 5430 - DNA, 20 bp, synthetic construct
  misc_feature 1..20: note = chemically synthesized
  source 1..20: mol_type = other DNA
ttagttccccgtacccatca

SEQ ID NO: 5431 - DNA, 20 bp, synthetic construct
  misc_feature 1..20: note = chemically synthesized
  source 1..20: mol_type = other DNA
tcaaggaaaatattctgccc

SEQ ID NO: 5432 - DNA, 20 bp, synthetic construct
  misc_feature 1..20: note = chemically synthesized
  source 1..20: mol_type = other DNA
ttccgttctcatttccttcc

SEQ ID NO: 5433 - DNA, 20 bp, synthetic construct
  misc_feature 1..20: note = chemically synthesized
  source 1..20: mol_type = other DNA
cttcttcttctcttacctcc

SEQ ID NO: 5434 - DNA, 20 bp, synthetic construct
  misc_feature 1..20: note = chemically synthesized
  source 1..20: mol_type = other DNA
tggaatcctgctcatacttc

SEQ ID NO: 5435 - DNA, 20 bp, synthetic construct
  misc_feature 1..20: note = chemically synthesized
  source 1..20: mol_type = other DNA
ggaatcctgctcatacttca

SEQ ID NO: 5436 - DNA, 20 bp, synthetic construct
  misc_feature 1..20: note = chemically synthesized
  source 1..20: mol_type = other DNA
catacttcaaggcctcaatg

SEQ ID NO: 5437 - DNA, 20 bp, synthetic construct
  misc_feature 1..20: note = chemically synthesized
  source 1..20: mol_type = other DNA
atacttcaaggcctcaatga

SEQ ID NO: 5438 - DNA, 20 bp, synthetic construct
  misc_feature 1..20: note = chemically synthesized
  source 1..20: mol_type = other DNA
ggcctcaatgaaggtctacc

SEQ ID NO: 5439 - DNA, 20 bp, synthetic construct
  misc_feature 1..20: note = chemically synthesized
  source 1..20: mol_type = other DNA
gaaggtctacctagtcacct

SEQ ID NO: 5440 - DNA, 20 bp, synthetic construct
  misc_feature 1..20: note = chemically synthesized
  source 1..20: mol_type = other DNA
gtctacctagtcaccttagc

SEQ ID NO: 5441 - DNA, 20 bp, synthetic construct
  misc_feature 1..20: note = chemically synthesized
  source 1..20: mol_type = other DNA
tacctagtcaccttagcaag

SEQ ID NO: 5442 - DNA, 20 bp, synthetic construct
  misc_feature 1..20: note = chemically synthesized
  source 1..20: mol_type = other DNA
ctcatccttctccaacctca

SEQ ID NO: 5443 - DNA, 20 bp, synthetic construct
  misc_feature 1..20: note = chemically synthesized
  source 1..20: mol_type = other DNA
accactccctgactcatatc

SEQ ID NO: 5444 - DNA, 20 bp, synthetic construct
  misc_feature 1..20: note = chemically synthesized
  source 1..20: mol_type = other DNA
ccactccctgactcatatct

SEQ ID NO: 5445 - DNA, 20 bp, synthetic construct
  misc_feature 1..20: note = chemically synthesized
  source 1..20: mol_type = other DNA
atatctaggccttacattgc

SEQ ID NO: 5446 - DNA, 20 bp, synthetic construct
  misc_feature 1..20: note = chemically synthesized
  source 1..20: mol_type = other DNA
taatttcatgtgttcccaat

SEQ ID NO: 5447 - DNA, 20 bp, synthetic construct
  misc_feature 1..20: note = chemically synthesized
  source 1..20: mol_type = other DNA
cccaatgagtttcttcaata

SEQ ID NO: 5448 - DNA, 20 bp, synthetic construct
  misc_feature 1..20: note = chemically synthesized
  source 1..20: mol_type = other DNA
ccaatgagtttcttcaatac

SEQ ID NO: 5449 - DNA, 20 bp, synthetic construct
  misc_feature 1..20: note = chemically synthesized
  source 1..20: mol_type = other DNA
caatgagtttcttcaataca

SEQ ID NO: 5450 - DNA, 20 bp, synthetic construct
  misc_feature 1..20: note = chemically synthesized
  source 1..20: mol_type = other DNA
cttgcttctattatatttga

SEQ ID NO: 5451 - DNA, 20 bp, synthetic construct
  misc_feature 1..20: note = chemically synthesized
  source 1..20: mol_type = other DNA
tctattatatttgaaagtac

SEQ ID NO: 5452 - DNA, 20 bp, synthetic construct
  misc_feature 1..20: note = chemically synthesized
  source 1..20: mol_type = other DNA
tatatttgaaagtaccagca

SEQ ID NO: 5453 - DNA, 20 bp, synthetic construct
  misc_feature 1..20: note = chemically synthesized
  source 1..20: mol_type = other DNA
gacatgatattcatatattc

SEQ ID NO: 5454 - DNA, 20 bp, synthetic construct
  misc_feature 1..20: note = chemically synthesized
  source 1..20: mol_type = other DNA
acatgatattcatatattct

SEQ ID NO: 5455 - DNA, 20 bp, synthetic construct
  misc_feature 1..20: note = chemically synthesized
  source 1..20: mol_type = other DNA
tattctaggaattcaacaaa

SEQ ID NO: 5456 - DNA, 20 bp, synthetic construct
  misc_feature 1..20: note = chemically synthesized
  source 1..20: mol_type = other DNA
tgactgatttaccttcctaa

SEQ ID NO: 5457 - DNA, 20 bp, synthetic construct
  misc_feature 1..20: note = chemically synthesized
  source 1..20: mol_type = other DNA
gactgatttaccttcctaaa

SEQ ID NO: 5458 - DNA, 20 bp, synthetic construct
  misc_feature 1..20: note = chemically synthesized
  source 1..20: mol_type = other DNA
actgatttaccttcctaaaa

SEQ ID NO: 5459 - DNA, 20 bp, synthetic construct
  misc_feature 1..20: note = chemically synthesized
  source 1..20: mol_type = other DNA
gatttaccttcctaaaaggg

SEQ ID NO: 5460 - DNA, 20 bp, synthetic construct
  misc_feature 1..20: note = chemically synthesized
  source 1..20: mol_type = other DNA
aatatcatttctgttcaaaa

SEQ ID NO: 5461 - DNA, 20 bp, synthetic construct
  misc_feature 1..20: note = chemically synthesized
  source 1..20: mol_type = other DNA
aatggtaattttaaccttct

SEQ ID NO: 5462 - DNA, 20 bp, synthetic construct
  misc_feature 1..20: note = chemically synthesized
  source 1..20: mol_type = other DNA
ctgatatctacttgaacttt

SEQ ID NO: 5463 - DNA, 20 bp, synthetic construct
  misc_feature 1..20: note = chemically synthesized
  source 1..20: mol_type = other DNA
actttcagataaaaaaaaaa

SEQ ID NO: 5464 - DNA, 20 bp, synthetic construct
  misc_feature 1..20: note = chemically synthesized
  source 1..20: mol_type = other DNA
tcagataaaaaaaaaaaagc

SEQ ID NO: 5465 - DNA, 20 bp, synthetic construct
  misc_feature 1..20: note = chemically synthesized
  source 1..20: mol_type = other DNA
aaaaaaaaaaaagcaagttg

SEQ ID NO: 5466 - DNA, 20 bp, synthetic construct
  misc_feature 1..20: note = chemically synthesized
  source 1..20: mol_type = other DNA
gtaacatgttatgctacaca

SEQ ID NO: 5467 - DNA, 20 bp, synthetic construct
  misc_feature 1..20: note = chemically synthesized
  source 1..20: mol_type = other DNA
atgttatgctacacaaagat

SEQ ID NO: 5468 - DNA, 20 bp, synthetic construct
  misc_feature 1..20: note = chemically synthesized
  source 1..20: mol_type = other DNA
gaatatccaccctctttaaa

SEQ ID NO: 5469 - DNA, 20 bp, synthetic construct
  misc_feature 1..20: note = chemically synthesized
  source 1..20: mol_type = other DNA
taaacagccaccccacaccc

SEQ ID NO: 5470 - DNA, 20 bp, synthetic construct
  misc_feature 1..20: note = chemically synthesized
  source 1..20: mol_type = other DNA
aacagccaccccacaccctg

SEQ ID NO: 5471 - DNA, 20 bp, synthetic construct
  misc_feature 1..20: note = chemically synthesized
  source 1..20: mol_type = other DNA
agccaccccacaccctggag

SEQ ID NO: 5472 - DNA, 20 bp, synthetic construct
  misc_feature 1..20: note = chemically synthesized
  source 1..20: mol_type = other DNA
ccaccccacaccctggagaa

SEQ ID NO: 5473 - DNA, 20 bp, synthetic construct
  misc_feature 1..20: note = chemically synthesized
  source 1..20: mol_type = other DNA
cctggagaagagcaaatgtg

SEQ ID NO: 5474 - DNA, 20 bp, synthetic construct
  misc_feature 1..20: note = chemically synthesized
  source 1..20: mol_type = other DNA
tgtgaagtttatgtgccaac

SEQ ID NO: 5475 - DNA, 20 bp, synthetic construct
  misc_feature 1..20: note = chemically synthesized
  source 1..20: mol_type = other DNA
gtgccaaccagactgtgcgc

SEQ ID NO: 5476 - DNA, 20 bp, synthetic construct
  misc_feature 1..20: note = chemically synthesized
  source 1..20: mol_type = other DNA
tgccaaccagactgtgcgcc

SEQ ID NO: 5477 - DNA, 20 bp, synthetic construct
  misc_feature 1..20: note = chemically synthesized
  source 1..20: mol_type = other DNA
aaccagactgtgcgccaggt

SEQ ID NO: 5478 - DNA, 20 bp, synthetic construct
  misc_feature 1..20: note = chemically synthesized
  source 1..20: mol_type = other DNA
gactgtgcgccaggttggta

SEQ ID NO: 5479 - DNA, 20 bp, synthetic construct
  misc_feature 1..20: note = chemically synthesized
  source 1..20: mol_type = other DNA
gccaggttggtaaagtctga

SEQ ID NO: 5480 - DNA, 20 bp, synthetic construct
  misc_feature 1..20: note = chemically synthesized
  source 1..20: mol_type = other DNA
caggttggtaaagtctgaca

SEQ ID NO: 5481 - DNA, 20 bp, synthetic construct
  misc_feature 1..20: note = chemically synthesized
  source 1..20: mol_type = other DNA
gacaacatcttctatatgtg

SEQ ID NO: 5482 - DNA, 20 bp, synthetic construct
  misc_feature 1..20: note = chemically synthesized
  source 1..20: mol_type = other DNA
atatgtgaagcccaactacg

SEQ ID NO: 5483 - DNA, 20 bp, synthetic construct
  misc_feature 1..20: note = chemically synthesized
  source 1..20: mol_type = other DNA
tacgtggttgtgcaactcta

SEQ ID NO: 5484 - DNA, 20 bp, synthetic construct
  misc_feature 1..20: note = chemically synthesized
  source 1..20: mol_type = other DNA
ctatagctgactttcaacca

SEQ ID NO: 5485 - DNA, 20 bp, synthetic construct
  misc_feature 1..20: note = chemically synthesized
  source 1..20: mol_type = other DNA
ttcaaccatggtcatctgca

SEQ ID NO: 5486 - DNA, 20 bp, synthetic construct
  misc_feature 1..20: note = chemically synthesized
  source 1..20: mol_type = other DNA
aaccatggtcatctgcaaag

SEQ ID NO: 5487 - DNA, 20 bp, synthetic construct
  misc_feature 1..20: note = chemically synthesized
  source 1..20: mol_type = other DNA
atggtcatctgcaaagaagt

SEQ ID NO: 5488 - DNA, 20 bp, synthetic construct
  misc_feature 1..20: note = chemically synthesized
  source 1..20: mol_type = other DNA
atctgcaaagaagttagtct

SEQ ID NO: 5489 - DNA, 20 bp, synthetic construct
  misc_feature 1..20: note = chemically synthesized
  source 1..20: mol_type = other DNA
ctgcgcatcctcaatgcaaa

SEQ ID NO: 5490 - DNA, 20 bp, synthetic construct
  misc_feature 1..20: note = chemically synthesized
  source 1..20: mol_type = other DNA
catcctcaatgcaaaaagct

SEQ ID NO: 5491 - DNA, 20 bp, synthetic construct
  misc_feature 1..20: note = chemically synthesized
  source 1..20: mol_type = other DNA
tcttaatgctgttttaaatg

SEQ ID NO: 5492 - DNA, 20 bp, synthetic construct
  misc_feature 1..20: note = chemically synthesized
  source 1..20: mol_type = other DNA
ttaaatgcagcactactaaa

SEQ ID NO: 5493 - DNA, 20 bp, synthetic construct
  misc_feature 1..20: note = chemically synthesized
  source 1..20: mol_type = other DNA
taaatgcagcactactaaaa

SEQ ID NO: 5494 - DNA, 20 bp, synthetic construct
  misc_feature 1..20: note = chemically synthesized
  source 1..20: mol_type = other DNA
aaaggacctcattttgatgc

SEQ ID NO: 5495 - DNA, 20 bp, synthetic construct
  misc_feature 1..20: note = chemically synthesized
  source 1..20: mol_type = other DNA
aggacctcattttgatgcca

SEQ ID NO: 5496 - DNA, 20 bp, synthetic construct
  misc_feature 1..20: note = chemically synthesized
  source 1..20: mol_type = other DNA
ggacctcattttgatgccag

SEQ ID NO: 5497 - DNA, 20 bp, synthetic construct
  misc_feature 1..20: note = chemically synthesized
  source 1..20: mol_type = other DNA
gacctcattttgatgccaga

SEQ ID NO: 5498 - DNA, 20 bp, synthetic construct
  misc_feature 1..20: note = chemically synthesized
  source 1..20: mol_type = other DNA
ctcattttgatgccagaggg

SEQ ID NO: 5499 - DNA, 20 bp, synthetic construct
  misc_feature 1..20: note = chemically synthesized
  source 1..20: mol_type = other DNA
atgccagagggcagcaaaca

SEQ ID NO: 5500 - DNA, 20 bp, synthetic construct
  misc_feature 1..20: note = chemically synthesized
  source 1..20: mol_type = other DNA
gcagcaaacatggacacttt

SEQ ID NO: 5501 - DNA, 20 bp, synthetic construct
  misc_feature 1..20: note = chemically synthesized
  source 1..20: mol_type = other DNA
tggacacttttggccccctt

SEQ ID NO: 5502 - DNA, 20 bp, synthetic construct
  misc_feature 1..20: note = chemically synthesized
  source 1..20: mol_type = other DNA
tttggcccccttcagctatt

SEQ ID NO: 5503 - DNA, 20 bp, synthetic construct
  misc_feature 1..20: note = chemically synthesized
  source 1..20: mol_type = other DNA
cccccttcagctattaagta

SEQ ID NO: 5504 - DNA, 20 bp, synthetic construct
  misc_feature 1..20: note = chemically synthesized
  source 1..20: mol_type = other DNA
tcagctattaagtacagtaa

SEQ ID NO: 5505 - DNA, 20 bp, synthetic construct
  misc_feature 1..20: note = chemically synthesized
  source 1..20: mol_type = other DNA
cagctattaagtacagtaaa

SEQ ID NO: 5506 - DNA, 20 bp, synthetic construct
  misc_feature 1..20: note = chemically synthesized
  source 1..20: mol_type = other DNA
ctattaagtacagtaaaagg

SEQ ID NO: 5507 - DNA, 20 bp, synthetic construct
  misc_feature 1..20: note = chemically synthesized
  source 1..20: mol_type = other DNA
actatcatttgaaatgctcc

SEQ ID NO: 5508 - DNA, 20 bp, synthetic construct
  misc_feature 1..20: note = chemically synthesized
  source 1..20: mol_type = other DNA
tcatttgaaatgctcccggc

SEQ ID NO: 5509 - DNA, 20 bp, synthetic construct
  misc_feature 1..20: note = chemically synthesized
  source 1..20: mol_type = other DNA
catttgaaatgctcccggcc

SEQ ID NO: 5510 - DNA, 20 bp, synthetic construct
  misc_feature 1..20: note = chemically synthesized
  source 1..20: mol_type = other DNA
atgctcccggccaggcgctg

SEQ ID NO: 5511 - DNA, 20 bp, synthetic construct
  misc_feature 1..20: note = chemically synthesized
  source 1..20: mol_type = other DNA
gtggctcacacctgtaatcc

SEQ ID NO: 5512 - DNA, 20 bp, synthetic construct
  misc_feature 1..20: note = chemically synthesized
  source 1..20: mol_type = other DNA
cacctgtaatcccagcactt

SEQ ID NO: 5513 - DNA, 20 bp, synthetic construct
  misc_feature 1..20: note = chemically synthesized
  source 1..20: mol_type = other DNA
acctgtaatcccagcacttt

SEQ ID NO: 5514 - DNA, 20 bp, synthetic construct
  misc_feature 1..20: note = chemically synthesized
  source 1..20: mol_type = other DNA
ctgtaatcccagcactttgg

SEQ ID NO: 5515 - DNA, 20 bp, synthetic construct
  misc_feature 1..20: note = chemically synthesized
  source 1..20: mol_type = other DNA
tgtaatcccagcactttggg

SEQ ID NO: 5516 - DNA, 20 bp, synthetic construct
  misc_feature 1..20: note = chemically synthesized
  source 1..20: mol_type = other DNA
atcccagcactttgggaggc

SEQ ID NO: 5517 - DNA, 20 bp, synthetic construct
  misc_feature 1..20: note = chemically synthesized
  source 1..20: mol_type = other DNA
tcccagcactttgggaggcc

SEQ ID NO: 5518 - DNA, 20 bp, synthetic construct
  misc_feature 1..20: note = chemically synthesized
  source 1..20: mol_type = other DNA
cccagcactttgggaggccg

SEQ ID NO: 5519 - DNA, 20 bp, synthetic construct
  misc_feature 1..20: note = chemically synthesized
  source 1..20: mol_type = other DNA
agcactttgggaggccgggg

SEQ ID NO: 5520 - DNA, 20 bp, synthetic construct
  misc_feature 1..20: note = chemically synthesized
  source 1..20: mol_type = other DNA
gcactttgggaggccggggc

SEQ ID NO: 5521 - DNA, 20 bp, synthetic construct
  misc_feature 1..20: note = chemically synthesized
  source 1..20: mol_type = other DNA
actttgggaggccggggcag

SEQ ID NO: 5522 - DNA, 20 bp, synthetic construct
  misc_feature 1..20: note = chemically synthesized
  source 1..20: mol_type = other DNA
ctttgggaggccggggcagg

SEQ ID NO: 5523 - DNA, 20 bp, synthetic construct
  misc_feature 1..20: note = chemically synthesized
  source 1..20: mol_type = other DNA
ccggggcaggaggatcacct

SEQ ID NO: 5524 - DNA, 20 bp, synthetic construct
  misc_feature 1..20: note = chemically synthesized
  source 1..20: mol_type = other DNA
cggggcaggaggatcacctg

SEQ ID NO: 5525 - DNA, 20 bp, synthetic construct
  misc_feature 1..20: note = chemically synthesized
  source 1..20: mol_type = other DNA
gcaggaggatcacctgaggt

SEQ ID NO: 5526 - DNA, 20 bp, synthetic construct
  misc_feature 1..20: note = chemically synthesized
  source 1..20: mol_type = other DNA
caggaggatcacctgaggtc

SEQ ID NO: 5527 - DNA, 20 bp, synthetic construct
  misc_feature 1..20: note = chemically synthesized
  source 1..20: mol_type = other DNA
ggaggatcacctgaggtcag

SEQ ID NO: 5528 - DNA, 20 bp, synthetic construct
  misc_feature 1..20: note = chemically synthesized
  source 1..20: mol_type = other DNA
tcacctgaggtcaggagttc

SEQ ID NO: 5529 - DNA, 20 bp, synthetic construct
  misc_feature 1..20: note = chemically synthesized
  source 1..20: mol_type = other DNA
tgaggtcaggagttcaagat

SEQ ID NO: 5530 - DNA, 20 bp, synthetic construct
  misc_feature 1..20: note = chemically synthesized
  source 1..20: mol_type = other DNA
tcaggagttcaagatcagtt

SEQ ID NO: 5531 - DNA, 20 bp, synthetic construct
  misc_feature 1..20: note = chemically synthesized
  source 1..20: mol_type = other DNA
caagatcagtttggacaaca

SEQ ID NO: 5532 - DNA, 20 bp, synthetic construct
  misc_feature 1..20: note = chemically synthesized
  source 1..20: mol_type = other DNA
ctctactaaaaatacaaaat

SEQ ID NO: 5533 - DNA, 20 bp, synthetic construct
  misc_feature 1..20: note = chemically synthesized
  source 1..20: mol_type = other DNA
actaaaaatacaaaattagc

SEQ ID NO: 5534 - DNA, 20 bp, synthetic construct
  misc_feature 1..20: note = chemically synthesized
  source 1..20: mol_type = other DNA
ctaaaaatacaaaattagcc

SEQ ID NO: 5535 - DNA, 20 bp, synthetic construct
  misc_feature 1..20: note = chemically synthesized
  source 1..20: mol_type = other DNA
aatacaaaattagccgggca

SEQ ID NO: 5536 - DNA, 20 bp, synthetic construct
  misc_feature 1..20: note = chemically synthesized
  source 1..20: mol_type = other DNA
gtaatacatgcctgtaatct

SEQ ID NO: 5537 - DNA, 20 bp, synthetic construct
  misc_feature 1..20: note = chemically synthesized
  source 1..20: mol_type = other DNA
tgcctgtaatctcagctact

SEQ ID NO: 5538 - DNA, 20 bp, synthetic construct
  misc_feature 1..20: note = chemically synthesized
  source 1..20: mol_type = other DNA
gcctgtaatctcagctactc

SEQ ID NO: 5539 - DNA, 20 bp, synthetic construct
  misc_feature 1..20: note = chemically synthesized
  source 1..20: mol_type = other DNA
ctgtaatctcagctactcgg

SEQ ID NO: 5540 - DNA, 20 bp, synthetic construct
  misc_feature 1..20: note = chemically synthesized
  source 1..20: mol_type = other DNA
tgtaatctcagctactcggg

SEQ ID NO: 5541 - DNA, 20 bp, synthetic construct
  misc_feature 1..20: note = chemically synthesized
  source 1..20: mol_type = other DNA
tctcagctactcgggaggct

SEQ ID NO: 5542 - DNA, 20 bp, synthetic construct
  misc_feature 1..20: note = chemically synthesized
  source 1..20: mol_type = other DNA
ctcagctactcgggaggctg

SEQ ID NO: 5543 - DNA, 20 bp, synthetic construct
  misc_feature 1..20: note = chemically synthesized
  source 1..20: mol_type = other DNA
agctactcgggaggctgagg

SEQ ID NO: 5544 - DNA, 20 bp, synthetic construct
  misc_feature 1..20: note = chemically synthesized
  source 1..20: mol_type = other DNA
gctactcgggaggctgaggc

SEQ ID NO: 5545 - DNA, 20 bp, synthetic construct
  misc_feature 1..20: note = chemically synthesized
  source 1..20: mol_type = other DNA
tactcgggaggctgaggcag

SEQ ID NO: 5546 - DNA, 20 bp, synthetic construct
  misc_feature 1..20: note = chemically synthesized
  source 1..20: mol_type = other DNA
ggcaggagatcgcttgaacc

SEQ ID NO: 5547 - DNA, 20 bp, synthetic construct
  misc_feature 1..20: note = chemically synthesized
  source 1..20: mol_type = other DNA
gcaggagatcgcttgaacct

SEQ ID NO: 5548 - DNA, 20 bp, synthetic construct
  misc_feature 1..20: note = chemically synthesized
  source 1..20: mol_type = other DNA
aggagatcgcttgaacctgg

SEQ ID NO: 5549 - DNA, 20 bp, synthetic construct
  misc_feature 1..20: note = chemically synthesized
  source 1..20: mol_type = other DNA
ggagatcgcttgaacctggg

SEQ ID NO: 5550 - DNA, 20 bp, synthetic construct
  misc_feature 1..20: note = chemically synthesized
  source 1..20: mol_type = other DNA
gatcgcttgaacctgggagg

SEQ ID NO: 5551 - DNA, 20 bp, synthetic construct
  misc_feature 1..20: note = chemically synthesized
  source 1..20: mol_type = other DNA
cgcttgaacctgggaggcag

SEQ ID NO: 5552 - DNA, 20 bp, synthetic construct
  misc_feature 1..20: note = chemically synthesized
  source 1..20: mol_type = other DNA
aacctgggaggcagaagatg

SEQ ID NO: 5553 - DNA, 20 bp, synthetic construct
  misc_feature 1..20: note = chemically synthesized
  source 1..20: mol_type = other DNA
tgggaggcagaagatgcagt

SEQ ID NO: 5554 - DNA, 20 bp, synthetic construct
  misc_feature 1..20: note = chemically synthesized
  source 1..20: mol_type = other DNA
ggcagaagatgcagtgagcc

SEQ ID NO: 5555 - DNA, 20 bp, synthetic construct
  misc_feature 1..20: note = chemically synthesized
  source 1..20: mol_type = other DNA
gagatcgcgccattgcattc

SEQ ID NO: 5556 - DNA, 20 bp, synthetic construct
  misc_feature 1..20: note = chemically synthesized
  source 1..20: mol_type = other DNA
cgcgccattgcattccagcc

SEQ ID NO: 5557 - DNA, 20 bp, synthetic construct
  misc_feature 1..20: note = chemically synthesized
  source 1..20: mol_type = other DNA
gcgccattgcattccagccc

SEQ ID NO: 5558 - DNA, 20 bp, synthetic construct
  misc_feature 1..20: note = chemically synthesized
  source 1..20: mol_type = other DNA
tgcattccagcccgggcaac

SEQ ID NO: 5559 - DNA, 20 bp, synthetic construct
  misc_feature 1..20: note = chemically synthesized
  source 1..20: mol_type = other DNA
cattccagcccgggcaacaa

SEQ ID NO: 5560 - DNA, 20 bp, synthetic construct
  misc_feature 1..20: note = chemically synthesized
  source 1..20: mol_type = other DNA
aatctccgtctcaccaaaaa

SEQ ID NO: 5561 - DNA, 20 bp, synthetic construct
  misc_feature 1..20: note = chemically synthesized
  source 1..20: mol_type = other DNA
gtctcaccaaaaaaagaaaa

SEQ ID NO: 5562 - DNA, 20 bp, synthetic construct
  misc_feature 1..20: note = chemically synthesized
  source 1..20: mol_type = other DNA
gaaaaaagaaaaaaaaaaaa

SEQ ID NO: 5563 - DNA, 20 bp, synthetic construct
  misc_feature 1..20: note = chemically synthesized
  source 1..20: mol_type = other DNA
aaagaaaaaaaaaaaaaaga

SEQ ID NO: 5564 - DNA, 20 bp, synthetic construct
  misc_feature 1..20: note = chemically synthesized
  source 1..20: mol_type = other DNA
aaagaaagaaatgctcccct

SEQ ID NO: 5565 - DNA, 20 bp, synthetic construct
  misc_feature 1..20: note = chemically synthesized
  source 1..20: mol_type = other DNA
aaatgctcccctcagttctc

SEQ ID NO: 5566 - DNA, 20 bp, synthetic construct
  misc_feature 1..20: note = chemically synthesized
  source 1..20: mol_type = other DNA
aatgctcccctcagttctcc

SEQ ID NO: 5567 - DNA, 20 bp, synthetic construct
  misc_feature 1..20: note = chemically synthesized
  source 1..20: mol_type = other DNA
ctcccctcagttctccaggc

SEQ ID NO: 5568 - DNA, 20 bp, synthetic construct
  misc_feature 1..20: note = chemically synthesized
  source 1..20: mol_type = other DNA
tcccctcagttctccaggct

SEQ ID NO: 5569 - DNA, 20 bp, synthetic construct
  misc_feature 1..20: note = chemically synthesized
  source 1..20: mol_type = other DNA
ctgcccacgtcaaaacaccc

SEQ ID NO: 5570 - DNA, 20 bp, synthetic construct
  misc_feature 1..20: note = chemically synthesized
  source 1..20: mol_type = other DNA
tgcccacgtcaaaacaccct

SEQ ID NO: 5571 - DNA, 20 bp, synthetic construct
  misc_feature 1..20: note = chemically synthesized
  source 1..20: mol_type = other DNA
aggcatcatcactccgtgtt

SEQ ID NO: 5572 - DNA, 20 bp, synthetic construct
  misc_feature 1..20: note = chemically synthesized
  source 1..20: mol_type = other DNA
gcatcatcactccgtgttga

SEQ ID NO: 5573 - DNA, 20 bp, synthetic construct
  misc_feature 1..20: note = chemically synthesized
  source 1..20: mol_type = other DNA
atcactccgtgttgagagcc

SEQ ID NO: 5574 - DNA, 20 bp, synthetic construct
  misc_feature 1..20: note = chemically synthesized
  source 1..20: mol_type = other DNA
actccgtgttgagagccaag

SEQ ID NO: 5575 - DNA, 20 bp, synthetic construct
  misc_feature 1..20: note = chemically synthesized
  source 1..20: mol_type = other DNA
cgtgttgagagccaagtggc

SEQ ID NO: 5576 - DNA, 20 bp, synthetic construct
  misc_feature 1..20: note = chemically synthesized
  source 1..20: mol_type = other DNA
gtgttgagagccaagtggcc

SEQ ID NO: 5577 - DNA, 20 bp, synthetic construct
  misc_feature 1..20: note = chemically synthesized
  source 1..20: mol_type = other DNA
ttgagagccaagtggccagg

SEQ ID NO: 5578 - DNA, 20 bp, synthetic construct
  misc_feature 1..20: note = chemically synthesized
  source 1..20: mol_type = other DNA
tgagagccaagtggccaggt

SEQ ID NO: 5579 - DNA, 20 bp, synthetic construct
  misc_feature 1..20: note = chemically synthesized
  source 1..20: mol_type = other DNA
aggtaggacccaacactacg

SEQ ID NO: 5580 - DNA, 20 bp, synthetic construct
  misc_feature 1..20: note = chemically synthesized
  source 1..20: mol_type = other DNA
ggtaggacccaacactacgc

SEQ ID NO: 5581 - DNA, 20 bp, synthetic construct
  misc_feature 1..20: note = chemically synthesized
  source 1..20: mol_type = other DNA
gacccaacactacgcaggca

SEQ ID NO: 5582 - DNA, 20 bp, synthetic construct
  misc_feature 1..20: note = chemically synthesized
  source 1..20: mol_type = other DNA
gcacagacgttttccatgtt

SEQ ID NO: 5583 - DNA, 20 bp, synthetic construct
  misc_feature 1..20: note = chemically synthesized
  source 1..20: mol_type = other DNA
gttaagaacccaaatccata

SEQ ID NO: 5584 - DNA, 20 bp, synthetic construct
  misc_feature 1..20: note = chemically synthesized
  source 1..20: mol_type = other DNA
acccaaatccatacagtcct

SEQ ID NO: 5585 - DNA, 20 bp, synthetic construct
  misc_feature 1..20: note = chemically synthesized
  source 1..20: mol_type = other DNA
tacagtccttagcacccaaa

SEQ ID NO: 5586 - DNA, 20 bp, synthetic construct
  misc_feature 1..20: note = chemically synthesized
  source 1..20: mol_type = other DNA
acagtccttagcacccaaat

SEQ ID NO: 5587 - DNA, 20 bp, synthetic construct
  misc_feature 1..20: note = chemically synthesized
  source 1..20: mol_type = other DNA
ccttagcacccaaataggtt

SEQ ID NO: 5588 - DNA, 20 bp, synthetic construct
  misc_feature 1..20: note = chemically synthesized
  source 1..20: mol_type = other DNA
gcacccaaataggttcagaa

SEQ ID NO: 5589 - DNA, 20 bp, synthetic construct
  misc_feature 1..20: note = chemically synthesized
  source 1..20: mol_type = other DNA
cacccaaataggttcagaaa

SEQ ID NO: 5590 - DNA, 20 bp, synthetic construct
  misc_feature 1..20: note = chemically synthesized
  source 1..20: mol_type = other DNA
ccaaataggttcagaaaagg

SEQ ID NO: 5591 - DNA, 20 bp, synthetic construct
  misc_feature 1..20: note = chemically synthesized
  source 1..20: mol_type = other DNA
acaaatctgccaaataaatg

SEQ ID NO: 5592 - DNA, 20 bp, synthetic construct
  misc_feature 1..20: note = chemically synthesized
  source 1..20: mol_type = other DNA
tctgccaaataaatgaagtt

SEQ ID NO: 5593 - DNA, 20 bp, synthetic construct
  misc_feature 1..20: note = chemically synthesized
  source 1..20: mol_type = other DNA
tgcatttacgctaaatacct

SEQ ID NO: 5594 - DNA, 20 bp, synthetic construct
  misc_feature 1..20: note = chemically synthesized
  source 1..20: mol_type = other DNA
cgctaaataccttggaaatt

SEQ ID NO: 5595 - DNA, 20 bp, synthetic construct
  misc_feature 1..20: note = chemically synthesized
  source 1..20: mol_type = other DNA
ctaaataccttggaaattga

SEQ ID NO: 5596 - DNA, 20 bp, synthetic construct
  misc_feature 1..20: note = chemically synthesized
  source 1..20: mol_type = other DNA
taaataccttggaaattgag

SEQ ID NO: 5597 - DNA, 20 bp, synthetic construct
  misc_feature 1..20: note = chemically synthesized
  source 1..20: mol_type = other DNA
aaataccttggaaattgaga

SEQ ID NO: 5598 - DNA, 20 bp, synthetic construct
  misc_feature 1..20: note = chemically synthesized
  source 1..20: mol_type = other DNA
ttggaaattgagagggaatc

SEQ ID NO: 5599 - DNA, 20 bp, synthetic construct
  misc_feature 1..20: note = chemically synthesized
  source 1..20: mol_type = other DNA
ggaaattgagagggaatctg

SEQ ID NO: 5600 - DNA, 20 bp, synthetic construct
  misc_feature 1..20: note = chemically synthesized
  source 1..20: mol_type = other DNA
aaattgagagggaatctgga

SEQ ID NO: 5601 - DNA, 20 bp, synthetic construct
  misc_feature 1..20: note = chemically synthesized
  source 1..20: mol_type = other DNA
aattgagagggaatctggag

SEQ ID NO: 5602 - DNA, 20 bp, synthetic construct
  misc_feature 1..20: note = chemically synthesized
  source 1..20: mol_type = other DNA
tgagagggaatctggagagg

SEQ ID NO: 5603 - DNA, 20 bp, synthetic construct
  misc_feature 1..20: note = chemically synthesized
  source 1..20: mol_type = other DNA
agggaatctggagaggaaga

SEQ ID NO: 5604 - DNA, 20 bp, synthetic construct
  misc_feature 1..20: note = chemically synthesized
  source 1..20: mol_type = other DNA
tctggagaggaagatggatg

SEQ ID NO: 5605 - DNA, 20 bp, synthetic construct
  misc_feature 1..20: note = chemically synthesized
  source 1..20: mol_type = other DNA
ctggagaggaagatggatgt

SEQ ID NO: 5606 - DNA, 20 bp, synthetic construct
  misc_feature 1..20: note = chemically synthesized
  source 1..20: mol_type = other DNA
aaacaaaaaccctcacttta

SEQ ID NO: 5607 - DNA, 20 bp, synthetic construct
  misc_feature 1..20: note = chemically synthesized
  source 1..20: mol_type = other DNA
aacaaaaaccctcactttac

SEQ ID NO: 5608 - DNA, 20 bp, synthetic construct
  misc_feature 1..20: note = chemically synthesized
  source 1..20: mol_type = other DNA
accctcactttacaggaatt

SEQ ID NO: 5609 - DNA, 20 bp, synthetic construct
  misc_feature 1..20: note = chemically synthesized
  source 1..20: mol_type = other DNA
cactttacaggaattcagca

SEQ ID NO: 5610 - DNA, 20 bp, synthetic construct
  misc_feature 1..20: note = chemically synthesized
  source 1..20: mol_type = other DNA
actttacaggaattcagcac

SEQ ID NO: 5611 - DNA, 20 bp, synthetic construct
  misc_feature 1..20: note = chemically synthesized
  source 1..20: mol_type = other DNA
tttacaggaattcagcacag

SEQ ID NO: 5612 - DNA, 20 bp, synthetic construct
  misc_feature 1..20: note = chemically synthesized
  source 1..20: mol_type = other DNA
cacaggagatgctacattgt

SEQ ID NO: 5613 - DNA, 20 bp, synthetic construct
  misc_feature 1..20: note = chemically synthesized
  source 1..20: mol_type = other DNA
cattgttagcatctccgctt

SEQ ID NO: 5614 - DNA, 20 bp, synthetic construct
  misc_feature 1..20: note = chemically synthesized
  source 1..20: mol_type = other DNA
attgttagcatctccgctta

SEQ ID NO: 5615 - DNA, 20 bp, synthetic construct
  misc_feature 1..20: note = chemically synthesized
  source 1..20: mol_type = other DNA
tgttagcatctccgcttaag

SEQ ID NO: 5616 - DNA, 20 bp, synthetic construct
  misc_feature 1..20: note = chemically synthesized
  source 1..20: mol_type = other DNA
tagcatctccgcttaaggag

SEQ ID NO: 5617 - DNA, 20 bp, synthetic construct
  misc_feature 1..20: note = chemically synthesized
  source 1..20: mol_type = other DNA
gagaagacatactgatgaat

SEQ ID NO: 5618 - DNA, 20 bp, synthetic construct
  misc_feature 1..20: note = chemically synthesized
  source 1..20: mol_type = other DNA
acatactgatgaataagact

SEQ ID NO: 5619 - DNA, 20 bp, synthetic construct
  misc_feature 1..20: note = chemically synthesized
  source 1..20: mol_type = other DNA
actgatgaataagactgagt

SEQ ID NO: 5620 - DNA, 20 bp, synthetic construct
  misc_feature 1..20: note = chemically synthesized
  source 1..20: mol_type = other DNA
gaataagactgagttggtga

SEQ ID NO: 5621 - DNA, 20 bp, synthetic construct
  misc_feature 1..20: note = chemically synthesized
  source 1..20: mol_type = other DNA
aataagactgagttggtgac

SEQ ID NO: 5622 - DNA, 20 bp, synthetic construct
  misc_feature 1..20: note = chemically synthesized
  source 1..20: mol_type = other DNA
gactgagttggtgacaggca

SEQ ID NO: 5623 - DNA, 20 bp, synthetic construct
  misc_feature 1..20: note = chemically synthesized
  source 1..20: mol_type = other DNA
tgagttggtgacaggcacag

SEQ ID NO: 5624 - DNA, 20 bp, synthetic construct
  misc_feature 1..20: note = chemically synthesized
  source 1..20: mol_type = other DNA
gtggctctcgcctgtaatcc

SEQ ID NO: 5625 - DNA, 20 bp, synthetic construct
  misc_feature 1..20: note = chemically synthesized
  source 1..20: mol_type = other DNA
cgcctgtaatcccagcactt

SEQ ID NO: 5626 - DNA, 20 bp, synthetic construct
  misc_feature 1..20: note = chemically synthesized
  source 1..20: mol_type = other DNA
gcctgtaatcccagcacttt

SEQ ID NO: 5627 - DNA, 20 bp, synthetic construct
  misc_feature 1..20: note = chemically synthesized
  source 1..20: mol_type = other DNA
ctgtaatcccagcactttgg

SEQ ID NO: 5628 - DNA, 20 bp, synthetic construct
  misc_feature 1..20: note = chemically synthesized
  source 1..20: mol_type = other DNA
tgtaatcccagcactttggg

SEQ ID NO: 5629 - DNA, 20 bp, synthetic construct
  misc_feature 1..20: note = chemically synthesized
  source 1..20: mol_type = other DNA
tcccagcactttgggaggtc

SEQ ID NO: 5630 - DNA, 20 bp, synthetic construct
  misc_feature 1..20: note = chemically synthesized
  source 1..20: mol_type = other DNA
cccagcactttgggaggtca

SEQ ID NO: 5631 - DNA, 20 bp, synthetic construct
  misc_feature 1..20: note = chemically synthesized
  source 1..20: mol_type = other DNA
agcactttgggaggtcaagg

SEQ ID NO: 5632 - DNA, 20 bp, synthetic construct
  misc_feature 1..20: note = chemically synthesized
  source 1..20: mol_type = other DNA
gcactttgggaggtcaaggc

SEQ ID NO: 5633 - DNA, 20 bp, synthetic construct
  misc_feature 1..20: note = chemically synthesized
  source 1..20: mol_type = other DNA
actttgggaggtcaaggcag

SEQ ID NO: 5634 - DNA, 20 bp, synthetic construct
  misc_feature 1..20: note = chemically synthesized
  source 1..20: mol_type = other DNA
ctttgggaggtcaaggcagg

SEQ ID NO: 5635 - DNA, 20 bp, synthetic construct
  misc_feature 1..20: note = chemically synthesized
  source 1..20: mol_type = other DNA
ggtcaaggcaggaggatcac

SEQ ID NO: 5636 - DNA, 20 bp, synthetic construct
  misc_feature 1..20: note = chemically synthesized
  source 1..20: mol_type = other DNA
tcaaggcaggaggatcactg

SEQ ID NO: 5637 - DNA, 20 bp, synthetic construct
  misc_feature 1..20: note = chemically synthesized
  source 1..20: mol_type = other DNA
gcaggaggatcactggagcc

SEQ ID NO: 5638 - DNA, 20 bp, synthetic construct
  misc_feature 1..20: note = chemically synthesized
  source 1..20: mol_type = other DNA
caggaggatcactggagccc

SEQ ID NO: 5639 - DNA, 20 bp, synthetic construct
  misc_feature 1..20: note = chemically synthesized
  source 1..20: mol_type = other DNA
ggaggatcactggagcccag

SEQ ID NO: 5640 - DNA, 20 bp, synthetic construct
  misc_feature 1..20: note = chemically synthesized
  source 1..20: mol_type = other DNA
tcactggagcccaggagttc

SEQ ID NO: 5641 - DNA, 20 bp, synthetic construct
  misc_feature 1..20: note = chemically synthesized
  source 1..20: mol_type = other DNA
ggagcccaggagttcaagac

SEQ ID NO: 5642 - DNA, 20 bp, synthetic construct
  misc_feature 1..20: note = chemically synthesized
  source 1..20: mol_type = other DNA
ccaggagttcaagaccagcc

SEQ ID NO: 5643 - DNA, 20 bp, synthetic construct
  misc_feature 1..20: note = chemically synthesized
  source 1..20: mol_type = other DNA
caggagttcaagaccagcct

SEQ ID NO: 5644 - DNA, 20 bp, synthetic construct
  misc_feature 1..20: note = chemically synthesized
  source 1..20: mol_type = other DNA
ttcaagaccagcctgggcaa

SEQ ID NO: 5645 - DNA, 20 bp, synthetic construct
  misc_feature 1..20: note = chemically synthesized
  source 1..20: mol_type = other DNA
tcaagaccagcctgggcaac

SEQ ID NO: 5646 - DNA, 20 bp, synthetic construct
  misc_feature 1..20: note = chemically synthesized
  source 1..20: mol_type = other DNA
caagaccagcctgggcaaca

SEQ ID NO: 5647 - DNA, 20 bp, synthetic construct
  misc_feature 1..20: note = chemically synthesized
  source 1..20: mol_type = other DNA
agaccagcctgggcaacagg

SEQ ID NO: 5648 - DNA, 20 bp, synthetic construct
  misc_feature 1..20: note = chemically synthesized
  source 1..20: mol_type = other DNA
aaactccatctctacaaaat

SEQ ID NO: 5649 - DNA, 20 bp, synthetic construct
  misc_feature 1..20: note = chemically synthesized
  source 1..20: mol_type = other DNA
tccatctctacaaaattagc

SEQ ID NO: 5650 - DNA, 20 bp, synthetic construct
  misc_feature 1..20: note = chemically synthesized
  source 1..20: mol_type = other DNA
ccatctctacaaaattagcc

SEQ ID NO: 5651 - DNA, 20 bp, synthetic construct
  misc_feature 1..20: note = chemically synthesized
  source 1..20: mol_type = other DNA
tctacaaaattagccaggca

SEQ ID NO: 5652 - DNA, 20 bp, synthetic construct
  misc_feature 1..20: note = chemically synthesized
  source 1..20: mol_type = other DNA
acaaaattagccaggcatgg

SEQ ID NO: 5653 - DNA, 20 bp, synthetic construct
  misc_feature 1..20: note = chemically synthesized
  source 1..20: mol_type = other DNA
gtggcatgcacctgtcgtcc

SEQ ID NO: 5654 - DNA, 20 bp, synthetic construct
  misc_feature 1..20: note = chemically synthesized
  source 1..20: mol_type = other DNA
cacctgtcgtcccagctact

SEQ ID NO: 5655 - DNA, 20 bp, synthetic construct
  misc_feature 1..20: note = chemically synthesized
  source 1..20: mol_type = other DNA
acctgtcgtcccagctactc

SEQ ID NO: 5656 - DNA, 20 bp, synthetic construct
  misc_feature 1..20: note = chemically synthesized
  source 1..20: mol_type = other DNA
ctgtcgtcccagctactcag

SEQ ID NO: 5657 - DNA, 20 bp, synthetic construct
  misc_feature 1..20: note = chemically synthesized
  source 1..20: mol_type = other DNA
tgtcgtcccagctactcagg

SEQ ID NO: 5658 - DNA, 20 bp, synthetic construct
  misc_feature 1..20: note = chemically synthesized
  source 1..20: mol_type = other DNA
tcccagctactcaggaggct

SEQ ID NO: 5659 - DNA, 20 bp, synthetic construct
  misc_feature 1..20: note = chemically synthesized
  source 1..20: mol_type = other DNA
cccagctactcaggaggctg

SEQ ID NO: 5660 - DNA, 20 bp, synthetic construct
  misc_feature 1..20: note = chemically synthesized
  source 1..20: mol_type = other DNA
tactcaggaggctgaggtga

SEQ ID NO: 5661 - DNA, 20 bp, synthetic construct
  misc_feature 1..20: note = chemically synthesized
  source 1..20: mol_type = other DNA
actcaggaggctgaggtgac

SEQ ID NO: 5662 - DNA, 20 bp, synthetic construct
  misc_feature 1..20: note = chemically synthesized
  source 1..20: mol_type = other DNA
aggaggctgaggtgacagga

SEQ ID NO: 5663 - DNA, 20 bp, synthetic construct
  misc_feature 1..20: note = chemically synthesized
  source 1..20: mol_type = other DNA
ctgaggtgacaggatggctt

SEQ ID NO: 5664 - DNA, 20 bp, synthetic construct
  misc_feature 1..20: note = chemically synthesized
  source 1..20: mol_type = other DNA
gtgacaggatggcttgagcc

SEQ ID NO: 5665 - DNA, 20 bp, synthetic construct
  misc_feature 1..20: note = chemically synthesized
  source 1..20: mol_type = other DNA
tgacaggatggcttgagcct

SEQ ID NO: 5666 - DNA, 20 bp, synthetic construct
  misc_feature 1..20: note = chemically synthesized
  source 1..20: mol_type = other DNA
acaggatggcttgagcctag

SEQ ID NO: 5667 - DNA, 20 bp, synthetic construct
  misc_feature 1..20: note = chemically synthesized
  source 1..20: mol_type = other DNA
tggcttgagcctaggagatc

SEQ ID NO: 5668 - DNA, 20 bp, synthetic construct
  misc_feature 1..20: note = chemically synthesized
  source 1..20: mol_type = other DNA
ggcttgagcctaggagatca

SEQ ID NO: 5669 - DNA, 20 bp, synthetic construct
  misc_feature 1..20: note = chemically synthesized
  source 1..20: mol_type = other DNA
agcctaggagatcaaggctg

SEQ ID NO: 5670 - DNA, 20 bp, synthetic construct
  misc_feature 1..20: note = chemically synthesized
  source 1..20: mol_type = other DNA
taggagatcaaggctgcagt

SEQ ID NO: 5671 - DNA, 20 bp, synthetic construct
  misc_feature 1..20: note = chemically synthesized
  source 1..20: mol_type = other DNA
atgaacatgccactacactc

SEQ ID NO: 5672 - DNA, 20 bp, synthetic construct
  misc_feature 1..20: note = chemically synthesized
  source 1..20: mol_type = other DNA
catgccactacactctagcc

SEQ ID NO: 5673 - DNA, 20 bp, synthetic construct
  misc_feature 1..20: note = chemically synthesized
  source 1..20: mol_type = other DNA
atgccactacactctagcct

SEQ ID NO: 5674 - DNA, 20 bp, synthetic construct
  misc_feature 1..20: note = chemically synthesized
  source 1..20: mol_type = other DNA
acactctagcctaggcaaca

SEQ ID NO: 5675 - DNA, 20 bp, synthetic construct
  misc_feature 1..20: note = chemically synthesized
  source 1..20: mol_type = other DNA
tctagcctaggcaacacagc

SEQ ID NO: 5676 - DNA, 20 bp, synthetic construct
  misc_feature 1..20: note = chemically synthesized
  source 1..20: mol_type = other DNA
acaaacaaacaaacaaacaa

SEQ ID NO: 5677 - DNA, 20 bp, synthetic construct
  misc_feature 1..20: note = chemically synthesized
  source 1..20: mol_type = other DNA
acaaacaaaagacaactaat

SEQ ID NO: 5678 - DNA, 20 bp, synthetic construct
  misc_feature 1..20: note = chemically synthesized
  source 1..20: mol_type = other DNA
caaacaaaagacaactaatt

SEQ ID NO: 5679 - DNA, 20 bp, synthetic construct
  misc_feature 1..20: note = chemically synthesized
  source 1..20: mol_type = other DNA
caactaattgggctaatgtt

SEQ ID NO: 5680 - DNA, 20 bp, synthetic construct
  misc_feature 1..20: note = chemically synthesized
  source 1..20: mol_type = other DNA
gtttagaataaatgtatttc

SEQ ID NO: 5681 - DNA, 20 bp, synthetic construct
  misc_feature 1..20: note = chemically synthesized
  source 1..20: mol_type = other DNA
tttagaataaatgtatttct

SEQ ID NO: 5682 - DNA, 20 bp, synthetic construct
  misc_feature 1..20: note = chemically synthesized
  source 1..20: mol_type = other DNA
ttagaataaatgtatttcta

SEQ ID NO: 5683 - DNA, 20 bp, synthetic construct
  misc_feature 1..20: note = chemically synthesized
  source 1..20: mol_type = other DNA
gaataaatgtatttctaggg

SEQ ID NO: 5684 - DNA, 20 bp, synthetic construct
  misc_feature 1..20: note = chemically synthesized
  source 1..20: mol_type = other DNA
ttctagggaagaaaaaaact

SEQ ID NO: 5685 - DNA, 20 bp, synthetic construct
  misc_feature 1..20: note = chemically synthesized
  source 1..20: mol_type = other DNA
agggaagaaaaaaacttagt

SEQ ID NO: 5686 - DNA, 20 bp, synthetic construct
  misc_feature 1..20: note = chemically synthesized
  source 1..20: mol_type = other DNA
gggaagaaaaaaacttagtt

SEQ ID NO: 5687 - DNA, 20 bp, synthetic construct
  misc_feature 1..20: note = chemically synthesized
  source 1..20: mol_type = other DNA
cctcccctttttactttttg

SEQ ID NO: 5688 - DNA, 20 bp, synthetic construct
  misc_feature 1..20: note = chemically synthesized
  source 1..20: mol_type = other DNA
ttttactttttgaagcctgc

SEQ ID NO: 5689 - DNA, 20 bp, synthetic construct
  misc_feature 1..20: note = chemically synthesized
  source 1..20: mol_type = other DNA
tttgaagcctgctggaattc

SEQ ID NO: 5690 - DNA, 20 bp, synthetic construct
  misc_feature 1..20: note = chemically synthesized
  source 1..20: mol_type = other DNA
ttgaagcctgctggaattct

SEQ ID NO: 5691 - DNA, 20 bp, synthetic construct
  misc_feature 1..20: note = chemically synthesized
  source 1..20: mol_type = other DNA
ctgctggaattctaggaaaa

SEQ ID NO: 5692 - DNA, 20 bp, synthetic construct
  misc_feature 1..20: note = chemically synthesized
  source 1..20: mol_type = other DNA
ctccttcctcacatactcac

SEQ ID NO: 5693 - DNA, 20 bp, synthetic construct
  misc_feature 1..20: note = chemically synthesized
  source 1..20: mol_type = other DNA
accagtactcatgcgcttct

SEQ ID NO: 5694 - DNA, 20 bp, synthetic construct
  misc_feature 1..20: note = chemically synthesized
  source 1..20: mol_type = other DNA
agacccaaatgctctgctta

SEQ ID NO: 5695 - DNA, 20 bp, synthetic construct
  misc_feature 1..20: note = chemically synthesized
  source 1..20: mol_type = other DNA
cccaaatgctctgcttatgg

SEQ ID NO: 5696 - DNA, 20 bp, synthetic construct
  misc_feature 1..20: note = chemically synthesized
  source 1..20: mol_type = other DNA
tatggtggataaccccatct

SEQ ID NO: 5697 - DNA, 20 bp, synthetic construct
  misc_feature 1..20: note = chemically synthesized
  source 1..20: mol_type = other DNA
ggtggataaccccatctcag

SEQ ID NO: 5698 - DNA, 20 bp, synthetic construct
  misc_feature 1..20: note = chemically synthesized
  source 1..20: mol_type = other DNA
gtggataaccccatctcagt

SEQ ID NO: 5699 - DNA, 20 bp, synthetic construct
  misc_feature 1..20: note = chemically synthesized
  source 1..20: mol_type = other DNA
taccaacttctataaaatct

SEQ ID NO: 5700 - DNA, 20 bp, synthetic construct
  misc_feature 1..20: note = chemically synthesized
  source 1..20: mol_type = other DNA
ctataaaatctcagaataca

SEQ ID NO: 5701 - DNA, 20 bp, synthetic construct
  misc_feature 1..20: note = chemically synthesized
  source 1..20: mol_type = other DNA
tataaaatctcagaatacaa

SEQ ID NO: 5702 - DNA, 20 bp, synthetic construct
  misc_feature 1..20: note = chemically synthesized
  source 1..20: mol_type = other DNA
ataaaatctcagaatacaaa

SEQ ID NO: 5703 - DNA, 20 bp, synthetic construct
  misc_feature 1..20: note = chemically synthesized
  source 1..20: mol_type = other DNA
catttccctgaaatgtactt

SEQ ID NO: 5704 - DNA, 20 bp, synthetic construct
  misc_feature 1..20: note = chemically synthesized
  source 1..20: mol_type = other DNA
gtactttggtgctaccctga

SEQ ID NO: 5705 - DNA, 20 bp, synthetic construct
  misc_feature 1..20: note = chemically synthesized
  source 1..20: mol_type = other DNA
tttggtgctaccctgaaaga

SEQ ID NO: 5706 - DNA, 20 bp, synthetic construct
  misc_feature 1..20: note = chemically synthesized
  source 1..20: mol_type = other DNA
gtgctaccctgaaagacggc

SEQ ID NO: 5707 - DNA, 20 bp, synthetic construct
  misc_feature 1..20: note = chemically synthesized
  source 1..20: mol_type = other DNA
gctaccctgaaagacggcta

SEQ ID NO: 5708 - DNA, 20 bp, synthetic construct
  misc_feature 1..20: note = chemically synthesized
  source 1..20: mol_type = other DNA
tgaaagacggctagagtctt

SEQ ID NO: 5709 - DNA, 20 bp, synthetic construct
  misc_feature 1..20: note = chemically synthesized
  source 1..20: mol_type = other DNA
gaaagacggctagagtcttg

SEQ ID NO: 5710 - DNA, 20 bp, synthetic construct
  misc_feature 1..20: note = chemically synthesized
  source 1..20: mol_type = other DNA
aagacggctagagtcttgag

SEQ ID NO: 5711 - DNA, 20 bp, synthetic construct
  misc_feature 1..20: note = chemically synthesized
  source 1..20: mol_type = other DNA
gagtcttgaggagacccaaa

SEQ ID NO: 5712 - DNA, 20 bp, synthetic construct
  misc_feature 1..20: note = chemically synthesized
  source 1..20: mol_type = other DNA
tgaggagacccaaacagtta

SEQ ID NO: 5713 - DNA, 20 bp, synthetic construct
  misc_feature 1..20: note = chemically synthesized
  source 1..20: mol_type = other DNA
gaggagacccaaacagttaa

SEQ ID NO: 5714 - DNA, 20 bp, synthetic construct
  misc_feature 1..20: note = chemically synthesized
  source 1..20: mol_type = other DNA
acccaaacagttaaaggtta

SEQ ID NO: 5715 - DNA, 20 bp, synthetic construct
  misc_feature 1..20: note = chemically synthesized
  source 1..20: mol_type = other DNA
aaacagttaaaggttacaga

SEQ ID NO: 5716 - DNA, 20 bp, synthetic construct
  misc_feature 1..20: note = chemically synthesized
  source 1..20: mol_type = other DNA
ttaaaggttacagacagact

SEQ ID NO: 5717 - DNA, 20 bp, synthetic construct
  misc_feature 1..20: note = chemically synthesized
  source 1..20: mol_type = other DNA
agacagacttggttccactc

SEQ ID NO: 5718 - DNA, 20 bp, synthetic construct
  misc_feature 1..20: note = chemically synthesized
  source 1..20: mol_type = other DNA
cagacttggttccactccag

SEQ ID NO: 5719 - DNA, 20 bp, synthetic construct
  misc_feature 1..20: note = chemically synthesized
  source 1..20: mol_type = other DNA
acttggttccactccagtgg

SEQ ID NO: 5720 - DNA, 20 bp, synthetic construct
  misc_feature 1..20: note = chemically synthesized
  source 1..20: mol_type = other DNA
cttggttccactccagtggt

SEQ ID NO: 5721 - DNA, 20 bp, synthetic construct
  misc_feature 1..20: note = chemically synthesized
  source 1..20: mol_type = other DNA
tgttttgttttgtttcgctt

SEQ ID NO: 5722 - DNA, 20 bp, synthetic construct
  misc_feature 1..20: note = chemically synthesized
  source 1..20: mol_type = other DNA
tgtttcgctttagctttatt

SEQ ID NO: 5723 - DNA, 20 bp, synthetic construct
  misc_feature 1..20: note = chemically synthesized
  source 1..20: mol_type = other DNA
gtttcgctttagctttatta

SEQ ID NO: 5724 - DNA, 20 bp, synthetic construct
  misc_feature 1..20: note = chemically synthesized
  source 1..20: mol_type = other DNA
gtatactttacatacaacaa

SEQ ID NO: 5725 - DNA, 20 bp, synthetic construct
  misc_feature 1..20: note = chemically synthesized
  source 1..20: mol_type = other DNA
caacaaaagtcattcatttt

SEQ ID NO: 5726 - DNA, 20 bp, synthetic construct
  misc_feature 1..20: note = chemically synthesized
  source 1..20: mol_type = other DNA
agtcattcattttaagtgta

SEQ ID NO: 5727 - DNA, 20 bp, synthetic construct
  misc_feature 1..20: note = chemically synthesized
  source 1..20: mol_type = other DNA
attcattttaagtgtacagt

SEQ ID NO: 5728 - DNA, 20 bp, synthetic construct
  misc_feature 1..20: note = chemically synthesized
  source 1..20: mol_type = other DNA
tacagttggattcaatttgc

SEQ ID NO: 5729 - DNA, 20 bp, synthetic construct
  misc_feature 1..20: note = chemically synthesized
  source 1..20: mol_type = other DNA
ttcaatttgccagttgtata

SEQ ID NO: 5730 - DNA, 20 bp, synthetic construct
  misc_feature 1..20: note = chemically synthesized
  source 1..20: mol_type = other DNA
gccagttgtatacagctgtg

SEQ ID NO: 5731 - DNA, 20 bp, synthetic construct
  misc_feature 1..20: note = chemically synthesized
  source 1..20: mol_type = other DNA
gtgtggcctccaccaaaatc

SEQ ID NO: 5732 - DNA, 20 bp, synthetic construct
  misc_feature 1..20: note = chemically synthesized
  source 1..20: mol_type = other DNA
cctccaccaaaatcaagata

SEQ ID NO: 5733 - DNA, 20 bp, synthetic construct
  misc_feature 1..20: note = chemically synthesized
  source 1..20: mol_type = other DNA
aagatacagaacacgtccac

SEQ ID NO: 5734 - DNA, 20 bp, synthetic construct
  misc_feature 1..20: note = chemically synthesized
  source 1..20: mol_type = other DNA
acagaacacgtccaccagtc

SEQ ID NO: 5735 - DNA, 20 bp, synthetic construct
  misc_feature 1..20: note = chemically synthesized
  source 1..20: mol_type = other DNA
aacacgtccaccagtctaga

SEQ ID NO: 5736 - DNA, 20 bp, synthetic construct
  misc_feature 1..20: note = chemically synthesized
  source 1..20: mol_type = other DNA
tgaacccccacctaccacca

SEQ ID NO: 5737 - DNA, 20 bp, synthetic construct
  misc_feature 1..20: note = chemically synthesized
  source 1..20: mol_type = other DNA
ccacctaccaccacagtgtt

SEQ ID NO: 5738 - DNA, 20 bp, synthetic construct
  misc_feature 1..20: note = chemically synthesized
  source 1..20: mol_type = other DNA
caccacagtgttgagaattc

SEQ ID NO: 5739 - DNA, 20 bp, synthetic construct
  misc_feature 1..20: note = chemically synthesized
  source 1..20: mol_type = other DNA
attctagaatttgttacaaa

SEQ ID NO: 5740 - DNA, 20 bp, synthetic construct
  misc_feature 1..20: note = chemically synthesized
  source 1..20: mol_type = other DNA
ttgttacaaatggactcata

SEQ ID NO: 5741 - DNA, 20 bp, synthetic construct
  misc_feature 1..20: note = chemically synthesized
  source 1..20: mol_type = other DNA
tgttacaaatggactcatac

SEQ ID NO: 5742 - DNA, 20 bp, synthetic construct
  misc_feature 1..20: note = chemically synthesized
  source 1..20: mol_type = other DNA
tttgtgtttaatttcttcca

SEQ ID NO: 5743 - DNA, 20 bp, synthetic construct
  misc_feature 1..20: note = chemically synthesized
  source 1..20: mol_type = other DNA
tgtgtttaatttcttccaca

SEQ ID NO: 5744 - DNA, 20 bp, synthetic construct
  misc_feature 1..20: note = chemically synthesized
  source 1..20: mol_type = other DNA
gtttaatttcttccacagag

SEQ ID NO: 5745 - DNA, 20 bp, synthetic construct
  misc_feature 1..20: note = chemically synthesized
  source 1..20: mol_type = other DNA
tccacagagcagaatgattc

SEQ ID NO: 5746 - DNA, 20 bp, synthetic construct
  misc_feature 1..20: note = chemically synthesized
  source 1..20: mol_type = other DNA
ccacagagcagaatgattct

SEQ ID NO: 5747 - DNA, 20 bp, synthetic construct
  misc_feature 1..20: note = chemically synthesized
  source 1..20: mol_type = other DNA
atgattctgggattcatcca

SEQ ID NO: 5748 - DNA, 20 bp, synthetic construct
  misc_feature 1..20: note = chemically synthesized
  source 1..20: mol_type = other DNA
tctgggattcatccatggtg

SEQ ID NO: 5749 - DNA, 20 bp, synthetic construct
  misc_feature 1..20: note = chemically synthesized
  source 1..20: mol_type = other DNA
tgggattcatccatggtgtg

SEQ ID NO: 5750 - DNA, 20 bp, synthetic construct
  misc_feature 1..20: note = chemically synthesized
  source 1..20: mol_type = other DNA
tctttcattcttctactgtt

SEQ ID NO: 5751 - DNA, 20 bp, synthetic construct
  misc_feature 1..20: note = chemically synthesized
  source 1..20: mol_type = other DNA
tgttgagttgtattccacca

SEQ ID NO: 5752 - DNA, 20 bp, synthetic construct
  misc_feature 1..20: note = chemically synthesized
  source 1..20: mol_type = other DNA
gttgagttgtattccaccat

SEQ ID NO: 5753 - DNA, 20 bp, synthetic construct
  misc_feature 1..20: note = chemically synthesized
  source 1..20: mol_type = other DNA
ttgagttgtattccaccata

SEQ ID NO: 5754 - DNA, 20 bp, synthetic construct
  misc_feature 1..20: note = chemically synthesized
  source 1..20: mol_type = other DNA
cgtttatccattcaacctat

SEQ ID NO: 5755 - DNA, 20 bp, synthetic construct
  misc_feature 1..20: note = chemically synthesized
  source 1..20: mol_type = other DNA
tcaacctattggttgccatg

SEQ ID NO: 5756 - DNA, 20 bp, synthetic construct
  misc_feature 1..20: note = chemically synthesized
  source 1..20: mol_type = other DNA
caacctattggttgccatgt

SEQ ID NO: 5757 - DNA, 20 bp, synthetic construct
  misc_feature 1..20: note = chemically synthesized
  source 1..20: mol_type = other DNA
cactttttgaccactatgaa

SEQ ID NO: 5758 - DNA, 20 bp, synthetic construct
  misc_feature 1..20: note = chemically synthesized
  source 1..20: mol_type = other DNA
cactatgaacagtgctacaa

SEQ ID NO: 5759 - DNA, 20 bp, synthetic construct
  misc_feature 1..20: note = chemically synthesized
  source 1..20: mol_type = other DNA
gtgctacaatggacactgtg

SEQ ID NO: 5760 - DNA, 20 bp, synthetic construct
  misc_feature 1..20: note = chemically synthesized
  source 1..20: mol_type = other DNA
acactgtgtagatgtgttta

SEQ ID NO: 5761 - DNA, 20 bp, synthetic construct
  misc_feature 1..20: note = chemically synthesized
  source 1..20: mol_type = other DNA
cactgtgtagatgtgtttat

SEQ ID NO: 5762 - DNA, 20 bp, synthetic construct
  misc_feature 1..20: note = chemically synthesized
  source 1..20: mol_type = other DNA
atgtatgtctacatttctct

SEQ ID NO: 5763 - DNA, 20 bp, synthetic construct
  misc_feature 1..20: note = chemically synthesized
  source 1..20: mol_type = other DNA
tgtatgtctacatttctctt

SEQ ID NO: 5764 - DNA, 20 bp, synthetic construct
  misc_feature 1..20: note = chemically synthesized
  source 1..20: mol_type = other DNA
tttctcttaggtaaacatct

SEQ ID NO: 5765 - DNA, 20 bp, synthetic construct
  misc_feature 1..20: note = chemically synthesized
  source 1..20: mol_type = other DNA
ttctcttaggtaaacatcta

SEQ ID NO: 5766 - DNA, 20 bp, synthetic construct
  misc_feature 1..20: note = chemically synthesized
  source 1..20: mol_type = other DNA
gtaaacatctaaggcatttc

SEQ ID NO: 5767 - DNA, 20 bp, synthetic construct
  misc_feature 1..20: note = chemically synthesized
  source 1..20: mol_type = other DNA
tctaaggcatttcgagaaca

SEQ ID NO: 5768 - DNA, 20 bp, synthetic construct
  misc_feature 1..20: note = chemically synthesized
  source 1..20: mol_type = other DNA
ggcatttcgagaacacagaa

SEQ ID NO: 5769 - DNA, 20 bp, synthetic construct
  misc_feature 1..20: note = chemically synthesized
  source 1..20: mol_type = other DNA
gcatttcgagaacacagaaa

SEQ ID NO: 5770 - DNA, 20 bp, synthetic construct
  misc_feature 1..20: note = chemically synthesized
  source 1..20: mol_type = other DNA
gagaacacagaaaaggtttt

SEQ ID NO: 5771 - DNA, 20 bp, synthetic construct
  misc_feature 1..20: note = chemically synthesized
  source 1..20: mol_type = other DNA
acagaaaaggttttgagttt

SEQ ID NO: 5772 - DNA, 20 bp, synthetic construct
  misc_feature 1..20: note = chemically synthesized
  source 1..20: mol_type = other DNA
aaaggttttgagtttgagtc

SEQ ID NO: 5773 - DNA, 20 bp, synthetic construct
  misc_feature 1..20: note = chemically synthesized
  source 1..20: mol_type = other DNA
aaggttttgagtttgagtcc

SEQ ID NO: 5774 - DNA, 20 bp, synthetic construct
  misc_feature 1..20: note = chemically synthesized
  source 1..20: mol_type = other DNA
aggttttgagtttgagtcca

SEQ ID NO: 5775 - DNA, 20 bp, synthetic construct
  misc_feature 1..20: note = chemically synthesized
  source 1..20: mol_type = other DNA
gttttgagtttgagtccagg

SEQ ID NO: 5776 - DNA, 20 bp, synthetic construct
  misc_feature 1..20: note = chemically synthesized
  source 1..20: mol_type = other DNA
gccctcattttgtcatcctc

SEQ ID NO: 5777 - DNA, 20 bp, synthetic construct
  misc_feature 1..20: note = chemically synthesized
  source 1..20: mol_type = other DNA
ccctcattttgtcatcctcc

SEQ ID NO: 5778 - DNA, 20 bp, synthetic construct
  misc_feature 1..20: note = chemically synthesized
  source 1..20: mol_type = other DNA
ccccctcccaccccattccc

SEQ ID NO: 5779 - DNA, 20 bp, synthetic construct
  misc_feature 1..20: note = chemically synthesized
  source 1..20: mol_type = other DNA
ccctcccaccccattccctg

SEQ ID NO: 5780 - DNA, 20 bp, synthetic construct
  misc_feature 1..20: note = chemically synthesized
  source 1..20: mol_type = other DNA
ctcccaccccattccctgga

SEQ ID NO: 5781 - DNA, 20 bp, synthetic construct
  misc_feature 1..20: note = chemically synthesized
  source 1..20: mol_type = other DNA
caactccaaaccctatatcc

SEQ ID NO: 5782 - DNA, 20 bp, synthetic construct
  misc_feature 1..20: note = chemically synthesized
  source 1..20: mol_type = other DNA
ctatatcccagctatctgtt

SEQ ID NO: 5783 - DNA, 20 bp, synthetic construct
  misc_feature 1..20: note = chemically synthesized
  source 1..20: mol_type = other DNA
tcccagctatctgtttggct

SEQ ID NO: 5784 - DNA, 20 bp, synthetic construct
  misc_feature 1..20: note = chemically synthesized
  source 1..20: mol_type = other DNA
aaatgtcatcctattccgaa

SEQ ID NO: 5785 - DNA, 20 bp, synthetic construct
  misc_feature 1..20: note = chemically synthesized
  source 1..20: mol_type = other DNA
agaaacctctccactacact

SEQ ID NO: 5786 - DNA, 20 bp, synthetic construct
  misc_feature 1..20: note = chemically synthesized
  source 1..20: mol_type = other DNA
gaaacctctccactacacta

SEQ ID NO: 5787 - DNA, 20 bp, synthetic construct
  misc_feature 1..20: note = chemically synthesized
  source 1..20: mol_type = other DNA
ccactacactaaggaaatga

SEQ ID NO: 5788 - DNA, 20 bp, synthetic construct
  misc_feature 1..20: note = chemically synthesized
  source 1..20: mol_type = other DNA
cactacactaaggaaatgat

SEQ ID NO: 5789 - DNA, 20 bp, synthetic construct
  misc_feature 1..20: note = chemically synthesized
  source 1..20: mol_type = other DNA
tacactaaggaaatgatggg

SEQ ID NO: 5790 - DNA, 20 bp, synthetic construct
  misc_feature 1..20: note = chemically synthesized
  source 1..20: mol_type = other DNA
cactaaggaaatgatgggaa

SEQ ID NO: 5791 - DNA, 20 bp, synthetic construct
  misc_feature 1..20: note = chemically synthesized
  source 1..20: mol_type = other DNA
accccaaaacattcttaaaa

SEQ ID NO: 5792 - DNA, 20 bp, synthetic construct
  misc_feature 1..20: note = chemically synthesized
  source 1..20: mol_type = other DNA
ccccaaaacattcttaaaat

SEQ ID NO: 5793 - DNA, 20 bp, synthetic construct
  misc_feature 1..20: note = chemically synthesized
  source 1..20: mol_type = other DNA
aaatgggcattcatttgaat

SEQ ID NO: 5794 - DNA, 20 bp, synthetic construct
  misc_feature 1..20: note = chemically synthesized
  source 1..20: mol_type = other DNA
aatgggcattcatttgaatc

SEQ ID NO: 5795 - DNA, 20 bp, synthetic construct
  misc_feature 1..20: note = chemically synthesized
  source 1..20: mol_type = other DNA
ttgaatcaggccaaataaat

SEQ ID NO: 5796 - DNA, 20 bp, synthetic construct
  misc_feature 1..20: note = chemically synthesized
  source 1..20: mol_type = other DNA
aggccaaataaattggactc

SEQ ID NO: 5797 - DNA, 20 bp, synthetic construct
  misc_feature 1..20: note = chemically synthesized
  source 1..20: mol_type = other DNA
ggccaaataaattggactct

SEQ ID NO: 5798 - DNA, 20 bp, synthetic construct
  misc_feature 1..20: note = chemically synthesized
  source 1..20: mol_type = other DNA
aaataaattggactctgggt

SEQ ID NO: 5799 - DNA, 20 bp, synthetic construct
  misc_feature 1..20: note = chemically synthesized
  source 1..20: mol_type = other DNA
ataaattggactctgggtca

SEQ ID NO: 5800 - DNA, 20 bp, synthetic construct
  misc_feature 1..20: note = chemically synthesized
  source 1..20: mol_type = other DNA
ctctgggtcagagataactt

SEQ ID NO: 5801 - DNA, 20 bp, synthetic construct
  misc_feature 1..20: note = chemically synthesized
  source 1..20: mol_type = other DNA
ggtcagagataacttaagtg

SEQ ID NO: 5802 - DNA, 20 bp, synthetic construct
  misc_feature 1..20: note = chemically synthesized
  source 1..20: mol_type = other DNA
gataacttaagtgtggtgtt

SEQ ID NO: 5803 - DNA, 20 bp, synthetic construct
  misc_feature 1..20: note = chemically synthesized
  source 1..20: mol_type = other DNA
taacttaagtgtggtgttcg

SEQ ID NO: 5804 - DNA, 20 bp, synthetic construct
  misc_feature 1..20: note = chemically synthesized
  source 1..20: mol_type = other DNA
agtgtggtgttcggagtcct

SEQ ID NO: 5805 - DNA, 20 bp, synthetic construct
  misc_feature 1..20: note = chemically synthesized
  source 1..20: mol_type = other DNA
tgtggtgttcggagtcctaa

SEQ ID NO: 5806 - DNA, 20 bp, synthetic construct
  misc_feature 1..20: note = chemically synthesized
  source 1..20: mol_type = other DNA
ggagtcctaagagcccccac

SEQ ID NO: 5807 - DNA, 20 bp, synthetic construct
  misc_feature 1..20: note = chemically synthesized
  source 1..20: mol_type = other DNA
cctaagagcccccactagct

SEQ ID NO: 5808 - DNA, 20 bp, synthetic construct
  misc_feature 1..20: note = chemically synthesized
  source 1..20: mol_type = other DNA
agcccccactagctcagaaa

SEQ ID NO: 5809 - DNA, 20 bp, synthetic construct
  misc_feature 1..20: note = chemically synthesized
  source 1..20: mol_type = other DNA
cactagctcagaaatggact

SEQ ID NO: 5810 - DNA, 20 bp, synthetic construct
  misc_feature 1..20: note = chemically synthesized
  source 1..20: mol_type = other DNA
acttagttgacctcccccat

SEQ ID NO: 5811 - DNA, 20 bp, synthetic construct
  misc_feature 1..20: note = chemically synthesized
  source 1..20: mol_type = other DNA
tagttgacctcccccattag

SEQ ID NO: 5812 - DNA, 20 bp, synthetic construct
  misc_feature 1..20: note = chemically synthesized
  source 1..20: mol_type = other DNA
gacctcccccattagcagca

SEQ ID NO: 5813 - DNA, 20 bp, synthetic construct
  misc_feature 1..20: note = chemically synthesized
  source 1..20: mol_type = other DNA
cctcccccattagcagcatg

SEQ ID NO: 5814 - DNA, 20 bp, synthetic construct
  misc_feature 1..20: note = chemically synthesized
  source 1..20: mol_type = other DNA
tcccccattagcagcatgga

SEQ ID NO: 5815 - DNA, 20 bp, synthetic construct
  misc_feature 1..20: note = chemically synthesized
  source 1..20: mol_type = other DNA
cattagcagcatggagagtc

SEQ ID NO: 5816 - DNA, 20 bp, synthetic construct
  misc_feature 1..20: note = chemically synthesized
  source 1..20: mol_type = other DNA
attagcagcatggagagtca

SEQ ID NO: 5817 - DNA, 20 bp, synthetic construct
  misc_feature 1..20: note = chemically synthesized
  source 1..20: mol_type = other DNA
tagcagcatggagagtcaag

SEQ ID NO: 5818 - DNA, 20 bp, synthetic construct
  misc_feature 1..20: note = chemically synthesized
  source 1..20: mol_type = other DNA
agatgacttctaccttgcca

SEQ ID NO: 5819 - DNA, 20 bp, synthetic construct
  misc_feature 1..20: note = chemically synthesized
  source 1..20: mol_type = other DNA
gatgacttctaccttgccaa

SEQ ID NO: 5820 - DNA, 20 bp, synthetic construct
  misc_feature 1..20: note = chemically synthesized
  source 1..20: mol_type = other DNA
ttctaccttgccaaaggcct

SEQ ID NO: 5821 - DNA, 20 bp, synthetic construct
  misc_feature 1..20: note = chemically synthesized
  source 1..20: mol_type = other DNA
tctaccttgccaaaggcctt

SEQ ID NO: 5822 - DNA, 20 bp, synthetic construct
  misc_feature 1..20: note = chemically synthesized
  source 1..20: mol_type = other DNA
accttgccaaaggccttggg

SEQ ID NO: 5823 - DNA, 20 bp, synthetic construct
  misc_feature 1..20: note = chemically synthesized
  source 1..20: mol_type = other DNA
tgccaaaggccttgggaaga

SEQ ID NO: 5824 - DNA, 20 bp, synthetic construct
  misc_feature 1..20: note = chemically synthesized
  source 1..20: mol_type = other DNA
aaaggccttgggaagaaaga

SEQ ID NO: 5825 - DNA, 20 bp, synthetic construct
  misc_feature 1..20: note = chemically synthesized
  source 1..20: mol_type = other DNA
ttgggaagaaagacagcatc

SEQ ID NO: 5826 - DNA, 20 bp, synthetic construct
  misc_feature 1..20: note = chemically synthesized
  source 1..20: mol_type = other DNA
tgggaagaaagacagcatca

SEQ ID NO: 5827 - DNA, 20 bp, synthetic construct
  misc_feature 1..20: note = chemically synthesized
  source 1..20: mol_type = other DNA
caaggtctcacacaacactc

SEQ ID NO: 5828 - DNA, 20 bp, synthetic construct
  misc_feature 1..20: note = chemically synthesized
  source 1..20: mol_type = other DNA
aaggtctcacacaacactcc

SEQ ID NO: 5829 - DNA, 20 bp, synthetic construct
  misc_feature 1..20: note = chemically synthesized
  source 1..20: mol_type = other DNA
aggtctcacacaacactcca

SEQ ID NO: 5830 - DNA, 20 bp, synthetic construct
  misc_feature 1..20: note = chemically synthesized
  source 1..20: mol_type = other DNA
gtctcacacaacactccagg

SEQ ID NO: 5831 - DNA, 20 bp, synthetic construct
  misc_feature 1..20: note = chemically synthesized
  source 1..20: mol_type = other DNA
tctcacacaacactccaggg

SEQ ID NO: 5832 - DNA, 20 bp, synthetic construct
  misc_feature 1..20: note = chemically synthesized
  source 1..20: mol_type = other DNA
cacacaacactccagggagg

SEQ ID NO: 5833 - DNA, 20 bp, synthetic construct
  misc_feature 1..20: note = chemically synthesized
  source 1..20: mol_type = other DNA
ccagggaggcagctgctgcc

SEQ ID NO: 5834 - DNA, 20 bp, synthetic construct
  misc_feature 1..20: note = chemically synthesized
  source 1..20: mol_type = other DNA
gcagctgctgcccagtgctg

SEQ ID NO: 5835 - DNA, 20 bp, synthetic construct
  misc_feature 1..20: note = chemically synthesized
  source 1..20: mol_type = other DNA
ctgctgcccagtgctgtgga

SEQ ID NO: 5836 - DNA, 20 bp, synthetic construct
  misc_feature 1..20: note = chemically synthesized
  source 1..20: mol_type = other DNA
gcccagtgctgtggacagca

SEQ ID NO: 5837 - DNA, 20 bp, synthetic construct
  misc_feature 1..20: note = chemically synthesized
  source 1..20: mol_type = other DNA
tgctgtggacagcaaagctt

SEQ ID NO: 5838 - DNA, 20 bp, synthetic construct
  misc_feature 1..20: note = chemically synthesized
  source 1..20: mol_type = other DNA
tggacagcaaagcttcagtg

SEQ ID NO: 5839 - DNA, 20 bp, synthetic construct
  misc_feature 1..20: note = chemically synthesized
  source 1..20: mol_type = other DNA
ggacagcaaagcttcagtgc

SEQ ID NO: 5840 - DNA, 20 bp, synthetic construct
  misc_feature 1..20: note = chemically synthesized
  source 1..20: mol_type = other DNA
aagcttcagtgcaggaaatt

SEQ ID NO: 5841 - DNA, 20 bp, synthetic construct
  misc_feature 1..20: note = chemically synthesized
  source 1..20: mol_type = other DNA
tccccctcccccatcctcat

SEQ ID NO: 5842 - DNA, 20 bp, synthetic construct
  misc_feature 1..20: note = chemically synthesized
  source 1..20: mol_type = other DNA
ctcccccatcctcatcagct

SEQ ID NO: 5843 - DNA, 20 bp, synthetic construct
  misc_feature 1..20: note = chemically synthesized
  source 1..20: mol_type = other DNA
catcctcatcagcttggcca

SEQ ID NO: 5844 - DNA, 20 bp, synthetic construct
  misc_feature 1..20: note = chemically synthesized
  source 1..20: mol_type = other DNA
cctcatcagcttggccatgg

SEQ ID NO: 5845 - DNA, 20 bp, synthetic construct
  misc_feature 1..20: note = chemically synthesized
  source 1..20: mol_type = other DNA
ctcatcagcttggccatggc

SEQ ID NO: 5846 - DNA, 20 bp, synthetic construct
  misc_feature 1..20: note = chemically synthesized
  source 1..20: mol_type = other DNA
tcatcagcttggccatggca

SEQ ID NO: 5847 - DNA, 20 bp, synthetic construct
  misc_feature 1..20: note = chemically synthesized
  source 1..20: mol_type = other DNA
cagcttggccatggcagggc

SEQ ID NO: 5848 - DNA, 20 bp, synthetic construct
  misc_feature 1..20: note = chemically synthesized
  source 1..20: mol_type = other DNA
agcttggccatggcagggct

SEQ ID NO: 5849 - DNA, 20 bp, synthetic construct
  misc_feature 1..20: note = chemically synthesized
  source 1..20: mol_type = other DNA
gcttggccatggcagggctg

SEQ ID NO: 5850 - DNA, 20 bp, synthetic construct
  misc_feature 1..20: note = chemically synthesized
  source 1..20: mol_type = other DNA
cttggccatggcagggctgg

SEQ ID NO: 5851 - DNA, 20 bp, synthetic construct
  misc_feature 1..20: note = chemically synthesized
  source 1..20: mol_type = other DNA
ccatggcagggctgggggat

SEQ ID NO: 5852 - DNA, 20 bp, synthetic construct
  misc_feature 1..20: note = chemically synthesized
  source 1..20: mol_type = other DNA
atggcagggctgggggatca

SEQ ID NO: 5853 - DNA, 20 bp, synthetic construct
  misc_feature 1..20: note = chemically synthesized
  source 1..20: mol_type = other DNA
tggcagggctgggggatcag

SEQ ID NO: 5854 - DNA, 20 bp, synthetic construct
  misc_feature 1..20: note = chemically synthesized
  source 1..20: mol_type = other DNA
gctgggggatcagaggtgaa

SEQ ID NO: 5855 - DNA, 20 bp, synthetic construct
  misc_feature 1..20: note = chemically synthesized
  source 1..20: mol_type = other DNA
ctgggggatcagaggtgaac

SEQ ID NO: 5856 - DNA, 20 bp, synthetic construct
  misc_feature 1..20: note = chemically synthesized
  source 1..20: mol_type = other DNA
ggggatcagaggtgaacagg

SEQ ID NO: 5857 - DNA, 20 bp, synthetic construct
  misc_feature 1..20: note = chemically synthesized
  source 1..20: mol_type = other DNA
gatcagaggtgaacaggaag

SEQ ID NO: 5858 - DNA, 20 bp, synthetic construct
  misc_feature 1..20: note = chemically synthesized
  source 1..20: mol_type = other DNA
cagaggtgaacaggaagcag

SEQ ID NO: 5859 - DNA, 20 bp, synthetic construct
  misc_feature 1..20: note = chemically synthesized
  source 1..20: mol_type = other DNA
agaggtgaacaggaagcaga

SEQ ID NO: 5860 - DNA, 20 bp, synthetic construct
  misc_feature 1..20: note = chemically synthesized
  source 1..20: mol_type = other DNA
acaggaagcagaaggacccc

SEQ ID NO: 5861 - DNA, 20 bp, synthetic construct
  misc_feature 1..20: note = chemically synthesized
  source 1..20: mol_type = other DNA
caggaagcagaaggacccct

SEQ ID NO: 5862 - DNA, 20 bp, synthetic construct
  misc_feature 1..20: note = chemically synthesized
  source 1..20: mol_type = other DNA
aggaagcagaaggacccctg

SEQ ID NO: 5863 - DNA, 20 bp, synthetic construct
  misc_feature 1..20: note = chemically synthesized
  source 1..20: mol_type = other DNA
ggaagcagaaggacccctgg

SEQ ID NO: 5864 - DNA, 20 bp, synthetic construct
  misc_feature 1..20: note = chemically synthesized
  source 1..20: mol_type = other DNA
aagcagaaggacccctgggg

SEQ ID NO: 5865 - DNA, 20 bp, synthetic construct
  misc_feature 1..20: note = chemically synthesized
  source 1..20: mol_type = other DNA
agaaggacccctgggggaga

SEQ ID NO: 5866 - DNA, 20 bp, synthetic construct
  misc_feature 1..20: note = chemically synthesized
  source 1..20: mol_type = other DNA
gaaggacccctgggggagac

SEQ ID NO: 5867 - DNA, 20 bp, synthetic construct
  misc_feature 1..20: note = chemically synthesized
  source 1..20: mol_type = other DNA
aaggacccctgggggagaca

SEQ ID NO: 5868 - DNA, 20 bp, synthetic construct
  misc_feature 1..20: note = chemically synthesized
  source 1..20: mol_type = other DNA
cctgggggagacagggcctc

SEQ ID NO: 5869 - DNA, 20 bp, synthetic construct
  misc_feature 1..20: note = chemically synthesized
  source 1..20: mol_type = other DNA
gggggagacagggcctccag

SEQ ID NO: 5870 - DNA, 20 bp, synthetic construct
  misc_feature 1..20: note = chemically synthesized
  source 1..20: mol_type = other DNA
ggggagacagggcctccagt

SEQ ID NO: 5871 - DNA, 20 bp, synthetic construct
  misc_feature 1..20: note = chemically synthesized
  source 1..20: mol_type = other DNA
gacagggcctccagtgggac

SEQ ID NO: 5872 - DNA, 20 bp, synthetic construct
  misc_feature 1..20: note = chemically synthesized
  source 1..20: mol_type = other DNA
cagggcctccagtgggacca

SEQ ID NO: 5873 - DNA, 20 bp, synthetic construct
  misc_feature 1..20: note = chemically synthesized
  source 1..20: mol_type = other DNA
cctccagtgggaccagagct

SEQ ID NO: 5874 - DNA, 20 bp, synthetic construct
  misc_feature 1..20: note = chemically synthesized
  source 1..20: mol_type = other DNA
ccagtgggaccagagctgag

SEQ ID NO: 5875 - DNA, 20 bp, synthetic construct
  misc_feature 1..20: note = chemically synthesized
  source 1..20: mol_type = other DNA
ggaccagagctgagtggcct

SEQ ID NO: 5876 - DNA, 20 bp, synthetic construct
  misc_feature 1..20: note = chemically synthesized
  source 1..20: mol_type = other DNA
gaccagagctgagtggcctc

SEQ ID NO: 5877 - DNA, 20 bp, synthetic construct
  misc_feature 1..20: note = chemically synthesized
  source 1..20: mol_type = other DNA
cagagctgagtggcctcagg

SEQ ID NO: 5878 - DNA, 20 bp, synthetic construct
  misc_feature 1..20: note = chemically synthesized
  source 1..20: mol_type = other DNA
agctgagtggcctcaggcag

SEQ ID NO: 5879 - DNA, 20 bp, synthetic construct
  misc_feature 1..20: note = chemically synthesized
  source 1..20: mol_type = other DNA
tgagtggcctcaggcagtgg

SEQ ID NO: 5880 - DNA, 20 bp, synthetic construct
  misc_feature 1..20: note = chemically synthesized
  source 1..20: mol_type = other DNA
gtggcctcaggcagtggcgg

SEQ ID NO: 5881 - DNA, 20 bp, synthetic construct
  misc_feature 1..20: note = chemically synthesized
  source 1..20: mol_type = other DNA
gcagtggcggaagctgatta

SEQ ID NO: 5882 - DNA, 20 bp, synthetic construct
  misc_feature 1..20: note = chemically synthesized
  source 1..20: mol_type = other DNA
cagtggcggaagctgattaa

SEQ ID NO: 5883 - DNA, 20 bp, synthetic construct
  misc_feature 1..20: note = chemically synthesized
  source 1..20: mol_type = other DNA
tggcggaagctgattaaagg

SEQ ID NO: 5884 - DNA, 20 bp, synthetic construct
  misc_feature 1..20: note = chemically synthesized
  source 1..20: mol_type = other DNA
ggcggaagctgattaaagga

SEQ ID NO: 5885 - DNA, 20 bp, synthetic construct
  misc_feature 1..20: note = chemically synthesized
  source 1..20: mol_type = other DNA
aagctgattaaaggaaggta

SEQ ID NO: 5886 - DNA, 20 bp, synthetic construct
  misc_feature 1..20: note = chemically synthesized
  source 1..20: mol_type = other DNA
agctgattaaaggaaggtac

SEQ ID NO: 5887 - DNA, 20 bp, synthetic construct
  misc_feature 1..20: note = chemically synthesized
  source 1..20: mol_type = other DNA
gctgattaaaggaaggtacg

SEQ ID NO: 5888 - DNA, 20 bp, synthetic construct
  misc_feature 1..20: note = chemically synthesized
  source 1..20: mol_type = other DNA
tgattaaaggaaggtacggg

SEQ ID NO: 5889 - DNA, 20 bp, synthetic construct
  misc_feature 1..20: note = chemically synthesized
  source 1..20: mol_type = other DNA
ttaaaggaaggtacggggag

SEQ ID NO: 5890 - DNA, 20 bp, synthetic construct
  misc_feature 1..20: note = chemically synthesized
  source 1..20: mol_type = other DNA
aaaggaaggtacggggagtg

SEQ ID NO: 5891 - DNA, 20 bp, synthetic construct
  misc_feature 1..20: note = chemically synthesized
  source 1..20: mol_type = other DNA
aaggaaggtacggggagtgg

SEQ ID NO: 5892 - DNA, 20 bp, synthetic construct
  misc_feature 1..20: note = chemically synthesized
  source 1..20: mol_type = other DNA
aggaaggtacggggagtgga

SEQ ID NO: 5893 - DNA, 20 bp, synthetic construct
  misc_feature 1..20: note = chemically synthesized
  source 1..20: mol_type = other DNA
ggaaggtacggggagtggag

SEQ ID NO: 5894 - DNA, 20 bp, synthetic construct
  misc_feature 1..20: note = chemically synthesized
  source 1..20: mol_type = other DNA
aggtacggggagtggagggg

SEQ ID NO: 5895 - DNA, 20 bp, synthetic construct
  misc_feature 1..20: note = chemically synthesized
  source 1..20: mol_type = other DNA
tacggggagtggaggggaag

SEQ ID NO: 5896 - DNA, 20 bp, synthetic construct
  misc_feature 1..20: note = chemically synthesized
  source 1..20: mol_type = other DNA
agtggaggggaagtggacaa

SEQ ID NO: 5897 - DNA, 20 bp, synthetic construct
  misc_feature 1..20: note = chemically synthesized
  source 1..20: mol_type = other DNA
gaggggaagtggacaaaaga

SEQ ID NO: 5898 - DNA, 20 bp, synthetic construct
  misc_feature 1..20: note = chemically synthesized
  source 1..20: mol_type = other DNA
aggggaagtggacaaaagac

SEQ ID NO: 5899 - DNA, 20 bp, synthetic construct
  misc_feature 1..20: note = chemically synthesized
  source 1..20: mol_type = other DNA
gaagtggacaaaagacagga

SEQ ID NO: 5900 - DNA, 20 bp, synthetic construct
  misc_feature 1..20: note = chemically synthesized
  source 1..20: mol_type = other DNA
aaaagacaggacagccatct

SEQ ID NO: 5901 - DNA, 20 bp, synthetic construct
  misc_feature 1..20: note = chemically synthesized
  source 1..20: mol_type = other DNA
gccatcttagacaacaatgc

SEQ ID NO: 5902 - DNA, 20 bp, synthetic construct
  misc_feature 1..20: note = chemically synthesized
  source 1..20: mol_type = other DNA
ccatcttagacaacaatgca

SEQ ID NO: 5903 - DNA, 20 bp, synthetic construct
  misc_feature 1..20: note = chemically synthesized
  source 1..20: mol_type = other DNA
catcttagacaacaatgcaa

SEQ ID NO: 5904 - DNA, 20 bp, synthetic construct
  misc_feature 1..20: note = chemically synthesized
  source 1..20: mol_type = other DNA
atcttagacaacaatgcaag

SEQ ID NO: 5905 - DNA, 20 bp, synthetic construct
  misc_feature 1..20: note = chemically synthesized
  source 1..20: mol_type = other DNA
tcttagacaacaatgcaagg

SEQ ID NO: 5906 - DNA, 20 bp, synthetic construct
  misc_feature 1..20: note = chemically synthesized
  source 1..20: mol_type = other DNA
ttagacaacaatgcaagggg

SEQ ID NO: 5907 - DNA, 20 bp, synthetic construct
  misc_feature 1..20: note = chemically synthesized
  source 1..20: mol_type = other DNA
aatgcaagggggagaaactg

SEQ ID NO: 5908 - DNA, 20 bp, synthetic construct
  misc_feature 1..20: note = chemically synthesized
  source 1..20: mol_type = other DNA
gggggagaaactgaagaaaa

SEQ ID NO: 5909 - DNA, 20 bp, synthetic construct
  misc_feature 1..20: note = chemically synthesized
  source 1..20: mol_type = other DNA
agaaactgaagaaaacagaa

SEQ ID NO: 5910 - DNA, 20 bp, synthetic construct
  misc_feature 1..20: note = chemically synthesized
  source 1..20: mol_type = other DNA
aaactgaagaaaacagaaca

SEQ ID NO: 5911 - DNA, 20 bp, synthetic construct
  misc_feature 1..20: note = chemically synthesized
  source 1..20: mol_type = other DNA
aacagaacagagaccactac

SEQ ID NO: 5912 - DNA, 20 bp, synthetic construct
  misc_feature 1..20: note = chemically synthesized
  source 1..20: mol_type = other DNA
agaccactactggcaataaa

SEQ ID NO: 5913 - DNA, 20 bp, synthetic construct
  misc_feature 1..20: note = chemically synthesized
  source 1..20: mol_type = other DNA
accactactggcaataaaca

SEQ ID NO: 5914 - DNA, 20 bp, synthetic construct
  misc_feature 1..20: note = chemically synthesized
  source 1..20: mol_type = other DNA
cactactggcaataaacaga

SEQ ID NO: 5915 - DNA, 20 bp, synthetic construct
  misc_feature 1..20: note = chemically synthesized
  source 1..20: mol_type = other DNA
actggcaataaacagagaga

SEQ ID NO: 5916 - DNA, 20 bp, synthetic construct
  misc_feature 1..20: note = chemically synthesized
  source 1..20: mol_type = other DNA
caataaacagagagaaagtg

SEQ ID NO: 5917 - DNA, 20 bp, synthetic construct
  misc_feature 1..20: note = chemically synthesized
  source 1..20: mol_type = other DNA
agagagaaagtgaagcccca

SEQ ID NO: 5918 - DNA, 20 bp, synthetic construct
  misc_feature 1..20: note = chemically synthesized
  source 1..20: mol_type = other DNA
gagagaaagtgaagccccat

SEQ ID NO: 5919 - DNA, 20 bp, synthetic construct
  misc_feature 1..20: note = chemically synthesized
  source 1..20: mol_type = other DNA
gaaagtgaagccccatgggt

SEQ ID NO: 5920 - DNA, 20 bp, synthetic construct
  misc_feature 1..20: note = chemically synthesized
  source 1..20: mol_type = other DNA
aaagtgaagccccatgggtg

SEQ ID NO: 5921 - DNA, 20 bp, synthetic construct
  misc_feature 1..20: note = chemically synthesized
  source 1..20: mol_type = other DNA
gaggcacacctacattactt

SEQ ID NO: 5922 - DNA, 20 bp, synthetic construct
  misc_feature 1..20: note = chemically synthesized
  source 1..20: mol_type = other DNA
ctacattacttaagaaacct

SEQ ID NO: 5923 - DNA, 20 bp, synthetic construct
  misc_feature 1..20: note = chemically synthesized
  source 1..20: mol_type = other DNA
cctgagcacattcttacgcc

SEQ ID NO: 5924 - DNA, 20 bp, synthetic construct
  misc_feature 1..20: note = chemically synthesized
  source 1..20: mol_type = other DNA
ctgagcacattcttacgcct

SEQ ID NO: 5925 - DNA, 20 bp, synthetic construct
  misc_feature 1..20: note = chemically synthesized
  source 1..20: mol_type = other DNA
tgagcacattcttacgccta

SEQ ID NO: 5926 - DNA, 20 bp, synthetic construct
  misc_feature 1..20: note = chemically synthesized
  source 1..20: mol_type = other DNA
agggcaataaatacatcctt

SEQ ID NO: 5927 - DNA, 20 bp, synthetic construct
  misc_feature 1..20: note = chemically synthesized
  source 1..20: mol_type = other DNA
aaatacatccttgagctaca

SEQ ID NO: 5928 - DNA, 20 bp, synthetic construct
  misc_feature 1..20: note = chemically synthesized
  source 1..20: mol_type = other DNA
aatacatccttgagctacac

SEQ ID NO: 5929 - DNA, 20 bp, synthetic construct
  misc_feature 1..20: note = chemically synthesized
  source 1..20: mol_type = other DNA
atccttgagctacacaggct

SEQ ID NO: 5930 - DNA, 20 bp, synthetic construct
  misc_feature 1..20: note = chemically synthesized
  source 1..20: mol_type = other DNA
ttgagctacacaggctaagc

SEQ ID NO: 5931 - DNA, 20 bp, synthetic construct
  misc_feature 1..20: note = chemically synthesized
  source 1..20: mol_type = other DNA
gagctacacaggctaagcaa

SEQ ID NO: 5932 - DNA, 20 bp, synthetic construct
  misc_feature 1..20: note = chemically synthesized
  source 1..20: mol_type = other DNA
tacacaggctaagcaagagt

SEQ ID NO: 5933 - DNA, 20 bp, synthetic construct
  misc_feature 1..20: note = chemically synthesized
  source 1..20: mol_type = other DNA
cacaggctaagcaagagtga

SEQ ID NO: 5934 - DNA, 20 bp, synthetic construct
  misc_feature 1..20: note = chemically synthesized
  source 1..20: mol_type = other DNA
caggctaagcaagagtgaga

SEQ ID NO: 5935 - DNA, 20 bp, synthetic construct
  misc_feature 1..20: note = chemically synthesized
  source 1..20: mol_type = other DNA
aggctaagcaagagtgagag

SEQ ID NO: 5936 - DNA, 20 bp, synthetic construct
  misc_feature 1..20: note = chemically synthesized
  source 1..20: mol_type = other DNA
ggctaagcaagagtgagaga

SEQ ID NO: 5937 - DNA, 20 bp, synthetic construct
  misc_feature 1..20: note = chemically synthesized
  source 1..20: mol_type = other DNA
gtgagagagggtgatgctga

SEQ ID NO: 5938 - DNA, 20 bp, synthetic construct
  misc_feature 1..20: note = chemically synthesized
  source 1..20: mol_type = other DNA
tgagagagggtgatgctgac

SEQ ID NO: 5939 - DNA, 20 bp, synthetic construct
  misc_feature 1..20: note = chemically synthesized
  source 1..20: mol_type = other DNA
ggtgatgctgacaggccaca

SEQ ID NO: 5940 - DNA, 20 bp, synthetic construct
  misc_feature 1..20: note = chemically synthesized
  source 1..20: mol_type = other DNA
gtgatgctgacaggccacat

SEQ ID NO: 5941 - DNA, 20 bp, synthetic construct
  misc_feature 1..20: note = chemically synthesized
  source 1..20: mol_type = other DNA
gatgctgacaggccacatgg

SEQ ID NO: 5942 - DNA, 20 bp, synthetic construct
  misc_feature 1..20: note = chemically synthesized
  source 1..20: mol_type = other DNA
tgctgacaggccacatggga

SEQ ID NO: 5943 - DNA, 20 bp, synthetic construct
  misc_feature 1..20: note = chemically synthesized
  source 1..20: mol_type = other DNA
tgacaggccacatgggagag

SEQ ID NO: 5944 - DNA, 20 bp, synthetic construct
  misc_feature 1..20: note = chemically synthesized
  source 1..20: mol_type = other DNA
gacaggccacatgggagagt

SEQ ID NO: 5945 - DNA, 20 bp, synthetic construct
  misc_feature 1..20: note = chemically synthesized
  source 1..20: mol_type = other DNA
aggccacatgggagagtggg

SEQ ID NO: 5946 - DNA, 20 bp, synthetic construct
  misc_feature 1..20: note = chemically synthesized
  source 1..20: mol_type = other DNA
catgggagagtgggaagacg

SEQ ID NO: 5947 - DNA, 20 bp, synthetic construct
  misc_feature 1..20: note = chemically synthesized
  source 1..20: mol_type = other DNA
atgggagagtgggaagacgt

SEQ ID NO: 5948 - DNA, 20 bp, synthetic construct
  misc_feature 1..20: note = chemically synthesized
  source 1..20: mol_type = other DNA
gagagtgggaagacgtgggc

SEQ ID NO: 5949 - DNA, 20 bp, synthetic construct
  misc_feature 1..20: note = chemically synthesized
  source 1..20: mol_type = other DNA
agagtgggaagacgtgggct

SEQ ID NO: 5950 - DNA, 20 bp, synthetic construct
  misc_feature 1..20: note = chemically synthesized
  source 1..20: mol_type = other DNA
agtgggaagacgtgggctgg

SEQ ID NO: 5951 - DNA, 20 bp, synthetic construct
  misc_feature 1..20: note = chemically synthesized
  source 1..20: mol_type = other DNA
ggaagacgtgggctgggagc

SEQ ID NO: 5952 - DNA, 20 bp, synthetic construct
  misc_feature 1..20: note = chemically synthesized
  source 1..20: mol_type = other DNA
gaagacgtgggctgggagct

SEQ ID NO: 5953 - DNA, 20 bp, synthetic construct
  misc_feature 1..20: note = chemically synthesized
  source 1..20: mol_type = other DNA
agacgtgggctgggagctgg

SEQ ID NO: 5954 - DNA, 20 bp, synthetic construct
  misc_feature 1..20: note = chemically synthesized
  source 1..20: mol_type = other DNA
tgggctgggagctgggagtt

SEQ ID NO: 5955 - DNA, 20 bp, synthetic construct
  misc_feature 1..20: note = chemically synthesized
  source 1..20: mol_type = other DNA
tttggcttctcatctgtgca

SEQ ID NO: 5956 - DNA, 20 bp, synthetic construct
  misc_feature 1..20: note = chemically synthesized
  source 1..20: mol_type = other DNA
tctgtgcatggcctctaaac

SEQ ID NO: 5957 - DNA, 20 bp, synthetic construct
  misc_feature 1..20: note = chemically synthesized
  source 1..20: mol_type = other DNA
ctgtgcatggcctctaaact

SEQ ID NO: 5958 - DNA, 20 bp, synthetic construct
  misc_feature 1..20: note = chemically synthesized
  source 1..20: mol_type = other DNA
tgcatggcctctaaactggg

SEQ ID NO: 5959 - DNA, 20 bp, synthetic construct
  misc_feature 1..20: note = chemically synthesized
  source 1..20: mol_type = other DNA
tctaaactgggcagtgacca

SEQ ID NO: 5960 - DNA, 20 bp, synthetic construct
  misc_feature 1..20: note = chemically synthesized
  source 1..20: mol_type = other DNA
actgggcagtgaccatggcc

SEQ ID NO: 5961 - DNA, 20 bp, synthetic construct
  misc_feature 1..20: note = chemically synthesized
  source 1..20: mol_type = other DNA
gcctggtcacctccccactc

SEQ ID NO: 5962 - DNA, 20 bp, synthetic construct
  misc_feature 1..20: note = chemically synthesized
  source 1..20: mol_type = other DNA
tcacctccccactctggacc

SEQ ID NO: 5963 - DNA, 20 bp, synthetic construct
  misc_feature 1..20: note = chemically synthesized
  source 1..20: mol_type = other DNA
cacctccccactctggacct

SEQ ID NO: 5964 - DNA, 20 bp, synthetic construct
  misc_feature 1..20: note = chemically synthesized
  source 1..20: mol_type = other DNA
tgggttgcccctctgtaaac

SEQ ID NO: 5965 - DNA, 20 bp, synthetic construct
  misc_feature 1..20: note = chemically synthesized
  source 1..20: mol_type = other DNA
gggttgcccctctgtaaaca

SEQ ID NO: 5966 - DNA, 20 bp, synthetic construct
  misc_feature 1..20: note = chemically synthesized
  source 1..20: mol_type = other DNA
gttgcccctctgtaaacaag

SEQ ID NO: 5967 - DNA, 20 bp, synthetic construct
  misc_feature 1..20: note = chemically synthesized
  source 1..20: mol_type = other DNA
ttgcccctctgtaaacaagg

SEQ ID NO: 5968 - DNA, 20 bp, synthetic construct
  misc_feature 1..20: note = chemically synthesized
  source 1..20: mol_type = other DNA
aatcttatgcaatttttgcc

SEQ ID NO: 5969 - DNA, 20 bp, synthetic construct
  misc_feature 1..20: note = chemically synthesized
  source 1..20: mol_type = other DNA
ttatgcaatttttgccaaga

SEQ ID NO: 5970 - DNA, 20 bp, synthetic construct
  misc_feature 1..20: note = chemically synthesized
  source 1..20: mol_type = other DNA
tatgcaatttttgccaagat

SEQ ID NO: 5971 - DNA, 20 bp, synthetic construct
  misc_feature 1..20: note = chemically synthesized
  source 1..20: mol_type = other DNA
tgcaatttttgccaagatgg

SEQ ID NO: 5972 - DNA, 20 bp, synthetic construct
  misc_feature 1..20: note = chemically synthesized
  source 1..20: mol_type = other DNA
tttttgccaagatgggagta

SEQ ID NO: 5973 - DNA, 20 bp, synthetic construct
  misc_feature 1..20: note = chemically synthesized
  source 1..20: mol_type = other DNA
ttttgccaagatgggagtat

SEQ ID NO: 5974 - DNA, 20 bp, synthetic construct
  misc_feature 1..20: note = chemically synthesized
  source 1..20: mol_type = other DNA
tttgccaagatgggagtatg

SEQ ID NO: 5975 - DNA, 20 bp, synthetic construct
  misc_feature 1..20: note = chemically synthesized
  source 1..20: mol_type = other DNA
tgccaagatgggagtatggg

SEQ ID NO: 5976 - DNA, 20 bp, synthetic construct
  misc_feature 1..20: note = chemically synthesized
  source 1..20: mol_type = other DNA
ccaagatgggagtatgggga

SEQ ID NO: 5977 - DNA, 20 bp, synthetic construct
  misc_feature 1..20: note = chemically synthesized
  source 1..20: mol_type = other DNA
agatgggagtatggggagag

SEQ ID NO: 5978 - DNA, 20 bp, synthetic construct
  misc_feature 1..20: note = chemically synthesized
  source 1..20: mol_type = other DNA
atgggagtatggggagagaa

SEQ ID NO: 5979 - DNA, 20 bp, synthetic construct
  misc_feature 1..20: note = chemically synthesized
  source 1..20: mol_type = other DNA
ggagtatggggagagaagag

SEQ ID NO: 5980 - DNA, 20 bp, synthetic construct
  misc_feature 1..20: note = chemically synthesized
  source 1..20: mol_type = other DNA
tggggagagaagagtggaaa

SEQ ID NO: 5981 - DNA, 20 bp, synthetic construct
  misc_feature 1..20: note = chemically synthesized
  source 1..20: mol_type = other DNA
agagaagagtggaaacggcc

SEQ ID NO: 5982 - DNA, 20 bp, synthetic construct
  misc_feature 1..20: note = chemically synthesized
  source 1..20: mol_type = other DNA
agaagagtggaaacggccca

SEQ ID NO: 5983 - DNA, 20 bp, synthetic construct
  misc_feature 1..20: note = chemically synthesized
  source 1..20: mol_type = other DNA
agtggaaacggcccagagct

SEQ ID NO: 5984 - DNA, 20 bp, synthetic construct
  misc_feature 1..20: note = chemically synthesized
  source 1..20: mol_type = other DNA
gaaacggcccagagctcagt

SEQ ID NO: 5985 - DNA, 20 bp, synthetic construct
  misc_feature 1..20: note = chemically synthesized
  source 1..20: mol_type = other DNA
ggcccagagctcagtgagat

SEQ ID NO: 5986 - DNA, 20 bp, synthetic construct
  misc_feature 1..20: note = chemically synthesized
  source 1..20: mol_type = other DNA
ctcagtgagatgagatatca

SEQ ID NO: 5987 - DNA, 20 bp, synthetic construct
  misc_feature 1..20: note = chemically synthesized
  source 1..20: mol_type = other DNA
tcagtgagatgagatatcaa

SEQ ID NO: 5988 - DNA, 20 bp, synthetic construct
  misc_feature 1..20: note = chemically synthesized
  source 1..20: mol_type = other DNA
cagtgagatgagatatcaaa

SEQ ID NO: 5989 - DNA, 20 bp, synthetic construct
  misc_feature 1..20: note = chemically synthesized
  source 1..20: mol_type = other DNA
agtgagatgagatatcaaag

SEQ ID NO: 5990 - DNA, 20 bp, synthetic construct
  misc_feature 1..20: note = chemically synthesized
  source 1..20: mol_type = other DNA
gagatatcaaaggggacgaa

SEQ ID NO: 5991 - DNA, 20 bp, synthetic construct
  misc_feature 1..20: note = chemically synthesized
  source 1..20: mol_type = other DNA
ccatctccctaatctccaat

SEQ ID NO: 5992 - DNA, 20 bp, synthetic construct
  misc_feature 1..20: note = chemically synthesized
  source 1..20: mol_type = other DNA
tccctaatctccaattggca

SEQ ID NO: 5993 - DNA, 20 bp, synthetic construct
  misc_feature 1..20: note = chemically synthesized
  source 1..20: mol_type = other DNA
taatctccaattggcaaagc

SEQ ID NO: 5994 - DNA, 20 bp, synthetic construct
  misc_feature 1..20: note = chemically synthesized
  source 1..20: mol_type = other DNA
ccaattggcaaagccagact

SEQ ID NO: 5995 - DNA, 20 bp, synthetic construct
  misc_feature 1..20: note = chemically synthesized
  source 1..20: mol_type = other DNA
caattggcaaagccagactt

SEQ ID NO: 5996 - DNA, 20 bp, synthetic construct
  misc_feature 1..20: note = chemically synthesized
  source 1..20: mol_type = other DNA
aattggcaaagccagacttg

SEQ ID NO: 5997 - DNA, 20 bp, synthetic construct
  misc_feature 1..20: note = chemically synthesized
  source 1..20: mol_type = other DNA
aagccagacttggggcaata

SEQ ID NO: 5998 - DNA, 20 bp, synthetic construct
  misc_feature 1..20: note = chemically synthesized
  source 1..20: mol_type = other DNA
agacttggggcaatacagac

SEQ ID NO: 5999 - DNA, 20 bp, synthetic construct
  misc_feature 1..20: note = chemically synthesized
  source 1..20: mol_type = other DNA
ctgtgatgacaaataactcc

SEQ ID NO: 6000 - DNA, 20 bp, synthetic construct
  misc_feature 1..20: note = chemically synthesized
  source 1..20: mol_type = other DNA
atcaccaaatgttctttctt

SEQ ID NO: 6001 - DNA, 20 bp, synthetic construct
  misc_feature 1..20: note = chemically synthesized
  source 1..20: mol_type = other DNA
ccaaatgttctttcttcagc

SEQ ID NO: 6002 - DNA, 20 bp, synthetic construct
  misc_feature 1..20: note = chemically synthesized
  source 1..20: mol_type = other DNA
ttcagctggaatttaaaata

SEQ ID NO: 6003 - DNA, 20 bp, synthetic construct
  misc_feature 1..20: note = chemically synthesized
  source 1..20: mol_type = other DNA
atatggactcatccgtaaaa

SEQ ID NO: 6004 - DNA, 20 bp, synthetic construct
  misc_feature 1..20: note = chemically synthesized
  source 1..20: mol_type = other DNA
tatggactcatccgtaaaat

SEQ ID NO: 6005 - DNA, 20 bp, synthetic construct
  misc_feature 1..20: note = chemically synthesized
  source 1..20: mol_type = other DNA
ccgtaaaataggaataataa

SEQ ID NO: 6006 - DNA, 20 bp, synthetic construct
  misc_feature 1..20: note = chemically synthesized
  source 1..20: mol_type = other DNA
taataatagtatatgcttca

SEQ ID NO: 6007 - DNA, 20 bp, synthetic construct
  misc_feature 1..20: note = chemically synthesized
  source 1..20: mol_type = other DNA
aataatagtatatgcttcat

SEQ ID NO: 6008 - DNA, 20 bp, synthetic construct
  misc_feature 1..20: note = chemically synthesized
  source 1..20: mol_type = other DNA
ataatagtatatgcttcata

SEQ ID NO: 6009 - DNA, 20 bp, synthetic construct
  misc_feature 1..20: note = chemically synthesized
  source 1..20: mol_type = other DNA
ggtttgtatgaaaataaaat

SEQ ID NO: 6010 - DNA, 20 bp, synthetic construct
  misc_feature 1..20: note = chemically synthesized
  source 1..20: mol_type = other DNA
aaaatgagtgcgtatttgta

SEQ ID NO: 6011 - DNA, 20 bp, synthetic construct
  misc_feature 1..20: note = chemically synthesized
  source 1..20: mol_type = other DNA
gtgcgtatttgtaaagttcc

SEQ ID NO: 6012 - DNA, 20 bp, synthetic construct
  misc_feature 1..20: note = chemically synthesized
  source 1..20: mol_type = other DNA
gcgtatttgtaaagttccta

SEQ ID NO: 6013 - DNA, 20 bp, synthetic construct
  misc_feature 1..20: note = chemically synthesized
  source 1..20: mol_type = other DNA
tatttgtaaagttcctagag

SEQ ID NO: 6014 - DNA, 20 bp, synthetic construct
  misc_feature 1..20: note = chemically synthesized
  source 1..20: mol_type = other DNA
tttgtaaagttcctagagca

SEQ ID NO: 6015 - DNA, 20 bp, synthetic construct
  misc_feature 1..20: note = chemically synthesized
  source 1..20: mol_type = other DNA
taaagttcctagagcagagt

SEQ ID NO: 6016 - DNA, 20 bp, synthetic construct
  misc_feature 1..20: note = chemically synthesized
  source 1..20: mol_type = other DNA
tagagcagagtaagtgctcc

SEQ ID NO: 6017 - DNA, 20 bp, synthetic construct
  misc_feature 1..20: note = chemically synthesized
  source 1..20: mol_type = other DNA
tgaactaaaatgctgcctcc

SEQ ID NO: 6018 - DNA, 20 bp, synthetic construct
  misc_feature 1..20: note = chemically synthesized
  source 1..20: mol_type = other DNA
tgctgcctcctggtatttat

SEQ ID NO: 6019 - DNA, 20 bp, synthetic construct
  misc_feature 1..20: note = chemically synthesized
  source 1..20: mol_type = other DNA
ggtatttattagttacacct

SEQ ID NO: 6020 - DNA, 20 bp, synthetic construct
  misc_feature 1..20: note = chemically synthesized
  source 1..20: mol_type = other DNA
atttattagttacacctcag

SEQ ID NO: 6021 - DNA, 20 bp, synthetic construct
  misc_feature 1..20: note = chemically synthesized
  source 1..20: mol_type = other DNA
gttacacctcagcagaaaca

SEQ ID NO: 6022 - DNA, 20 bp, synthetic construct
  misc_feature 1..20: note = chemically synthesized
  source 1..20: mol_type = other DNA
ctcagcagaaacaaagttat

SEQ ID NO: 6023 - DNA, 20 bp, synthetic construct
  misc_feature 1..20: note = chemically synthesized
  source 1..20: mol_type = other DNA
tcagcagaaacaaagttatc

SEQ ID NO: 6024 - DNA, 20 bp, synthetic construct
  misc_feature 1..20: note = chemically synthesized
  source 1..20: mol_type = other DNA
caggccctttccccaattcc

SEQ ID NO: 6025 - DNA, 20 bp, synthetic construct
  misc_feature 1..20: note = chemically synthesized
  source 1..20: mol_type = other DNA
cctttccccaattcctagtt

SEQ ID NO: 6026 - DNA, 20 bp, synthetic construct
  misc_feature 1..20: note = chemically synthesized
  source 1..20: mol_type = other DNA
ctttccccaattcctagttt

SEQ ID NO: 6027 - DNA, 20 bp, synthetic construct
  misc_feature 1..20: note = chemically synthesized
  source 1..20: mol_type = other DNA
ccccaattcctagtttgggt

SEQ ID NO: 6028 - DNA, 20 bp, synthetic construct
  misc_feature 1..20: note = chemically synthesized
  source 1..20: mol_type = other DNA
caattcctagtttgggtcag

SEQ ID NO: 6029 - DNA, 20 bp, synthetic construct
  misc_feature 1..20: note = chemically synthesized
  source 1..20: mol_type = other DNA
cctagtttgggtcagaagaa

SEQ ID NO: 6030 - DNA, 20 bp, synthetic construct
  misc_feature 1..20: note = chemically synthesized
  source 1..20: mol_type = other DNA
ctagtttgggtcagaagaaa

SEQ ID NO: 6031 - DNA, 20 bp, synthetic construct
  misc_feature 1..20: note = chemically synthesized
  source 1..20: mol_type = other DNA
tagtttgggtcagaagaaaa

SEQ ID NO: 6032 - DNA, 20 bp, synthetic construct
  misc_feature 1..20: note = chemically synthesized
  source 1..20: mol_type = other DNA
tgggtcagaagaaaagggaa

SEQ ID NO: 6033 - DNA, 20 bp, synthetic construct
  misc_feature 1..20: note = chemically synthesized
  source 1..20: mol_type = other DNA
gggtcagaagaaaagggaaa

SEQ ID NO: 6034 - DNA, 20 bp, synthetic construct
  misc_feature 1..20: note = chemically synthesized
  source 1..20: mol_type = other DNA
ggtcagaagaaaagggaaaa

SEQ ID NO: 6035 - DNA, 20 bp, synthetic construct
  misc_feature 1..20: note = chemically synthesized
  source 1..20: mol_type = other DNA
tcagaagaaaagggaaaagg

SEQ ID NO: 6036 - DNA, 20 bp, synthetic construct
  misc_feature 1..20: note = chemically synthesized
  source 1..20: mol_type = other DNA
agaagaaaagggaaaaggga

SEQ ID NO: 6037 - DNA, 20 bp, synthetic construct
  misc_feature 1..20: note = chemically synthesized
  source 1..20: mol_type = other DNA
gaagaaaagggaaaagggag

SEQ ID NO: 6038 - DNA, 20 bp, synthetic construct
  misc_feature 1..20: note = chemically synthesized
  source 1..20: mol_type = other DNA
aagggaaaagggagaggaaa

SEQ ID NO: 6039 - DNA, 20 bp, synthetic construct
  misc_feature 1..20: note = chemically synthesized
  source 1..20: mol_type = other DNA
agggaaaagggagaggaaaa

SEQ ID NO: 6040 - DNA, 20 bp, synthetic construct
  misc_feature 1..20: note = chemically synthesized
  source 1..20: mol_type = other DNA
aaagggagaggaaaaaggaa

SEQ ID NO: 6041 - DNA, 20 bp, synthetic construct
  misc_feature 1..20: note = chemically synthesized
  source 1..20: mol_type = other DNA
aaaggaaaagaatatgacgt

SEQ ID NO: 6042 - DNA, 20 bp, synthetic construct
  misc_feature 1..20: note = chemically synthesized
  source 1..20: mol_type = other DNA
aaggaaaagaatatgacgtc

SEQ ID NO: 6043 - DNA, 20 bp, synthetic construct
  misc_feature 1..20: note = chemically synthesized
  source 1..20: mol_type = other DNA
aggaaaagaatatgacgtca

SEQ ID NO: 6044 - DNA, 20 bp, synthetic construct
  misc_feature 1..20: note = chemically synthesized
  source 1..20: mol_type = other DNA
ggaaaagaatatgacgtcag

SEQ ID NO: 6045 - DNA, 20 bp, synthetic construct
  misc_feature 1..20: note = chemically synthesized
  source 1..20: mol_type = other DNA
gaaaagaatatgacgtcagg

SEQ ID NO: 6046 - DNA, 20 bp, synthetic construct
  misc_feature 1..20: note = chemically synthesized
  source 1..20: mol_type = other DNA
aaagaatatgacgtcagggg

SEQ ID NO: 6047 - DNA, 20 bp, synthetic construct
  misc_feature 1..20: note = chemically synthesized
  source 1..20: mol_type = other DNA
aagaatatgacgtcaggggg

SEQ ID NO: 6048 - DNA, 20 bp, synthetic construct
  misc_feature 1..20: note = chemically synthesized
  source 1..20: mol_type = other DNA
atatgacgtcagggggaggc

SEQ ID NO: 6049 - DNA, 20 bp, synthetic construct
  misc_feature 1..20: note = chemically synthesized
  source 1..20: mol_type = other DNA
gacgtcagggggaggcaagt

SEQ ID NO: 6050 - DNA, 20 bp, synthetic construct
  misc_feature 1..20: note = chemically synthesized
  source 1..20: mol_type = other DNA
tcagggggaggcaagtcagt

SEQ ID NO: 6051 - DNA, 20 bp, synthetic construct
  misc_feature 1..20: note = chemically synthesized
  source 1..20: mol_type = other DNA
cagggggaggcaagtcagtt

SEQ ID NO: 6052 - DNA, 20 bp, synthetic construct
  misc_feature 1..20: note = chemically synthesized
  source 1..20: mol_type = other DNA
aggcaagtcagttgggaaca

SEQ ID NO: 6053 - DNA, 20 bp, synthetic construct
  misc_feature 1..20: note = chemically synthesized
  source 1..20: mol_type = other DNA
tgggaacacagatcctaaca

SEQ ID NO: 6054 - DNA, 20 bp, synthetic construct
  misc_feature 1..20: note = chemically synthesized
  source 1..20: mol_type = other DNA
gaacacagatcctaacacag

SEQ ID NO: 6055 - DNA, 20 bp, synthetic construct
  misc_feature 1..20: note = chemically synthesized
  source 1..20: mol_type = other DNA
acagatcctaacacagtagc

SEQ ID NO: 6056 - DNA, 20 bp, synthetic construct
  misc_feature 1..20: note = chemically synthesized
  source 1..20: mol_type = other DNA
acacagtagctggtacctga

SEQ ID NO: 6057 - DNA, 20 bp, synthetic construct
  misc_feature 1..20: note = chemically synthesized
  source 1..20: mol_type = other DNA
cacagtagctggtacctgat

SEQ ID NO: 6058 - DNA, 20 bp, synthetic construct
  misc_feature 1..20: note = chemically synthesized
  source 1..20: mol_type = other DNA
tgataggtgcctatatgtga

SEQ ID NO: 6059 - DNA, 20 bp, synthetic construct
  misc_feature 1..20: note = chemically synthesized
  source 1..20: mol_type = other DNA
aggtgcctatatgtgatgga

SEQ ID NO: 6060 - DNA, 20 bp, synthetic construct
  misc_feature 1..20: note = chemically synthesized
  source 1..20: mol_type = other DNA
ggtgcctatatgtgatggat

SEQ ID NO: 6061 - DNA, 20 bp, synthetic construct
  misc_feature 1..20: note = chemically synthesized
  source 1..20: mol_type = other DNA
gcctatatgtgatggatggg

SEQ ID NO: 6062 - DNA, 20 bp, synthetic construct
  misc_feature 1..20: note = chemically synthesized
  source 1..20: mol_type = other DNA
atatgtgatggatgggtgga

SEQ ID NO: 6063 - DNA, 20 bp, synthetic construct
  misc_feature 1..20: note = chemically synthesized
  source 1..20: mol_type = other DNA
tggatgggtggacagcccga

SEQ ID NO: 6064 - DNA, 20 bp, synthetic construct
  misc_feature 1..20: note = chemically synthesized
  source 1..20: mol_type = other DNA
acagcccgacagatgaaaaa

SEQ ID NO: 6065 - DNA, 20 bp, synthetic construct
  misc_feature 1..20: note = chemically synthesized
  source 1..20: mol_type = other DNA
gatgaaaaatggacaattat

SEQ ID NO: 6066 - DNA, 20 bp, synthetic construct
  misc_feature 1..20: note = chemically synthesized
  source 1..20: mol_type = other DNA
atgaaaaatggacaattatg

SEQ ID NO: 6067 - DNA, 20 bp, synthetic construct
  misc_feature 1..20: note = chemically synthesized
  source 1..20: mol_type = other DNA
gaaaaatggacaattatgag

SEQ ID NO: 6068 - DNA, 20 bp, synthetic construct
  misc_feature 1..20: note = chemically synthesized
  source 1..20: mol_type = other DNA
aaaaatggacaattatgagg

SEQ ID NO: 6069 - DNA, 20 bp, synthetic construct
  misc_feature 1..20: note = chemically synthesized
  source 1..20: mol_type = other DNA
aaaatggacaattatgagga

SEQ ID NO: 6070 - DNA, 20 bp, synthetic construct
  misc_feature 1..20: note = chemically synthesized
  source 1..20: mol_type = other DNA
aaatggacaattatgaggag

SEQ ID NO: 6071 - DNA, 20 bp, synthetic construct
  misc_feature 1..20: note = chemically synthesized
  source 1..20: mol_type = other DNA
atggacaattatgaggaggg

SEQ ID NO: 6072 - DNA, 20 bp, synthetic construct
  misc_feature 1..20: note = chemically synthesized
  source 1..20: mol_type = other DNA
ggacaattatgaggagggga

SEQ ID NO: 6073 - DNA, 20 bp, synthetic construct
  misc_feature 1..20: note = chemically synthesized
  source 1..20: mol_type = other DNA
attatgaggaggggagagtg

SEQ ID NO: 6074 - DNA, 20 bp, synthetic construct
  misc_feature 1..20: note = chemically synthesized
  source 1..20: mol_type = other DNA
tgaggaggggagagtgcaga

SEQ ID NO: 6075 - DNA, 20 bp, synthetic construct
  misc_feature 1..20: note = chemically synthesized
  source 1..20: mol_type = other DNA
gaggaggggagagtgcagac

SEQ ID NO: 6076 - DNA, 20 bp, synthetic construct
  misc_feature 1..20: note = chemically synthesized
  source 1..20: mol_type = other DNA
aggaggggagagtgcagaca

SEQ ID NO: 6077 - DNA, 20 bp, synthetic construct
  misc_feature 1..20: note = chemically synthesized
  source 1..20: mol_type = other DNA
ggaggggagagtgcagacag

SEQ ID NO: 6078 - DNA, 20 bp, synthetic construct
  misc_feature 1..20: note = chemically synthesized
  source 1..20: mol_type = other DNA
ggggagagtgcagacagggg

SEQ ID NO: 6079 - DNA, 20 bp, synthetic construct
  misc_feature 1..20: note = chemically synthesized
  source 1..20: mol_type = other DNA
cttcacctcctttacaattt

SEQ ID NO: 6080 - DNA, 20 bp, synthetic construct
  misc_feature 1..20: note = chemically synthesized
  source 1..20: mol_type = other DNA
ttcacctcctttacaatttt

SEQ ID NO: 6081 - DNA, 20 bp, synthetic construct
  misc_feature 1..20: note = chemically synthesized
  source 1..20: mol_type = other DNA
cacctcctttacaattttgg

SEQ ID NO: 6082 - DNA, 20 bp, synthetic construct
  misc_feature 1..20: note = chemically synthesized
  source 1..20: mol_type = other DNA
tacaattttgggagtccaca

SEQ ID NO: 6083 - DNA, 20 bp, synthetic construct
  misc_feature 1..20: note = chemically synthesized
  source 1..20: mol_type = other DNA
ttttgggagtccacacggca

SEQ ID NO: 6084 - DNA, 20 bp, synthetic construct
  misc_feature 1..20: note = chemically synthesized
  source 1..20: mol_type = other DNA
caaattatttcattcccatt

SEQ ID NO: 6085 - DNA, 20 bp, synthetic construct
  misc_feature 1..20: note = chemically synthesized
  source 1..20: mol_type = other DNA
aaatccaattctccatcacc

SEQ ID NO: 6086 - DNA, 20 bp, synthetic construct
  misc_feature 1..20: note = chemically synthesized
  source 1..20: mol_type = other DNA
atccaattctccatcaccaa

SEQ ID NO: 6087 - DNA, 20 bp, synthetic construct
  misc_feature 1..20: note = chemically synthesized
  source 1..20: mol_type = other DNA
ccaattctccatcaccaaga

SEQ ID NO: 6088 - DNA, 20 bp, synthetic construct
  misc_feature 1..20: note = chemically synthesized
  source 1..20: mol_type = other DNA
tcaccaagagagccttccga

SEQ ID NO: 6089 - DNA, 20 bp, synthetic construct
  misc_feature 1..20: note = chemically synthesized
  source 1..20: mol_type = other DNA
accaagagagccttccgaaa

SEQ ID NO: 6090 - DNA, 20 bp, synthetic construct
  misc_feature 1..20: note = chemically synthesized
  source 1..20: mol_type = other DNA
ccaagagagccttccgaaag

SEQ ID NO: 6091 - DNA, 20 bp, synthetic construct
  misc_feature 1..20: note = chemically synthesized
  source 1..20: mol_type = other DNA
ccttccgaaagaggcccccc

SEQ ID NO: 6092 - DNA, 20 bp, synthetic construct
  misc_feature 1..20: note = chemically synthesized
  source 1..20: mol_type = other DNA
cttccgaaagaggcccccct

SEQ ID NO: 6093 - DNA, 20 bp, synthetic construct
  misc_feature 1..20: note = chemically synthesized
  source 1..20: mol_type = other DNA
aagaggcccccctgggcaaa

SEQ ID NO: 6094 - DNA, 20 bp, synthetic construct
  misc_feature 1..20: note = chemically synthesized
  source 1..20: mol_type = other DNA
cctgggcaaacggccaccga

SEQ ID NO: 6095 - DNA, 20 bp, synthetic construct
  misc_feature 1..20: note = chemically synthesized
  source 1..20: mol_type = other DNA
tgggcaaacggccaccgatg

SEQ ID NO: 6096 - DNA, 20 bp, synthetic construct
  misc_feature 1..20: note = chemically synthesized
  source 1..20: mol_type = other DNA
ggcaaacggccaccgatgga

SEQ ID NO: 6097 - DNA, 20 bp, synthetic construct
  misc_feature 1..20: note = chemically synthesized
  source 1..20: mol_type = other DNA
gcaaacggccaccgatggag

SEQ ID NO: 6098 - DNA, 20 bp, synthetic construct
  misc_feature 1..20: note = chemically synthesized
  source 1..20: mol_type = other DNA
ccaccgatggagaggtctgc

SEQ ID NO: 6099 - DNA, 20 bp, synthetic construct
  misc_feature 1..20: note = chemically synthesized
  source 1..20: mol_type = other DNA
acccacgcccccaccctaat

SEQ ID NO: 6100 - DNA, 20 bp, synthetic construct
  misc_feature 1..20: note = chemically synthesized
  source 1..20: mol_type = other DNA
ccacgcccccaccctaatca

SEQ ID NO: 6101 - DNA, 20 bp, synthetic construct
  misc_feature 1..20: note = chemically synthesized
  source 1..20: mol_type = other DNA
cacgcccccaccctaatcag

SEQ ID NO: 6102 - DNA, 20 bp, synthetic construct
  misc_feature 1..20: note = chemically synthesized
  source 1..20: mol_type = other DNA
atcagaggccaaacccttcc

SEQ ID NO: 6103 - DNA, 20 bp, synthetic construct
  misc_feature 1..20: note = chemically synthesized
  source 1..20: mol_type = other DNA
cagaggccaaacccttcctg

SEQ ID NO: 6104 - DNA, 20 bp, synthetic construct
  misc_feature 1..20: note = chemically synthesized
  source 1..20: mol_type = other DNA
cttcctggagcctgtgataa

SEQ ID NO: 6105 - DNA, 20 bp, synthetic construct
  misc_feature 1..20: note = chemically synthesized
  source 1..20: mol_type = other DNA
cctgtgataaaagcaactgt

SEQ ID NO: 6106 - DNA, 20 bp, synthetic construct
  misc_feature 1..20: note = chemically synthesized
  source 1..20: mol_type = other DNA
aagcaactgttagcttgcac

SEQ ID NO: 6107 - DNA, 20 bp, synthetic construct
  misc_feature 1..20: note = chemically synthesized
  source 1..20: mol_type = other DNA
actgttagcttgcactagac

SEQ ID NO: 6108 - DNA, 20 bp, synthetic construct
  misc_feature 1..20: note = chemically synthesized
  source 1..20: mol_type = other DNA
cttgcactagactagcttca

SEQ ID NO: 6109 - DNA, 20 bp, synthetic construct
  misc_feature 1..20: note = chemically synthesized
  source 1..20: mol_type = other DNA
cttcaaagttgtattgaccc

SEQ ID NO: 6110 - DNA, 20 bp, synthetic construct
  misc_feature 1..20: note = chemically synthesized
  source 1..20: mol_type = other DNA
gaccctggtgtgttatgtct

SEQ ID NO: 6111 - DNA, 20 bp, synthetic construct
  misc_feature 1..20: note = chemically synthesized
  source 1..20: mol_type = other DNA
ccctggtgtgttatgtctaa

SEQ ID NO: 6112 - DNA, 20 bp, synthetic construct
  misc_feature 1..20: note = chemically synthesized
  source 1..20: mol_type = other DNA
tggtgtgttatgtctaagag

SEQ ID NO: 6113 - DNA, 20 bp, synthetic construct
  misc_feature 1..20: note = chemically synthesized
  source 1..20: mol_type = other DNA
tagatgccatatctcttttc

SEQ ID NO: 6114 - DNA, 20 bp, synthetic construct
  misc_feature 1..20: note = chemically synthesized
  source 1..20: mol_type = other DNA
ggcctatgttattacctgta

SEQ ID NO: 6115 - DNA, 20 bp, synthetic construct
  misc_feature 1..20: note = chemically synthesized
  source 1..20: mol_type = other DNA
tacctgtatggactttgcac

SEQ ID NO: 6116 - DNA, 20 bp, synthetic construct
  misc_feature 1..20: note = chemically synthesized
  source 1..20: mol_type = other DNA
tatggactttgcactggaat

SEQ ID NO: 6117 - DNA, 20 bp, synthetic construct
  misc_feature 1..20: note = chemically synthesized
  source 1..20: mol_type = other DNA
tgctcttacttatgcacacc

SEQ ID NO: 6118 - DNA, 20 bp, synthetic construct
  misc_feature 1..20: note = chemically synthesized
  source 1..20: mol_type = other DNA
gctcttacttatgcacacct

SEQ ID NO: 6119 - DNA, 20 bp, synthetic construct
  misc_feature 1..20: note = chemically synthesized
  source 1..20: mol_type = other DNA
ctcttacttatgcacacctg

SEQ ID NO: 6120 - DNA, 20 bp, synthetic construct
  misc_feature 1..20: note = chemically synthesized
  source 1..20: mol_type = other DNA
acttatgcacacctggggca

SEQ ID NO: 6121 - DNA, 20 bp, synthetic construct
  misc_feature 1..20: note = chemically synthesized
  source 1..20: mol_type = other DNA
ttatgcacacctggggcata

SEQ ID NO: 6122 - DNA, 20 bp, synthetic construct
  misc_feature 1..20: note = chemically synthesized
  source 1..20: mol_type = other DNA
gcacacctggggcatagagc

SEQ ID NO: 6123 - DNA, 20 bp, synthetic construct
  misc_feature 1..20: note = chemically synthesized
  source 1..20: mol_type = other DNA
gccagccctgtatcgctttt

SEQ ID NO: 6124 - DNA, 20 bp, synthetic construct
  misc_feature 1..20: note = chemically synthesized
  source 1..20: mol_type = other DNA
gcttttcagccatctcacta

SEQ ID NO: 6125 - DNA, 20 bp, synthetic construct
  misc_feature 1..20: note = chemically synthesized
  source 1..20: mol_type = other DNA
tctcactacagataactccc

SEQ ID NO: 6126 - DNA, 20 bp, synthetic construct
  misc_feature 1..20: note = chemically synthesized
  source 1..20: mol_type = other DNA
gataactcccaagtcctgtc

SEQ ID NO: 6127 - DNA, 20 bp, synthetic construct
  misc_feature 1..20: note = chemically synthesized
  source 1..20: mol_type = other DNA
tctagctgccttccttatca

SEQ ID NO: 6128 - DNA, 20 bp, synthetic construct
  misc_feature 1..20: note = chemically synthesized
  source 1..20: mol_type = other DNA
ctagctgccttccttatcac

SEQ ID NO: 6129 - DNA, 20 bp, synthetic construct
  misc_feature 1..20: note = chemically synthesized
  source 1..20: mol_type = other DNA
tgccttccttatcacaggaa

SEQ ID NO: 6130 - DNA, 20 bp, synthetic construct
  misc_feature 1..20: note = chemically synthesized
  source 1..20: mol_type = other DNA
ttatcacaggaatagcaccc

SEQ ID NO: 6131 - DNA, 20 bp, synthetic construct
  misc_feature 1..20: note = chemically synthesized
  source 1..20: mol_type = other DNA
tatcacaggaatagcaccca

SEQ ID NO: 6132 - DNA, 20 bp, synthetic construct
  misc_feature 1..20: note = chemically synthesized
  source 1..20: mol_type = other DNA
gaatagcacccaaggtccat

SEQ ID NO: 6133 - DNA, 20 bp, synthetic construct
  misc_feature 1..20: note = chemically synthesized
  source 1..20: mol_type = other DNA
cccaaggtccatcagtacct

SEQ ID NO: 6134 - DNA, 20 bp, synthetic construct
  misc_feature 1..20: note = chemically synthesized
  source 1..20: mol_type = other DNA
caaggtccatcagtacctca

SEQ ID NO: 6135 - DNA, 20 bp, synthetic construct
  misc_feature 1..20: note = chemically synthesized
  source 1..20: mol_type = other DNA
ggtccatcagtacctcagag

SEQ ID NO: 6136 - DNA, 20 bp, synthetic construct
  misc_feature 1..20: note = chemically synthesized
  source 1..20: mol_type = other DNA
gagtagaaccccctataaac

SEQ ID NO: 6137 - DNA, 20 bp, synthetic construct
  misc_feature 1..20: note = chemically synthesized
  source 1..20: mol_type = other DNA
gaaccccctataaactagtc

SEQ ID NO: 6138 - DNA, 20 bp, synthetic construct
  misc_feature 1..20: note = chemically synthesized
  source 1..20: mol_type = other DNA
aaactagtctggtttgccca

SEQ ID NO: 6139 - DNA, 20 bp, synthetic construct
  misc_feature 1..20: note = chemically synthesized
  source 1..20: mol_type = other DNA
aactagtctggtttgcccat

SEQ ID NO: 6140 - DNA, 20 bp, synthetic construct
  misc_feature 1..20: note = chemically synthesized
  source 1..20: mol_type = other DNA
actagtctggtttgcccatg

SEQ ID NO: 6141 - DNA, 20 bp, synthetic construct
  misc_feature 1..20: note = chemically synthesized
  source 1..20: mol_type = other DNA
tctggtttgcccatggggca

SEQ ID NO: 6142 - DNA, 20 bp, synthetic construct
  misc_feature 1..20: note = chemically synthesized
  source 1..20: mol_type = other DNA
gtttgcccatggggcacagt

SEQ ID NO: 6143 - DNA, 20 bp, synthetic construct
  misc_feature 1..20: note = chemically synthesized
  source 1..20: mol_type = other DNA
tttgcccatggggcacagtc

SEQ ID NO: 6144 - DNA, 20 bp, synthetic construct
  misc_feature 1..20: note = chemically synthesized
  source 1..20: mol_type = other DNA
ggcacagtcaggctgttttc

SEQ ID NO: 6145 - DNA, 20 bp, synthetic construct
  misc_feature 1..20: note = chemically synthesized
  source 1..20: mol_type = other DNA
gcacagtcaggctgttttcc

SEQ ID NO: 6146 - DNA, 20 bp, synthetic construct
  misc_feature 1..20: note = chemically synthesized
  source 1..20: mol_type = other DNA
cacagtcaggctgttttcca

SEQ ID NO: 6147 - DNA, 20 bp, synthetic construct
  misc_feature 1..20: note = chemically synthesized
  source 1..20: mol_type = other DNA
agtcaggctgttttccaggg

SEQ ID NO: 6148 - DNA, 20 bp, synthetic construct
  misc_feature 1..20: note = chemically synthesized
  source 1..20: mol_type = other DNA
gtcaggctgttttccagggt

SEQ ID NO: 6149 - DNA, 20 bp, synthetic construct
  misc_feature 1..20: note = chemically synthesized
  source 1..20: mol_type = other DNA
tcaggctgttttccagggtg

SEQ ID NO: 6150 - DNA, 20 bp, synthetic construct
  misc_feature 1..20: note = chemically synthesized
  source 1..20: mol_type = other DNA
ctgttttccagggtggggtg

SEQ ID NO: 6151 - DNA, 20 bp, synthetic construct
  misc_feature 1..20: note = chemically synthesized
  source 1..20: mol_type = other DNA
gcttacatataacgtcataa

SEQ ID NO: 6152 - DNA, 20 bp, synthetic construct
  misc_feature 1..20: note = chemically synthesized
  source 1..20: mol_type = other DNA
cgtatgtgttgtgatccctg

SEQ ID NO: 6153 - DNA, 20 bp, synthetic construct
  misc_feature 1..20: note = chemically synthesized
  source 1..20: mol_type = other DNA
tgttgtgatccctgtggttt

SEQ ID NO: 6154 - DNA, 20 bp, synthetic construct
  misc_feature 1..20: note = chemically synthesized
  source 1..20: mol_type = other DNA
ttgtgatccctgtggtttga

SEQ ID NO: 6155 - DNA, 20 bp, synthetic construct
  misc_feature 1..20: note = chemically synthesized
  source 1..20: mol_type = other DNA
atccctgtggtttgagagtt

SEQ ID NO: 6156 - DNA, 20 bp, synthetic construct
  misc_feature 1..20: note = chemically synthesized
  source 1..20: mol_type = other DNA
ccctgtggtttgagagtttg

SEQ ID NO: 6157 - DNA, 20 bp, synthetic construct
  misc_feature 1..20: note = chemically synthesized
  source 1..20: mol_type = other DNA
agagtttggagcttccctaa

SEQ ID NO: 6158 - DNA, 20 bp, synthetic construct
  misc_feature 1..20: note = chemically synthesized
  source 1..20: mol_type = other DNA
aaaagtcaaaatattctcaa

SEQ ID NO: 6159 - DNA, 20 bp, synthetic construct
  misc_feature 1..20: note = chemically synthesized
  source 1..20: mol_type = other DNA
aaagtcaaaatattctcaat

SEQ ID NO: 6160 - DNA, 20 bp, synthetic construct
  misc_feature 1..20: note = chemically synthesized
  source 1..20: mol_type = other DNA
attctcaatgggccctcaat

SEQ ID NO: 6161 - DNA, 20 bp, synthetic construct
  misc_feature 1..20: note = chemically synthesized
  source 1..20: mol_type = other DNA
caatcagcacatacacacaa

SEQ ID NO: 6162 - DNA, 20 bp, synthetic construct
  misc_feature 1..20: note = chemically synthesized
  source 1..20: mol_type = other DNA
aatcagcacatacacacaaa

SEQ ID NO: 6163 - DNA, 20 bp, synthetic construct
  misc_feature 1..20: note = chemically synthesized
  source 1..20: mol_type = other DNA
acatacacacaaaaggtacc

SEQ ID NO: 6164 - DNA, 20 bp, synthetic construct
  misc_feature 1..20: note = chemically synthesized
  source 1..20: mol_type = other DNA
tgtaattcttttcctgctca

SEQ ID NO: 6165 - DNA, 20 bp, synthetic construct
  misc_feature 1..20: note = chemically synthesized
  source 1..20: mol_type = other DNA
attcttttcctgctcaaaga

SEQ ID NO: 6166 - DNA, 20 bp, synthetic construct
  misc_feature 1..20: note = chemically synthesized
  source 1..20: mol_type = other DNA
ttcttttcctgctcaaagac

SEQ ID NO: 6167 - DNA, 20 bp, synthetic construct
  misc_feature 1..20: note = chemically synthesized
  source 1..20: mol_type = other DNA
accaaaaacccttgccacca

SEQ ID NO: 6168 - DNA, 20 bp, synthetic construct
  misc_feature 1..20: note = chemically synthesized
  source 1..20: mol_type = other DNA
ccaaaaacccttgccaccat

SEQ ID NO: 6169 - DNA, 20 bp, synthetic construct
  misc_feature 1..20: note = chemically synthesized
  source 1..20: mol_type = other DNA
aaaaacccttgccaccatgg

SEQ ID NO: 6170 - DNA, 20 bp, synthetic construct
  misc_feature 1..20: note = chemically synthesized
  source 1..20: mol_type = other DNA
cccttgccaccatgggagcc

SEQ ID NO: 6171 - DNA, 20 bp, synthetic construct
  misc_feature 1..20: note = chemically synthesized
  source 1..20: mol_type = other DNA
ccttgccaccatgggagcct

SEQ ID NO: 6172 - DNA, 20 bp, synthetic construct
  misc_feature 1..20: note = chemically synthesized
  source 1..20: mol_type = other DNA
cttgccaccatgggagcctg

SEQ ID NO: 6173 - DNA, 20 bp, synthetic construct
  misc_feature 1..20: note = chemically synthesized
  source 1..20: mol_type = other DNA
gccaccatgggagcctgggg

SEQ ID NO: 6174 - DNA, 20 bp, synthetic construct
  misc_feature 1..20: note = chemically synthesized
  source 1..20: mol_type = other DNA
caccatgggagcctggggca

SEQ ID NO: 6175 - DNA, 20 bp, synthetic construct
  misc_feature 1..20: note = chemically synthesized
  source 1..20: mol_type = other DNA
catgggagcctggggcagag

SEQ ID NO: 6176 - DNA, 20 bp, synthetic construct
  misc_feature 1..20: note = chemically synthesized
  source 1..20: mol_type = other DNA
atgggagcctggggcagaga

SEQ ID NO: 6177 - DNA, 20 bp, synthetic construct
  misc_feature 1..20: note = chemically synthesized
  source 1..20: mol_type = other DNA
agcctggggcagagaaggca

SEQ ID NO: 6178 - DNA, 20 bp, synthetic construct
  misc_feature 1..20: note = chemically synthesized
  source 1..20: mol_type = other DNA
ggggcagagaaggcacagtg

SEQ ID NO: 6179 - DNA, 20 bp, synthetic construct
  misc_feature 1..20: note = chemically synthesized
  source 1..20: mol_type = other DNA
gtgaagtcaaactgtaattc

SEQ ID NO: 6180 - DNA, 20 bp, synthetic construct
  misc_feature 1..20: note = chemically synthesized
  source 1..20: mol_type = other DNA
tgaagtcaaactgtaattcc

SEQ ID NO: 6181 - DNA, 20 bp, synthetic construct
  misc_feature 1..20: note = chemically synthesized
  source 1..20: mol_type = other DNA
ctgtaattccaggctctaaa

SEQ ID NO: 6182 - DNA, 20 bp, synthetic construct
  misc_feature 1..20: note = chemically synthesized
  source 1..20: mol_type = other DNA
aatggtgctgtcatttttct

SEQ ID NO: 6183 - DNA, 20 bp, synthetic construct
  misc_feature 1..20: note = chemically synthesized
  source 1..20: mol_type = other DNA
tggtgctgtcatttttctga

SEQ ID NO: 6184 - DNA, 20 bp, synthetic construct
  misc_feature 1..20: note = chemically synthesized
  source 1..20: mol_type = other DNA
tctgagagtctctaaattac

SEQ ID NO: 6185 - DNA, 20 bp, synthetic construct
  misc_feature 1..20: note = chemically synthesized
  source 1..20: mol_type = other DNA
ctgagagtctctaaattaca

SEQ ID NO: 6186 - DNA, 20 bp, synthetic construct
  misc_feature 1..20: note = chemically synthesized
  source 1..20: mol_type = other DNA
tgagagtctctaaattacaa

SEQ ID NO: 6187 - DNA, 20 bp, synthetic construct
  misc_feature 1..20: note = chemically synthesized
  source 1..20: mol_type = other DNA
aagggtgttttcactattct

SEQ ID NO: 6188 - DNA, 20 bp, synthetic construct
  misc_feature 1..20: note = chemically synthesized
  source 1..20: mol_type = other DNA
agctattttttaaaacacct

SEQ ID NO: 6189 - DNA, 20 bp, synthetic construct
  misc_feature 1..20: note = chemically synthesized
  source 1..20: mol_type = other DNA
aacacctaagaaacatactg

SEQ ID NO: 6190 - DNA, 20 bp, synthetic construct
  misc_feature 1..20: note = chemically synthesized
  source 1..20: mol_type = other DNA
taagaaacatactgcagctc

SEQ ID NO: 6191 - DNA, 20 bp, synthetic construct
  misc_feature 1..20: note = chemically synthesized
  source 1..20: mol_type = other DNA
aacatactgcagctctggaa

SEQ ID NO: 6192 - DNA, 20 bp, synthetic construct
  misc_feature 1..20: note = chemically synthesized
  source 1..20: mol_type = other DNA
catactgcagctctggaaaa

SEQ ID NO: 6193 - DNA, 20 bp, synthetic construct
  misc_feature 1..20: note = chemically synthesized
  source 1..20: mol_type = other DNA
aaaagagaacaaacaaacca

SEQ ID NO: 6194 - DNA, 20 bp, synthetic construct
  misc_feature 1..20: note = chemically synthesized
  source 1..20: mol_type = other DNA
aagagaacaaacaaaccaaa

SEQ ID NO: 6195 - DNA, 20 bp, synthetic construct
  misc_feature 1..20: note = chemically synthesized
  source 1..20: mol_type = other DNA
agaacaaacaaaccaaagag

SEQ ID NO: 6196 - DNA, 20 bp, synthetic construct
  misc_feature 1..20: note = chemically synthesized
  source 1..20: mol_type = other DNA
gaacaaacaaaccaaagaga

SEQ ID NO: 6197 - DNA, 20 bp, synthetic construct
  misc_feature 1..20: note = chemically synthesized
  source 1..20: mol_type = other DNA
aacaaacaaaccaaagagaa

SEQ ID NO: 6198 - DNA, 20 bp, synthetic construct
  misc_feature 1..20: note = chemically synthesized
  source 1..20: mol_type = other DNA
caaaccaaagagaagggatc

SEQ ID NO: 6199 - DNA, 20 bp, synthetic construct
  misc_feature 1..20: note = chemically synthesized
  source 1..20: mol_type = other DNA
aaccaaagagaagggatcca

SEQ ID NO: 6200 - DNA, 20 bp, synthetic construct
  misc_feature 1..20: note = chemically synthesized
  source 1..20: mol_type = other DNA
accaaagagaagggatccag

SEQ ID NO: 6201 - DNA, 20 bp, synthetic construct
  misc_feature 1..20: note = chemically synthesized
  source 1..20: mol_type = other DNA
aggtcaccctcatatgtgaa

SEQ ID NO: 6202 - DNA, 20 bp, synthetic construct
  misc_feature 1..20: note = chemically synthesized
  source 1..20: mol_type = other DNA
tgaaaagtcaattgataatg

SEQ ID NO: 6203 - DNA, 20 bp, synthetic construct
  misc_feature 1..20: note = chemically synthesized
  source 1..20: mol_type = other DNA
gaaaagtcaattgataatga

SEQ ID NO: 6204 - DNA, 20 bp, synthetic construct
  misc_feature 1..20: note = chemically synthesized
  source 1..20: mol_type = other DNA
tcaattgataatgaaggctt

SEQ ID NO: 6205 - DNA, 20 bp, synthetic construct
  misc_feature 1..20: note = chemically synthesized
  source 1..20: mol_type = other DNA
caattgataatgaaggcttt

SEQ ID NO: 6206 - DNA, 20 bp, synthetic construct
  misc_feature 1..20: note = chemically synthesized
  source 1..20: mol_type = other DNA
aatgaaggctttaggataac

SEQ ID NO: 6207 - DNA, 20 bp, synthetic construct
  misc_feature 1..20: note = chemically synthesized
  source 1..20: mol_type = other DNA
tgaaggctttaggataaccg

SEQ ID NO: 6208 - DNA, 20 bp, synthetic construct
  misc_feature 1..20: note = chemically synthesized
  source 1..20: mol_type = other DNA
gaaggctttaggataaccgg

SEQ ID NO: 6209 - DNA, 20 bp, synthetic construct
  misc_feature 1..20: note = chemically synthesized
  source 1..20: mol_type = other DNA
aaggctttaggataaccgga

SEQ ID NO: 6210 - DNA, 20 bp, synthetic construct
  misc_feature 1..20: note = chemically synthesized
  source 1..20: mol_type = other DNA
aggctttaggataaccggag

SEQ ID NO: 6211 - DNA, 20 bp, synthetic construct
  misc_feature 1..20: note = chemically synthesized
  source 1..20: mol_type = other DNA
gctttaggataaccggaggg

SEQ ID NO: 6212 - DNA, 20 bp, synthetic construct
  misc_feature 1..20: note = chemically synthesized
  source 1..20: mol_type = other DNA
accggaggggagatgattga

SEQ ID NO: 6213 - DNA, 20 bp, synthetic construct
  misc_feature 1..20: note = chemically synthesized
  source 1..20: mol_type = other DNA
ttgaaagcaatgcacctgtg

SEQ ID NO: 6214 - DNA, 20 bp, synthetic construct
  misc_feature 1..20: note = chemically synthesized
  source 1..20: mol_type = other DNA
tgaaagcaatgcacctgtgc

SEQ ID NO: 6215 - DNA, 20 bp, synthetic construct
  misc_feature 1..20: note = chemically synthesized
  source 1..20: mol_type = other DNA
caatgcacctgtgcaggaaa

SEQ ID NO: 6216 - DNA, 20 bp, synthetic construct
  misc_feature 1..20: note = chemically synthesized
  source 1..20: mol_type = other DNA
cctgtgcaggaaatggatta

SEQ ID NO: 6217 - DNA, 20 bp, synthetic construct
  misc_feature 1..20: note = chemically synthesized
  source 1..20: mol_type = other DNA
caggaaatggattacggaaa

SEQ ID NO: 6218 - DNA, 20 bp, synthetic construct
  misc_feature 1..20: note = chemically synthesized
  source 1..20: mol_type = other DNA
aggaaatggattacggaaac

SEQ ID NO: 6219 - DNA, 20 bp, synthetic construct
  misc_feature 1..20: note = chemically synthesized
  source 1..20: mol_type = other DNA
ggaaatggattacggaaaca

SEQ ID NO: 6220 - DNA, 20 bp, synthetic construct
  misc_feature 1..20: note = chemically synthesized
  source 1..20: mol_type = other DNA
gggaattgttcatgaaatcc

SEQ ID NO: 6221 - DNA, 20 bp, synthetic construct
  misc_feature 1..20: note = chemically synthesized
  source 1..20: mol_type = other DNA
ttcatgaaatcccagaaaac

SEQ ID NO: 6222 - DNA, 20 bp, synthetic construct
  misc_feature 1..20: note = chemically synthesized
  source 1..20: mol_type = other DNA
aaatcccagaaaaccagaac

SEQ ID NO: 6223 - DNA, 20 bp, synthetic construct
  misc_feature 1..20: note = chemically synthesized
  source 1..20: mol_type = other DNA
aatcccagaaaaccagaacc

SEQ ID NO: 6224 - DNA, 20 bp, synthetic construct
  misc_feature 1..20: note = chemically synthesized
  source 1..20: mol_type = other DNA
ccagaaaaccagaaccggga

SEQ ID NO: 6225 - DNA, 20 bp, synthetic construct
  misc_feature 1..20: note = chemically synthesized
  source 1..20: mol_type = other DNA
aaccagaaccgggaaagttc

SEQ ID NO: 6226 - DNA, 20 bp, synthetic construct
  misc_feature 1..20: note = chemically synthesized
  source 1..20: mol_type = other DNA
cagaaccgggaaagttctgg

SEQ ID NO: 6227 - DNA, 20 bp, synthetic construct
  misc_feature 1..20: note = chemically synthesized
  source 1..20: mol_type = other DNA
accgggaaagttctggaagt

SEQ ID NO: 6228 - DNA, 20 bp, synthetic construct
  misc_feature 1..20: note = chemically synthesized
  source 1..20: mol_type = other DNA
ggaaaaacaaatcatgactt

SEQ ID NO: 6229 - DNA, 20 bp, synthetic construct
  misc_feature 1..20: note = chemically synthesized
  source 1..20: mol_type = other DNA
acaaatcatgacttaagcaa

SEQ ID NO: 6230 - DNA, 20 bp, synthetic construct
  misc_feature 1..20: note = chemically synthesized
  source 1..20: mol_type = other DNA
aatcatgacttaagcaatgg

SEQ ID NO: 6231 - DNA, 20 bp, synthetic construct
  misc_feature 1..20: note = chemically synthesized
  source 1..20: mol_type = other DNA
ggaagtccaatacacgttta

SEQ ID NO: 6232 - DNA, 20 bp, synthetic construct
  misc_feature 1..20: note = chemically synthesized
  source 1..20: mol_type = other DNA
tacagaatgccttgtcccac

SEQ ID NO: 6233 - DNA, 20 bp, synthetic construct
  misc_feature 1..20: note = chemically synthesized
  source 1..20: mol_type = other DNA
acagaatgccttgtcccacg

SEQ ID NO: 6234 - DNA, 20 bp, synthetic construct
  misc_feature 1..20: note = chemically synthesized
  source 1..20: mol_type = other DNA
ccttgtcccacgaggcaaca

SEQ ID NO: 6235 - DNA, 20 bp, synthetic construct
  misc_feature 1..20: note = chemically synthesized
  source 1..20: mol_type = other DNA
cttgtcccacgaggcaacac

SEQ ID NO: 6236 - DNA, 20 bp, synthetic construct
  misc_feature 1..20: note = chemically synthesized
  source 1..20: mol_type = other DNA
cgaggcaacacaggctacca

SEQ ID NO: 6237 - DNA, 20 bp, synthetic construct
  misc_feature 1..20: note = chemically synthesized
  source 1..20: mol_type = other DNA
gcaacacaggctaccacaga

SEQ ID NO: 6238 - DNA, 20 bp, synthetic construct
  misc_feature 1..20: note = chemically synthesized
  source 1..20: mol_type = other DNA
caacacaggctaccacagat

SEQ ID NO: 6239 - DNA, 20 bp, synthetic construct
  misc_feature 1..20: note = chemically synthesized
  source 1..20: mol_type = other DNA
aacacaggctaccacagatg

SEQ ID NO: 6240 - DNA, 20 bp, synthetic construct
  misc_feature 1..20: note = chemically synthesized
  source 1..20: mol_type = other DNA
acacaggctaccacagatgg

SEQ ID NO: 6241 - DNA, 20 bp, synthetic construct
  misc_feature 1..20: note = chemically synthesized
  source 1..20: mol_type = other DNA
aggctaccacagatggggga

SEQ ID NO: 6242 - DNA, 20 bp, synthetic construct
  misc_feature 1..20: note = chemically synthesized
  source 1..20: mol_type = other DNA
ggctaccacagatgggggac

SEQ ID NO: 6243 - DNA, 20 bp, synthetic construct
  misc_feature 1..20: note = chemically synthesized
  source 1..20: mol_type = other DNA
gctaccacagatgggggaca

SEQ ID NO: 6244 - DNA, 20 bp, synthetic construct
  misc_feature 1..20: note = chemically synthesized
  source 1..20: mol_type = other DNA
accacagatgggggacaggg

SEQ ID NO: 6245 - DNA, 20 bp, synthetic construct
  misc_feature 1..20: note = chemically synthesized
  source 1..20: mol_type = other DNA
ccacagatgggggacagggt

SEQ ID NO: 6246 - DNA, 20 bp, synthetic construct
  misc_feature 1..20: note = chemically synthesized
  source 1..20: mol_type = other DNA
acagatgggggacagggtgg

SEQ ID NO: 6247 - DNA, 20 bp, synthetic construct
  misc_feature 1..20: note = chemically synthesized
  source 1..20: mol_type = other DNA
gatgggggacagggtgggag

SEQ ID NO: 6248 - DNA, 20 bp, synthetic construct
  misc_feature 1..20: note = chemically synthesized
  source 1..20: mol_type = other DNA
agggtgggagtggaccatcc

SEQ ID NO: 6249 - DNA, 20 bp, synthetic construct
  misc_feature 1..20: note = chemically synthesized
  source 1..20: mol_type = other DNA
gtgggagtggaccatcccag

SEQ ID NO: 6250 - DNA, 20 bp, synthetic construct
  misc_feature 1..20: note = chemically synthesized
  source 1..20: mol_type = other DNA
accatcccagtggtgttact

SEQ ID NO: 6251 - DNA, 20 bp, synthetic construct
  misc_feature 1..20: note = chemically synthesized
  source 1..20: mol_type = other DNA
ccatcccagtggtgttactg

SEQ ID NO: 6252 - DNA, 20 bp, synthetic construct
  misc_feature 1..20: note = chemically synthesized
  source 1..20: mol_type = other DNA
catcccagtggtgttactga

SEQ ID NO: 6253 - DNA, 20 bp, synthetic construct
  misc_feature 1..20: note = chemically synthesized
  source 1..20: mol_type = other DNA
atcccagtggtgttactgag

SEQ ID NO: 6254 - DNA, 20 bp, synthetic construct
  misc_feature 1..20: note = chemically synthesized
  source 1..20: mol_type = other DNA
agtggtgttactgaggggca

SEQ ID NO: 6255 - DNA, 20 bp, synthetic construct
  misc_feature 1..20: note = chemically synthesized
  source 1..20: mol_type = other DNA
gtggtgttactgaggggcaa

SEQ ID NO: 6256 - DNA, 20 bp, synthetic construct
  misc_feature 1..20: note = chemically synthesized
  source 1..20: mol_type = other DNA
tggtgttactgaggggcaaa

SEQ ID NO: 6257 - DNA, 20 bp, synthetic construct
  misc_feature 1..20: note = chemically synthesized
  source 1..20: mol_type = other DNA
gttactgaggggcaaaggga

SEQ ID NO: 6258 - DNA, 20 bp, synthetic construct
  misc_feature 1..20: note = chemically synthesized
  source 1..20: mol_type = other DNA
gggcaaagggatagccctat

SEQ ID NO: 6259 - DNA, 20 bp, synthetic construct
  misc_feature 1..20: note = chemically synthesized
  source 1..20: mol_type = other DNA
ggcaaagggatagccctatg

SEQ ID NO: 6260 - DNA, 20 bp, synthetic construct
  misc_feature 1..20: note = chemically synthesized
  source 1..20: mol_type = other DNA
aagggatagccctatgaggc

SEQ ID NO: 6261 - DNA, 20 bp, synthetic construct
  misc_feature 1..20: note = chemically synthesized
  source 1..20: mol_type = other DNA
agccctatgaggcaagtgtc

SEQ ID NO: 6262 - DNA, 20 bp, synthetic construct
  misc_feature 1..20: note = chemically synthesized
  source 1..20: mol_type = other DNA
gccctatgaggcaagtgtcc

SEQ ID NO: 6263 - DNA, 20 bp, synthetic construct
  misc_feature 1..20: note = chemically synthesized
  source 1..20: mol_type = other DNA
ccctatgaggcaagtgtcca

SEQ ID NO: 6264 - DNA, 20 bp, synthetic construct
  misc_feature 1..20: note = chemically synthesized
  source 1..20: mol_type = other DNA
tatgaggcaagtgtccaggg

SEQ ID NO: 6265 - DNA, 20 bp, synthetic construct
  misc_feature 1..20: note = chemically synthesized
  source 1..20: mol_type = other DNA
gcaagtgtccagggcagaac

SEQ ID NO: 6266 - DNA, 20 bp, synthetic construct
  misc_feature 1..20: note = chemically synthesized
  source 1..20: mol_type = other DNA
aagtgtccagggcagaactg

SEQ ID NO: 6267 - DNA, 20 bp, synthetic construct
  misc_feature 1..20: note = chemically synthesized
  source 1..20: mol_type = other DNA
agctttgtgaaaccatttcc

SEQ ID NO: 6268 - DNA, 20 bp, synthetic construct
  misc_feature 1..20: note = chemically synthesized
  source 1..20: mol_type = other DNA
gctttgtgaaaccatttccc

SEQ ID NO: 6269 - DNA, 20 bp, synthetic construct
  misc_feature 1..20: note = chemically synthesized
  source 1..20: mol_type = other DNA
ttgtgaaaccatttcccagg

SEQ ID NO: 6270 - DNA, 20 bp, synthetic construct
  misc_feature 1..20: note = chemically synthesized
  source 1..20: mol_type = other DNA
gtgaaaccatttcccaggca

SEQ ID NO: 6271 - DNA, 20 bp, synthetic construct
  misc_feature 1..20: note = chemically synthesized
  source 1..20: mol_type = other DNA
aaccatttcccaggcagaga

SEQ ID NO: 6272 - DNA, 20 bp, synthetic construct
  misc_feature 1..20: note = chemically synthesized
  source 1..20: mol_type = other DNA
ccatttcccaggcagagaca

SEQ ID NO: 6273 - DNA, 20 bp, synthetic construct
  misc_feature 1..20: note = chemically synthesized
  source 1..20: mol_type = other DNA
cccaggcagagacagagcac

SEQ ID NO: 6274 - DNA, 20 bp, synthetic construct
  misc_feature 1..20: note = chemically synthesized
  source 1..20: mol_type = other DNA
ccaggcagagacagagcact

SEQ ID NO: 6275 - DNA, 20 bp, synthetic construct
  misc_feature 1..20: note = chemically synthesized
  source 1..20: mol_type = other DNA
gcagagacagagcactaggc

SEQ ID NO: 6276 - DNA, 20 bp, synthetic construct
  misc_feature 1..20: note = chemically synthesized
  source 1..20: mol_type = other DNA
gagcactaggctggtgctgc

SEQ ID NO: 6277 - DNA, 20 bp, synthetic construct
  misc_feature 1..20: note = chemically synthesized
  source 1..20: mol_type = other DNA
ggtgctgccagtctgacaat

SEQ ID NO: 6278 - DNA, 20 bp, synthetic construct
  misc_feature 1..20: note = chemically synthesized
  source 1..20: mol_type = other DNA
ataagtctgccattgtcctc

SEQ ID NO: 6279 - DNA, 20 bp, synthetic construct
  misc_feature 1..20: note = chemically synthesized
  source 1..20: mol_type = other DNA
gtctgccattgtcctctggt

SEQ ID NO: 6280 - DNA, 20 bp, synthetic construct
  misc_feature 1..20: note = chemically synthesized
  source 1..20: mol_type = other DNA
cattgtcctctggtcagctc

SEQ ID NO: 6281 - DNA, 20 bp, synthetic construct
  misc_feature 1..20: note = chemically synthesized
  source 1..20: mol_type = other DNA
tctggtcagctctggacaca

SEQ ID NO: 6282 - DNA, 20 bp, synthetic construct
  misc_feature 1..20: note = chemically synthesized
  source 1..20: mol_type = other DNA
cagctctggacacacagcaa

SEQ ID NO: 6283 - DNA, 20 bp, synthetic construct
  misc_feature 1..20: note = chemically synthesized
  source 1..20: mol_type = other DNA
tctggacacacagcaaaagt

SEQ ID NO: 6284 - DNA, 20 bp, synthetic construct
  misc_feature 1..20: note = chemically synthesized
  source 1..20: mol_type = other DNA
acacacagcaaaagtgagtt

SEQ ID NO: 6285 - DNA, 20 bp, synthetic construct
  misc_feature 1..20: note = chemically synthesized
  source 1..20: mol_type = other DNA
acacagcaaaagtgagttca

SEQ ID NO: 6286 - DNA, 20 bp, synthetic construct
  misc_feature 1..20: note = chemically synthesized
  source 1..20: mol_type = other DNA
cagcaaaagtgagttcagag

SEQ ID NO: 6287 - DNA, 20 bp, synthetic construct
  misc_feature 1..20: note = chemically synthesized
  source 1..20: mol_type = other DNA
agtgagttcagagtagcctg

SEQ ID NO: 6288 - DNA, 20 bp, synthetic construct
  misc_feature 1..20: note = chemically synthesized
  source 1..20: mol_type = other DNA
gagttcagagtagcctgaag

SEQ ID NO: 6289 - DNA, 20 bp, synthetic construct
  misc_feature 1..20: note = chemically synthesized
  source 1..20: mol_type = other DNA
agttcagagtagcctgaagc

SEQ ID NO: 6290 - DNA, 20 bp, synthetic construct
  misc_feature 1..20: note = chemically synthesized
  source 1..20: mol_type = other DNA
cagagtagcctgaagcagga

SEQ ID NO: 6291 - DNA, 20 bp, synthetic construct
  misc_feature 1..20: note = chemically synthesized
  source 1..20: mol_type = other DNA
gagtagcctgaagcaggaaa

SEQ ID NO: 6292 - DNA, 20 bp, synthetic construct
  misc_feature 1..20: note = chemically synthesized
  source 1..20: mol_type = other DNA
agtagcctgaagcaggaaag

SEQ ID NO: 6293 - DNA, 20 bp, synthetic construct
  misc_feature 1..20: note = chemically synthesized
  source 1..20: mol_type = other DNA
gtagcctgaagcaggaaaga

SEQ ID NO: 6294 - DNA, 20 bp, synthetic construct
  misc_feature 1..20: note = chemically synthesized
  source 1..20: mol_type = other DNA
gcctgaagcaggaaagaggg

SEQ ID NO: 6295 - DNA, 20 bp, synthetic construct
  misc_feature 1..20: note = chemically synthesized
  source 1..20: mol_type = other DNA
ctgaagcaggaaagagggaa

SEQ ID NO: 6296 - DNA, 20 bp, synthetic construct
  misc_feature 1..20: note = chemically synthesized
  source 1..20: mol_type = other DNA
gaagcaggaaagagggaaga

SEQ ID NO: 6297 - DNA, 20 bp, synthetic construct
  misc_feature 1..20: note = chemically synthesized
  source 1..20: mol_type = other DNA
aagcaggaaagagggaagag

SEQ ID NO: 6298 - DNA, 20 bp, synthetic construct
  misc_feature 1..20: note = chemically synthesized
  source 1..20: mol_type = other DNA
gcaggaaagagggaagagag

SEQ ID NO: 6299 - DNA, 20 bp, synthetic construct
  misc_feature 1..20: note = chemically synthesized
  source 1..20: mol_type = other DNA
caggaaagagggaagagagg

SEQ ID NO: 6300 - DNA, 20 bp, synthetic construct
  misc_feature 1..20: note = chemically synthesized
  source 1..20: mol_type = other DNA
acctatcttccactttgctg

SEQ ID NO: 6301 - DNA, 20 bp, synthetic construct
  misc_feature 1..20: note = chemically synthesized
  source 1..20: mol_type = other DNA
cctatcttccactttgctgc

SEQ ID NO: 6302 - DNA, 20 bp, synthetic construct
  misc_feature 1..20: note = chemically synthesized
  source 1..20: mol_type = other DNA
ttccactttgctgcaggttc

SEQ ID NO: 6303 - DNA, 20 bp, synthetic construct
  misc_feature 1..20: note = chemically synthesized
  source 1..20: mol_type = other DNA
tccactttgctgcaggttca

SEQ ID NO: 6304 - DNA, 20 bp, synthetic construct
  misc_feature 1..20: note = chemically synthesized
  source 1..20: mol_type = other DNA
ctttgctgcaggttcaaggc

SEQ ID NO: 6305 - DNA, 20 bp, synthetic construct
  misc_feature 1..20: note = chemically synthesized
  source 1..20: mol_type = other DNA
tttgctgcaggttcaaggca

SEQ ID NO: 6306 - DNA, 20 bp, synthetic construct
  misc_feature 1..20: note = chemically synthesized
  source 1..20: mol_type = other DNA
caggttcaaggcaaggattt

SEQ ID NO: 6307 - DNA, 20 bp, synthetic construct
  misc_feature 1..20: note = chemically synthesized
  source 1..20: mol_type = other DNA
ttcaaggcaaggatttgaga

SEQ ID NO: 6308 - DNA, 20 bp, synthetic construct
  misc_feature 1..20: note = chemically synthesized
  source 1..20: mol_type = other DNA
tttgagacagttaccccttc

SEQ ID NO: 6309 - DNA, 20 bp, synthetic construct
  misc_feature 1..20: note = chemically synthesized
  source 1..20: mol_type = other DNA
gagacagttaccccttctgg

SEQ ID NO: 6310 - DNA, 20 bp, synthetic construct
  misc_feature 1..20: note = chemically synthesized
  source 1..20: mol_type = other DNA
gacagttaccccttctggaa

SEQ ID NO: 6311 - DNA, 20 bp, synthetic construct
  misc_feature 1..20: note = chemically synthesized
  source 1..20: mol_type = other DNA
ttaccccttctggaagagcc

SEQ ID NO: 6312 - DNA, 20 bp, synthetic construct
  misc_feature 1..20: note = chemically synthesized
  source 1..20: mol_type = other DNA
cccttctggaagagcctggt

SEQ ID NO: 6313 - DNA, 20 bp, synthetic construct
  misc_feature 1..20: note = chemically synthesized
  source 1..20: mol_type = other DNA
tcctcaccgactttctctcc

SEQ ID NO: 6314 - DNA, 20 bp, synthetic construct
  misc_feature 1..20: note = chemically synthesized
  source 1..20: mol_type = other DNA
tcaccgactttctctcccag

SEQ ID NO: 6315 - DNA, 20 bp, synthetic construct
  misc_feature 1..20: note = chemically synthesized
  source 1..20: mol_type = other DNA
cgactttctctcccagcagc

SEQ ID NO: 6316 - DNA, 20 bp, synthetic construct
  misc_feature 1..20: note = chemically synthesized
  source 1..20: mol_type = other DNA
ctttctctcccagcagccag

SEQ ID NO: 6317 - DNA, 20 bp, synthetic construct
  misc_feature 1..20: note = chemically synthesized
  source 1..20: mol_type = other DNA
tttctctcccagcagccagc

SEQ ID NO: 6318 - DNA, 20 bp, synthetic construct
  misc_feature 1..20: note = chemically synthesized
  source 1..20: mol_type = other DNA
ttctctcccagcagccagca

SEQ ID NO: 6319 - DNA, 20 bp, synthetic construct
  misc_feature 1..20: note = chemically synthesized
  source 1..20: mol_type = other DNA
tctctcccagcagccagcag

SEQ ID NO: 6320 - DNA, 20 bp, synthetic construct
  misc_feature 1..20: note = chemically synthesized
  source 1..20: mol_type = other DNA
cccagcagccagcaggggcc

SEQ ID NO: 6321 - DNA, 20 bp, synthetic construct
  misc_feature 1..20: note = chemically synthesized
  source 1..20: mol_type = other DNA
ccagcagccagcaggggcct

SEQ ID NO: 6322 - DNA, 20 bp, synthetic construct
  misc_feature 1..20: note = chemically synthesized
  source 1..20: mol_type = other DNA
gcaggggcctgggccattta

SEQ ID NO: 6323 - DNA, 20 bp, synthetic construct
  misc_feature 1..20: note = chemically synthesized
  source 1..20: mol_type = other DNA
ctgggccatttatggaatgc

SEQ ID NO: 6324 - DNA, 20 bp, synthetic construct
  misc_feature 1..20: note = chemically synthesized
  source 1..20: mol_type = other DNA
gaatgcaagccctgaccaca

SEQ ID NO: 6325 - DNA, 20 bp, synthetic construct
  misc_feature 1..20: note = chemically synthesized
  source 1..20: mol_type = other DNA
acacagacttacttacatgc

SEQ ID NO: 6326 - DNA, 20 bp, synthetic construct
  misc_feature 1..20: note = chemically synthesized
  source 1..20: mol_type = other DNA
cacagacttacttacatgcc

SEQ ID NO: 6327 - DNA, 20 bp, synthetic construct
  misc_feature 1..20: note = chemically synthesized
  source 1..20: mol_type = other DNA
gacttacttacatgccagga

SEQ ID NO: 6328 - DNA, 20 bp, synthetic construct
  misc_feature 1..20: note = chemically synthesized
  source 1..20: mol_type = other DNA
ttacatgccaggacagccac

SEQ ID NO: 6329 - DNA, 20 bp, synthetic construct
  misc_feature 1..20: note = chemically synthesized
  source 1..20: mol_type = other DNA
tacatgccaggacagccacc

SEQ ID NO: 6330 - DNA, 20 bp, synthetic construct
  misc_feature 1..20: note = chemically synthesized
  source 1..20: mol_type = other DNA
atgccaggacagccaccagg

SEQ ID NO: 6331 - DNA, 20 bp, synthetic construct
  misc_feature 1..20: note = chemically synthesized
  source 1..20: mol_type = other DNA
ccaggtagcctttcccactc

SEQ ID NO: 6332 - DNA, 20 bp, synthetic construct
  misc_feature 1..20: note = chemically synthesized
  source 1..20: mol_type = other DNA
caggtagcctttcccactct

SEQ ID NO: 6333 - DNA, 20 bp, synthetic construct
  misc_feature 1..20: note = chemically synthesized
  source 1..20: mol_type = other DNA
cccactctaggttccactgt

SEQ ID NO: 6334 - DNA, 20 bp, synthetic construct
  misc_feature 1..20: note = chemically synthesized
  source 1..20: mol_type = other DNA
ctctctctcactatgctccc

SEQ ID NO: 6335 - DNA, 20 bp, synthetic construct
  misc_feature 1..20: note = chemically synthesized
  source 1..20: mol_type = other DNA
ctctctcactatgctcccaa

SEQ ID NO: 6336 - DNA, 20 bp, synthetic construct
  misc_feature 1..20: note = chemically synthesized
  source 1..20: mol_type = other DNA
tctctcactatgctcccaag

SEQ ID NO: 6337 - DNA, 20 bp, synthetic construct
  misc_feature 1..20: note = chemically synthesized
  source 1..20: mol_type = other DNA
tctcactatgctcccaagag

SEQ ID NO: 6338 - DNA, 20 bp, synthetic construct
  misc_feature 1..20: note = chemically synthesized
  source 1..20: mol_type = other DNA
cttcctcaaatctccctcac

SEQ ID NO: 6339 - DNA, 20 bp, synthetic construct
  misc_feature 1..20: note = chemically synthesized
  source 1..20: mol_type = other DNA
atctccctcactggatgtca

SEQ ID NO: 6340 - DNA, 20 bp, synthetic construct
  misc_feature 1..20: note = chemically synthesized
  source 1..20: mol_type = other DNA
ctcactggatgtcacagtca

SEQ ID NO: 6341 - DNA, 20 bp, synthetic construct
  misc_feature 1..20: note = chemically synthesized
  source 1..20: mol_type = other DNA
tcactggatgtcacagtcat

SEQ ID NO: 6342 - DNA, 20 bp, synthetic construct
  misc_feature 1..20: note = chemically synthesized
  source 1..20: mol_type = other DNA
gtcacagtcataggcctgaa

SEQ ID NO: 6343 - DNA, 20 bp, synthetic construct
  misc_feature 1..20: note = chemically synthesized
  source 1..20: mol_type = other DNA
acagtcataggcctgaaaag

SEQ ID NO: 6344 - DNA, 20 bp, synthetic construct
  misc_feature 1..20: note = chemically synthesized
  source 1..20: mol_type = other DNA
atgcaaactgaatttttgta

SEQ ID NO: 6345 - DNA, 20 bp, synthetic construct
  misc_feature 1..20: note = chemically synthesized
  source 1..20: mol_type = other DNA
caaactgaatttttgtaaag

SEQ ID NO: 6346 - DNA, 20 bp, synthetic construct
  misc_feature 1..20: note = chemically synthesized
  source 1..20: mol_type = other DNA
aaactgaatttttgtaaagc

SEQ ID NO: 6347 - DNA, 20 bp, synthetic construct
  misc_feature 1..20: note = chemically synthesized
  source 1..20: mol_type = other DNA
aagcaggacccatttcccca

SEQ ID NO: 6348 - DNA, 20 bp, synthetic construct
  misc_feature 1..20: note = chemically synthesized
  source 1..20: mol_type = other DNA
aggacccatttccccatgga

SEQ ID NO: 6349 - DNA, 20 bp, synthetic construct
  misc_feature 1..20: note = chemically synthesized
  source 1..20: mol_type = other DNA
atttccccatggacagtcat

SEQ ID NO: 6350 - DNA, 20 bp, synthetic construct
  misc_feature 1..20: note = chemically synthesized
  source 1..20: mol_type = other DNA
ttccccatggacagtcataa

SEQ ID NO: 6351 - DNA, 20 bp, synthetic construct
  misc_feature 1..20: note = chemically synthesized
  source 1..20: mol_type = other DNA
catggacagtcataagagat

SEQ ID NO: 6352 - DNA, 20 bp, synthetic construct
  misc_feature 1..20: note = chemically synthesized
  source 1..20: mol_type = other DNA
agagatgagtgaacacaatg

SEQ ID NO: 6353 - DNA, 20 bp, synthetic construct
  misc_feature 1..20: note = chemically synthesized
  source 1..20: mol_type = other DNA
cgattacttcacgataaatc

SEQ ID NO: 6354 - DNA, 20 bp, synthetic construct
  misc_feature 1..20: note = chemically synthesized
  source 1..20: mol_type = other DNA
cacgataaatctggattcca

SEQ ID NO: 6355 - DNA, 20 bp, synthetic construct
  misc_feature 1..20: note = chemically synthesized
  source 1..20: mol_type = other DNA
acgataaatctggattccaa

SEQ ID NO: 6356 - DNA, 20 bp, synthetic construct
  misc_feature 1..20: note = chemically synthesized
  source 1..20: mol_type = other DNA
cgataaatctggattccaaa

SEQ ID NO: 6357 - DNA, 20 bp, synthetic construct
  misc_feature 1..20: note = chemically synthesized
  source 1..20: mol_type = other DNA
ctggattccaaagggactat

SEQ ID NO: 6358 - DNA, 20 bp, synthetic construct
  misc_feature 1..20: note = chemically synthesized
  source 1..20: mol_type = other DNA
agggactataagctctcaca

SEQ ID NO: 6359 - DNA, 20 bp, synthetic construct
  misc_feature 1..20: note = chemically synthesized
  source 1..20: mol_type = other DNA
gactataagctctcacatgg

SEQ ID NO: 6360 - DNA, 20 bp, synthetic construct
  misc_feature 1..20: note = chemically synthesized
  source 1..20: mol_type = other DNA
actataagctctcacatgga

SEQ ID NO: 6361 - DNA, 20 bp, synthetic construct
  misc_feature 1..20: note = chemically synthesized
  source 1..20: mol_type = other DNA
ataagctctcacatggaagg

SEQ ID NO: 6362 - DNA, 20 bp, synthetic construct
  misc_feature 1..20: note = chemically synthesized
  source 1..20: mol_type = other DNA
gctctcacatggaaggaagc

SEQ ID NO: 6363 - DNA, 20 bp, synthetic construct
  misc_feature 1..20: note = chemically synthesized
  source 1..20: mol_type = other DNA
caagatctctactcctcccc

SEQ ID NO: 6364 - DNA, 20 bp, synthetic construct
  misc_feature 1..20: note = chemically synthesized
  source 1..20: mol_type = other DNA
tctactcctcccccagtgtt

SEQ ID NO: 6365 - DNA, 20 bp, synthetic construct
  misc_feature 1..20: note = chemically synthesized
  source 1..20: mol_type = other DNA
actcctcccccagtgttgag

SEQ ID NO: 6366 - DNA, 20 bp, synthetic construct
  misc_feature 1..20: note = chemically synthesized
  source 1..20: mol_type = other DNA
ctcccccagtgttgagtgga

SEQ ID NO: 6367 - DNA, 20 bp, synthetic construct
  misc_feature 1..20: note = chemically synthesized
  source 1..20: mol_type = other DNA
tcccccagtgttgagtggac

SEQ ID NO: 6368 - DNA, 20 bp, synthetic construct
  misc_feature 1..20: note = chemically synthesized
  source 1..20: mol_type = other DNA
cccccagtgttgagtggaca

SEQ ID NO: 6369 - DNA, 20 bp, synthetic construct
  misc_feature 1..20: note = chemically synthesized
  source 1..20: mol_type = other DNA
cccagtgttgagtggacagg

SEQ ID NO: 6370 - DNA, 20 bp, synthetic construct
  misc_feature 1..20: note = chemically synthesized
  source 1..20: mol_type = other DNA
agtggacagggagtacaccg

SEQ ID NO: 6371 - DNA, 20 bp, synthetic construct
  misc_feature 1..20: note = chemically synthesized
  source 1..20: mol_type = other DNA
agtacaccgcagacacctgt

SEQ ID NO: 6372 - DNA, 20 bp, synthetic construct
  misc_feature 1..20: note = chemically synthesized
  source 1..20: mol_type = other DNA
caaccaattctaattccctt

SEQ ID NO: 6373 - DNA, 20 bp, synthetic construct
  misc_feature 1..20: note = chemically synthesized
  source 1..20: mol_type = other DNA
caattctaattccctttagc

SEQ ID NO: 6374 - DNA, 20 bp, synthetic construct
  misc_feature 1..20: note = chemically synthesized
  source 1..20: mol_type = other DNA
ccctttagctagcatcccct

SEQ ID NO: 6375 - DNA, 20 bp, synthetic construct
  misc_feature 1..20: note = chemically synthesized
  source 1..20: mol_type = other DNA
ttagctagcatcccctaagc

SEQ ID NO: 6376 - DNA, 20 bp, synthetic construct
  misc_feature 1..20: note = chemically synthesized
  source 1..20: mol_type = other DNA
agctagcatcccctaagcta

SEQ ID NO: 6377 - DNA, 20 bp, synthetic construct
  misc_feature 1..20: note = chemically synthesized
  source 1..20: mol_type = other DNA
agcatcccctaagctagagc

SEQ ID NO: 6378 - DNA, 20 bp, synthetic construct
  misc_feature 1..20: note = chemically synthesized
  source 1..20: mol_type = other DNA
catcccctaagctagagcta

SEQ ID NO: 6379 - DNA, 20 bp, synthetic construct
  misc_feature 1..20: note = chemically synthesized
  source 1..20: mol_type = other DNA
ccctaagctagagctagagc

SEQ ID NO: 6380 - DNA, 20 bp, synthetic construct
  misc_feature 1..20: note = chemically synthesized
  source 1..20: mol_type = other DNA
ctaagctagagctagagcta

SEQ ID NO: 6381 - DNA, 20 bp, synthetic construct
  misc_feature 1..20: note = chemically synthesized
  source 1..20: mol_type = other DNA
gagctagagctatttccttg

SEQ ID NO: 6382 - DNA, 20 bp, synthetic construct
  misc_feature 1..20: note = chemically synthesized
  source 1..20: mol_type = other DNA
cttgcagccttccttttctc

SEQ ID NO: 6383 - DNA, 20 bp, synthetic construct
  misc_feature 1..20: note = chemically synthesized
  source 1..20: mol_type = other DNA
agccttccttttctctagca

SEQ ID NO: 6384 - DNA, 20 bp, synthetic construct
  misc_feature 1..20: note = chemically synthesized
  source 1..20: mol_type = other DNA
tctagcaaagtccttccatg

SEQ ID NO: 6385 - DNA, 20 bp, synthetic construct
  misc_feature 1..20: note = chemically synthesized
  source 1..20: mol_type = other DNA
agcaaagtccttccatgcag

SEQ ID NO: 6386 - DNA, 20 bp, synthetic construct
  misc_feature 1..20: note = chemically synthesized
  source 1..20: mol_type = other DNA
atgacctgtaaacacttaat

SEQ ID NO: 6387 - DNA, 20 bp, synthetic construct
  misc_feature 1..20: note = chemically synthesized
  source 1..20: mol_type = other DNA
cctgtaaacacttaatgagc

SEQ ID NO: 6388 - DNA, 20 bp, synthetic construct
  misc_feature 1..20: note = chemically synthesized
  source 1..20: mol_type = other DNA
tgtaaacacttaatgagcta

SEQ ID NO: 6389 - DNA, 20 bp, synthetic construct
  misc_feature 1..20: note = chemically synthesized
  source 1..20: mol_type = other DNA
ctagagaaacattccattga

SEQ ID NO: 6390 - DNA, 20 bp, synthetic construct
  misc_feature 1..20: note = chemically synthesized
  source 1..20: mol_type = other DNA
tagagaaacattccattgaa

SEQ ID NO: 6391 - DNA, 20 bp, synthetic construct
  misc_feature 1..20: note = chemically synthesized
  source 1..20: mol_type = other DNA
ccactgtgcatccttttgta

SEQ ID NO: 6392 - DNA, 20 bp, synthetic construct
  misc_feature 1..20: note = chemically synthesized
  source 1..20: mol_type = other DNA
actgtgcatccttttgtaaa

SEQ ID NO: 6393 - DNA, 20 bp, synthetic construct
  misc_feature 1..20: note = chemically synthesized
  source 1..20: mol_type = other DNA
ctgtgcatccttttgtaaag

SEQ ID NO: 6394 - DNA, 20 bp, synthetic construct
  misc_feature 1..20: note = chemically synthesized
  source 1..20: mol_type = other DNA
tgtgcatccttttgtaaaga

SEQ ID NO: 6395 - DNA, 20 bp, synthetic construct
  misc_feature 1..20: note = chemically synthesized
  source 1..20: mol_type = other DNA
gtgcatccttttgtaaagag

SEQ ID NO: 6396 - DNA, 20 bp, synthetic construct
  misc_feature 1..20: note = chemically synthesized
  source 1..20: mol_type = other DNA
tgcatccttttgtaaagagg

SEQ ID NO: 6397 - DNA, 20 bp, synthetic construct
  misc_feature 1..20: note = chemically synthesized
  source 1..20: mol_type = other DNA
gcatccttttgtaaagaggg

SEQ ID NO: 6398 - DNA, 20 bp, synthetic construct
  misc_feature 1..20: note = chemically synthesized
  source 1..20: mol_type = other DNA
ggaaaatcttttgtaaaacg

SEQ ID NO: 6399 - DNA, 20 bp, synthetic construct
  misc_feature 1..20: note = chemically synthesized
  source 1..20: mol_type = other DNA
tttaactgctctgtttgatc

SEQ ID NO: 6400 - DNA, 20 bp, synthetic construct
  misc_feature 1..20: note = chemically synthesized
  source 1..20: mol_type = other DNA
actgctctgtttgatcaagt

SEQ ID NO: 6401 - DNA, 20 bp, synthetic construct
  misc_feature 1..20: note = chemically synthesized
  source 1..20: mol_type = other DNA
tttgatcaagtcagattttt

SEQ ID NO: 6402 - DNA, 20 bp, synthetic construct
  misc_feature 1..20: note = chemically synthesized
  source 1..20: mol_type = other DNA
cagatttttcagaatatgaa

SEQ ID NO: 6403 - DNA, 20 bp, synthetic construct
  misc_feature 1..20: note = chemically synthesized
  source 1..20: mol_type = other DNA
tttttcagaatatgaatagc

SEQ ID NO: 6404 - DNA, 20 bp, synthetic construct
  misc_feature 1..20: note = chemically synthesized
  source 1..20: mol_type = other DNA
aatatgaatagctagtattc

SEQ ID NO: 6405 - DNA, 20 bp, synthetic construct
  misc_feature 1..20: note = chemically synthesized
  source 1..20: mol_type = other DNA
agcatatatgaactgtcttt

SEQ ID NO: 6406 - DNA, 20 bp, synthetic construct
  misc_feature 1..20: note = chemically synthesized
  source 1..20: mol_type = other DNA
tctttaagttaatcaatccc

SEQ ID NO: 6407 - DNA, 20 bp, synthetic construct
  misc_feature 1..20: note = chemically synthesized
  source 1..20: mol_type = other DNA
gttaatcaatccctagaaac

SEQ ID NO: 6408 - DNA, 20 bp, synthetic construct
  misc_feature 1..20: note = chemically synthesized
  source 1..20: mol_type = other DNA
aatccctagaaactagccct

SEQ ID NO: 6409 - DNA, 20 bp, synthetic construct
  misc_feature 1..20: note = chemically synthesized
  source 1..20: mol_type = other DNA
atccctagaaactagccctc

SEQ ID NO: 6410 - DNA, 20 bp, synthetic construct
  misc_feature 1..20: note = chemically synthesized
  source 1..20: mol_type = other DNA
ctagaaactagccctcaggt

SEQ ID NO: 6411 - DNA, 20 bp, synthetic construct
  misc_feature 1..20: note = chemically synthesized
  source 1..20: mol_type = other DNA
gaaactagccctcaggttag

SEQ ID NO: 6412 - DNA, 20 bp, synthetic construct
  misc_feature 1..20: note = chemically synthesized
  source 1..20: mol_type = other DNA
aaactagccctcaggttagc

SEQ ID NO: 6413 - DNA, 20 bp, synthetic construct
  misc_feature 1..20: note = chemically synthesized
  source 1..20: mol_type = other DNA
agccctcaggttagcaggcc

SEQ ID NO: 6414 - DNA, 20 bp, synthetic construct
  misc_feature 1..20: note = chemically synthesized
  source 1..20: mol_type = other DNA
gccctcaggttagcaggcca

SEQ ID NO: 6415 - DNA, 20 bp, synthetic construct
  misc_feature 1..20: note = chemically synthesized
  source 1..20: mol_type = other DNA
ttagcaggccaaggatatat

SEQ ID NO: 6416 - DNA, 20 bp, synthetic construct
  misc_feature 1..20: note = chemically synthesized
  source 1..20: mol_type = other DNA
agcaggccaaggatatatga

SEQ ID NO: 6417 - DNA, 20 bp, synthetic construct
  misc_feature 1..20: note = chemically synthesized
  source 1..20: mol_type = other DNA
ggatatatgagagtgctttg

SEQ ID NO: 6418 - DNA, 20 bp, synthetic construct
  misc_feature 1..20: note = chemically synthesized
  source 1..20: mol_type = other DNA
tatgagagtgctttgaagtc

SEQ ID NO: 6419 - DNA, 20 bp, synthetic construct
  misc_feature 1..20: note = chemically synthesized
  source 1..20: mol_type = other DNA
ctgccgctcctgaattgaat

SEQ ID NO: 6420 - DNA, 20 bp, synthetic construct
  misc_feature 1..20: note = chemically synthesized
  source 1..20: mol_type = other DNA
tgaattgaattagaacattc

SEQ ID NO: 6421 - DNA, 20 bp, synthetic construct
  misc_feature 1..20: note = chemically synthesized
  source 1..20: mol_type = other DNA
gaattgaattagaacattcc

SEQ ID NO: 6422 - DNA, 20 bp, synthetic construct
  misc_feature 1..20: note = chemically synthesized
  source 1..20: mol_type = other DNA
ttgaattagaacattccagg

SEQ ID NO: 6423 - DNA, 20 bp, synthetic construct
  misc_feature 1..20: note = chemically synthesized
  source 1..20: mol_type = other DNA
attagaacattccaggtaga

SEQ ID NO: 6424 - DNA, 20 bp, synthetic construct
  misc_feature 1..20: note = chemically synthesized
  source 1..20: mol_type = other DNA
attccaggtagacagattca

SEQ ID NO: 6425 - DNA, 20 bp, synthetic construct
  misc_feature 1..20: note = chemically synthesized
  source 1..20: mol_type = other DNA
agattcatggcccctaacat

SEQ ID NO: 6426 - DNA, 20 bp, synthetic construct
  misc_feature 1..20: note = chemically synthesized
  source 1..20: mol_type = other DNA
gattcatggcccctaacatc

SEQ ID NO: 6427 - DNA, 20 bp, synthetic construct
  misc_feature 1..20: note = chemically synthesized
  source 1..20: mol_type = other DNA
tggcccctaacatcaggaat

SEQ ID NO: 6428 - DNA, 20 bp, synthetic construct
  misc_feature 1..20: note = chemically synthesized
  source 1..20: mol_type = other DNA
ccctaacatcaggaatcagc

SEQ ID NO: 6429 - DNA, 20 bp, synthetic construct
  misc_feature 1..20: note = chemically synthesized
  source 1..20: mol_type = other DNA
gaatcagctagaaactcaat

SEQ ID NO: 6430 - DNA, 20 bp, synthetic construct
  misc_feature 1..20: note = chemically synthesized
  source 1..20: mol_type = other DNA
gaaactcaatcggctcttac

SEQ ID NO: 6431 - DNA, 20 bp, synthetic construct
  misc_feature 1..20: note = chemically synthesized
  source 1..20: mol_type = other DNA
ttaccagtcactacctacgt

SEQ ID NO: 6432 - DNA, 20 bp, synthetic construct
  misc_feature 1..20: note = chemically synthesized
  source 1..20: mol_type = other DNA
gtcagtgccatatcctataa

SEQ ID NO: 6433 - DNA, 20 bp, synthetic construct
  misc_feature 1..20: note = chemically synthesized
  source 1..20: mol_type = other DNA
gatgatgataataataataa

SEQ ID NO: 6434 - DNA, 20 bp, synthetic construct
  misc_feature 1..20: note = chemically synthesized
  source 1..20: mol_type = other DNA
ataataataatagcttccac

SEQ ID NO: 6435 - DNA, 20 bp, synthetic construct
  misc_feature 1..20: note = chemically synthesized
  source 1..20: mol_type = other DNA
taataatagcttccactgga

SEQ ID NO: 6436 - DNA, 20 bp, synthetic construct
  misc_feature 1..20: note = chemically synthesized
  source 1..20: mol_type = other DNA
ggatggcactttgcaccttc

SEQ ID NO: 6437 - DNA, 20 bp, synthetic construct
  misc_feature 1..20: note = chemically synthesized
  source 1..20: mol_type = other DNA
atggcactttgcaccttcca

SEQ ID NO: 6438 - DNA, 20 bp, synthetic construct
  misc_feature 1..20: note = chemically synthesized
  source 1..20: mol_type = other DNA
ttaacatcctttactttttt

SEQ ID NO: 6439 - DNA, 20 bp, synthetic construct
  misc_feature 1..20: note = chemically synthesized
  source 1..20: mol_type = other DNA
acatcctttactttttttgg

SEQ ID NO: 6440 - DNA, 20 bp, synthetic construct
  misc_feature 1..20: note = chemically synthesized
  source 1..20: mol_type = other DNA
catcctttactttttttgga

SEQ ID NO: 6441 - DNA, 20 bp, synthetic construct
  misc_feature 1..20: note = chemically synthesized
  source 1..20: mol_type = other DNA
tactttttttggaaggcctt

SEQ ID NO: 6442 - DNA, 20 bp, synthetic construct
  misc_feature 1..20: note = chemically synthesized
  source 1..20: mol_type = other DNA
actttttttggaaggccttc

SEQ ID NO: 6443 - DNA, 20 bp, synthetic construct
  misc_feature 1..20: note = chemically synthesized
  source 1..20: mol_type = other DNA
ttttggaaggccttcaggtc

SEQ ID NO: 6444 - DNA, 20 bp, synthetic construct
  misc_feature 1..20: note = chemically synthesized
  source 1..20: mol_type = other DNA
tctgaactatcaccttacta

SEQ ID NO: 6445 - DNA, 20 bp, synthetic construct
  misc_feature 1..20: note = chemically synthesized
  source 1..20: mol_type = other DNA
ctgaactatcaccttactat

SEQ ID NO: 6446 - DNA, 20 bp, synthetic construct
  misc_feature 1..20: note = chemically synthesized
  source 1..20: mol_type = other DNA
ataggcacatatttccccca

SEQ ID NO: 6447 - DNA, 20 bp, synthetic construct
  misc_feature 1..20: note = chemically synthesized
  source 1..20: mol_type = other DNA
taggcacatatttcccccaa

SEQ ID NO: 6448 - DNA, 20 bp, synthetic construct
  misc_feature 1..20: note = chemically synthesized
  source 1..20: mol_type = other DNA
catatttcccccaaaggact

SEQ ID NO: 6449 - DNA, 20 bp, synthetic construct
  misc_feature 1..20: note = chemically synthesized
  source 1..20: mol_type = other DNA
atttcccccaaaggactcag

SEQ ID NO: 6450 - DNA, 20 bp, synthetic construct
  misc_feature 1..20: note = chemically synthesized
  source 1..20: mol_type = other DNA
ttctccctttgctgatgatc

SEQ ID NO: 6451 - DNA, 20 bp, synthetic construct
  misc_feature 1..20: note = chemically synthesized
  source 1..20: mol_type = other DNA
tccctttgctgatgatccag

SEQ ID NO: 6452 - DNA, 20 bp, synthetic construct
  misc_feature 1..20: note = chemically synthesized
  source 1..20: mol_type = other DNA
cctttgctgatgatccagta

SEQ ID NO: 6453 - DNA, 20 bp, synthetic construct
  misc_feature 1..20: note = chemically synthesized
  source 1..20: mol_type = other DNA
tccagtagagaaatgatcaa

SEQ ID NO: 6454 - DNA, 20 bp, synthetic construct
  misc_feature 1..20: note = chemically synthesized
  source 1..20: mol_type = other DNA
ccagtagagaaatgatcaaa

SEQ ID NO: 6455 - DNA, 20 bp, synthetic construct
  misc_feature 1..20: note = chemically synthesized
  source 1..20: mol_type = other DNA
acattgtcctaaatgaaacc

SEQ ID NO: 6456 - DNA, 20 bp, synthetic construct
  misc_feature 1..20: note = chemically synthesized
  source 1..20: mol_type = other DNA
atgaaaccaagcttcctctg

SEQ ID NO: 6457 - DNA, 20 bp, synthetic construct
  misc_feature 1..20: note = chemically synthesized
  source 1..20: mol_type = other DNA
tgaaaccaagcttcctctgc

SEQ ID NO: 6458 - DNA, 20 bp, synthetic construct
  misc_feature 1..20: note = chemically synthesized
  source 1..20: mol_type = other DNA
accaagcttcctctgcagga

SEQ ID NO: 6459 - DNA, 20 bp, synthetic construct
  misc_feature 1..20: note = chemically synthesized
  source 1..20: mol_type = other DNA
aagcttcctctgcaggatgg

SEQ ID NO: 6460 - DNA, 20 bp, synthetic construct
  misc_feature 1..20: note = chemically synthesized
  source 1..20: mol_type = other DNA
ttcctctgcaggatggaagt

SEQ ID NO: 6461 - DNA, 20 bp, synthetic construct
  misc_feature 1..20: note = chemically synthesized
  source 1..20: mol_type = other DNA
tctgcaggatggaagtgagc

SEQ ID NO: 6462 - DNA, 20 bp, synthetic construct
  misc_feature 1..20: note = chemically synthesized
  source 1..20: mol_type = other DNA
ctgcaggatggaagtgagcc

SEQ ID NO: 6463 - DNA, 20 bp, synthetic construct
  misc_feature 1..20: note = chemically synthesized
  source 1..20: mol_type = other DNA
gatggaagtgagccaggtga

SEQ ID NO: 6464 - DNA, 20 bp, synthetic construct
  misc_feature 1..20: note = chemically synthesized
  source 1..20: mol_type = other DNA
ggaagtgagccaggtgatag

SEQ ID NO: 6465 - DNA, 20 bp, synthetic construct
  misc_feature 1..20: note = chemically synthesized
  source 1..20: mol_type = other DNA
gaagtgagccaggtgataga

SEQ ID NO: 6466 - DNA, 20 bp, synthetic construct
  misc_feature 1..20: note = chemically synthesized
  source 1..20: mol_type = other DNA
aagtgagccaggtgatagaa

SEQ ID NO: 6467 - DNA, 20 bp, synthetic construct
  misc_feature 1..20: note = chemically synthesized
  source 1..20: mol_type = other DNA
agtgagccaggtgatagaag

SEQ ID NO: 6468 - DNA, 20 bp, synthetic construct
  misc_feature 1..20: note = chemically synthesized
  source 1..20: mol_type = other DNA
gtgagccaggtgatagaagg

SEQ ID NO: 6469 - DNA, 20 bp, synthetic construct
  misc_feature 1..20: note = chemically synthesized
  source 1..20: mol_type = other DNA
gagccaggtgatagaagggg

SEQ ID NO: 6470 - DNA, 20 bp, synthetic construct
  misc_feature 1..20: note = chemically synthesized
  source 1..20: mol_type = other DNA
aggtgatagaagggggagcc

SEQ ID NO: 6471 - DNA, 20 bp, synthetic construct
  misc_feature 1..20: note = chemically synthesized
  source 1..20: mol_type = other DNA
gcctggacccaccgcttcat

SEQ ID NO: 6472 - DNA, 20 bp, synthetic construct
  misc_feature 1..20: note = chemically synthesized
  source 1..20: mol_type = other DNA
gacccaccgcttcattggcc

SEQ ID NO: 6473 - DNA, 20 bp, synthetic construct
  misc_feature 1..20: note = chemically synthesized
  source 1..20: mol_type = other DNA
acccaccgcttcattggccg

SEQ ID NO: 6474 - DNA, 20 bp, synthetic construct
  misc_feature 1..20: note = chemically synthesized
  source 1..20: mol_type = other DNA
tggccgaggatgaccccata

SEQ ID NO: 6475 - DNA, 20 bp, synthetic construct
  misc_feature 1..20: note = chemically synthesized
  source 1..20: mol_type = other DNA
ggccgaggatgaccccataa

SEQ ID NO: 6476 - DNA, 20 bp, synthetic construct
  misc_feature 1..20: note = chemically synthesized
  source 1..20: mol_type = other DNA
gaggatgaccccataaaggt

SEQ ID NO: 6477 - DNA, 20 bp, synthetic construct
  misc_feature 1..20: note = chemically synthesized
  source 1..20: mol_type = other DNA
aggatgaccccataaaggtc

SEQ ID NO: 6478 - DNA, 20 bp, synthetic construct
  misc_feature 1..20: note = chemically synthesized
  source 1..20: mol_type = other DNA
ggatgaccccataaaggtca

SEQ ID NO: 6479 - DNA, 20 bp, synthetic construct
  misc_feature 1..20: note = chemically synthesized
  source 1..20: mol_type = other DNA
ccataaaggtcagggtgttg

SEQ ID NO: 6480 - DNA, 20 bp, synthetic construct
  misc_feature 1..20: note = chemically synthesized
  source 1..20: mol_type = other DNA
ataaaggtcagggtgttgca

SEQ ID NO: 6481 - DNA, 20 bp, synthetic construct
  misc_feature 1..20: note = chemically synthesized
  source 1..20: mol_type = other DNA
gattgctatgcacaaaatcc

SEQ ID NO: 6482 - DNA, 20 bp, synthetic construct
  misc_feature 1..20: note = chemically synthesized
  source 1..20: mol_type = other DNA
ttgctatgcacaaaatccaa

SEQ ID NO: 6483 - DNA, 20 bp, synthetic construct
  misc_feature 1..20: note = chemically synthesized
  source 1..20: mol_type = other DNA
tgctatgcacaaaatccaag

SEQ ID NO: 6484 - DNA, 20 bp, synthetic construct
  misc_feature 1..20: note = chemically synthesized
  source 1..20: mol_type = other DNA
cacaaaatccaagaggccca

SEQ ID NO: 6485 - DNA, 20 bp, synthetic construct
  misc_feature 1..20: note = chemically synthesized
  source 1..20: mol_type = other DNA
caaaatccaagaggcccatg

SEQ ID NO: 6486 - DNA, 20 bp, synthetic construct
  misc_feature 1..20: note = chemically synthesized
  source 1..20: mol_type = other DNA
aaaatccaagaggcccatgg

SEQ ID NO: 6487 - DNA, 20 bp, synthetic construct
  misc_feature 1..20: note = chemically synthesized
  source 1..20: mol_type = other DNA
atccaagaggcccatggagg

SEQ ID NO: 6488 - DNA, 20 bp, synthetic construct
  misc_feature 1..20: note = chemically synthesized
  source 1..20: mol_type = other DNA
tccaagaggcccatggaggt

SEQ ID NO: 6489 - DNA, 20 bp, synthetic construct
  misc_feature 1..20: note = chemically synthesized
  source 1..20: mol_type = other DNA
ccaagaggcccatggaggtg

SEQ ID NO: 6490 - DNA, 20 bp, synthetic construct
  misc_feature 1..20: note = chemically synthesized
  source 1..20: mol_type = other DNA
aagaggcccatggaggtggg

SEQ ID NO: 6491 - DNA, 20 bp, synthetic construct
  misc_feature 1..20: note = chemically synthesized
  source 1..20: mol_type = other DNA
gcccatggaggtggggagat

SEQ ID NO: 6492 - DNA, 20 bp, synthetic construct
  misc_feature 1..20: note = chemically synthesized
  source 1..20: mol_type = other DNA
cccatggaggtggggagatg

SEQ ID NO: 6493 - DNA, 20 bp, synthetic construct
  misc_feature 1..20: note = chemically synthesized
  source 1..20: mol_type = other DNA
ccatggaggtggggagatga

SEQ ID NO: 6494 - DNA, 20 bp, synthetic construct
  misc_feature 1..20: note = chemically synthesized
  source 1..20: mol_type = other DNA
ggggagatgagggacccacc

SEQ ID NO: 6495 - DNA, 20 bp, synthetic construct
  misc_feature 1..20: note = chemically synthesized
  source 1..20: mol_type = other DNA
gagatgagggacccacctgg

SEQ ID NO: 6496 - DNA, 20 bp, synthetic construct
  misc_feature 1..20: note = chemically synthesized
  source 1..20: mol_type = other DNA
gacccacctggcagaccctc

SEQ ID NO: 6497 - DNA, 20 bp, synthetic construct
  misc_feature 1..20: note = chemically synthesized
  source 1..20: mol_type = other DNA
cccacctggcagaccctcaa

SEQ ID NO: 6498 - DNA, 20 bp, synthetic construct
  misc_feature 1..20: note = chemically synthesized
  source 1..20: mol_type = other DNA
acctggcagaccctcaagag

SEQ ID NO: 6499 - DNA, 20 bp, synthetic construct
  misc_feature 1..20: note = chemically synthesized
  source 1..20: mol_type = other DNA
cctggcagaccctcaagagc

SEQ ID NO: 6500 - DNA, 20 bp, synthetic construct
  misc_feature 1..20: note = chemically synthesized
  source 1..20: mol_type = other DNA
ctggcagaccctcaagagca

SEQ ID NO: 6501 - DNA, 20 bp, synthetic construct
  misc_feature 1..20: note = chemically synthesized
  source 1..20: mol_type = other DNA
tggcagaccctcaagagcag

SEQ ID NO: 6502 - DNA, 20 bp, synthetic construct
  misc_feature 1..20: note = chemically synthesized
  source 1..20: mol_type = other DNA
aagagcaggggtcttctctt

SEQ ID NO: 6503 - DNA, 20 bp, synthetic construct
  misc_feature 1..20: note = chemically synthesized
  source 1..20: mol_type = other DNA
agagcaggggtcttctcttt

SEQ ID NO: 6504 - DNA, 20 bp, synthetic construct
  misc_feature 1..20: note = chemically synthesized
  source 1..20: mol_type = other DNA
gagcaggggtcttctctttg

SEQ ID NO: 6505 - DNA, 20 bp, synthetic construct
  misc_feature 1..20: note = chemically synthesized
  source 1..20: mol_type = other DNA
agcaggggtcttctctttgg

SEQ ID NO: 6506 - DNA, 20 bp, synthetic construct
  misc_feature 1..20: note = chemically synthesized
  source 1..20: mol_type = other DNA
caggggtcttctctttgggg

SEQ ID NO: 6507 - DNA, 20 bp, synthetic construct
  misc_feature 1..20: note = chemically synthesized
  source 1..20: mol_type = other DNA
aggggtcttctctttggggg

SEQ ID NO: 6508 - DNA, 20 bp, synthetic construct
  misc_feature 1..20: note = chemically synthesized
  source 1..20: mol_type = other DNA
ttgggggaggacatcactct

SEQ ID NO: 6509 - DNA, 20 bp, synthetic construct
  misc_feature 1..20: note = chemically synthesized
  source 1..20: mol_type = other DNA
ggggaggacatcactcttag

SEQ ID NO: 6510 - DNA, 20 bp, synthetic construct
  misc_feature 1..20: note = chemically synthesized
  source 1..20: mol_type = other DNA
gggaggacatcactcttagc

SEQ ID NO: 6511 - DNA, 20 bp, synthetic construct
  misc_feature 1..20: note = chemically synthesized
  source 1..20: mol_type = other DNA
ggaggacatcactcttagca

SEQ ID NO: 6512 - DNA, 20 bp, synthetic construct
  misc_feature 1..20: note = chemically synthesized
  source 1..20: mol_type = other DNA
gacatcactcttagcagggc

SEQ ID NO: 6513 - DNA, 20 bp, synthetic construct
  misc_feature 1..20: note = chemically synthesized
  source 1..20: mol_type = other DNA
acatcactcttagcagggct

SEQ ID NO: 6514 - DNA, 20 bp, synthetic construct
  misc_feature 1..20: note = chemically synthesized
  source 1..20: mol_type = other DNA
catcactcttagcagggctg

SEQ ID NO: 6515 - DNA, 20 bp, synthetic construct
  misc_feature 1..20: note = chemically synthesized
  source 1..20: mol_type = other DNA
actcttagcagggctggggt

SEQ ID NO: 6516 - DNA, 20 bp, synthetic construct
  misc_feature 1..20: note = chemically synthesized
  source 1..20: mol_type = other DNA
gcagggctggggtgagtcaa

SEQ ID NO: 6517 - DNA, 20 bp, synthetic construct
  misc_feature 1..20: note = chemically synthesized
  source 1..20: mol_type = other DNA
gctggggtgagtcaaaagtc

SEQ ID NO: 6518 - DNA, 20 bp, synthetic construct
  misc_feature 1..20: note = chemically synthesized
  source 1..20: mol_type = other DNA
ctggggtgagtcaaaagtct

SEQ ID NO: 6519 - DNA, 20 bp, synthetic construct
  misc_feature 1..20: note = chemically synthesized
  source 1..20: mol_type = other DNA
ggggtgagtcaaaagtctgg

SEQ ID NO: 6520 - DNA, 20 bp, synthetic construct
  misc_feature 1..20: note = chemically synthesized
  source 1..20: mol_type = other DNA
gagtcaaaagtctgggagaa

SEQ ID NO: 6521 - DNA, 20 bp, synthetic construct
  misc_feature 1..20: note = chemically synthesized
  source 1..20: mol_type = other DNA
gtcaaaagtctgggagaatg

SEQ ID NO: 6522 - DNA, 20 bp, synthetic construct
  misc_feature 1..20: note = chemically synthesized
  source 1..20: mol_type = other DNA
tcaaaagtctgggagaatgg

SEQ ID NO: 6523 - DNA, 20 bp, synthetic construct
  misc_feature 1..20: note = chemically synthesized
  source 1..20: mol_type = other DNA
agtctgggagaatggaggtg

SEQ ID NO: 6524 - DNA, 20 bp, synthetic construct
  misc_feature 1..20: note = chemically synthesized
  source 1..20: mol_type = other DNA
tctgggagaatggaggtgtg

SEQ ID NO: 6525 - DNA, 20 bp, synthetic construct
  misc_feature 1..20: note = chemically synthesized
  source 1..20: mol_type = other DNA
ctgggagaatggaggtgtgg

SEQ ID NO: 6526 - DNA, 20 bp, synthetic construct
  misc_feature 1..20: note = chemically synthesized
  source 1..20: mol_type = other DNA
tgggagaatggaggtgtgga

SEQ ID NO: 6527 - DNA, 20 bp, synthetic construct
  misc_feature 1..20: note = chemically synthesized
  source 1..20: mol_type = other DNA
gggagaatggaggtgtggag

SEQ ID NO: 6528 - DNA, 20 bp, synthetic construct
  misc_feature 1..20: note = chemically synthesized
  source 1..20: mol_type = other DNA
ggaggtgtggaggggataac

SEQ ID NO: 6529 - DNA, 20 bp, synthetic construct
  misc_feature 1..20: note = chemically synthesized
  source 1..20: mol_type = other DNA
gaggtgtggaggggataact

SEQ ID NO: 6530 - DNA, 20 bp, synthetic construct
  misc_feature 1..20: note = chemically synthesized
  source 1..20: mol_type = other DNA
tgtggaggggataactgggt

SEQ ID NO: 6531 - DNA, 20 bp, synthetic construct
  misc_feature 1..20: note = chemically synthesized
  source 1..20: mol_type = other DNA
ggataactgggtcagacccc

SEQ ID NO: 6532 - DNA, 20 bp, synthetic construct
  misc_feature 1..20: note = chemically synthesized
  source 1..20: mol_type = other DNA
taactgggtcagaccccaag

SEQ ID NO: 6533 - DNA, 20 bp, synthetic construct
  misc_feature 1..20: note = chemically synthesized
  source 1..20: mol_type = other DNA
aactgggtcagaccccaagc

SEQ ID NO: 6534 - DNA, 20 bp, synthetic construct
  misc_feature 1..20: note = chemically synthesized
  source 1..20: mol_type = other DNA
tgggtcagaccccaagcagg

SEQ ID NO: 6535 - DNA, 20 bp, synthetic construct
  misc_feature 1..20: note = chemically synthesized
  source 1..20: mol_type = other DNA
gggtcagaccccaagcagga

SEQ ID NO: 6536 - DNA, 20 bp, synthetic construct
  misc_feature 1..20: note = chemically synthesized
  source 1..20: mol_type = other DNA
ggtcagaccccaagcaggaa

SEQ ID NO: 6537 - DNA, 20 bp, synthetic construct
  misc_feature 1..20: note = chemically synthesized
  source 1..20: mol_type = other DNA
aagcaggaagggcctctatg

SEQ ID NO: 6538 - DNA, 20 bp, synthetic construct
  misc_feature 1..20: note = chemically synthesized
  source 1..20: mol_type = other DNA
aggaagggcctctatgtaga

SEQ ID NO: 6539 - DNA, 20 bp, synthetic construct
  misc_feature 1..20: note = chemically synthesized
  source 1..20: mol_type = other DNA
ggaagggcctctatgtagac

SEQ ID NO: 6540 - DNA, 20 bp, synthetic construct
  misc_feature 1..20: note = chemically synthesized
  source 1..20: mol_type = other DNA
cctctatgtagacgggtgtg

SEQ ID NO: 6541 - DNA, 20 bp, synthetic construct
  misc_feature 1..20: note = chemically synthesized
  source 1..20: mol_type = other DNA
agacgggtgtgtggctcctt

SEQ ID NO: 6542 - DNA, 20 bp, synthetic construct
  misc_feature 1..20: note = chemically synthesized
  source 1..20: mol_type = other DNA
gacgggtgtgtggctcctta

SEQ ID NO: 6543 - DNA, 20 bp, synthetic construct
  misc_feature 1..20: note = chemically synthesized
  source 1..20: mol_type = other DNA
tgtggctccttaaggtgacc

SEQ ID NO: 6544 - DNA, 20 bp, synthetic construct
  misc_feature 1..20: note = chemically synthesized
  source 1..20: mol_type = other DNA
ggctccttaaggtgacccag

SEQ ID NO: 6545 - DNA, 20 bp, synthetic construct
  misc_feature 1..20: note = chemically synthesized
  source 1..20: mol_type = other DNA
ttaaggtgacccagcagccc

SEQ ID NO: 6546 - DNA, 20 bp, synthetic construct
  misc_feature 1..20: note = chemically synthesized
  source 1..20: mol_type = other DNA
taaggtgacccagcagccct

SEQ ID NO: 6547 - DNA, 20 bp, synthetic construct
  misc_feature 1..20: note = chemically synthesized
  source 1..20: mol_type = other DNA
tgacccagcagccctgggca

SEQ ID NO: 6548 - DNA, 20 bp, synthetic construct
  misc_feature 1..20: note = chemically synthesized
  source 1..20: mol_type = other DNA
cccagcagccctgggcacag

SEQ ID NO: 6549 - DNA, 20 bp, synthetic construct
  misc_feature 1..20: note = chemically synthesized
  source 1..20: mol_type = other DNA
agcagccctgggcacagaag

SEQ ID NO: 6550 - DNA, 20 bp, synthetic construct
  misc_feature 1..20: note = chemically synthesized
  source 1..20: mol_type = other DNA
ctgggcacagaagtggtgcg

SEQ ID NO: 6551 - DNA, 20 bp, synthetic construct
  misc_feature 1..20: note = chemically synthesized
  source 1..20: mol_type = other DNA
gggcacagaagtggtgcgtg

SEQ ID NO: 6552 - DNA, 20 bp, synthetic construct
  misc_feature 1..20: note = chemically synthesized
  source 1..20: mol_type = other DNA
gtgcgtggagataatgccaa

SEQ ID NO: 6553 - DNA, 20 bp, synthetic construct
  misc_feature 1..20: note = chemically synthesized
  source 1..20: mol_type = other DNA
ataatgccaacagtgataac

SEQ ID NO: 6554 - DNA, 20 bp, synthetic construct
  misc_feature 1..20: note = chemically synthesized
  source 1..20: mol_type = other DNA
atgccaacagtgataaccag

SEQ ID NO: 6555 - DNA, 20 bp, synthetic construct
  misc_feature 1..20: note = chemically synthesized
  source 1..20: mol_type = other DNA
tgccaacagtgataaccagc

SEQ ID NO: 6556 - DNA, 20 bp, synthetic construct
  misc_feature 1..20: note = chemically synthesized
  source 1..20: mol_type = other DNA
gccaacagtgataaccagca

SEQ ID NO: 6557 - DNA, 20 bp, synthetic construct
  misc_feature 1..20: note = chemically synthesized
  source 1..20: mol_type = other DNA
tgataaccagcagggcctgt

SEQ ID NO: 6558 - DNA, 20 bp, synthetic construct
  misc_feature 1..20: note = chemically synthesized
  source 1..20: mol_type = other DNA
taaccagcagggcctgtcag

SEQ ID NO: 6559 - DNA, 20 bp, synthetic construct
  misc_feature 1..20: note = chemically synthesized
  source 1..20: mol_type = other DNA
accagcagggcctgtcagaa

SEQ ID NO: 6560 - DNA, 20 bp, synthetic construct
  misc_feature 1..20: note = chemically synthesized
  source 1..20: mol_type = other DNA
ccagcagggcctgtcagaag

SEQ ID NO: 6561 - DNA, 20 bp, synthetic construct
  misc_feature 1..20: note = chemically synthesized
  source 1..20: mol_type = other DNA
gggcctgtcagaagaggccc

SEQ ID NO: 6562 - DNA, 20 bp, synthetic construct
  misc_feature 1..20: note = chemically synthesized
  source 1..20: mol_type = other DNA
agaagaggccctggacactg

SEQ ID NO: 6563 - DNA, 20 bp, synthetic construct
  misc_feature 1..20: note = chemically synthesized
  source 1..20: mol_type = other DNA
gaagaggccctggacactga

SEQ ID NO: 6564 - DNA, 20 bp, synthetic construct
  misc_feature 1..20: note = chemically synthesized
  source 1..20: mol_type = other DNA
aggccctggacactgaaggc

SEQ ID NO: 6565 - DNA, 20 bp, synthetic construct
  misc_feature 1..20: note = chemically synthesized
  source 1..20: mol_type = other DNA
ggccctggacactgaaggct

SEQ ID NO: 6566 - DNA, 20 bp, synthetic construct
  misc_feature 1..20: note = chemically synthesized
  source 1..20: mol_type = other DNA
tggacactgaaggctgggca

SEQ ID NO: 6567 - DNA, 20 bp, synthetic construct
  misc_feature 1..20: note = chemically synthesized
  source 1..20: mol_type = other DNA
ctgaaggctgggcacagcct

SEQ ID NO: 6568 - DNA, 20 bp, synthetic construct
  misc_feature 1..20: note = chemically synthesized
  source 1..20: mol_type = other DNA
tgaaggctgggcacagcctt

SEQ ID NO: 6569 - DNA, 20 bp, synthetic construct
  misc_feature 1..20: note = chemically synthesized
  source 1..20: mol_type = other DNA
gaaggctgggcacagccttg

SEQ ID NO: 6570 - DNA, 20 bp, synthetic construct
  misc_feature 1..20: note = chemically synthesized
  source 1..20: mol_type = other DNA
acagccttggggaccgctca

SEQ ID NO: 6571 - DNA, 20 bp, synthetic construct
  misc_feature 1..20: note = chemically synthesized
  source 1..20: mol_type = other DNA
cagccttggggaccgctcac

SEQ ID NO: 6572 - DNA, 20 bp, synthetic construct
  misc_feature 1..20: note = chemically synthesized
  source 1..20: mol_type = other DNA
gggaccgctcacaggacatg

SEQ ID NO: 6573 - DNA, 20 bp, synthetic construct
  misc_feature 1..20: note = chemically synthesized
  source 1..20: mol_type = other DNA
accgctcacaggacatgcag

SEQ ID NO: 6574 - DNA, 20 bp, synthetic construct
  misc_feature 1..20: note = chemically synthesized
  source 1..20: mol_type = other DNA
ctccctaccgcgacccctat

SEQ ID NO: 6575 - DNA, 20 bp, synthetic construct
  misc_feature 1..20: note = chemically synthesized
  source 1..20: mol_type = other DNA
gacccctatcagtgccgacc

SEQ ID NO: 6576 - DNA, 20 bp, synthetic construct
  misc_feature 1..20: note = chemically synthesized
  source 1..20: mol_type = other DNA
tcagtgccgaccaagcacac

SEQ ID NO: 6577 - DNA, 20 bp, synthetic construct
  misc_feature 1..20: note = chemically synthesized
  source 1..20: mol_type = other DNA
aagcacacaagatgcacacc

SEQ ID NO: 6578 - DNA, 20 bp, synthetic construct
  misc_feature 1..20: note = chemically synthesized
  source 1..20: mol_type = other DNA
agcacacaagatgcacaccc

SEQ ID NO: 6579 - DNA, 20 bp, synthetic construct
  misc_feature 1..20: note = chemically synthesized
  source 1..20: mol_type = other DNA
cacaagatgcacacccaggc

SEQ ID NO: 6580 - DNA, 20 bp, synthetic construct
  misc_feature 1..20: note = chemically synthesized
  source 1..20: mol_type = other DNA
acaagatgcacacccaggct

SEQ ID NO: 6581 - DNA, 20 bp, synthetic construct
  misc_feature 1..20: note = chemically synthesized
  source 1..20: mol_type = other DNA
gatgcacacccaggctgggc

SEQ ID NO: 6582 - DNA, 20 bp, synthetic construct
  misc_feature 1..20: note = chemically synthesized
  source 1..20: mol_type = other DNA
cacacccaggctgggctgga

SEQ ID NO: 6583 - DNA, 20 bp, synthetic construct
  misc_feature 1..20: note = chemically synthesized
  source 1..20: mol_type = other DNA
cacccaggctgggctggaca

SEQ ID NO: 6584 - DNA, 20 bp, synthetic construct
  misc_feature 1..20: note = chemically synthesized
  source 1..20: mol_type = other DNA
acccaggctgggctggacag

SEQ ID NO: 6585 - DNA, 20 bp, synthetic construct
  misc_feature 1..20: note = chemically synthesized
  source 1..20: mol_type = other DNA
cccaggctgggctggacaga

SEQ ID NO: 6586 - DNA, 20 bp, synthetic construct
  misc_feature 1..20: note = chemically synthesized
  source 1..20: mol_type = other DNA
ccaggctgggctggacagag

SEQ ID NO: 6587 - DNA, 20 bp, synthetic construct
  misc_feature 1..20: note = chemically synthesized
  source 1..20: mol_type = other DNA
gctggacagaggggtcccac

SEQ ID NO: 6588 - DNA, 20 bp, synthetic construct
  misc_feature 1..20: note = chemically synthesized
  source 1..20: mol_type = other DNA
agaggggtcccacaagatca

SEQ ID NO: 6589 - DNA, 20 bp, synthetic construct
  misc_feature 1..20: note = chemically synthesized
  source 1..20: mol_type = other DNA
gaggggtcccacaagatcac

SEQ ID NO: 6590 - DNA, 20 bp, synthetic construct
  misc_feature 1..20: note = chemically synthesized
  source 1..20: mol_type = other DNA
aggggtcccacaagatcaca

SEQ ID NO: 6591 - DNA, 20 bp, synthetic construct
  misc_feature 1..20: note = chemically synthesized
  source 1..20: mol_type = other DNA
aagatcacagggtgtgccct

SEQ ID NO: 6592 - DNA, 20 bp, synthetic construct
  misc_feature 1..20: note = chemically synthesized
  source 1..20: mol_type = other DNA
atcacagggtgtgccctgag

SEQ ID NO: 6593 - DNA, 20 bp, synthetic construct
  misc_feature 1..20: note = chemically synthesized
  source 1..20: mol_type = other DNA
tcacagggtgtgccctgaga

SEQ ID NO: 6594 - DNA, 20 bp, synthetic construct
  misc_feature 1..20: note = chemically synthesized
  source 1..20: mol_type = other DNA
cagggtgtgccctgagaagg

SEQ ID NO: 6595 - DNA, 20 bp, synthetic construct
  misc_feature 1..20: note = chemically synthesized
  source 1..20: mol_type = other DNA
agggtgtgccctgagaaggt

SEQ ID NO: 6596 - DNA, 20 bp, synthetic construct
  misc_feature 1..20: note = chemically synthesized
  source 1..20: mol_type = other DNA
gggtgtgccctgagaaggtg

SEQ ID NO: 6597 - DNA, 20 bp, synthetic construct
  misc_feature 1..20: note = chemically synthesized
  source 1..20: mol_type = other DNA
gtgtgccctgagaaggtggg

SEQ ID NO: 6598 - DNA, 20 bp, synthetic construct
  misc_feature 1..20: note = chemically synthesized
  source 1..20: mol_type = other DNA
ctgagaaggtggggagctca

SEQ ID NO: 6599 - DNA, 20 bp, synthetic construct
  misc_feature 1..20: note = chemically synthesized
  source 1..20: mol_type = other DNA
gtggggagctcacagcctcc

SEQ ID NO: 6600 - DNA, 20 bp, synthetic construct
  misc_feature 1..20: note = chemically synthesized
  source 1..20: mol_type = other DNA
ctccaagcattgcatcatcc

SEQ ID NO: 6601 - DNA, 20 bp, synthetic construct
  misc_feature 1..20: note = chemically synthesized
  source 1..20: mol_type = other DNA
gcattgcatcatcctggtac

SEQ ID NO: 6602 - DNA, 20 bp, synthetic construct
  misc_feature 1..20: note = chemically synthesized
  source 1..20: mol_type = other DNA
cattgcatcatcctggtacc

SEQ ID NO: 6603 - DNA, 20 bp, synthetic construct
  misc_feature 1..20: note = chemically synthesized
  source 1..20: mol_type = other DNA
tgcatcatcctggtaccagg

SEQ ID NO: 6604 - DNA, 20 bp, synthetic construct
  misc_feature 1..20: note = chemically synthesized
  source 1..20: mol_type = other DNA
gcatcatcctggtaccagga

SEQ ID NO: 6605 - DNA, 20 bp, synthetic construct
  misc_feature 1..20: note = chemically synthesized
  source 1..20: mol_type = other DNA
tcctggtaccaggaaggcaa

SEQ ID NO: 6606 - DNA, 20 bp, synthetic construct
  misc_feature 1..20: note = chemically synthesized
  source 1..20: mol_type = other DNA
cctggtaccaggaaggcaat

SEQ ID NO: 6607 - DNA, 20 bp, synthetic construct
  misc_feature 1..20: note = chemically synthesized
  source 1..20: mol_type = other DNA
cccatacccacttcccttcc

SEQ ID NO: 6608 - DNA, 20 bp, synthetic construct
  misc_feature 1..20: note = chemically synthesized
  source 1..20: mol_type = other DNA
cccacttcccttcctagaat

SEQ ID NO: 6609 - DNA, 20 bp, synthetic construct
  misc_feature 1..20: note = chemically synthesized
  source 1..20: mol_type = other DNA
ttcccttcctagaattggcc

SEQ ID NO: 6610 - DNA, 20 bp, synthetic construct
  misc_feature 1..20: note = chemically synthesized
  source 1..20: mol_type = other DNA
tcccttcctagaattggcct

SEQ ID NO: 6611 - DNA, 20 bp, synthetic construct
  misc_feature 1..20: note = chemically synthesized
  source 1..20: mol_type = other DNA
ggcctgggacattcattatt

SEQ ID NO: 6612 - DNA, 20 bp, synthetic construct
  misc_feature 1..20: note = chemically synthesized
  source 1..20: mol_type = other DNA
attcattatttagccacctc

SEQ ID NO: 6613 - DNA, 20 bp, synthetic construct
  misc_feature 1..20: note = chemically synthesized
  source 1..20: mol_type = other DNA
atttgtttttcaaattttaa

SEQ ID NO: 6614 - DNA, 20 bp, synthetic construct
  misc_feature 1..20: note = chemically synthesized
  source 1..20: mol_type = other DNA
tttcaaattttaatagcaaa

SEQ ID NO: 6615 - DNA, 20 bp, synthetic construct
  misc_feature 1..20: note = chemically synthesized
  source 1..20: mol_type = other DNA
ttcaaattttaatagcaaat

SEQ ID NO: 6616 - DNA, 20 bp, synthetic construct
  misc_feature 1..20: note = chemically synthesized
  source 1..20: mol_type = other DNA
attttaatagcaaataggct

SEQ ID NO: 6617 - DNA, 20 bp, synthetic construct
  misc_feature 1..20: note = chemically synthesized
  source 1..20: mol_type = other DNA
agcaaataggcttagtgtgc

SEQ ID NO: 6618 - DNA, 20 bp, synthetic construct
  misc_feature 1..20: note = chemically synthesized
  source 1..20: mol_type = other DNA
gcaaataggcttagtgtgct

SEQ ID NO: 6619 - DNA, 20 bp, synthetic construct
  misc_feature 1..20: note = chemically synthesized
  source 1..20: mol_type = other DNA
aataggcttagtgtgctggg

SEQ ID NO: 6620 - DNA, 20 bp, synthetic construct
  misc_feature 1..20: note = chemically synthesized
  source 1..20: mol_type = other DNA
taggcttagtgtgctgggca

SEQ ID NO: 6621 - DNA, 20 bp, synthetic construct
  misc_feature 1..20: note = chemically synthesized
  source 1..20: mol_type = other DNA
ttagtgtgctgggcagagct

SEQ ID NO: 6622 - DNA, 20 bp, synthetic construct
  misc_feature 1..20: note = chemically synthesized
  source 1..20: mol_type = other DNA
gtgtgctgggcagagctgag

SEQ ID NO: 6623 - DNA, 20 bp, synthetic construct
  misc_feature 1..20: note = chemically synthesized
  source 1..20: mol_type = other DNA
gtgctgggcagagctgagca

SEQ ID NO: 6624 - DNA, 20 bp, synthetic construct
  misc_feature 1..20: note = chemically synthesized
  source 1..20: mol_type = other DNA
tgctgggcagagctgagcag

SEQ ID NO: 6625 - DNA, 20 bp, synthetic construct
  misc_feature 1..20: note = chemically synthesized
  source 1..20: mol_type = other DNA
acccctctacctactcacat

SEQ ID NO: 6626 - DNA, 20 bp, synthetic construct
  misc_feature 1..20: note = chemically synthesized
  source 1..20: mol_type = other DNA
tctacctactcacataagat

SEQ ID NO: 6627 - DNA, 20 bp, synthetic construct
  misc_feature 1..20: note = chemically synthesized
  source 1..20: mol_type = other DNA
ctactcacataagatcagta

SEQ ID NO: 6628 - DNA, 20 bp, synthetic construct
  misc_feature 1..20: note = chemically synthesized
  source 1..20: mol_type = other DNA
actcacataagatcagtaaa

SEQ ID NO: 6629 - DNA, 20 bp, synthetic construct
  misc_feature 1..20: note = chemically synthesized
  source 1..20: mol_type = other DNA
cacataagatcagtaaagag

SEQ ID NO: 6630 - DNA, 20 bp, synthetic construct
  misc_feature 1..20: note = chemically synthesized
  source 1..20: mol_type = other DNA
acataagatcagtaaagaga

SEQ ID NO: 6631 - DNA, 20 bp, synthetic construct
  misc_feature 1..20: note = chemically synthesized
  source 1..20: mol_type = other DNA
taagatcagtaaagagaagg

SEQ ID NO: 6632 - DNA, 20 bp, synthetic construct
  misc_feature 1..20: note = chemically synthesized
  source 1..20: mol_type = other DNA
gatcagtaaagagaaggaag

SEQ ID NO: 6633 - DNA, 20 bp, synthetic construct
  misc_feature 1..20: note = chemically synthesized
  source 1..20: mol_type = other DNA
atcagtaaagagaaggaagc

SEQ ID NO: 6634 - DNA, 20 bp, synthetic construct
  misc_feature 1..20: note = chemically synthesized
  source 1..20: mol_type = other DNA
agtaaagagaaggaagcagg

SEQ ID NO: 6635 - DNA, 20 bp, synthetic construct
  misc_feature 1..20: note = chemically synthesized
  source 1..20: mol_type = other DNA
agagaaggaagcaggcagat

SEQ ID NO: 6636 - DNA, 20 bp, synthetic construct
  misc_feature 1..20: note = chemically synthesized
  source 1..20: mol_type = other DNA
gagaaggaagcaggcagatg

SEQ ID NO: 6637 - DNA, 20 bp, synthetic construct
  misc_feature 1..20: note = chemically synthesized
  source 1..20: mol_type = other DNA
aagcaggcagatgaggtgac

SEQ ID NO: 6638 - DNA, 20 bp, synthetic construct
  misc_feature 1..20: note = chemically synthesized
  source 1..20: mol_type = other DNA
agcaggcagatgaggtgaca

SEQ ID NO: 6639 - DNA, 20 bp, synthetic construct
  misc_feature 1..20: note = chemically synthesized
  source 1..20: mol_type = other DNA
gcaggcagatgaggtgacaa

SEQ ID NO: 6640 - DNA, 20 bp, synthetic construct
  misc_feature 1..20: note = chemically synthesized
  source 1..20: mol_type = other DNA
caggcagatgaggtgacaag

SEQ ID NO: 6641 - DNA, 20 bp, synthetic construct
  misc_feature 1..20: note = chemically synthesized
  source 1..20: mol_type = other DNA
ggcagatgaggtgacaaggg

SEQ ID NO: 6642 - DNA, 20 bp, synthetic construct
  misc_feature 1..20: note = chemically synthesized
  source 1..20: mol_type = other DNA
gaggtgacaaggggagaaac

SEQ ID NO: 6643 - DNA, 20 bp, synthetic construct
  misc_feature 1..20: note = chemically synthesized
  source 1..20: mol_type = other DNA
tgacaaggggagaaaccagt

SEQ ID NO: 6644 - DNA, 20 bp, synthetic construct
  misc_feature 1..20: note = chemically synthesized
  source 1..20: mol_type = other DNA
gacaaggggagaaaccagtg

SEQ ID NO: 6645 - DNA, 20 bp, synthetic construct
  misc_feature 1..20: note = chemically synthesized
  source 1..20: mol_type = other DNA
gaaaccagtgaggtcatcta

SEQ ID NO: 6646 - DNA, 20 bp, synthetic construct
  misc_feature 1..20: note = chemically synthesized
  source 1..20: mol_type = other DNA
aaaccagtgaggtcatctat

SEQ ID NO: 6647 - DNA, 20 bp, synthetic construct
  misc_feature 1..20: note = chemically synthesized
  source 1..20: mol_type = other DNA
gtgaggtcatctataggtcc

SEQ ID NO: 6648 - DNA, 20 bp, synthetic construct
  misc_feature 1..20: note = chemically synthesized
  source 1..20: mol_type = other DNA
tctataggtccaagttcgta

SEQ ID NO: 6649 - DNA, 20 bp, synthetic construct
  misc_feature 1..20: note = chemically synthesized
  source 1..20: mol_type = other DNA
ggtccaagttcgtacagacc

SEQ ID NO: 6650 - DNA, 20 bp, synthetic construct
  misc_feature 1..20: note = chemically synthesized
  source 1..20: mol_type = other DNA
caagttcgtacagacccagc

SEQ ID NO: 6651 - DNA, 20 bp, synthetic construct
  misc_feature 1..20: note = chemically synthesized
  source 1..20: mol_type = other DNA
tacagacccagccagactgc

SEQ ID NO: 6652 - DNA, 20 bp, synthetic construct
  misc_feature 1..20: note = chemically synthesized
  source 1..20: mol_type = other DNA
agccagactgccagttctct

SEQ ID NO: 6653 - DNA, 20 bp, synthetic construct
  misc_feature 1..20: note = chemically synthesized
  source 1..20: mol_type = other DNA
gccagactgccagttctctg

SEQ ID NO: 6654 - DNA, 20 bp, synthetic construct
  misc_feature 1..20: note = chemically synthesized
  source 1..20: mol_type = other DNA
cagactgccagttctctgag

SEQ ID NO: 6655 - DNA, 20 bp, synthetic construct
  misc_feature 1..20: note = chemically synthesized
  source 1..20: mol_type = other DNA
ctgccagttctctgaggagc

SEQ ID NO: 6656 - DNA, 20 bp, synthetic construct
  misc_feature 1..20: note = chemically synthesized
  source 1..20: mol_type = other DNA
gccagttctctgaggagcta

SEQ ID NO: 6657 - DNA, 20 bp, synthetic construct
  misc_feature 1..20: note = chemically synthesized
  source 1..20: mol_type = other DNA
tctgaggagctagagacttg

SEQ ID NO: 6658 - DNA, 20 bp, synthetic construct
  misc_feature 1..20: note = chemically synthesized
  source 1..20: mol_type = other DNA
gagctagagacttgtggctt

SEQ ID NO: 6659 - DNA, 20 bp, synthetic construct
  misc_feature 1..20: note = chemically synthesized
  source 1..20: mol_type = other DNA
agctagagacttgtggctta

SEQ ID NO: 6660 - DNA, 20 bp, synthetic construct
  misc_feature 1..20: note = chemically synthesized
  source 1..20: mol_type = other DNA
tagagacttgtggcttaagg

SEQ ID NO: 6661 - DNA, 20 bp, synthetic construct
  misc_feature 1..20: note = chemically synthesized
  source 1..20: mol_type = other DNA
gcttaaggaagcctctctga

SEQ ID NO: 6662 - DNA, 20 bp, synthetic construct
  misc_feature 1..20: note = chemically synthesized
  source 1..20: mol_type = other DNA
ctgtaaatcttgatcaaact

SEQ ID NO: 6663 - DNA, 20 bp, synthetic construct
  misc_feature 1..20: note = chemically synthesized
  source 1..20: mol_type = other DNA
agatgactgtccaactcatc

SEQ ID NO: 6664 - DNA, 20 bp, synthetic construct
  misc_feature 1..20: note = chemically synthesized
  source 1..20: mol_type = other DNA
cagaaactacgtttgtctaa

SEQ ID NO: 6665 - DNA, 20 bp, synthetic construct
  misc_feature 1..20: note = chemically synthesized
  source 1..20: mol_type = other DNA
actacgtttgtctaatagaa

SEQ ID NO: 6666 - DNA, 20 bp, synthetic construct
  misc_feature 1..20: note = chemically synthesized
  source 1..20: mol_type = other DNA
ctacgtttgtctaatagaac

SEQ ID NO: 6667 - DNA, 20 bp, synthetic construct
  misc_feature 1..20: note = chemically synthesized
  source 1..20: mol_type = other DNA
cgtttgtctaatagaacagg

SEQ ID NO: 6668 - DNA, 20 bp, synthetic construct
  misc_feature 1..20: note = chemically synthesized
  source 1..20: mol_type = other DNA
ttgtctaatagaacaggaag

SEQ ID NO: 6669 - DNA, 20 bp, synthetic construct
  misc_feature 1..20: note = chemically synthesized
  source 1..20: mol_type = other DNA
tgtctaatagaacaggaagc

SEQ ID NO: 6670 - DNA, 20 bp, synthetic construct
  misc_feature 1..20: note = chemically synthesized
  source 1..20: mol_type = other DNA
ctaatagaacaggaagcagg

SEQ ID NO: 6671 - DNA, 20 bp, synthetic construct
  misc_feature 1..20: note = chemically synthesized
  source 1..20: mol_type = other DNA
atagaacaggaagcaggtgg

SEQ ID NO: 6672 - DNA, 20 bp, synthetic construct
  misc_feature 1..20: note = chemically synthesized
  source 1..20: mol_type = other DNA
gaacaggaagcaggtggtgg

SEQ ID NO: 6673 - DNA, 20 bp, synthetic construct
  misc_feature 1..20: note = chemically synthesized
  source 1..20: mol_type = other DNA
caggaagcaggtggtggtgg

SEQ ID NO: 6674 - DNA, 20 bp, synthetic construct
  misc_feature 1..20: note = chemically synthesized
  source 1..20: mol_type = other DNA
aggaagcaggtggtggtggt

SEQ ID NO: 6675 - DNA, 20 bp, synthetic construct
  misc_feature 1..20: note = chemically synthesized
  source 1..20: mol_type = other DNA
aagcaggtggtggtggtggg

SEQ ID NO: 6676 - DNA, 20 bp, synthetic construct
  misc_feature 1..20: note = chemically synthesized
  source 1..20: mol_type = other DNA
caggtggtggtggtgggtgg

SEQ ID NO: 6677 - DNA, 20 bp, synthetic construct
  misc_feature 1..20: note = chemically synthesized
  source 1..20: mol_type = other DNA
aggtggtggtggtgggtggt

SEQ ID NO: 6678 - DNA, 20 bp, synthetic construct
  misc_feature 1..20: note = chemically synthesized
  source 1..20: mol_type = other DNA
ggtggtggtggtgggtggtg

SEQ ID NO: 6679 - DNA, 20 bp, synthetic construct
  misc_feature 1..20: note = chemically synthesized
  source 1..20: mol_type = other DNA
gtggtggtggtgggtggtgg

SEQ ID NO: 6680 - DNA, 20 bp, synthetic construct
  misc_feature 1..20: note = chemically synthesized
  source 1..20: mol_type = other DNA
tggtggtggtgggtggtggg

SEQ ID NO: 6681 - DNA, 20 bp, synthetic construct
  misc_feature 1..20: note = chemically synthesized
  source 1..20: mol_type = other DNA
ggtggtggtgggtggtgggg

SEQ ID NO: 6682 - DNA, 20 bp, synthetic construct
  misc_feature 1..20: note = chemically synthesized
  source 1..20: mol_type = other DNA
ggtggtgggggggcattgat

SEQ ID NO: 6683 - DNA, 20 bp, synthetic construct
  misc_feature 1..20: note = chemically synthesized
  source 1..20: mol_type = other DNA
tggtgggggggcattgatga

SEQ ID NO: 6684 - DNA, 20 bp, synthetic construct
  misc_feature 1..20: note = chemically synthesized
  source 1..20: mol_type = other DNA
ggtgggggggcattgatgag

SEQ ID NO: 6685 - DNA, 20 bp, synthetic construct
  misc_feature 1..20: note = chemically synthesized
  source 1..20: mol_type = other DNA
gggggggcattgatgagagg

SEQ ID NO: 6686 - DNA, 20 bp, synthetic construct
  misc_feature 1..20: note = chemically synthesized
  source 1..20: mol_type = other DNA
ggggggcattgatgagaggc

SEQ ID NO: 6687 - DNA, 20 bp, synthetic construct
  misc_feature 1..20: note = chemically synthesized
  source 1..20: mol_type = other DNA
gggggcattgatgagaggca

SEQ ID NO: 6688 - DNA, 20 bp, synthetic construct
  misc_feature 1..20: note = chemically synthesized
  source 1..20: mol_type = other DNA
gcattgatgagaggcagggc

SEQ ID NO: 6689 - DNA, 20 bp, synthetic construct
  misc_feature 1..20: note = chemically synthesized
  source 1..20: mol_type = other DNA
ccactgattctgtccccaca

SEQ ID NO: 6690 - DNA, 20 bp, synthetic construct
  misc_feature 1..20: note = chemically synthesized
  source 1..20: mol_type = other DNA
cactgattctgtccccacac

SEQ ID NO: 6691 - DNA, 20 bp, synthetic construct
  misc_feature 1..20: note = chemically synthesized
  source 1..20: mol_type = other DNA
tgtccccacacaggcatcca

SEQ ID NO: 6692 - DNA, 20 bp, synthetic construct
  misc_feature 1..20: note = chemically synthesized
  source 1..20: mol_type = other DNA
gtccccacacaggcatccaa

SEQ ID NO: 6693 - DNA, 20 bp, synthetic construct
  misc_feature 1..20: note = chemically synthesized
  source 1..20: mol_type = other DNA
tccccacacaggcatccaaa

SEQ ID NO: 6694 - DNA, 20 bp, synthetic construct
  misc_feature 1..20: note = chemically synthesized
  source 1..20: mol_type = other DNA
ccacacaggcatccaaaggg

SEQ ID NO: 6695 - DNA, 20 bp, synthetic construct
  misc_feature 1..20: note = chemically synthesized
  source 1..20: mol_type = other DNA
atccaaagggaagaatgcta

SEQ ID NO: 6696 - DNA, 20 bp, synthetic construct
  misc_feature 1..20: note = chemically synthesized
  source 1..20: mol_type = other DNA
agggaagaatgctacagcta

SEQ ID NO: 6697 - DNA, 20 bp, synthetic construct
  misc_feature 1..20: note = chemically synthesized
  source 1..20: mol_type = other DNA
agctacagtccatttctcgc

SEQ ID NO: 6698 - DNA, 20 bp, synthetic construct
  misc_feature 1..20: note = chemically synthesized
  source 1..20: mol_type = other DNA
ccatttctcgctggcttttc

SEQ ID NO: 6699 - DNA, 20 bp, synthetic construct
  misc_feature 1..20: note = chemically synthesized
  source 1..20: mol_type = other DNA
catttctcgctggcttttct

SEQ ID NO: 6700 - DNA, 20 bp, synthetic construct
  misc_feature 1..20: note = chemically synthesized
  source 1..20: mol_type = other DNA
tttctcgctggcttttctgg

SEQ ID NO: 6701 - DNA, 20 bp, synthetic construct
  misc_feature 1..20: note = chemically synthesized
  source 1..20: mol_type = other DNA
tcaccctacaatgtgttccc

SEQ ID NO: 6702 - DNA, 20 bp, synthetic construct
  misc_feature 1..20: note = chemically synthesized
  source 1..20: mol_type = other DNA
acaatgtgttccccagtatt

SEQ ID NO: 6703 - DNA, 20 bp, synthetic construct
  misc_feature 1..20: note = chemically synthesized
  source 1..20: mol_type = other DNA
caatgtgttccccagtattc

SEQ ID NO: 6704 - DNA, 20 bp, synthetic construct
  misc_feature 1..20: note = chemically synthesized
  source 1..20: mol_type = other DNA
ttccccagtattcaggtttc

SEQ ID NO: 6705 - DNA, 20 bp, synthetic construct
  misc_feature 1..20: note = chemically synthesized
  source 1..20: mol_type = other DNA
tccccagtattcaggtttct

SEQ ID NO: 6706 - DNA, 20 bp, synthetic construct
  misc_feature 1..20: note = chemically synthesized
  source 1..20: mol_type = other DNA
tgggctgccattatcttctc

SEQ ID NO: 6707 - DNA, 20 bp, synthetic construct
  misc_feature 1..20: note = chemically synthesized
  source 1..20: mol_type = other DNA
gccattatcttctctggtct

SEQ ID NO: 6708 - DNA, 20 bp, synthetic construct
  misc_feature 1..20: note = chemically synthesized
  source 1..20: mol_type = other DNA
ccattatcttctctggtctc

SEQ ID NO: 6709 - DNA, 20 bp, synthetic construct
  misc_feature 1..20: note = chemically synthesized
  source 1..20: mol_type = other DNA
cattatcttctctggtctcg

SEQ ID NO: 6710 - DNA, 20 bp, synthetic construct
  misc_feature 1..20: note = chemically synthesized
  source 1..20: mol_type = other DNA
cttctctggtctcggggccc

SEQ ID NO: 6711 - DNA, 20 bp, synthetic construct
  misc_feature 1..20: note = chemically synthesized
  source 1..20: mol_type = other DNA
tggtctcggggcccaagcca

SEQ ID NO: 6712 - DNA, 20 bp, synthetic construct
  misc_feature 1..20: note = chemically synthesized
  source 1..20: mol_type = other DNA
gtctcggggcccaagccaaa

SEQ ID NO: 6713 - DNA, 20 bp, synthetic construct
  misc_feature 1..20: note = chemically synthesized
  source 1..20: mol_type = other DNA
cggggcccaagccaaagagc

SEQ ID NO: 6714 - DNA, 20 bp, synthetic construct
  misc_feature 1..20: note = chemically synthesized
  source 1..20: mol_type = other DNA
gggcccaagccaaagagctg

SEQ ID NO: 6715 - DNA, 20 bp, synthetic construct
  misc_feature 1..20: note = chemically synthesized
  source 1..20: mol_type = other DNA
caagccaaagagctggagaa

SEQ ID NO: 6716 - DNA, 20 bp, synthetic construct
  misc_feature 1..20: note = chemically synthesized
  source 1..20: mol_type = other DNA
aagagctggagaacagtatc

SEQ ID NO: 6717 - DNA, 20 bp, synthetic construct
  misc_feature 1..20: note = chemically synthesized
  source 1..20: mol_type = other DNA
tggagaacagtatctggcca

SEQ ID NO: 6718 - DNA, 20 bp, synthetic construct
  misc_feature 1..20: note = chemically synthesized
  source 1..20: mol_type = other DNA
agtatctggccacagaacct

SEQ ID NO: 6719 - DNA, 20 bp, synthetic construct
  misc_feature 1..20: note = chemically synthesized
  source 1..20: mol_type = other DNA
gtatctggccacagaaccta

SEQ ID NO: 6720 - DNA, 20 bp, synthetic construct
  misc_feature 1..20: note = chemically synthesized
  source 1..20: mol_type = other DNA
tggccacagaacctaaggcc

SEQ ID NO: 6721 - DNA, 20 bp, synthetic construct
  misc_feature 1..20: note = chemically synthesized
  source 1..20: mol_type = other DNA
ccacagaacctaaggcctgg

SEQ ID NO: 6722 - DNA, 20 bp, synthetic construct
  misc_feature 1..20: note = chemically synthesized
  source 1..20: mol_type = other DNA
acagaacctaaggcctggta

SEQ ID NO: 6723 - DNA, 20 bp, synthetic construct
  misc_feature 1..20: note = chemically synthesized
  source 1..20: mol_type = other DNA
aacctaaggcctggtagagc

SEQ ID NO: 6724 - DNA, 20 bp, synthetic construct
  misc_feature 1..20: note = chemically synthesized
  source 1..20: mol_type = other DNA
taaggcctggtagagcaaga

SEQ ID NO: 6725 - DNA, 20 bp, synthetic construct
  misc_feature 1..20: note = chemically synthesized
  source 1..20: mol_type = other DNA
agagcaagacagccatgtgc

SEQ ID NO: 6726 - DNA, 20 bp, synthetic construct
  misc_feature 1..20: note = chemically synthesized
  source 1..20: mol_type = other DNA
gagcaagacagccatgtgca

SEQ ID NO: 6727 - DNA, 20 bp, synthetic construct
  misc_feature 1..20: note = chemically synthesized
  source 1..20: mol_type = other DNA
aagacagccatgtgcaaggc

SEQ ID NO: 6728 - DNA, 20 bp, synthetic construct
  misc_feature 1..20: note = chemically synthesized
  source 1..20: mol_type = other DNA
acagccatgtgcaaggcgag

SEQ ID NO: 6729 - DNA, 20 bp, synthetic construct
  misc_feature 1..20: note = chemically synthesized
  source 1..20: mol_type = other DNA
ccatgtgcaaggcgagtgga

SEQ ID NO: 6730 - DNA, 20 bp, synthetic construct
  misc_feature 1..20: note = chemically synthesized
  source 1..20: mol_type = other DNA
gcgcccttccgtcactccca

SEQ ID NO: 6731 - DNA, 20 bp, synthetic construct
  misc_feature 1..20: note = chemically synthesized
  source 1..20: mol_type = other DNA
gcccttccgtcactcccaca

SEQ ID NO: 6732 - DNA, 20 bp, synthetic construct
  misc_feature 1..20: note = chemically synthesized
  source 1..20: mol_type = other DNA
ccgtcactcccacagagctg

SEQ ID NO: 6733 - DNA, 20 bp, synthetic construct
  misc_feature 1..20: note = chemically synthesized
  source 1..20: mol_type = other DNA
cgtcactcccacagagctgc

SEQ ID NO: 6734 - DNA, 20 bp, synthetic construct
  misc_feature 1..20: note = chemically synthesized
  source 1..20: mol_type = other DNA
gtcactcccacagagctgca

SEQ ID NO: 6735 - DNA, 20 bp, synthetic construct
  misc_feature 1..20: note = chemically synthesized
  source 1..20: mol_type = other DNA
tcactcccacagagctgcag

SEQ ID NO: 6736 - DNA, 20 bp, synthetic construct
  misc_feature 1..20: note = chemically synthesized
  source 1..20: mol_type = other DNA
aggggtgtgacgcccctgcc

SEQ ID NO: 6737 - DNA, 20 bp, synthetic construct
  misc_feature 1..20: note = chemically synthesized
  source 1..20: mol_type = other DNA
cctgcccagccatacccttc

SEQ ID NO: 6738 - DNA, 20 bp, synthetic construct
  misc_feature 1..20: note = chemically synthesized
  source 1..20: mol_type = other DNA
ctgcccagccatacccttct

SEQ ID NO: 6739 - DNA, 20 bp, synthetic construct
  misc_feature 1..20: note = chemically synthesized
  source 1..20: mol_type = other DNA
agccatacccttctgggcca

SEQ ID NO: 6740 - DNA, 20 bp, synthetic construct
  misc_feature 1..20: note = chemically synthesized
  source 1..20: mol_type = other DNA
acccttctgggccacagtgc

SEQ ID NO: 6741 - DNA, 20 bp, synthetic construct
  misc_feature 1..20: note = chemically synthesized
  source 1..20: mol_type = other DNA
ccttctgggccacagtgctg

SEQ ID NO: 6742 - DNA, 20 bp, synthetic construct
  misc_feature 1..20: note = chemically synthesized
  source 1..20: mol_type = other DNA
cttctgggccacagtgctgg

SEQ ID NO: 6743 - DNA, 20 bp, synthetic construct
  misc_feature 1..20: note = chemically synthesized
  source 1..20: mol_type = other DNA
ggccacagtgctggaggctg

SEQ ID NO: 6744 - DNA, 20 bp, synthetic construct
  misc_feature 1..20: note = chemically synthesized
  source 1..20: mol_type = other DNA
agtgctggaggctgaagtca

SEQ ID NO: 6745 - DNA, 20 bp, synthetic construct
  misc_feature 1..20: note = chemically synthesized
  source 1..20: mol_type = other DNA
cccatcgtgccttattcctt

SEQ ID NO: 6746 - DNA, 20 bp, synthetic construct
  misc_feature 1..20: note = chemically synthesized
  source 1..20: mol_type = other DNA
ccatcgtgccttattccttc

SEQ ID NO: 6747 - DNA, 20 bp, synthetic construct
  misc_feature 1..20: note = chemically synthesized
  source 1..20: mol_type = other DNA
atcgtgccttattccttcag

SEQ ID NO: 6748 - DNA, 20 bp, synthetic construct
  misc_feature 1..20: note = chemically synthesized
  source 1..20: mol_type = other DNA
tccttcaggagcaatactcc

SEQ ID NO: 6749 - DNA, 20 bp, synthetic construct
  misc_feature 1..20: note = chemically synthesized
  source 1..20: mol_type = other DNA
ccttcaggagcaatactcct

SEQ ID NO: 6750 - DNA, 20 bp, synthetic construct
  misc_feature 1..20: note = chemically synthesized
  source 1..20: mol_type = other DNA
caggagcaatactcctggga

SEQ ID NO: 6751 - DNA, 20 bp, synthetic construct
  misc_feature 1..20: note = chemically synthesized
  source 1..20: mol_type = other DNA
aggagcaatactcctgggaa

SEQ ID NO: 6752 - DNA, 20 bp, synthetic construct
  misc_feature 1..20: note = chemically synthesized
  source 1..20: mol_type = other DNA
gcacattctgtaactcctct

SEQ ID NO: 6753 - DNA, 20 bp, synthetic construct
  misc_feature 1..20: note = chemically synthesized
  source 1..20: mol_type = other DNA
ctctaagtgatatttcttcc

SEQ ID NO: 6754 - DNA, 20 bp, synthetic construct
  misc_feature 1..20: note = chemically synthesized
  source 1..20: mol_type = other DNA
tctaagtgatatttcttccc

SEQ ID NO: 6755 - DNA, 20 bp, synthetic construct
  misc_feature 1..20: note = chemically synthesized
  source 1..20: mol_type = other DNA
ctaagtgatatttcttccca

SEQ ID NO: 6756 - DNA, 20 bp, synthetic construct
  misc_feature 1..20: note = chemically synthesized
  source 1..20: mol_type = other DNA
taagtgatatttcttcccag

SEQ ID NO: 6757 - DNA, 20 bp, synthetic construct
  misc_feature 1..20: note = chemically synthesized
  source 1..20: mol_type = other DNA
atttcttcccaggggcaaaa

SEQ ID NO: 6758 - DNA, 20 bp, synthetic construct
  misc_feature 1..20: note = chemically synthesized
  source 1..20: mol_type = other DNA
tttcttcccaggggcaaaaa

SEQ ID NO: 6759 - DNA, 20 bp, synthetic construct
  misc_feature 1..20: note = chemically synthesized
  source 1..20: mol_type = other DNA
ccaggggcaaaaaaggaaat

SEQ ID NO: 6760 - DNA, 20 bp, synthetic construct
  misc_feature 1..20: note = chemically synthesized
  source 1..20: mol_type = other DNA
aggaaattagccccatttta

SEQ ID NO: 6761 - DNA, 20 bp, synthetic construct
  misc_feature 1..20: note = chemically synthesized
  source 1..20: mol_type = other DNA
ttagccccattttatagata

SEQ ID NO: 6762 - DNA, 20 bp, synthetic construct
  misc_feature 1..20: note = chemically synthesized
  source 1..20: mol_type = other DNA
agccccattttatagataaa

SEQ ID NO: 6763 - DNA, 20 bp, synthetic construct
  misc_feature 1..20: note = chemically synthesized
  source 1..20: mol_type = other DNA
attttatagataaagagcct

SEQ ID NO: 6764 - DNA, 20 bp, synthetic construct
  misc_feature 1..20: note = chemically synthesized
  source 1..20: mol_type = other DNA
ttttatagataaagagcctg

SEQ ID NO: 6765 - DNA, 20 bp, synthetic construct
  misc_feature 1..20: note = chemically synthesized
  source 1..20: mol_type = other DNA
ataaagagcctgaggcccaa

SEQ ID NO: 6766 - DNA, 20 bp, synthetic construct
  misc_feature 1..20: note = chemically synthesized
  source 1..20: mol_type = other DNA
taaagagcctgaggcccaat

SEQ ID NO: 6767 - DNA, 20 bp, synthetic construct
  misc_feature 1..20: note = chemically synthesized
  source 1..20: mol_type = other DNA
aataggctgattgacttgtc

SEQ ID NO: 6768 - DNA, 20 bp, synthetic construct
  misc_feature 1..20: note = chemically synthesized
  source 1..20: mol_type = other DNA
ataggctgattgacttgtcc

SEQ ID NO: 6769 - DNA, 20 bp, synthetic construct
  misc_feature 1..20: note = chemically synthesized
  source 1..20: mol_type = other DNA
taggctgattgacttgtccg

SEQ ID NO: 6770 - DNA, 20 bp, synthetic construct
  misc_feature 1..20: note = chemically synthesized
  source 1..20: mol_type = other DNA
ttgacttgtccggggccacc

SEQ ID NO: 6771 - DNA, 20 bp, synthetic construct
  misc_feature 1..20: note = chemically synthesized
  source 1..20: mol_type = other DNA
cttgtccggggccacctagc

SEQ ID NO: 6772 - DNA, 20 bp, synthetic construct
  misc_feature 1..20: note = chemically synthesized
  source 1..20: mol_type = other DNA
gtccggggccacctagccag

SEQ ID NO: 6773 - DNA, 20 bp, synthetic construct
  misc_feature 1..20: note = chemically synthesized
  source 1..20: mol_type = other DNA
tccggggccacctagccagc

SEQ ID NO: 6774 - DNA, 20 bp, synthetic construct
  misc_feature 1..20: note = chemically synthesized
  source 1..20: mol_type = other DNA
ccacctagccagcaggtgaa

SEQ ID NO: 6775 - DNA, 20 bp, synthetic construct
  misc_feature 1..20: note = chemically synthesized
  source 1..20: mol_type = other DNA
caggtgaaaagactcatgtg

SEQ ID NO: 6776 - DNA, 20 bp, synthetic construct
  misc_feature 1..20: note = chemically synthesized
  source 1..20: mol_type = other DNA
gactcatgtgtagctgactt

SEQ ID NO: 6777 - DNA, 20 bp, synthetic construct
  misc_feature 1..20: note = chemically synthesized
  source 1..20: mol_type = other DNA
ctcatgtgtagctgacttta

SEQ ID NO: 6778 - DNA, 20 bp, synthetic construct
  misc_feature 1..20: note = chemically synthesized
  source 1..20: mol_type = other DNA
tgtagctgactttagagtcc

SEQ ID NO: 6779 - DNA, 20 bp, synthetic construct
  misc_feature 1..20: note = chemically synthesized
  source 1..20: mol_type = other DNA
cttcaacgtcccactttctc

SEQ ID NO: 6780 - DNA, 20 bp, synthetic construct
  misc_feature 1..20: note = chemically synthesized
  source 1..20: mol_type = other DNA
aacgtcccactttctcaaga

SEQ ID NO: 6781 - DNA, 20 bp, synthetic construct
  misc_feature 1..20: note = chemically synthesized
  source 1..20: mol_type = other DNA
tctcaagacagtgtttgcca

SEQ ID NO: 6782 - DNA, 20 bp, synthetic construct
  misc_feature 1..20: note = chemically synthesized
  source 1..20: mol_type = other DNA
ctcaagacagtgtttgccac

SEQ ID NO: 6783 - DNA, 20 bp, synthetic construct
  misc_feature 1..20: note = chemically synthesized
  source 1..20: mol_type = other DNA
agacagtgtttgccacgggc

SEQ ID NO: 6784 - DNA, 20 bp, synthetic construct
  misc_feature 1..20: note = chemically synthesized
  source 1..20: mol_type = other DNA
gacagtgtttgccacgggcc

SEQ ID NO: 6785 - DNA, 20 bp, synthetic construct
  misc_feature 1..20: note = chemically synthesized
  source 1..20: mol_type = other DNA
acagtgtttgccacgggcca

SEQ ID NO: 6786 - DNA, 20 bp, synthetic construct
  misc_feature 1..20: note = chemically synthesized
  source 1..20: mol_type = other DNA
tgtttgccacgggccagggc

SEQ ID NO: 6787 - DNA, 20 bp, synthetic construct
  misc_feature 1..20: note = chemically synthesized
  source 1..20: mol_type = other DNA
cacgggccagggctagcaaa

SEQ ID NO: 6788 - DNA, 20 bp, synthetic construct
  misc_feature 1..20: note = chemically synthesized
  source 1..20: mol_type = other DNA
acctccccaccaaccccatg

SEQ ID NO: 6789 - DNA, 20 bp, synthetic construct
  misc_feature 1..20: note = chemically synthesized
  source 1..20: mol_type = other DNA
cctccccaccaaccccatgc

SEQ ID NO: 6790 - DNA, 20 bp, synthetic construct
  misc_feature 1..20: note = chemically synthesized
  source 1..20: mol_type = other DNA
caccaaccccatgcaggtgt

SEQ ID NO: 6791 - DNA, 20 bp, synthetic construct
  misc_feature 1..20: note = chemically synthesized
  source 1..20: mol_type = other DNA
aaccccatgcaggtgtcagt

SEQ ID NO: 6792 - DNA, 20 bp, synthetic construct
  misc_feature 1..20: note = chemically synthesized
  source 1..20: mol_type = other DNA
accccatgcaggtgtcagtg

SEQ ID NO: 6793 - DNA, 20 bp, synthetic construct
  misc_feature 1..20: note = chemically synthesized
  source 1..20: mol_type = other DNA
atgcaggtgtcagtgaggcc

SEQ ID NO: 6794 - DNA, 20 bp, synthetic construct
  misc_feature 1..20: note = chemically synthesized
  source 1..20: mol_type = other DNA
tgcaggtgtcagtgaggccc

SEQ ID NO: 6795 - DNA, 20 bp, synthetic construct
  misc_feature 1..20: note = chemically synthesized
  source 1..20: mol_type = other DNA
cagtgaggcccaggaacatg

SEQ ID NO: 6796 - DNA, 20 bp, synthetic construct
  misc_feature 1..20: note = chemically synthesized
  source 1..20: mol_type = other DNA
cccaggaacatgaagctccc

SEQ ID NO: 6797 - DNA, 20 bp, synthetic construct
  misc_feature 1..20: note = chemically synthesized
  source 1..20: mol_type = other DNA
acatgaagctccccggacca

SEQ ID NO: 6798 - DNA, 20 bp, synthetic construct
  misc_feature 1..20: note = chemically synthesized
  source 1..20: mol_type = other DNA
catgaagctccccggaccaa

SEQ ID NO: 6799 - DNA, 20 bp, synthetic construct
  misc_feature 1..20: note = chemically synthesized
  source 1..20: mol_type = other DNA
atgaagctccccggaccaaa

SEQ ID NO: 6800 - DNA, 20 bp, synthetic construct
  misc_feature 1..20: note = chemically synthesized
  source 1..20: mol_type = other DNA
tgaagctccccggaccaaag

SEQ ID NO: 6801 - DNA, 20 bp, synthetic construct
  misc_feature 1..20: note = chemically synthesized
  source 1..20: mol_type = other DNA
agctccccggaccaaagggg

SEQ ID NO: 6802 - DNA, 20 bp, synthetic construct
  misc_feature 1..20: note = chemically synthesized
  source 1..20: mol_type = other DNA
ccccggaccaaaggggtgga

SEQ ID NO: 6803 - DNA, 20 bp, synthetic construct
  misc_feature 1..20: note = chemically synthesized
  source 1..20: mol_type = other DNA
caaaggggtggacagcactg

SEQ ID NO: 6804 - DNA, 20 bp, synthetic construct
  misc_feature 1..20: note = chemically synthesized
  source 1..20: mol_type = other DNA
aaaggggtggacagcactga

SEQ ID NO: 6805 - DNA, 20 bp, synthetic construct
  misc_feature 1..20: note = chemically synthesized
  source 1..20: mol_type = other DNA
gaaggaaaccgctcaacctt

SEQ ID NO: 6806 - DNA, 20 bp, synthetic construct
  misc_feature 1..20: note = chemically synthesized
  source 1..20: mol_type = other DNA
ggaaaccgctcaaccttgag

SEQ ID NO: 6807 - DNA, 20 bp, synthetic construct
  misc_feature 1..20: note = chemically synthesized
  source 1..20: mol_type = other DNA
aaaccgctcaaccttgagtg

SEQ ID NO: 6808 - DNA, 20 bp, synthetic construct
  misc_feature 1..20: note = chemically synthesized
  source 1..20: mol_type = other DNA
accgctcaaccttgagtgga

SEQ ID NO: 6809 - DNA, 20 bp, synthetic construct
  misc_feature 1..20: note = chemically synthesized
  source 1..20: mol_type = other DNA
ccgctcaaccttgagtggag

SEQ ID NO: 6810 - DNA, 20 bp, synthetic construct
  misc_feature 1..20: note = chemically synthesized
  source 1..20: mol_type = other DNA
gtggagaggctgctgtgaaa

SEQ ID NO: 6811 - DNA, 20 bp, synthetic construct
  misc_feature 1..20: note = chemically synthesized
  source 1..20: mol_type = other DNA
aggctgctgtgaaacagctc

SEQ ID NO: 6812 - DNA, 20 bp, synthetic construct
  misc_feature 1..20: note = chemically synthesized
  source 1..20: mol_type = other DNA
ggctgctgtgaaacagctct

SEQ ID NO: 6813 - DNA, 20 bp, synthetic construct
  misc_feature 1..20: note = chemically synthesized
  source 1..20: mol_type = other DNA
tgctgtgaaacagctctggg

SEQ ID NO: 6814 - DNA, 20 bp, synthetic construct
  misc_feature 1..20: note = chemically synthesized
  source 1..20: mol_type = other DNA
aaacagctctgggcagcacc

SEQ ID NO: 6815 - DNA, 20 bp, synthetic construct
  misc_feature 1..20: note = chemically synthesized
  source 1..20: mol_type = other DNA
aacagctctgggcagcacct

SEQ ID NO: 6816 - DNA, 20 bp, synthetic construct
  misc_feature 1..20: note = chemically synthesized
  source 1..20: mol_type = other DNA
tctgggcagcacctgggcca

SEQ ID NO: 6817 - DNA, 20 bp, synthetic construct
  misc_feature 1..20: note = chemically synthesized
  source 1..20: mol_type = other DNA
agcacctgggccacagcatg

SEQ ID NO: 6818 - DNA, 20 bp, synthetic construct
  misc_feature 1..20: note = chemically synthesized
  source 1..20: mol_type = other DNA
acctgggccacagcatgtgg

SEQ ID NO: 6819 - DNA, 20 bp, synthetic construct
  misc_feature 1..20: note = chemically synthesized
  source 1..20: mol_type = other DNA
cctgggccacagcatgtgga

SEQ ID NO: 6820 - DNA, 20 bp, synthetic construct
  misc_feature 1..20: note = chemically synthesized
  source 1..20: mol_type = other DNA
tgggccacagcatgtggaag

SEQ ID NO: 6821 - DNA, 20 bp, synthetic construct
  misc_feature 1..20: note = chemically synthesized
  source 1..20: mol_type = other DNA
gtggaaggagacatgttcct

SEQ ID NO: 6822 - DNA, 20 bp, synthetic construct
  misc_feature 1..20: note = chemically synthesized
  source 1..20: mol_type = other DNA
agacatgttcctaagctgcc

SEQ ID NO: 6823 - DNA, 20 bp, synthetic construct
  misc_feature 1..20: note = chemically synthesized
  source 1..20: mol_type = other DNA
ttctcttcctcctaatccat

SEQ ID NO: 6824 - DNA, 20 bp, synthetic construct
  misc_feature 1..20: note = chemically synthesized
  source 1..20: mol_type = other DNA
tcctcctaatccataagcac

SEQ ID NO: 6825 - DNA, 20 bp, synthetic construct
  misc_feature 1..20: note = chemically synthesized
  source 1..20: mol_type = other DNA
atccataagcaccagacctc

SEQ ID NO: 6826 - DNA, 20 bp, synthetic construct
  misc_feature 1..20: note = chemically synthesized
  source 1..20: mol_type = other DNA
cagacctcaagccccatgtg

SEQ ID NO: 6827 - DNA, 20 bp, synthetic construct
  misc_feature 1..20: note = chemically synthesized
  source 1..20: mol_type = other DNA
tcaagccccatgtgcagctc

SEQ ID NO: 6828 - DNA, 20 bp, synthetic construct
  misc_feature 1..20: note = chemically synthesized
  source 1..20: mol_type = other DNA
agccccatgtgcagctccgg

SEQ ID NO: 6829 - DNA, 20 bp, synthetic construct
  misc_feature 1..20: note = chemically synthesized
  source 1..20: mol_type = other DNA
tgtgcagctccggaagctgc

SEQ ID NO: 6830 - DNA, 20 bp, synthetic construct
  misc_feature 1..20: note = chemically synthesized
  source 1..20: mol_type = other DNA
tccggaagctgctagacctc

SEQ ID NO: 6831 - DNA, 20 bp, synthetic construct
  misc_feature 1..20: note = chemically synthesized
  source 1..20: mol_type = other DNA
ggaagctgctagacctcaag

SEQ ID NO: 6832 - DNA, 20 bp, synthetic construct
  misc_feature 1..20: note = chemically synthesized
  source 1..20: mol_type = other DNA
gaagctgctagacctcaagc

SEQ ID NO: 6833 - DNA, 20 bp, synthetic construct
  misc_feature 1..20: note = chemically synthesized
  source 1..20: mol_type = other DNA
gctagacctcaagcaggact

SEQ ID NO: 6834 - DNA, 20 bp, synthetic construct
  misc_feature 1..20: note = chemically synthesized
  source 1..20: mol_type = other DNA
cctcaagcaggactaagatt

SEQ ID NO: 6835 - DNA, 20 bp, synthetic construct
  misc_feature 1..20: note = chemically synthesized
  source 1..20: mol_type = other DNA
tcaagcaggactaagattcg

SEQ ID NO: 6836 - DNA, 20 bp, synthetic construct
  misc_feature 1..20: note = chemically synthesized
  source 1..20: mol_type = other DNA
aagcaggactaagattcgga

SEQ ID NO: 6837 - DNA, 20 bp, synthetic construct
  misc_feature 1..20: note = chemically synthesized
  source 1..20: mol_type = other DNA
gcaggactaagattcggaga

SEQ ID NO: 6838 - DNA, 20 bp, synthetic construct
  misc_feature 1..20: note = chemically synthesized
  source 1..20: mol_type = other DNA
ggactaagattcggagagag

SEQ ID NO: 6839 - DNA, 20 bp, synthetic construct
  misc_feature 1..20: note = chemically synthesized
  source 1..20: mol_type = other DNA
ggagagagcagccaccgacc

SEQ ID NO: 6840 - DNA, 20 bp, synthetic construct
  misc_feature 1..20: note = chemically synthesized
  source 1..20: mol_type = other DNA
gccaccgacctggctcctcc

SEQ ID NO: 6841 - DNA, 20 bp, synthetic construct
  misc_feature 1..20: note = chemically synthesized
  source 1..20: mol_type = other DNA
ccaccgacctggctcctccc

SEQ ID NO: 6842 - DNA, 20 bp, synthetic construct
  misc_feature 1..20: note = chemically synthesized
  source 1..20: mol_type = other DNA
ccgacctggctcctcccagg

SEQ ID NO: 6843 - DNA, 20 bp, synthetic construct
  misc_feature 1..20: note = chemically synthesized
  source 1..20: mol_type = other DNA
cgacctggctcctcccaggc

SEQ ID NO: 6844 - DNA, 20 bp, synthetic construct
  misc_feature 1..20: note = chemically synthesized
  source 1..20: mol_type = other DNA
ctggctcctcccaggcaggc

SEQ ID NO: 6845 - DNA, 20 bp, synthetic construct
  misc_feature 1..20: note = chemically synthesized
  source 1..20: mol_type = other DNA
tcctcccaggcaggccagcc

SEQ ID NO: 6846 - DNA, 20 bp, synthetic construct
  misc_feature 1..20: note = chemically synthesized
  source 1..20: mol_type = other DNA
cctcccaggcaggccagccc

SEQ ID NO: 6847 - DNA, 20 bp, synthetic construct
  misc_feature 1..20: note = chemically synthesized
  source 1..20: mol_type = other DNA
ccaggcaggccagcccaggt

SEQ ID NO: 6848 - DNA, 20 bp, synthetic construct
  misc_feature 1..20: note = chemically synthesized
  source 1..20: mol_type = other DNA
ccagcccaggtgagcccctc

SEQ ID NO: 6849 - DNA, 20 bp, synthetic construct
  misc_feature 1..20: note = chemically synthesized
  source 1..20: mol_type = other DNA
cccaggtgagcccctccagc

SEQ ID NO: 6850 - DNA, 20 bp, synthetic construct
  misc_feature 1..20: note = chemically synthesized
  source 1..20: mol_type = other DNA
ccaggtgagcccctccagcc

SEQ ID NO: 6851 - DNA, 20 bp, synthetic construct
  misc_feature 1..20: note = chemically synthesized
  source 1..20: mol_type = other DNA
ccaggcactcaccccactgc

SEQ ID NO: 6852 - DNA, 20 bp, synthetic construct
  misc_feature 1..20: note = chemically synthesized
  source 1..20: mol_type = other DNA
caggcactcaccccactgcc

SEQ ID NO: 6853 - DNA, 20 bp, synthetic construct
  misc_feature 1..20: note = chemically synthesized
  source 1..20: mol_type = other DNA
actgccaggctgtttactct

SEQ ID NO: 6854 - DNA, 20 bp, synthetic construct
  misc_feature 1..20: note = chemically synthesized
  source 1..20: mol_type = other DNA
ccaggctgtttactcttagc

SEQ ID NO: 6855 - DNA, 20 bp, synthetic construct
  misc_feature 1..20: note = chemically synthesized
  source 1..20: mol_type = other DNA
gtctcctgtctgctctactg

SEQ ID NO: 6856 - DNA, 20 bp, synthetic construct
  misc_feature 1..20: note = chemically synthesized
  source 1..20: mol_type = other DNA
cctccctcctctcctccttt

SEQ ID NO: 6857 - DNA, 20 bp, synthetic construct
  misc_feature 1..20: note = chemically synthesized
  source 1..20: mol_type = other DNA
cctcctttcggtcctctgcc

SEQ ID NO: 6858 - DNA, 20 bp, synthetic construct
  misc_feature 1..20: note = chemically synthesized
  source 1..20: mol_type = other DNA
ctcctttcggtcctctgccc

SEQ ID NO: 6859 - DNA, 20 bp, synthetic construct
  misc_feature 1..20: note = chemically synthesized
  source 1..20: mol_type = other DNA
tcctctgcccaggcctgcct

SEQ ID NO: 6860 - DNA, 20 bp, synthetic construct
  misc_feature 1..20: note = chemically synthesized
  source 1..20: mol_type = other DNA
cctctgcccaggcctgcctg

SEQ ID NO: 6861 - DNA, 20 bp, synthetic construct
  misc_feature 1..20: note = chemically synthesized
  source 1..20: mol_type = other DNA
gcctgcctgaggctgcctgc

SEQ ID NO: 6862 - DNA, 20 bp, synthetic construct
  misc_feature 1..20: note = chemically synthesized
  source 1..20: mol_type = other DNA
gcctgaggctgcctgccagt

SEQ ID NO: 6863 - DNA, 20 bp, synthetic construct
  misc_feature 1..20: note = chemically synthesized
  source 1..20: mol_type = other DNA
ctgccagtgagattgcatgt

SEQ ID NO: 6864 - DNA, 20 bp, synthetic construct
  misc_feature 1..20: note = chemically synthesized
  source 1..20: mol_type = other DNA
tgccagtgagattgcatgtc

SEQ ID NO: 6865 - DNA, 20 bp, synthetic construct
  misc_feature 1..20: note = chemically synthesized
  source 1..20: mol_type = other DNA
gccagtgagattgcatgtca

SEQ ID NO: 6866 - DNA, 20 bp, synthetic construct
  misc_feature 1..20: note = chemically synthesized
  source 1..20: mol_type = other DNA
tgcatgtcagggctttgccc

SEQ ID NO: 6867 - DNA, 20 bp, synthetic construct
  misc_feature 1..20: note = chemically synthesized
  source 1..20: mol_type = other DNA
gcatgtcagggctttgccct

SEQ ID NO: 6868 - DNA, 20 bp, synthetic construct
  misc_feature 1..20: note = chemically synthesized
  source 1..20: mol_type = other DNA
agggctttgccctgggcact

SEQ ID NO: 6869 - DNA, 20 bp, synthetic construct
  misc_feature 1..20: note = chemically synthesized
  source 1..20: mol_type = other DNA
gggctttgccctgggcactg

SEQ ID NO: 6870 - DNA, 20 bp, synthetic construct
  misc_feature 1..20: note = chemically synthesized
  source 1..20: mol_type = other DNA
ggctttgccctgggcactga

SEQ ID NO: 6871 - DNA, 20 bp, synthetic construct
  misc_feature 1..20: note = chemically synthesized
  source 1..20: mol_type = other DNA
ttgccctgggcactgagggc

SEQ ID NO: 6872 - DNA, 20 bp, synthetic construct
  misc_feature 1..20: note = chemically synthesized
  source 1..20: mol_type = other DNA
tgccctgggcactgagggct

SEQ ID NO: 6873 - DNA, 20 bp, synthetic construct
  misc_feature 1..20: note = chemically synthesized
  source 1..20: mol_type = other DNA
gccctgggcactgagggcta

SEQ ID NO: 6874 - DNA, 20 bp, synthetic construct
  misc_feature 1..20: note = chemically synthesized
  source 1..20: mol_type = other DNA
gcactgagggctagggtgcc

SEQ ID NO: 6875 - DNA, 20 bp, synthetic construct
  misc_feature 1..20: note = chemically synthesized
  source 1..20: mol_type = other DNA
actgagggctagggtgccca

SEQ ID NO: 6876 - DNA, 20 bp, synthetic construct
  misc_feature 1..20: note = chemically synthesized
  source 1..20: mol_type = other DNA
ctgagggctagggtgcccag

SEQ ID NO: 6877 - DNA, 20 bp, synthetic construct
  misc_feature 1..20: note = chemically synthesized
  source 1..20: mol_type = other DNA
ctagggtgcccagaggcctg

SEQ ID NO: 6878 - DNA, 20 bp, synthetic construct
  misc_feature 1..20: note = chemically synthesized
  source 1..20: mol_type = other DNA
agaggcctgcggctgtgccc

SEQ ID NO: 6879 - DNA, 20 bp, synthetic construct
  misc_feature 1..20: note = chemically synthesized
  source 1..20: mol_type = other DNA
gcctgcggctgtgccctgga

SEQ ID NO: 6880 - DNA, 20 bp, synthetic construct
  misc_feature 1..20: note = chemically synthesized
  source 1..20: mol_type = other DNA
ctgtgccctggatggaaaac

SEQ ID NO: 6881 - DNA, 20 bp, synthetic construct
  misc_feature 1..20: note = chemically synthesized
  source 1..20: mol_type = other DNA
tgccctggatggaaaaccag

SEQ ID NO: 6882 - DNA, 20 bp, synthetic construct
  misc_feature 1..20: note = chemically synthesized
  source 1..20: mol_type = other DNA
tggaaaaccagcagcctgca

SEQ ID NO: 6883 - DNA, 20 bp, synthetic construct
  misc_feature 1..20: note = chemically synthesized
  source 1..20: mol_type = other DNA
accagcagcctgcaaagctg

SEQ ID NO: 6884 - DNA, 20 bp, synthetic construct
  misc_feature 1..20: note = chemically synthesized
  source 1..20: mol_type = other DNA
ccagcagcctgcaaagctgt

SEQ ID NO: 6885 - DNA, 20 bp, synthetic construct
  misc_feature 1..20: note = chemically synthesized
  source 1..20: mol_type = other DNA
cagcagcctgcaaagctgtg

SEQ ID NO: 6886 - DNA, 20 bp, synthetic construct
  misc_feature 1..20: note = chemically synthesized
  source 1..20: mol_type = other DNA
agcagcctgcaaagctgtgg

SEQ ID NO: 6887 - DNA, 20 bp, synthetic construct
  misc_feature 1..20: note = chemically synthesized
  source 1..20: mol_type = other DNA
agcctgcaaagctgtggggg

SEQ ID NO: 6888 - DNA, 20 bp, synthetic construct
  misc_feature 1..20: note = chemically synthesized
  source 1..20: mol_type = other DNA
gcaaagctgtgggggcagca

SEQ ID NO: 6889 - DNA, 20 bp, synthetic construct
  misc_feature 1..20: note = chemically synthesized
  source 1..20: mol_type = other DNA
caaagctgtgggggcagcac

SEQ ID NO: 6890 - DNA, 20 bp, synthetic construct
  misc_feature 1..20: note = chemically synthesized
  source 1..20: mol_type = other DNA
gcagcacaggacctgtgtgt

SEQ ID NO: 6891 - DNA, 20 bp, synthetic construct
  misc_feature 1..20: note = chemically synthesized
  source 1..20: mol_type = other DNA
agcacaggacctgtgtgtga

SEQ ID NO: 6892 - DNA, 20 bp, synthetic construct
  misc_feature 1..20: note = chemically synthesized
  source 1..20: mol_type = other DNA
acaggacctgtgtgtgagag

SEQ ID NO: 6893 - DNA, 20 bp, synthetic construct
  misc_feature 1..20: note = chemically synthesized
  source 1..20: mol_type = other DNA
ggacctgtgtgtgagagcgg

SEQ ID NO: 6894 - DNA, 20 bp, synthetic construct
  misc_feature 1..20: note = chemically synthesized
  source 1..20: mol_type = other DNA
tgtgtgagagcggtggtctt

SEQ ID NO: 6895 - DNA, 20 bp, synthetic construct
  misc_feature 1..20: note = chemically synthesized
  source 1..20: mol_type = other DNA
tgtgagagcggtggtcttga

SEQ ID NO: 6896 - DNA, 20 bp, synthetic construct
  misc_feature 1..20: note = chemically synthesized
  source 1..20: mol_type = other DNA
agcggtggtcttgagagtga

SEQ ID NO: 6897 - DNA, 20 bp, synthetic construct
  misc_feature 1..20: note = chemically synthesized
  source 1..20: mol_type = other DNA
ggtggtcttgagagtgaaag

SEQ ID NO: 6898 - DNA, 20 bp, synthetic construct
  misc_feature 1..20: note = chemically synthesized
  source 1..20: mol_type = other DNA
tcttgagagtgaaagtggac

SEQ ID NO: 6899 - DNA, 20 bp, synthetic construct
  misc_feature 1..20: note = chemically synthesized
  source 1..20: mol_type = other DNA
agagtgaaagtggacaagtc

SEQ ID NO: 6900 - DNA, 20 bp, synthetic construct
  misc_feature 1..20: note = chemically synthesized
  source 1..20: mol_type = other DNA
gaaagtggacaagtcaagcc

SEQ ID NO: 6901 - DNA, 20 bp, synthetic construct
  misc_feature 1..20: note = chemically synthesized
  source 1..20: mol_type = other DNA
aaagtggacaagtcaagccc

SEQ ID NO: 6902 - DNA, 20 bp, synthetic construct
  misc_feature 1..20: note = chemically synthesized
  source 1..20: mol_type = other DNA
gtggacaagtcaagcccagg

SEQ ID NO: 6903 - DNA, 20 bp, synthetic construct
  misc_feature 1..20: note = chemically synthesized
  source 1..20: mol_type = other DNA
tggacaagtcaagcccaggc

SEQ ID NO: 6904 - DNA, 20 bp, synthetic construct
  misc_feature 1..20: note = chemically synthesized
  source 1..20: mol_type = other DNA
ggacaagtcaagcccaggcg

SEQ ID NO: 6905 - DNA, 20 bp, synthetic construct
  misc_feature 1..20: note = chemically synthesized
  source 1..20: mol_type = other DNA
acaagtcaagcccaggcggg

SEQ ID NO: 6906 - DNA, 20 bp, synthetic construct
  misc_feature 1..20: note = chemically synthesized
  source 1..20: mol_type = other DNA
caagtcaagcccaggcgggg

SEQ ID NO: 6907 - DNA, 20 bp, synthetic construct
  misc_feature 1..20: note = chemically synthesized
  source 1..20: mol_type = other DNA
aagtcaagcccaggcgggga

SEQ ID NO: 6908 - DNA, 20 bp, synthetic construct
  misc_feature 1..20: note = chemically synthesized
  source 1..20: mol_type = other DNA
agtcaagcccaggcggggag

SEQ ID NO: 6909 - DNA, 20 bp, synthetic construct
  misc_feature 1..20: note = chemically synthesized
  source 1..20: mol_type = other DNA
aagcccaggcggggagggga

SEQ ID NO: 6910 - DNA, 20 bp, synthetic construct
  misc_feature 1..20: note = chemically synthesized
  source 1..20: mol_type = other DNA
agcccaggcggggaggggac

SEQ ID NO: 6911 - DNA, 20 bp, synthetic construct
  misc_feature 1..20: note = chemically synthesized
  source 1..20: mol_type = other DNA
gcccaggcggggaggggaca

SEQ ID NO: 6912 - DNA, 20 bp, synthetic construct
  misc_feature 1..20: note = chemically synthesized
  source 1..20: mol_type = other DNA
cccaggcggggaggggacag

SEQ ID NO: 6913 - DNA, 20 bp, synthetic construct
  misc_feature 1..20: note = chemically synthesized
  source 1..20: mol_type = other DNA
ccaggcggggaggggacagg

SEQ ID NO: 6914 - DNA, 20 bp, synthetic construct
  misc_feature 1..20: note = chemically synthesized
  source 1..20: mol_type = other DNA
ggcggggaggggacaggggg

SEQ ID NO: 6915 - DNA, 20 bp, synthetic construct
  misc_feature 1..20: note = chemically synthesized
  source 1..20: mol_type = other DNA
gcggggaggggacagggggc

SEQ ID NO: 6916 - DNA, 20 bp, synthetic construct
  misc_feature 1..20: note = chemically synthesized
  source 1..20: mol_type = other DNA
gggaggggacagggggcagg

SEQ ID NO: 6917 - DNA, 20 bp, synthetic construct
  misc_feature 1..20: note = chemically synthesized
  source 1..20: mol_type = other DNA
ggaggggacagggggcaggt

SEQ ID NO: 6918 - DNA, 20 bp, synthetic construct
  misc_feature 1..20: note = chemically synthesized
  source 1..20: mol_type = other DNA
gaggggacagggggcaggta

SEQ ID NO: 6919 - DNA, 20 bp, synthetic construct
  misc_feature 1..20: note = chemically synthesized
  source 1..20: mol_type = other DNA
ggacagggggcaggtaggga

SEQ ID NO: 6920 - DNA, 20 bp, synthetic construct
  misc_feature 1..20: note = chemically synthesized
  source 1..20: mol_type = other DNA
gacagggggcaggtagggat

SEQ ID NO: 6921 - DNA, 20 bp, synthetic construct
  misc_feature 1..20: note = chemically synthesized
  source 1..20: mol_type = other DNA
acagggggcaggtagggata

SEQ ID NO: 6922 - DNA, 20 bp, synthetic construct
  misc_feature 1..20: note = chemically synthesized
  source 1..20: mol_type = other DNA
gggggcaggtagggataggg

SEQ ID NO: 6923 - DNA, 20 bp, synthetic construct
  misc_feature 1..20: note = chemically synthesized
  source 1..20: mol_type = other DNA
ggggcaggtagggatagggc

SEQ ID NO: 6924 - DNA, 20 bp, synthetic construct
  misc_feature 1..20: note = chemically synthesized
  source 1..20: mol_type = other DNA
caggtagggatagggcaggt

SEQ ID NO: 6925 - DNA, 20 bp, synthetic construct
  misc_feature 1..20: note = chemically synthesized
  source 1..20: mol_type = other DNA
aggtagggatagggcaggtg

SEQ ID NO: 6926 - DNA, 20 bp, synthetic construct
  misc_feature 1..20: note = chemically synthesized
  source 1..20: mol_type = other DNA
gatagggcaggtgaggttcc

SEQ ID NO: 6927 - DNA, 20 bp, synthetic construct
  misc_feature 1..20: note = chemically synthesized
  source 1..20: mol_type = other DNA
atagggcaggtgaggttccc

SEQ ID NO: 6928 - DNA, 20 bp, synthetic construct
  misc_feature 1..20: note = chemically synthesized
  source 1..20: mol_type = other DNA
tagggcaggtgaggttcccg

SEQ ID NO: 6929 - DNA, 20 bp, synthetic construct
  misc_feature 1..20: note = chemically synthesized
  source 1..20: mol_type = other DNA
gcaggtgaggttcccggggc

SEQ ID NO: 6930 - DNA, 20 bp, synthetic construct
  misc_feature 1..20: note = chemically synthesized
  source 1..20: mol_type = other DNA
caccattaaccgtgcctctg

SEQ ID NO: 6931 - DNA, 20 bp, synthetic construct
  misc_feature 1..20: note = chemically synthesized
  source 1..20: mol_type = other DNA
accattaaccgtgcctctgt

SEQ ID NO: 6932 - DNA, 20 bp, synthetic construct
  misc_feature 1..20: note = chemically synthesized
  source 1..20: mol_type = other DNA
accgtgcctctgtgggctga

SEQ ID NO: 6933 - DNA, 20 bp, synthetic construct
  misc_feature 1..20: note = chemically synthesized
  source 1..20: mol_type = other DNA
tgggctgacagatgtgcctt

SEQ ID NO: 6934 - DNA, 20 bp, synthetic construct
  misc_feature 1..20: note = chemically synthesized
  source 1..20: mol_type = other DNA
ggctgacagatgtgccttca

SEQ ID NO: 6935 - DNA, 20 bp, synthetic construct
  misc_feature 1..20: note = chemically synthesized
  source 1..20: mol_type = other DNA
tgacagatgtgccttcagag

SEQ ID NO: 6936 - DNA, 20 bp, synthetic construct
  misc_feature 1..20: note = chemically synthesized
  source 1..20: mol_type = other DNA
gacagatgtgccttcagaga

SEQ ID NO: 6937 - DNA, 20 bp, synthetic construct
  misc_feature 1..20: note = chemically synthesized
  source 1..20: mol_type = other DNA
acagatgtgccttcagagaa

SEQ ID NO: 6938 - DNA, 20 bp, synthetic construct
  misc_feature 1..20: note = chemically synthesized
  source 1..20: mol_type = other DNA
gatgtgccttcagagaaggg

SEQ ID NO: 6939 - DNA, 20 bp, synthetic construct
  misc_feature 1..20: note = chemically synthesized
  source 1..20: mol_type = other DNA
atgtgccttcagagaagggc

SEQ ID NO: 6940 - DNA, 20 bp, synthetic construct
  misc_feature 1..20: note = chemically synthesized
  source 1..20: mol_type = other DNA
tgtgccttcagagaagggca

SEQ ID NO: 6941 - DNA, 20 bp, synthetic construct
  misc_feature 1..20: note = chemically synthesized
  source 1..20: mol_type = other DNA
tgccttcagagaagggcagg

SEQ ID NO: 6942 - DNA, 20 bp, synthetic construct
  misc_feature 1..20: note = chemically synthesized
  source 1..20: mol_type = other DNA
cttcagagaagggcagggag

SEQ ID NO: 6943 - DNA, 20 bp, synthetic construct
  misc_feature 1..20: note = chemically synthesized
  source 1..20: mol_type = other DNA
agagaagggcagggagcagc

SEQ ID NO: 6944 - DNA, 20 bp, synthetic construct
  misc_feature 1..20: note = chemically synthesized
  source 1..20: mol_type = other DNA
gagaagggcagggagcagct

SEQ ID NO: 6945 - DNA, 20 bp, synthetic construct
  misc_feature 1..20: note = chemically synthesized
  source 1..20: mol_type = other DNA
agaagggcagggagcagctg

SEQ ID NO: 6946 - DNA, 20 bp, synthetic construct
  misc_feature 1..20: note = chemically synthesized
  source 1..20: mol_type = other DNA
gaagggcagggagcagctgg

SEQ ID NO: 6947 - DNA, 20 bp, synthetic construct
  misc_feature 1..20: note = chemically synthesized
  source 1..20: mol_type = other DNA
gcagggagcagctgggggcc

SEQ ID NO: 6948 - DNA, 20 bp, synthetic construct
  misc_feature 1..20: note = chemically synthesized
  source 1..20: mol_type = other DNA
ggagcagctgggggcctggc

SEQ ID NO: 6949 - DNA, 20 bp, synthetic construct
  misc_feature 1..20: note = chemically synthesized
  source 1..20: mol_type = other DNA
agcagctgggggcctggcca

SEQ ID NO: 6950 - DNA, 20 bp, synthetic construct
  misc_feature 1..20: note = chemically synthesized
  source 1..20: mol_type = other DNA
cctggccagagcaatcatcc

SEQ ID NO: 6951 - DNA, 20 bp, synthetic construct
  misc_feature 1..20: note = chemically synthesized
  source 1..20: mol_type = other DNA
ggccagagcaatcatcccag

SEQ ID NO: 6952 - DNA, 20 bp, synthetic construct
  misc_feature 1..20: note = chemically synthesized
  source 1..20: mol_type = other DNA
gccagagcaatcatcccagc

SEQ ID NO: 6953 - DNA, 20 bp, synthetic construct
  misc_feature 1..20: note = chemically synthesized
  source 1..20: mol_type = other DNA
atcccagcaggaacttacat

SEQ ID NO: 6954 - DNA, 20 bp, synthetic construct
  misc_feature 1..20: note = chemically synthesized
  source 1..20: mol_type = other DNA
cccagcaggaacttacatca

SEQ ID NO: 6955 - DNA, 20 bp, synthetic construct
  misc_feature 1..20: note = chemically synthesized
  source 1..20: mol_type = other DNA
agcaggaacttacatcagag

SEQ ID NO: 6956 - DNA, 20 bp, synthetic construct
  misc_feature 1..20: note = chemically synthesized
  source 1..20: mol_type = other DNA
gcaggaacttacatcagagc

SEQ ID NO: 6957 - DNA, 20 bp, synthetic construct
  misc_feature 1..20: note = chemically synthesized
  source 1..20: mol_type = other DNA
ggaacttacatcagagcagg

SEQ ID NO: 6958 - DNA, 20 bp, synthetic construct
  misc_feature 1..20: note = chemically synthesized
  source 1..20: mol_type = other DNA
tcagagcaggcagcctaccc

SEQ ID NO: 6959 - DNA, 20 bp, synthetic construct
  misc_feature 1..20: note = chemically synthesized
  source 1..20: mol_type = other DNA
agagcaggcagcctacccaa

SEQ ID NO: 6960 - DNA, 20 bp, synthetic construct
  misc_feature 1..20: note = chemically synthesized
  source 1..20: mol_type = other DNA
caggcagcctacccaagagc

SEQ ID NO: 6961 - DNA, 20 bp, synthetic construct
  misc_feature 1..20: note = chemically synthesized
  source 1..20: mol_type = other DNA
aggcagcctacccaagagcc

SEQ ID NO: 6962 - DNA, 20 bp, synthetic construct
  misc_feature 1..20: note = chemically synthesized
  source 1..20: mol_type = other DNA
ggcagcctacccaagagcca

SEQ ID NO: 6963 - DNA, 20 bp, synthetic construct
  misc_feature 1..20: note = chemically synthesized
  source 1..20: mol_type = other DNA
agcctacccaagagccaggg

SEQ ID NO: 6964 - DNA, 20 bp, synthetic construct
  misc_feature 1..20: note = chemically synthesized
  source 1..20: mol_type = other DNA
gcctacccaagagccaggga

SEQ ID NO: 6965 - DNA, 20 bp, synthetic construct
  misc_feature 1..20: note = chemically synthesized
  source 1..20: mol_type = other DNA
tacccaagagccagggaagg

SEQ ID NO: 6966 - DNA, 20 bp, synthetic construct
  misc_feature 1..20: note = chemically synthesized
  source 1..20: mol_type = other DNA
acccaagagccagggaagga

SEQ ID NO: 6967 - DNA, 20 bp, synthetic construct
  misc_feature 1..20: note = chemically synthesized
  source 1..20: mol_type = other DNA
ccaagagccagggaaggaag

SEQ ID NO: 6968 - DNA, 20 bp, synthetic construct
  misc_feature 1..20: note = chemically synthesized
  source 1..20: mol_type = other DNA
aagagccagggaaggaagga

SEQ ID NO: 6969 - DNA, 20 bp, synthetic construct
  misc_feature 1..20: note = chemically synthesized
  source 1..20: mol_type = other DNA
gggaaggaaggagagcccct

SEQ ID NO: 6970 - DNA, 20 bp, synthetic construct
  misc_feature 1..20: note = chemically synthesized
  source 1..20: mol_type = other DNA
ggagagcccctgagaaaaaa

SEQ ID NO: 6971 - DNA, 20 bp, synthetic construct
  misc_feature 1..20: note = chemically synthesized
  source 1..20: mol_type = other DNA
gagcccctgagaaaaaatgg

SEQ ID NO: 6972 - DNA, 20 bp, synthetic construct
  misc_feature 1..20: note = chemically synthesized
  source 1..20: mol_type = other DNA
cccctgagaaaaaatggcag

SEQ ID NO: 6973 - DNA, 20 bp, synthetic construct
  misc_feature 1..20: note = chemically synthesized
  source 1..20: mol_type = other DNA
gagaaaaaatggcagaagaa

SEQ ID NO: 6974 - DNA, 20 bp, synthetic construct
  misc_feature 1..20: note = chemically synthesized
  source 1..20: mol_type = other DNA
aaaaaatggcagaagaatgg

SEQ ID NO: 6975 - DNA, 20 bp, synthetic construct
  misc_feature 1..20: note = chemically synthesized
  source 1..20: mol_type = other DNA
aaaaatggcagaagaatgga

SEQ ID NO: 6976 - DNA, 20 bp, synthetic construct
  misc_feature 1..20: note = chemically synthesized
  source 1..20: mol_type = other DNA
aaaatggcagaagaatggaa

SEQ ID NO: 6977 - DNA, 20 bp, synthetic construct
  misc_feature 1..20: note = chemically synthesized
  source 1..20: mol_type = other DNA
gaagggactacgtgtattga

SEQ ID NO: 6978 - DNA, 20 bp, synthetic construct
  misc_feature 1..20: note = chemically synthesized
  source 1..20: mol_type = other DNA
cgtgtattgatggaataaac

SEQ ID NO: 6979 - DNA, 20 bp, synthetic construct
  misc_feature 1..20: note = chemically synthesized
  source 1..20: mol_type = other DNA
ccccacacttcccaactcct

SEQ ID NO: 6980 - DNA, 20 bp, synthetic construct
  misc_feature 1..20: note = chemically synthesized
  source 1..20: mol_type = other DNA
cccacacttcccaactcctc

SEQ ID NO: 6981 - DNA, 20 bp, synthetic construct
  misc_feature 1..20: note = chemically synthesized
  source 1..20: mol_type = other DNA
cacttcccaactcctcagga

SEQ ID NO: 6982 - DNA, 20 bp, synthetic construct
  misc_feature 1..20: note = chemically synthesized
  source 1..20: mol_type = other DNA
acttcccaactcctcaggac

SEQ ID NO: 6983 - DNA, 20 bp, synthetic construct
  misc_feature 1..20: note = chemically synthesized
  source 1..20: mol_type = other DNA
cttcccaactcctcaggaca

SEQ ID NO: 6984 - DNA, 20 bp, synthetic construct
  misc_feature 1..20: note = chemically synthesized
  source 1..20: mol_type = other DNA
caactcctcaggacagggtt

SEQ ID NO: 6985 - DNA, 20 bp, synthetic construct
  misc_feature 1..20: note = chemically synthesized
  source 1..20: mol_type = other DNA
actcctcaggacagggttca

SEQ ID NO: 6986 - DNA, 20 bp, synthetic construct
  misc_feature 1..20: note = chemically synthesized
  source 1..20: mol_type = other DNA
ctcaggacagggttcagagc

SEQ ID NO: 6987 - DNA, 20 bp, synthetic construct
  misc_feature 1..20: note = chemically synthesized
  source 1..20: mol_type = other DNA
tcaggacagggttcagagct

SEQ ID NO: 6988 - DNA, 20 bp, synthetic construct
  misc_feature 1..20: note = chemically synthesized
  source 1..20: mol_type = other DNA
gacagggttcagagctaggc

SEQ ID NO: 6989 - DNA, 20 bp, synthetic construct
  misc_feature 1..20: note = chemically synthesized
  source 1..20: mol_type = other DNA
agggttcagagctaggctgg

SEQ ID NO: 6990 - DNA, 20 bp, synthetic construct
  misc_feature 1..20: note = chemically synthesized
  source 1..20: mol_type = other DNA
ctaggctggtggctgctaca

SEQ ID NO: 6991 - DNA, 20 bp, synthetic construct
  misc_feature 1..20: note = chemically synthesized
  source 1..20: mol_type = other DNA
aggctggtggctgctacaca

SEQ ID NO: 6992 - DNA, 20 bp, synthetic construct
  misc_feature 1..20: note = chemically synthesized
  source 1..20: mol_type = other DNA
tggtggctgctacacagaga

SEQ ID NO: 6993 - DNA, 20 bp, synthetic construct
  misc_feature 1..20: note = chemically synthesized
  source 1..20: mol_type = other DNA
acagagacagcaccctccac

SEQ ID NO: 6994 - DNA, 20 bp, synthetic construct
  misc_feature 1..20: note = chemically synthesized
  source 1..20: mol_type = other DNA
gacagcaccctccaccagtt

SEQ ID NO: 6995 - DNA, 20 bp, synthetic construct
  misc_feature 1..20: note = chemically synthesized
  source 1..20: mol_type = other DNA
acagcaccctccaccagtta

SEQ ID NO: 6996 - DNA, 20 bp, synthetic construct
  misc_feature 1..20: note = chemically synthesized
  source 1..20: mol_type = other DNA
ccctccaccagttaaggtat

SEQ ID NO: 6997 - DNA, 20 bp, synthetic construct
  misc_feature 1..20: note = chemically synthesized
  source 1..20: mol_type = other DNA
caccagttaaggtataagac

SEQ ID NO: 6998 - DNA, 20 bp, synthetic construct
  misc_feature 1..20: note = chemically synthesized
  source 1..20: mol_type = other DNA
accagttaaggtataagaca

SEQ ID NO: 6999 - DNA, 20 bp, synthetic construct
  misc_feature 1..20: note = chemically synthesized
  source 1..20: mol_type = other DNA
taaggtataagacaaggtat

SEQ ID NO: 7000 - DNA, 20 bp, synthetic construct
  misc_feature 1..20: note = chemically synthesized
  source 1..20: mol_type = other DNA
aaggtataagacaaggtata

SEQ ID NO: 7001 - DNA, 20 bp, synthetic construct
  misc_feature 1..20: note = chemically synthesized
  source 1..20: mol_type = other DNA
aagacaaggtataaggctga

SEQ ID NO: 7002 - DNA, 20 bp, synthetic construct
  misc_feature 1..20: note = chemically synthesized
  source 1..20: mol_type = other DNA
agacaaggtataaggctgat

SEQ ID NO: 7003 - DNA, 20 bp, synthetic construct
  misc_feature 1..20: note = chemically synthesized
  source 1..20: mol_type = other DNA
ggtataaggctgatgggctg

SEQ ID NO: 7004 - DNA, 20 bp, synthetic construct
  misc_feature 1..20: note = chemically synthesized
  source 1..20: mol_type = other DNA
gtataaggctgatgggctgt

SEQ ID NO: 7005 - DNA, 20 bp, synthetic construct
  misc_feature 1..20: note = chemically synthesized
  source 1..20: mol_type = other DNA
tgggctgtaggcatcaaacc

SEQ ID NO: 7006 - DNA, 20 bp, synthetic construct
  misc_feature 1..20: note = chemically synthesized
  source 1..20: mol_type = other DNA
ggcatcaaacctggaactca

SEQ ID NO: 7007 - DNA, 20 bp, synthetic construct
  misc_feature 1..20: note = chemically synthesized
  source 1..20: mol_type = other DNA
tcaaacctggaactcacagt

SEQ ID NO: 7008 - DNA, 20 bp, synthetic construct
  misc_feature 1..20: note = chemically synthesized
  source 1..20: mol_type = other DNA
caaacctggaactcacagtc

SEQ ID NO: 7009 - DNA, 20 bp, synthetic construct
  misc_feature 1..20: note = chemically synthesized
  source 1..20: mol_type = other DNA
aaacctggaactcacagtcg

SEQ ID NO: 7010 - DNA, 20 bp, synthetic construct
  misc_feature 1..20: note = chemically synthesized
  source 1..20: mol_type = other DNA
cagtcggggcacctcacttc

SEQ ID NO: 7011 - DNA, 20 bp, synthetic construct
  misc_feature 1..20: note = chemically synthesized
  source 1..20: mol_type = other DNA
gggcacctcacttcaagcct

SEQ ID NO: 7012 - DNA, 20 bp, synthetic construct
  misc_feature 1..20: note = chemically synthesized
  source 1..20: mol_type = other DNA
cacctcacttcaagccttgg

SEQ ID NO: 7013 - DNA, 20 bp, synthetic construct
  misc_feature 1..20: note = chemically synthesized
  source 1..20: mol_type = other DNA
tcacttcaagccttggtgga

SEQ ID NO: 7014 - DNA, 20 bp, synthetic construct
  misc_feature 1..20: note = chemically synthesized
  source 1..20: mol_type = other DNA
cacttcaagccttggtggat

SEQ ID NO: 7015 - DNA, 20 bp, synthetic construct
  misc_feature 1..20: note = chemically synthesized
  source 1..20: mol_type = other DNA
tcaagccttggtggataggt

SEQ ID NO: 7016 - DNA, 20 bp, synthetic construct
  misc_feature 1..20: note = chemically synthesized
  source 1..20: mol_type = other DNA
ggataggtaagatgaacact

SEQ ID NO: 7017 - DNA, 20 bp, synthetic construct
  misc_feature 1..20: note = chemically synthesized
  source 1..20: mol_type = other DNA
gataggtaagatgaacactc

SEQ ID NO: 7018 - DNA, 20 bp, synthetic construct
  misc_feature 1..20: note = chemically synthesized
  source 1..20: mol_type = other DNA
agatgaacactcaggctccc

SEQ ID NO: 7019 - DNA, 20 bp, synthetic construct
  misc_feature 1..20: note = chemically synthesized
  source 1..20: mol_type = other DNA
gaacactcaggctcccaagt

SEQ ID NO: 7020 - DNA, 20 bp, synthetic construct
  misc_feature 1..20: note = chemically synthesized
  source 1..20: mol_type = other DNA
actcaggctcccaagttaga

SEQ ID NO: 7021 - DNA, 20 bp, synthetic construct
  misc_feature 1..20: note = chemically synthesized
  source 1..20: mol_type = other DNA
ggctcccaagttagacagat

SEQ ID NO: 7022 - DNA, 20 bp, synthetic construct
  misc_feature 1..20: note = chemically synthesized
  source 1..20: mol_type = other DNA
cccaagttagacagatgagc

SEQ ID NO: 7023 - DNA, 20 bp, synthetic construct
  misc_feature 1..20: note = chemically synthesized
  source 1..20: mol_type = other DNA
ttcatctaccaccaatttcc

SEQ ID NO: 7024 - DNA, 20 bp, synthetic construct
  misc_feature 1..20: note = chemically synthesized
  source 1..20: mol_type = other DNA
caatttcctggctgtgtgtc

SEQ ID NO: 7025 - DNA, 20 bp, synthetic construct
  misc_feature 1..20: note = chemically synthesized
  source 1..20: mol_type = other DNA
aatttcctggctgtgtgtct

SEQ ID NO: 7026 - DNA, 20 bp, synthetic construct
  misc_feature 1..20: note = chemically synthesized
  source 1..20: mol_type = other DNA
tttcctggctgtgtgtctgg

SEQ ID NO: 7027 - DNA, 20 bp, synthetic construct
  misc_feature 1..20: note = chemically synthesized
  source 1..20: mol_type = other DNA
cctggctgtgtgtctgggag

SEQ ID NO: 7028 - DNA, 20 bp, synthetic construct
  misc_feature 1..20: note = chemically synthesized
  source 1..20: mol_type = other DNA
agcagctctttaacctctcc

SEQ ID NO: 7029 - DNA, 20 bp, synthetic construct
  misc_feature 1..20: note = chemically synthesized
  source 1..20: mol_type = other DNA
tctttaacctctccaagcct

SEQ ID NO: 7030 - DNA, 20 bp, synthetic construct
  misc_feature 1..20: note = chemically synthesized
  source 1..20: mol_type = other DNA
ccaagcctcagtttcttcac

SEQ ID NO: 7031 - DNA, 20 bp, synthetic construct
  misc_feature 1..20: note = chemically synthesized
  source 1..20: mol_type = other DNA
atgtgtatgatgacattgta

SEQ ID NO: 7032 - DNA, 20 bp, synthetic construct
  misc_feature 1..20: note = chemically synthesized
  source 1..20: mol_type = other DNA
atgacattgtatggccaacc

SEQ ID NO: 7033 - DNA, 20 bp, synthetic construct
  misc_feature 1..20: note = chemically synthesized
  source 1..20: mol_type = other DNA
tgacattgtatggccaacct

SEQ ID NO: 7034 - DNA, 20 bp, synthetic construct
  misc_feature 1..20: note = chemically synthesized
  source 1..20: mol_type = other DNA
gacattgtatggccaacctg

SEQ ID NO: 7035 - DNA, 20 bp, synthetic construct
  misc_feature 1..20: note = chemically synthesized
  source 1..20: mol_type = other DNA
ggccaacctggggttgctga

SEQ ID NO: 7036 - DNA, 20 bp, synthetic construct
  misc_feature 1..20: note = chemically synthesized
  source 1..20: mol_type = other DNA
cctggggttgctgatggaac

SEQ ID NO: 7037 - DNA, 20 bp, synthetic construct
  misc_feature 1..20: note = chemically synthesized
  source 1..20: mol_type = other DNA
ttgctgatggaactagttaa

SEQ ID NO: 7038 - DNA, 20 bp, synthetic construct
  misc_feature 1..20: note = chemically synthesized
  source 1..20: mol_type = other DNA
gctgatggaactagttaaaa

SEQ ID NO: 7039 - DNA, 20 bp, synthetic construct
  misc_feature 1..20: note = chemically synthesized
  source 1..20: mol_type = other DNA
tagttaaaagagtgtctgtg

SEQ ID NO: 7040 - DNA, 20 bp, synthetic construct
  misc_feature 1..20: note = chemically synthesized
  source 1..20: mol_type = other DNA
taaaagagtgtctgtgaagc

SEQ ID NO: 7041 - DNA, 20 bp, synthetic construct
  misc_feature 1..20: note = chemically synthesized
  source 1..20: mol_type = other DNA
gagtgtctgtgaagcaagcc

SEQ ID NO: 7042 - DNA, 20 bp, synthetic construct
  misc_feature 1..20: note = chemically synthesized
  source 1..20: mol_type = other DNA
gtctgtgaagcaagcctagc

SEQ ID NO: 7043 - DNA, 20 bp, synthetic construct
  misc_feature 1..20: note = chemically synthesized
  source 1..20: mol_type = other DNA
tctgtgaagcaagcctagct

SEQ ID NO: 7044 - DNA, 20 bp, synthetic construct
  misc_feature 1..20: note = chemically synthesized
  source 1..20: mol_type = other DNA
gtgaagcaagcctagctggg

SEQ ID NO: 7045 - DNA, 20 bp, synthetic construct
  misc_feature 1..20: note = chemically synthesized
  source 1..20: mol_type = other DNA
tgaagcaagcctagctgggt

SEQ ID NO: 7046 - DNA, 20 bp, synthetic construct
  misc_feature 1..20: note = chemically synthesized
  source 1..20: mol_type = other DNA
gcctagctgggtgggcttgc

SEQ ID NO: 7047 - DNA, 20 bp, synthetic construct
  misc_feature 1..20: note = chemically synthesized
  source 1..20: mol_type = other DNA
ggtgggcttgcaagcatttc

SEQ ID NO: 7048 - DNA, 20 bp, synthetic construct
  misc_feature 1..20: note = chemically synthesized
  source 1..20: mol_type = other DNA
gtgggcttgcaagcatttct

SEQ ID NO: 7049 - DNA, 20 bp, synthetic construct
  misc_feature 1..20: note = chemically synthesized
  source 1..20: mol_type = other DNA
ctgcatcctcctctgtaaaa

SEQ ID NO: 7050 - DNA, 20 bp, synthetic construct
  misc_feature 1..20: note = chemically synthesized
  source 1..20: mol_type = other DNA
tgcatcctcctctgtaaaat

SEQ ID NO: 7051 - DNA, 20 bp, synthetic construct
  misc_feature 1..20: note = chemically synthesized
  source 1..20: mol_type = other DNA
catcctcctctgtaaaatgg

SEQ ID NO: 7052 - DNA, 20 bp, synthetic construct
  misc_feature 1..20: note = chemically synthesized
  source 1..20: mol_type = other DNA
tgggagaaccctgaactgct

SEQ ID NO: 7053 - DNA, 20 bp, synthetic construct
  misc_feature 1..20: note = chemically synthesized
  source 1..20: mol_type = other DNA
gaactgctcagccgacctca

SEQ ID NO: 7054 - DNA, 20 bp, synthetic construct
  misc_feature 1..20: note = chemically synthesized
  source 1..20: mol_type = other DNA
gacctcatggttgactcact

SEQ ID NO: 7055 - DNA, 20 bp, synthetic construct
  misc_feature 1..20: note = chemically synthesized
  source 1..20: mol_type = other DNA
atggttgactcactcagcaa

SEQ ID NO: 7056 - DNA, 20 bp, synthetic construct
  misc_feature 1..20: note = chemically synthesized
  source 1..20: mol_type = other DNA
ggttgactcactcagcaaca

SEQ ID NO: 7057 - DNA, 20 bp, synthetic construct
  misc_feature 1..20: note = chemically synthesized
  source 1..20: mol_type = other DNA
gttgactcactcagcaacag

SEQ ID NO: 7058 - DNA, 20 bp, synthetic construct
  misc_feature 1..20: note = chemically synthesized
  source 1..20: mol_type = other DNA
ctcagcaacagaggtctcca

SEQ ID NO: 7059 - DNA, 20 bp, synthetic construct
  misc_feature 1..20: note = chemically synthesized
  source 1..20: mol_type = other DNA
tcagcaacagaggtctccac

SEQ ID NO: 7060 - DNA, 20 bp, synthetic construct
  misc_feature 1..20: note = chemically synthesized
  source 1..20: mol_type = other DNA
agcaacagaggtctccacag

SEQ ID NO: 7061 - DNA, 20 bp, synthetic construct
  misc_feature 1..20: note = chemically synthesized
  source 1..20: mol_type = other DNA
cacaggagccctgcccacat

SEQ ID NO: 7062 - DNA, 20 bp, synthetic construct
  misc_feature 1..20: note = chemically synthesized
  source 1..20: mol_type = other DNA
ctgcccacatgagacatctt

SEQ ID NO: 7063 - DNA, 20 bp, synthetic construct
  misc_feature 1..20: note = chemically synthesized
  source 1..20: mol_type = other DNA
tttggcacatcttctgaaac

SEQ ID NO: 7064 - DNA, 20 bp, synthetic construct
  misc_feature 1..20: note = chemically synthesized
  source 1..20: mol_type = other DNA
tctgaaacaagacctgtttc

SEQ ID NO: 7065 - DNA, 20 bp, synthetic construct
  misc_feature 1..20: note = chemically synthesized
  source 1..20: mol_type = other DNA
aaacaagacctgtttctgga

SEQ ID NO: 7066 - DNA, 20 bp, synthetic construct
  misc_feature 1..20: note = chemically synthesized
  source 1..20: mol_type = other DNA
acctgtttctggaaagttgt

SEQ ID NO: 7067 - DNA, 20 bp, synthetic construct
  misc_feature 1..20: note = chemically synthesized
  source 1..20: mol_type = other DNA
acttatttatattattgttt

SEQ ID NO: 7068 - DNA, 20 bp, synthetic construct
  misc_feature 1..20: note = chemically synthesized
  source 1..20: mol_type = other DNA
ttcattctgctttgattcaa

SEQ ID NO: 7069 - DNA, 20 bp, synthetic construct
  misc_feature 1..20: note = chemically synthesized
  source 1..20: mol_type = other DNA
attctgctttgattcaatgg

SEQ ID NO: 7070 - DNA, 20 bp, synthetic construct
  misc_feature 1..20: note = chemically synthesized
  source 1..20: mol_type = other DNA
ggcagccaatttaattcatt

SEQ ID NO: 7071 - DNA, 20 bp, synthetic construct
  misc_feature 1..20: note = chemically synthesized
  source 1..20: mol_type = other DNA
attcatttggtccaaacctg

SEQ ID NO: 7072 - DNA, 20 bp, synthetic construct
  misc_feature 1..20: note = chemically synthesized
  source 1..20: mol_type = other DNA
aaacctgtagtgctacttgc

SEQ ID NO: 7073 - DNA, 20 bp, synthetic construct
  misc_feature 1..20: note = chemically synthesized
  source 1..20: mol_type = other DNA
tgctacttgccagaacaaaa

SEQ ID NO: 7074 - DNA, 20 bp, synthetic construct
  misc_feature 1..20: note = chemically synthesized
  source 1..20: mol_type = other DNA
ttgccagaacaaaatggaat

SEQ ID NO: 7075 - DNA, 20 bp, synthetic construct
  misc_feature 1..20: note = chemically synthesized
  source 1..20: mol_type = other DNA
gagcctcattccctgccctc

SEQ ID NO: 7076 - DNA, 20 bp, synthetic construct
  misc_feature 1..20: note = chemically synthesized
  source 1..20: mol_type = other DNA
agcctcattccctgccctca

SEQ ID NO: 7077 - DNA, 20 bp, synthetic construct
  misc_feature 1..20: note = chemically synthesized
  source 1..20: mol_type = other DNA
cctcattccctgccctcaag

SEQ ID NO: 7078 - DNA, 20 bp, synthetic construct
  misc_feature 1..20: note = chemically synthesized
  source 1..20: mol_type = other DNA
ccctgccctcaaggagctca

SEQ ID NO: 7079 - DNA, 20 bp, synthetic construct
  misc_feature 1..20: note = chemically synthesized
  source 1..20: mol_type = other DNA
ccctcaaggagctcacagtc

SEQ ID NO: 7080 - DNA, 20 bp, synthetic construct
  misc_feature 1..20: note = chemically synthesized
  source 1..20: mol_type = other DNA
tcaaggagctcacagtccag

SEQ ID NO: 7081 - DNA, 20 bp, synthetic construct
  misc_feature 1..20: note = chemically synthesized
  source 1..20: mol_type = other DNA
gctctgtctttaatatctat

SEQ ID NO: 7082 - DNA, 20 bp, synthetic construct
  misc_feature 1..20: note = chemically synthesized
  source 1..20: mol_type = other DNA
tctgtctttaatatctataa

SEQ ID NO: 7083 - DNA, 20 bp, synthetic construct
  misc_feature 1..20: note = chemically synthesized
  source 1..20: mol_type = other DNA
ctttaatatctataagagca

SEQ ID NO: 7084 - DNA, 20 bp, synthetic construct
  misc_feature 1..20: note = chemically synthesized
  source 1..20: mol_type = other DNA
tttaatatctataagagcac

SEQ ID NO: 7085 - DNA, 20 bp, synthetic construct
  misc_feature 1..20: note = chemically synthesized
  source 1..20: mol_type = other DNA
atatctataagagcacaggt

SEQ ID NO: 7086 - DNA, 20 bp, synthetic construct
  misc_feature 1..20: note = chemically synthesized
  source 1..20: mol_type = other DNA
aagagcacaggtaagtgtca

SEQ ID NO: 7087 - DNA, 20 bp, synthetic construct
  misc_feature 1..20: note = chemically synthesized
  source 1..20: mol_type = other DNA
agagcacaggtaagtgtcac

SEQ ID NO: 7088 - DNA, 20 bp, synthetic construct
  misc_feature 1..20: note = chemically synthesized
  source 1..20: mol_type = other DNA
gcacaggtaagtgtcacagg

SEQ ID NO: 7089 - DNA, 20 bp, synthetic construct
  misc_feature 1..20: note = chemically synthesized
  source 1..20: mol_type = other DNA
gtaagtgtcacaggaagcca

SEQ ID NO: 7090 - DNA, 20 bp, synthetic construct
  misc_feature 1..20: note = chemically synthesized
  source 1..20: mol_type = other DNA
cacaggaagccatggtcctt

SEQ ID NO: 7091 - DNA, 20 bp, synthetic construct
  misc_feature 1..20: note = chemically synthesized
  source 1..20: mol_type = other DNA
acaggaagccatggtccttt

SEQ ID NO: 7092 - DNA, 20 bp, synthetic construct
  misc_feature 1..20: note = chemically synthesized
  source 1..20: mol_type = other DNA
caggaagccatggtcctttg

SEQ ID NO: 7093 - DNA, 20 bp, synthetic construct
  misc_feature 1..20: note = chemically synthesized
  source 1..20: mol_type = other DNA
aggaagccatggtcctttgg

SEQ ID NO: 7094 - DNA, 20 bp, synthetic construct
  misc_feature 1..20: note = chemically synthesized
  source 1..20: mol_type = other DNA
atggtcctttgggggaaatg

SEQ ID NO: 7095 - DNA, 20 bp, synthetic construct
  misc_feature 1..20: note = chemically synthesized
  source 1..20: mol_type = other DNA
tcacttccaaatactttacc

SEQ ID NO: 7096 - DNA, 20 bp, synthetic construct
  misc_feature 1..20: note = chemically synthesized
  source 1..20: mol_type = other DNA
aaatactttacctggtttgt

SEQ ID NO: 7097 - DNA, 20 bp, synthetic construct
  misc_feature 1..20: note = chemically synthesized
  source 1..20: mol_type = other DNA
ctggtttgtaagttctcttt

SEQ ID NO: 7098 - DNA, 20 bp, synthetic construct
  misc_feature 1..20: note = chemically synthesized
  source 1..20: mol_type = other DNA
tggtttgtaagttctctttc

SEQ ID NO: 7099 - DNA, 20 bp, synthetic construct
  misc_feature 1..20: note = chemically synthesized
  source 1..20: mol_type = other DNA
tctctttcgggtgcttccct

SEQ ID NO: 7100 - DNA, 20 bp, synthetic construct
  misc_feature 1..20: note = chemically synthesized
  source 1..20: mol_type = other DNA
ctttcgggtgcttccctgag

SEQ ID NO: 7101 - DNA, 20 bp, synthetic construct
  misc_feature 1..20: note = chemically synthesized
  source 1..20: mol_type = other DNA
cgggtgcttccctgagtggc

SEQ ID NO: 7102 - DNA, 20 bp, synthetic construct
  misc_feature 1..20: note = chemically synthesized
  source 1..20: mol_type = other DNA
ggtgcttccctgagtggcaa

SEQ ID NO: 7103 - DNA, 20 bp, synthetic construct
  misc_feature 1..20: note = chemically synthesized
  source 1..20: mol_type = other DNA
gtgcttccctgagtggcaag

SEQ ID NO: 7104 - DNA, 20 bp, synthetic construct
  misc_feature 1..20: note = chemically synthesized
  source 1..20: mol_type = other DNA
tgcttccctgagtggcaaga

SEQ ID NO: 7105 - DNA, 20 bp, synthetic construct
  misc_feature 1..20: note = chemically synthesized
  source 1..20: mol_type = other DNA
tccctgagtggcaagaggga

SEQ ID NO: 7106 - DNA, 20 bp, synthetic construct
  misc_feature 1..20: note = chemically synthesized
  source 1..20: mol_type = other DNA
ccctgagtggcaagagggaa

SEQ ID NO: 7107 - DNA, 20 bp, synthetic construct
  misc_feature 1..20: note = chemically synthesized
  source 1..20: mol_type = other DNA
aagagggaaaggccttttgc

SEQ ID NO: 7108 - DNA, 20 bp, synthetic construct
  misc_feature 1..20: note = chemically synthesized
  source 1..20: mol_type = other DNA
tttttttttttttttttttt

SEQ ID NO: 7109 - DNA, 20 bp, synthetic construct
  misc_feature 1..20: note = chemically synthesized
  source 1..20: mol_type = other DNA
ttttttttttttttttgaga

SEQ ID NO: 7110 - DNA, 20 bp, synthetic construct
  misc_feature 1..20: note = chemically synthesized
  source 1..20: mol_type = other DNA
ttttttttttttttgagaca

SEQ ID NO: 7111 - DNA, 20 bp, synthetic construct
  misc_feature 1..20: note = chemically synthesized
  source 1..20: mol_type = other DNA
agagtttcgctcttgttgcc

SEQ ID NO: 7112 - DNA, 20 bp, synthetic construct
  misc_feature 1..20: note = chemically synthesized
  source 1..20: mol_type = other DNA
gagtttcgctcttgttgccc

SEQ ID NO: 7113 - DNA, 20 bp, synthetic construct
  misc_feature 1..20: note = chemically synthesized
  source 1..20: mol_type = other DNA
ttcgctcttgttgcccaggc

SEQ ID NO: 7114 - DNA, 20 bp, synthetic construct
  misc_feature 1..20: note = chemically synthesized
  source 1..20: mol_type = other DNA
tcgctcttgttgcccaggct

SEQ ID NO: 7115 - DNA, 20 bp, synthetic construct
  misc_feature 1..20: note = chemically synthesized
  source 1..20: mol_type = other DNA
cgctcttgttgcccaggctg

SEQ ID NO: 7116 - DNA, 20 bp, synthetic construct
  misc_feature 1..20: note = chemically synthesized
  source 1..20: mol_type = other DNA
ttgcccaggctggggtgcaa

SEQ ID NO: 7117 - DNA, 20 bp, synthetic construct
  misc_feature 1..20: note = chemically synthesized
  source 1..20: mol_type = other DNA
ggggtgcaatggtgtgatct

SEQ ID NO: 7118 - DNA, 20 bp, synthetic construct
  misc_feature 1..20: note = chemically synthesized
  source 1..20: mol_type = other DNA
ggctcaccacctctgcctcc

SEQ ID NO: 7119 - DNA, 20 bp, synthetic construct
  misc_feature 1..20: note = chemically synthesized
  source 1..20: mol_type = other DNA
gctcaccacctctgcctcct

SEQ ID NO: 7120 - DNA, 20 bp, synthetic construct
  misc_feature 1..20: note = chemically synthesized
  source 1..20: mol_type = other DNA
cacctctgcctcctgggttc

SEQ ID NO: 7121 - DNA, 20 bp, synthetic construct
  misc_feature 1..20: note = chemically synthesized
  source 1..20: mol_type = other DNA
ttcaagcaattctcctccct

SEQ ID NO: 7122 - DNA, 20 bp, synthetic construct
  misc_feature 1..20: note = chemically synthesized
  source 1..20: mol_type = other DNA
ttctcctccctcagcctcct

SEQ ID NO: 7123 - DNA, 20 bp, synthetic construct
  misc_feature 1..20: note = chemically synthesized
  source 1..20: mol_type = other DNA
tcctccctcagcctcctgag

SEQ ID NO: 7124 - DNA, 20 bp, synthetic construct
  misc_feature 1..20: note = chemically synthesized
  source 1..20: mol_type = other DNA
ccctcagcctcctgagtagc

SEQ ID NO: 7125 - DNA, 20 bp, synthetic construct
  misc_feature 1..20: note = chemically synthesized
  source 1..20: mol_type = other DNA
cctcagcctcctgagtagct

SEQ ID NO: 7126 - DNA, 20 bp, synthetic construct
  misc_feature 1..20: note = chemically synthesized
  source 1..20: mol_type = other DNA
ctcctgagtagctgggatta

SEQ ID NO: 7127 - DNA, 20 bp, synthetic construct
  misc_feature 1..20: note = chemically synthesized
  source 1..20: mol_type = other DNA
tcctgagtagctgggattac

SEQ ID NO: 7128 - DNA, 20 bp, synthetic construct
  misc_feature 1..20: note = chemically synthesized
  source 1..20: mol_type = other DNA
caggcatgtgcgaccatgcc

SEQ ID NO: 7129 - DNA, 20 bp, synthetic construct
  misc_feature 1..20: note = chemically synthesized
  source 1..20: mol_type = other DNA
atgtgcgaccatgcctggct

SEQ ID NO: 7130 - DNA, 20 bp, synthetic construct
  misc_feature 1..20: note = chemically synthesized
  source 1..20: mol_type = other DNA
ggctaagtttatatttttaa

SEQ ID NO: 7131 - DNA, 20 bp, synthetic construct
  misc_feature 1..20: note = chemically synthesized
  source 1..20: mol_type = other DNA
ctaagtttatatttttaata

SEQ ID NO: 7132 - DNA, 20 bp, synthetic construct
  misc_feature 1..20: note = chemically synthesized
  source 1..20: mol_type = other DNA
tttatatttttaatagagat

SEQ ID NO: 7133 - DNA, 20 bp, synthetic construct
  misc_feature 1..20: note = chemically synthesized
  source 1..20: mol_type = other DNA
ttatatttttaatagagatg

SEQ ID NO: 7134 - DNA, 20 bp, synthetic construct
  misc_feature 1..20: note = chemically synthesized
  source 1..20: mol_type = other DNA
gagatgaggtttctccatgt

SEQ ID NO: 7135 - DNA, 20 bp, synthetic construct
  misc_feature 1..20: note = chemically synthesized
  source 1..20: mol_type = other DNA
tgaggtttctccatgttggt

SEQ ID NO: 7136 - DNA, 20 bp, synthetic construct
  misc_feature 1..20: note = chemically synthesized
  source 1..20: mol_type = other DNA
gaggtttctccatgttggtc

SEQ ID NO: 7137 - DNA, 20 bp, synthetic construct
  misc_feature 1..20: note = chemically synthesized
  source 1..20: mol_type = other DNA
tttctccatgttggtcaggc

SEQ ID NO: 7138 - DNA, 20 bp, synthetic construct
  misc_feature 1..20: note = chemically synthesized
  source 1..20: mol_type = other DNA
tggtctcaaactcttgacct

SEQ ID NO: 7139 - DNA, 20 bp, synthetic construct
  misc_feature 1..20: note = chemically synthesized
  source 1..20: mol_type = other DNA
ggtctcaaactcttgacctc

SEQ ID NO: 7140 - DNA, 20 bp, synthetic construct
  misc_feature 1..20: note = chemically synthesized
  source 1..20: mol_type = other DNA
ctcaggtgatctacccacct

SEQ ID NO: 7141 - DNA, 20 bp, synthetic construct
  misc_feature 1..20: note = chemically synthesized
  source 1..20: mol_type = other DNA
ctacccacctcggcctccca

SEQ ID NO: 7142 - DNA, 20 bp, synthetic construct
  misc_feature 1..20: note = chemically synthesized
  source 1..20: mol_type = other DNA
acctcggcctcccaaagtgc

SEQ ID NO: 7143 - DNA, 20 bp, synthetic construct
  misc_feature 1..20: note = chemically synthesized
  source 1..20: mol_type = other DNA
ctcccaaagtgctggaatta

SEQ ID NO: 7144 - DNA, 20 bp, synthetic construct
  misc_feature 1..20: note = chemically synthesized
  source 1..20: mol_type = other DNA
agtgctggaattacagacgt

SEQ ID NO: 7145 - DNA, 20 bp, synthetic construct
  misc_feature 1..20: note = chemically synthesized
  source 1..20: mol_type = other DNA
cagacgtgagccactgcgcc

SEQ ID NO: 7146 - DNA, 20 bp, synthetic construct
  misc_feature 1..20: note = chemically synthesized
  source 1..20: mol_type = other DNA
ttacactgctttcttaatta

SEQ ID NO: 7147 - DNA, 20 bp, synthetic construct
  misc_feature 1..20: note = chemically synthesized
  source 1..20: mol_type = other DNA
cactgctttcttaattacag

SEQ ID NO: 7148 - DNA, 20 bp, synthetic construct
  misc_feature 1..20: note = chemically synthesized
  source 1..20: mol_type = other DNA
ctcatctcacataaaaattt

SEQ ID NO: 7149 - DNA, 20 bp, synthetic construct
  misc_feature 1..20: note = chemically synthesized
  source 1..20: mol_type = other DNA
tctcacataaaaatttaaga

SEQ ID NO: 7150 - DNA, 20 bp, synthetic construct
  misc_feature 1..20: note = chemically synthesized
  source 1..20: mol_type = other DNA
ctcacataaaaatttaagac

SEQ ID NO: 7151 - DNA, 20 bp, synthetic construct
  misc_feature 1..20: note = chemically synthesized
  source 1..20: mol_type = other DNA
aaaaatttaagacgggaaaa

SEQ ID NO: 7152 - DNA, 20 bp, synthetic construct
  misc_feature 1..20: note = chemically synthesized
  source 1..20: mol_type = other DNA
aaaatttaagacgggaaaac

SEQ ID NO: 7153 - DNA, 20 bp, synthetic construct
  misc_feature 1..20: note = chemically synthesized
  source 1..20: mol_type = other DNA
atttaagacgggaaaacagg

SEQ ID NO: 7154 - DNA, 20 bp, synthetic construct
  misc_feature 1..20: note = chemically synthesized
  source 1..20: mol_type = other DNA
aaaacaggaagatgcattct

SEQ ID NO: 7155 - DNA, 20 bp, synthetic construct
  misc_feature 1..20: note = chemically synthesized
  source 1..20: mol_type = other DNA
acaggaagatgcattctgag

SEQ ID NO: 7156 - DNA, 20 bp, synthetic construct
  misc_feature 1..20: note = chemically synthesized
  source 1..20: mol_type = other DNA
tgcattctgagaagttatat

SEQ ID NO: 7157 - DNA, 20 bp, synthetic construct
  misc_feature 1..20: note = chemically synthesized
  source 1..20: mol_type = other DNA
tgcctctctacattccaaaa

SEQ ID NO: 7158 - DNA, 20 bp, synthetic construct
  misc_feature 1..20: note = chemically synthesized
  source 1..20: mol_type = other DNA
ttttattctaattattttac

SEQ ID NO: 7159 - DNA, 20 bp, synthetic construct
  misc_feature 1..20: note = chemically synthesized
  source 1..20: mol_type = other DNA
attattttactagtgaatta

SEQ ID NO: 7160 - DNA, 20 bp, synthetic construct
  misc_feature 1..20: note = chemically synthesized
  source 1..20: mol_type = other DNA
tactagtgaattatggaata

SEQ ID NO: 7161 - DNA, 20 bp, synthetic construct
  misc_feature 1..20: note = chemically synthesized
  source 1..20: mol_type = other DNA
tagtgaattatggaataaag

SEQ ID NO: 7162 - DNA, 20 bp, synthetic construct
  misc_feature 1..20: note = chemically synthesized
  source 1..20: mol_type = other DNA
ctacacaacttgtgttgcac

SEQ ID NO: 7163 - DNA, 20 bp, synthetic construct
  misc_feature 1..20: note = chemically synthesized
  source 1..20: mol_type = other DNA
tacacaacttgtgttgcact

SEQ ID NO: 7164 - DNA, 20 bp, synthetic construct
  misc_feature 1..20: note = chemically synthesized
  source 1..20: mol_type = other DNA
tgttgcactaggtgaaatct

SEQ ID NO: 7165 - DNA, 20 bp, synthetic construct
  misc_feature 1..20: note = chemically synthesized
  source 1..20: mol_type = other DNA
gttgcactaggtgaaatctc

SEQ ID NO: 7166 - DNA, 20 bp, synthetic construct
  misc_feature 1..20: note = chemically synthesized
  source 1..20: mol_type = other DNA
taggtgaaatctcaggctaa

SEQ ID NO: 7167 - DNA, 20 bp, synthetic construct
  misc_feature 1..20: note = chemically synthesized
  source 1..20: mol_type = other DNA
ggtgaaatctcaggctaaca

SEQ ID NO: 7168 - DNA, 20 bp, synthetic construct
  misc_feature 1..20: note = chemically synthesized
  source 1..20: mol_type = other DNA
atctcaggctaacagagctt

SEQ ID NO: 7169 - DNA, 20 bp, synthetic construct
  misc_feature 1..20: note = chemically synthesized
  source 1..20: mol_type = other DNA
tctcaggctaacagagcttc

SEQ ID NO: 7170 - DNA, 20 bp, synthetic construct
  misc_feature 1..20: note = chemically synthesized
  source 1..20: mol_type = other DNA
ctcaggctaacagagcttca

SEQ ID NO: 7171 - DNA, 20 bp, synthetic construct
  misc_feature 1..20: note = chemically synthesized
  source 1..20: mol_type = other DNA
caggctaacagagcttcagg

SEQ ID NO: 7172 - DNA, 20 bp, synthetic construct
  misc_feature 1..20: note = chemically synthesized
  source 1..20: mol_type = other DNA
aggctaacagagcttcaggg

SEQ ID NO: 7173 - DNA, 20 bp, synthetic construct
  misc_feature 1..20: note = chemically synthesized
  source 1..20: mol_type = other DNA
taacagagcttcagggagga

SEQ ID NO: 7174 - DNA, 20 bp, synthetic construct
  misc_feature 1..20: note = chemically synthesized
  source 1..20: mol_type = other DNA
aacagagcttcagggaggaa

SEQ ID NO: 7175 - DNA, 20 bp, synthetic construct
  misc_feature 1..20: note = chemically synthesized
  source 1..20: mol_type = other DNA
gagcttcagggaggaaaggc

SEQ ID NO: 7176 - DNA, 20 bp, synthetic construct
  misc_feature 1..20: note = chemically synthesized
  source 1..20: mol_type = other DNA
caaaaatatgcctcactcca

SEQ ID NO: 7177 - DNA, 20 bp, synthetic construct
  misc_feature 1..20: note = chemically synthesized
  source 1..20: mol_type = other DNA
aaaatatgcctcactccaca

SEQ ID NO: 7178 - DNA, 20 bp, synthetic construct
  misc_feature 1..20: note = chemically synthesized
  source 1..20: mol_type = other DNA
atatgcctcactccacagag

SEQ ID NO: 7179 - DNA, 20 bp, synthetic construct
  misc_feature 1..20: note = chemically synthesized
  source 1..20: mol_type = other DNA
ccacagagaagctgtaccac

SEQ ID NO: 7180 - DNA, 20 bp, synthetic construct
  misc_feature 1..20: note = chemically synthesized
  source 1..20: mol_type = other DNA
cagagaagctgtaccaccag

SEQ ID NO: 7181 - DNA, 20 bp, synthetic construct
  misc_feature 1..20: note = chemically synthesized
  source 1..20: mol_type = other DNA
agctgtaccaccagaagtcc

SEQ ID NO: 7182 - DNA, 20 bp, synthetic construct
  misc_feature 1..20: note = chemically synthesized
  source 1..20: mol_type = other DNA
accagaagtcctggaaaact

SEQ ID NO: 7183 - DNA, 20 bp, synthetic construct
  misc_feature 1..20: note = chemically synthesized
  source 1..20: mol_type = other DNA
cagaagtcctggaaaactga

SEQ ID NO: 7184 - DNA, 20 bp, synthetic construct
  misc_feature 1..20: note = chemically synthesized
  source 1..20: mol_type = other DNA
agaagtcctggaaaactgag

SEQ ID NO: 7185 - DNA, 20 bp, synthetic construct
  misc_feature 1..20: note = chemically synthesized
  source 1..20: mol_type = other DNA
atgttgtaacaatgcaactc

SEQ ID NO: 7186 - DNA, 20 bp, synthetic construct
  misc_feature 1..20: note = chemically synthesized
  source 1..20: mol_type = other DNA
acaatgcaactcaagactat

SEQ ID NO: 7187 - DNA, 20 bp, synthetic construct
  misc_feature 1..20: note = chemically synthesized
  source 1..20: mol_type = other DNA
gaatgatatgaatatttgta

SEQ ID NO: 7188 - DNA, 20 bp, synthetic construct
  misc_feature 1..20: note = chemically synthesized
  source 1..20: mol_type = other DNA
atttgtatagatacttatca

SEQ ID NO: 7189 - DNA, 20 bp, synthetic construct
  misc_feature 1..20: note = chemically synthesized
  source 1..20: mol_type = other DNA
atacttatcaaagcaacaat

SEQ ID NO: 7190 - DNA, 20 bp, synthetic construct
  misc_feature 1..20: note = chemically synthesized
  source 1..20: mol_type = other DNA
acttatcaaagcaacaatca

SEQ ID NO: 7191 - DNA, 20 bp, synthetic construct
  misc_feature 1..20: note = chemically synthesized
  source 1..20: mol_type = other DNA
tcaaagcaacaatcagagat

SEQ ID NO: 7192 - DNA, 20 bp, synthetic construct
  misc_feature 1..20: note = chemically synthesized
  source 1..20: mol_type = other DNA
caaagcaacaatcagagatc

SEQ ID NO: 7193 - DNA, 20 bp, synthetic construct
  misc_feature 1..20: note = chemically synthesized
  source 1..20: mol_type = other DNA
gagatcaggtccctccaaat

SEQ ID NO: 7194 - DNA, 20 bp, synthetic construct
  misc_feature 1..20: note = chemically synthesized
  source 1..20: mol_type = other DNA
ggtccctccaaatgagctta

SEQ ID NO: 7195 - DNA, 20 bp, synthetic construct
  misc_feature 1..20: note = chemically synthesized
  source 1..20: mol_type = other DNA
tttatgatcctgctttgtaa

SEQ ID NO: 7196 - DNA, 20 bp, synthetic construct
  misc_feature 1..20: note = chemically synthesized
  source 1..20: mol_type = other DNA
tgatcctgctttgtaaaagc

SEQ ID NO: 7197 - DNA, 20 bp, synthetic construct
  misc_feature 1..20: note = chemically synthesized
  source 1..20: mol_type = other DNA
aagctggtgaaacaaaatga

SEQ ID NO: 7198 - DNA, 20 bp, synthetic construct
  misc_feature 1..20: note = chemically synthesized
  source 1..20: mol_type = other DNA
tggtgaaacaaaatgatgga

SEQ ID NO: 7199 - DNA, 20 bp, synthetic construct
  misc_feature 1..20: note = chemically synthesized
  source 1..20: mol_type = other DNA
tgaaacaaaatgatggatag

SEQ ID NO: 7200 - DNA, 20 bp, synthetic construct
  misc_feature 1..20: note = chemically synthesized
  source 1..20: mol_type = other DNA
tgatggatagcagatttgct

SEQ ID NO: 7201 - DNA, 20 bp, synthetic construct
  misc_feature 1..20: note = chemically synthesized
  source 1..20: mol_type = other DNA
agcagatttgctgagctcca

SEQ ID NO: 7202 - DNA, 20 bp, synthetic construct
  misc_feature 1..20: note = chemically synthesized
  source 1..20: mol_type = other DNA
gatttgctgagctccaaagt

SEQ ID NO: 7203 - DNA, 20 bp, synthetic construct
  misc_feature 1..20: note = chemically synthesized
  source 1..20: mol_type = other DNA
atttgctgagctccaaagtc

SEQ ID NO: 7204 - DNA, 20 bp, synthetic construct
  misc_feature 1..20: note = chemically synthesized
  source 1..20: mol_type = other DNA
tttgctgagctccaaagtca

SEQ ID NO: 7205 - DNA, 20 bp, synthetic construct
  misc_feature 1..20: note = chemically synthesized
  source 1..20: mol_type = other DNA
tgctgagctccaaagtcagg

SEQ ID NO: 7206 - DNA, 20 bp, synthetic construct
  misc_feature 1..20: note = chemically synthesized
  source 1..20: mol_type = other DNA
tgagctccaaagtcagggag

SEQ ID NO: 7207 - DNA, 20 bp, synthetic construct
  misc_feature 1..20: note = chemically synthesized
  source 1..20: mol_type = other DNA
gagctccaaagtcagggagt

SEQ ID NO: 7208 - DNA, 20 bp, synthetic construct
  misc_feature 1..20: note = chemically synthesized
  source 1..20: mol_type = other DNA
aaagtcagggagtaggtaaa

SEQ ID NO: 7209 - DNA, 20 bp, synthetic construct
  misc_feature 1..20: note = chemically synthesized
  source 1..20: mol_type = other DNA
ggtaaacagtgtgaacgtgt

SEQ ID NO: 7210 - DNA, 20 bp, synthetic construct
  misc_feature 1..20: note = chemically synthesized
  source 1..20: mol_type = other DNA
tgaacgtgtcagctccctcc

SEQ ID NO: 7211 - DNA, 20 bp, synthetic construct
  misc_feature 1..20: note = chemically synthesized
  source 1..20: mol_type = other DNA
ggctctcctctacattctgt

SEQ ID NO: 7212 - DNA, 20 bp, synthetic construct
  misc_feature 1..20: note = chemically synthesized
  source 1..20: mol_type = other DNA
ctctacattctgtgagcaaa

SEQ ID NO: 7213 - DNA, 20 bp, synthetic construct
  misc_feature 1..20: note = chemically synthesized
  source 1..20: mol_type = other DNA
caaacggaaaaataaaccat

SEQ ID NO: 7214 - DNA, 20 bp, synthetic construct
  misc_feature 1..20: note = chemically synthesized
  source 1..20: mol_type = other DNA
gaaaaataaaccatcggaaa

SEQ ID NO: 7215 - DNA, 20 bp, synthetic construct
  misc_feature 1..20: note = chemically synthesized
  source 1..20: mol_type = other DNA
taaaccatcggaaaaagtct

SEQ ID NO: 7216 - DNA, 20 bp, synthetic construct
  misc_feature 1..20: note = chemically synthesized
  source 1..20: mol_type = other DNA
ctcagcctaataaaactgca

SEQ ID NO: 7217 - DNA, 20 bp, synthetic construct
  misc_feature 1..20: note = chemically synthesized
  source 1..20: mol_type = other DNA
gcctaataaaactgcacaga

SEQ ID NO: 7218 - DNA, 20 bp, synthetic construct
  misc_feature 1..20: note = chemically synthesized
  source 1..20: mol_type = other DNA
agacagaataacttcttcat

SEQ ID NO: 7219 - DNA, 20 bp, synthetic construct
  misc_feature 1..20: note = chemically synthesized
  source 1..20: mol_type = other DNA
aataacttcttcatcagatt

SEQ ID NO: 7220 - DNA, 20 bp, synthetic construct
  misc_feature 1..20: note = chemically synthesized
  source 1..20: mol_type = other DNA
aacttcttcatcagattcag

SEQ ID NO: 7221 - DNA, 20 bp, synthetic construct
  misc_feature 1..20: note = chemically synthesized
  source 1..20: mol_type = other DNA
cttcttcatcagattcagaa

SEQ ID NO: 7222 - DNA, 20 bp, synthetic construct
  misc_feature 1..20: note = chemically synthesized
  source 1..20: mol_type = other DNA
cttcatcagattcagaagag

SEQ ID NO: 7223 - DNA, 20 bp, synthetic construct
  misc_feature 1..20: note = chemically synthesized
  source 1..20: mol_type = other DNA
catcagattcagaagagtag

SEQ ID NO: 7224 - DNA, 20 bp, synthetic construct
  misc_feature 1..20: note = chemically synthesized
  source 1..20: mol_type = other DNA
atcagattcagaagagtagc

SEQ ID NO: 7225 - DNA, 20 bp, synthetic construct
  misc_feature 1..20: note = chemically synthesized
  source 1..20: mol_type = other DNA
tcagattcagaagagtagca

SEQ ID NO: 7226 - DNA, 20 bp, synthetic construct
  misc_feature 1..20: note = chemically synthesized
  source 1..20: mol_type = other DNA
cagattcagaagagtagcag

SEQ ID NO: 7227 - DNA, 20 bp, synthetic construct
  misc_feature 1..20: note = chemically synthesized
  source 1..20: mol_type = other DNA
agattcagaagagtagcagg

SEQ ID NO: 7228 - DNA, 20 bp, synthetic construct
  misc_feature 1..20: note = chemically synthesized
  source 1..20: mol_type = other DNA
agtagcagggggtttctcgc

SEQ ID NO: 7229 - DNA, 20 bp, synthetic construct
  misc_feature 1..20: note = chemically synthesized
  source 1..20: mol_type = other DNA
cagggggtttctcgctagca

SEQ ID NO: 7230 - DNA, 20 bp, synthetic construct
  misc_feature 1..20: note = chemically synthesized
  source 1..20: mol_type = other DNA
tttctcgctagcacagattt

SEQ ID NO: 7231 - DNA, 20 bp, synthetic construct
  misc_feature 1..20: note = chemically synthesized
  source 1..20: mol_type = other DNA
acactttgtacatacaattc

SEQ ID NO: 7232 - DNA, 20 bp, synthetic construct
  misc_feature 1..20: note = chemically synthesized
  source 1..20: mol_type = other DNA
cactttgtacatacaattct

SEQ ID NO: 7233 - DNA, 20 bp, synthetic construct
  misc_feature 1..20: note = chemically synthesized
  source 1..20: mol_type = other DNA
tacatacaattctgggatct

SEQ ID NO: 7234 - DNA, 20 bp, synthetic construct
  misc_feature 1..20: note = chemically synthesized
  source 1..20: mol_type = other DNA
acatacaattctgggatctc

SEQ ID NO: 7235 - DNA, 20 bp, synthetic construct
  misc_feature 1..20: note = chemically synthesized
  source 1..20: mol_type = other DNA
gatctcaggtattgctccta

SEQ ID NO: 7236 - DNA, 20 bp, synthetic construct
  misc_feature 1..20: note = chemically synthesized
  source 1..20: mol_type = other DNA
tcaggtattgctcctaaaga

SEQ ID NO: 7237 - DNA, 20 bp, synthetic construct
  misc_feature 1..20: note = chemically synthesized
  source 1..20: mol_type = other DNA
aggtattgctcctaaagaaa

SEQ ID NO: 7238 - DNA, 20 bp, synthetic construct
  misc_feature 1..20: note = chemically synthesized
  source 1..20: mol_type = other DNA
attgctcctaaagaaagagc

SEQ ID NO: 7239 - DNA, 20 bp, synthetic construct
  misc_feature 1..20: note = chemically synthesized
  source 1..20: mol_type = other DNA
tatcttcctccaacatccaa

SEQ ID NO: 7240 - DNA, 20 bp, synthetic construct
  misc_feature 1..20: note = chemically synthesized
  source 1..20: mol_type = other DNA
cttcctccaacatccaaaag

SEQ ID NO: 7241 - DNA, 20 bp, synthetic construct
  misc_feature 1..20: note = chemically synthesized
  source 1..20: mol_type = other DNA
taatattaaaatatgaattt

SEQ ID NO: 7242 - DNA, 20 bp, synthetic construct
  misc_feature 1..20: note = chemically synthesized
  source 1..20: mol_type = other DNA
aatatgaatttaagaaatac

SEQ ID NO: 7243 - DNA, 20 bp, synthetic construct
  misc_feature 1..20: note = chemically synthesized
  source 1..20: mol_type = other DNA
atttaagaaataccagtgaa

SEQ ID NO: 7244 - DNA, 20 bp, synthetic construct
  misc_feature 1..20: note = chemically synthesized
  source 1..20: mol_type = other DNA
ttaagaaataccagtgaaaa

SEQ ID NO: 7245 - DNA, 20 bp, synthetic construct
  misc_feature 1..20: note = chemically synthesized
  source 1..20: mol_type = other DNA
tgaaaagagattttttaaac

SEQ ID NO: 7246 - DNA, 20 bp, synthetic construct
  misc_feature 1..20: note = chemically synthesized
  source 1..20: mol_type = other DNA
aaactgttttcaatcatcat

SEQ ID NO: 7247 - DNA, 20 bp, synthetic construct
  misc_feature 1..20: note = chemically synthesized
  source 1..20: mol_type = other DNA
actgttttcaatcatcatca

SEQ ID NO: 7248 - DNA, 20 bp, synthetic construct
  misc_feature 1..20: note = chemically synthesized
  source 1..20: mol_type = other DNA
aacaaatttacctctgatca

SEQ ID NO: 7249 - DNA, 20 bp, synthetic construct
  misc_feature 1..20: note = chemically synthesized
  source 1..20: mol_type = other DNA
aaatttacctctgatcatgg

SEQ ID NO: 7250 - DNA, 20 bp, synthetic construct
  misc_feature 1..20: note = chemically synthesized
  source 1..20: mol_type = other DNA
tacctctgatcatggtagca

SEQ ID NO: 7251 - DNA, 20 bp, synthetic construct
  misc_feature 1..20: note = chemically synthesized
  source 1..20: mol_type = other DNA
ctctgatcatggtagcacag

SEQ ID NO: 7252 - DNA, 20 bp, synthetic construct
  misc_feature 1..20: note = chemically synthesized
  source 1..20: mol_type = other DNA
ctgatcatggtagcacagta

SEQ ID NO: 7253 - DNA, 20 bp, synthetic construct
  misc_feature 1..20: note = chemically synthesized
  source 1..20: mol_type = other DNA
atcatggtagcacagtagag

SEQ ID NO: 7254 - DNA, 20 bp, synthetic construct
  misc_feature 1..20: note = chemically synthesized
  source 1..20: mol_type = other DNA
tggtagcacagtagagcaga

SEQ ID NO: 7255 - DNA, 20 bp, synthetic construct
  misc_feature 1..20: note = chemically synthesized
  source 1..20: mol_type = other DNA
gtagcacagtagagcagaaa

SEQ ID NO: 7256 - DNA, 20 bp, synthetic construct
  misc_feature 1..20: note = chemically synthesized
  source 1..20: mol_type = other DNA
gagcagaaagagcactcaat

SEQ ID NO: 7257 - DNA, 20 bp, synthetic construct
  misc_feature 1..20: note = chemically synthesized
  source 1..20: mol_type = other DNA
agcactcaattggtgatcaa

SEQ ID NO: 7258 - DNA, 20 bp, synthetic construct
  misc_feature 1..20: note = chemically synthesized
  source 1..20: mol_type = other DNA
tgatcaaaagaaataaattc

SEQ ID NO: 7259 - DNA, 20 bp, synthetic construct
  misc_feature 1..20: note = chemically synthesized
  source 1..20: mol_type = other DNA
taaattctagtcctgtcacc

SEQ ID NO: 7260 - DNA, 20 bp, synthetic construct
  misc_feature 1..20: note = chemically synthesized
  source 1..20: mol_type = other DNA
tcacccagaaactatgtgac

SEQ ID NO: 7261 - DNA, 20 bp, synthetic construct
  misc_feature 1..20: note = chemically synthesized
  source 1..20: mol_type = other DNA
cacccagaaactatgtgacc

SEQ ID NO: 7262 - DNA, 20 bp, synthetic construct
  misc_feature 1..20: note = chemically synthesized
  source 1..20: mol_type = other DNA
acccagaaactatgtgacca

SEQ ID NO: 7263 - DNA, 20 bp, synthetic construct
  misc_feature 1..20: note = chemically synthesized
  source 1..20: mol_type = other DNA
cccagaaactatgtgaccag

SEQ ID NO: 7264 - DNA, 20 bp, synthetic construct
  misc_feature 1..20: note = chemically synthesized
  source 1..20: mol_type = other DNA
cagaaactatgtgaccaggg

SEQ ID NO: 7265 - DNA, 20 bp, synthetic construct
  misc_feature 1..20: note = chemically synthesized
  source 1..20: mol_type = other DNA
agaaactatgtgaccagggg

SEQ ID NO: 7266 - DNA, 20 bp, synthetic construct
  misc_feature 1..20: note = chemically synthesized
  source 1..20: mol_type = other DNA
aggggaggtacttaatctct

SEQ ID NO: 7267 - DNA, 20 bp, synthetic construct
  misc_feature 1..20: note = chemically synthesized
  source 1..20: mol_type = other DNA
gggaggtacttaatctctaa

SEQ ID NO: 7268 - DNA, 20 bp, synthetic construct
  misc_feature 1..20: note = chemically synthesized
  source 1..20: mol_type = other DNA
acttaatctctaagagaatc

SEQ ID NO: 7269 - DNA, 20 bp, synthetic construct
  misc_feature 1..20: note = chemically synthesized
  source 1..20: mol_type = other DNA
ctctaagagaatcaagtctc

SEQ ID NO: 7270 - DNA, 20 bp, synthetic construct
  misc_feature 1..20: note = chemically synthesized
  source 1..20: mol_type = other DNA
taagagaatcaagtctcgag

SEQ ID NO: 7271 - DNA, 20 bp, synthetic construct
  misc_feature 1..20: note = chemically synthesized
  source 1..20: mol_type = other DNA
aagagaatcaagtctcgagt

SEQ ID NO: 7272 - DNA, 20 bp, synthetic construct
  misc_feature 1..20: note = chemically synthesized
  source 1..20: mol_type = other DNA
aagtctcgagtgggtaaaat

SEQ ID NO: 7273 - DNA, 20 bp, synthetic construct
  misc_feature 1..20: note = chemically synthesized
  source 1..20: mol_type = other DNA
ctcgagtgggtaaaatgagc

SEQ ID NO: 7274 - DNA, 20 bp, synthetic construct
  misc_feature 1..20: note = chemically synthesized
  source 1..20: mol_type = other DNA
tcgagtgggtaaaatgagct

SEQ ID NO: 7275 - DNA, 20 bp, synthetic construct
  misc_feature 1..20: note = chemically synthesized
  source 1..20: mol_type = other DNA
cgagtgggtaaaatgagctg

SEQ ID NO: 7276 - DNA, 20 bp, synthetic construct
  misc_feature 1..20: note = chemically synthesized
  source 1..20: mol_type = other DNA
gtgggtaaaatgagctgggg

SEQ ID NO: 7277 - DNA, 20 bp, synthetic construct
  misc_feature 1..20: note = chemically synthesized
  source 1..20: mol_type = other DNA
tgggtaaaatgagctgggga

SEQ ID NO: 7278 - DNA, 20 bp, synthetic construct
  misc_feature 1..20: note = chemically synthesized
  source 1..20: mol_type = other DNA
ggtaaaatgagctggggaag

SEQ ID NO: 7279 - DNA, 20 bp, synthetic construct
  misc_feature 1..20: note = chemically synthesized
  source 1..20: mol_type = other DNA
gagctggggaaggagtgaac

SEQ ID NO: 7280 - DNA, 20 bp, synthetic construct
  misc_feature 1..20: note = chemically synthesized
  source 1..20: mol_type = other DNA
tggggaaggagtgaaccagt

SEQ ID NO: 7281 - DNA, 20 bp, synthetic construct
  misc_feature 1..20: note = chemically synthesized
  source 1..20: mol_type = other DNA
gaaggagtgaaccagtgaga

SEQ ID NO: 7282 - DNA, 20 bp, synthetic construct
  misc_feature 1..20: note = chemically synthesized
  source 1..20: mol_type = other DNA
gaaccagtgagaaagaacac

SEQ ID NO: 7283 - DNA, 20 bp, synthetic construct
  misc_feature 1..20: note = chemically synthesized
  source 1..20: mol_type = other DNA
agaaagaacactggtctgtc

SEQ ID NO: 7284 - DNA, 20 bp, synthetic construct
  misc_feature 1..20: note = chemically synthesized
  source 1..20: mol_type = other DNA
gaaagaacactggtctgtct

SEQ ID NO: 7285 - DNA, 20 bp, synthetic construct
  misc_feature 1..20: note = chemically synthesized
  source 1..20: mol_type = other DNA
aaagaacactggtctgtctg

SEQ ID NO: 7286 - DNA, 20 bp, synthetic construct
  misc_feature 1..20: note = chemically synthesized
  source 1..20: mol_type = other DNA
actggtctgtctggggctcc

SEQ ID NO: 7287 - DNA, 20 bp, synthetic construct
  misc_feature 1..20: note = chemically synthesized
  source 1..20: mol_type = other DNA
ggtctgtctggggctcccag

SEQ ID NO: 7288 - DNA, 20 bp, synthetic construct
  misc_feature 1..20: note = chemically synthesized
  source 1..20: mol_type = other DNA
tctggggctcccagaagaca

SEQ ID NO: 7289 - DNA, 20 bp, synthetic construct
  misc_feature 1..20: note = chemically synthesized
  source 1..20: mol_type = other DNA
gggctcccagaagacacagc

SEQ ID NO: 7290 - DNA, 20 bp, synthetic construct
  misc_feature 1..20: note = chemically synthesized
  source 1..20: mol_type = other DNA
caaacacctccttgtctttt

SEQ ID NO: 7291 - DNA, 20 bp, synthetic construct
  misc_feature 1..20: note = chemically synthesized
  source 1..20: mol_type = other DNA
aaacacctccttgtctttta

SEQ ID NO: 7292 - DNA, 20 bp, synthetic construct
  misc_feature 1..20: note = chemically synthesized
  source 1..20: mol_type = other DNA
cctccttgtcttttaaggcc

SEQ ID NO: 7293 - DNA, 20 bp, synthetic construct
  misc_feature 1..20: note = chemically synthesized
  source 1..20: mol_type = other DNA
ctccttgtcttttaaggcct

SEQ ID NO: 7294 - DNA, 20 bp, synthetic construct
  misc_feature 1..20: note = chemically synthesized
  source 1..20: mol_type = other DNA
cttttaaggcctgggctgtc

SEQ ID NO: 7295 - DNA, 20 bp, synthetic construct
  misc_feature 1..20: note = chemically synthesized
  source 1..20: mol_type = other DNA
ttttaaggcctgggctgtct

SEQ ID NO: 7296 - DNA, 20 bp, synthetic construct
  misc_feature 1..20: note = chemically synthesized
  source 1..20: mol_type = other DNA
tttaaggcctgggctgtcta

SEQ ID NO: 7297 - DNA, 20 bp, synthetic construct
  misc_feature 1..20: note = chemically synthesized
  source 1..20: mol_type = other DNA
ttaaggcctgggctgtctag

SEQ ID NO: 7298 - DNA, 20 bp, synthetic construct
  misc_feature 1..20: note = chemically synthesized
  source 1..20: mol_type = other DNA
taaggcctgggctgtctagg

SEQ ID NO: 7299 - DNA, 20 bp, synthetic construct
  misc_feature 1..20: note = chemically synthesized
  source 1..20: mol_type = other DNA
gcctgggctgtctaggggga

SEQ ID NO: 7300 - DNA, 20 bp, synthetic construct
  misc_feature 1..20: note = chemically synthesized
  source 1..20: mol_type = other DNA
ctgtctagggggatggctac

SEQ ID NO: 7301 - DNA, 20 bp, synthetic construct
  misc_feature 1..20: note = chemically synthesized
  source 1..20: mol_type = other DNA
tagggggatggctactggct

SEQ ID NO: 7302 - DNA, 20 bp, synthetic construct
  misc_feature 1..20: note = chemically synthesized
  source 1..20: mol_type = other DNA
gggggatggctactggcttg

SEQ ID NO: 7303 - DNA, 20 bp, synthetic construct
  misc_feature 1..20: note = chemically synthesized
  source 1..20: mol_type = other DNA
gtctgtcatcttaatacaca

SEQ ID NO: 7304 - DNA, 20 bp, synthetic construct
  misc_feature 1..20: note = chemically synthesized
  source 1..20: mol_type = other DNA
acacggaatgtgttgaaatg

SEQ ID NO: 7305 - DNA, 20 bp, synthetic construct
  misc_feature 1..20: note = chemically synthesized
  source 1..20: mol_type = other DNA
cacggaatgtgttgaaatga

SEQ ID NO: 7306 - DNA, 20 bp, synthetic construct
  misc_feature 1..20: note = chemically synthesized
  source 1..20: mol_type = other DNA
ttgaaatgaaggtgtctgtg

SEQ ID NO: 7307 - DNA, 20 bp, synthetic construct
  misc_feature 1..20: note = chemically synthesized
  source 1..20: mol_type = other DNA
aaatgaaggtgtctgtgtgg

SEQ ID NO: 7308 - DNA, 20 bp, synthetic construct
  misc_feature 1..20: note = chemically synthesized
  source 1..20: mol_type = other DNA
aatgaaggtgtctgtgtgga

SEQ ID NO: 7309 - DNA, 20 bp, synthetic construct
  misc_feature 1..20: note = chemically synthesized
  source 1..20: mol_type = other DNA
atgaaggtgtctgtgtggaa

SEQ ID NO: 7310 - DNA, 20 bp, synthetic construct
  misc_feature 1..20: note = chemically synthesized
  source 1..20: mol_type = other DNA
aggtgtctgtgtggaaggga

SEQ ID NO: 7311 - DNA, 20 bp, synthetic construct
  misc_feature 1..20: note = chemically synthesized
  source 1..20: mol_type = other DNA
ctgtgtggaagggacagacc

SEQ ID NO: 7312 - DNA, 20 bp, synthetic construct
  misc_feature 1..20: note = chemically synthesized
  source 1..20: mol_type = other DNA
gatccactctgcatttgtcc

SEQ ID NO: 7313 - DNA, 20 bp, synthetic construct
  misc_feature 1..20: note = chemically synthesized
  source 1..20: mol_type = other DNA
ctctgcatttgtcctggcaa

SEQ ID NO: 7314 - DNA, 20 bp, synthetic construct
  misc_feature 1..20: note = chemically synthesized
  source 1..20: mol_type = other DNA
tctgcatttgtcctggcaat

SEQ ID NO: 7315 - DNA, 20 bp, synthetic construct
  misc_feature 1..20: note = chemically synthesized
  source 1..20: mol_type = other DNA
tgcatttgtcctggcaatgg

SEQ ID NO: 7316 - DNA, 20 bp, synthetic construct
  misc_feature 1..20: note = chemically synthesized
  source 1..20: mol_type = other DNA
atttgtcctggcaatgggag

SEQ ID NO: 7317 - DNA, 20 bp, synthetic construct
  misc_feature 1..20: note = chemically synthesized
  source 1..20: mol_type = other DNA
tttgtcctggcaatgggagc

SEQ ID NO: 7318 - DNA, 20 bp, synthetic construct
  misc_feature 1..20: note = chemically synthesized
  source 1..20: mol_type = other DNA
ctggcaatgggagcaggaat

SEQ ID NO: 7319 - DNA, 20 bp, synthetic construct
  misc_feature 1..20: note = chemically synthesized
  source 1..20: mol_type = other DNA
gagtccaccttctctaaacc

SEQ ID NO: 7320 - DNA, 20 bp, synthetic construct
  misc_feature 1..20: note = chemically synthesized
  source 1..20: mol_type = other DNA
tctctaaacctggtcactcc

SEQ ID NO: 7321 - DNA, 20 bp, synthetic construct
  misc_feature 1..20: note = chemically synthesized
  source 1..20: mol_type = other DNA
acctggtcactcctagtccc

SEQ ID NO: 7322 - DNA, 20 bp, synthetic construct
  misc_feature 1..20: note = chemically synthesized
  source 1..20: mol_type = other DNA
ggtcactcctagtcccaaga

SEQ ID NO: 7323 - DNA, 20 bp, synthetic construct
  misc_feature 1..20: note = chemically synthesized
  source 1..20: mol_type = other DNA
tcactcctagtcccaagatg

SEQ ID NO: 7324 - DNA, 20 bp, synthetic construct
  misc_feature 1..20: note = chemically synthesized
  source 1..20: mol_type = other DNA
ctcctagtcccaagatggag

SEQ ID NO: 7325 - DNA, 20 bp, synthetic construct
  misc_feature 1..20: note = chemically synthesized
  source 1..20: mol_type = other DNA
cacatcacccttgatcatgt

SEQ ID NO: 7326 - DNA, 20 bp, synthetic construct
  misc_feature 1..20: note = chemically synthesized
  source 1..20: mol_type = other DNA
atcatgttagccccattctg

SEQ ID NO: 7327 - DNA, 20 bp, synthetic construct
  misc_feature 1..20: note = chemically synthesized
  source 1..20: mol_type = other DNA
ttagccccattctgcagcct

SEQ ID NO: 7328 - DNA, 20 bp, synthetic construct
  misc_feature 1..20: note = chemically synthesized
  source 1..20: mol_type = other DNA
tagccccattctgcagcctc

SEQ ID NO: 7329 - DNA, 20 bp, synthetic construct
  misc_feature 1..20: note = chemically synthesized
  source 1..20: mol_type = other DNA
gccccattctgcagcctcag

SEQ ID NO: 7330 - DNA, 20 bp, synthetic construct
  misc_feature 1..20: note = chemically synthesized
  source 1..20: mol_type = other DNA
ccccattctgcagcctcagg

SEQ ID NO: 7331 - DNA, 20 bp, synthetic construct
  misc_feature 1..20: note = chemically synthesized
  source 1..20: mol_type = other DNA
cagcctcaggaggctctgac

SEQ ID NO: 7332 - DNA, 20 bp, synthetic construct
  misc_feature 1..20: note = chemically synthesized
  source 1..20: mol_type = other DNA
agcctcaggaggctctgacc

SEQ ID NO: 7333 - DNA, 20 bp, synthetic construct
  misc_feature 1..20: note = chemically synthesized
  source 1..20: mol_type = other DNA
ctcaggaggctctgaccagg

SEQ ID NO: 7334 - DNA, 20 bp, synthetic construct
  misc_feature 1..20: note = chemically synthesized
  source 1..20: mol_type = other DNA
ggaggctctgaccaggtgga

SEQ ID NO: 7335 - DNA, 20 bp, synthetic construct
  misc_feature 1..20: note = chemically synthesized
  source 1..20: mol_type = other DNA
gctctgaccaggtggaaagc

SEQ ID NO: 7336 - DNA, 20 bp, synthetic construct
  misc_feature 1..20: note = chemically synthesized
  source 1..20: mol_type = other DNA
gaccaggtggaaagccagaa

SEQ ID NO: 7337 - DNA, 20 bp, synthetic construct
  misc_feature 1..20: note = chemically synthesized
  source 1..20: mol_type = other DNA
accaggtggaaagccagaat

SEQ ID NO: 7338 - DNA, 20 bp, synthetic construct
  misc_feature 1..20: note = chemically synthesized
  source 1..20: mol_type = other DNA
ccaggtggaaagccagaatg

SEQ ID NO: 7339 - DNA, 20 bp, synthetic construct
  misc_feature 1..20: note = chemically synthesized
  source 1..20: mol_type = other DNA
aagccagaatggggtccaac

SEQ ID NO: 7340 - DNA, 20 bp, synthetic construct
  misc_feature 1..20: note = chemically synthesized
  source 1..20: mol_type = other DNA
agccagaatggggtccaacc

SEQ ID NO: 7341 - DNA, 20 bp, synthetic construct
  misc_feature 1..20: note = chemically synthesized
  source 1..20: mol_type = other DNA
ccagaatggggtccaaccag

SEQ ID NO: 7342 - DNA, 20 bp, synthetic construct
  misc_feature 1..20: note = chemically synthesized
  source 1..20: mol_type = other DNA
ggggtccaaccaggagaccc

SEQ ID NO: 7343 - DNA, 20 bp, synthetic construct
  misc_feature 1..20: note = chemically synthesized
  source 1..20: mol_type = other DNA
tccaaccaggagacccaaga

SEQ ID NO: 7344 - DNA, 20 bp, synthetic construct
  misc_feature 1..20: note = chemically synthesized
  source 1..20: mol_type = other DNA
ccaggagacccaagacagaa

SEQ ID NO: 7345 - DNA, 20 bp, synthetic construct
  misc_feature 1..20: note = chemically synthesized
  source 1..20: mol_type = other DNA
caggagacccaagacagaaa

SEQ ID NO: 7346 - DNA, 20 bp, synthetic construct
  misc_feature 1..20: note = chemically synthesized
  source 1..20: mol_type = other DNA
gagacccaagacagaaaagg

SEQ ID NO: 7347 - DNA, 20 bp, synthetic construct
  misc_feature 1..20: note = chemically synthesized
  source 1..20: mol_type = other DNA
agacccaagacagaaaaggc

SEQ ID NO: 7348 - DNA, 20 bp, synthetic construct
  misc_feature 1..20: note = chemically synthesized
  source 1..20: mol_type = other DNA
cccaagacagaaaaggcagg

SEQ ID NO: 7349 - DNA, 20 bp, synthetic construct
  misc_feature 1..20: note = chemically synthesized
  source 1..20: mol_type = other DNA
cagaaaaggcaggtggctgc

SEQ ID NO: 7350 - DNA, 20 bp, synthetic construct
  misc_feature 1..20: note = chemically synthesized
  source 1..20: mol_type = other DNA
agaaaaggcaggtggctgca

SEQ ID NO: 7351 - DNA, 20 bp, synthetic construct
  misc_feature 1..20: note = chemically synthesized
  source 1..20: mol_type = other DNA
aaaaggcaggtggctgcaag

SEQ ID NO: 7352 - DNA, 20 bp, synthetic construct
  misc_feature 1..20: note = chemically synthesized
  source 1..20: mol_type = other DNA
tgcaaggagcctcacttctc

SEQ ID NO: 7353 - DNA, 20 bp, synthetic construct
  misc_feature 1..20: note = chemically synthesized
  source 1..20: mol_type = other DNA
gcaaggagcctcacttctcc

SEQ ID NO: 7354 - DNA, 20 bp, synthetic construct
  misc_feature 1..20: note = chemically synthesized
  source 1..20: mol_type = other DNA
cttacccatgccacccaccg

SEQ ID NO: 7355 - DNA, 20 bp, synthetic construct
  misc_feature 1..20: note = chemically synthesized
  source 1..20: mol_type = other DNA
ccatgccacccaccgcagcc

SEQ ID NO: 7356 - DNA, 20 bp, synthetic construct
  misc_feature 1..20: note = chemically synthesized
  source 1..20: mol_type = other DNA
gccacccaccgcagcctgga

SEQ ID NO: 7357 - DNA, 20 bp, synthetic construct
  misc_feature 1..20: note = chemically synthesized
  source 1..20: mol_type = other DNA
ccacccaccgcagcctggac

SEQ ID NO: 7358 - DNA, 20 bp, synthetic construct
  misc_feature 1..20: note = chemically synthesized
  source 1..20: mol_type = other DNA
cgcagcctggacaggcattc

SEQ ID NO: 7359 - DNA, 20 bp, synthetic construct
  misc_feature 1..20: note = chemically synthesized
  source 1..20: mol_type = other DNA
gcagcctggacaggcattcc

SEQ ID NO: 7360 - DNA, 20 bp, synthetic construct
  misc_feature 1..20: note = chemically synthesized
  source 1..20: mol_type = other DNA
agcctggacaggcattccag

SEQ ID NO: 7361 - DNA, 20 bp, synthetic construct
  misc_feature 1..20: note = chemically synthesized
  source 1..20: mol_type = other DNA
tggacaggcattccaggagc

SEQ ID NO: 7362 - DNA, 20 bp, synthetic construct
  misc_feature 1..20: note = chemically synthesized
  source 1..20: mol_type = other DNA
ccaggagccagacatgtccc

SEQ ID NO: 7363 - DNA, 20 bp, synthetic construct
  misc_feature 1..20: note = chemically synthesized
  source 1..20: mol_type = other DNA
ggagccagacatgtccctgg

SEQ ID NO: 7364 - DNA, 20 bp, synthetic construct
  misc_feature 1..20: note = chemically synthesized
  source 1..20: mol_type = other DNA
ccagacatgtccctggaaga

SEQ ID NO: 7365 - DNA, 20 bp, synthetic construct
  misc_feature 1..20: note = chemically synthesized
  source 1..20: mol_type = other DNA
gacatgtccctggaagacag

SEQ ID NO: 7366 - DNA, 20 bp, synthetic construct
  misc_feature 1..20: note = chemically synthesized
  source 1..20: mol_type = other DNA
acatgtccctggaagacagt

SEQ ID NO: 7367 - DNA, 20 bp, synthetic construct
  misc_feature 1..20: note = chemically synthesized
  source 1..20: mol_type = other DNA
agtaggctattgcttcctct

SEQ ID NO: 7368 - DNA, 20 bp, synthetic construct
  misc_feature 1..20: note = chemically synthesized
  source 1..20: mol_type = other DNA
agcactgcaacaattttctc

SEQ ID NO: 7369 - DNA, 20 bp, synthetic construct
  misc_feature 1..20: note = chemically synthesized
  source 1..20: mol_type = other DNA
ccctctcctccacctattca

SEQ ID NO: 7370 - DNA, 20 bp, synthetic construct
  misc_feature 1..20: note = chemically synthesized
  source 1..20: mol_type = other DNA
ctcctccacctattcacaga

SEQ ID NO: 7371 - DNA, 20 bp, synthetic construct
  misc_feature 1..20: note = chemically synthesized
  source 1..20: mol_type = other DNA
tcctccacctattcacagat

SEQ ID NO: 7372 - DNA, 20 bp, synthetic construct
  misc_feature 1..20: note = chemically synthesized
  source 1..20: mol_type = other DNA
cctccacctattcacagatg

SEQ ID NO: 7373 - DNA, 20 bp, synthetic construct
  misc_feature 1..20: note = chemically synthesized
  source 1..20: mol_type = other DNA
taaccctccctcctatccat

SEQ ID NO: 7374 - DNA, 20 bp, synthetic construct
  misc_feature 1..20: note = chemically synthesized
  source 1..20: mol_type = other DNA
tccattagattgcccaaatc

SEQ ID NO: 7375 - DNA, 20 bp, synthetic construct
  misc_feature 1..20: note = chemically synthesized
  source 1..20: mol_type = other DNA
ccattagattgcccaaatct

SEQ ID NO: 7376 - DNA, 20 bp, synthetic construct
  misc_feature 1..20: note = chemically synthesized
  source 1..20: mol_type = other DNA
aaatctgggaaaataatgtg

SEQ ID NO: 7377 - DNA, 20 bp, synthetic construct
  misc_feature 1..20: note = chemically synthesized
  source 1..20: mol_type = other DNA
ggaaaataatgtgtggcgct

SEQ ID NO: 7378 - DNA, 20 bp, synthetic construct
  misc_feature 1..20: note = chemically synthesized
  source 1..20: mol_type = other DNA
gaaaataatgtgtggcgctc

SEQ ID NO: 7379 - DNA, 20 bp, synthetic construct
  misc_feature 1..20: note = chemically synthesized
  source 1..20: mol_type = other DNA
aatgtgtggcgctcaggtct

SEQ ID NO: 7380 - DNA, 20 bp, synthetic construct
  misc_feature 1..20: note = chemically synthesized
  source 1..20: mol_type = other DNA
gtggcgctcaggtctgagtg

SEQ ID NO: 7381 - DNA, 20 bp, synthetic construct
  misc_feature 1..20: note = chemically synthesized
  source 1..20: mol_type = other DNA
ctcaggtctgagtgcagacc

SEQ ID NO: 7382 - DNA, 20 bp, synthetic construct
  misc_feature 1..20: note = chemically synthesized
  source 1..20: mol_type = other DNA
gcagaccaagctcccaatac

SEQ ID NO: 7383 - DNA, 20 bp, synthetic construct
  misc_feature 1..20: note = chemically synthesized
  source 1..20: mol_type = other DNA
gaccaagctcccaataccag

SEQ ID NO: 7384 - DNA, 20 bp, synthetic construct
  misc_feature 1..20: note = chemically synthesized
  source 1..20: mol_type = other DNA
cccaataccagtggctcttt

SEQ ID NO: 7385 - DNA, 20 bp, synthetic construct
  misc_feature 1..20: note = chemically synthesized
  source 1..20: mol_type = other DNA
ccaataccagtggctctttc

SEQ ID NO: 7386 - DNA, 20 bp, synthetic construct
  misc_feature 1..20: note = chemically synthesized
  source 1..20: mol_type = other DNA
gtggctctttcaggcttaca

SEQ ID NO: 7387 - DNA, 20 bp, synthetic construct
  misc_feature 1..20: note = chemically synthesized
  source 1..20: mol_type = other DNA
ctttcaggcttacaaagcct

SEQ ID NO: 7388 - DNA, 20 bp, synthetic construct
  misc_feature 1..20: note = chemically synthesized
  source 1..20: mol_type = other DNA
tcaggcttacaaagccttgg

SEQ ID NO: 7389 - DNA, 20 bp, synthetic construct
  misc_feature 1..20: note = chemically synthesized
  source 1..20: mol_type = other DNA
gccttggtggtttccacacc

SEQ ID NO: 7390 - DNA, 20 bp, synthetic construct
  misc_feature 1..20: note = chemically synthesized
  source 1..20: mol_type = other DNA
ttggtggtttccacacccag

SEQ ID NO: 7391 - DNA, 20 bp, synthetic construct
  misc_feature 1..20: note = chemically synthesized
  source 1..20: mol_type = other DNA
cacacccagcagttcctacc

SEQ ID NO: 7392 - DNA, 20 bp, synthetic construct
  misc_feature 1..20: note = chemically synthesized
  source 1..20: mol_type = other DNA
acacccagcagttcctaccc

SEQ ID NO: 7393 - DNA, 20 bp, synthetic construct
  misc_feature 1..20: note = chemically synthesized
  source 1..20: mol_type = other DNA
agcagttcctacccaggact

SEQ ID NO: 7394 - DNA, 20 bp, synthetic construct
  misc_feature 1..20: note = chemically synthesized
  source 1..20: mol_type = other DNA
agttcctacccaggactgag

SEQ ID NO: 7395 - DNA, 20 bp, synthetic construct
  misc_feature 1..20: note = chemically synthesized
  source 1..20: mol_type = other DNA
acccaggactgagaagccct

SEQ ID NO: 7396 - DNA, 20 bp, synthetic construct
  misc_feature 1..20: note = chemically synthesized
  source 1..20: mol_type = other DNA
agaagccctcagcaaacacc

SEQ ID NO: 7397 - DNA, 20 bp, synthetic construct
  misc_feature 1..20: note = chemically synthesized
  source 1..20: mol_type = other DNA
gccctcagcaaacacccaga

SEQ ID NO: 7398 - DNA, 20 bp, synthetic construct
  misc_feature 1..20: note = chemically synthesized
  source 1..20: mol_type = other DNA
atggcccttgttcaccctcc

SEQ ID NO: 7399 - DNA, 20 bp, synthetic construct
  misc_feature 1..20: note = chemically synthesized
  source 1..20: mol_type = other DNA
ttcaccctcctggaaaccta

SEQ ID NO: 7400 - DNA, 20 bp, synthetic construct
  misc_feature 1..20: note = chemically synthesized
  source 1..20: mol_type = other DNA
tcctggaaacctatagctgc

SEQ ID NO: 7401 - DNA, 20 bp, synthetic construct
  misc_feature 1..20: note = chemically synthesized
  source 1..20: mol_type = other DNA
cctggaaacctatagctgcc

SEQ ID NO: 7402 - DNA, 20 bp, synthetic construct
  misc_feature 1..20: note = chemically synthesized
  source 1..20: mol_type = other DNA
ctggaaacctatagctgcca

SEQ ID NO: 7403 - DNA, 20 bp, synthetic construct
  misc_feature 1..20: note = chemically synthesized
  source 1..20: mol_type = other DNA
agggaaatgtgacattttgt

SEQ ID NO: 7404 - DNA, 20 bp, synthetic construct
  misc_feature 1..20: note = chemically synthesized
  source 1..20: mol_type = other DNA
gggaaatgtgacattttgtg

SEQ ID NO: 7405 - DNA, 20 bp, synthetic construct
  misc_feature 1..20: note = chemically synthesized
  source 1..20: mol_type = other DNA
gaggactaatttaacccgcc

SEQ ID NO: 7406 - DNA, 20 bp, synthetic construct
  misc_feature 1..20: note = chemically synthesized
  source 1..20: mol_type = other DNA
gactaatttaacccgcctag

SEQ ID NO: 7407 - DNA, 20 bp, synthetic construct
  misc_feature 1..20: note = chemically synthesized
  source 1..20: mol_type = other DNA
tttaacccgcctagaagatt

SEQ ID NO: 7408 - DNA, 20 bp, synthetic construct
  misc_feature 1..20: note = chemically synthesized
  source 1..20: mol_type = other DNA
ttaacccgcctagaagattt

SEQ ID NO: 7409 - DNA, 20 bp, synthetic construct
  misc_feature 1..20: note = chemically synthesized
  source 1..20: mol_type = other DNA
aacccgcctagaagatttag

SEQ ID NO: 7410 - DNA, 20 bp, synthetic construct
  misc_feature 1..20: note = chemically synthesized
  source 1..20: mol_type = other DNA
gcctagaagatttaggagcc

SEQ ID NO: 7411 - DNA, 20 bp, synthetic construct
  misc_feature 1..20: note = chemically synthesized
  source 1..20: mol_type = other DNA
ggagccaagatgcaacccta

SEQ ID NO: 7412 - DNA, 20 bp, synthetic construct
  misc_feature 1..20: note = chemically synthesized
  source 1..20: mol_type = other DNA
gcaaccctaaagcccactgc

SEQ ID NO: 7413 - DNA, 20 bp, synthetic construct
  misc_feature 1..20: note = chemically synthesized
  source 1..20: mol_type = other DNA
caaccctaaagcccactgca

SEQ ID NO: 7414 - DNA, 20 bp, synthetic construct
  misc_feature 1..20: note = chemically synthesized
  source 1..20: mol_type = other DNA
aaccctaaagcccactgcaa

SEQ ID NO: 7415 - DNA, 20 bp, synthetic construct
  misc_feature 1..20: note = chemically synthesized
  source 1..20: mol_type = other DNA
cactgcaagggacaatattc

SEQ ID NO: 7416 - DNA, 20 bp, synthetic construct
  misc_feature 1..20: note = chemically synthesized
  source 1..20: mol_type = other DNA
caatattctggatcttttgt

SEQ ID NO: 7417 - DNA, 20 bp, synthetic construct
  misc_feature 1..20: note = chemically synthesized
  source 1..20: mol_type = other DNA
atattctggatcttttgtca

SEQ ID NO: 7418 - DNA, 20 bp, synthetic construct
  misc_feature 1..20: note = chemically synthesized
  source 1..20: mol_type = other DNA
aataaaatttttatattaaa

SEQ ID NO: 7419 - DNA, 20 bp, synthetic construct
  misc_feature 1..20: note = chemically synthesized
  source 1..20: mol_type = other DNA
catctaaacctcctgaaaat

SEQ ID NO: 7420 - DNA, 20 bp, synthetic construct
  misc_feature 1..20: note = chemically synthesized
  source 1..20: mol_type = other DNA
acctcctgaaaattggttat

SEQ ID NO: 7421 - DNA, 20 bp, synthetic construct
  misc_feature 1..20: note = chemically synthesized
  source 1..20: mol_type = other DNA
attggctgcttcgttgattc

SEQ ID NO: 7422 - DNA, 20 bp, synthetic construct
  misc_feature 1..20: note = chemically synthesized
  source 1..20: mol_type = other DNA
ttcgttgattctagaaaaaa

SEQ ID NO: 7423 - DNA, 20 bp, synthetic construct
  misc_feature 1..20: note = chemically synthesized
  source 1..20: mol_type = other DNA
ttgattctagaaaaaaaaga

SEQ ID NO: 7424 - DNA, 20 bp, synthetic construct
  misc_feature 1..20: note = chemically synthesized
  source 1..20: mol_type = other DNA
ttctagaaaaaaaagaaagc

SEQ ID NO: 7425 - DNA, 20 bp, synthetic construct
  misc_feature 1..20: note = chemically synthesized
  source 1..20: mol_type = other DNA
aaaaaagaaagcaagaaatg

SEQ ID NO: 7426 - DNA, 20 bp, synthetic construct
  misc_feature 1..20: note = chemically synthesized
  source 1..20: mol_type = other DNA
aaaaagaaagcaagaaatgc

SEQ ID NO: 7427 - DNA, 20 bp, synthetic construct
  misc_feature 1..20: note = chemically synthesized
  source 1..20: mol_type = other DNA
agaaagcaagaaatgcagga

SEQ ID NO: 7428 - DNA, 20 bp, synthetic construct
  misc_feature 1..20: note = chemically synthesized
  source 1..20: mol_type = other DNA
gaaagcaagaaatgcaggaa

SEQ ID NO: 7429 - DNA, 20 bp, synthetic construct
  misc_feature 1..20: note = chemically synthesized
  source 1..20: mol_type = other DNA
aagaaatgcaggaaaggaac

SEQ ID NO: 7430 - DNA, 20 bp, synthetic construct
  misc_feature 1..20: note = chemically synthesized
  source 1..20: mol_type = other DNA
agaaatgcaggaaaggaacg

SEQ ID NO: 7431 - DNA, 20 bp, synthetic construct
  misc_feature 1..20: note = chemically synthesized
  source 1..20: mol_type = other DNA
gaaatgcaggaaaggaacga

SEQ ID NO: 7432 - DNA, 20 bp, synthetic construct
  misc_feature 1..20: note = chemically synthesized
  source 1..20: mol_type = other DNA
aaatgcaggaaaggaacgag

SEQ ID NO: 7433 - DNA, 20 bp, synthetic construct
  misc_feature 1..20: note = chemically synthesized
  source 1..20: mol_type = other DNA
aatgcaggaaaggaacgagg

SEQ ID NO: 7434 - DNA, 20 bp, synthetic construct
  misc_feature 1..20: note = chemically synthesized
  source 1..20: mol_type = other DNA
gcaggaaaggaacgaggggg

SEQ ID NO: 7435 - DNA, 20 bp, synthetic construct
  misc_feature 1..20: note = chemically synthesized
  source 1..20: mol_type = other DNA
aggaaaggaacgagggggca

SEQ ID NO: 7436 - DNA, 20 bp, synthetic construct
  misc_feature 1..20: note = chemically synthesized
  source 1..20: mol_type = other DNA
gaaaggaacgagggggcaga

SEQ ID NO: 7437 - DNA, 20 bp, synthetic construct
  misc_feature 1..20: note = chemically synthesized
  source 1..20: mol_type = other DNA
aaaggaacgagggggcagag

SEQ ID NO: 7438 - DNA, 20 bp, synthetic construct
  misc_feature 1..20: note = chemically synthesized
  source 1..20: mol_type = other DNA
aaggaacgagggggcagaga

SEQ ID NO: 7439 - DNA, 20 bp, synthetic construct
  misc_feature 1..20: note = chemically synthesized
  source 1..20: mol_type = other DNA
agggggcagagagggaatga

SEQ ID NO: 7440 - DNA, 20 bp, synthetic construct
  misc_feature 1..20: note = chemically synthesized
  source 1..20: mol_type = other DNA
gagagggaatgaaagacact

SEQ ID NO: 7441 - DNA, 20 bp, synthetic construct
  misc_feature 1..20: note = chemically synthesized
  source 1..20: mol_type = other DNA
aatgaaagacactgagtatt

SEQ ID NO: 7442 - DNA, 20 bp, synthetic construct
  misc_feature 1..20: note = chemically synthesized
  source 1..20: mol_type = other DNA
atgaaagacactgagtatta

SEQ ID NO: 7443 - DNA, 20 bp, synthetic construct
  misc_feature 1..20: note = chemically synthesized
  source 1..20: mol_type = other DNA
ctgagtattaaggcccaacc

SEQ ID NO: 7444 - DNA, 20 bp, synthetic construct
  misc_feature 1..20: note = chemically synthesized
  source 1..20: mol_type = other DNA
ccagccaaaaccccatctgc

SEQ ID NO: 7445 - DNA, 20 bp, synthetic construct
  misc_feature 1..20: note = chemically synthesized
  source 1..20: mol_type = other DNA
gccaaaaccccatctgctag

SEQ ID NO: 7446 - DNA, 20 bp, synthetic construct
  misc_feature 1..20: note = chemically synthesized
  source 1..20: mol_type = other DNA
cccatctgctagaagcctgc

SEQ ID NO: 7447 - DNA, 20 bp, synthetic construct
  misc_feature 1..20: note = chemically synthesized
  source 1..20: mol_type = other DNA
atctgctagaagcctgctgg

SEQ ID NO: 7448 - DNA, 20 bp, synthetic construct
  misc_feature 1..20: note = chemically synthesized
  source 1..20: mol_type = other DNA
aagcctgctggaagcctaca

SEQ ID NO: 7449 - DNA, 20 bp, synthetic construct
  misc_feature 1..20: note = chemically synthesized
  source 1..20: mol_type = other DNA
ctggaagcctacatggcttc

SEQ ID NO: 7450 - DNA, 20 bp, synthetic construct
  misc_feature 1..20: note = chemically synthesized
  source 1..20: mol_type = other DNA
gaagcctacatggcttcgag

SEQ ID NO: 7451 - DNA, 20 bp, synthetic construct
  misc_feature 1..20: note = chemically synthesized
  source 1..20: mol_type = other DNA
ggcttcgagcggcacattct

SEQ ID NO: 7452 - DNA, 20 bp, synthetic construct
  misc_feature 1..20: note = chemically synthesized
  source 1..20: mol_type = other DNA
ggcacattctgagaactctg

SEQ ID NO: 7453 - DNA, 20 bp, synthetic construct
  misc_feature 1..20: note = chemically synthesized
  source 1..20: mol_type = other DNA
cacattctgagaactctgaa

SEQ ID NO: 7454 - DNA, 20 bp, synthetic construct
  misc_feature 1..20: note = chemically synthesized
  source 1..20: mol_type = other DNA
gaactctgaagagtaccact

SEQ ID NO: 7455 - DNA, 20 bp, synthetic construct
  misc_feature 1..20: note = chemically synthesized
  source 1..20: mol_type = other DNA
ccgacactgcccccatgaca

SEQ ID NO: 7456 - DNA, 20 bp, synthetic construct
  misc_feature 1..20: note = chemically synthesized
  source 1..20: mol_type = other DNA
cgacactgcccccatgacat

SEQ ID NO: 7457 - DNA, 20 bp, synthetic construct
  misc_feature 1..20: note = chemically synthesized
  source 1..20: mol_type = other DNA
gacactgcccccatgacata

SEQ ID NO: 7458 - DNA, 20 bp, synthetic construct
  misc_feature 1..20: note = chemically synthesized
  source 1..20: mol_type = other DNA
gcccccatgacatagggccc

SEQ ID NO: 7459 - DNA, 20 bp, synthetic construct
  misc_feature 1..20: note = chemically synthesized
  source 1..20: mol_type = other DNA
ctctttgactcacacttgcc

SEQ ID NO: 7460 - DNA, 20 bp, synthetic construct
  misc_feature 1..20: note = chemically synthesized
  source 1..20: mol_type = other DNA
tttgactcacacttgcctgg

SEQ ID NO: 7461 - DNA, 20 bp, synthetic construct
  misc_feature 1..20: note = chemically synthesized
  source 1..20: mol_type = other DNA
ttgactcacacttgcctggc

SEQ ID NO: 7462 - DNA, 20 bp, synthetic construct
  misc_feature 1..20: note = chemically synthesized
  source 1..20: mol_type = other DNA
gcctggcaggactccccaaa

SEQ ID NO: 7463 - DNA, 20 bp, synthetic construct
  misc_feature 1..20: note = chemically synthesized
  source 1..20: mol_type = other DNA
gcaggactccccaaacagaa

SEQ ID NO: 7464 - DNA, 20 bp, synthetic construct
  misc_feature 1..20: note = chemically synthesized
  source 1..20: mol_type = other DNA
aggactccccaaacagaaca

SEQ ID NO: 7465 - DNA, 20 bp, synthetic construct
  misc_feature 1..20: note = chemically synthesized
  source 1..20: mol_type = other DNA
ccaaacagaacagagatgct

SEQ ID NO: 7466 - DNA, 20 bp, synthetic construct
  misc_feature 1..20: note = chemically synthesized
  source 1..20: mol_type = other DNA
acagaacagagatgctcagc

SEQ ID NO: 7467 - DNA, 20 bp, synthetic construct
  misc_feature 1..20: note = chemically synthesized
  source 1..20: mol_type = other DNA
cagaacagagatgctcagcc

SEQ ID NO: 7468 - DNA, 20 bp, synthetic construct
  misc_feature 1..20: note = chemically synthesized
  source 1..20: mol_type = other DNA
agagatgctcagccgggcac

SEQ ID NO: 7469 - DNA, 20 bp, synthetic construct
  misc_feature 1..20: note = chemically synthesized
  source 1..20: mol_type = other DNA
agatgctcagccgggcacaa

SEQ ID NO: 7470 - DNA, 20 bp, synthetic construct
  misc_feature 1..20: note = chemically synthesized
  source 1..20: mol_type = other DNA
atgctcagccgggcacaaga

SEQ ID NO: 7471 - DNA, 20 bp, synthetic construct
  misc_feature 1..20: note = chemically synthesized
  source 1..20: mol_type = other DNA
ctcagccgggcacaagagag

SEQ ID NO: 7472 - DNA, 20 bp, synthetic construct
  misc_feature 1..20: note = chemically synthesized
  source 1..20: mol_type = other DNA
tcagccgggcacaagagagc

SEQ ID NO: 7473 - DNA, 20 bp, synthetic construct
  misc_feature 1..20: note = chemically synthesized
  source 1..20: mol_type = other DNA
gggcacaagagagcaggccc

SEQ ID NO: 7474 - DNA, 20 bp, synthetic construct
  misc_feature 1..20: note = chemically synthesized
  source 1..20: mol_type = other DNA
ggcacaagagagcaggcccc

SEQ ID NO: 7475 - DNA, 20 bp, synthetic construct
  misc_feature 1..20: note = chemically synthesized
  source 1..20: mol_type = other DNA
gcacaagagagcaggcccca

SEQ ID NO: 7476 - DNA, 20 bp, synthetic construct
  misc_feature 1..20: note = chemically synthesized
  source 1..20: mol_type = other DNA
ccagggctcatgctgcactg

SEQ ID NO: 7477 - DNA, 20 bp, synthetic construct
  misc_feature 1..20: note = chemically synthesized
  source 1..20: mol_type = other DNA
atgctgcactgtggtttccc

SEQ ID NO: 7478 - DNA, 20 bp, synthetic construct
  misc_feature 1..20: note = chemically synthesized
  source 1..20: mol_type = other DNA
tgtggtttccccagcaattc

SEQ ID NO: 7479 - DNA, 20 bp, synthetic construct
  misc_feature 1..20: note = chemically synthesized
  source 1..20: mol_type = other DNA
attccagaactgctgcctac

SEQ ID NO: 7480 - DNA, 20 bp, synthetic construct
  misc_feature 1..20: note = chemically synthesized
  source 1..20: mol_type = other DNA
gctgcctaccggcacgcatg

SEQ ID NO: 7481 - DNA, 20 bp, synthetic construct
  misc_feature 1..20: note = chemically synthesized
  source 1..20: mol_type = other DNA
ctgcctaccggcacgcatgc

SEQ ID NO: 7482 - DNA, 20 bp, synthetic construct
  misc_feature 1..20: note = chemically synthesized
  source 1..20: mol_type = other DNA
cgcatgcaggatcaatgatg

SEQ ID NO: 7483 - DNA, 20 bp, synthetic construct
  misc_feature 1..20: note = chemically synthesized
  source 1..20: mol_type = other DNA
caggatcaatgatgaagatg

SEQ ID NO: 7484 - DNA, 20 bp, synthetic construct
  misc_feature 1..20: note = chemically synthesized
  source 1..20: mol_type = other DNA
gatgaagatgcagtaccttc

SEQ ID NO: 7485 - DNA, 20 bp, synthetic construct
  misc_feature 1..20: note = chemically synthesized
  source 1..20: mol_type = other DNA
atgaagatgcagtaccttct

SEQ ID NO: 7486 - DNA, 20 bp, synthetic construct
  misc_feature 1..20: note = chemically synthesized
  source 1..20: mol_type = other DNA
cagtaccttctgggtctgcc

SEQ ID NO: 7487 - DNA, 20 bp, synthetic construct
  misc_feature 1..20: note = chemically synthesized
  source 1..20: mol_type = other DNA
agtaccttctgggtctgcct

SEQ ID NO: 7488 - DNA, 20 bp, synthetic construct
  misc_feature 1..20: note = chemically synthesized
  source 1..20: mol_type = other DNA
tgggtccacccttcctttct

SEQ ID NO: 7489 - DNA, 20 bp, synthetic construct
  misc_feature 1..20: note = chemically synthesized
  source 1..20: mol_type = other DNA
cttcctttcttagtcactgc

SEQ ID NO: 7490 - DNA, 20 bp, synthetic construct
  misc_feature 1..20: note = chemically synthesized
  source 1..20: mol_type = other DNA
agtcactgcaagatttcacc

SEQ ID NO: 7491 - DNA, 20 bp, synthetic construct
  misc_feature 1..20: note = chemically synthesized
  source 1..20: mol_type = other DNA
ctgcaagatttcacccagcc

SEQ ID NO: 7492 - DNA, 20 bp, synthetic construct
  misc_feature 1..20: note = chemically synthesized
  source 1..20: mol_type = other DNA
cagcccagccacccactgaa

SEQ ID NO: 7493 - DNA, 20 bp, synthetic construct
  misc_feature 1..20: note = chemically synthesized
  source 1..20: mol_type = other DNA
agcccagccacccactgaaa

SEQ ID NO: 7494 - DNA, 20 bp, synthetic construct
  misc_feature 1..20: note = chemically synthesized
  source 1..20: mol_type = other DNA
ccagccacccactgaaaagg

SEQ ID NO: 7495 - DNA, 20 bp, synthetic construct
  misc_feature 1..20: note = chemically synthesized
  source 1..20: mol_type = other DNA
agccacccactgaaaaggca

SEQ ID NO: 7496 - DNA, 20 bp, synthetic construct
  misc_feature 1..20: note = chemically synthesized
  source 1..20: mol_type = other DNA
gccacccactgaaaaggcag

SEQ ID NO: 7497 - DNA, 20 bp, synthetic construct
  misc_feature 1..20: note = chemically synthesized
  source 1..20: mol_type = other DNA
cacccactgaaaaggcagag

SEQ ID NO: 7498 - DNA, 20 bp, synthetic construct
  misc_feature 1..20: note = chemically synthesized
  source 1..20: mol_type = other DNA
acccactgaaaaggcagagg

SEQ ID NO: 7499 - DNA, 20 bp, synthetic construct
  misc_feature 1..20: note = chemically synthesized
  source 1..20: mol_type = other DNA
gaggccacctatctgaatgc

SEQ ID NO: 7500 - DNA, 20 bp, synthetic construct
  misc_feature 1..20: note = chemically synthesized
  source 1..20: mol_type = other DNA
aggccacctatctgaatgct

SEQ ID NO: 7501 - DNA, 20 bp, synthetic construct
  misc_feature 1..20: note = chemically synthesized
  source 1..20: mol_type = other DNA
acacacttgaaccttcctcc

SEQ ID NO: 7502 - DNA, 20 bp, synthetic construct
  misc_feature 1..20: note = chemically synthesized
  source 1..20: mol_type = other DNA
acttgaaccttcctcctggc

SEQ ID NO: 7503 - DNA, 20 bp, synthetic construct
  misc_feature 1..20: note = chemically synthesized
  source 1..20: mol_type = other DNA
ctggccagcctgctctccca

SEQ ID NO: 7504 - DNA, 20 bp, synthetic construct
  misc_feature 1..20: note = chemically synthesized
  source 1..20: mol_type = other DNA
gccagcctgctctcccaaag

SEQ ID NO: 7505 - DNA, 20 bp, synthetic construct
  misc_feature 1..20: note = chemically synthesized
  source 1..20: mol_type = other DNA
ccagcctgctctcccaaaga

SEQ ID NO: 7506 - DNA, 20 bp, synthetic construct
  misc_feature 1..20: note = chemically synthesized
  source 1..20: mol_type = other DNA
ctctcccaaagaaggaataa

SEQ ID NO: 7507 - DNA, 20 bp, synthetic construct
  misc_feature 1..20: note = chemically synthesized
  source 1..20: mol_type = other DNA
gaaggaataacagaacaaaa

SEQ ID NO: 7508 - DNA, 20 bp, synthetic construct
  misc_feature 1..20: note = chemically synthesized
  source 1..20: mol_type = other DNA
agtcaacctctgactacttc

SEQ ID NO: 7509 - DNA, 20 bp, synthetic construct
  misc_feature 1..20: note = chemically synthesized
  source 1..20: mol_type = other DNA
ttataccaatgttcttcttg

SEQ ID NO: 7510 - DNA, 20 bp, synthetic construct
  misc_feature 1..20: note = chemically synthesized
  source 1..20: mol_type = other DNA
taccaatgttcttcttgaag

SEQ ID NO: 7511 - DNA, 20 bp, synthetic construct
  misc_feature 1..20: note = chemically synthesized
  source 1..20: mol_type = other DNA
accaatgttcttcttgaagt

SEQ ID NO: 7512 - DNA, 20 bp, synthetic construct
  misc_feature 1..20: note = chemically synthesized
  source 1..20: mol_type = other DNA
caatgttcttcttgaagtgg

SEQ ID NO: 7513 - DNA, 20 bp, synthetic construct
  misc_feature 1..20: note = chemically synthesized
  source 1..20: mol_type = other DNA
ttcttcttgaagtgggagct

SEQ ID NO: 7514 - DNA, 20 bp, synthetic construct
  misc_feature 1..20: note = chemically synthesized
  source 1..20: mol_type = other DNA
ttgaagtgggagctcagcat

SEQ ID NO: 7515 - DNA, 20 bp, synthetic construct
  misc_feature 1..20: note = chemically synthesized
  source 1..20: mol_type = other DNA
tgaagtgggagctcagcatc

SEQ ID NO: 7516 - DNA, 20 bp, synthetic construct
  misc_feature 1..20: note = chemically synthesized
  source 1..20: mol_type = other DNA
gagctcagcatcgggacacc

SEQ ID NO: 7517 - DNA, 20 bp, synthetic construct
  misc_feature 1..20: note = chemically synthesized
  source 1..20: mol_type = other DNA
acccagaaaaaataatctcc

SEQ ID NO: 7518 - DNA, 20 bp, synthetic construct
  misc_feature 1..20: note = chemically synthesized
  source 1..20: mol_type = other DNA
cccagaaaaaataatctcca

SEQ ID NO: 7519 - DNA, 20 bp, synthetic construct
  misc_feature 1..20: note = chemically synthesized
  source 1..20: mol_type = other DNA
aaaataatctccaaggcaaa

SEQ ID NO: 7520 - DNA, 20 bp, synthetic construct
  misc_feature 1..20: note = chemically synthesized
  source 1..20: mol_type = other DNA
tctccaaggcaaaaagcaaa

SEQ ID NO: 7521 - DNA, 20 bp, synthetic construct
  misc_feature 1..20: note = chemically synthesized
  source 1..20: mol_type = other DNA
ccaaggcaaaaagcaaatag

SEQ ID NO: 7522 - DNA, 20 bp, synthetic construct
  misc_feature 1..20: note = chemically synthesized
  source 1..20: mol_type = other DNA
caaaaagcaaatagcagaat

SEQ ID NO: 7523 - DNA, 20 bp, synthetic construct
  misc_feature 1..20: note = chemically synthesized
  source 1..20: mol_type = other DNA
gcagaatgagtctgctgaaa

SEQ ID NO: 7524 - DNA, 20 bp, synthetic construct
  misc_feature 1..20: note = chemically synthesized
  source 1..20: mol_type = other DNA
actctgtctctgtctccccc

SEQ ID NO: 7525 - DNA, 20 bp, synthetic construct
  misc_feature 1..20: note = chemically synthesized
  source 1..20: mol_type = other DNA
ctgtctcccccaagccctcc

SEQ ID NO: 7526 - DNA, 20 bp, synthetic construct
  misc_feature 1..20: note = chemically synthesized
  source 1..20: mol_type = other DNA
ctcccccaagccctcctagt

SEQ ID NO: 7527 - DNA, 20 bp, synthetic construct
  misc_feature 1..20: note = chemically synthesized
  source 1..20: mol_type = other DNA
tcctagtcagaacgttctct

SEQ ID NO: 7528 - DNA, 20 bp, synthetic construct
  misc_feature 1..20: note = chemically synthesized
  source 1..20: mol_type = other DNA
agaacgttctctcagcattt

SEQ ID NO: 7529 - DNA, 20 bp, synthetic construct
  misc_feature 1..20: note = chemically synthesized
  source 1..20: mol_type = other DNA
acgttctctcagcatttcag

SEQ ID NO: 7530 - DNA, 20 bp, synthetic construct
  misc_feature 1..20: note = chemically synthesized
  source 1..20: mol_type = other DNA
cgttctctcagcatttcagc

SEQ ID NO: 7531 - DNA, 20 bp, synthetic construct
  misc_feature 1..20: note = chemically synthesized
  source 1..20: mol_type = other DNA
ttcagcaggtactgctcacc

SEQ ID NO: 7532 - DNA, 20 bp, synthetic construct
  misc_feature 1..20: note = chemically synthesized
  source 1..20: mol_type = other DNA
gtactgctcacctggaaata

SEQ ID NO: 7533 - DNA, 20 bp, synthetic construct
  misc_feature 1..20: note = chemically synthesized
  source 1..20: mol_type = other DNA
atacagctgatgtatttact

SEQ ID NO: 7534 - DNA, 20 bp, synthetic construct
  misc_feature 1..20: note = chemically synthesized
  source 1..20: mol_type = other DNA
cagctgatgtatttactgag

SEQ ID NO: 7535 - DNA, 20 bp, synthetic construct
  misc_feature 1..20: note = chemically synthesized
  source 1..20: mol_type = other DNA
atttactgagaagcttcttc

SEQ ID NO: 7536 - DNA, 20 bp, synthetic construct
  misc_feature 1..20: note = chemically synthesized
  source 1..20: mol_type = other DNA
agcttcttcaagctttctac

SEQ ID NO: 7537 - DNA, 20 bp, synthetic construct
  misc_feature 1..20: note = chemically synthesized
  source 1..20: mol_type = other DNA
tcaagctttctactggtgct

SEQ ID NO: 7538 - DNA, 20 bp, synthetic construct
  misc_feature 1..20: note = chemically synthesized
  source 1..20: mol_type = other DNA
caagctttctactggtgctt

SEQ ID NO: 7539 - DNA, 20 bp, synthetic construct
  misc_feature 1..20: note = chemically synthesized
  source 1..20: mol_type = other DNA
aagctttctactggtgctta

SEQ ID NO: 7540 - DNA, 20 bp, synthetic construct
  misc_feature 1..20: note = chemically synthesized
  source 1..20: mol_type = other DNA
gcttagggacaatgccaatc

SEQ ID NO: 7541 - DNA, 20 bp, synthetic construct
  misc_feature 1..20: note = chemically synthesized
  source 1..20: mol_type = other DNA
aatcaagtcttgaaattata

SEQ ID NO: 7542 - DNA, 20 bp, synthetic construct
  misc_feature 1..20: note = chemically synthesized
  source 1..20: mol_type = other DNA
tcaagtcttgaaattatata

SEQ ID NO: 7543 - DNA, 20 bp, synthetic construct
  misc_feature 1..20: note = chemically synthesized
  source 1..20: mol_type = other DNA
aagtcttgaaattatataga

SEQ ID NO: 7544 - DNA, 20 bp, synthetic construct
  misc_feature 1..20: note = chemically synthesized
  source 1..20: mol_type = other DNA
agtcttgaaattatatagag

SEQ ID NO: 7545 - DNA, 20 bp, synthetic construct
  misc_feature 1..20: note = chemically synthesized
  source 1..20: mol_type = other DNA
cttgaaattatatagagagg

SEQ ID NO: 7546 - DNA, 20 bp, synthetic construct
  misc_feature 1..20: note = chemically synthesized
  source 1..20: mol_type = other DNA
tatatagagaggtggaatat

SEQ ID NO: 7547 - DNA, 20 bp, synthetic construct
  misc_feature 1..20: note = chemically synthesized
  source 1..20: mol_type = other DNA
atatagagaggtggaatatc

SEQ ID NO: 7548 - DNA, 20 bp, synthetic construct
  misc_feature 1..20: note = chemically synthesized
  source 1..20: mol_type = other DNA
ctgtccctgaaaatgcttaa

SEQ ID NO: 7549 - DNA, 20 bp, synthetic construct
  misc_feature 1..20: note = chemically synthesized
  source 1..20: mol_type = other DNA
ctatcacatgcctcccctac

SEQ ID NO: 7550 - DNA, 20 bp, synthetic construct
  misc_feature 1..20: note = chemically synthesized
  source 1..20: mol_type = other DNA
cacatgcctcccctaccagt

SEQ ID NO: 7551 - DNA, 20 bp, synthetic construct
  misc_feature 1..20: note = chemically synthesized
  source 1..20: mol_type = other DNA
taccagtgagcgcccaccac

SEQ ID NO: 7552 - DNA, 20 bp, synthetic construct
  misc_feature 1..20: note = chemically synthesized
  source 1..20: mol_type = other DNA
cttgctccaaactattaaaa

SEQ ID NO: 7553 - DNA, 20 bp, synthetic construct
  misc_feature 1..20: note = chemically synthesized
  source 1..20: mol_type = other DNA
tgctccaaactattaaaaca

SEQ ID NO: 7554 - DNA, 20 bp, synthetic construct
  misc_feature 1..20: note = chemically synthesized
  source 1..20: mol_type = other DNA
agagcgtccccccaaaaaaa

SEQ ID NO: 7555 - DNA, 20 bp, synthetic construct
  misc_feature 1..20: note = chemically synthesized
  source 1..20: mol_type = other DNA
ccaaaaaaacagccttctgc

SEQ ID NO: 7556 - DNA, 20 bp, synthetic construct
  misc_feature 1..20: note = chemically synthesized
  source 1..20: mol_type = other DNA
caacttccctaccctgtgtg

SEQ ID NO: 7557 - DNA, 20 bp, synthetic construct
  misc_feature 1..20: note = chemically synthesized
  source 1..20: mol_type = other DNA
aacttccctaccctgtgtgc

SEQ ID NO: 7558 - DNA, 20 bp, synthetic construct
  misc_feature 1..20: note = chemically synthesized
  source 1..20: mol_type = other DNA
cctaccctgtgtgcaggctg

SEQ ID NO: 7559 - DNA, 20 bp, synthetic construct
  misc_feature 1..20: note = chemically synthesized
  source 1..20: mol_type = other DNA
accctgtgtgcaggctgtgg

SEQ ID NO: 7560 - DNA, 20 bp, synthetic construct
  misc_feature 1..20: note = chemically synthesized
  source 1..20: mol_type = other DNA
gtgtgcaggctgtggaagcg

SEQ ID NO: 7561 - DNA, 20 bp, synthetic construct
  misc_feature 1..20: note = chemically synthesized
  source 1..20: mol_type = other DNA
tgtgcaggctgtggaagcgt

SEQ ID NO: 7562 - DNA, 20 bp, synthetic construct
  misc_feature 1..20: note = chemically synthesized
  source 1..20: mol_type = other DNA
gtgcaggctgtggaagcgtg

SEQ ID NO: 7563 - DNA, 20 bp, synthetic construct
  misc_feature 1..20: note = chemically synthesized
  source 1..20: mol_type = other DNA
caggctgtggaagcgtgggg

SEQ ID NO: 7564 - DNA, 20 bp, synthetic construct
  misc_feature 1..20: note = chemically synthesized
  source 1..20: mol_type = other DNA
gtggaagcgtggggtggacc

SEQ ID NO: 7565 - DNA, 20 bp, synthetic construct
  misc_feature 1..20: note = chemically synthesized
  source 1..20: mol_type = other DNA
gaagcgtggggtggacccag

SEQ ID NO: 7566 - DNA, 20 bp, synthetic construct
  misc_feature 1..20: note = chemically synthesized
  source 1..20: mol_type = other DNA
tggggtggacccagaagtat

SEQ ID NO: 7567 - DNA, 20 bp, synthetic construct
  misc_feature 1..20: note = chemically synthesized
  source 1..20: mol_type = other DNA
ggggtggacccagaagtata

SEQ ID NO: 7568 - DNA, 20 bp, synthetic construct
  misc_feature 1..20: note = chemically synthesized
  source 1..20: mol_type = other DNA
ggtggacccagaagtataag

SEQ ID NO: 7569 - DNA, 20 bp, synthetic construct
  misc_feature 1..20: note = chemically synthesized
  source 1..20: mol_type = other DNA
cccagaagtataaggagttc

SEQ ID NO: 7570 - DNA, 20 bp, synthetic construct
  misc_feature 1..20: note = chemically synthesized
  source 1..20: mol_type = other DNA
aagtataaggagttctggat

SEQ ID NO: 7571 - DNA, 20 bp, synthetic construct
  misc_feature 1..20: note = chemically synthesized
  source 1..20: mol_type = other DNA
gagttctggatcagaatccc

SEQ ID NO: 7572 - DNA, 20 bp, synthetic construct
  misc_feature 1..20: note = chemically synthesized
  source 1..20: mol_type = other DNA
gaatccctagtctacccctg

SEQ ID NO: 7573 - DNA, 20 bp, synthetic construct
  misc_feature 1..20: note = chemically synthesized
  source 1..20: mol_type = other DNA
gtctacccctgcggctgcat

SEQ ID NO: 7574 - DNA, 20 bp, synthetic construct
  misc_feature 1..20: note = chemically synthesized
  source 1..20: mol_type = other DNA
cccctgcggctgcatgagac

SEQ ID NO: 7575 - DNA, 20 bp, synthetic construct
  misc_feature 1..20: note = chemically synthesized
  source 1..20: mol_type = other DNA
acctgccatttaacctctct

SEQ ID NO: 7576 - DNA, 20 bp, synthetic construct
  misc_feature 1..20: note = chemically synthesized
  source 1..20: mol_type = other DNA
ccctttctcctgcctcttca

SEQ ID NO: 7577 - DNA, 20 bp, synthetic construct
  misc_feature 1..20: note = chemically synthesized
  source 1..20: mol_type = other DNA
cctttctcctgcctcttcac

SEQ ID NO: 7578 - DNA, 20 bp, synthetic construct
  misc_feature 1..20: note = chemically synthesized
  source 1..20: mol_type = other DNA
ctttctcctgcctcttcaca

SEQ ID NO: 7579 - DNA, 20 bp, synthetic construct
  misc_feature 1..20: note = chemically synthesized
  source 1..20: mol_type = other DNA
ctcttcacagggttactcat

SEQ ID NO: 7580 - DNA, 20 bp, synthetic construct
  misc_feature 1..20: note = chemically synthesized
  source 1..20: mol_type = other DNA
tcttcacagggttactcatg

SEQ ID NO: 7581 - DNA, 20 bp, synthetic construct
  misc_feature 1..20: note = chemically synthesized
  source 1..20: mol_type = other DNA
cacagggttactcatgaggt

SEQ ID NO: 7582 - DNA, 20 bp, synthetic construct
  misc_feature 1..20: note = chemically synthesized
  source 1..20: mol_type = other DNA
caatttgacaatactcctca

SEQ ID NO: 7583 - DNA, 20 bp, synthetic construct
  misc_feature 1..20: note = chemically synthesized
  source 1..20: mol_type = other DNA
aatttgacaatactcctcaa

SEQ ID NO: 7584 - DNA, 20 bp, synthetic construct
  misc_feature 1..20: note = chemically synthesized
  source 1..20: mol_type = other DNA
atttgacaatactcctcaaa

SEQ ID NO: 7585 - DNA, 20 bp, synthetic construct
  misc_feature 1..20: note = chemically synthesized
  source 1..20: mol_type = other DNA
atccgtatcctcattactaa

SEQ ID NO: 7586 - DNA, 20 bp, synthetic construct
  misc_feature 1..20: note = chemically synthesized
  source 1..20: mol_type = other DNA
cctcattactaacagcacaa

SEQ ID NO: 7587 - DNA, 20 bp, synthetic construct
  misc_feature 1..20: note = chemically synthesized
  source 1..20: mol_type = other DNA
acagcacaatggacattcga

SEQ ID NO: 7588 - DNA, 20 bp, synthetic construct
  misc_feature 1..20: note = chemically synthesized
  source 1..20: mol_type = other DNA
cagcacaatggacattcgaa

SEQ ID NO: 7589 - DNA, 20 bp, synthetic construct
  misc_feature 1..20: note = chemically synthesized
  source 1..20: mol_type = other DNA
agcacaatggacattcgaaa

SEQ ID NO: 7590 - DNA, 20 bp, synthetic construct
  misc_feature 1..20: note = chemically synthesized
  source 1..20: mol_type = other DNA
caatggacattcgaaaggga

SEQ ID NO: 7591 - DNA, 20 bp, synthetic construct
  misc_feature 1..20: note = chemically synthesized
  source 1..20: mol_type = other DNA
aatggacattcgaaagggat

SEQ ID NO: 7592 - DNA, 20 bp, synthetic construct
  misc_feature 1..20: note = chemically synthesized
  source 1..20: mol_type = other DNA
ggatgggcccaatttttcat

SEQ ID NO: 7593 - DNA, 20 bp, synthetic construct
  misc_feature 1..20: note = chemically synthesized
  source 1..20: mol_type = other DNA
caatttttcataagccaaaa

SEQ ID NO: 7594 - DNA, 20 bp, synthetic construct
  misc_feature 1..20: note = chemically synthesized
  source 1..20: mol_type = other DNA
ttttcataagccaaaaaagc

SEQ ID NO: 7595 - DNA, 20 bp, synthetic construct
  misc_feature 1..20: note = chemically synthesized
  source 1..20: mol_type = other DNA
ttcataagccaaaaaagcta

SEQ ID NO: 7596 - DNA, 20 bp, synthetic construct
  misc_feature 1..20: note = chemically synthesized
  source 1..20: mol_type = other DNA
tcataagccaaaaaagctag

SEQ ID NO: 7597 - DNA, 20 bp, synthetic construct
  misc_feature 1..20: note = chemically synthesized
  source 1..20: mol_type = other DNA
agccaaaaaagctagaggat

SEQ ID NO: 7598 - DNA, 20 bp, synthetic construct
  misc_feature 1..20: note = chemically synthesized
  source 1..20: mol_type = other DNA
ccaaaaaagctagaggatcg

SEQ ID NO: 7599 - DNA, 20 bp, synthetic construct
  misc_feature 1..20: note = chemically synthesized
  source 1..20: mol_type = other DNA
aaaaaagctagaggatcgga

SEQ ID NO: 7600 - DNA, 20 bp, synthetic construct
  misc_feature 1..20: note = chemically synthesized
  source 1..20: mol_type = other DNA
agctagaggatcggagagaa

SEQ ID NO: 7601 - DNA, 20 bp, synthetic construct
  misc_feature 1..20: note = chemically synthesized
  source 1..20: mol_type = other DNA
tagaggatcggagagaaaag

SEQ ID NO: 7602 - DNA, 20 bp, synthetic construct
  misc_feature 1..20: note = chemically synthesized
  source 1..20: mol_type = other DNA
agaggatcggagagaaaaga

SEQ ID NO: 7603 - DNA, 20 bp, synthetic construct
  misc_feature 1..20: note = chemically synthesized
  source 1..20: mol_type = other DNA
gaggatcggagagaaaagaa

SEQ ID NO: 7604 - DNA, 20 bp, synthetic construct
  misc_feature 1..20: note = chemically synthesized
  source 1..20: mol_type = other DNA
atcggagagaaaagaaggga

SEQ ID NO: 7605 - DNA, 20 bp, synthetic construct
  misc_feature 1..20: note = chemically synthesized
  source 1..20: mol_type = other DNA
gaaaagaagggacggatact

SEQ ID NO: 7606 - DNA, 20 bp, synthetic construct
  misc_feature 1..20: note = chemically synthesized
  source 1..20: mol_type = other DNA
aagggacggatactcagaaa

SEQ ID NO: 7607 - DNA, 20 bp, synthetic construct
  misc_feature 1..20: note = chemically synthesized
  source 1..20: mol_type = other DNA
ggatactcagaaacggcttc

SEQ ID NO: 7608 - DNA, 20 bp, synthetic construct
  misc_feature 1..20: note = chemically synthesized
  source 1..20: mol_type = other DNA
gatactcagaaacggcttca

SEQ ID NO: 7609 - DNA, 20 bp, synthetic construct
  misc_feature 1..20: note = chemically synthesized
  source 1..20: mol_type = other DNA
atactcagaaacggcttcaa

SEQ ID NO: 7610 - DNA, 20 bp, synthetic construct
  misc_feature 1..20: note = chemically synthesized
  source 1..20: mol_type = other DNA
acggcttcaagggtgtcctt

SEQ ID NO: 7611 - DNA, 20 bp, synthetic construct
  misc_feature 1..20: note = chemically synthesized
  source 1..20: mol_type = other DNA
cctttggcaccccattcttc

SEQ ID NO: 7612 - DNA, 20 bp, synthetic construct
  misc_feature 1..20: note = chemically synthesized
  source 1..20: mol_type = other DNA
attgttccaaatgcctgctg

SEQ ID NO: 7613 - DNA, 20 bp, synthetic construct
  misc_feature 1..20: note = chemically synthesized
  source 1..20: mol_type = other DNA
aatgcctgctgcagtaataa

SEQ ID NO: 7614 - DNA, 20 bp, synthetic construct
  misc_feature 1..20: note = chemically synthesized
  source 1..20: mol_type = other DNA
tgcagtaataacagccccaa

SEQ ID NO: 7615 - DNA, 20 bp, synthetic construct
  misc_feature 1..20: note = chemically synthesized
  source 1..20: mol_type = other DNA
aaaagaacacaccactttgt

SEQ ID NO: 7616 - DNA, 20 bp, synthetic construct
  misc_feature 1..20: note = chemically synthesized
  source 1..20: mol_type = other DNA
aaagaacacaccactttgtc

SEQ ID NO: 7617 - DNA, 20 bp, synthetic construct
  misc_feature 1..20: note = chemically synthesized
  source 1..20: mol_type = other DNA
caccactttgtcaggacttg

SEQ ID NO: 7618 - DNA, 20 bp, synthetic construct
  misc_feature 1..20: note = chemically synthesized
  source 1..20: mol_type = other DNA
accactttgtcaggacttgt

SEQ ID NO: 7619 - DNA, 20 bp, synthetic construct
  misc_feature 1..20: note = chemically synthesized
  source 1..20: mol_type = other DNA
gacttgtaggtgaaatgtgt

SEQ ID NO: 7620 - DNA, 20 bp, synthetic construct
  misc_feature 1..20: note = chemically synthesized
  source 1..20: mol_type = other DNA
cttgtaggtgaaatgtgttg

SEQ ID NO: 7621 - DNA, 20 bp, synthetic construct
  misc_feature 1..20: note = chemically synthesized
  source 1..20: mol_type = other DNA
gtaggtgaaatgtgttggag

SEQ ID NO: 7622 - DNA, 20 bp, synthetic construct
  misc_feature 1..20: note = chemically synthesized
  source 1..20: mol_type = other DNA
aaatgtgttggagcagctgt

SEQ ID NO: 7623 - DNA, 20 bp, synthetic construct
  misc_feature 1..20: note = chemically synthesized
  source 1..20: mol_type = other DNA
tgttggagcagctgtcagct

SEQ ID NO: 7624 - DNA, 20 bp, synthetic construct
  misc_feature 1..20: note = chemically synthesized
  source 1..20: mol_type = other DNA
gttggagcagctgtcagctt

SEQ ID NO: 7625 - DNA, 20 bp, synthetic construct
  misc_feature 1..20: note = chemically synthesized
  source 1..20: mol_type = other DNA
ttggagcagctgtcagcttg

SEQ ID NO: 7626 - DNA, 20 bp, synthetic construct
  misc_feature 1..20: note = chemically synthesized
  source 1..20: mol_type = other DNA
gcttggggaaaatcactcat

SEQ ID NO: 7627 - DNA, 20 bp, synthetic construct
  misc_feature 1..20: note = chemically synthesized
  source 1..20: mol_type = other DNA
cttggggaaaatcactcatc

SEQ ID NO: 7628 - DNA, 20 bp, synthetic construct
  misc_feature 1..20: note = chemically synthesized
  source 1..20: mol_type = other DNA
ggggaaaatcactcatcagg

SEQ ID NO: 7629 - DNA, 20 bp, synthetic construct
  misc_feature 1..20: note = chemically synthesized
  source 1..20: mol_type = other DNA
aaaatcactcatcaggtagt

SEQ ID NO: 7630 - DNA, 20 bp, synthetic construct
  misc_feature 1..20: note = chemically synthesized
  source 1..20: mol_type = other DNA
cactcatcaggtagtcagcc

SEQ ID NO: 7631 - DNA, 20 bp, synthetic construct
  misc_feature 1..20: note = chemically synthesized
  source 1..20: mol_type = other DNA
catcaggtagtcagccgagt

SEQ ID NO: 7632 - DNA, 20 bp, synthetic construct
  misc_feature 1..20: note = chemically synthesized
  source 1..20: mol_type = other DNA
atcaggtagtcagccgagtg

SEQ ID NO: 7633 - DNA, 20 bp, synthetic construct
  misc_feature 1..20: note = chemically synthesized
  source 1..20: mol_type = other DNA
cagccgagtgaggctgcctt

SEQ ID NO: 7634 - DNA, 20 bp, synthetic construct
  misc_feature 1..20: note = chemically synthesized
  source 1..20: mol_type = other DNA
cgagtgaggctgccttcagc

SEQ ID NO: 7635 - DNA, 20 bp, synthetic construct
  misc_feature 1..20: note = chemically synthesized
  source 1..20: mol_type = other DNA
ggacaaacactgcatccaca

SEQ ID NO: 7636 - DNA, 20 bp, synthetic construct
  misc_feature 1..20: note = chemically synthesized
  source 1..20: mol_type = other DNA
gacaaacactgcatccacac

SEQ ID NO: 7637 - DNA, 20 bp, synthetic construct
  misc_feature 1..20: note = chemically synthesized
  source 1..20: mol_type = other DNA
acaaacactgcatccacaca

SEQ ID NO: 7638 - DNA, 20 bp, synthetic construct
  misc_feature 1..20: note = chemically synthesized
  source 1..20: mol_type = other DNA
actgcatccacacagggaac

SEQ ID NO: 7639 - DNA, 20 bp, synthetic construct
  misc_feature 1..20: note = chemically synthesized
  source 1..20: mol_type = other DNA
gcatccacacagggaacaag

SEQ ID NO: 7640 - DNA, 20 bp, synthetic construct
  misc_feature 1..20: note = chemically synthesized
  source 1..20: mol_type = other DNA
catccacacagggaacaagc

SEQ ID NO: 7641 - DNA, 20 bp, synthetic construct
  misc_feature 1..20: note = chemically synthesized
  source 1..20: mol_type = other DNA
gtgctttcctgtccttccct

SEQ ID NO: 7642 - DNA, 20 bp, synthetic construct
  misc_feature 1..20: note = chemically synthesized
  source 1..20: mol_type = other DNA
tgctttcctgtccttccctt

SEQ ID NO: 7643 - DNA, 20 bp, synthetic construct
  misc_feature 1..20: note = chemically synthesized
  source 1..20: mol_type = other DNA
gctttcctgtccttccctta

SEQ ID NO: 7644 - DNA, 20 bp, synthetic construct
  misc_feature 1..20: note = chemically synthesized
  source 1..20: mol_type = other DNA
ctttcctgtccttcccttag

SEQ ID NO: 7645 - DNA, 20 bp, synthetic construct
  misc_feature 1..20: note = chemically synthesized
  source 1..20: mol_type = other DNA
ccttcccttaggggccaaac

SEQ ID NO: 7646 - DNA, 20 bp, synthetic construct
  misc_feature 1..20: note = chemically synthesized
  source 1..20: mol_type = other DNA
ttttaccttcttgtccaacc

SEQ ID NO: 7647 - DNA, 20 bp, synthetic construct
  misc_feature 1..20: note = chemically synthesized
  source 1..20: mol_type = other DNA
taccttcttgtccaacccag

SEQ ID NO: 7648 - DNA, 20 bp, synthetic construct
  misc_feature 1..20: note = chemically synthesized
  source 1..20: mol_type = other DNA
accttcttgtccaacccagt

SEQ ID NO: 7649 - DNA, 20 bp, synthetic construct
  misc_feature 1..20: note = chemically synthesized
  source 1..20: mol_type = other DNA
atacctccttctctttcctc

SEQ ID NO: 7650 - DNA, 20 bp, synthetic construct
  misc_feature 1..20: note = chemically synthesized
  source 1..20: mol_type = other DNA
tctctttcctccagctccct

SEQ ID NO: 7651 - DNA, 20 bp, synthetic construct
  misc_feature 1..20: note = chemically synthesized
  source 1..20: mol_type = other DNA
cagctccctaagctgttgtt

SEQ ID NO: 7652 - DNA, 20 bp, synthetic construct
  misc_feature 1..20: note = chemically synthesized
  source 1..20: mol_type = other DNA
agctccctaagctgttgttc

SEQ ID NO: 7653 - DNA, 20 bp, synthetic construct
  misc_feature 1..20: note = chemically synthesized
  source 1..20: mol_type = other DNA
gctccctaagctgttgttca

SEQ ID NO: 7654 - DNA, 20 bp, synthetic construct
  misc_feature 1..20: note = chemically synthesized
  source 1..20: mol_type = other DNA
ctaagctgttgttcagggca

SEQ ID NO: 7655 - DNA, 20 bp, synthetic construct
  misc_feature 1..20: note = chemically synthesized
  source 1..20: mol_type = other DNA
gctgttgttcagggcacaga

SEQ ID NO: 7656 - DNA, 20 bp, synthetic construct
  misc_feature 1..20: note = chemically synthesized
  source 1..20: mol_type = other DNA
tcagggcacagacagctctt

SEQ ID NO: 7657 - DNA, 20 bp, synthetic construct
  misc_feature 1..20: note = chemically synthesized
  source 1..20: mol_type = other DNA
cagggcacagacagctcttc

SEQ ID NO: 7658 - DNA, 20 bp, synthetic construct
  misc_feature 1..20: note = chemically synthesized
  source 1..20: mol_type = other DNA
cagacagctcttcaggctgc

SEQ ID NO: 7659 - DNA, 20 bp, synthetic construct
  misc_feature 1..20: note = chemically synthesized
  source 1..20: mol_type = other DNA
gacagctcttcaggctgcca

SEQ ID NO: 7660 - DNA, 20 bp, synthetic construct
  misc_feature 1..20: note = chemically synthesized
  source 1..20: mol_type = other DNA
gctcttcaggctgccagagc

SEQ ID NO: 7661 - DNA, 20 bp, synthetic construct
  misc_feature 1..20: note = chemically synthesized
  source 1..20: mol_type = other DNA
tcttcaggctgccagagcaa

SEQ ID NO: 7662 - DNA, 20 bp, synthetic construct
  misc_feature 1..20: note = chemically synthesized
  source 1..20: mol_type = other DNA
ttcaggctgccagagcaaga

SEQ ID NO: 7663 - DNA, 20 bp, synthetic construct
  misc_feature 1..20: note = chemically synthesized
  source 1..20: mol_type = other DNA
ggctgccagagcaagagagt

SEQ ID NO: 7664 - DNA, 20 bp, synthetic construct
  misc_feature 1..20: note = chemically synthesized
  source 1..20: mol_type = other DNA
gctgccagagcaagagagtt

SEQ ID NO: 7665 - DNA, 20 bp, synthetic construct
  misc_feature 1..20: note = chemically synthesized
  source 1..20: mol_type = other DNA
ccacatgcattcccacctcc

SEQ ID NO: 7666 - DNA, 20 bp, synthetic construct
  misc_feature 1..20: note = chemically synthesized
  source 1..20: mol_type = other DNA
catgcattcccacctcccgg

SEQ ID NO: 7667 - DNA, 20 bp, synthetic construct
  misc_feature 1..20: note = chemically synthesized
  source 1..20: mol_type = other DNA
gcattcccacctcccggaag

SEQ ID NO: 7668 - DNA, 20 bp, synthetic construct
  misc_feature 1..20: note = chemically synthesized
  source 1..20: mol_type = other DNA
cattcccacctcccggaagc

SEQ ID NO: 7669 - DNA, 20 bp, synthetic construct
  misc_feature 1..20: note = chemically synthesized
  source 1..20: mol_type = other DNA
attcccacctcccggaagca

SEQ ID NO: 7670 - DNA, 20 bp, synthetic construct
  misc_feature 1..20: note = chemically synthesized
  source 1..20: mol_type = other DNA
ttcccacctcccggaagcag

SEQ ID NO: 7671 - DNA, 20 bp, synthetic construct
  misc_feature 1..20: note = chemically synthesized
  source 1..20: mol_type = other DNA
cctcccggaagcaggggaca

SEQ ID NO: 7672 - DNA, 20 bp, synthetic construct
  misc_feature 1..20: note = chemically synthesized
  source 1..20: mol_type = other DNA
ccggaagcaggggacacagc

SEQ ID NO: 7673 - DNA, 20 bp, synthetic construct
  misc_feature 1..20: note = chemically synthesized
  source 1..20: mol_type = other DNA
cacagctggccactctgtga

SEQ ID NO: 7674 - DNA, 20 bp, synthetic construct
  misc_feature 1..20: note = chemically synthesized
  source 1..20: mol_type = other DNA
cagctggccactctgtgacg

SEQ ID NO: 7675 - DNA, 20 bp, synthetic construct
  misc_feature 1..20: note = chemically synthesized
  source 1..20: mol_type = other DNA
agctggccactctgtgacgg

SEQ ID NO: 7676 - DNA, 20 bp, synthetic construct
  misc_feature 1..20: note = chemically synthesized
  source 1..20: mol_type = other DNA
gctggccactctgtgacgga

SEQ ID NO: 7677 - DNA, 20 bp, synthetic construct
  misc_feature 1..20: note = chemically synthesized
  source 1..20: mol_type = other DNA
ggccactctgtgacggaggg

SEQ ID NO: 7678 - DNA, 20 bp, synthetic construct
  misc_feature 1..20: note = chemically synthesized
  source 1..20: mol_type = other DNA
gccactctgtgacggagggt

SEQ ID NO: 7679 - DNA, 20 bp, synthetic construct
  misc_feature 1..20: note = chemically synthesized
  source 1..20: mol_type = other DNA
gggtgggtaacctctctacc

SEQ ID NO: 7680 - DNA, 20 bp, synthetic construct
  misc_feature 1..20: note = chemically synthesized
  source 1..20: mol_type = other DNA
ggtgggtaacctctctacct

SEQ ID NO: 7681 - DNA, 20 bp, synthetic construct
  misc_feature 1..20: note = chemically synthesized
  source 1..20: mol_type = other DNA
tctacctgggtctatcattt

SEQ ID NO: 7682 - DNA, 20 bp, synthetic construct
  misc_feature 1..20: note = chemically synthesized
  source 1..20: mol_type = other DNA
attttagaataaatcattcg

SEQ ID NO: 7683 - DNA, 20 bp, synthetic construct
  misc_feature 1..20: note = chemically synthesized
  source 1..20: mol_type = other DNA
attcgtggctgactcttaaa

SEQ ID NO: 7684 - DNA, 20 bp, synthetic construct
  misc_feature 1..20: note = chemically synthesized
  source 1..20: mol_type = other DNA
ttcgtggctgactcttaaat

SEQ ID NO: 7685 - DNA, 20 bp, synthetic construct
  misc_feature 1..20: note = chemically synthesized
  source 1..20: mol_type = other DNA
gtggctgactcttaaatggg

SEQ ID NO: 7686 - DNA, 20 bp, synthetic construct
  misc_feature 1..20: note = chemically synthesized
  source 1..20: mol_type = other DNA
tggctgactcttaaatggga

SEQ ID NO: 7687 - DNA, 20 bp, synthetic construct
  misc_feature 1..20: note = chemically synthesized
  source 1..20: mol_type = other DNA
ggctgactcttaaatgggaa

SEQ ID NO: 7688 - DNA, 20 bp, synthetic construct
  misc_feature 1..20: note = chemically synthesized
  source 1..20: mol_type = other DNA
taaatgggaagggccaatta

SEQ ID NO: 7689 - DNA, 20 bp, synthetic construct
  misc_feature 1..20: note = chemically synthesized
  source 1..20: mol_type = other DNA
ggccaattacagatatctct

SEQ ID NO: 7690 - DNA, 20 bp, synthetic construct
  misc_feature 1..20: note = chemically synthesized
  source 1..20: mol_type = other DNA
ctctgagaacaactctacct

SEQ ID NO: 7691 - DNA, 20 bp, synthetic construct
  misc_feature 1..20: note = chemically synthesized
  source 1..20: mol_type = other DNA
tctgagaacaactctacctg

SEQ ID NO: 7692 - DNA, 20 bp, synthetic construct
  misc_feature 1..20: note = chemically synthesized
  source 1..20: mol_type = other DNA
ctgagaacaactctacctga

SEQ ID NO: 7693 - DNA, 20 bp, synthetic construct
  misc_feature 1..20: note = chemically synthesized
  source 1..20: mol_type = other DNA
gagaacaactctacctgagg

SEQ ID NO: 7694 - DNA, 20 bp, synthetic construct
  misc_feature 1..20: note = chemically synthesized
  source 1..20: mol_type = other DNA
agaacaactctacctgaggg

SEQ ID NO: 7695 - DNA, 20 bp, synthetic construct
  misc_feature 1..20: note = chemically synthesized
  source 1..20: mol_type = other DNA
gaacaactctacctgaggga

SEQ ID NO: 7696 - DNA, 20 bp, synthetic construct
  misc_feature 1..20: note = chemically synthesized
  source 1..20: mol_type = other DNA
aacaactctacctgagggag

SEQ ID NO: 7697 - DNA, 20 bp, synthetic construct
  misc_feature 1..20: note = chemically synthesized
  source 1..20: mol_type = other DNA
acaactctacctgagggagg

SEQ ID NO: 7698 - DNA, 20 bp, synthetic construct
  misc_feature 1..20: note = chemically synthesized
  source 1..20: mol_type = other DNA
ggaaatccctcccaaaacaa

SEQ ID NO: 7699 - DNA, 20 bp, synthetic construct
  misc_feature 1..20: note = chemically synthesized
  source 1..20: mol_type = other DNA
aatccctcccaaaacaacgg

SEQ ID NO: 7700 - DNA, 20 bp, synthetic construct
  misc_feature 1..20: note = chemically synthesized
  source 1..20: mol_type = other DNA
atccctcccaaaacaacggt

SEQ ID NO: 7701 - DNA, 20 bp, synthetic construct
  misc_feature 1..20: note = chemically synthesized
  source 1..20: mol_type = other DNA
cctcccaaaacaacggtggg

SEQ ID NO: 7702 - DNA, 20 bp, synthetic construct
  misc_feature 1..20: note = chemically synthesized
  source 1..20: mol_type = other DNA
atctgcatcccgtaaatacc

SEQ ID NO: 7703 - DNA, 20 bp, synthetic construct
  misc_feature 1..20: note = chemically synthesized
  source 1..20: mol_type = other DNA
tgcatcccgtaaatacccag

SEQ ID NO: 7704 - DNA, 20 bp, synthetic construct
  misc_feature 1..20: note = chemically synthesized
  source 1..20: mol_type = other DNA
ccgtaaatacccagaagcaa

SEQ ID NO: 7705 - DNA, 20 bp, synthetic construct
  misc_feature 1..20: note = chemically synthesized
  source 1..20: mol_type = other DNA
taaatacccagaagcaatag

SEQ ID NO: 7706 - DNA, 20 bp, synthetic construct
  misc_feature 1..20: note = chemically synthesized
  source 1..20: mol_type = other DNA
gaagcaatagcagccccacc

SEQ ID NO: 7707 - DNA, 20 bp, synthetic construct
  misc_feature 1..20: note = chemically synthesized
  source 1..20: mol_type = other DNA
gccccacctggttcgtctgc

SEQ ID NO: 7708 - DNA, 20 bp, synthetic construct
  misc_feature 1..20: note = chemically synthesized
  source 1..20: mol_type = other DNA
ggttcgtctgccagatgctg

SEQ ID NO: 7709 - DNA, 20 bp, synthetic construct
  misc_feature 1..20: note = chemically synthesized
  source 1..20: mol_type = other DNA
ttcgtctgccagatgctgtg

SEQ ID NO: 7710 - DNA, 20 bp, synthetic construct
  misc_feature 1..20: note = chemically synthesized
  source 1..20: mol_type = other DNA
tctgccagatgctgtggaga

SEQ ID NO: 7711 - DNA, 20 bp, synthetic construct
  misc_feature 1..20: note = chemically synthesized
  source 1..20: mol_type = other DNA
cagatgctgtggagatggca

SEQ ID NO: 7712 - DNA, 20 bp, synthetic construct
  misc_feature 1..20: note = chemically synthesized
  source 1..20: mol_type = other DNA
atgctgtggagatggcatgg

SEQ ID NO: 7713 - DNA, 20 bp, synthetic construct
  misc_feature 1..20: note = chemically synthesized
  source 1..20: mol_type = other DNA
ggagatggcatggtggcatt

SEQ ID NO: 7714 - DNA, 20 bp, synthetic construct
  misc_feature 1..20: note = chemically synthesized
  source 1..20: mol_type = other DNA
catttggtaaataacccaaa

SEQ ID NO: 7715 - DNA, 20 bp, synthetic construct
  misc_feature 1..20: note = chemically synthesized
  source 1..20: mol_type = other DNA
atttggtaaataacccaaat

SEQ ID NO: 7716 - DNA, 20 bp, synthetic construct
  misc_feature 1..20: note = chemically synthesized
  source 1..20: mol_type = other DNA
tttggtaaataacccaaata

SEQ ID NO: 7717 - DNA, 20 bp, synthetic construct
  misc_feature 1..20: note = chemically synthesized
  source 1..20: mol_type = other DNA
ataacccaaatagggctttg

SEQ ID NO: 7718 - DNA, 20 bp, synthetic construct
  misc_feature 1..20: note = chemically synthesized
  source 1..20: mol_type = other DNA
taacccaaatagggctttgc

SEQ ID NO: 7719 - DNA, 20 bp, synthetic construct
  misc_feature 1..20: note = chemically synthesized
  source 1..20: mol_type = other DNA
aacccaaatagggctttgca

SEQ ID NO: 7720 - DNA, 20 bp, synthetic construct
  misc_feature 1..20: note = chemically synthesized
  source 1..20: mol_type = other DNA
aaatagggctttgcagggta

SEQ ID NO: 7721 - DNA, 20 bp, synthetic construct
  misc_feature 1..20: note = chemically synthesized
  source 1..20: mol_type = other DNA
aatagggctttgcagggtat

SEQ ID NO: 7722 - DNA, 20 bp, synthetic construct
  misc_feature 1..20: note = chemically synthesized
  source 1..20: mol_type = other DNA
cagggtatgggacaccacac

SEQ ID NO: 7723 - DNA, 20 bp, synthetic construct
  misc_feature 1..20: note = chemically synthesized
  source 1..20: mol_type = other DNA
agggtatgggacaccacact

SEQ ID NO: 7724 - DNA, 20 bp, synthetic construct
  misc_feature 1..20: note = chemically synthesized
  source 1..20: mol_type = other DNA
ggacaccacactaggctttg

SEQ ID NO: 7725 - DNA, 20 bp, synthetic construct
  misc_feature 1..20: note = chemically synthesized
  source 1..20: mol_type = other DNA
ccacactaggctttgcagcc

SEQ ID NO: 7726 - DNA, 20 bp, synthetic construct
  misc_feature 1..20: note = chemically synthesized
  source 1..20: mol_type = other DNA
cacactaggctttgcagccc

SEQ ID NO: 7727 - DNA, 20 bp, synthetic construct
  misc_feature 1..20: note = chemically synthesized
  source 1..20: mol_type = other DNA
ctttgcagcccgggtgaaac

SEQ ID NO: 7728 - DNA, 20 bp, synthetic construct
  misc_feature 1..20: note = chemically synthesized
  source 1..20: mol_type = other DNA
gcagcccgggtgaaaccaga

SEQ ID NO: 7729 - DNA, 20 bp, synthetic construct
  misc_feature 1..20: note = chemically synthesized
  source 1..20: mol_type = other DNA
cgggtgaaaccagatggtgc

SEQ ID NO: 7730 - DNA, 20 bp, synthetic construct
  misc_feature 1..20: note = chemically synthesized
  source 1..20: mol_type = other DNA
gtgaaaccagatggtgcgag

SEQ ID NO: 7731 - DNA, 20 bp, synthetic construct
  misc_feature 1..20: note = chemically synthesized
  source 1..20: mol_type = other DNA
aaccagatggtgcgagaaga

SEQ ID NO: 7732 - DNA, 20 bp, synthetic construct
  misc_feature 1..20: note = chemically synthesized
  source 1..20: mol_type = other DNA
agaagatagtgaatcactca

SEQ ID NO: 7733 - DNA, 20 bp, synthetic construct
  misc_feature 1..20: note = chemically synthesized
  source 1..20: mol_type = other DNA
gaagatagtgaatcactcat

SEQ ID NO: 7734 - DNA, 20 bp, synthetic construct
  misc_feature 1..20: note = chemically synthesized
  source 1..20: mol_type = other DNA
atagtgaatcactcataggc

SEQ ID NO: 7735 - DNA, 20 bp, synthetic construct
  misc_feature 1..20: note = chemically synthesized
  source 1..20: mol_type = other DNA
tagtgaatcactcataggca

SEQ ID NO: 7736 - DNA, 20 bp, synthetic construct
  misc_feature 1..20: note = chemically synthesized
  source 1..20: mol_type = other DNA
agtgaatcactcataggcaa

SEQ ID NO: 7737 - DNA, 20 bp, synthetic construct
  misc_feature 1..20: note = chemically synthesized
  source 1..20: mol_type = other DNA
cactcataggcaagggatgt

SEQ ID NO: 7738 - DNA, 20 bp, synthetic construct
  misc_feature 1..20: note = chemically synthesized
  source 1..20: mol_type = other DNA
cacctaaaaatcccctttcc

SEQ ID NO: 7739 - DNA, 20 bp, synthetic construct
  misc_feature 1..20: note = chemically synthesized
  source 1..20: mol_type = other DNA
ccatcctttgacacccacca

SEQ ID NO: 7740 - DNA, 20 bp, synthetic construct
  misc_feature 1..20: note = chemically synthesized
  source 1..20: mol_type = other DNA
gacacccaccatagaaatca

SEQ ID NO: 7741 - DNA, 20 bp, synthetic construct
  misc_feature 1..20: note = chemically synthesized
  source 1..20: mol_type = other DNA
cacccaccatagaaatcaca

SEQ ID NO: 7742 - DNA, 20 bp, synthetic construct
  misc_feature 1..20: note = chemically synthesized
  source 1..20: mol_type = other DNA
cccaccatagaaatcacaga

SEQ ID NO: 7743 - DNA, 20 bp, synthetic construct
  misc_feature 1..20: note = chemically synthesized
  source 1..20: mol_type = other DNA
ccaccatagaaatcacagag

SEQ ID NO: 7744 - DNA, 20 bp, synthetic construct
  misc_feature 1..20: note = chemically synthesized
  source 1..20: mol_type = other DNA
catagaaatcacagagaggt

SEQ ID NO: 7745 - DNA, 20 bp, synthetic construct
  misc_feature 1..20: note = chemically synthesized
  source 1..20: mol_type = other DNA
gaaatcacagagaggtcaga

SEQ ID NO: 7746 - DNA, 20 bp, synthetic construct
  misc_feature 1..20: note = chemically synthesized
  source 1..20: mol_type = other DNA
gagaggtcagaaagaacacc

SEQ ID NO: 7747 - DNA, 20 bp, synthetic construct
  misc_feature 1..20: note = chemically synthesized
  source 1..20: mol_type = other DNA
agaggtcagaaagaacacct

SEQ ID NO: 7748 - DNA, 20 bp, synthetic construct
  misc_feature 1..20: note = chemically synthesized
  source 1..20: mol_type = other DNA
aagaacacctgggcccaaaa

SEQ ID NO: 7749 - DNA, 20 bp, synthetic construct
  misc_feature 1..20: note = chemically synthesized
  source 1..20: mol_type = other DNA
cccaaaatagcctgtcctgt

SEQ ID NO: 7750 - DNA, 20 bp, synthetic construct
  misc_feature 1..20: note = chemically synthesized
  source 1..20: mol_type = other DNA
ctgtcctgttagccaaatgc

SEQ ID NO: 7751 - DNA, 20 bp, synthetic construct
  misc_feature 1..20: note = chemically synthesized
  source 1..20: mol_type = other DNA
ccagcactcccactttctct

SEQ ID NO: 7752 - DNA, 20 bp, synthetic construct
  misc_feature 1..20: note = chemically synthesized
  source 1..20: mol_type = other DNA
cagcactcccactttctctg

SEQ ID NO: 7753 - DNA, 20 bp, synthetic construct
  misc_feature 1..20: note = chemically synthesized
  source 1..20: mol_type = other DNA
agcactcccactttctctga

SEQ ID NO: 7754 - DNA, 20 bp, synthetic construct
  misc_feature 1..20: note = chemically synthesized
  source 1..20: mol_type = other DNA
tcccactttctctgagggca

SEQ ID NO: 7755 - DNA, 20 bp, synthetic construct
  misc_feature 1..20: note = chemically synthesized
  source 1..20: mol_type = other DNA
ccactttctctgagggcatg

SEQ ID NO: 7756 - DNA, 20 bp, synthetic construct
  misc_feature 1..20: note = chemically synthesized
  source 1..20: mol_type = other DNA
cactttctctgagggcatgg

SEQ ID NO: 7757 - DNA, 20 bp, synthetic construct
  misc_feature 1..20: note = chemically synthesized
  source 1..20: mol_type = other DNA
actttctctgagggcatgga

SEQ ID NO: 7758 - DNA, 20 bp, synthetic construct
  misc_feature 1..20: note = chemically synthesized
  source 1..20: mol_type = other DNA
ctttctctgagggcatggag

SEQ ID NO: 7759 - DNA, 20 bp, synthetic construct
  misc_feature 1..20: note = chemically synthesized
  source 1..20: mol_type = other DNA
ttctctgagggcatggaggg

SEQ ID NO: 7760 - DNA, 20 bp, synthetic construct
  misc_feature 1..20: note = chemically synthesized
  source 1..20: mol_type = other DNA
tctctgagggcatggagggg

SEQ ID NO: 7761 - DNA, 20 bp, synthetic construct
  misc_feature 1..20: note = chemically synthesized
  source 1..20: mol_type = other DNA
ctgagggcatggaggggagg

SEQ ID NO: 7762 - DNA, 20 bp, synthetic construct
  misc_feature 1..20: note = chemically synthesized
  source 1..20: mol_type = other DNA
agggcatggaggggaggcag

SEQ ID NO: 7763 - DNA, 20 bp, synthetic construct
  misc_feature 1..20: note = chemically synthesized
  source 1..20: mol_type = other DNA
catggaggggaggcagcagc

SEQ ID NO: 7764 - DNA, 20 bp, synthetic construct
  misc_feature 1..20: note = chemically synthesized
  source 1..20: mol_type = other DNA
atggaggggaggcagcagct

SEQ ID NO: 7765 - DNA, 20 bp, synthetic construct
  misc_feature 1..20: note = chemically synthesized
  source 1..20: mol_type = other DNA
tggaggggaggcagcagcta

SEQ ID NO: 7766 - DNA, 20 bp, synthetic construct
  misc_feature 1..20: note = chemically synthesized
  source 1..20: mol_type = other DNA
ggaggcagcagctagggctc

SEQ ID NO: 7767 - DNA, 20 bp, synthetic construct
  misc_feature 1..20: note = chemically synthesized
  source 1..20: mol_type = other DNA
tcatttaattctctctgcat

SEQ ID NO: 7768 - DNA, 20 bp, synthetic construct
  misc_feature 1..20: note = chemically synthesized
  source 1..20: mol_type = other DNA
atttaattctctctgcatca

SEQ ID NO: 7769 - DNA, 20 bp, synthetic construct
  misc_feature 1..20: note = chemically synthesized
  source 1..20: mol_type = other DNA
tttaattctctctgcatcag

SEQ ID NO: 7770 - DNA, 20 bp, synthetic construct
  misc_feature 1..20: note = chemically synthesized
  source 1..20: mol_type = other DNA
aattctctctgcatcagagg

SEQ ID NO: 7771 - DNA, 20 bp, synthetic construct
  misc_feature 1..20: note = chemically synthesized
  source 1..20: mol_type = other DNA
ttctctctgcatcagaggaa

SEQ ID NO: 7772 - DNA, 20 bp, synthetic construct
  misc_feature 1..20: note = chemically synthesized
  source 1..20: mol_type = other DNA
cagaggaagagtcaccttca

SEQ ID NO: 7773 - DNA, 20 bp, synthetic construct
  misc_feature 1..20: note = chemically synthesized
  source 1..20: mol_type = other DNA
agaggaagagtcaccttcac

SEQ ID NO: 7774 - DNA, 20 bp, synthetic construct
  misc_feature 1..20: note = chemically synthesized
  source 1..20: mol_type = other DNA
gaagagtcaccttcacaggc

SEQ ID NO: 7775 - DNA, 20 bp, synthetic construct
  misc_feature 1..20: note = chemically synthesized
  source 1..20: mol_type = other DNA
tcaccttcacaggccagctg

SEQ ID NO: 7776 - DNA, 20 bp, synthetic construct
  misc_feature 1..20: note = chemically synthesized
  source 1..20: mol_type = other DNA
cttgccacatctaatgccac

SEQ ID NO: 7777 - DNA, 20 bp, synthetic construct
  misc_feature 1..20: note = chemically synthesized
  source 1..20: mol_type = other DNA
ttgccacatctaatgccacc

SEQ ID NO: 7778 - DNA, 20 bp, synthetic construct
  misc_feature 1..20: note = chemically synthesized
  source 1..20: mol_type = other DNA
ctaatgccaccaggccctgc

SEQ ID NO: 7779 - DNA, 20 bp, synthetic construct
  misc_feature 1..20: note = chemically synthesized
  source 1..20: mol_type = other DNA
atgccaccaggccctgccag

SEQ ID NO: 7780 - DNA, 20 bp, synthetic construct
  misc_feature 1..20: note = chemically synthesized
  source 1..20: mol_type = other DNA
cctgccagcggcccccattc

SEQ ID NO: 7781 - DNA, 20 bp, synthetic construct
  misc_feature 1..20: note = chemically synthesized
  source 1..20: mol_type = other DNA
attctggtctgtcaaacccc

SEQ ID NO: 7782 - DNA, 20 bp, synthetic construct
  misc_feature 1..20: note = chemically synthesized
  source 1..20: mol_type = other DNA
gtcaaacccctggaaaactt

SEQ ID NO: 7783 - DNA, 20 bp, synthetic construct
  misc_feature 1..20: note = chemically synthesized
  source 1..20: mol_type = other DNA
aacccctggaaaacttcaga

SEQ ID NO: 7784 - DNA, 20 bp, synthetic construct
  misc_feature 1..20: note = chemically synthesized
  source 1..20: mol_type = other DNA
aaacttcagacagtgttcct

SEQ ID NO: 7785 - DNA, 20 bp, synthetic construct
  misc_feature 1..20: note = chemically synthesized
  source 1..20: mol_type = other DNA
cagacagtgttcctcagatc

SEQ ID NO: 7786 - DNA, 20 bp, synthetic construct
  misc_feature 1..20: note = chemically synthesized
  source 1..20: mol_type = other DNA
agacagtgttcctcagatcc

SEQ ID NO: 7787 - DNA, 20 bp, synthetic construct
  misc_feature 1..20: note = chemically synthesized
  source 1..20: mol_type = other DNA
agtgttcctcagatccagga

SEQ ID NO: 7788 - DNA, 20 bp, synthetic construct
  misc_feature 1..20: note = chemically synthesized
  source 1..20: mol_type = other DNA
tgttcctcagatccaggaca

SEQ ID NO: 7789 - DNA, 20 bp, synthetic construct
  misc_feature 1..20: note = chemically synthesized
  source 1..20: mol_type = other DNA
cctcagatccaggacagagc

SEQ ID NO: 7790 - DNA, 20 bp, synthetic construct
  misc_feature 1..20: note = chemically synthesized
  source 1..20: mol_type = other DNA
gatccaggacagagctggct

SEQ ID NO: 7791 - DNA, 20 bp, synthetic construct
  misc_feature 1..20: note = chemically synthesized
  source 1..20: mol_type = other DNA
atccaggacagagctggctc

SEQ ID NO: 7792 - DNA, 20 bp, synthetic construct
  misc_feature 1..20: note = chemically synthesized
  source 1..20: mol_type = other DNA
agctggctcaggacgccaca

SEQ ID NO: 7793 - DNA, 20 bp, synthetic construct
  misc_feature 1..20: note = chemically synthesized
  source 1..20: mol_type = other DNA
gctggctcaggacgccacat

SEQ ID NO: 7794 - DNA, 20 bp, synthetic construct
  misc_feature 1..20: note = chemically synthesized
  source 1..20: mol_type = other DNA
gacgccacatgggtcaaccc

SEQ ID NO: 7795 - DNA, 20 bp, synthetic construct
  misc_feature 1..20: note = chemically synthesized
  source 1..20: mol_type = other DNA
atgggtcaacccgagcgcac

SEQ ID NO: 7796 - DNA, 20 bp, synthetic construct
  misc_feature 1..20: note = chemically synthesized
  source 1..20: mol_type = other DNA
aacccgagcgcaccagtcct

SEQ ID NO: 7797 - DNA, 20 bp, synthetic construct
  misc_feature 1..20: note = chemically synthesized
  source 1..20: mol_type = other DNA
caccagtcctcagaccctcc

SEQ ID NO: 7798 - DNA, 20 bp, synthetic construct
  misc_feature 1..20: note = chemically synthesized
  source 1..20: mol_type = other DNA
accagtcctcagaccctcca

SEQ ID NO: 7799 - DNA, 20 bp, synthetic construct
  misc_feature 1..20: note = chemically synthesized
  source 1..20: mol_type = other DNA
tcagaccctccaaggtgaca

SEQ ID NO: 7800 - DNA, 20 bp, synthetic construct
  misc_feature 1..20: note = chemically synthesized
  source 1..20: mol_type = other DNA
caaggtgacaaagacctcac

SEQ ID NO: 7801 - DNA, 20 bp, synthetic construct
  misc_feature 1..20: note = chemically synthesized
  source 1..20: mol_type = other DNA
tagactgtatctcatttttc

SEQ ID NO: 7802 - DNA, 20 bp, synthetic construct
  misc_feature 1..20: note = chemically synthesized
  source 1..20: mol_type = other DNA
gtatctcatttttccagcct

SEQ ID NO: 7803 - DNA, 20 bp, synthetic construct
  misc_feature 1..20: note = chemically synthesized
  source 1..20: mol_type = other DNA
ctcatttttccagcctcagt

SEQ ID NO: 7804 - DNA, 20 bp, synthetic construct
  misc_feature 1..20: note = chemically synthesized
  source 1..20: mol_type = other DNA
tttttccagcctcagtgagc

SEQ ID NO: 7805 - DNA, 20 bp, synthetic construct
  misc_feature 1..20: note = chemically synthesized
  source 1..20: mol_type = other DNA
cagcctcagtgagccggccc

SEQ ID NO: 7806 - DNA, 20 bp, synthetic construct
  misc_feature 1..20: note = chemically synthesized
  source 1..20: mol_type = other DNA
ctcagtgagccggccccagc

SEQ ID NO: 7807 - DNA, 20 bp, synthetic construct
  misc_feature 1..20: note = chemically synthesized
  source 1..20: mol_type = other DNA
ccggccccagctggcatgct

SEQ ID NO: 7808 - DNA, 20 bp, synthetic construct
  misc_feature 1..20: note = chemically synthesized
  source 1..20: mol_type = other DNA
cccagctggcatgctgagtc

SEQ ID NO: 7809 - DNA, 20 bp, synthetic construct
  misc_feature 1..20: note = chemically synthesized
  source 1..20: mol_type = other DNA
ccagctggcatgctgagtcc

SEQ ID NO: 7810 - DNA, 20 bp, synthetic construct
  misc_feature 1..20: note = chemically synthesized
  source 1..20: mol_type = other DNA
ctggcatgctgagtccagga

SEQ ID NO: 7811 - DNA, 20 bp, synthetic construct
  misc_feature 1..20: note = chemically synthesized
  source 1..20: mol_type = other DNA
tgctgagtccaggaaagccc

SEQ ID NO: 7812 - DNA, 20 bp, synthetic construct
  misc_feature 1..20: note = chemically synthesized
  source 1..20: mol_type = other DNA
agccctggctatacaaaaca

SEQ ID NO: 7813 - DNA, 20 bp, synthetic construct
  misc_feature 1..20: note = chemically synthesized
  source 1..20: mol_type = other DNA
cacccacgtgcctttgtgca

SEQ ID NO: 7814 - DNA, 20 bp, synthetic construct
  misc_feature 1..20: note = chemically synthesized
  source 1..20: mol_type = other DNA
tgcctttgtgcatggctgct

SEQ ID NO: 7815 - DNA, 20 bp, synthetic construct
  misc_feature 1..20: note = chemically synthesized
  source 1..20: mol_type = other DNA
cctttgtgcatggctgctta

SEQ ID NO: 7816 - DNA, 20 bp, synthetic construct
  misc_feature 1..20: note = chemically synthesized
  source 1..20: mol_type = other DNA
ctttgtgcatggctgcttag

SEQ ID NO: 7817 - DNA, 20 bp, synthetic construct
  misc_feature 1..20: note = chemically synthesized
  source 1..20: mol_type = other DNA
tttgtgcatggctgcttaga

SEQ ID NO: 7818 - DNA, 20 bp, synthetic construct
  misc_feature 1..20: note = chemically synthesized
  source 1..20: mol_type = other DNA
tgcttagagggctaatgata

SEQ ID NO: 7819 - DNA, 20 bp, synthetic construct
  misc_feature 1..20: note = chemically synthesized
  source 1..20: mol_type = other DNA
gcttagagggctaatgataa

SEQ ID NO: 7820 - DNA, 20 bp, synthetic construct
  misc_feature 1..20: note = chemically synthesized
  source 1..20: mol_type = other DNA
tagagggctaatgataaagg

SEQ ID NO: 7821 - DNA, 20 bp, synthetic construct
  misc_feature 1..20: note = chemically synthesized
  source 1..20: mol_type = other DNA
aatgataaaggcagctcact

SEQ ID NO: 7822 - DNA, 20 bp, synthetic construct
  misc_feature 1..20: note = chemically synthesized
  source 1..20: mol_type = other DNA
actaagaaaacgaccgtgcc

SEQ ID NO: 7823 - DNA, 20 bp, synthetic construct
  misc_feature 1..20: note = chemically synthesized
  source 1..20: mol_type = other DNA
aagaaaacgaccgtgcccag

SEQ ID NO: 7824 - DNA, 20 bp, synthetic construct
  misc_feature 1..20: note = chemically synthesized
  source 1..20: mol_type = other DNA
gtgcccagcagtctcctaaa

SEQ ID NO: 7825 - DNA, 20 bp, synthetic construct
  misc_feature 1..20: note = chemically synthesized
  source 1..20: mol_type = other DNA
cagcagtctcctaaatggcg

SEQ ID NO: 7826 - DNA, 20 bp, synthetic construct
  misc_feature 1..20: note = chemically synthesized
  source 1..20: mol_type = other DNA
agcagtctcctaaatggcga

SEQ ID NO: 7827 - DNA, 20 bp, synthetic construct
  misc_feature 1..20: note = chemically synthesized
  source 1..20: mol_type = other DNA
agtctcctaaatggcgaagg

SEQ ID NO: 7828 - DNA, 20 bp, synthetic construct
  misc_feature 1..20: note = chemically synthesized
  source 1..20: mol_type = other DNA
gcagcatttaccactgatga

SEQ ID NO: 7829 - DNA, 20 bp, synthetic construct
  misc_feature 1..20: note = chemically synthesized
  source 1..20: mol_type = other DNA
atatatatccatttttctgt

SEQ ID NO: 7830 - DNA, 20 bp, synthetic construct
  misc_feature 1..20: note = chemically synthesized
  source 1..20: mol_type = other DNA
caaataatgtctataatgct

SEQ ID NO: 7831 - DNA, 20 bp, synthetic construct
  misc_feature 1..20: note = chemically synthesized
  source 1..20: mol_type = other DNA
ataatgctgagatttataca

SEQ ID NO: 7832 - DNA, 20 bp, synthetic construct
  misc_feature 1..20: note = chemically synthesized
  source 1..20: mol_type = other DNA
taatgctgagatttatacat

SEQ ID NO: 7833 - DNA, 20 bp, synthetic construct
  misc_feature 1..20: note = chemically synthesized
  source 1..20: mol_type = other DNA
ttataaatgtgatttcatta

SEQ ID NO: 7834 - DNA, 20 bp, synthetic construct
  misc_feature 1..20: note = chemically synthesized
  source 1..20: mol_type = other DNA
gtaattaaattgctacctga

SEQ ID NO: 7835 - DNA, 20 bp, synthetic construct
  misc_feature 1..20: note = chemically synthesized
  source 1..20: mol_type = other DNA
tggcattatctaatttaact

SEQ ID NO: 7836 - DNA, 20 bp, synthetic construct
  misc_feature 1..20: note = chemically synthesized
  source 1..20: mol_type = other DNA
ggcattatctaatttaactt

SEQ ID NO: 7837 - DNA, 20 bp, synthetic construct
  misc_feature 1..20: note = chemically synthesized
  source 1..20: mol_type = other DNA
ttgggatccaaactattgaa

SEQ ID NO: 7838 - DNA, 20 bp, synthetic construct
  misc_feature 1..20: note = chemically synthesized
  source 1..20: mol_type = other DNA
gtgccttttaacaccctgac

SEQ ID NO: 7839 - DNA, 20 bp, synthetic construct
  misc_feature 1..20: note = chemically synthesized
  source 1..20: mol_type = other DNA
cttttaacaccctgactggt

SEQ ID NO: 7840 - DNA, 20 bp, synthetic construct
  misc_feature 1..20: note = chemically synthesized
  source 1..20: mol_type = other DNA
ttttaacaccctgactggta

SEQ ID NO: 7841 - DNA, 20 bp, synthetic construct
  misc_feature 1..20: note = chemically synthesized
  source 1..20: mol_type = other DNA
ctggtaaggcatgtgatgaa

SEQ ID NO: 7842 - DNA, 20 bp, synthetic construct
  misc_feature 1..20: note = chemically synthesized
  source 1..20: mol_type = other DNA
ggtaaggcatgtgatgaaca

SEQ ID NO: 7843 - DNA, 20 bp, synthetic construct
  misc_feature 1..20: note = chemically synthesized
  source 1..20: mol_type = other DNA
gaacagagctataaacatgt

SEQ ID NO: 7844 - DNA, 20 bp, synthetic construct
  misc_feature 1..20: note = chemically synthesized
  source 1..20: mol_type = other DNA
ataaacatgttggcgtaact

SEQ ID NO: 7845 - DNA, 20 bp, synthetic construct
  misc_feature 1..20: note = chemically synthesized
  source 1..20: mol_type = other DNA
tgagctgtttaaaaataaat

SEQ ID NO: 7846 - DNA, 20 bp, synthetic construct
  misc_feature 1..20: note = chemically synthesized
  source 1..20: mol_type = other DNA
tagcaaactataaaaataaa

SEQ ID NO: 7847 - DNA, 20 bp, synthetic construct
  misc_feature 1..20: note = chemically synthesized
  source 1..20: mol_type = other DNA
tgaaatactgtctttgacct

SEQ ID NO: 7848 - DNA, 20 bp, synthetic construct
  misc_feature 1..20: note = chemically synthesized
  source 1..20: mol_type = other DNA
ctttgaccttagtcataaac

SEQ ID NO: 7849 - DNA, 20 bp, synthetic construct
  misc_feature 1..20: note = chemically synthesized
  source 1..20: mol_type = other DNA
aaaaaaacataatatcccaa

SEQ ID NO: 7850 - DNA, 20 bp, synthetic construct
  misc_feature 1..20: note = chemically synthesized
  source 1..20: mol_type = other DNA
aaacataatatcccaacaga

SEQ ID NO: 7851 - DNA, 20 bp, synthetic construct
  misc_feature 1..20: note = chemically synthesized
  source 1..20: mol_type = other DNA
acataatatcccaacagaca

SEQ ID NO: 7852 - DNA, 20 bp, synthetic construct
  misc_feature 1..20: note = chemically synthesized
  source 1..20: mol_type = other DNA
cataatatcccaacagacag

SEQ ID NO: 7853 - DNA, 20 bp, synthetic construct
  misc_feature 1..20: note = chemically synthesized
  source 1..20: mol_type = other DNA
ataatatcccaacagacaga

SEQ ID NO: 7854 - DNA, 20 bp, synthetic construct
  misc_feature 1..20: note = chemically synthesized
  source 1..20: mol_type = other DNA
atcccaacagacagagggcc

SEQ ID NO: 7855 - DNA, 20 bp, synthetic construct
  misc_feature 1..20: note = chemically synthesized
  source 1..20: mol_type = other DNA
tcccaacagacagagggcca

SEQ ID NO: 7856 - DNA, 20 bp, synthetic construct
  misc_feature 1..20: note = chemically synthesized
  source 1..20: mol_type = other DNA
ccaaggattaaatgctcttc

SEQ ID NO: 7857 - DNA, 20 bp, synthetic construct
  misc_feature 1..20: note = chemically synthesized
  source 1..20: mol_type = other DNA
taaatgctcttctagctctg

SEQ ID NO: 7858 - DNA, 20 bp, synthetic construct
  misc_feature 1..20: note = chemically synthesized
  source 1..20: mol_type = other DNA
ttctagctctgcagaatgca

SEQ ID NO: 7859 - DNA, 20 bp, synthetic construct
  misc_feature 1..20: note = chemically synthesized
  source 1..20: mol_type = other DNA
agctctgcagaatgcaaagc

SEQ ID NO: 7860 - DNA, 20 bp, synthetic construct
  misc_feature 1..20: note = chemically synthesized
  source 1..20: mol_type = other DNA
tgcagaatgcaaagcaagac

SEQ ID NO: 7861 - DNA, 20 bp, synthetic construct
  misc_feature 1..20: note = chemically synthesized
  source 1..20: mol_type = other DNA
gcagaatgcaaagcaagaca

SEQ ID NO: 7862 - DNA, 20 bp, synthetic construct
  misc_feature 1..20: note = chemically synthesized
  source 1..20: mol_type = other DNA
gaatgcaaagcaagacaagg

SEQ ID NO: 7863 - DNA, 20 bp, synthetic construct
  misc_feature 1..20: note = chemically synthesized
  source 1..20: mol_type = other DNA
gcaaagcaagacaaggaaga

SEQ ID NO: 7864 - DNA, 20 bp, synthetic construct
  misc_feature 1..20: note = chemically synthesized
  source 1..20: mol_type = other DNA
caaagcaagacaaggaagaa

SEQ ID NO: 7865 - DNA, 20 bp, synthetic construct
  misc_feature 1..20: note = chemically synthesized
  source 1..20: mol_type = other DNA
agcaagacaaggaagaaagg

SEQ ID NO: 7866 - DNA, 20 bp, synthetic construct
  misc_feature 1..20: note = chemically synthesized
  source 1..20: mol_type = other DNA
gcaagacaaggaagaaagga

SEQ ID NO: 7867 - DNA, 20 bp, synthetic construct
  misc_feature 1..20: note = chemically synthesized
  source 1..20: mol_type = other DNA
agacaaggaagaaaggaagg

SEQ ID NO: 7868 - DNA, 20 bp, synthetic construct
  misc_feature 1..20: note = chemically synthesized
  source 1..20: mol_type = other DNA
gacaaggaagaaaggaagga

SEQ ID NO: 7869 - DNA, 20 bp, synthetic construct
  misc_feature 1..20: note = chemically synthesized
  source 1..20: mol_type = other DNA
aaggaagaaaggaaggaagg

SEQ ID NO: 7870 - DNA, 20 bp, synthetic construct
  misc_feature 1..20: note = chemically synthesized
  source 1..20: mol_type = other DNA
aggaagaaaggaaggaagga

SEQ ID NO: 7871 - DNA, 20 bp, synthetic construct
  misc_feature 1..20: note = chemically synthesized
  source 1..20: mol_type = other DNA
aagaaaggaaggaaggaagg

SEQ ID NO: 7872 - DNA, 20 bp, synthetic construct
  misc_feature 1..20: note = chemically synthesized
  source 1..20: mol_type = other DNA
agaaaggaaggaaggaagga

SEQ ID NO: 7873 - DNA, 20 bp, synthetic construct
  misc_feature 1..20: note = chemically synthesized
  source 1..20: mol_type = other DNA
aaggaaggaaggaaggaagg

SEQ ID NO: 7874 - DNA, 20 bp, synthetic construct
  misc_feature 1..20: note = chemically synthesized
  source 1..20: mol_type = other DNA
aggaaggaaggaaggaagga

SEQ ID NO: 7875 - DNA, 20 bp, synthetic construct
  misc_feature 1..20: note = chemically synthesized
  source 1..20: mol_type = other DNA
aaggaaggaaggaaggaagg

SEQ ID NO: 7876 - DNA, 20 bp, synthetic construct
  misc_feature 1..20: note = chemically synthesized
  source 1..20: mol_type = other DNA
aggaaggaaggaaggaagga

SEQ ID NO: 7877 - DNA, 20 bp, synthetic construct
  misc_feature 1..20: note = chemically synthesized
  source 1..20: mol_type = other DNA
ggaaggaaggaaggaaggaa

SEQ ID NO: 7878 - DNA, 20 bp, synthetic construct
  misc_feature 1..20: note = chemically synthesized
  source 1..20: mol_type = other DNA
aaggaaggaaggaaggaagg

SEQ ID NO: 7879 - DNA, 20 bp, synthetic construct
  misc_feature 1..20: note = chemically synthesized
  source 1..20: mol_type = other DNA
aggaaggaaggaaggaaggg

SEQ ID NO: 7880 - DNA, 20 bp, synthetic construct
  misc_feature 1..20: note = chemically synthesized
  source 1..20: mol_type = other DNA
ggaaggaaggaaggaaggga

SEQ ID NO: 7881 - DNA, 20 bp, synthetic construct
  misc_feature 1..20: note = chemically synthesized
  source 1..20: mol_type = other DNA
aaggaaggaaggaagggagg

SEQ ID NO: 7882 - DNA, 20 bp, synthetic construct
  misc_feature 1..20: note = chemically synthesized
  source 1..20: mol_type = other DNA
aggaaggaaggaagggaggg

SEQ ID NO: 7883 - DNA, 20 bp, synthetic construct
  misc_feature 1..20: note = chemically synthesized
  source 1..20: mol_type = other DNA
ggaaggaaggaagggaggga

SEQ ID NO: 7884 - DNA, 20 bp, synthetic construct
  misc_feature 1..20: note = chemically synthesized
  source 1..20: mol_type = other DNA
aaggaaggaagggagggagg

SEQ ID NO: 7885 - DNA, 20 bp, synthetic construct
  misc_feature 1..20: note = chemically synthesized
  source 1..20: mol_type = other DNA
aggaaggaagggagggaggg

SEQ ID NO: 7886 - DNA, 20 bp, synthetic construct
  misc_feature 1..20: note = chemically synthesized
  source 1..20: mol_type = other DNA
ggaaggaagggagggaggga

SEQ ID NO: 7887 - DNA, 20 bp, synthetic construct
  misc_feature 1..20: note = chemically synthesized
  source 1..20: mol_type = other DNA
gaaggaagggagggagggag

SEQ ID NO: 7888 - DNA, 20 bp, synthetic construct
  misc_feature 1..20: note = chemically synthesized
  source 1..20: mol_type = other DNA
aggaagggagggagggaggg

SEQ ID NO: 7889 - DNA, 20 bp, synthetic construct
  misc_feature 1..20: note = chemically synthesized
  source 1..20: mol_type = other DNA
ggaagggagggagggagggg

SEQ ID NO: 7890 - DNA, 20 bp, synthetic construct
  misc_feature 1..20: note = chemically synthesized
  source 1..20: mol_type = other DNA
gaagggagggagggagggga

SEQ ID NO: 7891 - DNA, 20 bp, synthetic construct
  misc_feature 1..20: note = chemically synthesized
  source 1..20: mol_type = other DNA
aagggagggagggaggggag

SEQ ID NO: 7892 - DNA, 20 bp, synthetic construct
  misc_feature 1..20: note = chemically synthesized
  source 1..20: mol_type = other DNA
gggagggagggaggggaggg

SEQ ID NO: 7893 - DNA, 20 bp, synthetic construct
  misc_feature 1..20: note = chemically synthesized
  source 1..20: mol_type = other DNA
ggagggagggaggggagggg

SEQ ID NO: 7894 - DNA, 20 bp, synthetic construct
  misc_feature 1..20: note = chemically synthesized
  source 1..20: mol_type = other DNA
gagggagggaggggagggga

SEQ ID NO: 7895 - DNA, 20 bp, synthetic construct
  misc_feature 1..20: note = chemically synthesized
  source 1..20: mol_type = other DNA
agggagggaggggaggggag

SEQ ID NO: 7896 - DNA, 20 bp, synthetic construct
  misc_feature 1..20: note = chemically synthesized
  source 1..20: mol_type = other DNA
ggagggaggggaggggaggg

SEQ ID NO: 7897 - DNA, 20 bp, synthetic construct
  misc_feature 1..20: note = chemically synthesized
  source 1..20: mol_type = other DNA
gagggaggggaggggagggg

SEQ ID NO: 7898 - DNA, 20 bp, synthetic construct
  misc_feature 1..20: note = chemically synthesized
  source 1..20: mol_type = other DNA
agggaggggaggggagggga

SEQ ID NO: 7899 - DNA, 20 bp, synthetic construct
  misc_feature 1..20: note = chemically synthesized
  source 1..20: mol_type = other DNA
gggaggggaggggaggggag

SEQ ID NO: 7900 - DNA, 20 bp, synthetic construct
  misc_feature 1..20: note = chemically synthesized
  source 1..20: mol_type = other DNA
gaggggaggggaggggaggg

SEQ ID NO: 7901 - DNA, 20 bp, synthetic construct
  misc_feature 1..20: note = chemically synthesized
  source 1..20: mol_type = other DNA
aggggaggggaggggagggg

SEQ ID NO: 7902 - DNA, 20 bp, synthetic construct
  misc_feature 1..20: note = chemically synthesized
  source 1..20: mol_type = other DNA
ggggaggggaggggagggga

SEQ ID NO: 7903 - DNA, 20 bp, synthetic construct
  misc_feature 1..20: note = chemically synthesized
  source 1..20: mol_type = other DNA
gggaggggaggggaggggag

SEQ ID NO: 7904 - DNA, 20 bp, synthetic construct
  misc_feature 1..20: note = chemically synthesized
  source 1..20: mol_type = other DNA
gaggggaggggaggggaggg

SEQ ID NO: 7905 - DNA, 20 bp, synthetic construct
  misc_feature 1..20: note = chemically synthesized
  source 1..20: mol_type = other DNA
aggggaggggaggggagggg

SEQ ID NO: 7906 - DNA, 20 bp, synthetic construct
  misc_feature 1..20: note = chemically synthesized
  source 1..20: mol_type = other DNA
ggggaggggaggggagggga

SEQ ID NO: 7907 - DNA, 20 bp, synthetic construct
  misc_feature 1..20: note = chemically synthesized
  source 1..20: mol_type = other DNA
gggaggggaggggaggggag

SEQ ID NO: 7908 - DNA, 20 bp, synthetic construct
  misc_feature 1..20: note = chemically synthesized
  source 1..20: mol_type = other DNA
gaggggaggggaggggaggg

SEQ ID NO: 7909 - DNA, 20 bp, synthetic construct
  misc_feature 1..20: note = chemically synthesized
  source 1..20: mol_type = other DNA
aggggaggggaggggagggg

SEQ ID NO: 7910 - DNA, 20 bp, synthetic construct
  misc_feature 1..20: note = chemically synthesized
  source 1..20: mol_type = other DNA
ggggaggggaggggagggga

SEQ ID NO: 7911 - DNA, 20 bp, synthetic construct
  misc_feature 1..20: note = chemically synthesized
  source 1..20: mol_type = other DNA
gggaggggaggggaggggag

SEQ ID NO: 7912 - DNA, 20 bp, synthetic construct
  misc_feature 1..20: note = chemically synthesized
  source 1..20: mol_type = other DNA
gaggggaggggaggggaggg

SEQ ID NO: 7913 - DNA, 20 bp, synthetic construct
  misc_feature 1..20: note = chemically synthesized
  source 1..20: mol_type = other DNA
aggggaggggaggggagggg

SEQ ID NO: 7914 - DNA, 20 bp, synthetic construct
  misc_feature 1..20: note = chemically synthesized
  source 1..20: mol_type = other DNA
ggggaggggaggggagggga

SEQ ID NO: 7915 - DNA, 20 bp, synthetic construct
  misc_feature 1..20: note = chemically synthesized
  source 1..20: mol_type = other DNA
gggaggggaggggaggggag

SEQ ID NO: 7916 - DNA, 20 bp, synthetic construct
  misc_feature 1..20: note = chemically synthesized
  source 1..20: mol_type = other DNA
gaggggaggggaggggaggg

SEQ ID NO: 7917 - DNA, 20 bp, synthetic construct
  misc_feature 1..20: note = chemically synthesized
  source 1..20: mol_type = other DNA
aggggaggggaggggagggg

SEQ ID NO: 7918 - DNA, 20 bp, synthetic construct
  misc_feature 1..20: note = chemically synthesized
  source 1..20: mol_type = other DNA
ggggaggggaggggagggga

SEQ ID NO: 7919 - DNA, 20 bp, synthetic construct
  misc_feature 1..20: note = chemically synthesized
  source 1..20: mol_type = other DNA
gggaggggaggggaggggag

SEQ ID NO: 7920 - DNA, 20 bp, synthetic construct
  misc_feature 1..20: note = chemically synthesized
  source 1..20: mol_type = other DNA
gaggggaggggaggggaggg

SEQ ID NO: 7921 - DNA, 20 bp, synthetic construct
  misc_feature 1..20: note = chemically synthesized
  source 1..20: mol_type = other DNA
aggggaggggaggggagggg

SEQ ID NO: 7922 - DNA, 20 bp, synthetic construct
  misc_feature 1..20: note = chemically synthesized
  source 1..20: mol_type = other DNA
ggggaggggaggggagggga

SEQ ID NO: 7923 - DNA, 20 bp, synthetic construct
  misc_feature 1..20: note = chemically synthesized
  source 1..20: mol_type = other DNA
gggaggggaggggaggggag

SEQ ID NO: 7924 - DNA, 20 bp, synthetic construct
  misc_feature 1..20: note = chemically synthesized
  source 1..20: mol_type = other DNA
gaggggaggggaggggaggg

SEQ ID NO: 7925 - DNA, 20 bp, synthetic construct
  misc_feature 1..20: note = chemically synthesized
  source 1..20: mol_type = other DNA
aggggaggggaggggagggg

SEQ ID NO: 7926 - DNA, 20 bp, synthetic construct
  misc_feature 1..20: note = chemically synthesized
  source 1..20: mol_type = other DNA
ggggaggggaggggagggga

SEQ ID NO: 7927 - DNA, 20 bp, synthetic construct
  misc_feature 1..20: note = chemically synthesized
  source 1..20: mol_type = other DNA
gggaggggaggggaggggag

SEQ ID NO: 7928 - DNA, 20 bp, synthetic construct
  misc_feature 1..20: note = chemically synthesized
  source 1..20: mol_type = other DNA
gaggggaggggaggggaggg

SEQ ID NO: 7929 - DNA, 20 bp, synthetic construct
  misc_feature 1..20: note = chemically synthesized
  source 1..20: mol_type = other DNA
aggggaggggaggggagggg

SEQ ID NO: 7930 - DNA, 20 bp, synthetic construct
  misc_feature 1..20: note = chemically synthesized
  source 1..20: mol_type = other DNA
ggggaggggaggggagggga

SEQ ID NO: 7931 - DNA, 20 bp, synthetic construct
  misc_feature 1..20: note = chemically synthesized
  source 1..20: mol_type = other DNA
gggaggggaggggaggggag

SEQ ID NO: 7932 - DNA, 20 bp, synthetic construct
  misc_feature 1..20: note = chemically synthesized
  source 1..20: mol_type = other DNA
gaggggaggggaggggaggg

SEQ ID NO: 7933 - DNA, 20 bp, synthetic construct
  misc_feature 1..20: note = chemically synthesized
  source 1..20: mol_type = other DNA
aggggaggggaggggagggg

SEQ ID NO: 7934 - DNA, 20 bp, synthetic construct
  misc_feature 1..20: note = chemically synthesized
  source 1..20: mol_type = other DNA
ggggaggggaggggagggga

SEQ ID NO: 7935 - DNA, 20 bp, synthetic construct
  misc_feature 1..20: note = chemically synthesized
  source 1..20: mol_type = other DNA
gggaggggaggggaggggag

SEQ ID NO: 7936 - DNA, 20 bp, synthetic construct
  misc_feature 1..20: note = chemically synthesized
  source 1..20: mol_type = other DNA
gaggggaggggaggggaggg

SEQ ID NO: 7937 - DNA, 20 bp, synthetic construct
  misc_feature 1..20: note = chemically synthesized
  source 1..20: mol_type = other DNA
aggggaggggaggggagggg

SEQ ID NO: 7938 - DNA, 20 bp, synthetic construct
  misc_feature 1..20: note = chemically synthesized
  source 1..20: mol_type = other DNA
ggggaggggaggggagggga

SEQ ID NO: 7939 - DNA, 20 bp, synthetic construct
  misc_feature 1..20: note = chemically synthesized
  source 1..20: mol_type = other DNA
gggaggggaggggaggggag

SEQ ID NO: 7940 - DNA, 20 bp, synthetic construct
  misc_feature 1..20: note = chemically synthesized
  source 1..20: mol_type = other DNA
gaggggaggggaggggaggg

SEQ ID NO: 7941 - DNA, 20 bp, synthetic construct
  misc_feature 1..20: note = chemically synthesized
  source 1..20: mol_type = other DNA
aggggaggggaggggagggg

SEQ ID NO: 7942 - DNA, 20 bp, synthetic construct
  misc_feature 1..20: note = chemically synthesized
  source 1..20: mol_type = other DNA
ggggaggggaggggagggga

SEQ ID NO: 7943 - DNA, 20 bp, synthetic construct
  misc_feature 1..20: note = chemically synthesized
  source 1..20: mol_type = other DNA
gggaggggaggggaggggag

SEQ ID NO: 7944 - DNA, 20 bp, synthetic construct
  misc_feature 1..20: note = chemically synthesized
  source 1..20: mol_type = other DNA
aggggaggggaggggagggg

SEQ ID NO: 7945 - DNA, 20 bp, synthetic construct
  misc_feature 1..20: note = chemically synthesized
  source 1..20: mol_type = other DNA
ggggaggggaggggagggga

SEQ ID NO: 7946 - DNA, 20 bp, synthetic construct
  misc_feature 1..20: note = chemically synthesized
  source 1..20: mol_type = other DNA
gggaggggaggggaggggaa

SEQ ID NO: 7947 - DNA, 20 bp, synthetic construct
  misc_feature 1..20: note = chemically synthesized
  source 1..20: mol_type = other DNA
aggggaggggaggggaaggg

SEQ ID NO: 7948 - DNA, 20 bp, synthetic construct
  misc_feature 1..20: note = chemically synthesized
  source 1..20: mol_type = other DNA
ggggaggggaggggaaggga

SEQ ID NO: 7949 - DNA, 20 bp, synthetic construct
  misc_feature 1..20: note = chemically synthesized
  source 1..20: mol_type = other DNA
gggaggggaggggaagggaa

SEQ ID NO: 7950 - DNA, 20 bp, synthetic construct
  misc_feature 1..20: note = chemically synthesized
  source 1..20: mol_type = other DNA
aggggaggggaagggaaggg

SEQ ID NO: 7951 - DNA, 20 bp, synthetic construct
  misc_feature 1..20: note = chemically synthesized
  source 1..20: mol_type = other DNA
ggggaggggaagggaaggga

SEQ ID NO: 7952 - DNA, 20 bp, synthetic construct
  misc_feature 1..20: note = chemically synthesized
  source 1..20: mol_type = other DNA
gggaggggaagggaagggaa

SEQ ID NO: 7953 - DNA, 20 bp, synthetic construct
  misc_feature 1..20: note = chemically synthesized
  source 1..20: mol_type = other DNA
aggggaagggaagggaaggg

SEQ ID NO: 7954 - DNA, 20 bp, synthetic construct
  misc_feature 1..20: note = chemically synthesized
  source 1..20: mol_type = other DNA
ggggaagggaagggaaggga

SEQ ID NO: 7955 - DNA, 20 bp, synthetic construct
  misc_feature 1..20: note = chemically synthesized
  source 1..20: mol_type = other DNA
gggaagggaagggaagggaa

SEQ ID NO: 7956 - DNA, 20 bp, synthetic construct
  misc_feature 1..20: note = chemically synthesized
  source 1..20: mol_type = other DNA
aagggaagggaagggaaggg

SEQ ID NO: 7957 - DNA, 20 bp, synthetic construct
  misc_feature 1..20: note = chemically synthesized
  source 1..20: mol_type = other DNA
agggaagggaagggaaggga

SEQ ID NO: 7958 - DNA, 20 bp, synthetic construct
  misc_feature 1..20: note = chemically synthesized
  source 1..20: mol_type = other DNA
gggaagggaagggaagggaa

SEQ ID NO: 7959 - DNA, 20 bp, synthetic construct
  misc_feature 1..20: note = chemically synthesized
  source 1..20: mol_type = other DNA
aagggaagggaagggaaggg

SEQ ID NO: 7960 - DNA, 20 bp, synthetic construct
  misc_feature 1..20: note = chemically synthesized
  source 1..20: mol_type = other DNA
agggaagggaagggaaggga

SEQ ID NO: 7961 - DNA, 20 bp, synthetic construct
  misc_feature 1..20: note = chemically synthesized
  source 1..20: mol_type = other DNA
gggaagggaagggaagggaa

SEQ ID NO: 7962 - DNA, 20 bp, synthetic construct
  misc_feature 1..20: note = chemically synthesized
  source 1..20: mol_type = other DNA
aagggaagggaagggaaggg

SEQ ID NO: 7963 - DNA, 20 bp, synthetic construct
  misc_feature 1..20: note = chemically synthesized
  source 1..20: mol_type = other DNA
agggaagggaagggaaggga

SEQ ID NO: 7964 - DNA, 20 bp, synthetic construct
  misc_feature 1..20: note = chemically synthesized
  source 1..20: mol_type = other DNA
gggaagggaagggaagggaa

SEQ ID NO: 7965 - DNA, 20 bp, synthetic construct
  misc_feature 1..20: note = chemically synthesized
  source 1..20: mol_type = other DNA
aagggaagggaagggaaggg

SEQ ID NO: 7966 - DNA, 20 bp, synthetic construct
  misc_feature 1..20: note = chemically synthesized
  source 1..20: mol_type = other DNA
agggaagggaagggaaggga

SEQ ID NO: 7967 - DNA, 20 bp, synthetic construct
  misc_feature 1..20: note = chemically synthesized
  source 1..20: mol_type = other DNA
gggaagggaagggaagggaa

SEQ ID NO: 7968 - DNA, 20 bp, synthetic construct
  misc_feature 1..20: note = chemically synthesized
  source 1..20: mol_type = other DNA
aagggaagggaagggaaggg

SEQ ID NO: 7969 - DNA, 20 bp, synthetic construct
  misc_feature 1..20: note = chemically synthesized
  source 1..20: mol_type = other DNA
agggaagggaagggaaggga

SEQ ID NO: 7970 - DNA, 20 bp, synthetic construct
  misc_feature 1..20: note = chemically synthesized
  source 1..20: mol_type = other DNA
gggaagggaagggaagggaa

SEQ ID NO: 7971 - DNA, 20 bp, synthetic construct
  misc_feature 1..20: note = chemically synthesized
  source 1..20: mol_type = other DNA
aagggaagggaagggaaggg

SEQ ID NO: 7972 - DNA, 20 bp, synthetic construct
  misc_feature 1..20: note = chemically synthesized
  source 1..20: mol_type = other DNA
agggaagggaagggaaggga

SEQ ID NO: 7973 - DNA, 20 bp, synthetic construct
  misc_feature 1..20: note = chemically synthesized
  source 1..20: mol_type = other DNA
gggaagggaagggaagggaa

SEQ ID NO: 7974 - DNA, 20 bp, synthetic construct
  misc_feature 1..20: note = chemically synthesized
  source 1..20: mol_type = other DNA
aagggaagggaagggaaggg

SEQ ID NO: 7975 - DNA, 20 bp, synthetic construct
  misc_feature 1..20: note = chemically synthesized
  source 1..20: mol_type = other DNA
agggaagggaagggaaggga

SEQ ID NO: 7976 - DNA, 20 bp, synthetic construct
  misc_feature 1..20: note = chemically synthesized
  source 1..20: mol_type = other DNA
gggaagggaagggaagggaa

SEQ ID NO: 7977 - DNA, 20 bp, synthetic construct
  misc_feature 1..20: note = chemically synthesized
  source 1..20: mol_type = other DNA
aagggaagggaagggaaggg

SEQ ID NO: 7978 - DNA, 20 bp, synthetic construct
  misc_feature 1..20: note = chemically synthesized
  source 1..20: mol_type = other DNA
agggaagggaagggaaggga

SEQ ID NO: 7979 - DNA, 20 bp, synthetic construct
  misc_feature 1..20: note = chemically synthesized
  source 1..20: mol_type = other DNA
gggaagggaagggaagggaa

SEQ ID NO: 7980 - DNA, 20 bp, synthetic construct
  misc_feature 1..20: note = chemically synthesized
  source 1..20: mol_type = other DNA
gaagggaagggaagggaagg

SEQ ID NO: 7981 - DNA, 20 bp, synthetic construct
  misc_feature 1..20: note = chemically synthesized
  source 1..20: mol_type = other DNA
aagggaagggaagggaaggg

SEQ ID NO: 7982 - DNA, 20 bp, synthetic construct
  misc_feature 1..20: note = chemically synthesized
  source 1..20: mol_type = other DNA
agggaagggaagggaaggga

SEQ ID NO: 7983 - DNA, 20 bp, synthetic construct
  misc_feature 1..20: note = chemically synthesized
  source 1..20: mol_type = other DNA
ggaagggaagggaagggagg

SEQ ID NO: 7984 - DNA, 20 bp, synthetic construct
  misc_feature 1..20: note = chemically synthesized
  source 1..20: mol_type = other DNA
gaagggaagggaagggaggg

SEQ ID NO: 7985 - DNA, 20 bp, synthetic construct
  misc_feature 1..20: note = chemically synthesized
  source 1..20: mol_type = other DNA
aagggaagggaagggaggga

SEQ ID NO: 7986 - DNA, 20 bp, synthetic construct
  misc_feature 1..20: note = chemically synthesized
  source 1..20: mol_type = other DNA
ggaagggaagggagggaggg

SEQ ID NO: 7987 - DNA, 20 bp, synthetic construct
  misc_feature 1..20: note = chemically synthesized
  source 1..20: mol_type = other DNA
gaagggaagggagggaggga

SEQ ID NO: 7988 - DNA, 20 bp, synthetic construct
  misc_feature 1..20: note = chemically synthesized
  source 1..20: mol_type = other DNA
agggaagggagggagggaag

SEQ ID NO: 7989 - DNA, 20 bp, synthetic construct
  misc_feature 1..20: note = chemically synthesized
  source 1..20: mol_type = other DNA
gggaagggagggagggaagg

SEQ ID NO: 7990 - DNA, 20 bp, synthetic construct
  misc_feature 1..20: note = chemically synthesized
  source 1..20: mol_type = other DNA
ggaagggagggagggaagga

SEQ ID NO: 7991 - DNA, 20 bp, synthetic construct
  misc_feature 1..20: note = chemically synthesized
  source 1..20: mol_type = other DNA
gggcccttgcctttcttgaa

SEQ ID NO: 7992 - DNA, 20 bp, synthetic construct
  misc_feature 1..20: note = chemically synthesized
  source 1..20: mol_type = other DNA
ccttgcctttcttgaaaagc

SEQ ID NO: 7993 - DNA, 20 bp, synthetic construct
  misc_feature 1..20: note = chemically synthesized
  source 1..20: mol_type = other DNA
aactgtgtccaaaacctaca

SEQ ID NO: 7994 - DNA, 20 bp, synthetic construct
  misc_feature 1..20: note = chemically synthesized
  source 1..20: mol_type = other DNA
attgtgctcttgttgacttg

SEQ ID NO: 7995 - DNA, 20 bp, synthetic construct
  misc_feature 1..20: note = chemically synthesized
  source 1..20: mol_type = other DNA
acttgaagctgcttccgttc

SEQ ID NO: 7996 - DNA, 20 bp, synthetic construct
  misc_feature 1..20: note = chemically synthesized
  source 1..20: mol_type = other DNA
gaagctgcttccgttcaagc

SEQ ID NO: 7997 - DNA, 20 bp, synthetic construct
  misc_feature 1..20: note = chemically synthesized
  source 1..20: mol_type = other DNA
tgcttccgttcaagccagaa

SEQ ID NO: 7998 - DNA, 20 bp, synthetic construct
  misc_feature 1..20: note = chemically synthesized
  source 1..20: mol_type = other DNA
agaaaagttaaaaccttgtg

SEQ ID NO: 7999 - DNA, 20 bp, synthetic construct
  misc_feature 1..20: note = chemically synthesized
  source 1..20: mol_type = other DNA
gtgaagtgcttttacatttt

SEQ ID NO: 8000 - DNA, 20 bp, synthetic construct
  misc_feature 1..20: note = chemically synthesized
  source 1..20: mol_type = other DNA
ttttacattttcagatgttt

SEQ ID NO: 8001 - DNA, 20 bp, synthetic construct
  misc_feature 1..20: note = chemically synthesized
  source 1..20: mol_type = other DNA
ttacattttcagatgttttg

SEQ ID NO: 8002 - DNA, 20 bp, synthetic construct
  misc_feature 1..20: note = chemically synthesized
  source 1..20: mol_type = other DNA
cagatgttttggagtctctc

SEQ ID NO: 8003 - DNA, 20 bp, synthetic construct
  misc_feature 1..20: note = chemically synthesized
  source 1..20: mol_type = other DNA
tttggagtctctcaagaaat

SEQ ID NO: 8004 - DNA, 20 bp, synthetic construct
  misc_feature 1..20: note = chemically synthesized
  source 1..20: mol_type = other DNA
ttggagtctctcaagaaatg

SEQ ID NO: 8005 - DNA, 20 bp, synthetic construct
  misc_feature 1..20: note = chemically synthesized
  source 1..20: mol_type = other DNA
agtctctcaagaaatgagga

SEQ ID NO: 8006 - DNA, 20 bp, synthetic construct
  misc_feature 1..20: note = chemically synthesized
  source 1..20: mol_type = other DNA
gtctctcaagaaatgaggac

SEQ ID NO: 8007 - DNA, 20 bp, synthetic construct
  misc_feature 1..20: note = chemically synthesized
  source 1..20: mol_type = other DNA
ctcaagaaatgaggacaggc

SEQ ID NO: 8008 - DNA, 20 bp, synthetic construct
  misc_feature 1..20: note = chemically synthesized
  source 1..20: mol_type = other DNA
tcaagaaatgaggacaggca

SEQ ID NO: 8009 - DNA, 20 bp, synthetic construct
  misc_feature 1..20: note = chemically synthesized
  source 1..20: mol_type = other DNA
caagaaatgaggacaggcaa

SEQ ID NO: 8010 - DNA, 20 bp, synthetic construct
  misc_feature 1..20: note = chemically synthesized
  source 1..20: mol_type = other DNA
aagaaatgaggacaggcaag

SEQ ID NO: 8011 - DNA, 20 bp, synthetic construct
  misc_feature 1..20: note = chemically synthesized
  source 1..20: mol_type = other DNA
aaatgaggacaggcaagggg

SEQ ID NO: 8012 - DNA, 20 bp, synthetic construct
  misc_feature 1..20: note = chemically synthesized
  source 1..20: mol_type = other DNA
ggaagaactgtttccacatg

SEQ ID NO: 8013 - DNA, 20 bp, synthetic construct
  misc_feature 1..20: note = chemically synthesized
  source 1..20: mol_type = other DNA
tccacatgcagctgtttcaa

SEQ ID NO: 8014 - DNA, 20 bp, synthetic construct
  misc_feature 1..20: note = chemically synthesized
  source 1..20: mol_type = other DNA
ttcaacagctcactgcataa

SEQ ID NO: 8015 - DNA, 20 bp, synthetic construct
  misc_feature 1..20: note = chemically synthesized
  source 1..20: mol_type = other DNA
caacagctcactgcataaca

SEQ ID NO: 8016 - DNA, 20 bp, synthetic construct
  misc_feature 1..20: note = chemically synthesized
  source 1..20: mol_type = other DNA
gcataacagagtctcttaca

SEQ ID NO: 8017 - DNA, 20 bp, synthetic construct
  misc_feature 1..20: note = chemically synthesized
  source 1..20: mol_type = other DNA
cataacagagtctcttacac

SEQ ID NO: 8018 - DNA, 20 bp, synthetic construct
  misc_feature 1..20: note = chemically synthesized
  source 1..20: mol_type = other DNA
ataacagagtctcttacaca

SEQ ID NO: 8019 - DNA, 20 bp, synthetic construct
  misc_feature 1..20: note = chemically synthesized
  source 1..20: mol_type = other DNA
acagggctgcctccgcacct

SEQ ID NO: 8020 - DNA, 20 bp, synthetic construct
  misc_feature 1..20: note = chemically synthesized
  source 1..20: mol_type = other DNA
gctgcctccgcacctgagct

SEQ ID NO: 8021 - DNA, 20 bp, synthetic construct
  misc_feature 1..20: note = chemically synthesized
  source 1..20: mol_type = other DNA
tgagctgagcttgctgtcct

SEQ ID NO: 8022 - DNA, 20 bp, synthetic construct
  misc_feature 1..20: note = chemically synthesized
  source 1..20: mol_type = other DNA
ctgagcttgctgtcctaagt

SEQ ID NO: 8023 - DNA, 20 bp, synthetic construct
  misc_feature 1..20: note = chemically synthesized
  source 1..20: mol_type = other DNA
ctaagtcggctactgcttct

SEQ ID NO: 8024 - DNA, 20 bp, synthetic construct
  misc_feature 1..20: note = chemically synthesized
  source 1..20: mol_type = other DNA
ggctactgcttctaagtccc

SEQ ID NO: 8025 - DNA, 20 bp, synthetic construct
  misc_feature 1..20: note = chemically synthesized
  source 1..20: mol_type = other DNA
tctaagtccccagcttttct

SEQ ID NO: 8026 - DNA, 20 bp, synthetic construct
  misc_feature 1..20: note = chemically synthesized
  source 1..20: mol_type = other DNA
cccagcttttctaagacata

SEQ ID NO: 8027 - DNA, 20 bp, synthetic construct
  misc_feature 1..20: note = chemically synthesized
  source 1..20: mol_type = other DNA
agcttttctaagacatatgg

SEQ ID NO: 8028 - DNA, 20 bp, synthetic construct
  misc_feature 1..20: note = chemically synthesized
  source 1..20: mol_type = other DNA
taagacatatggcagaaatg

SEQ ID NO: 8029 - DNA, 20 bp, synthetic construct
  misc_feature 1..20: note = chemically synthesized
  source 1..20: mol_type = other DNA
tgtggaaattgtcttccaaa

SEQ ID NO: 8030 - DNA, 20 bp, synthetic construct
  misc_feature 1..20: note = chemically synthesized
  source 1..20: mol_type = other DNA
aattgtcttccaaacagcac

SEQ ID NO: 8031 - DNA, 20 bp, synthetic construct
  misc_feature 1..20: note = chemically synthesized
  source 1..20: mol_type = other DNA
gtcttccaaacagcacaaga

SEQ ID NO: 8032 - DNA, 20 bp, synthetic construct
  misc_feature 1..20: note = chemically synthesized
  source 1..20: mol_type = other DNA
tccaaacagcacaagacaga

SEQ ID NO: 8033 - DNA, 20 bp, synthetic construct
  misc_feature 1..20: note = chemically synthesized
  source 1..20: mol_type = other DNA
aaacagcacaagacagaaag

SEQ ID NO: 8034 - DNA, 20 bp, synthetic construct
  misc_feature 1..20: note = chemically synthesized
  source 1..20: mol_type = other DNA
aacagcacaagacagaaagc

SEQ ID NO: 8035 - DNA, 20 bp, synthetic construct
  misc_feature 1..20: note = chemically synthesized
  source 1..20: mol_type = other DNA
agcacaagacagaaagcggg

SEQ ID NO: 8036 - DNA, 20 bp, synthetic construct
  misc_feature 1..20: note = chemically synthesized
  source 1..20: mol_type = other DNA
gcacaagacagaaagcgggt

SEQ ID NO: 8037 - DNA, 20 bp, synthetic construct
  misc_feature 1..20: note = chemically synthesized
  source 1..20: mol_type = other DNA
cacaagacagaaagcgggtg

SEQ ID NO: 8038 - DNA, 20 bp, synthetic construct
  misc_feature 1..20: note = chemically synthesized
  source 1..20: mol_type = other DNA
aagacagaaagcgggtgggg

SEQ ID NO: 8039 - DNA, 20 bp, synthetic construct
  misc_feature 1..20: note = chemically synthesized
  source 1..20: mol_type = other DNA
agacagaaagcgggtggggt

SEQ ID NO: 8040 - DNA, 20 bp, synthetic construct
  misc_feature 1..20: note = chemically synthesized
  source 1..20: mol_type = other DNA
gacagaaagcgggtggggtg

SEQ ID NO: 8041 - DNA, 20 bp, synthetic construct
  misc_feature 1..20: note = chemically synthesized
  source 1..20: mol_type = other DNA
acagaaagcgggtggggtgg

SEQ ID NO: 8042 - DNA, 20 bp, synthetic construct
  misc_feature 1..20: note = chemically synthesized
  source 1..20: mol_type = other DNA
cagaaagcgggtggggtggg

SEQ ID NO: 8043 - DNA, 20 bp, synthetic construct
  misc_feature 1..20: note = chemically synthesized
  source 1..20: mol_type = other DNA
gcgggtggggtggggggcga

SEQ ID NO: 8044 - DNA, 20 bp, synthetic construct
  misc_feature 1..20: note = chemically synthesized
  source 1..20: mol_type = other DNA
cgggtggggtggggggcgac

SEQ ID NO: 8045 - DNA, 20 bp, synthetic construct
  misc_feature 1..20: note = chemically synthesized
  source 1..20: mol_type = other DNA
ggggtggggggcgacgggtg

SEQ ID NO: 8046 - DNA, 20 bp, synthetic construct
  misc_feature 1..20: note = chemically synthesized
  source 1..20: mol_type = other DNA
gggtggggggcgacgggtgc

SEQ ID NO: 8047 - DNA, 20 bp, synthetic construct
  misc_feature 1..20: note = chemically synthesized
  source 1..20: mol_type = other DNA
ggtggggggcgacgggtgcg

SEQ ID NO: 8048 - DNA, 20 bp, synthetic construct
  misc_feature 1..20: note = chemically synthesized
  source 1..20: mol_type = other DNA
tggggggcgacgggtgcggg

SEQ ID NO: 8049 - DNA, 20 bp, synthetic construct
  misc_feature 1..20: note = chemically synthesized
  source 1..20: mol_type = other DNA
ggggcgacgggtgcggggag

SEQ ID NO: 8050 - DNA, 20 bp, synthetic construct
  misc_feature 1..20: note = chemically synthesized
  source 1..20: mol_type = other DNA
gggcgacgggtgcggggaga

SEQ ID NO: 8051 - DNA, 20 bp, synthetic construct
  misc_feature 1..20: note = chemically synthesized
  source 1..20: mol_type = other DNA
ggcgacgggtgcggggagaa

SEQ ID NO: 8052 - DNA, 20 bp, synthetic construct
  misc_feature 1..20: note = chemically synthesized
  source 1..20: mol_type = other DNA
gacgggtgcggggagaaggg

SEQ ID NO: 8053 - DNA, 20 bp, synthetic construct
  misc_feature 1..20: note = chemically synthesized
  source 1..20: mol_type = other DNA
gggtgcggggagaagggaag

SEQ ID NO: 8054 - DNA, 20 bp, synthetic construct
  misc_feature 1..20: note = chemically synthesized
  source 1..20: mol_type = other DNA
agaagggaagaagtaaaaac

SEQ ID NO: 8055 - DNA, 20 bp, synthetic construct
  misc_feature 1..20: note = chemically synthesized
  source 1..20: mol_type = other DNA
caagctgttgaaactgtata

SEQ ID NO: 8056 - DNA, 20 bp, synthetic construct
  misc_feature 1..20: note = chemically synthesized
  source 1..20: mol_type = other DNA
aagctgttgaaactgtatac

SEQ ID NO: 8057 - DNA, 20 bp, synthetic construct
  misc_feature 1..20: note = chemically synthesized
  source 1..20: mol_type = other DNA
gtatacaggacacgtcttca

SEQ ID NO: 8058 - DNA, 20 bp, synthetic construct
  misc_feature 1..20: note = chemically synthesized
  source 1..20: mol_type = other DNA
aatccaatgctcctgtaaca

SEQ ID NO: 8059 - DNA, 20 bp, synthetic construct
  misc_feature 1..20: note = chemically synthesized
  source 1..20: mol_type = other DNA
atccaatgctcctgtaacaa

SEQ ID NO: 8060 - DNA, 20 bp, synthetic construct
  misc_feature 1..20: note = chemically synthesized
  source 1..20: mol_type = other DNA
aatgctcctgtaacaaagga

SEQ ID NO: 8061 - DNA, 20 bp, synthetic construct
  misc_feature 1..20: note = chemically synthesized
  source 1..20: mol_type = other DNA
taacaaaggacagcatacta

SEQ ID NO: 8062 - DNA, 20 bp, synthetic construct
  misc_feature 1..20: note = chemically synthesized
  source 1..20: mol_type = other DNA
aacaaaggacagcatactat

SEQ ID NO: 8063 - DNA, 20 bp, synthetic construct
  misc_feature 1..20: note = chemically synthesized
  source 1..20: mol_type = other DNA
atactatgggataattacta

SEQ ID NO: 8064 - DNA, 20 bp, synthetic construct
  misc_feature 1..20: note = chemically synthesized
  source 1..20: mol_type = other DNA
attactatggattattatta

SEQ ID NO: 8065 - DNA, 20 bp, synthetic construct
  misc_feature 1..20: note = chemically synthesized
  source 1..20: mol_type = other DNA
gattattattacagtttcta

SEQ ID NO: 8066 - DNA, 20 bp, synthetic construct
  misc_feature 1..20: note = chemically synthesized
  source 1..20: mol_type = other DNA
tattacagtttctaaagcaa

SEQ ID NO: 8067 - DNA, 20 bp, synthetic construct
  misc_feature 1..20: note = chemically synthesized
  source 1..20: mol_type = other DNA
gaacaaaaaaaaattcacaa

SEQ ID NO: 8068 - DNA, 20 bp, synthetic construct
  misc_feature 1..20: note = chemically synthesized
  source 1..20: mol_type = other DNA
caaaagacatattacacacg

SEQ ID NO: 8069 - DNA, 20 bp, synthetic construct
  misc_feature 1..20: note = chemically synthesized
  source 1..20: mol_type = other DNA
attacacacgcagatttcta

SEQ ID NO: 8070 - DNA, 20 bp, synthetic construct
  misc_feature 1..20: note = chemically synthesized
  source 1..20: mol_type = other DNA
tctaaagctttaaaatcata

SEQ ID NO: 8071 - DNA, 20 bp, synthetic construct
  misc_feature 1..20: note = chemically synthesized
  source 1..20: mol_type = other DNA
ctttaaaatcatatggtctt

SEQ ID NO: 8072 - DNA, 20 bp, synthetic construct
  misc_feature 1..20: note = chemically synthesized
  source 1..20: mol_type = other DNA
aatcatatggtcttcggtgt

SEQ ID NO: 8073 - DNA, 20 bp, synthetic construct
  misc_feature 1..20: note = chemically synthesized
  source 1..20: mol_type = other DNA
gtcttcggtgttggttccta

SEQ ID NO: 8074 - DNA, 20 bp, synthetic construct
  misc_feature 1..20: note = chemically synthesized
  source 1..20: mol_type = other DNA
tcttcggtgttggttcctat

SEQ ID NO: 8075 - DNA, 20 bp, synthetic construct
  misc_feature 1..20: note = chemically synthesized
  source 1..20: mol_type = other DNA
cttcggtgttggttcctatg

SEQ ID NO: 8076 - DNA, 20 bp, synthetic construct
  misc_feature 1..20: note = chemically synthesized
  source 1..20: mol_type = other DNA
tgttggttcctatggggtta

SEQ ID NO: 8077 - DNA, 20 bp, synthetic construct
  misc_feature 1..20: note = chemically synthesized
  source 1..20: mol_type = other DNA
ttacggataatgccctaact

SEQ ID NO: 8078 - DNA, 20 bp, synthetic construct
  misc_feature 1..20: note = chemically synthesized
  source 1..20: mol_type = other DNA
aatgccctaactgagcacga

SEQ ID NO: 8079 - DNA, 20 bp, synthetic construct
  misc_feature 1..20: note = chemically synthesized
  source 1..20: mol_type = other DNA
cgacagatgcaaacacaaaa

SEQ ID NO: 8080 - DNA, 20 bp, synthetic construct
  misc_feature 1..20: note = chemically synthesized
  source 1..20: mol_type = other DNA
cctgaaattctctcatgtca

SEQ ID NO: 8081 - DNA, 20 bp, synthetic construct
  misc_feature 1..20: note = chemically synthesized
  source 1..20: mol_type = other DNA
gccctttctttcacaaacaa

SEQ ID NO: 8082 - DNA, 20 bp, synthetic construct
  misc_feature 1..20: note = chemically synthesized
  source 1..20: mol_type = other DNA
ctttctttcacaaacaaaag

SEQ ID NO: 8083 - DNA, 20 bp, synthetic construct
  misc_feature 1..20: note = chemically synthesized
  source 1..20: mol_type = other DNA
tttcacaaacaaaagtagtt

SEQ ID NO: 8084 - DNA, 20 bp, synthetic construct
  misc_feature 1..20: note = chemically synthesized
  source 1..20: mol_type = other DNA
aaacaaaagtagttgagcaa

SEQ ID NO: 8085 - DNA, 20 bp, synthetic construct
  misc_feature 1..20: note = chemically synthesized
  source 1..20: mol_type = other DNA
aaagtagttgagcaacagct

SEQ ID NO: 8086 - DNA, 20 bp, synthetic construct
  misc_feature 1..20: note = chemically synthesized
  source 1..20: mol_type = other DNA
gtagttgagcaacagctaag

SEQ ID NO: 8087 - DNA, 20 bp, synthetic construct
  misc_feature 1..20: note = chemically synthesized
  source 1..20: mol_type = other DNA
ctaagtagttattcatctca

SEQ ID NO: 8088 - DNA, 20 bp, synthetic construct
  misc_feature 1..20: note = chemically synthesized
  source 1..20: mol_type = other DNA
gaaccaacctaaaattctga

SEQ ID NO: 8089 - DNA, 20 bp, synthetic construct
  misc_feature 1..20: note = chemically synthesized
  source 1..20: mol_type = other DNA
aaccaacctaaaattctgac

SEQ ID NO: 8090 - DNA, 20 bp, synthetic construct
  misc_feature 1..20: note = chemically synthesized
  source 1..20: mol_type = other DNA
acctaaaattctgacaggcc

SEQ ID NO: 8091 - DNA, 20 bp, synthetic construct
  misc_feature 1..20: note = chemically synthesized
  source 1..20: mol_type = other DNA
caaattacacaaataaaaac

SEQ ID NO: 8092 - DNA, 20 bp, synthetic construct
  misc_feature 1..20: note = chemically synthesized
  source 1..20: mol_type = other DNA
aaattacacaaataaaaact

SEQ ID NO: 8093 - DNA, 20 bp, synthetic construct
  misc_feature 1..20: note = chemically synthesized
  source 1..20: mol_type = other DNA
attacacaaataaaaactag

SEQ ID NO: 8094 - DNA, 20 bp, synthetic construct
  misc_feature 1..20: note = chemically synthesized
  source 1..20: mol_type = other DNA
ttacacaaataaaaactagg

SEQ ID NO: 8095 - DNA, 20 bp, synthetic construct
  misc_feature 1..20: note = chemically synthesized
  source 1..20: mol_type = other DNA
cacaaataaaaactaggagg

SEQ ID NO: 8096 - DNA, 20 bp, synthetic construct
  misc_feature 1..20: note = chemically synthesized
  source 1..20: mol_type = other DNA
agctcaaactcatccacact

SEQ ID NO: 8097 - DNA, 20 bp, synthetic construct
  misc_feature 1..20: note = chemically synthesized
  source 1..20: mol_type = other DNA
aaactcatccacacttggtt

SEQ ID NO: 8098 - DNA, 20 bp, synthetic construct
  misc_feature 1..20: note = chemically synthesized
  source 1..20: mol_type = other DNA
aactcatccacacttggttc

SEQ ID NO: 8099 - DNA, 20 bp, synthetic construct
  misc_feature 1..20: note = chemically synthesized
  source 1..20: mol_type = other DNA
tccacacttggttcaggaca

SEQ ID NO: 8100 - DNA, 20 bp, synthetic construct
  misc_feature 1..20: note = chemically synthesized
  source 1..20: mol_type = other DNA
ccacacttggttcaggacac

SEQ ID NO: 8101 - DNA, 20 bp, synthetic construct
  misc_feature 1..20: note = chemically synthesized
  source 1..20: mol_type = other DNA
cacacttggttcaggacaca

SEQ ID NO: 8102 - DNA, 20 bp, synthetic construct
  misc_feature 1..20: note = chemically synthesized
  source 1..20: mol_type = other DNA
acttggttcaggacacaggg

SEQ ID NO: 8103 - DNA, 20 bp, synthetic construct
  misc_feature 1..20: note = chemically synthesized
  source 1..20: mol_type = other DNA
cttggttcaggacacaggga

SEQ ID NO: 8104 - DNA, 20 bp, synthetic construct
  misc_feature 1..20: note = chemically synthesized
  source 1..20: mol_type = other DNA
acagggaaggcctgatgtga

SEQ ID NO: 8105 - DNA, 20 bp, synthetic construct
  misc_feature 1..20: note = chemically synthesized
  source 1..20: mol_type = other DNA
agggaaggcctgatgtgaaa

SEQ ID NO: 8106 - DNA, 20 bp, synthetic construct
  misc_feature 1..20: note = chemically synthesized
  source 1..20: mol_type = other DNA
gggaaggcctgatgtgaaag

SEQ ID NO: 8107 - DNA, 20 bp, synthetic construct
  misc_feature 1..20: note = chemically synthesized
  source 1..20: mol_type = other DNA
gaaggcctgatgtgaaagag

SEQ ID NO: 8108 - DNA, 20 bp, synthetic construct
  misc_feature 1..20: note = chemically synthesized
  source 1..20: mol_type = other DNA
gcctgatgtgaaagaggaga

SEQ ID NO: 8109 - DNA, 20 bp, synthetic construct
  misc_feature 1..20: note = chemically synthesized
  source 1..20: mol_type = other DNA
ctgatgtgaaagaggagaca

SEQ ID NO: 8110 - DNA, 20 bp, synthetic construct
  misc_feature 1..20: note = chemically synthesized
  source 1..20: mol_type = other DNA
atgtgaaagaggagacagag

SEQ ID NO: 8111 - DNA, 20 bp, synthetic construct
  misc_feature 1..20: note = chemically synthesized
  source 1..20: mol_type = other DNA
gaggagacagagaagcttcc

SEQ ID NO: 8112 - DNA, 20 bp, synthetic construct
  misc_feature 1..20: note = chemically synthesized
  source 1..20: mol_type = other DNA
aggagacagagaagcttcct

SEQ ID NO: 8113 - DNA, 20 bp, synthetic construct
  misc_feature 1..20: note = chemically synthesized
  source 1..20: mol_type = other DNA
agagaagcttcctgggtgtg

SEQ ID NO: 8114 - DNA, 20 bp, synthetic construct
  misc_feature 1..20: note = chemically synthesized
  source 1..20: mol_type = other DNA
gggtgtgcagaattacaccc

SEQ ID NO: 8115 - DNA, 20 bp, synthetic construct
  misc_feature 1..20: note = chemically synthesized
  source 1..20: mol_type = other DNA
ggtgtgcagaattacacccc

SEQ ID NO: 8116 - DNA, 20 bp, synthetic construct
  misc_feature 1..20: note = chemically synthesized
  source 1..20: mol_type = other DNA
accccaggccacactccctg

SEQ ID NO: 8117 - DNA, 20 bp, synthetic construct
  misc_feature 1..20: note = chemically synthesized
  source 1..20: mol_type = other DNA
ccccaggccacactccctgc

SEQ ID NO: 8118 - DNA, 20 bp, synthetic construct
  misc_feature 1..20: note = chemically synthesized
  source 1..20: mol_type = other DNA
cccaggccacactccctgca

SEQ ID NO: 8119 - DNA, 20 bp, synthetic construct
  misc_feature 1..20: note = chemically synthesized
  source 1..20: mol_type = other DNA
ccaggccacactccctgcag

SEQ ID NO: 8120 - DNA, 20 bp, synthetic construct
  misc_feature 1..20: note = chemically synthesized
  source 1..20: mol_type = other DNA
cacactccctgcaggggcca

SEQ ID NO: 8121 - DNA, 20 bp, synthetic construct
  misc_feature 1..20: note = chemically synthesized
  source 1..20: mol_type = other DNA
acactccctgcaggggccac

SEQ ID NO: 8122 - DNA, 20 bp, synthetic construct
  misc_feature 1..20: note = chemically synthesized
  source 1..20: mol_type = other DNA
actccctgcaggggccacag

SEQ ID NO: 8123 - DNA, 20 bp, synthetic construct
  misc_feature 1..20: note = chemically synthesized
  source 1..20: mol_type = other DNA
cctgcaggggccacaggagc

SEQ ID NO: 8124 - DNA, 20 bp, synthetic construct
  misc_feature 1..20: note = chemically synthesized
  source 1..20: mol_type = other DNA
ggccacaggagcaagcactg

SEQ ID NO: 8125 - DNA, 20 bp, synthetic construct
  misc_feature 1..20: note = chemically synthesized
  source 1..20: mol_type = other DNA
acaggagcaagcactgcagc

SEQ ID NO: 8126 - DNA, 20 bp, synthetic construct
  misc_feature 1..20: note = chemically synthesized
  source 1..20: mol_type = other DNA
caggagcaagcactgcagcc

SEQ ID NO: 8127 - DNA, 20 bp, synthetic construct
  misc_feature 1..20: note = chemically synthesized
  source 1..20: mol_type = other DNA
agcactgcagccgggtccct

SEQ ID NO: 8128 - DNA, 20 bp, synthetic construct
  misc_feature 1..20: note = chemically synthesized
  source 1..20: mol_type = other DNA
gagtctgacttttacccaaa

SEQ ID NO: 8129 - DNA, 20 bp, synthetic construct
  misc_feature 1..20: note = chemically synthesized
  source 1..20: mol_type = other DNA
agtctgacttttacccaaac

SEQ ID NO: 8130 - DNA, 20 bp, synthetic construct
  misc_feature 1..20: note = chemically synthesized
  source 1..20: mol_type = other DNA
gtctgacttttacccaaaca

SEQ ID NO: 8131 - DNA, 20 bp, synthetic construct
  misc_feature 1..20: note = chemically synthesized
  source 1..20: mol_type = other DNA
tctgacttttacccaaacag

SEQ ID NO: 8132 - DNA, 20 bp, synthetic construct
  misc_feature 1..20: note = chemically synthesized
  source 1..20: mol_type = other DNA
ctgacttttacccaaacagg

SEQ ID NO: 8133 - DNA, 20 bp, synthetic construct
  misc_feature 1..20: note = chemically synthesized
  source 1..20: mol_type = other DNA
ttacccaaacagggggttgc

SEQ ID NO: 8134 - DNA, 20 bp, synthetic construct
  misc_feature 1..20: note = chemically synthesized
  source 1..20: mol_type = other DNA
agggggttgccagttgctgc

SEQ ID NO: 8135 - DNA, 20 bp, synthetic construct
  misc_feature 1..20: note = chemically synthesized
  source 1..20: mol_type = other DNA
tgctgcgagacaaatatccc

SEQ ID NO: 8136 - DNA, 20 bp, synthetic construct
  misc_feature 1..20: note = chemically synthesized
  source 1..20: mol_type = other DNA
aatatccctagcacattacc

SEQ ID NO: 8137 - DNA, 20 bp, synthetic construct
  misc_feature 1..20: note = chemically synthesized
  source 1..20: mol_type = other DNA
tccctagcacattacctagt

SEQ ID NO: 8138 - DNA, 20 bp, synthetic construct
  misc_feature 1..20: note = chemically synthesized
  source 1..20: mol_type = other DNA
agcacattacctagttggca

SEQ ID NO: 8139 - DNA, 20 bp, synthetic construct
  misc_feature 1..20: note = chemically synthesized
  source 1..20: mol_type = other DNA
gcacattacctagttggcaa

SEQ ID NO: 8140 - DNA, 20 bp, synthetic construct
  misc_feature 1..20: note = chemically synthesized
  source 1..20: mol_type = other DNA
agttggcaaaggaatgcaac

SEQ ID NO: 8141 - DNA, 20 bp, synthetic construct
  misc_feature 1..20: note = chemically synthesized
  source 1..20: mol_type = other DNA
gttggcaaaggaatgcaact

SEQ ID NO: 8142 - DNA, 20 bp, synthetic construct
  misc_feature 1..20: note = chemically synthesized
  source 1..20: mol_type = other DNA
tggcaaaggaatgcaactgg

SEQ ID NO: 8143 - DNA, 20 bp, synthetic construct
  misc_feature 1..20: note = chemically synthesized
  source 1..20: mol_type = other DNA
ggcaaaggaatgcaactggg

SEQ ID NO: 8144 - DNA, 20 bp, synthetic construct
  misc_feature 1..20: note = chemically synthesized
  source 1..20: mol_type = other DNA
ggaatgcaactgggaggttc

SEQ ID NO: 8145 - DNA, 20 bp, synthetic construct
  misc_feature 1..20: note = chemically synthesized
  source 1..20: mol_type = other DNA
gcaactgggaggttctggaa

SEQ ID NO: 8146 - DNA, 20 bp, synthetic construct
  misc_feature 1..20: note = chemically synthesized
  source 1..20: mol_type = other DNA
tgggaggttctggaatagca

SEQ ID NO: 8147 - DNA, 20 bp, synthetic construct
  misc_feature 1..20: note = chemically synthesized
  source 1..20: mol_type = other DNA
ggttctggaatagcacagtg

SEQ ID NO: 8148 - DNA, 20 bp, synthetic construct
  misc_feature 1..20: note = chemically synthesized
  source 1..20: mol_type = other DNA
agcacagtgtggaactgcac

SEQ ID NO: 8149 - DNA, 20 bp, synthetic construct
  misc_feature 1..20: note = chemically synthesized
  source 1..20: mol_type = other DNA
actggacttttcctgttctg

SEQ ID NO: 8150 - DNA, 20 bp, synthetic construct
  misc_feature 1..20: note = chemically synthesized
  source 1..20: mol_type = other DNA
tggacttttcctgttctgaa

SEQ ID NO: 8151 - DNA, 20 bp, synthetic construct
  misc_feature 1..20: note = chemically synthesized
  source 1..20: mol_type = other DNA
ggacttttcctgttctgaag

SEQ ID NO: 8152 - DNA, 20 bp, synthetic construct
  misc_feature 1..20: note = chemically synthesized
  source 1..20: mol_type = other DNA
aagaggactttgctttcctc

SEQ ID NO: 8153 - DNA, 20 bp, synthetic construct
  misc_feature 1..20: note = chemically synthesized
  source 1..20: mol_type = other DNA
agaggactttgctttcctcc

SEQ ID NO: 8154 - DNA, 20 bp, synthetic construct
  misc_feature 1..20: note = chemically synthesized
  source 1..20: mol_type = other DNA
ttgctttcctccgggatgta

SEQ ID NO: 8155 - DNA, 20 bp, synthetic construct
  misc_feature 1..20: note = chemically synthesized
  source 1..20: mol_type = other DNA
cctccgggatgtaaagcatt

SEQ ID NO: 8156 - DNA, 20 bp, synthetic construct
  misc_feature 1..20: note = chemically synthesized
  source 1..20: mol_type = other DNA
ccgggatgtaaagcatttgg

SEQ ID NO: 8157 - DNA, 20 bp, synthetic construct
  misc_feature 1..20: note = chemically synthesized
  source 1..20: mol_type = other DNA
cgggatgtaaagcatttggc

SEQ ID NO: 8158 - DNA, 20 bp, synthetic construct
  misc_feature 1..20: note = chemically synthesized
  source 1..20: mol_type = other DNA
tgtaaagcatttggcaggca

SEQ ID NO: 8159 - DNA, 20 bp, synthetic construct
  misc_feature 1..20: note = chemically synthesized
  source 1..20: mol_type = other DNA
gtaaagcatttggcaggcaa

SEQ ID NO: 8160 - DNA, 20 bp, synthetic construct
  misc_feature 1..20: note = chemically synthesized
  source 1..20: mol_type = other DNA
gcaaaggacaaaacttacct

SEQ ID NO: 8161 - DNA, 20 bp, synthetic construct
  misc_feature 1..20: note = chemically synthesized
  source 1..20: mol_type = other DNA
caaaggacaaaacttacctc

SEQ ID NO: 8162 - DNA, 20 bp, synthetic construct
  misc_feature 1..20: note = chemically synthesized
  source 1..20: mol_type = other DNA
aaaacttacctcaggtacta

SEQ ID NO: 8163 - DNA, 20 bp, synthetic construct
  misc_feature 1..20: note = chemically synthesized
  source 1..20: mol_type = other DNA
cctcaggtactatggcaaac

SEQ ID NO: 8164 - DNA, 20 bp, synthetic construct
  misc_feature 1..20: note = chemically synthesized
  source 1..20: mol_type = other DNA
gtactatggcaaactggcca

SEQ ID NO: 8165 - DNA, 20 bp, synthetic construct
  misc_feature 1..20: note = chemically synthesized
  source 1..20: mol_type = other DNA
actatggcaaactggccaaa

SEQ ID NO: 8166 - DNA, 20 bp, synthetic construct
  misc_feature 1..20: note = chemically synthesized
  source 1..20: mol_type = other DNA
atggcaaactggccaaagag

SEQ ID NO: 8167 - DNA, 20 bp, synthetic construct
  misc_feature 1..20: note = chemically synthesized
  source 1..20: mol_type = other DNA
tggccaaagagaagcgttgc

SEQ ID NO: 8168 - DNA, 20 bp, synthetic construct
  misc_feature 1..20: note = chemically synthesized
  source 1..20: mol_type = other DNA
ggccaaagagaagcgttgct

SEQ ID NO: 8169 - DNA, 20 bp, synthetic construct
  misc_feature 1..20: note = chemically synthesized
  source 1..20: mol_type = other DNA
ccaaagagaagcgttgctag

SEQ ID NO: 8170 - DNA, 20 bp, synthetic construct
  misc_feature 1..20: note = chemically synthesized
  source 1..20: mol_type = other DNA
gagaagcgttgctaggagaa

SEQ ID NO: 8171 - DNA, 20 bp, synthetic construct
  misc_feature 1..20: note = chemically synthesized
  source 1..20: mol_type = other DNA
cgttgctaggagaatggaca

SEQ ID NO: 8172 - DNA, 20 bp, synthetic construct
  misc_feature 1..20: note = chemically synthesized
  source 1..20: mol_type = other DNA
tgctaggagaatggacacgg

SEQ ID NO: 8173 - DNA, 20 bp, synthetic construct
  misc_feature 1..20: note = chemically synthesized
  source 1..20: mol_type = other DNA
gctaggagaatggacacggc

SEQ ID NO: 8174 - DNA, 20 bp, synthetic construct
  misc_feature 1..20: note = chemically synthesized
  source 1..20: mol_type = other DNA
agaatggacacggcaggaaa

SEQ ID NO: 8175 - DNA, 20 bp, synthetic construct
  misc_feature 1..20: note = chemically synthesized
  source 1..20: mol_type = other DNA
gacacggcaggaaacagcct

SEQ ID NO: 8176 - DNA, 20 bp, synthetic construct
  misc_feature 1..20: note = chemically synthesized
  source 1..20: mol_type = other DNA
ggcaggaaacagcctcagct

SEQ ID NO: 8177 - DNA, 20 bp, synthetic construct
  misc_feature 1..20: note = chemically synthesized
  source 1..20: mol_type = other DNA
gaaacagcctcagcttggcc

SEQ ID NO: 8178 - DNA, 20 bp, synthetic construct
  misc_feature 1..20: note = chemically synthesized
  source 1..20: mol_type = other DNA
aaacagcctcagcttggccc

SEQ ID NO: 8179 - DNA, 20 bp, synthetic construct
  misc_feature 1..20: note = chemically synthesized
  source 1..20: mol_type = other DNA
cagcctcagcttggcccagg

SEQ ID NO: 8180 - DNA, 20 bp, synthetic construct
  misc_feature 1..20: note = chemically synthesized
  source 1..20: mol_type = other DNA
cctcagcttggcccaggaag

SEQ ID NO: 8181 - DNA, 20 bp, synthetic construct
  misc_feature 1..20: note = chemically synthesized
  source 1..20: mol_type = other DNA
agcttggcccaggaagaagc

SEQ ID NO: 8182 - DNA, 20 bp, synthetic construct
  misc_feature 1..20: note = chemically synthesized
  source 1..20: mol_type = other DNA
cccaggaagaagctggcgct

SEQ ID NO: 8183 - DNA, 20 bp, synthetic construct
  misc_feature 1..20: note = chemically synthesized
  source 1..20: mol_type = other DNA
aagaagctggcgctcagcta

SEQ ID NO: 8184 - DNA, 20 bp, synthetic construct
  misc_feature 1..20: note = chemically synthesized
  source 1..20: mol_type = other DNA
agaagctggcgctcagctac

SEQ ID NO: 8185 - DNA, 20 bp, synthetic construct
  misc_feature 1..20: note = chemically synthesized
  source 1..20: mol_type = other DNA
gaagctggcgctcagctaca

SEQ ID NO: 8186 - DNA, 20 bp, synthetic construct
  misc_feature 1..20: note = chemically synthesized
  source 1..20: mol_type = other DNA
aagctggcgctcagctacag

SEQ ID NO: 8187 - DNA, 20 bp, synthetic construct
  misc_feature 1..20: note = chemically synthesized
  source 1..20: mol_type = other DNA
gcgctcagctacaggggccg

SEQ ID NO: 8188 - DNA, 20 bp, synthetic construct
  misc_feature 1..20: note = chemically synthesized
  source 1..20: mol_type = other DNA
cgctcagctacaggggccgt

SEQ ID NO: 8189 - DNA, 20 bp, synthetic construct
  misc_feature 1..20: note = chemically synthesized
  source 1..20: mol_type = other DNA
agctacaggggccgtgggaa

SEQ ID NO: 8190 - DNA, 20 bp, synthetic construct
  misc_feature 1..20: note = chemically synthesized
  source 1..20: mol_type = other DNA
acaggggccgtgggaatagc

SEQ ID NO: 8191 - DNA, 20 bp, synthetic construct
  misc_feature 1..20: note = chemically synthesized
  source 1..20: mol_type = other DNA
aggggccgtgggaatagctg

SEQ ID NO: 8192 - DNA, 20 bp, synthetic construct
  misc_feature 1..20: note = chemically synthesized
  source 1..20: mol_type = other DNA
ggggccgtgggaatagctgg

SEQ ID NO: 8193 - DNA, 20 bp, synthetic construct
  misc_feature 1..20: note = chemically synthesized
  source 1..20: mol_type = other DNA
ggaggcctgtgcatttccct

SEQ ID NO: 8194 - DNA, 20 bp, synthetic construct
  misc_feature 1..20: note = chemically synthesized
  source 1..20: mol_type = other DNA
gaggcctgtgcatttccctg

SEQ ID NO: 8195 - DNA, 20 bp, synthetic construct
  misc_feature 1..20: note = chemically synthesized
  source 1..20: mol_type = other DNA
aggcctgtgcatttccctga

SEQ ID NO: 8196 - DNA, 20 bp, synthetic construct
  misc_feature 1..20: note = chemically synthesized
  source 1..20: mol_type = other DNA
catttccctgagggtctcct

SEQ ID NO: 8197 - DNA, 20 bp, synthetic construct
  misc_feature 1..20: note = chemically synthesized
  source 1..20: mol_type = other DNA
cctgagggtctccttggcga

SEQ ID NO: 8198 - DNA, 20 bp, synthetic construct
  misc_feature 1..20: note = chemically synthesized
  source 1..20: mol_type = other DNA
ctgagggtctccttggcgac

SEQ ID NO: 8199 - DNA, 20 bp, synthetic construct
  misc_feature 1..20: note = chemically synthesized
  source 1..20: mol_type = other DNA
tgagggtctccttggcgaca

SEQ ID NO: 8200 - DNA, 20 bp, synthetic construct
  misc_feature 1..20: note = chemically synthesized
  source 1..20: mol_type = other DNA
ggtctccttggcgacagggc

SEQ ID NO: 8201 - DNA, 20 bp, synthetic construct
  misc_feature 1..20: note = chemically synthesized
  source 1..20: mol_type = other DNA
acagggctggacctttgcac

SEQ ID NO: 8202 - DNA, 20 bp, synthetic construct
  misc_feature 1..20: note = chemically synthesized
  source 1..20: mol_type = other DNA
gggctggacctttgcactgg

SEQ ID NO: 8203 - DNA, 20 bp, synthetic construct
  misc_feature 1..20: note = chemically synthesized
  source 1..20: mol_type = other DNA
ggacctttgcactggcagcc

SEQ ID NO: 8204 - DNA, 20 bp, synthetic construct
  misc_feature 1..20: note = chemically synthesized
  source 1..20: mol_type = other DNA
ggcagcctggactcttctct

SEQ ID NO: 8205 - DNA, 20 bp, synthetic construct
  misc_feature 1..20: note = chemically synthesized
  source 1..20: mol_type = other DNA
ctcttctctgagctccccct

SEQ ID NO: 8206 - DNA, 20 bp, synthetic construct
  misc_feature 1..20: note = chemically synthesized
  source 1..20: mol_type = other DNA
tcttctctgagctccccctt

SEQ ID NO: 8207 - DNA, 20 bp, synthetic construct
  misc_feature 1..20: note = chemically synthesized
  source 1..20: mol_type = other DNA
ccttgggttacctatgattc

SEQ ID NO: 8208 - DNA, 20 bp, synthetic construct
  misc_feature 1..20: note = chemically synthesized
  source 1..20: mol_type = other DNA
tgggttacctatgattccag

SEQ ID NO: 8209 - DNA, 20 bp, synthetic construct
  misc_feature 1..20: note = chemically synthesized
  source 1..20: mol_type = other DNA
ggttacctatgattccagaa

SEQ ID NO: 8210 - DNA, 20 bp, synthetic construct
  misc_feature 1..20: note = chemically synthesized
  source 1..20: mol_type = other DNA
agaagagtttgttctacatg

SEQ ID NO: 8211 - DNA, 20 bp, synthetic construct
  misc_feature 1..20: note = chemically synthesized
  source 1..20: mol_type = other DNA
agtttgttctacatgtggca

SEQ ID NO: 8212 - DNA, 20 bp, synthetic construct
  misc_feature 1..20: note = chemically synthesized
  source 1..20: mol_type = other DNA
tgttctacatgtggcaaagc

SEQ ID NO: 8213 - DNA, 20 bp, synthetic construct
  misc_feature 1..20: note = chemically synthesized
  source 1..20: mol_type = other DNA
atgtggcaaagccagcacca

SEQ ID NO: 8214 - DNA, 20 bp, synthetic construct
  misc_feature 1..20: note = chemically synthesized
  source 1..20: mol_type = other DNA
gtggcaaagccagcaccata

SEQ ID NO: 8215 - DNA, 20 bp, synthetic construct
  misc_feature 1..20: note = chemically synthesized
  source 1..20: mol_type = other DNA
tggcaaagccagcaccatag

SEQ ID NO: 8216 - DNA, 20 bp, synthetic construct
  misc_feature 1..20: note = chemically synthesized
  source 1..20: mol_type = other DNA
ggcaaagccagcaccataga

SEQ ID NO: 8217 - DNA, 20 bp, synthetic construct
  misc_feature 1..20: note = chemically synthesized
  source 1..20: mol_type = other DNA
gcaaagccagcaccatagag

SEQ ID NO: 8218 - DNA, 20 bp, synthetic construct
  misc_feature 1..20: note = chemically synthesized
  source 1..20: mol_type = other DNA
agccagcaccatagagggga

SEQ ID NO: 8219 - DNA, 20 bp, synthetic construct
  misc_feature 1..20: note = chemically synthesized
  source 1..20: mol_type = other DNA
ccagcaccatagaggggaca

SEQ ID NO: 8220 - DNA, 20 bp, synthetic construct
  misc_feature 1..20: note = chemically synthesized
  source 1..20: mol_type = other DNA
cagcaccatagaggggacag

SEQ ID NO: 8221 - DNA, 20 bp, synthetic construct
  misc_feature 1..20: note = chemically synthesized
  source 1..20: mol_type = other DNA
agcaccatagaggggacaga

SEQ ID NO: 8222 - DNA, 20 bp, synthetic construct
  misc_feature 1..20: note = chemically synthesized
  source 1..20: mol_type = other DNA
gaggggacagagggaaacct

SEQ ID NO: 8223 - DNA, 20 bp, synthetic construct
  misc_feature 1..20: note = chemically synthesized
  source 1..20: mol_type = other DNA
aggggacagagggaaaccta

SEQ ID NO: 8224 - DNA, 20 bp, synthetic construct
  misc_feature 1..20: note = chemically synthesized
  source 1..20: mol_type = other DNA
ggaaacctaaggcctacctt

SEQ ID NO: 8225 - DNA, 20 bp, synthetic construct
  misc_feature 1..20: note = chemically synthesized
  source 1..20: mol_type = other DNA
gaaacctaaggcctaccttg

SEQ ID NO: 8226 - DNA, 20 bp, synthetic construct
  misc_feature 1..20: note = chemically synthesized
  source 1..20: mol_type = other DNA
aaacctaaggcctaccttga

SEQ ID NO: 8227 - DNA, 20 bp, synthetic construct
  misc_feature 1..20: note = chemically synthesized
  source 1..20: mol_type = other DNA
cgccctacccactgctactt

SEQ ID NO: 8228 - DNA, 20 bp, synthetic construct
  misc_feature 1..20: note = chemically synthesized
  source 1..20: mol_type = other DNA
gccctacccactgctactta

SEQ ID NO: 8229 - DNA, 20 bp, synthetic construct
  misc_feature 1..20: note = chemically synthesized
  source 1..20: mol_type = other DNA
taaggtgtcttttgaatcct

SEQ ID NO: 8230 - DNA, 20 bp, synthetic construct
  misc_feature 1..20: note = chemically synthesized
  source 1..20: mol_type = other DNA
aaggtgtcttttgaatcctg

SEQ ID NO: 8231 - DNA, 20 bp, synthetic construct
  misc_feature 1..20: note = chemically synthesized
  source 1..20: mol_type = other DNA
tcttttgaatcctgaggacc

SEQ ID NO: 8232 - DNA, 20 bp, synthetic construct
  misc_feature 1..20: note = chemically synthesized
  source 1..20: mol_type = other DNA
cttttgaatcctgaggacca

SEQ ID NO: 8233 - DNA, 20 bp, synthetic construct
  misc_feature 1..20: note = chemically synthesized
  source 1..20: mol_type = other DNA
tttgaatcctgaggaccaag

SEQ ID NO: 8234 - DNA, 20 bp, synthetic construct
  misc_feature 1..20: note = chemically synthesized
  source 1..20: mol_type = other DNA
ccaaggagctctcctatgac

SEQ ID NO: 8235 - DNA, 20 bp, synthetic construct
  misc_feature 1..20: note = chemically synthesized
  source 1..20: mol_type = other DNA
caaggagctctcctatgaca

SEQ ID NO: 8236 - DNA, 20 bp, synthetic construct
  misc_feature 1..20: note = chemically synthesized
  source 1..20: mol_type = other DNA
tatgacaaggaacctgtcac

SEQ ID NO: 8237 - DNA, 20 bp, synthetic construct
  misc_feature 1..20: note = chemically synthesized
  source 1..20: mol_type = other DNA
tggttcttctgtgattgcta

SEQ ID NO: 8238 - DNA, 20 bp, synthetic construct
  misc_feature 1..20: note = chemically synthesized
  source 1..20: mol_type = other DNA
cttctgtgattgctaaagcc

SEQ ID NO: 8239 - DNA, 20 bp, synthetic construct
  misc_feature 1..20: note = chemically synthesized
  source 1..20: mol_type = other DNA
tctgtgattgctaaagccta

SEQ ID NO: 8240 - DNA, 20 bp, synthetic construct
  misc_feature 1..20: note = chemically synthesized
  source 1..20: mol_type = other DNA
ctgtgattgctaaagcctag

SEQ ID NO: 8241 - DNA, 20 bp, synthetic construct
  misc_feature 1..20: note = chemically synthesized
  source 1..20: mol_type = other DNA
agcctagaggacctcctcca

SEQ ID NO: 8242 - DNA, 20 bp, synthetic construct
  misc_feature 1..20: note = chemically synthesized
  source 1..20: mol_type = other DNA
agaggacctcctccaaagaa

SEQ ID NO: 8243 - DNA, 20 bp, synthetic construct
  misc_feature 1..20: note = chemically synthesized
  source 1..20: mol_type = other DNA
ggacctcctccaaagaaaag

SEQ ID NO: 8244 - DNA, 20 bp, synthetic construct
  misc_feature 1..20: note = chemically synthesized
  source 1..20: mol_type = other DNA
tcctccaaagaaaagtggct

SEQ ID NO: 8245 - DNA, 20 bp, synthetic construct
  misc_feature 1..20: note = chemically synthesized
  source 1..20: mol_type = other DNA
ccaaagaaaagtggctcaga

SEQ ID NO: 8246 - DNA, 20 bp, synthetic construct
  misc_feature 1..20: note = chemically synthesized
  source 1..20: mol_type = other DNA
cactgactcttatttctcat

SEQ ID NO: 8247 - DNA, 20 bp, synthetic construct
  misc_feature 1..20: note = chemically synthesized
  source 1..20: mol_type = other DNA
ctcatcagactccgaaatca

SEQ ID NO: 8248 - DNA, 20 bp, synthetic construct
  misc_feature 1..20: note = chemically synthesized
  source 1..20: mol_type = other DNA
tcatcagactccgaaatcac

SEQ ID NO: 8249 - DNA, 20 bp, synthetic construct
  misc_feature 1..20: note = chemically synthesized
  source 1..20: mol_type = other DNA
actccgaaatcacaggcttc

SEQ ID NO: 8250 - DNA, 20 bp, synthetic construct
  misc_feature 1..20: note = chemically synthesized
  source 1..20: mol_type = other DNA
aatcacaggcttctggtcta

SEQ ID NO: 8251 - DNA, 20 bp, synthetic construct
  misc_feature 1..20: note = chemically synthesized
  source 1..20: mol_type = other DNA
ggcttctggtctaaagattc

SEQ ID NO: 8252 - DNA, 20 bp, synthetic construct
  misc_feature 1..20: note = chemically synthesized
  source 1..20: mol_type = other DNA
ctggtctaaagattcaagct

SEQ ID NO: 8253 - DNA, 20 bp, synthetic construct
  misc_feature 1..20: note = chemically synthesized
  source 1..20: mol_type = other DNA
aaagattcaagctgagaaac

SEQ ID NO: 8254 - DNA, 20 bp, synthetic construct
  misc_feature 1..20: note = chemically synthesized
  source 1..20: mol_type = other DNA
attcaagctgagaaacaaga

SEQ ID NO: 8255 - DNA, 20 bp, synthetic construct
  misc_feature 1..20: note = chemically synthesized
  source 1..20: mol_type = other DNA
agaaagcaatttgtttgatt

SEQ ID NO: 8256 - DNA, 20 bp, synthetic construct
  misc_feature 1..20: note = chemically synthesized
  source 1..20: mol_type = other DNA
gaaagcaatttgtttgattc

SEQ ID NO: 8257 - DNA, 20 bp, synthetic construct
  misc_feature 1..20: note = chemically synthesized
  source 1..20: mol_type = other DNA
ttaccccccaataatttact

SEQ ID NO: 8258 - DNA, 20 bp, synthetic construct
  misc_feature 1..20: note = chemically synthesized
  source 1..20: mol_type = other DNA
cccaataatttacttggtct

SEQ ID NO: 8259 - DNA, 20 bp, synthetic construct
  misc_feature 1..20: note = chemically synthesized
  source 1..20: mol_type = other DNA
aatttacttggtctcagctt

SEQ ID NO: 8260 - DNA, 20 bp, synthetic construct
  misc_feature 1..20: note = chemically synthesized
  source 1..20: mol_type = other DNA
tacttggtctcagctttggc

SEQ ID NO: 8261 - DNA, 20 bp, synthetic construct
  misc_feature 1..20: note = chemically synthesized
  source 1..20: mol_type = other DNA
ggtctcagctttggctggct

SEQ ID NO: 8262 - DNA, 20 bp, synthetic construct
  misc_feature 1..20: note = chemically synthesized
  source 1..20: mol_type = other DNA
ttggctggcttggatgttat

SEQ ID NO: 8263 - DNA, 20 bp, synthetic construct
  misc_feature 1..20: note = chemically synthesized
  source 1..20: mol_type = other DNA
tggctggcttggatgttatg

SEQ ID NO: 8264 - DNA, 20 bp, synthetic construct
  misc_feature 1..20: note = chemically synthesized
  source 1..20: mol_type = other DNA
ttggatgttatgaggattcc

SEQ ID NO: 8265 - DNA, 20 bp, synthetic construct
  misc_feature 1..20: note = chemically synthesized
  source 1..20: mol_type = other DNA
gaatttttttacttttccat

SEQ ID NO: 8266 - DNA, 20 bp, synthetic construct
  misc_feature 1..20: note = chemically synthesized
  source 1..20: mol_type = other DNA
atttttttacttttccatta

SEQ ID NO: 8267 - DNA, 20 bp, synthetic construct
  misc_feature 1..20: note = chemically synthesized
  source 1..20: mol_type = other DNA
tttttttacttttccattag

SEQ ID NO: 8268 - DNA, 20 bp, synthetic construct
  misc_feature 1..20: note = chemically synthesized
  source 1..20: mol_type = other DNA
ttttttacttttccattaga

SEQ ID NO: 8269 - DNA, 20 bp, synthetic construct
  misc_feature 1..20: note = chemically synthesized
  source 1..20: mol_type = other DNA
gggctctgcactctcctttc

SEQ ID NO: 8270 - DNA, 20 bp, synthetic construct
  misc_feature 1..20: note = chemically synthesized
  source 1..20: mol_type = other DNA
ggctctgcactctcctttca

SEQ ID NO: 8271 - DNA, 20 bp, synthetic construct
  misc_feature 1..20: note = chemically synthesized
  source 1..20: mol_type = other DNA
gcactctcctttcaaggaaa

SEQ ID NO: 8272 - DNA, 20 bp, synthetic construct
  misc_feature 1..20: note = chemically synthesized
  source 1..20: mol_type = other DNA
cactctcctttcaaggaaaa

SEQ ID NO: 8273 - DNA, 20 bp, synthetic construct
  misc_feature 1..20: note = chemically synthesized
  source 1..20: mol_type = other DNA
aggaaaaaggctctatgtgc

SEQ ID NO: 8274 - DNA, 20 bp, synthetic construct
  misc_feature 1..20: note = chemically synthesized
  source 1..20: mol_type = other DNA
tgtgccagcccacttctttc

SEQ ID NO: 8275 - DNA, 20 bp, synthetic construct
  misc_feature 1..20: note = chemically synthesized
  source 1..20: mol_type = other DNA
agcccacttctttccagaaa

SEQ ID NO: 8276 - DNA, 20 bp, synthetic construct
  misc_feature 1..20: note = chemically synthesized
  source 1..20: mol_type = other DNA
gcccacttctttccagaaat

SEQ ID NO: 8277 - DNA, 20 bp, synthetic construct
  misc_feature 1..20: note = chemically synthesized
  source 1..20: mol_type = other DNA
cccacttctttccagaaatg

SEQ ID NO: 8278 - DNA, 20 bp, synthetic construct
  misc_feature 1..20: note = chemically synthesized
  source 1..20: mol_type = other DNA
cttctttccagaaatgggga

SEQ ID NO: 8279 - DNA, 20 bp, synthetic construct
  misc_feature 1..20: note = chemically synthesized
  source 1..20: mol_type = other DNA
ttctttccagaaatggggaa

SEQ ID NO: 8280 - DNA, 20 bp, synthetic construct
  misc_feature 1..20: note = chemically synthesized
  source 1..20: mol_type = other DNA
tctttccagaaatggggaaa

SEQ ID NO: 8281 - DNA, 20 bp, synthetic construct
  misc_feature 1..20: note = chemically synthesized
  source 1..20: mol_type = other DNA
tttccagaaatggggaaagg

SEQ ID NO: 8282 - DNA, 20 bp, synthetic construct
  misc_feature 1..20: note = chemically synthesized
  source 1..20: mol_type = other DNA
ttccagaaatggggaaaggg

SEQ ID NO: 8283 - DNA, 20 bp, synthetic construct
  misc_feature 1..20: note = chemically synthesized
  source 1..20: mol_type = other DNA
ccagaaatggggaaagggag

SEQ ID NO: 8284 - DNA, 20 bp, synthetic construct
  misc_feature 1..20: note = chemically synthesized
  source 1..20: mol_type = other DNA
cagaaatggggaaagggagg

SEQ ID NO: 8285 - DNA, 20 bp, synthetic construct
  misc_feature 1..20: note = chemically synthesized
  source 1..20: mol_type = other DNA
gaaatggggaaagggaggag

SEQ ID NO: 8286 - DNA, 20 bp, synthetic construct
  misc_feature 1..20: note = chemically synthesized
  source 1..20: mol_type = other DNA
aaagggaggaggagaacctg

SEQ ID NO: 8287 - DNA, 20 bp, synthetic construct
  misc_feature 1..20: note = chemically synthesized
  source 1..20: mol_type = other DNA
gaggaggagaacctgtggaa

SEQ ID NO: 8288 - DNA, 20 bp, synthetic construct
  misc_feature 1..20: note = chemically synthesized
  source 1..20: mol_type = other DNA
ggaggagaacctgtggaaaa

SEQ ID NO: 8289 - DNA, 20 bp, synthetic construct
  misc_feature 1..20: note = chemically synthesized
  source 1..20: mol_type = other DNA
gaggagaacctgtggaaaag

SEQ ID NO: 8290 - DNA, 20 bp, synthetic construct
  misc_feature 1..20: note = chemically synthesized
  source 1..20: mol_type = other DNA
acctgtggaaaagaggacaa

SEQ ID NO: 8291 - DNA, 20 bp, synthetic construct
  misc_feature 1..20: note = chemically synthesized
  source 1..20: mol_type = other DNA
aaaagaggacaacggatttc

SEQ ID NO: 8292 - DNA, 20 bp, synthetic construct
  misc_feature 1..20: note = chemically synthesized
  source 1..20: mol_type = other DNA
agaggacaacggatttccgg

SEQ ID NO: 8293 - DNA, 20 bp, synthetic construct
  misc_feature 1..20: note = chemically synthesized
  source 1..20: mol_type = other DNA
ggatttccggaagaaattcc

SEQ ID NO: 8294 - DNA, 20 bp, synthetic construct
  misc_feature 1..20: note = chemically synthesized
  source 1..20: mol_type = other DNA
ttccggaagaaattccaagc

SEQ ID NO: 8295 - DNA, 20 bp, synthetic construct
  misc_feature 1..20: note = chemically synthesized
  source 1..20: mol_type = other DNA
tccggaagaaattccaagcc

SEQ ID NO: 8296 - DNA, 20 bp, synthetic construct
  misc_feature 1..20: note = chemically synthesized
  source 1..20: mol_type = other DNA
ccggaagaaattccaagcca

SEQ ID NO: 8297 - DNA, 20 bp, synthetic construct
  misc_feature 1..20: note = chemically synthesized
  source 1..20: mol_type = other DNA
cggaagaaattccaagccag

SEQ ID NO: 8298 - DNA, 20 bp, synthetic construct
  misc_feature 1..20: note = chemically synthesized
  source 1..20: mol_type = other DNA
tccaagccaggggctaaccg

SEQ ID NO: 8299 - DNA, 20 bp, synthetic construct
  misc_feature 1..20: note = chemically synthesized
  source 1..20: mol_type = other DNA
caggggctaaccgtggacct

SEQ ID NO: 8300 - DNA, 20 bp, synthetic construct
  misc_feature 1..20: note = chemically synthesized
  source 1..20: mol_type = other DNA
gctaaccgtggacctgagca

SEQ ID NO: 8301 - DNA, 20 bp, synthetic construct
  misc_feature 1..20: note = chemically synthesized
  source 1..20: mol_type = other DNA
aaccgtggacctgagcacag

SEQ ID NO: 8302 - DNA, 20 bp, synthetic construct
  misc_feature 1..20: note = chemically synthesized
  source 1..20: mol_type = other DNA
ccgtggacctgagcacagca

SEQ ID NO: 8303 - DNA, 20 bp, synthetic construct
  misc_feature 1..20: note = chemically synthesized
  source 1..20: mol_type = other DNA
ctgagcacagcagagccaca

SEQ ID NO: 8304 - DNA, 20 bp, synthetic construct
  misc_feature 1..20: note = chemically synthesized
  source 1..20: mol_type = other DNA
gcagagccacacggacgtct

SEQ ID NO: 8305 - DNA, 20 bp, synthetic construct
  misc_feature 1..20: note = chemically synthesized
  source 1..20: mol_type = other DNA
cacacggacgtctcagaaaa

SEQ ID NO: 8306 - DNA, 20 bp, synthetic construct
  misc_feature 1..20: note = chemically synthesized
  source 1..20: mol_type = other DNA
cgtctcagaaaacggttctg

SEQ ID NO: 8307 - DNA, 20 bp, synthetic construct
  misc_feature 1..20: note = chemically synthesized
  source 1..20: mol_type = other DNA
ctcagaaaacggttctgtgg

SEQ ID NO: 8308 - DNA, 20 bp, synthetic construct
  misc_feature 1..20: note = chemically synthesized
  source 1..20: mol_type = other DNA
aaacggttctgtggaagcac

SEQ ID NO: 8309 - DNA, 20 bp, synthetic construct
  misc_feature 1..20: note = chemically synthesized
  source 1..20: mol_type = other DNA
ctgtggaagcacaagacacg

SEQ ID NO: 8310 - DNA, 20 bp, synthetic construct
  misc_feature 1..20: note = chemically synthesized
  source 1..20: mol_type = other DNA
tggaagcacaagacacgtgg

SEQ ID NO: 8311 - DNA, 20 bp, synthetic construct
  misc_feature 1..20: note = chemically synthesized
  source 1..20: mol_type = other DNA
agcacaagacacgtggcagt

SEQ ID NO: 8312 - DNA, 20 bp, synthetic construct
  misc_feature 1..20: note = chemically synthesized
  source 1..20: mol_type = other DNA
cacaagacacgtggcagtga

SEQ ID NO: 8313 - DNA, 20 bp, synthetic construct
  misc_feature 1..20: note = chemically synthesized
  source 1..20: mol_type = other DNA
cacgtggcagtgagagtcct

SEQ ID NO: 8314 - DNA, 20 bp, synthetic construct
  misc_feature 1..20: note = chemically synthesized
  source 1..20: mol_type = other DNA
gtggcagtgagagtcctgag

SEQ ID NO: 8315 - DNA, 20 bp, synthetic construct
  misc_feature 1..20: note = chemically synthesized
  source 1..20: mol_type = other DNA
agtgagagtcctgagaagtc

SEQ ID NO: 8316 - DNA, 20 bp, synthetic construct
  misc_feature 1..20: note = chemically synthesized
  source 1..20: mol_type = other DNA
gtgagagtcctgagaagtcc

SEQ ID NO: 8317 - DNA, 20 bp, synthetic construct
  misc_feature 1..20: note = chemically synthesized
  source 1..20: mol_type = other DNA
agtcctgagaagtccaggaa

SEQ ID NO: 8318 - DNA, 20 bp, synthetic construct
  misc_feature 1..20: note = chemically synthesized
  source 1..20: mol_type = other DNA
gagaagtccaggaaaagatg

SEQ ID NO: 8319 - DNA, 20 bp, synthetic construct
  misc_feature 1..20: note = chemically synthesized
  source 1..20: mol_type = other DNA
tcctaaatatcaccaattaa

SEQ ID NO: 8320 - DNA, 20 bp, synthetic construct
  misc_feature 1..20: note = chemically synthesized
  source 1..20: mol_type = other DNA
taaatatcaccaattaacag

SEQ ID NO: 8321 - DNA, 20 bp, synthetic construct
  misc_feature 1..20: note = chemically synthesized
  source 1..20: mol_type = other DNA
accaattaacagcagctcga

SEQ ID NO: 8322 - DNA, 20 bp, synthetic construct
  misc_feature 1..20: note = chemically synthesized
  source 1..20: mol_type = other DNA
agcagctcgatggtctacct

SEQ ID NO: 8323 - DNA, 20 bp, synthetic construct
  misc_feature 1..20: note = chemically synthesized
  source 1..20: mol_type = other DNA
cgatggtctacctgagacct

SEQ ID NO: 8324 - DNA, 20 bp, synthetic construct
  misc_feature 1..20: note = chemically synthesized
  source 1..20: mol_type = other DNA
gagacctgagaaaacaaacg

SEQ ID NO: 8325 - DNA, 20 bp, synthetic construct
  misc_feature 1..20: note = chemically synthesized
  source 1..20: mol_type = other DNA
agacctgagaaaacaaacga

SEQ ID NO: 8326 - DNA, 20 bp, synthetic construct
  misc_feature 1..20: note = chemically synthesized
  source 1..20: mol_type = other DNA
gacctgagaaaacaaacgaa

SEQ ID NO: 8327 - DNA, 20 bp, synthetic construct
  misc_feature 1..20: note = chemically synthesized
  source 1..20: mol_type = other DNA
tgagaaaacaaacgaaggga

SEQ ID NO: 8328 - DNA, 20 bp, synthetic construct
  misc_feature 1..20: note = chemically synthesized
  source 1..20: mol_type = other DNA
aaacgaagggaaagaaatgc

SEQ ID NO: 8329 - DNA, 20 bp, synthetic construct
  misc_feature 1..20: note = chemically synthesized
  source 1..20: mol_type = other DNA
ggaaagaaatgcaagaaaca

SEQ ID NO: 8330 - DNA, 20 bp, synthetic construct
  misc_feature 1..20: note = chemically synthesized
  source 1..20: mol_type = other DNA
agaaacaaagcgcatctttc

SEQ ID NO: 8331 - DNA, 20 bp, synthetic construct
  misc_feature 1..20: note = chemically synthesized
  source 1..20: mol_type = other DNA
agcgcatctttctggatcaa

SEQ ID NO: 8332 - DNA, 20 bp, synthetic construct
  misc_feature 1..20: note = chemically synthesized
  source 1..20: mol_type = other DNA
tctttctggatcaaaagatc

SEQ ID NO: 8333 - DNA, 20 bp, synthetic construct
  misc_feature 1..20: note = chemically synthesized
  source 1..20: mol_type = other DNA
tcaaaagatcaagttgtctt

SEQ ID NO: 8334 - DNA, 20 bp, synthetic construct
  misc_feature 1..20: note = chemically synthesized
  source 1..20: mol_type = other DNA
aaagatcaagttgtctttgg

SEQ ID NO: 8335 - DNA, 20 bp, synthetic construct
  misc_feature 1..20: note = chemically synthesized
  source 1..20: mol_type = other DNA
caagttgtctttggtagcta

SEQ ID NO: 8336 - DNA, 20 bp, synthetic construct
  misc_feature 1..20: note = chemically synthesized
  source 1..20: mol_type = other DNA
ctttggtagctaaagaacaa

SEQ ID NO: 8337 - DNA, 20 bp, synthetic construct
  misc_feature 1..20: note = chemically synthesized
  source 1..20: mol_type = other DNA
ttggtagctaaagaacaaca

SEQ ID NO: 8338 - DNA, 20 bp, synthetic construct
  misc_feature 1..20: note = chemically synthesized
  source 1..20: mol_type = other DNA
gtagctaaagaacaacagag

SEQ ID NO: 8339 - DNA, 20 bp, synthetic construct
  misc_feature 1..20: note = chemically synthesized
  source 1..20: mol_type = other DNA
tagctaaagaacaacagaga

SEQ ID NO: 8340 - DNA, 20 bp, synthetic construct
  misc_feature 1..20: note = chemically synthesized
  source 1..20: mol_type = other DNA
aagaacaacagagaaggaaa

SEQ ID NO: 8341 - DNA, 20 bp, synthetic construct
  misc_feature 1..20: note = chemically synthesized
  source 1..20: mol_type = other DNA
agagaaggaaaaagaacaaa

SEQ ID NO: 8342 - DNA, 20 bp, synthetic construct
  misc_feature 1..20: note = chemically synthesized
  source 1..20: mol_type = other DNA
aggaaaaagaacaaaaagat

SEQ ID NO: 8343 - DNA, 20 bp, synthetic construct
  misc_feature 1..20: note = chemically synthesized
  source 1..20: mol_type = other DNA
ggaaaaagaacaaaaagatt

SEQ ID NO: 8344 - DNA, 20 bp, synthetic construct
  misc_feature 1..20: note = chemically synthesized
  source 1..20: mol_type = other DNA
aaaaagaacaaaaagattag

SEQ ID NO: 8345 - DNA, 20 bp, synthetic construct
  misc_feature 1..20: note = chemically synthesized
  source 1..20: mol_type = other DNA
aaaagaacaaaaagattagg

SEQ ID NO: 8346 - DNA, 20 bp, synthetic construct
  misc_feature 1..20: note = chemically synthesized
  source 1..20: mol_type = other DNA
aagaacaaaaagattaggag

SEQ ID NO: 8347 - DNA, 20 bp, synthetic construct
  misc_feature 1..20: note = chemically synthesized
  source 1..20: mol_type = other DNA
agaacaaaaagattaggagg

SEQ ID NO: 8348 - DNA, 20 bp, synthetic construct
  misc_feature 1..20: note = chemically synthesized
  source 1..20: mol_type = other DNA
aacaaaaagattaggaggag

SEQ ID NO: 8349 - DNA, 20 bp, synthetic construct
  misc_feature 1..20: note = chemically synthesized
  source 1..20: mol_type = other DNA
aggaggaggagaaaaacacc

SEQ ID NO: 8350 - DNA, 20 bp, synthetic construct
  misc_feature 1..20: note = chemically synthesized
  source 1..20: mol_type = other DNA
aaaacacctggccctcccca

SEQ ID NO: 8351 - DNA, 20 bp, synthetic construct
  misc_feature 1..20: note = chemically synthesized
  source 1..20: mol_type = other DNA
gaactcgacttaaatcatct

SEQ ID NO: 8352 - DNA, 20 bp, synthetic construct
  misc_feature 1..20: note = chemically synthesized
  source 1..20: mol_type = other DNA
gacttaaatcatctcagcta

SEQ ID NO: 8353 - DNA, 20 bp, synthetic construct
  misc_feature 1..20: note = chemically synthesized
  source 1..20: mol_type = other DNA
acttaaatcatctcagctat

SEQ ID NO: 8354 - DNA, 20 bp, synthetic construct
  misc_feature 1..20: note = chemically synthesized
  source 1..20: mol_type = other DNA
taaatcatctcagctatagg

SEQ ID NO: 8355 - DNA, 20 bp, synthetic construct
  misc_feature 1..20: note = chemically synthesized
  source 1..20: mol_type = other DNA
ctcagctataggcagtcaac

SEQ ID NO: 8356 - DNA, 20 bp, synthetic construct
  misc_feature 1..20: note = chemically synthesized
  source 1..20: mol_type = other DNA
tcagctataggcagtcaact

SEQ ID NO: 8357 - DNA, 20 bp, synthetic construct
  misc_feature 1..20: note = chemically synthesized
  source 1..20: mol_type = other DNA
cagctataggcagtcaactg

SEQ ID NO: 8358 - DNA, 20 bp, synthetic construct
  misc_feature 1..20: note = chemically synthesized
  source 1..20: mol_type = other DNA
gtcaactggggctctccgaa

SEQ ID NO: 8359 - DNA, 20 bp, synthetic construct
  misc_feature 1..20: note = chemically synthesized
  source 1..20: mol_type = other DNA
gctctccgaacagccacaat

SEQ ID NO: 8360 - DNA, 20 bp, synthetic construct
  misc_feature 1..20: note = chemically synthesized
  source 1..20: mol_type = other DNA
ctctccgaacagccacaatc

SEQ ID NO: 8361 - DNA, 20 bp, synthetic construct
  misc_feature 1..20: note = chemically synthesized
  source 1..20: mol_type = other DNA
tctccgaacagccacaatcg

SEQ ID NO: 8362 - DNA, 20 bp, synthetic construct
  misc_feature 1..20: note = chemically synthesized
  source 1..20: mol_type = other DNA
ctccgaacagccacaatcgg

SEQ ID NO: 8363 - DNA, 20 bp, synthetic construct
  misc_feature 1..20: note = chemically synthesized
  source 1..20: mol_type = other DNA
tccgaacagccacaatcggg

SEQ ID NO: 8364 - DNA, 20 bp, synthetic construct
  misc_feature 1..20: note = chemically synthesized
  source 1..20: mol_type = other DNA
cccctcacgatcttcctgaa

SEQ ID NO: 8365 - DNA, 20 bp, synthetic construct
  misc_feature 1..20: note = chemically synthesized
  source 1..20: mol_type = other DNA
ccctcacgatcttcctgaac

SEQ ID NO: 8366 - DNA, 20 bp, synthetic construct
  misc_feature 1..20: note = chemically synthesized
  source 1..20: mol_type = other DNA
cctcacgatcttcctgaaca

SEQ ID NO: 8367 - DNA, 20 bp, synthetic construct
  misc_feature 1..20: note = chemically synthesized
  source 1..20: mol_type = other DNA
cacgatcttcctgaacaggg

SEQ ID NO: 8368 - DNA, 20 bp, synthetic construct
  misc_feature 1..20: note = chemically synthesized
  source 1..20: mol_type = other DNA
gatcttcctgaacagggcag

SEQ ID NO: 8369 - DNA, 20 bp, synthetic construct
  misc_feature 1..20: note = chemically synthesized
  source 1..20: mol_type = other DNA
tcctgaacagggcagtagtc

SEQ ID NO: 8370 - DNA, 20 bp, synthetic construct
  misc_feature 1..20: note = chemically synthesized
  source 1..20: mol_type = other DNA
cagtagtctagcatccactg

SEQ ID NO: 8371 - DNA, 20 bp, synthetic construct
  misc_feature 1..20: note = chemically synthesized
  source 1..20: mol_type = other DNA
tagcatccactgaagtcctg

SEQ ID NO: 8372 - DNA, 20 bp, synthetic construct
  misc_feature 1..20: note = chemically synthesized
  source 1..20: mol_type = other DNA
catccactgaagtcctgaag

SEQ ID NO: 8373 - DNA, 20 bp, synthetic construct
  misc_feature 1..20: note = chemically synthesized
  source 1..20: mol_type = other DNA
actgaagtcctgaagtggtg

SEQ ID NO: 8374 - DNA, 20 bp, synthetic construct
  misc_feature 1..20: note = chemically synthesized
  source 1..20: mol_type = other DNA
ctgaagtcctgaagtggtga

SEQ ID NO: 8375 - DNA, 20 bp, synthetic construct
  misc_feature 1..20: note = chemically synthesized
  source 1..20: mol_type = other DNA
gaagtcctgaagtggtgaag

SEQ ID NO: 8376 - DNA, 20 bp, synthetic construct
  misc_feature 1..20: note = chemically synthesized
  source 1..20: mol_type = other DNA
ctgaagtggtgaaggagccc

SEQ ID NO: 8377 - DNA, 20 bp, synthetic construct
  misc_feature 1..20: note = chemically synthesized
  source 1..20: mol_type = other DNA
cccagacacacccatcctct

SEQ ID NO: 8378 - DNA, 20 bp, synthetic construct
  misc_feature 1..20: note = chemically synthesized
  source 1..20: mol_type = other DNA
ccatcctctgagcacctcca

SEQ ID NO: 8379 - DNA, 20 bp, synthetic construct
  misc_feature 1..20: note = chemically synthesized
  source 1..20: mol_type = other DNA
gagcacctccacagcctttc

SEQ ID NO: 8380 - DNA, 20 bp, synthetic construct
  misc_feature 1..20: note = chemically synthesized
  source 1..20: mol_type = other DNA
ttctggcccatcccaataaa

SEQ ID NO: 8381 - DNA, 20 bp, synthetic construct
  misc_feature 1..20: note = chemically synthesized
  source 1..20: mol_type = other DNA
aaacagcaattctattctcc

SEQ ID NO: 8382 - DNA, 20 bp, synthetic construct
  misc_feature 1..20: note = chemically synthesized
  source 1..20: mol_type = other DNA
attctattctcccagtcacc

SEQ ID NO: 8383 - DNA, 20 bp, synthetic construct
  misc_feature 1..20: note = chemically synthesized
  source 1..20: mol_type = other DNA
agtcaccgagccacacattt

SEQ ID NO: 8384 - DNA, 20 bp, synthetic construct
  misc_feature 1..20: note = chemically synthesized
  source 1..20: mol_type = other DNA
gtcaccgagccacacatttt

SEQ ID NO: 8385 - DNA, 20 bp, synthetic construct
  misc_feature 1..20: note = chemically synthesized
  source 1..20: mol_type = other DNA
tcaccgagccacacattttg

SEQ ID NO: 8386 - DNA, 20 bp, synthetic construct
  misc_feature 1..20: note = chemically synthesized
  source 1..20: mol_type = other DNA
tttcatacaacccatcccac

SEQ ID NO: 8387 - DNA, 20 bp, synthetic construct
  misc_feature 1..20: note = chemically synthesized
  source 1..20: mol_type = other DNA
atacaacccatcccaccagt

SEQ ID NO: 8388 - DNA, 20 bp, synthetic construct
  misc_feature 1..20: note = chemically synthesized
  source 1..20: mol_type = other DNA
caccagtcagcaaatcctgc

SEQ ID NO: 8389 - DNA, 20 bp, synthetic construct
  misc_feature 1..20: note = chemically synthesized
  source 1..20: mol_type = other DNA
tcctgccggttttcccttcg

SEQ ID NO: 8390 - DNA, 20 bp, synthetic construct
  misc_feature 1..20: note = chemically synthesized
  source 1..20: mol_type = other DNA
ttttcccttcgaagtatgtc

SEQ ID NO: 8391 - DNA, 20 bp, synthetic construct
  misc_feature 1..20: note = chemically synthesized
  source 1..20: mol_type = other DNA
ttcgaagtatgtccagaatc

SEQ ID NO: 8392 - DNA, 20 bp, synthetic construct
  misc_feature 1..20: note = chemically synthesized
  source 1..20: mol_type = other DNA
ttctcacgtccccaccaccc

SEQ ID NO: 8393 - DNA, 20 bp, synthetic construct
  misc_feature 1..20: note = chemically synthesized
  source 1..20: mol_type = other DNA
tgcctcactttcccatgctt

SEQ ID NO: 8394 - DNA, 20 bp, synthetic construct
  misc_feature 1..20: note = chemically synthesized
  source 1..20: mol_type = other DNA
catgcttgagtctcaaaatg

SEQ ID NO: 8395 - DNA, 20 bp, synthetic construct
  misc_feature 1..20: note = chemically synthesized
  source 1..20: mol_type = other DNA
tgagtctcaaaatgcggccc

SEQ ID NO: 8396 - DNA, 20 bp, synthetic construct
  misc_feature 1..20: note = chemically synthesized
  source 1..20: mol_type = other DNA
agtctcaaaatgcggcccaa

SEQ ID NO: 8397 - DNA, 20 bp, synthetic construct
  misc_feature 1..20: note = chemically synthesized
  source 1..20: mol_type = other DNA
atgcggcccaagagactctc

SEQ ID NO: 8398 - DNA, 20 bp, synthetic construct
  misc_feature 1..20: note = chemically synthesized
  source 1..20: mol_type = other DNA
cggcccaagagactctctgg

SEQ ID NO: 8399 - DNA, 20 bp, synthetic construct
  misc_feature 1..20: note = chemically synthesized
  source 1..20: mol_type = other DNA
aagagactctctggaagcgc

SEQ ID NO: 8400 - DNA, 20 bp, synthetic construct
  misc_feature 1..20: note = chemically synthesized
  source 1..20: mol_type = other DNA
gtcatatgacatcactcctc

SEQ ID NO: 8401 - DNA, 20 bp, synthetic construct
  misc_feature 1..20: note = chemically synthesized
  source 1..20: mol_type = other DNA
atatgacatcactcctccag

SEQ ID NO: 8402 - DNA, 20 bp, synthetic construct
  misc_feature 1..20: note = chemically synthesized
  source 1..20: mol_type = other DNA
ccagtggcttccatctccct

SEQ ID NO: 8403 - DNA, 20 bp, synthetic construct
  misc_feature 1..20: note = chemically synthesized
  source 1..20: mol_type = other DNA
agtggcttccatctcccttg

SEQ ID NO: 8404 - DNA, 20 bp, synthetic construct
  misc_feature 1..20: note = chemically synthesized
  source 1..20: mol_type = other DNA
gcttccatctcccttggagt

SEQ ID NO: 8405 - DNA, 20 bp, synthetic construct
  misc_feature 1..20: note = chemically synthesized
  source 1..20: mol_type = other DNA
ttccatctcccttggagtca

SEQ ID NO: 8406 - DNA, 20 bp, synthetic construct
  misc_feature 1..20: note = chemically synthesized
  source 1..20: mol_type = other DNA
atccctgctctacgtccttc

SEQ ID NO: 8407 - DNA, 20 bp, synthetic construct
  misc_feature 1..20: note = chemically synthesized
  source 1..20: mol_type = other DNA
tccctgctctacgtccttca

SEQ ID NO: 8408 - DNA, 20 bp, synthetic construct
  misc_feature 1..20: note = chemically synthesized
  source 1..20: mol_type = other DNA
cctgctctacgtccttcaag

SEQ ID NO: 8409 - DNA, 20 bp, synthetic construct
  misc_feature 1..20: note = chemically synthesized
  source 1..20: mol_type = other DNA
ctctacgtccttcaaggagc

SEQ ID NO: 8410 - DNA, 20 bp, synthetic construct
  misc_feature 1..20: note = chemically synthesized
  source 1..20: mol_type = other DNA
acgtccttcaaggagccagc

SEQ ID NO: 8411 - DNA, 20 bp, synthetic construct
  misc_feature 1..20: note = chemically synthesized
  source 1..20: mol_type = other DNA
cactctttccactctgacct

SEQ ID NO: 8412 - DNA, 20 bp, synthetic construct
  misc_feature 1..20: note = chemically synthesized
  source 1..20: mol_type = other DNA
actctttccactctgacctc

SEQ ID NO: 8413 - DNA, 20 bp, synthetic construct
  misc_feature 1..20: note = chemically synthesized
  source 1..20: mol_type = other DNA
ctctttccactctgacctca

SEQ ID NO: 8414 - DNA, 20 bp, synthetic construct
  misc_feature 1..20: note = chemically synthesized
  source 1..20: mol_type = other DNA
agggccccttgctcctcctc

SEQ ID NO: 8415 - DNA, 20 bp, synthetic construct
  misc_feature 1..20: note = chemically synthesized
  source 1..20: mol_type = other DNA
gccccttgctcctcctccag

SEQ ID NO: 8416 - DNA, 20 bp, synthetic construct
  misc_feature 1..20: note = chemically synthesized
  source 1..20: mol_type = other DNA
cttgctcctcctccagtagc

SEQ ID NO: 8417 - DNA, 20 bp, synthetic construct
  misc_feature 1..20: note = chemically synthesized
  source 1..20: mol_type = other DNA
ttgctcctcctccagtagcc

SEQ ID NO: 8418 - DNA, 20 bp, synthetic construct
  misc_feature 1..20: note = chemically synthesized
  source 1..20: mol_type = other DNA
tagccaggcgtattacacac

SEQ ID NO: 8419 - DNA, 20 bp, synthetic construct
  misc_feature 1..20: note = chemically synthesized
  source 1..20: mol_type = other DNA
agccaggcgtattacacaca

SEQ ID NO: 8420 - DNA, 20 bp, synthetic construct
  misc_feature 1..20: note = chemically synthesized
  source 1..20: mol_type = other DNA
tgctctctacacactcttcc

SEQ ID NO: 8421 - DNA, 20 bp, synthetic construct
  misc_feature 1..20: note = chemically synthesized
  source 1..20: mol_type = other DNA
ccatcttctcaaaattctca

SEQ ID NO: 8422 - DNA, 20 bp, synthetic construct
  misc_feature 1..20: note = chemically synthesized
  source 1..20: mol_type = other DNA
ggccaacttcctcacctctt

SEQ ID NO: 8423 - DNA, 20 bp, synthetic construct
  misc_feature 1..20: note = chemically synthesized
  source 1..20: mol_type = other DNA
ccaacttcctcacctctttg

SEQ ID NO: 8424 - DNA, 20 bp, synthetic construct
  misc_feature 1..20: note = chemically synthesized
  source 1..20: mol_type = other DNA
ttggagcctttgcttctcat

SEQ ID NO: 8425 - DNA, 20 bp, synthetic construct
  misc_feature 1..20: note = chemically synthesized
  source 1..20: mol_type = other DNA
tggagcctttgcttctcatt

SEQ ID NO: 8426 - DNA, 20 bp, synthetic construct
  misc_feature 1..20: note = chemically synthesized
  source 1..20: mol_type = other DNA
tccctaattatcctatttaa

SEQ ID NO: 8427 - DNA, 20 bp, synthetic construct
  misc_feature 1..20: note = chemically synthesized
  source 1..20: mol_type = other DNA
aattatcctatttaaaagcc

SEQ ID NO: 8428 - DNA, 20 bp, synthetic construct
  misc_feature 1..20: note = chemically synthesized
  source 1..20: mol_type = other DNA
ttccccaccttattttcgtg

SEQ ID NO: 8429 - DNA, 20 bp, synthetic construct
  misc_feature 1..20: note = chemically synthesized
  source 1..20: mol_type = other DNA
tccccaccttattttcgtgc

SEQ ID NO: 8430 - DNA, 20 bp, synthetic construct
  misc_feature 1..20: note = chemically synthesized
  source 1..20: mol_type = other DNA
ccaccttattttcgtgcagg

SEQ ID NO: 8431 - DNA, 20 bp, synthetic construct
  misc_feature 1..20: note = chemically synthesized
  source 1..20: mol_type = other DNA
tatataattcacatatttat

SEQ ID NO: 8432 - DNA, 20 bp, synthetic construct
  misc_feature 1..20: note = chemically synthesized
  source 1..20: mol_type = other DNA
gtgcatcttctgtctctccc

SEQ ID NO: 8433 - DNA, 20 bp, synthetic construct
  misc_feature 1..20: note = chemically synthesized
  source 1..20: mol_type = other DNA
atcttctgtctctccccagc

SEQ ID NO: 8434 - DNA, 20 bp, synthetic construct
  misc_feature 1..20: note = chemically synthesized
  source 1..20: mol_type = other DNA
tctgtctctccccagctaga

SEQ ID NO: 8435 - DNA, 20 bp, synthetic construct
  misc_feature 1..20: note = chemically synthesized
  source 1..20: mol_type = other DNA
ctgtctctccccagctagaa

SEQ ID NO: 8436 - DNA, 20 bp, synthetic construct
  misc_feature 1..20: note = chemically synthesized
  source 1..20: mol_type = other DNA
tgtctctccccagctagaaa

SEQ ID NO: 8437 - DNA, 20 bp, synthetic construct
  misc_feature 1..20: note = chemically synthesized
  source 1..20: mol_type = other DNA
gtctctccccagctagaaag

SEQ ID NO: 8438 - DNA, 20 bp, synthetic construct
  misc_feature 1..20: note = chemically synthesized
  source 1..20: mol_type = other DNA
tctctccccagctagaaagg

SEQ ID NO: 8439 - DNA, 20 bp, synthetic construct
  misc_feature 1..20: note = chemically synthesized
  source 1..20: mol_type = other DNA
agctagaaagggggtgccac

SEQ ID NO: 8440 - DNA, 20 bp, synthetic construct
  misc_feature 1..20: note = chemically synthesized
  source 1..20: mol_type = other DNA
ctagaaagggggtgccacaa

SEQ ID NO: 8441 - DNA, 20 bp, synthetic construct
  misc_feature 1..20: note = chemically synthesized
  source 1..20: mol_type = other DNA
gaaagggggtgccacaagag

SEQ ID NO: 8442 - DNA, 20 bp, synthetic construct
  misc_feature 1..20: note = chemically synthesized
  source 1..20: mol_type = other DNA
aaagggggtgccacaagagc

SEQ ID NO: 8443 - DNA, 20 bp, synthetic construct
  misc_feature 1..20: note = chemically synthesized
  source 1..20: mol_type = other DNA
aagggggtgccacaagagca

SEQ ID NO: 8444 - DNA, 20 bp, synthetic construct
  misc_feature 1..20: note = chemically synthesized
  source 1..20: mol_type = other DNA
gggggtgccacaagagcagg

SEQ ID NO: 8445 - DNA, 20 bp, synthetic construct
  misc_feature 1..20: note = chemically synthesized
  source 1..20: mol_type = other DNA
cacaagagcagggagttttt

SEQ ID NO: 8446 - DNA, 20 bp, synthetic construct
  misc_feature 1..20: note = chemically synthesized
  source 1..20: mol_type = other DNA
acaagagcagggagttttta

SEQ ID NO: 8447 - DNA, 20 bp, synthetic construct
  misc_feature 1..20: note = chemically synthesized
  source 1..20: mol_type = other DNA
ggctttctatgcccaacacc

SEQ ID NO: 8448 - DNA, 20 bp, synthetic construct
  misc_feature 1..20: note = chemically synthesized
  source 1..20: mol_type = other DNA
ccaacaccaagaaccgttcc

SEQ ID NO: 8449 - DNA, 20 bp, synthetic construct
  misc_feature 1..20: note = chemically synthesized
  source 1..20: mol_type = other DNA
caagaaccgttcccagcatg

SEQ ID NO: 8450 - DNA, 20 bp, synthetic construct
  misc_feature 1..20: note = chemically synthesized
  source 1..20: mol_type = other DNA
gaaccgttcccagcatgtgg

SEQ ID NO: 8451 - DNA, 20 bp, synthetic construct
  misc_feature 1..20: note = chemically synthesized
  source 1..20: mol_type = other DNA
aaccgttcccagcatgtggc

SEQ ID NO: 8452 - DNA, 20 bp, synthetic construct
  misc_feature 1..20: note = chemically synthesized
  source 1..20: mol_type = other DNA
atatttgttgaaaaatgaat

SEQ ID NO: 8453 - DNA, 20 bp, synthetic construct
  misc_feature 1..20: note = chemically synthesized
  source 1..20: mol_type = other DNA
ccttcacaattccaaactgc

SEQ ID NO: 8454 - DNA, 20 bp, synthetic construct
  misc_feature 1..20: note = chemically synthesized
  source 1..20: mol_type = other DNA
cttcacaattccaaactgcc

SEQ ID NO: 8455 - DNA, 20 bp, synthetic construct
  misc_feature 1..20: note = chemically synthesized
  source 1..20: mol_type = other DNA
tcacaattccaaactgccag

SEQ ID NO: 8456 - DNA, 20 bp, synthetic construct
  misc_feature 1..20: note = chemically synthesized
  source 1..20: mol_type = other DNA
cacaattccaaactgccagg

SEQ ID NO: 8457 - DNA, 20 bp, synthetic construct
  misc_feature 1..20: note = chemically synthesized
  source 1..20: mol_type = other DNA
tgccatatctataaaactgt

SEQ ID NO: 8458 - DNA, 20 bp, synthetic construct
  misc_feature 1..20: note = chemically synthesized
  source 1..20: mol_type = other DNA
gccatatctataaaactgtc

SEQ ID NO: 8459 - DNA, 20 bp, synthetic construct
  misc_feature 1..20: note = chemically synthesized
  source 1..20: mol_type = other DNA
atatctataaaactgtcagg

SEQ ID NO: 8460 - DNA, 20 bp, synthetic construct
  misc_feature 1..20: note = chemically synthesized
  source 1..20: mol_type = other DNA
aactgtcaggcagcccaacc

SEQ ID NO: 8461 - DNA, 20 bp, synthetic construct
  misc_feature 1..20: note = chemically synthesized
  source 1..20: mol_type = other DNA
actgtcaggcagcccaacct

SEQ ID NO: 8462 - DNA, 20 bp, synthetic construct
  misc_feature 1..20: note = chemically synthesized
  source 1..20: mol_type = other DNA
ctgtcaggcagcccaacctg

SEQ ID NO: 8463 - DNA, 20 bp, synthetic construct
  misc_feature 1..20: note = chemically synthesized
  source 1..20: mol_type = other DNA
tgtcaggcagcccaacctgg

SEQ ID NO: 8464 - DNA, 20 bp, synthetic construct
  misc_feature 1..20: note = chemically synthesized
  source 1..20: mol_type = other DNA
agcccaacctgggggcactt

SEQ ID NO: 8465 - DNA, 20 bp, synthetic construct
  misc_feature 1..20: note = chemically synthesized
  source 1..20: mol_type = other DNA
acctgggggcactttagctt

SEQ ID NO: 8466 - DNA, 20 bp, synthetic construct
  misc_feature 1..20: note = chemically synthesized
  source 1..20: mol_type = other DNA
ggcactttagctttggatct

SEQ ID NO: 8467 - DNA, 20 bp, synthetic construct
  misc_feature 1..20: note = chemically synthesized
  source 1..20: mol_type = other DNA
gcactttagctttggatctt

SEQ ID NO: 8468 - DNA, 20 bp, synthetic construct
  misc_feature 1..20: note = chemically synthesized
  source 1..20: mol_type = other DNA
tagctttggatcttgggttt

SEQ ID NO: 8469 - DNA, 20 bp, synthetic construct
  misc_feature 1..20: note = chemically synthesized
  source 1..20: mol_type = other DNA
tttggatcttgggtttgagc

SEQ ID NO: 8470 - DNA, 20 bp, synthetic construct
  misc_feature 1..20: note = chemically synthesized
  source 1..20: mol_type = other DNA
gccagattccattttcccca

SEQ ID NO: 8471 - DNA, 20 bp, synthetic construct
  misc_feature 1..20: note = chemically synthesized
  source 1..20: mol_type = other DNA
ccagattccattttccccac

SEQ ID NO: 8472 - DNA, 20 bp, synthetic construct
  misc_feature 1..20: note = chemically synthesized
  source 1..20: mol_type = other DNA
ccattttccccacaggccct

SEQ ID NO: 8473 - DNA, 20 bp, synthetic construct
  misc_feature 1..20: note = chemically synthesized
  source 1..20: mol_type = other DNA
cccacaggccctgagaccca

SEQ ID NO: 8474 - DNA, 20 bp, synthetic construct
  misc_feature 1..20: note = chemically synthesized
  source 1..20: mol_type = other DNA
ccacaggccctgagacccac

SEQ ID NO: 8475 - DNA, 20 bp, synthetic construct
  misc_feature 1..20: note = chemically synthesized
  source 1..20: mol_type = other DNA
cacaggccctgagacccaca

SEQ ID NO: 8476 - DNA, 20 bp, synthetic construct
  misc_feature 1..20: note = chemically synthesized
  source 1..20: mol_type = other DNA
aggccctgagacccacaggg

SEQ ID NO: 8477 - DNA, 20 bp, synthetic construct
  misc_feature 1..20: note = chemically synthesized
  source 1..20: mol_type = other DNA
gccctgagacccacagggaa

SEQ ID NO: 8478 - DNA, 20 bp, synthetic construct
  misc_feature 1..20: note = chemically synthesized
  source 1..20: mol_type = other DNA
cttttgcattataatgtaaa

SEQ ID NO: 8479 - DNA, 20 bp, synthetic construct
  misc_feature 1..20: note = chemically synthesized
  source 1..20: mol_type = other DNA
tttgcattataatgtaaatg

SEQ ID NO: 8480 - DNA, 20 bp, synthetic construct
  misc_feature 1..20: note = chemically synthesized
  source 1..20: mol_type = other DNA
ttgcattataatgtaaatgg

SEQ ID NO: 8481 - DNA, 20 bp, synthetic construct
  misc_feature 1..20: note = chemically synthesized
  source 1..20: mol_type = other DNA
tgcattataatgtaaatgga

SEQ ID NO: 8482 - DNA, 20 bp, synthetic construct
  misc_feature 1..20: note = chemically synthesized
  source 1..20: mol_type = other DNA
gcattataatgtaaatggag

SEQ ID NO: 8483 - DNA, 20 bp, synthetic construct
  misc_feature 1..20: note = chemically synthesized
  source 1..20: mol_type = other DNA
ataatgtaaatggaggggtt

SEQ ID NO: 8484 - DNA, 20 bp, synthetic construct
  misc_feature 1..20: note = chemically synthesized
  source 1..20: mol_type = other DNA
tgtaaatggaggggttgagc

SEQ ID NO: 8485 - DNA, 20 bp, synthetic construct
  misc_feature 1..20: note = chemically synthesized
  source 1..20: mol_type = other DNA
atggaggggttgagctggtt

SEQ ID NO: 8486 - DNA, 20 bp, synthetic construct
  misc_feature 1..20: note = chemically synthesized
  source 1..20: mol_type = other DNA
tggaggggttgagctggttt

SEQ ID NO: 8487 - DNA, 20 bp, synthetic construct
  misc_feature 1..20: note = chemically synthesized
  source 1..20: mol_type = other DNA
ggaggggttgagctggtttg

SEQ ID NO: 8488 - DNA, 20 bp, synthetic construct
  misc_feature 1..20: note = chemically synthesized
  source 1..20: mol_type = other DNA
gaggggttgagctggtttgg

SEQ ID NO: 8489 - DNA, 20 bp, synthetic construct
  misc_feature 1..20: note = chemically synthesized
  source 1..20: mol_type = other DNA
tggtttgggggaacccttga

SEQ ID NO: 8490 - DNA, 20 bp, synthetic construct
  misc_feature 1..20: note = chemically synthesized
  source 1..20: mol_type = other DNA
ggtttgggggaacccttgac

SEQ ID NO: 8491 - DNA, 20 bp, synthetic construct
  misc_feature 1..20: note = chemically synthesized
  source 1..20: mol_type = other DNA
tttgggggaacccttgacag

SEQ ID NO: 8492 - DNA, 20 bp, synthetic construct
  misc_feature 1..20: note = chemically synthesized
  source 1..20: mol_type = other DNA
ggggaacccttgacaggagc

SEQ ID NO: 8493 - DNA, 20 bp, synthetic construct
  misc_feature 1..20: note = chemically synthesized
  source 1..20: mol_type = other DNA
agccagttaaaaccaaacga

SEQ ID NO: 8494 - DNA, 20 bp, synthetic construct
  misc_feature 1..20: note = chemically synthesized
  source 1..20: mol_type = other DNA
accaaacgaaagtctttcct

SEQ ID NO: 8495 - DNA, 20 bp, synthetic construct
  misc_feature 1..20: note = chemically synthesized
  source 1..20: mol_type = other DNA
ccaaacgaaagtctttccta

SEQ ID NO: 8496 - DNA, 20 bp, synthetic construct
  misc_feature 1..20: note = chemically synthesized
  source 1..20: mol_type = other DNA
cgaaagtctttcctaaggct

SEQ ID NO: 8497 - DNA, 20 bp, synthetic construct
  misc_feature 1..20: note = chemically synthesized
  source 1..20: mol_type = other DNA
gaaagtctttcctaaggctt

SEQ ID NO: 8498 - DNA, 20 bp, synthetic construct
  misc_feature 1..20: note = chemically synthesized
  source 1..20: mol_type = other DNA
agtctttcctaaggcttagg

SEQ ID NO: 8499 - DNA, 20 bp, synthetic construct
  misc_feature 1..20: note = chemically synthesized
  source 1..20: mol_type = other DNA
tctttcctaaggcttaggtg

SEQ ID NO: 8500 - DNA, 20 bp, synthetic construct
  misc_feature 1..20: note = chemically synthesized
  source 1..20: mol_type = other DNA
taaggcttaggtggagcctc

SEQ ID NO: 8501 - DNA, 20 bp, synthetic construct
  misc_feature 1..20: note = chemically synthesized
  source 1..20: mol_type = other DNA
gcttaggtggagcctctaga

SEQ ID NO: 8502 - DNA, 20 bp, synthetic construct
  misc_feature 1..20: note = chemically synthesized
  source 1..20: mol_type = other DNA
ttaggtggagcctctagaaa

SEQ ID NO: 8503 - DNA, 20 bp, synthetic construct
  misc_feature 1..20: note = chemically synthesized
  source 1..20: mol_type = other DNA
taggtggagcctctagaaag

SEQ ID NO: 8504 - DNA, 20 bp, synthetic construct
  misc_feature 1..20: note = chemically synthesized
  source 1..20: mol_type = other DNA
aggtggagcctctagaaaga

SEQ ID NO: 8505 - DNA, 20 bp, synthetic construct
  misc_feature 1..20: note = chemically synthesized
  source 1..20: mol_type = other DNA
ggtggagcctctagaaagag

SEQ ID NO: 8506 - DNA, 20 bp, synthetic construct
  misc_feature 1..20: note = chemically synthesized
  source 1..20: mol_type = other DNA
agcctctagaaagaggggct

SEQ ID NO: 8507 - DNA, 20 bp, synthetic construct
  misc_feature 1..20: note = chemically synthesized
  source 1..20: mol_type = other DNA
cctctagaaagaggggctga

SEQ ID NO: 8508 - DNA, 20 bp, synthetic construct
  misc_feature 1..20: note = chemically synthesized
  source 1..20: mol_type = other DNA
agaaagaggggctgagagcc

SEQ ID NO: 8509 - DNA, 20 bp, synthetic construct
  misc_feature 1..20: note = chemically synthesized
  source 1..20: mol_type = other DNA
gaaagaggggctgagagcct

SEQ ID NO: 8510 - DNA, 20 bp, synthetic construct
  misc_feature 1..20: note = chemically synthesized
  source 1..20: mol_type = other DNA
aaagaggggctgagagcctg

SEQ ID NO: 8511 - DNA, 20 bp, synthetic construct
  misc_feature 1..20: note = chemically synthesized
  source 1..20: mol_type = other DNA
gaggggctgagagcctgggg

SEQ ID NO: 8512 - DNA, 20 bp, synthetic construct
  misc_feature 1..20: note = chemically synthesized
  source 1..20: mol_type = other DNA
ggggctgagagcctggggaa

SEQ ID NO: 8513 - DNA, 20 bp, synthetic construct
  misc_feature 1..20: note = chemically synthesized
  source 1..20: mol_type = other DNA
cctggggaagagccaaccac

SEQ ID NO: 8514 - DNA, 20 bp, synthetic construct
  misc_feature 1..20: note = chemically synthesized
  source 1..20: mol_type = other DNA
ggggaagagccaaccaccag

SEQ ID NO: 8515 - DNA, 20 bp, synthetic construct
  misc_feature 1..20: note = chemically synthesized
  source 1..20: mol_type = other DNA
gccaaccaccagcagttcct

SEQ ID NO: 8516 - DNA, 20 bp, synthetic construct
  misc_feature 1..20: note = chemically synthesized
  source 1..20: mol_type = other DNA
caaccaccagcagttcctca

SEQ ID NO: 8517 - DNA, 20 bp, synthetic construct
  misc_feature 1..20: note = chemically synthesized
  source 1..20: mol_type = other DNA
ttcctcagagttcttcccac

SEQ ID NO: 8518 - DNA, 20 bp, synthetic construct
  misc_feature 1..20: note = chemically synthesized
  source 1..20: mol_type = other DNA
tcctcagagttcttcccact

SEQ ID NO: 8519 - DNA, 20 bp, synthetic construct
  misc_feature 1..20: note = chemically synthesized
  source 1..20: mol_type = other DNA
cctcagagttcttcccactg

SEQ ID NO: 8520 - DNA, 20 bp, synthetic construct
  misc_feature 1..20: note = chemically synthesized
  source 1..20: mol_type = other DNA
ttcttcccactggggctgtg

SEQ ID NO: 8521 - DNA, 20 bp, synthetic construct
  misc_feature 1..20: note = chemically synthesized
  source 1..20: mol_type = other DNA
tgtgcagccaactgcgtttc

SEQ ID NO: 8522 - DNA, 20 bp, synthetic construct
  misc_feature 1..20: note = chemically synthesized
  source 1..20: mol_type = other DNA
gtgcagccaactgcgtttcc

SEQ ID NO: 8523 - DNA, 20 bp, synthetic construct
  misc_feature 1..20: note = chemically synthesized
  source 1..20: mol_type = other DNA
actgcgtttccaggcacact

SEQ ID NO: 8524 - DNA, 20 bp, synthetic construct
  misc_feature 1..20: note = chemically synthesized
  source 1..20: mol_type = other DNA
tactcatatccaatactgtg

SEQ ID NO: 8525 - DNA, 20 bp, synthetic construct
  misc_feature 1..20: note = chemically synthesized
  source 1..20: mol_type = other DNA
actcatatccaatactgtgc

SEQ ID NO: 8526 - DNA, 20 bp, synthetic construct
  misc_feature 1..20: note = chemically synthesized
  source 1..20: mol_type = other DNA
ctcatatccaatactgtgca

SEQ ID NO: 8527 - DNA, 20 bp, synthetic construct
  misc_feature 1..20: note = chemically synthesized
  source 1..20: mol_type = other DNA
tcatatccaatactgtgcag

SEQ ID NO: 8528 - DNA, 20 bp, synthetic construct
  misc_feature 1..20: note = chemically synthesized
  source 1..20: mol_type = other DNA
ccaatactgtgcaggggcac

SEQ ID NO: 8529 - DNA, 20 bp, synthetic construct
  misc_feature 1..20: note = chemically synthesized
  source 1..20: mol_type = other DNA
tactgtgcaggggcactggc

SEQ ID NO: 8530 - DNA, 20 bp, synthetic construct
  misc_feature 1..20: note = chemically synthesized
  source 1..20: mol_type = other DNA
actgtgcaggggcactggcc

SEQ ID NO: 8531 - DNA, 20 bp, synthetic construct
  misc_feature 1..20: note = chemically synthesized
  source 1..20: mol_type = other DNA
cactggccaggcacaaatcc

SEQ ID NO: 8532 - DNA, 20 bp, synthetic construct
  misc_feature 1..20: note = chemically synthesized
  source 1..20: mol_type = other DNA
acaaatcccagctgcctcca

SEQ ID NO: 8533 - DNA, 20 bp, synthetic construct
  misc_feature 1..20: note = chemically synthesized
  source 1..20: mol_type = other DNA
tctccctccattcttgcttt

SEQ ID NO: 8534 - DNA, 20 bp, synthetic construct
  misc_feature 1..20: note = chemically synthesized
  source 1..20: mol_type = other DNA
tttcagattctccctcctcc

SEQ ID NO: 8535 - DNA, 20 bp, synthetic construct
  misc_feature 1..20: note = chemically synthesized
  source 1..20: mol_type = other DNA
cagattctccctcctcctgg

SEQ ID NO: 8536 - DNA, 20 bp, synthetic construct
  misc_feature 1..20: note = chemically synthesized
  source 1..20: mol_type = other DNA
agattctccctcctcctggc

SEQ ID NO: 8537 - DNA, 20 bp, synthetic construct
  misc_feature 1..20: note = chemically synthesized
  source 1..20: mol_type = other DNA
gattctccctcctcctggca

SEQ ID NO: 8538 - DNA, 20 bp, synthetic construct
  misc_feature 1..20: note = chemically synthesized
  source 1..20: mol_type = other DNA
attctccctcctcctggcag

SEQ ID NO: 8539 - DNA, 20 bp, synthetic construct
  misc_feature 1..20: note = chemically synthesized
  source 1..20: mol_type = other DNA
cctcctcctggcaggggcac

SEQ ID NO: 8540 - DNA, 20 bp, synthetic construct
  misc_feature 1..20: note = chemically synthesized
  source 1..20: mol_type = other DNA
ctcctcctggcaggggcact

SEQ ID NO: 8541 - DNA, 20 bp, synthetic construct
  misc_feature 1..20: note = chemically synthesized
  source 1..20: mol_type = other DNA
tcctcctggcaggggcactg

SEQ ID NO: 8542 - DNA, 20 bp, synthetic construct
  misc_feature 1..20: note = chemically synthesized
  source 1..20: mol_type = other DNA
ctcctggcaggggcactggg

SEQ ID NO: 8543 - DNA, 20 bp, synthetic construct
  misc_feature 1..20: note = chemically synthesized
  source 1..20: mol_type = other DNA
tcctggcaggggcactgggg

SEQ ID NO: 8544 - DNA, 20 bp, synthetic construct
  misc_feature 1..20: note = chemically synthesized
  source 1..20: mol_type = other DNA
cctggcaggggcactgggga

SEQ ID NO: 8545 - DNA, 20 bp, synthetic construct
  misc_feature 1..20: note = chemically synthesized
  source 1..20: mol_type = other DNA
ggcaggggcactggggaggg

SEQ ID NO: 8546 - DNA, 20 bp, synthetic construct
  misc_feature 1..20: note = chemically synthesized
  source 1..20: mol_type = other DNA
gcaggggcactggggagggc

SEQ ID NO: 8547 - DNA, 20 bp, synthetic construct
  misc_feature 1..20: note = chemically synthesized
  source 1..20: mol_type = other DNA
aggggcactggggagggcag

SEQ ID NO: 8548 - DNA, 20 bp, synthetic construct
  misc_feature 1..20: note = chemically synthesized
  source 1..20: mol_type = other DNA
gggcactggggagggcagga

SEQ ID NO: 8549 - DNA, 20 bp, synthetic construct
  misc_feature 1..20: note = chemically synthesized
  source 1..20: mol_type = other DNA
cactggggagggcaggagag

SEQ ID NO: 8550 - DNA, 20 bp, synthetic construct
  misc_feature 1..20: note = chemically synthesized
  source 1..20: mol_type = other DNA
actggggagggcaggagaga

SEQ ID NO: 8551 - DNA, 20 bp, synthetic construct
  misc_feature 1..20: note = chemically synthesized
  source 1..20: mol_type = other DNA
tggggagggcaggagagaag

SEQ ID NO: 8552 - DNA, 20 bp, synthetic construct
  misc_feature 1..20: note = chemically synthesized
  source 1..20: mol_type = other DNA
ggggagggcaggagagaagg

SEQ ID NO: 8553 - DNA, 20 bp, synthetic construct
  misc_feature 1..20: note = chemically synthesized
  source 1..20: mol_type = other DNA
ggcaggagagaaggaggcca

SEQ ID NO: 8554 - DNA, 20 bp, synthetic construct
  misc_feature 1..20: note = chemically synthesized
  source 1..20: mol_type = other DNA
gagagaaggaggccatggca

SEQ ID NO: 8555 - DNA, 20 bp, synthetic construct
  misc_feature 1..20: note = chemically synthesized
  source 1..20: mol_type = other DNA
agagaaggaggccatggcaa

SEQ ID NO: 8556 - DNA, 20 bp, synthetic construct
  misc_feature 1..20: note = chemically synthesized
  source 1..20: mol_type = other DNA
gagaaggaggccatggcaaa

SEQ ID NO: 8557 - DNA, 20 bp, synthetic construct
  misc_feature 1..20: note = chemically synthesized
  source 1..20: mol_type = other DNA
gggacaaatcccttctacct

SEQ ID NO: 8558 - DNA, 20 bp, synthetic construct
  misc_feature 1..20: note = chemically synthesized
  source 1..20: mol_type = other DNA
gacaaatcccttctacctga

SEQ ID NO: 8559 - DNA, 20 bp, synthetic construct
  misc_feature 1..20: note = chemically synthesized
  source 1..20: mol_type = other DNA
atcccttctacctgagagcc

SEQ ID NO: 8560 - DNA, 20 bp, synthetic construct
  misc_feature 1..20: note = chemically synthesized
  source 1..20: mol_type = other DNA
tcccttctacctgagagccc

SEQ ID NO: 8561 - DNA, 20 bp, synthetic construct
  misc_feature 1..20: note = chemically synthesized
  source 1..20: mol_type = other DNA
ctacctgagagcccgggatg

SEQ ID NO: 8562 - DNA, 20 bp, synthetic construct
  misc_feature 1..20: note = chemically synthesized
  source 1..20: mol_type = other DNA
ctgagagcccgggatgcagc

SEQ ID NO: 8563 - DNA, 20 bp, synthetic construct
  misc_feature 1..20: note = chemically synthesized
  source 1..20: mol_type = other DNA
agcccgggatgcagccagaa

SEQ ID NO: 8564 - DNA, 20 bp, synthetic construct
  misc_feature 1..20: note = chemically synthesized
  source 1..20: mol_type = other DNA
taaaataccctttcccaccc

SEQ ID NO: 8565 - DNA, 20 bp, synthetic construct
  misc_feature 1..20: note = chemically synthesized
  source 1..20: mol_type = other DNA
caccctagcatacaatttga

SEQ ID NO: 8566 - DNA, 20 bp, synthetic construct
  misc_feature 1..20: note = chemically synthesized
  source 1..20: mol_type = other DNA
accctagcatacaatttgac

SEQ ID NO: 8567 - DNA, 20 bp, synthetic construct
  misc_feature 1..20: note = chemically synthesized
  source 1..20: mol_type = other DNA
atacaatttgacaggtgaat

SEQ ID NO: 8568 - DNA, 20 bp, synthetic construct
  misc_feature 1..20: note = chemically synthesized
  source 1..20: mol_type = other DNA
acaggtgaataagtgctccc

SEQ ID NO: 8569 - DNA, 20 bp, synthetic construct
  misc_feature 1..20: note = chemically synthesized
  source 1..20: mol_type = other DNA
ggtgaataagtgctccccag

SEQ ID NO: 8570 - DNA, 20 bp, synthetic construct
  misc_feature 1..20: note = chemically synthesized
  source 1..20: mol_type = other DNA
gtgaataagtgctccccagt

SEQ ID NO: 8571 - DNA, 20 bp, synthetic construct
  misc_feature 1..20: note = chemically synthesized
  source 1..20: mol_type = other DNA
gctccccagtaggcaataac

SEQ ID NO: 8572 - DNA, 20 bp, synthetic construct
  misc_feature 1..20: note = chemically synthesized
  source 1..20: mol_type = other DNA
ctccccagtaggcaataaca

SEQ ID NO: 8573 - DNA, 20 bp, synthetic construct
  misc_feature 1..20: note = chemically synthesized
  source 1..20: mol_type = other DNA
ccccagtaggcaataacaag

SEQ ID NO: 8574 - DNA, 20 bp, synthetic construct
  misc_feature 1..20: note = chemically synthesized
  source 1..20: mol_type = other DNA
cagtaggcaataacaaggag

SEQ ID NO: 8575 - DNA, 20 bp, synthetic construct
  misc_feature 1..20: note = chemically synthesized
  source 1..20: mol_type = other DNA
caaggagaagtctgaattaa

SEQ ID NO: 8576 - DNA, 20 bp, synthetic construct
  misc_feature 1..20: note = chemically synthesized
  source 1..20: mol_type = other DNA
attaaaagaactcgccaatt

SEQ ID NO: 8577 - DNA, 20 bp, synthetic construct
  misc_feature 1..20: note = chemically synthesized
  source 1..20: mol_type = other DNA
ttaaaagaactcgccaattt

SEQ ID NO: 8578 - DNA, 20 bp, synthetic construct
  misc_feature 1..20: note = chemically synthesized
  source 1..20: mol_type = other DNA
aaagaactcgccaatttggg

SEQ ID NO: 8579 - DNA, 20 bp, synthetic construct
  misc_feature 1..20: note = chemically synthesized
  source 1..20: mol_type = other DNA
cgttaccaataaaacactta

SEQ ID NO: 8580 - DNA, 20 bp, synthetic construct
  misc_feature 1..20: note = chemically synthesized
  source 1..20: mol_type = other DNA
acttaaagatgctattcatg

SEQ ID NO: 8581 - DNA, 20 bp, synthetic construct
  misc_feature 1..20: note = chemically synthesized
  source 1..20: mol_type = other DNA
atgctattcatgcagacata

SEQ ID NO: 8582 - DNA, 20 bp, synthetic construct
  misc_feature 1..20: note = chemically synthesized
  source 1..20: mol_type = other DNA
atgcagacataaagtgctaa

SEQ ID NO: 8583 - DNA, 20 bp, synthetic construct
  misc_feature 1..20: note = chemically synthesized
  source 1..20: mol_type = other DNA
tatttccctctgatttctga

SEQ ID NO: 8584 - DNA, 20 bp, synthetic construct
  misc_feature 1..20: note = chemically synthesized
  source 1..20: mol_type = other DNA
tttttttccttcttcttttt

SEQ ID NO: 8585 - DNA, 20 bp, synthetic construct
  misc_feature 1..20: note = chemically synthesized
  source 1..20: mol_type = other DNA
ttttttccttcttctttttt

SEQ ID NO: 8586 - DNA, 20 bp, synthetic construct
  misc_feature 1..20: note = chemically synthesized
  source 1..20: mol_type = other DNA
tttttccttcttcttttttg

SEQ ID NO: 8587 - DNA, 20 bp, synthetic construct
  misc_feature 1..20: note = chemically synthesized
  source 1..20: mol_type = other DNA
ttcttttttggggctatttt

SEQ ID NO: 8588 - DNA, 20 bp, synthetic construct
  misc_feature 1..20: note = chemically synthesized
  source 1..20: mol_type = other DNA
ttggggctattttaagttaa

SEQ ID NO: 8589 - DNA, 20 bp, synthetic construct
  misc_feature 1..20: note = chemically synthesized
  source 1..20: mol_type = other DNA
ggggctattttaagttaaca

SEQ ID NO: 8590 - DNA, 20 bp, synthetic construct
  misc_feature 1..20: note = chemically synthesized
  source 1..20: mol_type = other DNA
gctaatctgattcaaaactg

SEQ ID NO: 8591 - DNA, 20 bp, synthetic construct
  misc_feature 1..20: note = chemically synthesized
  source 1..20: mol_type = other DNA
gattcaaaactgaagactca

SEQ ID NO: 8592 - DNA, 20 bp, synthetic construct
  misc_feature 1..20: note = chemically synthesized
  source 1..20: mol_type = other DNA
ttcaaaactgaagactcaaa

SEQ ID NO: 8593 - DNA, 20 bp, synthetic construct
  misc_feature 1..20: note = chemically synthesized
  source 1..20: mol_type = other DNA
tcatgaaaacaatcatcact

SEQ ID NO: 8594 - DNA, 20 bp, synthetic construct
  misc_feature 1..20: note = chemically synthesized
  source 1..20: mol_type = other DNA
actcagtcaacgtattttcc

SEQ ID NO: 8595 - DNA, 20 bp, synthetic construct
  misc_feature 1..20: note = chemically synthesized
  source 1..20: mol_type = other DNA
tcaacgtattttccaagcca

SEQ ID NO: 8596 - DNA, 20 bp, synthetic construct
  misc_feature 1..20: note = chemically synthesized
  source 1..20: mol_type = other DNA
ttttccaagccacagaaaat

SEQ ID NO: 8597 - DNA, 20 bp, synthetic construct
  misc_feature 1..20: note = chemically synthesized
  source 1..20: mol_type = other DNA
cacagaaaataagttgaaat

SEQ ID NO: 8598 - DNA, 20 bp, synthetic construct
  misc_feature 1..20: note = chemically synthesized
  source 1..20: mol_type = other DNA
gttgaaataagttgaaaatg

SEQ ID NO: 8599 - DNA, 20 bp, synthetic construct
  misc_feature 1..20: note = chemically synthesized
  source 1..20: mol_type = other DNA
gaaataagttgaaaatgcag

SEQ ID NO: 8600 - DNA, 20 bp, synthetic construct
  misc_feature 1..20: note = chemically synthesized
  source 1..20: mol_type = other DNA
aaataagttgaaaatgcagt

SEQ ID NO: 8601 - DNA, 20 bp, synthetic construct
  misc_feature 1..20: note = chemically synthesized
  source 1..20: mol_type = other DNA
agttgaaaatgcagtaggca

SEQ ID NO: 8602 - DNA, 20 bp, synthetic construct
  misc_feature 1..20: note = chemically synthesized
  source 1..20: mol_type = other DNA
tgaaaatgcagtaggcaaag

SEQ ID NO: 8603 - DNA, 20 bp, synthetic construct
  misc_feature 1..20: note = chemically synthesized
  source 1..20: mol_type = other DNA
aaatgcagtaggcaaagaag

SEQ ID NO: 8604 - DNA, 20 bp, synthetic construct
  misc_feature 1..20: note = chemically synthesized
  source 1..20: mol_type = other DNA
gcagtaggcaaagaagcagc

SEQ ID NO: 8605 - DNA, 20 bp, synthetic construct
  misc_feature 1..20: note = chemically synthesized
  source 1..20: mol_type = other DNA
aaagaagcagctagtcatgt

SEQ ID NO: 8606 - DNA, 20 bp, synthetic construct
  misc_feature 1..20: note = chemically synthesized
  source 1..20: mol_type = other DNA
agctagtcatgtaagacact

SEQ ID NO: 8607 - DNA, 20 bp, synthetic construct
  misc_feature 1..20: note = chemically synthesized
  source 1..20: mol_type = other DNA
gctagtcatgtaagacacta

SEQ ID NO: 8608 - DNA, 20 bp, synthetic construct
  misc_feature 1..20: note = chemically synthesized
  source 1..20: mol_type = other DNA
ctagtcatgtaagacactaa

SEQ ID NO: 8609 - DNA, 20 bp, synthetic construct
  misc_feature 1..20: note = chemically synthesized
  source 1..20: mol_type = other DNA
tagtcatgtaagacactaag

SEQ ID NO: 8610 - DNA, 20 bp, synthetic construct
  misc_feature 1..20: note = chemically synthesized
  source 1..20: mol_type = other DNA
tcatgtaagacactaagggg

SEQ ID NO: 8611 - DNA, 20 bp, synthetic construct
  misc_feature 1..20: note = chemically synthesized
  source 1..20: mol_type = other DNA
catgtaagacactaaggggc

SEQ ID NO: 8612 - DNA, 20 bp, synthetic construct
  misc_feature 1..20: note = chemically synthesized
  source 1..20: mol_type = other DNA
atgtaagacactaaggggca

SEQ ID NO: 8613 - DNA, 20 bp, synthetic construct
  misc_feature 1..20: note = chemically synthesized
  source 1..20: mol_type = other DNA
tgtaagacactaaggggcag

SEQ ID NO: 8614 - DNA, 20 bp, synthetic construct
  misc_feature 1..20: note = chemically synthesized
  source 1..20: mol_type = other DNA
taagacactaaggggcaggg

SEQ ID NO: 8615 - DNA, 20 bp, synthetic construct
  misc_feature 1..20: note = chemically synthesized
  source 1..20: mol_type = other DNA
ggagtcattaattcttctcc

SEQ ID NO: 8616 - DNA, 20 bp, synthetic construct
  misc_feature 1..20: note = chemically synthesized
  source 1..20: mol_type = other DNA
ttcaacactctgtttctatg

SEQ ID NO: 8617 - DNA, 20 bp, synthetic construct
  misc_feature 1..20: note = chemically synthesized
  source 1..20: mol_type = other DNA
tcaacactctgtttctatga

SEQ ID NO: 8618 - DNA, 20 bp, synthetic construct
  misc_feature 1..20: note = chemically synthesized
  source 1..20: mol_type = other DNA
cactctgtttctatgaaggc

SEQ ID NO: 8619 - DNA, 20 bp, synthetic construct
  misc_feature 1..20: note = chemically synthesized
  source 1..20: mol_type = other DNA
actctgtttctatgaaggca

SEQ ID NO: 8620 - DNA, 20 bp, synthetic construct
  misc_feature 1..20: note = chemically synthesized
  source 1..20: mol_type = other DNA
ctctgtttctatgaaggcaa

SEQ ID NO: 8621 - DNA, 20 bp, synthetic construct
  misc_feature 1..20: note = chemically synthesized
  source 1..20: mol_type = other DNA
gtttctatgaaggcaagggt

SEQ ID NO: 8622 - DNA, 20 bp, synthetic construct
  misc_feature 1..20: note = chemically synthesized
  source 1..20: mol_type = other DNA
ttctatgaaggcaagggttg

SEQ ID NO: 8623 - DNA, 20 bp, synthetic construct
  misc_feature 1..20: note = chemically synthesized
  source 1..20: mol_type = other DNA
tctatgaaggcaagggttgg

SEQ ID NO: 8624 - DNA, 20 bp, synthetic construct
  misc_feature 1..20: note = chemically synthesized
  source 1..20: mol_type = other DNA
ctatgaaggcaagggttgga

SEQ ID NO: 8625 - DNA, 20 bp, synthetic construct
  misc_feature 1..20: note = chemically synthesized
  source 1..20: mol_type = other DNA
atgaaggcaagggttggagg

SEQ ID NO: 8626 - DNA, 20 bp, synthetic construct
  misc_feature 1..20: note = chemically synthesized
  source 1..20: mol_type = other DNA
cttttttctttcaaataaat

SEQ ID NO: 8627 - DNA, 20 bp, synthetic construct
  misc_feature 1..20: note = chemically synthesized
  source 1..20: mol_type = other DNA
aaataaatcagtaaaatgat

SEQ ID NO: 8628 - DNA, 20 bp, synthetic construct
  misc_feature 1..20: note = chemically synthesized
  source 1..20: mol_type = other DNA
aataaatcagtaaaatgatg

SEQ ID NO: 8629 - DNA, 20 bp, synthetic construct
  misc_feature 1..20: note = chemically synthesized
  source 1..20: mol_type = other DNA
ggtgcttcctctgctacgcc

SEQ ID NO: 8630 - DNA, 20 bp, synthetic construct
  misc_feature 1..20: note = chemically synthesized
  source 1..20: mol_type = other DNA
gcttcctctgctacgcccag

SEQ ID NO: 8631 - DNA, 20 bp, synthetic construct
  misc_feature 1..20: note = chemically synthesized
  source 1..20: mol_type = other DNA
ctctgctacgcccagtggcc

SEQ ID NO: 8632 - DNA, 20 bp, synthetic construct
  misc_feature 1..20: note = chemically synthesized
  source 1..20: mol_type = other DNA
tctgctacgcccagtggccc

SEQ ID NO: 8633 - DNA, 20 bp, synthetic construct
  misc_feature 1..20: note = chemically synthesized
  source 1..20: mol_type = other DNA
gtggcccaggcactctcact

SEQ ID NO: 8634 - DNA, 20 bp, synthetic construct
  misc_feature 1..20: note = chemically synthesized
  source 1..20: mol_type = other DNA
tggcccaggcactctcacta

SEQ ID NO: 8635 - DNA, 20 bp, synthetic construct
  misc_feature 1..20: note = chemically synthesized
  source 1..20: mol_type = other DNA
ctctcactaaggtatcctcc

SEQ ID NO: 8636 - DNA, 20 bp, synthetic construct
  misc_feature 1..20: note = chemically synthesized
  source 1..20: mol_type = other DNA
aaggtatcctcccagcaatg

SEQ ID NO: 8637 - DNA, 20 bp, synthetic construct
  misc_feature 1..20: note = chemically synthesized
  source 1..20: mol_type = other DNA
aggtatcctcccagcaatgt

SEQ ID NO: 8638 - DNA, 20 bp, synthetic construct
  misc_feature 1..20: note = chemically synthesized
  source 1..20: mol_type = other DNA
cccagcaatgtaggtgttca

SEQ ID NO: 8639 - DNA, 20 bp, synthetic construct
  misc_feature 1..20: note = chemically synthesized
  source 1..20: mol_type = other DNA
ccagcaatgtaggtgttcaa

SEQ ID NO: 8640 - DNA, 20 bp, synthetic construct
  misc_feature 1..20: note = chemically synthesized
  source 1..20: mol_type = other DNA
atgtaggtgttcaaaggcaa

SEQ ID NO: 8641 - DNA, 20 bp, synthetic construct
  misc_feature 1..20: note = chemically synthesized
  source 1..20: mol_type = other DNA
aggtgttcaaaggcaaaaga

SEQ ID NO: 8642 - DNA, 20 bp, synthetic construct
  misc_feature 1..20: note = chemically synthesized
  source 1..20: mol_type = other DNA
ggtgttcaaaggcaaaagaa

SEQ ID NO: 8643 - DNA, 20 bp, synthetic construct
  misc_feature 1..20: note = chemically synthesized
  source 1..20: mol_type = other DNA
gtgttcaaaggcaaaagaaa

SEQ ID NO: 8644 - DNA, 20 bp, synthetic construct
  misc_feature 1..20: note = chemically synthesized
  source 1..20: mol_type = other DNA
aaaggcaaaagaaagggaac

SEQ ID NO: 8645 - DNA, 20 bp, synthetic construct
  misc_feature 1..20: note = chemically synthesized
  source 1..20: mol_type = other DNA
aaagaaagggaaccagctca

SEQ ID NO: 8646 - DNA, 20 bp, synthetic construct
  misc_feature 1..20: note = chemically synthesized
  source 1..20: mol_type = other DNA
ctcatggcgtaatacttgct

SEQ ID NO: 8647 - DNA, 20 bp, synthetic construct
  misc_feature 1..20: note = chemically synthesized
  source 1..20: mol_type = other DNA
gcgtaatacttgctcggcca

SEQ ID NO: 8648 - DNA, 20 bp, synthetic construct
  misc_feature 1..20: note = chemically synthesized
  source 1..20: mol_type = other DNA
tacttgctcggccaaagaca

SEQ ID NO: 8649 - DNA, 20 bp, synthetic construct
  misc_feature 1..20: note = chemically synthesized
  source 1..20: mol_type = other DNA
aaagacatagtaacgcttcc

SEQ ID NO: 8650 - DNA, 20 bp, synthetic construct
  misc_feature 1..20: note = chemically synthesized
  source 1..20: mol_type = other DNA
aagacatagtaacgcttccc

SEQ ID NO: 8651 - DNA, 20 bp, synthetic construct
  misc_feature 1..20: note = chemically synthesized
  source 1..20: mol_type = other DNA
taacgcttcccaggaaatac

SEQ ID NO: 8652 - DNA, 20 bp, synthetic construct
  misc_feature 1..20: note = chemically synthesized
  source 1..20: mol_type = other DNA
cccaggaaatacaagtgtca

SEQ ID NO: 8653 - DNA, 20 bp, synthetic construct
  misc_feature 1..20: note = chemically synthesized
  source 1..20: mol_type = other DNA
ctccaaaatgaatatgtgtg

SEQ ID NO: 8654 - DNA, 20 bp, synthetic construct
  misc_feature 1..20: note = chemically synthesized
  source 1..20: mol_type = other DNA
tgaatatgtgtgcagccacc

SEQ ID NO: 8655 - DNA, 20 bp, synthetic construct
  misc_feature 1..20: note = chemically synthesized
  source 1..20: mol_type = other DNA
gaatatgtgtgcagccacct

SEQ ID NO: 8656 - DNA, 20 bp, synthetic construct
  misc_feature 1..20: note = chemically synthesized
  source 1..20: mol_type = other DNA
gcaacttaattcaaacaact

SEQ ID NO: 8657 - DNA, 20 bp, synthetic construct
  misc_feature 1..20: note = chemically synthesized
  source 1..20: mol_type = other DNA
acttaattcaaacaacttgg

SEQ ID NO: 8658 - DNA, 20 bp, synthetic construct
  misc_feature 1..20: note = chemically synthesized
  source 1..20: mol_type = other DNA
cttaattcaaacaacttgga

SEQ ID NO: 8659 - DNA, 20 bp, synthetic construct
  misc_feature 1..20: note = chemically synthesized
  source 1..20: mol_type = other DNA
ttcaaacaacttggaaggct

SEQ ID NO: 8660 - DNA, 20 bp, synthetic construct
  misc_feature 1..20: note = chemically synthesized
  source 1..20: mol_type = other DNA
tcaaacaacttggaaggcta

SEQ ID NO: 8661 - DNA, 20 bp, synthetic construct
  misc_feature 1..20: note = chemically synthesized
  source 1..20: mol_type = other DNA
aaacaacttggaaggctaag

SEQ ID NO: 8662 - DNA, 20 bp, synthetic construct
  misc_feature 1..20: note = chemically synthesized
  source 1..20: mol_type = other DNA
cttggaaggctaaggagcac

SEQ ID NO: 8663 - DNA, 20 bp, synthetic construct
  misc_feature 1..20: note = chemically synthesized
  source 1..20: mol_type = other DNA
tggaaggctaaggagcactg

SEQ ID NO: 8664 - DNA, 20 bp, synthetic construct
  misc_feature 1..20: note = chemically synthesized
  source 1..20: mol_type = other DNA
aggctaaggagcactggagc

SEQ ID NO: 8665 - DNA, 20 bp, synthetic construct
  misc_feature 1..20: note = chemically synthesized
  source 1..20: mol_type = other DNA
ggctaaggagcactggagct

SEQ ID NO: 8666 - DNA, 20 bp, synthetic construct
  misc_feature 1..20: note = chemically synthesized
  source 1..20: mol_type = other DNA
gctaaggagcactggagctg

SEQ ID NO: 8667 - DNA, 20 bp, synthetic construct
  misc_feature 1..20: note = chemically synthesized
  source 1..20: mol_type = other DNA
taaggagcactggagctggg

SEQ ID NO: 8668 - DNA, 20 bp, synthetic construct
  misc_feature 1..20: note = chemically synthesized
  source 1..20: mol_type = other DNA
gcactggagctggggagctg

SEQ ID NO: 8669 - DNA, 20 bp, synthetic construct
  misc_feature 1..20: note = chemically synthesized
  source 1..20: mol_type = other DNA
acccctgtgctcaccacccc

SEQ ID NO: 8670 - DNA, 20 bp, synthetic construct
  misc_feature 1..20: note = chemically synthesized
  source 1..20: mol_type = other DNA
ccctgtgctcaccacccctg

SEQ ID NO: 8671 - DNA, 20 bp, synthetic construct
  misc_feature 1..20: note = chemically synthesized
  source 1..20: mol_type = other DNA
ctgtgctcaccacccctgga

SEQ ID NO: 8672 - DNA, 20 bp, synthetic construct
  misc_feature 1..20: note = chemically synthesized
  source 1..20: mol_type = other DNA
tgctcaccacccctggagag

SEQ ID NO: 8673 - DNA, 20 bp, synthetic construct
  misc_feature 1..20: note = chemically synthesized
  source 1..20: mol_type = other DNA
caccacccctggagagcagt

SEQ ID NO: 8674 - DNA, 20 bp, synthetic construct
  misc_feature 1..20: note = chemically synthesized
  source 1..20: mol_type = other DNA
ccacccctggagagcagtca

SEQ ID NO: 8675 - DNA, 20 bp, synthetic construct
  misc_feature 1..20: note = chemically synthesized
  source 1..20: mol_type = other DNA
acccctggagagcagtcaga

SEQ ID NO: 8676 - DNA, 20 bp, synthetic construct
  misc_feature 1..20: note = chemically synthesized
  source 1..20: mol_type = other DNA
cccctggagagcagtcagag

SEQ ID NO: 8677 - DNA, 20 bp, synthetic construct
  misc_feature 1..20: note = chemically synthesized
  source 1..20: mol_type = other DNA
ctggagagcagtcagagagg

SEQ ID NO: 8678 - DNA, 20 bp, synthetic construct
  misc_feature 1..20: note = chemically synthesized
  source 1..20: mol_type = other DNA
gagaggaagcctgctttcct

SEQ ID NO: 8679 - DNA, 20 bp, synthetic construct
  misc_feature 1..20: note = chemically synthesized
  source 1..20: mol_type = other DNA
tgctttcctcagatgtttta

SEQ ID NO: 8680 - DNA, 20 bp, synthetic construct
  misc_feature 1..20: note = chemically synthesized
  source 1..20: mol_type = other DNA
gctttcctcagatgttttaa

SEQ ID NO: 8681 - DNA, 20 bp, synthetic construct
  misc_feature 1..20: note = chemically synthesized
  source 1..20: mol_type = other DNA
ttcctcagatgttttaaagg

SEQ ID NO: 8682 - DNA, 20 bp, synthetic construct
  misc_feature 1..20: note = chemically synthesized
  source 1..20: mol_type = other DNA
atgttttaaaggaagccacc

SEQ ID NO: 8683 - DNA, 20 bp, synthetic construct
  misc_feature 1..20: note = chemically synthesized
  source 1..20: mol_type = other DNA
gttttaaaggaagccaccta

SEQ ID NO: 8684 - DNA, 20 bp, synthetic construct
  misc_feature 1..20: note = chemically synthesized
  source 1..20: mol_type = other DNA
tagagccccacctgtcactg

SEQ ID NO: 8685 - DNA, 20 bp, synthetic construct
  misc_feature 1..20: note = chemically synthesized
  source 1..20: mol_type = other DNA
tgtcactgtggaactgctca

SEQ ID NO: 8686 - DNA, 20 bp, synthetic construct
  misc_feature 1..20: note = chemically synthesized
  source 1..20: mol_type = other DNA
cactgtggaactgctcatgg

SEQ ID NO: 8687 - DNA, 20 bp, synthetic construct
  misc_feature 1..20: note = chemically synthesized
  source 1..20: mol_type = other DNA
ggctgcccgatgcgctgatg

SEQ ID NO: 8688 - DNA, 20 bp, synthetic construct
  misc_feature 1..20: note = chemically synthesized
  source 1..20: mol_type = other DNA
cgatgcgctgatgtggaact

SEQ ID NO: 8689 - DNA, 20 bp, synthetic construct
  misc_feature 1..20: note = chemically synthesized
  source 1..20: mol_type = other DNA
ggaactcagaatcattcatt

SEQ ID NO: 8690 - DNA, 20 bp, synthetic construct
  misc_feature 1..20: note = chemically synthesized
  source 1..20: mol_type = other DNA
gaactcagaatcattcattt

SEQ ID NO: 8691 - DNA, 20 bp, synthetic construct
  misc_feature 1..20: note = chemically synthesized
  source 1..20: mol_type = other DNA
gaatcattcatttgggcttg

SEQ ID NO: 8692 - DNA, 20 bp, synthetic construct
  misc_feature 1..20: note = chemically synthesized
  source 1..20: mol_type = other DNA
attcatttgggcttgtggct

SEQ ID NO: 8693 - DNA, 20 bp, synthetic construct
  misc_feature 1..20: note = chemically synthesized
  source 1..20: mol_type = other DNA
ggcttgtggctgagctgtgc

SEQ ID NO: 8694 - DNA, 20 bp, synthetic construct
  misc_feature 1..20: note = chemically synthesized
  source 1..20: mol_type = other DNA
gcttgtggctgagctgtgct

SEQ ID NO: 8695 - DNA, 20 bp, synthetic construct
  misc_feature 1..20: note = chemically synthesized
  source 1..20: mol_type = other DNA
gctgagctgtgctaggtaac

SEQ ID NO: 8696 - DNA, 20 bp, synthetic construct
  misc_feature 1..20: note = chemically synthesized
  source 1..20: mol_type = other DNA
ctgagctgtgctaggtaact

SEQ ID NO: 8697 - DNA, 20 bp, synthetic construct
  misc_feature 1..20: note = chemically synthesized
  source 1..20: mol_type = other DNA
agctgtgctaggtaactggg

SEQ ID NO: 8698 - DNA, 20 bp, synthetic construct
  misc_feature 1..20: note = chemically synthesized
  source 1..20: mol_type = other DNA
tgctaggtaactgggtggcc

SEQ ID NO: 8699 - DNA, 20 bp, synthetic construct
  misc_feature 1..20: note = chemically synthesized
  source 1..20: mol_type = other DNA
gctaggtaactgggtggcct

SEQ ID NO: 8700 - DNA, 20 bp, synthetic construct
  misc_feature 1..20: note = chemically synthesized
  source 1..20: mol_type = other DNA
ggtaactgggtggcctgggc

SEQ ID NO: 8701 - DNA, 20 bp, synthetic construct
  misc_feature 1..20: note = chemically synthesized
  source 1..20: mol_type = other DNA
gcaagtcacttcacctccct

SEQ ID NO: 8702 - DNA, 20 bp, synthetic construct
  misc_feature 1..20: note = chemically synthesized
  source 1..20: mol_type = other DNA
ctcccttggcctgtgtcctt

SEQ ID NO: 8703 - DNA, 20 bp, synthetic construct
  misc_feature 1..20: note = chemically synthesized
  source 1..20: mol_type = other DNA
cctgtgtccttgagctttcc

SEQ ID NO: 8704 - DNA, 20 bp, synthetic construct
  misc_feature 1..20: note = chemically synthesized
  source 1..20: mol_type = other DNA
ctggctgcacatcttgctct

SEQ ID NO: 8705 - DNA, 20 bp, synthetic construct
  misc_feature 1..20: note = chemically synthesized
  source 1..20: mol_type = other DNA
tggctgcacatcttgctctc

SEQ ID NO: 8706 - DNA, 20 bp, synthetic construct
  misc_feature 1..20: note = chemically synthesized
  source 1..20: mol_type = other DNA
acatcttgctctcaggtata

SEQ ID NO: 8707 - DNA, 20 bp, synthetic construct
  misc_feature 1..20: note = chemically synthesized
  source 1..20: mol_type = other DNA
catcttgctctcaggtataa

SEQ ID NO: 8708 - DNA, 20 bp, synthetic construct
  misc_feature 1..20: note = chemically synthesized
  source 1..20: mol_type = other DNA
cacacactcgcctctcaaat

SEQ ID NO: 8709 - DNA, 20 bp, synthetic construct
  misc_feature 1..20: note = chemically synthesized
  source 1..20: mol_type = other DNA
cactcgcctctcaaatgaga

SEQ ID NO: 8710 - DNA, 20 bp, synthetic construct
  misc_feature 1..20: note = chemically synthesized
  source 1..20: mol_type = other DNA
actcgcctctcaaatgagaa

SEQ ID NO: 8711 - DNA, 20 bp, synthetic construct
  misc_feature 1..20: note = chemically synthesized
  source 1..20: mol_type = other DNA
cgcctctcaaatgagaaagg

SEQ ID NO: 8712 - DNA, 20 bp, synthetic construct
  misc_feature 1..20: note = chemically synthesized
  source 1..20: mol_type = other DNA
caaatgagaaaggcagcttt

SEQ ID NO: 8713 - DNA, 20 bp, synthetic construct
  misc_feature 1..20: note = chemically synthesized
  source 1..20: mol_type = other DNA
aatgagaaaggcagctttga

SEQ ID NO: 8714 - DNA, 20 bp, synthetic construct
  misc_feature 1..20: note = chemically synthesized
  source 1..20: mol_type = other DNA
tgagaaaggcagctttgaga

SEQ ID NO: 8715 - DNA, 20 bp, synthetic construct
  misc_feature 1..20: note = chemically synthesized
  source 1..20: mol_type = other DNA
gagaaaggcagctttgagag

SEQ ID NO: 8716 - DNA, 20 bp, synthetic construct
  misc_feature 1..20: note = chemically synthesized
  source 1..20: mol_type = other DNA
agagaggatgcttgccttcc

SEQ ID NO: 8717 - DNA, 20 bp, synthetic construct
  misc_feature 1..20: note = chemically synthesized
  source 1..20: mol_type = other DNA
tcccggctcccctcccaacc

SEQ ID NO: 8718 - DNA, 20 bp, synthetic construct
  misc_feature 1..20: note = chemically synthesized
  source 1..20: mol_type = other DNA
gaacctatcacaatgctctg

SEQ ID NO: 8719 - DNA, 20 bp, synthetic construct
  misc_feature 1..20: note = chemically synthesized
  source 1..20: mol_type = other DNA
acctatcacaatgctctgca

SEQ ID NO: 8720 - DNA, 20 bp, synthetic construct
  misc_feature 1..20: note = chemically synthesized
  source 1..20: mol_type = other DNA
ctatcacaatgctctgcaga

SEQ ID NO: 8721 - DNA, 20 bp, synthetic construct
  misc_feature 1..20: note = chemically synthesized
  source 1..20: mol_type = other DNA
atccaatgctaaattgtaaa

SEQ ID NO: 8722 - DNA, 20 bp, synthetic construct
  misc_feature 1..20: note = chemically synthesized
  source 1..20: mol_type = other DNA
aatgctaaattgtaaaaagt

SEQ ID NO: 8723 - DNA, 20 bp, synthetic construct
  misc_feature 1..20: note = chemically synthesized
  source 1..20: mol_type = other DNA
taaattgtaaaaagtgagac

SEQ ID NO: 8724 - DNA, 20 bp, synthetic construct
  misc_feature 1..20: note = chemically synthesized
  source 1..20: mol_type = other DNA
ttgtaaaaagtgagactaga

SEQ ID NO: 8725 - DNA, 20 bp, synthetic construct
  misc_feature 1..20: note = chemically synthesized
  source 1..20: mol_type = other DNA
atggtatctgcctctcctct

SEQ ID NO: 8726 - DNA, 20 bp, synthetic construct
  misc_feature 1..20: note = chemically synthesized
  source 1..20: mol_type = other DNA
cctctcagctctaaattatt

SEQ ID NO: 8727 - DNA, 20 bp, synthetic construct
  misc_feature 1..20: note = chemically synthesized
  source 1..20: mol_type = other DNA
gctctaaattatttggtcta

SEQ ID NO: 8728 - DNA, 20 bp, synthetic construct
  misc_feature 1..20: note = chemically synthesized
  source 1..20: mol_type = other DNA
atttggtctaaagaaaactg

SEQ ID NO: 8729 - DNA, 20 bp, synthetic construct
  misc_feature 1..20: note = chemically synthesized
  source 1..20: mol_type = other DNA
ctaaagaaaactgaagcccc

SEQ ID NO: 8730 - DNA, 20 bp, synthetic construct
  misc_feature 1..20: note = chemically synthesized
  source 1..20: mol_type = other DNA
ctccattttgcatatctaat

SEQ ID NO: 8731 - DNA, 20 bp, synthetic construct
  misc_feature 1..20: note = chemically synthesized
  source 1..20: mol_type = other DNA
ccattttgcatatctaattg

SEQ ID NO: 8732 - DNA, 20 bp, synthetic construct
  misc_feature 1..20: note = chemically synthesized
  source 1..20: mol_type = other DNA
tttgcatatctaattggaga

SEQ ID NO: 8733 - DNA, 20 bp, synthetic construct
  misc_feature 1..20: note = chemically synthesized
  source 1..20: mol_type = other DNA
gtttcaataatataattatc

SEQ ID NO: 8734 - DNA, 20 bp, synthetic construct
  misc_feature 1..20: note = chemically synthesized
  source 1..20: mol_type = other DNA
tttcaataatataattatca

SEQ ID NO: 8735 - DNA, 20 bp, synthetic construct
  misc_feature 1..20: note = chemically synthesized
  source 1..20: mol_type = other DNA
aggcatccctacgttacttg

SEQ ID NO: 8736 - DNA, 20 bp, synthetic construct
  misc_feature 1..20: note = chemically synthesized
  source 1..20: mol_type = other DNA
atccctacgttacttgaagt

SEQ ID NO: 8737 - DNA, 20 bp, synthetic construct
  misc_feature 1..20: note = chemically synthesized
  source 1..20: mol_type = other DNA
cttgaagttggttcataatc

SEQ ID NO: 8738 - DNA, 20 bp, synthetic construct
  misc_feature 1..20: note = chemically synthesized
  source 1..20: mol_type = other DNA
tcataatctggcgacgttca

SEQ ID NO: 8739 - DNA, 20 bp, synthetic construct
  misc_feature 1..20: note = chemically synthesized
  source 1..20: mol_type = other DNA
gcgacgttcacagccttatg

SEQ ID NO: 8740 - DNA, 20 bp, synthetic construct
  misc_feature 1..20: note = chemically synthesized
  source 1..20: mol_type = other DNA
cgttcacagccttatgaaga

SEQ ID NO: 8741 - DNA, 20 bp, synthetic construct
  misc_feature 1..20: note = chemically synthesized
  source 1..20: mol_type = other DNA
gaagacagtttattctcttt

SEQ ID NO: 8742 - DNA, 20 bp, synthetic construct
  misc_feature 1..20: note = chemically synthesized
  source 1..20: mol_type = other DNA
ttattctcttttagtgtctc

SEQ ID NO: 8743 - DNA, 20 bp, synthetic construct
  misc_feature 1..20: note = chemically synthesized
  source 1..20: mol_type = other DNA
tcttttagtgtctcaagtat

SEQ ID NO: 8744 - DNA, 20 bp, synthetic construct
  misc_feature 1..20: note = chemically synthesized
  source 1..20: mol_type = other DNA
gtatgagtcacctctgatga

SEQ ID NO: 8745 - DNA, 20 bp, synthetic construct
  misc_feature 1..20: note = chemically synthesized
  source 1..20: mol_type = other DNA
gagtcacctctgatgacgga

SEQ ID NO: 8746 - DNA, 20 bp, synthetic construct
  misc_feature 1..20: note = chemically synthesized
  source 1..20: mol_type = other DNA
agtcacctctgatgacggat

SEQ ID NO: 8747 - DNA, 20 bp, synthetic construct
  misc_feature 1..20: note = chemically synthesized
  source 1..20: mol_type = other DNA
tcacctctgatgacggatag

SEQ ID NO: 8748 - DNA, 20 bp, synthetic construct
  misc_feature 1..20: note = chemically synthesized
  source 1..20: mol_type = other DNA
ctgatgacggataggagaac

SEQ ID NO: 8749 - DNA, 20 bp, synthetic construct
  misc_feature 1..20: note = chemically synthesized
  source 1..20: mol_type = other DNA
atgacggataggagaacaag

SEQ ID NO: 8750 - DNA, 20 bp, synthetic construct
  misc_feature 1..20: note = chemically synthesized
  source 1..20: mol_type = other DNA
tgacggataggagaacaagc

SEQ ID NO: 8751 - DNA, 20 bp, synthetic construct
  misc_feature 1..20: note = chemically synthesized
  source 1..20: mol_type = other DNA
tttactacaatacacaccta

SEQ ID NO: 8752 - DNA, 20 bp, synthetic construct
  misc_feature 1..20: note = chemically synthesized
  source 1..20: mol_type = other DNA
aaccactttgcccacccaca

SEQ ID NO: 8753 - DNA, 20 bp, synthetic construct
  misc_feature 1..20: note = chemically synthesized
  source 1..20: mol_type = other DNA
ccacccacatggcatccatt

SEQ ID NO: 8754 - DNA, 20 bp, synthetic construct
  misc_feature 1..20: note = chemically synthesized
  source 1..20: mol_type = other DNA
acccacatggcatccatttg

SEQ ID NO: 8755 - DNA, 20 bp, synthetic construct
  misc_feature 1..20: note = chemically synthesized
  source 1..20: mol_type = other DNA
cccacatggcatccatttgg

SEQ ID NO: 8756 - DNA, 20 bp, synthetic construct
  misc_feature 1..20: note = chemically synthesized
  source 1..20: mol_type = other DNA
cacatggcatccatttggag

SEQ ID NO: 8757 - DNA, 20 bp, synthetic construct
  misc_feature 1..20: note = chemically synthesized
  source 1..20: mol_type = other DNA
gcatccatttggaggagaca

SEQ ID NO: 8758 - DNA, 20 bp, synthetic construct
  misc_feature 1..20: note = chemically synthesized
  source 1..20: mol_type = other DNA
atccatttggaggagacaca

SEQ ID NO: 8759 - DNA, 20 bp, synthetic construct
  misc_feature 1..20: note = chemically synthesized
  source 1..20: mol_type = other DNA
atttggaggagacacagaga

SEQ ID NO: 8760 - DNA, 20 bp, synthetic construct
  misc_feature 1..20: note = chemically synthesized
  source 1..20: mol_type = other DNA
tttggaggagacacagagaa

SEQ ID NO: 8761 - DNA, 20 bp, synthetic construct
  misc_feature 1..20: note = chemically synthesized
  source 1..20: mol_type = other DNA
tggaggagacacagagaaag

SEQ ID NO: 8762 - DNA, 20 bp, synthetic construct
  misc_feature 1..20: note = chemically synthesized
  source 1..20: mol_type = other DNA
gagaaaggagtttcacctct

SEQ ID NO: 8763 - DNA, 20 bp, synthetic construct
  misc_feature 1..20: note = chemically synthesized
  source 1..20: mol_type = other DNA
gtttcacctcttagacgtct

SEQ ID NO: 8764 - DNA, 20 bp, synthetic construct
  misc_feature 1..20: note = chemically synthesized
  source 1..20: mol_type = other DNA
ttcacctcttagacgtctca

SEQ ID NO: 8765 - DNA, 20 bp, synthetic construct
  misc_feature 1..20: note = chemically synthesized
  source 1..20: mol_type = other DNA
ttttctcaaaaatgaacaca

SEQ ID NO: 8766 - DNA, 20 bp, synthetic construct
  misc_feature 1..20: note = chemically synthesized
  source 1..20: mol_type = other DNA
ttctcaaaaatgaacacaca

SEQ ID NO: 8767 - DNA, 20 bp, synthetic construct
  misc_feature 1..20: note = chemically synthesized
  source 1..20: mol_type = other DNA
aaaatgaacacacagagcaa

SEQ ID NO: 8768 - DNA, 20 bp, synthetic construct
  misc_feature 1..20: note = chemically synthesized
  source 1..20: mol_type = other DNA
cacacagagcaacagctgac

SEQ ID NO: 8769 - DNA, 20 bp, synthetic construct
  misc_feature 1..20: note = chemically synthesized
  source 1..20: mol_type = other DNA
gagcaacagctgacgagtca

SEQ ID NO: 8770 - DNA, 20 bp, synthetic construct
  misc_feature 1..20: note = chemically synthesized
  source 1..20: mol_type = other DNA
caacagctgacgagtcacag

SEQ ID NO: 8771 - DNA, 20 bp, synthetic construct
  misc_feature 1..20: note = chemically synthesized
  source 1..20: mol_type = other DNA
gtggaccacaccaccacctc

SEQ ID NO: 8772 - DNA, 20 bp, synthetic construct
  misc_feature 1..20: note = chemically synthesized
  source 1..20: mol_type = other DNA
accacctctggttaccccct

SEQ ID NO: 8773 - DNA, 20 bp, synthetic construct
  misc_feature 1..20: note = chemically synthesized
  source 1..20: mol_type = other DNA
cctctggttaccccctgaga

SEQ ID NO: 8774 - DNA, 20 bp, synthetic construct
  misc_feature 1..20: note = chemically synthesized
  source 1..20: mol_type = other DNA
ctctggttaccccctgagaa

SEQ ID NO: 8775 - DNA, 20 bp, synthetic construct
  misc_feature 1..20: note = chemically synthesized
  source 1..20: mol_type = other DNA
tggttaccccctgagaaagg

SEQ ID NO: 8776 - DNA, 20 bp, synthetic construct
  misc_feature 1..20: note = chemically synthesized
  source 1..20: mol_type = other DNA
gttaccccctgagaaaggca

SEQ ID NO: 8777 - DNA, 20 bp, synthetic construct
  misc_feature 1..20: note = chemically synthesized
  source 1..20: mol_type = other DNA
ccccctgagaaaggcagaga

SEQ ID NO: 8778 - DNA, 20 bp, synthetic construct
  misc_feature 1..20: note = chemically synthesized
  source 1..20: mol_type = other DNA
cccctgagaaaggcagagaa

SEQ ID NO: 8779 - DNA, 20 bp, synthetic construct
  misc_feature 1..20: note = chemically synthesized
  source 1..20: mol_type = other DNA
aaaggcagagaaaggacccc

SEQ ID NO: 8780 - DNA, 20 bp, synthetic construct
  misc_feature 1..20: note = chemically synthesized
  source 1..20: mol_type = other DNA
cagagaaaggacccccagaa

SEQ ID NO: 8781 - DNA, 20 bp, synthetic construct
  misc_feature 1..20: note = chemically synthesized
  source 1..20: mol_type = other DNA
ccccagaacagtcaccattt

SEQ ID NO: 8782 - DNA, 20 bp, synthetic construct
  misc_feature 1..20: note = chemically synthesized
  source 1..20: mol_type = other DNA
cccagaacagtcaccatttg

SEQ ID NO: 8783 - DNA, 20 bp, synthetic construct
  misc_feature 1..20: note = chemically synthesized
  source 1..20: mol_type = other DNA
cagaacagtcaccatttgag

SEQ ID NO: 8784 - DNA, 20 bp, synthetic construct
  misc_feature 1..20: note = chemically synthesized
  source 1..20: mol_type = other DNA
gaacagtcaccatttgagga

SEQ ID NO: 8785 - DNA, 20 bp, synthetic construct
  misc_feature 1..20: note = chemically synthesized
  source 1..20: mol_type = other DNA
aacagtcaccatttgaggag

SEQ ID NO: 8786 - DNA, 20 bp, synthetic construct
  misc_feature 1..20: note = chemically synthesized
  source 1..20: mol_type = other DNA
tcaccatttgaggagaggtt

SEQ ID NO: 8787 - DNA, 20 bp, synthetic construct
  misc_feature 1..20: note = chemically synthesized
  source 1..20: mol_type = other DNA
caccatttgaggagaggttc

SEQ ID NO: 8788 - DNA, 20 bp, synthetic construct
  misc_feature 1..20: note = chemically synthesized
  source 1..20: mol_type = other DNA
accatttgaggagaggttca

SEQ ID NO: 8789 - DNA, 20 bp, synthetic construct
  misc_feature 1..20: note = chemically synthesized
  source 1..20: mol_type = other DNA
aggagaggttcagggatcat

SEQ ID NO: 8790 - DNA, 20 bp, synthetic construct
  misc_feature 1..20: note = chemically synthesized
  source 1..20: mol_type = other DNA
ggagaggttcagggatcatg

SEQ ID NO: 8791 - DNA, 20 bp, synthetic construct
  misc_feature 1..20: note = chemically synthesized
  source 1..20: mol_type = other DNA
caccaccccactgaaatcca

SEQ ID NO: 8792 - DNA, 20 bp, synthetic construct
  misc_feature 1..20: note = chemically synthesized
  source 1..20: mol_type = other DNA
accccactgaaatccatgga

SEQ ID NO: 8793 - DNA, 20 bp, synthetic construct
  misc_feature 1..20: note = chemically synthesized
  source 1..20: mol_type = other DNA
actgaaatccatggatagtc

SEQ ID NO: 8794 - DNA, 20 bp, synthetic construct
  misc_feature 1..20: note = chemically synthesized
  source 1..20: mol_type = other DNA
ccatggatagtctagcctgt

SEQ ID NO: 8795 - DNA, 20 bp, synthetic construct
  misc_feature 1..20: note = chemically synthesized
  source 1..20: mol_type = other DNA
catggatagtctagcctgtg

SEQ ID NO: 8796 - DNA, 20 bp, synthetic construct
  misc_feature 1..20: note = chemically synthesized
  source 1..20: mol_type = other DNA
atggatagtctagcctgtga

SEQ ID NO: 8797 - DNA, 20 bp, synthetic construct
  misc_feature 1..20: note = chemically synthesized
  source 1..20: mol_type = other DNA
tggatagtctagcctgtgag

SEQ ID NO: 8798 - DNA, 20 bp, synthetic construct
  misc_feature 1..20: note = chemically synthesized
  source 1..20: mol_type = other DNA
tagtctagcctgtgaggggt

SEQ ID NO: 8799 - DNA, 20 bp, synthetic construct
  misc_feature 1..20: note = chemically synthesized
  source 1..20: mol_type = other DNA
agtctagcctgtgaggggtt

SEQ ID NO: 8800 - DNA, 20 bp, synthetic construct
  misc_feature 1..20: note = chemically synthesized
  source 1..20: mol_type = other DNA
gtctagcctgtgaggggttg

SEQ ID NO: 8801 - DNA, 20 bp, synthetic construct
  misc_feature 1..20: note = chemically synthesized
  source 1..20: mol_type = other DNA
tctagcctgtgaggggttgg

SEQ ID NO: 8802 - DNA, 20 bp, synthetic construct
  misc_feature 1..20: note = chemically synthesized
  source 1..20: mol_type = other DNA
agcctgtgaggggttggggg

SEQ ID NO: 8803 - DNA, 20 bp, synthetic construct
  misc_feature 1..20: note = chemically synthesized
  source 1..20: mol_type = other DNA
actttatctttctcatcttt

SEQ ID NO: 8804 - DNA, 20 bp, synthetic construct
  misc_feature 1..20: note = chemically synthesized
  source 1..20: mol_type = other DNA
ttatctttctcatctttgag

SEQ ID NO: 8805 - DNA, 20 bp, synthetic construct
  misc_feature 1..20: note = chemically synthesized
  source 1..20: mol_type = other DNA
atctttgagcggctcttccc

SEQ ID NO: 8806 - DNA, 20 bp, synthetic construct
  misc_feature 1..20: note = chemically synthesized
  source 1..20: mol_type = other DNA
ctttgagcggctcttcccca

SEQ ID NO: 8807 - DNA, 20 bp, synthetic construct
  misc_feature 1..20: note = chemically synthesized
  source 1..20: mol_type = other DNA
gagcggctcttccccagagt

SEQ ID NO: 8808 - DNA, 20 bp, synthetic construct
  misc_feature 1..20: note = chemically synthesized
  source 1..20: mol_type = other DNA
agcggctcttccccagagtc

SEQ ID NO: 8809 - DNA, 20 bp, synthetic construct
  misc_feature 1..20: note = chemically synthesized
  source 1..20: mol_type = other DNA
agagtcaggatgactctcac

SEQ ID NO: 8810 - DNA, 20 bp, synthetic construct
  misc_feature 1..20: note = chemically synthesized
  source 1..20: mol_type = other DNA
gagtcaggatgactctcact

SEQ ID NO: 8811 - DNA, 20 bp, synthetic construct
  misc_feature 1..20: note = chemically synthesized
  source 1..20: mol_type = other DNA
ggatgactctcactaggttt

SEQ ID NO: 8812 - DNA, 20 bp, synthetic construct
  misc_feature 1..20: note = chemically synthesized
  source 1..20: mol_type = other DNA
gatgactctcactaggtttc

SEQ ID NO: 8813 - DNA, 20 bp, synthetic construct
  misc_feature 1..20: note = chemically synthesized
  source 1..20: mol_type = other DNA
ggtacatccccatcatgccc

SEQ ID NO: 8814 - DNA, 20 bp, synthetic construct
  misc_feature 1..20: note = chemically synthesized
  source 1..20: mol_type = other DNA
ccccatcatgccccggactc

SEQ ID NO: 8815 - DNA, 20 bp, synthetic construct
  misc_feature 1..20: note = chemically synthesized
  source 1..20: mol_type = other DNA
gccccggactccagtctctg

SEQ ID NO: 8816 - DNA, 20 bp, synthetic construct
  misc_feature 1..20: note = chemically synthesized
  source 1..20: mol_type = other DNA
tccagtctctgcagctgaca

SEQ ID NO: 8817 - DNA, 20 bp, synthetic construct
  misc_feature 1..20: note = chemically synthesized
  source 1..20: mol_type = other DNA
tctgcagctgacacggctcc

SEQ ID NO: 8818 - DNA, 20 bp, synthetic construct
  misc_feature 1..20: note = chemically synthesized
  source 1..20: mol_type = other DNA
ggctccaagatgctaaatat

SEQ ID NO: 8819 - DNA, 20 bp, synthetic construct
  misc_feature 1..20: note = chemically synthesized
  source 1..20: mol_type = other DNA
caagatgctaaatatgagac

SEQ ID NO: 8820 - DNA, 20 bp, synthetic construct
  misc_feature 1..20: note = chemically synthesized
  source 1..20: mol_type = other DNA
aagatgctaaatatgagaca

SEQ ID NO: 8821 - DNA, 20 bp, synthetic construct
  misc_feature 1..20: note = chemically synthesized
  source 1..20: mol_type = other DNA
gatgctaaatatgagacaag

SEQ ID NO: 8822 - DNA, 20 bp, synthetic construct
  misc_feature 1..20: note = chemically synthesized
  source 1..20: mol_type = other DNA
atgctaaatatgagacaagg

SEQ ID NO: 8823 - DNA, 20 bp, synthetic construct
  misc_feature 1..20: note = chemically synthesized
  source 1..20: mol_type = other DNA
tgctaaatatgagacaagga

SEQ ID NO: 8824 - DNA, 20 bp, synthetic construct
  misc_feature 1..20: note = chemically synthesized
  source 1..20: mol_type = other DNA
gctaaatatgagacaaggag

SEQ ID NO: 8825 - DNA, 20 bp, synthetic construct
  misc_feature 1..20: note = chemically synthesized
  source 1..20: mol_type = other DNA
atatgagacaaggaggggac

SEQ ID NO: 8826 - DNA, 20 bp, synthetic construct
  misc_feature 1..20: note = chemically synthesized
  source 1..20: mol_type = other DNA
tatgagacaaggaggggaca

SEQ ID NO: 8827 - DNA, 20 bp, synthetic construct
  misc_feature 1..20: note = chemically synthesized
  source 1..20: mol_type = other DNA
caaggaggggacaaggaatt

SEQ ID NO: 8828 - DNA, 20 bp, synthetic construct
  misc_feature 1..20: note = chemically synthesized
  source 1..20: mol_type = other DNA
ggggacaaggaatttagtcc

SEQ ID NO: 8829 - DNA, 20 bp, synthetic construct
  misc_feature 1..20: note = chemically synthesized
  source 1..20: mol_type = other DNA
gggacaaggaatttagtccc

SEQ ID NO: 8830 - DNA, 20 bp, synthetic construct
  misc_feature 1..20: note = chemically synthesized
  source 1..20: mol_type = other DNA
gacaaggaatttagtcccag

SEQ ID NO: 8831 - DNA, 20 bp, synthetic construct
  misc_feature 1..20: note = chemically synthesized
  source 1..20: mol_type = other DNA
aaggaatttagtcccaggag

SEQ ID NO: 8832 - DNA, 20 bp, synthetic construct
  misc_feature 1..20: note = chemically synthesized
  source 1..20: mol_type = other DNA
tttagtcccaggagtggcac

SEQ ID NO: 8833 - DNA, 20 bp, synthetic construct
  misc_feature 1..20: note = chemically synthesized
  source 1..20: mol_type = other DNA
agtcccaggagtggcactag

SEQ ID NO: 8834 - DNA, 20 bp, synthetic construct
  misc_feature 1..20: note = chemically synthesized
  source 1..20: mol_type = other DNA
gtcccaggagtggcactaga

SEQ ID NO: 8835 - DNA, 20 bp, synthetic construct
  misc_feature 1..20: note = chemically synthesized
  source 1..20: mol_type = other DNA
cccaggagtggcactagaag

SEQ ID NO: 8836 - DNA, 20 bp, synthetic construct
  misc_feature 1..20: note = chemically synthesized
  source 1..20: mol_type = other DNA
agaaggagtccctgctccct

SEQ ID NO: 8837 - DNA, 20 bp, synthetic construct
  misc_feature 1..20: note = chemically synthesized
  source 1..20: mol_type = other DNA
gaaggagtccctgctccctc

SEQ ID NO: 8838 - DNA, 20 bp, synthetic construct
  misc_feature 1..20: note = chemically synthesized
  source 1..20: mol_type = other DNA
aggagtccctgctccctcag

SEQ ID NO: 8839 - DNA, 20 bp, synthetic construct
  misc_feature 1..20: note = chemically synthesized
  source 1..20: mol_type = other DNA
ctccctcaggagccatctgc

SEQ ID NO: 8840 - DNA, 20 bp, synthetic construct
  misc_feature 1..20: note = chemically synthesized
  source 1..20: mol_type = other DNA
tccctcaggagccatctgcc

SEQ ID NO: 8841 - DNA, 20 bp, synthetic construct
  misc_feature 1..20: note = chemically synthesized
  source 1..20: mol_type = other DNA
agccatctgccgggtgcttc

SEQ ID NO: 8842 - DNA, 20 bp, synthetic construct
  misc_feature 1..20: note = chemically synthesized
  source 1..20: mol_type = other DNA
ccatctgccgggtgcttctg

SEQ ID NO: 8843 - DNA, 20 bp, synthetic construct
  misc_feature 1..20: note = chemically synthesized
  source 1..20: mol_type = other DNA
gctgcctccacgccccactt

SEQ ID NO: 8844 - DNA, 20 bp, synthetic construct
  misc_feature 1..20: note = chemically synthesized
  source 1..20: mol_type = other DNA
ctgcctccacgccccacttg

SEQ ID NO: 8845 - DNA, 20 bp, synthetic construct
  misc_feature 1..20: note = chemically synthesized
  source 1..20: mol_type = other DNA
gccccacttgaggctgtcca

SEQ ID NO: 8846 - DNA, 20 bp, synthetic construct
  misc_feature 1..20: note = chemically synthesized
  source 1..20: mol_type = other DNA
ccacttgaggctgtccacag

SEQ ID NO: 8847 - DNA, 20 bp, synthetic construct
  misc_feature 1..20: note = chemically synthesized
  source 1..20: mol_type = other DNA
aggctgtccacagcagaaac

SEQ ID NO: 8848 - DNA, 20 bp, synthetic construct
  misc_feature 1..20: note = chemically synthesized
  source 1..20: mol_type = other DNA
ccacagcagaaaccagcgcc

SEQ ID NO: 8849 - DNA, 20 bp, synthetic construct
  misc_feature 1..20: note = chemically synthesized
  source 1..20: mol_type = other DNA
accagcgcccagatcccctc

SEQ ID NO: 8850 - DNA, 20 bp, synthetic construct
  misc_feature 1..20: note = chemically synthesized
  source 1..20: mol_type = other DNA
gcgcccagatcccctcaagc

SEQ ID NO: 8851 - DNA, 20 bp, synthetic construct
  misc_feature 1..20: note = chemically synthesized
  source 1..20: mol_type = other DNA
ccctcaagccagccacccca

SEQ ID NO: 8852 - DNA, 20 bp, synthetic construct
  misc_feature 1..20: note = chemically synthesized
  source 1..20: mol_type = other DNA
cctcaagccagccaccccat

SEQ ID NO: 8853 - DNA, 20 bp, synthetic construct
  misc_feature 1..20: note = chemically synthesized
  source 1..20: mol_type = other DNA
ccaccccatgggaacccctt

SEQ ID NO: 8854 - DNA, 20 bp, synthetic construct
  misc_feature 1..20: note = chemically synthesized
  source 1..20: mol_type = other DNA
ccccatgggaacccctttgg

SEQ ID NO: 8855 - DNA, 20 bp, synthetic construct
  misc_feature 1..20: note = chemically synthesized
  source 1..20: mol_type = other DNA
cccatgggaacccctttggc

SEQ ID NO: 8856 - DNA, 20 bp, synthetic construct
  misc_feature 1..20: note = chemically synthesized
  source 1..20: mol_type = other DNA
gggaacccctttggcaggtg

SEQ ID NO: 8857 - DNA, 20 bp, synthetic construct
  misc_feature 1..20: note = chemically synthesized
  source 1..20: mol_type = other DNA
ggaacccctttggcaggtgt

SEQ ID NO: 8858 - DNA, 20 bp, synthetic construct
  misc_feature 1..20: note = chemically synthesized
  source 1..20: mol_type = other DNA
cctttggcaggtgtgggtgt

SEQ ID NO: 8859 - DNA, 20 bp, synthetic construct
  misc_feature 1..20: note = chemically synthesized
  source 1..20: mol_type = other DNA
ctttggcaggtgtgggtgtt

SEQ ID NO: 8860 - DNA, 20 bp, synthetic construct
  misc_feature 1..20: note = chemically synthesized
  source 1..20: mol_type = other DNA
ggcaggtgtgggtgttgggt

SEQ ID NO: 8861 - DNA, 20 bp, synthetic construct
  misc_feature 1..20: note = chemically synthesized
  source 1..20: mol_type = other DNA
gtgggtgttgggttagcctc

SEQ ID NO: 8862 - DNA, 20 bp, synthetic construct
  misc_feature 1..20: note = chemically synthesized
  source 1..20: mol_type = other DNA
gtgttgggttagcctctagc

SEQ ID NO: 8863 - DNA, 20 bp, synthetic construct
  misc_feature 1..20: note = chemically synthesized
  source 1..20: mol_type = other DNA
tcctgctgcttctctctttg

SEQ ID NO: 8864 - DNA, 20 bp, synthetic construct
  misc_feature 1..20: note = chemically synthesized
  source 1..20: mol_type = other DNA
ctgctgcttctctctttgtg

SEQ ID NO: 8865 - DNA, 20 bp, synthetic construct
  misc_feature 1..20: note = chemically synthesized
  source 1..20: mol_type = other DNA
gcaaatcttcatgtcctgtc

SEQ ID NO: 8866 - DNA, 20 bp, synthetic construct
  misc_feature 1..20: note = chemically synthesized
  source 1..20: mol_type = other DNA
atgtcctgtctggatcttcc

SEQ ID NO: 8867 - DNA, 20 bp, synthetic construct
  misc_feature 1..20: note = chemically synthesized
  source 1..20: mol_type = other DNA
ctgaatcttcccacccttcc

SEQ ID NO: 8868 - DNA, 20 bp, synthetic construct
  misc_feature 1..20: note = chemically synthesized
  source 1..20: mol_type = other DNA
tgaatcttcccacccttcca

SEQ ID NO: 8869 - DNA, 20 bp, synthetic construct
  misc_feature 1..20: note = chemically synthesized
  source 1..20: mol_type = other DNA
gaatcttcccacccttccaa

SEQ ID NO: 8870 - DNA, 20 bp, synthetic construct
  misc_feature 1..20: note = chemically synthesized
  source 1..20: mol_type = other DNA
atctccccactcacacgcta

SEQ ID NO: 8871 - DNA, 20 bp, synthetic construct
  misc_feature 1..20: note = chemically synthesized
  source 1..20: mol_type = other DNA
aagtaaatgaataaacccaa

SEQ ID NO: 8872 - DNA, 20 bp, synthetic construct
  misc_feature 1..20: note = chemically synthesized
  source 1..20: mol_type = other DNA
aatgaataaacccaacagca

SEQ ID NO: 8873 - DNA, 20 bp, synthetic construct
  misc_feature 1..20: note = chemically synthesized
  source 1..20: mol_type = other DNA
agcacggactcatccctgat

SEQ ID NO: 8874 - DNA, 20 bp, synthetic construct
  misc_feature 1..20: note = chemically synthesized
  source 1..20: mol_type = other DNA
gcacggactcatccctgatc

SEQ ID NO: 8875 - DNA, 20 bp, synthetic construct
  misc_feature 1..20: note = chemically synthesized
  source 1..20: mol_type = other DNA
tccctgatcaggactgaaaa

SEQ ID NO: 8876 - DNA, 20 bp, synthetic construct
  misc_feature 1..20: note = chemically synthesized
  source 1..20: mol_type = other DNA
atcaggactgaaaaaagaaa

SEQ ID NO: 8877 - DNA, 20 bp, synthetic construct
  misc_feature 1..20: note = chemically synthesized
  source 1..20: mol_type = other DNA
actgaaaaaagaaaaagaaa

SEQ ID NO: 8878 - DNA, 20 bp, synthetic construct
  misc_feature 1..20: note = chemically synthesized
  source 1..20: mol_type = other DNA
cctcccatcacaccactctc

SEQ ID NO: 8879 - DNA, 20 bp, synthetic construct
  misc_feature 1..20: note = chemically synthesized
  source 1..20: mol_type = other DNA
ctcccatcacaccactctct

SEQ ID NO: 8880 - DNA, 20 bp, synthetic construct
  misc_feature 1..20: note = chemically synthesized
  source 1..20: mol_type = other DNA
cacaccactctctgggaaaa

SEQ ID NO: 8881 - DNA, 20 bp, synthetic construct
  misc_feature 1..20: note = chemically synthesized
  source 1..20: mol_type = other DNA
ctctctgggaaaatagaact

SEQ ID NO: 8882 - DNA, 20 bp, synthetic construct
  misc_feature 1..20: note = chemically synthesized
  source 1..20: mol_type = other DNA
gggaaaatagaactgagtcc

SEQ ID NO: 8883 - DNA, 20 bp, synthetic construct
  misc_feature 1..20: note = chemically synthesized
  source 1..20: mol_type = other DNA
atagaactgagtcctagctc

SEQ ID NO: 8884 - DNA, 20 bp, synthetic construct
  misc_feature 1..20: note = chemically synthesized
  source 1..20: mol_type = other DNA
ctgagtcctagctctagcac

SEQ ID NO: 8885 - DNA, 20 bp, synthetic construct
  misc_feature 1..20: note = chemically synthesized
  source 1..20: mol_type = other DNA
tgagtcctagctctagcact

SEQ ID NO: 8886 - DNA, 20 bp, synthetic construct
  misc_feature 1..20: note = chemically synthesized
  source 1..20: mol_type = other DNA
cctagctctagcactgggca

SEQ ID NO: 8887 - DNA, 20 bp, synthetic construct
  misc_feature 1..20: note = chemically synthesized
  source 1..20: mol_type = other DNA
gctctagcactgggcacagc

SEQ ID NO: 8888 - DNA, 20 bp, synthetic construct
  misc_feature 1..20: note = chemically synthesized
  source 1..20: mol_type = other DNA
ctctagcactgggcacagct

SEQ ID NO: 8889 - DNA, 20 bp, synthetic construct
  misc_feature 1..20: note = chemically synthesized
  source 1..20: mol_type = other DNA
agcactgggcacagctgggt

SEQ ID NO: 8890 - DNA, 20 bp, synthetic construct
  misc_feature 1..20: note = chemically synthesized
  source 1..20: mol_type = other DNA
cagctgggtcagcacctacg

SEQ ID NO: 8891 - DNA, 20 bp, synthetic construct
  misc_feature 1..20: note = chemically synthesized
  source 1..20: mol_type = other DNA
agctgggtcagcacctacga

SEQ ID NO: 8892 - DNA, 20 bp, synthetic construct
  misc_feature 1..20: note = chemically synthesized
  source 1..20: mol_type = other DNA
gctgggtcagcacctacgaa

SEQ ID NO: 8893 - DNA, 20 bp, synthetic construct
  misc_feature 1..20: note = chemically synthesized
  source 1..20: mol_type = other DNA
cacctacgaagggtcctatg

SEQ ID NO: 8894 - DNA, 20 bp, synthetic construct
  misc_feature 1..20: note = chemically synthesized
  source 1..20: mol_type = other DNA
cctatgcagtgaacaccttg

SEQ ID NO: 8895 - DNA, 20 bp, synthetic construct
  misc_feature 1..20: note = chemically synthesized
  source 1..20: mol_type = other DNA
agtgaacaccttgcagtctg

SEQ ID NO: 8896 - DNA, 20 bp, synthetic construct
  misc_feature 1..20: note = chemically synthesized
  source 1..20: mol_type = other DNA
gtgaacaccttgcagtctga

SEQ ID NO: 8897 - DNA, 20 bp, synthetic construct
  misc_feature 1..20: note = chemically synthesized
  source 1..20: mol_type = other DNA
tgaacaccttgcagtctgaa

SEQ ID NO: 8898 - DNA, 20 bp, synthetic construct
  misc_feature 1..20: note = chemically synthesized
  source 1..20: mol_type = other DNA
acaccttgcagtctgaaggg

SEQ ID NO: 8899 - DNA, 20 bp, synthetic construct
  misc_feature 1..20: note = chemically synthesized
  source 1..20: mol_type = other DNA
gcagactctctcttctcaac

SEQ ID NO: 8900 - DNA, 20 bp, synthetic construct
  misc_feature 1..20: note = chemically synthesized
  source 1..20: mol_type = other DNA
actctctcttctcaacaagc

SEQ ID NO: 8901 - DNA, 20 bp, synthetic construct
  misc_feature 1..20: note = chemically synthesized
  source 1..20: mol_type = other DNA
tctctcttctcaacaagcca

SEQ ID NO: 8902 - DNA, 20 bp, synthetic construct
  misc_feature 1..20: note = chemically synthesized
  source 1..20: mol_type = other DNA
gccagagattctctgccttc

SEQ ID NO: 8903 - DNA, 20 bp, synthetic construct
  misc_feature 1..20: note = chemically synthesized
  source 1..20: mol_type = other DNA
gagattctctgccttccaga

SEQ ID NO: 8904 - DNA, 20 bp, synthetic construct
  misc_feature 1..20: note = chemically synthesized
  source 1..20: mol_type = other DNA
agattctctgccttccagac

SEQ ID NO: 8905 - DNA, 20 bp, synthetic construct
  misc_feature 1..20: note = chemically synthesized
  source 1..20: mol_type = other DNA
tccagacaggcacctccatg

SEQ ID NO: 8906 - DNA, 20 bp, synthetic construct
  misc_feature 1..20: note = chemically synthesized
  source 1..20: mol_type = other DNA
cagacaggcacctccatgaa

SEQ ID NO: 8907 - DNA, 20 bp, synthetic construct
  misc_feature 1..20: note = chemically synthesized
  source 1..20: mol_type = other DNA
acaggcacctccatgaagag

SEQ ID NO: 8908 - DNA, 20 bp, synthetic construct
  misc_feature 1..20: note = chemically synthesized
  source 1..20: mol_type = other DNA
ccatgaagagaagctgttcc

SEQ ID NO: 8909 - DNA, 20 bp, synthetic construct
  misc_feature 1..20: note = chemically synthesized
  source 1..20: mol_type = other DNA
gagaagctgttcctggcttg

SEQ ID NO: 8910 - DNA, 20 bp, synthetic construct
  misc_feature 1..20: note = chemically synthesized
  source 1..20: mol_type = other DNA
agctgttcctggcttgtggt

SEQ ID NO: 8911 - DNA, 20 bp, synthetic construct
  misc_feature 1..20: note = chemically synthesized
  source 1..20: mol_type = other DNA
ttgtggtgagcaaaactccc

SEQ ID NO: 8912 - DNA, 20 bp, synthetic construct
  misc_feature 1..20: note = chemically synthesized
  source 1..20: mol_type = other DNA
tgagcaaaactccctggatt

SEQ ID NO: 8913 - DNA, 20 bp, synthetic construct
  misc_feature 1..20: note = chemically synthesized
  source 1..20: mol_type = other DNA
aaaactccctggattgagtc

SEQ ID NO: 8914 - DNA, 20 bp, synthetic construct
  misc_feature 1..20: note = chemically synthesized
  source 1..20: mol_type = other DNA
ccctggattgagtcgagacc

SEQ ID NO: 8915 - DNA, 20 bp, synthetic construct
  misc_feature 1..20: note = chemically synthesized
  source 1..20: mol_type = other DNA
ttgagtcgagacctggattc

SEQ ID NO: 8916 - DNA, 20 bp, synthetic construct
  misc_feature 1..20: note = chemically synthesized
  source 1..20: mol_type = other DNA
ttccactactttgaattctc

SEQ ID NO: 8917 - DNA, 20 bp, synthetic construct
  misc_feature 1..20: note = chemically synthesized
  source 1..20: mol_type = other DNA
tccactactttgaattctct

SEQ ID NO: 8918 - DNA, 20 bp, synthetic construct
  misc_feature 1..20: note = chemically synthesized
  source 1..20: mol_type = other DNA
ctttgaattctctaggttca

SEQ ID NO: 8919 - DNA, 20 bp, synthetic construct
  misc_feature 1..20: note = chemically synthesized
  source 1..20: mol_type = other DNA
ggttcacagtcctaaatcct

SEQ ID NO: 8920 - DNA, 20 bp, synthetic construct
  misc_feature 1..20: note = chemically synthesized
  source 1..20: mol_type = other DNA
ttcacagtcctaaatcctca

SEQ ID NO: 8921 - DNA, 20 bp, synthetic construct
  misc_feature 1..20: note = chemically synthesized
  source 1..20: mol_type = other DNA
acagtcctaaatcctcagag

SEQ ID NO: 8922 - DNA, 20 bp, synthetic construct
  misc_feature 1..20: note = chemically synthesized
  source 1..20: mol_type = other DNA
cagtcctaaatcctcagaga

SEQ ID NO: 8923 - DNA, 20 bp, synthetic construct
  misc_feature 1..20: note = chemically synthesized
  source 1..20: mol_type = other DNA
cctaaatcctcagagaagga

SEQ ID NO: 8924 - DNA, 20 bp, synthetic construct
  misc_feature 1..20: note = chemically synthesized
  source 1..20: mol_type = other DNA
cctcagagaaggacagactt

SEQ ID NO: 8925 - DNA, 20 bp, synthetic construct
  misc_feature 1..20: note = chemically synthesized
  source 1..20: mol_type = other DNA
ctcagagaaggacagacttg

SEQ ID NO: 8926 - DNA, 20 bp, synthetic construct
  misc_feature 1..20: note = chemically synthesized
  source 1..20: mol_type = other DNA
tcagagaaggacagacttga

SEQ ID NO: 8927 - DNA, 20 bp, synthetic construct
  misc_feature 1..20: note = chemically synthesized
  source 1..20: mol_type = other DNA
gagaaggacagacttgaggg

SEQ ID NO: 8928 - DNA, 20 bp, synthetic construct
  misc_feature 1..20: note = chemically synthesized
  source 1..20: mol_type = other DNA
aggacagacttgagggcaga

SEQ ID NO: 8929 - DNA, 20 bp, synthetic construct
  misc_feature 1..20: note = chemically synthesized
  source 1..20: mol_type = other DNA
gacttgagggcagacagcca

SEQ ID NO: 8930 - DNA, 20 bp, synthetic construct
  misc_feature 1..20: note = chemically synthesized
  source 1..20: mol_type = other DNA
acttgagggcagacagccac

SEQ ID NO: 8931 - DNA, 20 bp, synthetic construct
  misc_feature 1..20: note = chemically synthesized
  source 1..20: mol_type = other DNA
tgagggcagacagccacagg

SEQ ID NO: 8932 - DNA, 20 bp, synthetic construct
  misc_feature 1..20: note = chemically synthesized
  source 1..20: mol_type = other DNA
gcagacagccacaggtggcc

SEQ ID NO: 8933 - DNA, 20 bp, synthetic construct
  misc_feature 1..20: note = chemically synthesized
  source 1..20: mol_type = other DNA
cagccacaggtggcctggca

SEQ ID NO: 8934 - DNA, 20 bp, synthetic construct
  misc_feature 1..20: note = chemically synthesized
  source 1..20: mol_type = other DNA
agccacaggtggcctggcat

SEQ ID NO: 8935 - DNA, 20 bp, synthetic construct
  misc_feature 1..20: note = chemically synthesized
  source 1..20: mol_type = other DNA
caggtggcctggcatgggct

SEQ ID NO: 8936 - DNA, 20 bp, synthetic construct
  misc_feature 1..20: note = chemically synthesized
  source 1..20: mol_type = other DNA
aggtggcctggcatgggctg

SEQ ID NO: 8937 - DNA, 20 bp, synthetic construct
  misc_feature 1..20: note = chemically synthesized
  source 1..20: mol_type = other DNA
tggcctggcatgggctgagg

SEQ ID NO: 8938 - DNA, 20 bp, synthetic construct
  misc_feature 1..20: note = chemically synthesized
  source 1..20: mol_type = other DNA
catgggctgaggcagcacac

SEQ ID NO: 8939 - DNA, 20 bp, synthetic construct
  misc_feature 1..20: note = chemically synthesized
  source 1..20: mol_type = other DNA
atgggctgaggcagcacaca

SEQ ID NO: 8940 - DNA, 20 bp, synthetic construct
  misc_feature 1..20: note = chemically synthesized
  source 1..20: mol_type = other DNA
aggcagcacacaaggactct

SEQ ID NO: 8941 - DNA, 20 bp, synthetic construct
  misc_feature 1..20: note = chemically synthesized
  source 1..20: mol_type = other DNA
acaaggactctgagccacac

SEQ ID NO: 8942 - DNA, 20 bp, synthetic construct
  misc_feature 1..20: note = chemically synthesized
  source 1..20: mol_type = other DNA
ccacaccagccatctccttg

SEQ ID NO: 8943 - DNA, 20 bp, synthetic construct
  misc_feature 1..20: note = chemically synthesized
  source 1..20: mol_type = other DNA
atctccttgtggactttcct

SEQ ID NO: 8944 - DNA, 20 bp, synthetic construct
  misc_feature 1..20: note = chemically synthesized
  source 1..20: mol_type = other DNA
ctccttgtggactttcctga

SEQ ID NO: 8945 - DNA, 20 bp, synthetic construct
  misc_feature 1..20: note = chemically synthesized
  source 1..20: mol_type = other DNA
gactttcctgagagcacgtg

SEQ ID NO: 8946 - DNA, 20 bp, synthetic construct
  misc_feature 1..20: note = chemically synthesized
  source 1..20: mol_type = other DNA
ttcctgagagcacgtgcagc

SEQ ID NO: 8947 - DNA, 20 bp, synthetic construct
  misc_feature 1..20: note = chemically synthesized
  source 1..20: mol_type = other DNA
ctgagagcacgtgcagctag

SEQ ID NO: 8948 - DNA, 20 bp, synthetic construct
  misc_feature 1..20: note = chemically synthesized
  source 1..20: mol_type = other DNA
cgtgcagctagcagtgctcc

SEQ ID NO: 8949 - DNA, 20 bp, synthetic construct
  misc_feature 1..20: note = chemically synthesized
  source 1..20: mol_type = other DNA
cagtgctccaagcactctct

SEQ ID NO: 8950 - DNA, 20 bp, synthetic construct
  misc_feature 1..20: note = chemically synthesized
  source 1..20: mol_type = other DNA
gtgctccaagcactctctga

SEQ ID NO: 8951 - DNA, 20 bp, synthetic construct
  misc_feature 1..20: note = chemically synthesized
  source 1..20: mol_type = other DNA
tgctccaagcactctctgag

SEQ ID NO: 8952 - DNA, 20 bp, synthetic construct
  misc_feature 1..20: note = chemically synthesized
  source 1..20: mol_type = other DNA
agcactctctgagaggcttc

SEQ ID NO: 8953 - DNA, 20 bp, synthetic construct
  misc_feature 1..20: note = chemically synthesized
  source 1..20: mol_type = other DNA
gcactctctgagaggcttcc

SEQ ID NO: 8954 - DNA, 20 bp, synthetic construct
  misc_feature 1..20: note = chemically synthesized
  source 1..20: mol_type = other DNA
tctctgagaggcttccaggc

SEQ ID NO: 8955 - DNA, 20 bp, synthetic construct
  misc_feature 1..20: note = chemically synthesized
  source 1..20: mol_type = other DNA
tctgagaggcttccaggctg

SEQ ID NO: 8956 - DNA, 20 bp, synthetic construct
  misc_feature 1..20: note = chemically synthesized
  source 1..20: mol_type = other DNA
ggcttccaggctggagctct

SEQ ID NO: 8957 - DNA, 20 bp, synthetic construct
  misc_feature 1..20: note = chemically synthesized
  source 1..20: mol_type = other DNA
cttccaggctggagctctga

SEQ ID NO: 8958 - DNA, 20 bp, synthetic construct
  misc_feature 1..20: note = chemically synthesized
  source 1..20: mol_type = other DNA
ttccaggctggagctctgag

SEQ ID NO: 8959 - DNA, 20 bp, synthetic construct
  misc_feature 1..20: note = chemically synthesized
  source 1..20: mol_type = other DNA
ctggagctctgagaggcttc

SEQ ID NO: 8960 - DNA, 20 bp, synthetic construct
  misc_feature 1..20: note = chemically synthesized
  source 1..20: mol_type = other DNA
tggagctctgagaggcttcc

SEQ ID NO: 8961 - DNA, 20 bp, synthetic construct
  misc_feature 1..20: note = chemically synthesized
  source 1..20: mol_type = other DNA
gctctgagaggcttccaggc

SEQ ID NO: 8962 - DNA, 20 bp, synthetic construct
  misc_feature 1..20: note = chemically synthesized
  source 1..20: mol_type = other DNA
ctctgagaggcttccaggct

SEQ ID NO: 8963 - DNA, 20 bp, synthetic construct
  misc_feature 1..20: note = chemically synthesized
  source 1..20: mol_type = other DNA
cttccaggctgggctacctc

SEQ ID NO: 8964 - DNA, 20 bp, synthetic construct
  misc_feature 1..20: note = chemically synthesized
  source 1..20: mol_type = other DNA
ctgggctacctccagccatg

SEQ ID NO: 8965 - DNA, 20 bp, synthetic construct
  misc_feature 1..20: note = chemically synthesized
  source 1..20: mol_type = other DNA
ggctacctccagccatgtgg

SEQ ID NO: 8966 - DNA, 20 bp, synthetic construct
  misc_feature 1..20: note = chemically synthesized
  source 1..20: mol_type = other DNA
tccagccatgtggtggaaac

SEQ ID NO: 8967 - DNA, 20 bp, synthetic construct
  misc_feature 1..20: note = chemically synthesized
  source 1..20: mol_type = other DNA
agccatgtggtggaaactgg

SEQ ID NO: 8968 - DNA, 20 bp, synthetic construct
  misc_feature 1..20: note = chemically synthesized
  source 1..20: mol_type = other DNA
tgtggtggaaactggtagca

SEQ ID NO: 8969 - DNA, 20 bp, synthetic construct
  misc_feature 1..20: note = chemically synthesized
  source 1..20: mol_type = other DNA
gtggtggaaactggtagcaa

SEQ ID NO: 8970 - DNA, 20 bp, synthetic construct
  misc_feature 1..20: note = chemically synthesized
  source 1..20: mol_type = other DNA
gtggaaactggtagcaaagg

SEQ ID NO: 8971 - DNA, 20 bp, synthetic construct
  misc_feature 1..20: note = chemically synthesized
  source 1..20: mol_type = other DNA
aactggtagcaaaggaagcc

SEQ ID NO: 8972 - DNA, 20 bp, synthetic construct
  misc_feature 1..20: note = chemically synthesized
  source 1..20: mol_type = other DNA
tggtagcaaaggaagcccag

SEQ ID NO: 8973 - DNA, 20 bp, synthetic construct
  misc_feature 1..20: note = chemically synthesized
  source 1..20: mol_type = other DNA
ggtagcaaaggaagcccaga

SEQ ID NO: 8974 - DNA, 20 bp, synthetic construct
  misc_feature 1..20: note = chemically synthesized
  source 1..20: mol_type = other DNA
gtagcaaaggaagcccagaa

SEQ ID NO: 8975 - DNA, 20 bp, synthetic construct
  misc_feature 1..20: note = chemically synthesized
  source 1..20: mol_type = other DNA
cagaagggccacaactgaac

SEQ ID NO: 8976 - DNA, 20 bp, synthetic construct
  misc_feature 1..20: note = chemically synthesized
  source 1..20: mol_type = other DNA
aagggccacaactgaactag

SEQ ID NO: 8977 - DNA, 20 bp, synthetic construct
  misc_feature 1..20: note = chemically synthesized
  source 1..20: mol_type = other DNA
agggccacaactgaactaga

SEQ ID NO: 8978 - DNA, 20 bp, synthetic construct
  misc_feature 1..20: note = chemically synthesized
  source 1..20: mol_type = other DNA
cacaactgaactagaaggct

SEQ ID NO: 8979 - DNA, 20 bp, synthetic construct
  misc_feature 1..20: note = chemically synthesized
  source 1..20: mol_type = other DNA
acaactgaactagaaggcta

SEQ ID NO: 8980 - DNA, 20 bp, synthetic construct
  misc_feature 1..20: note = chemically synthesized
  source 1..20: mol_type = other DNA
tagaaggctaaggaacaccc

SEQ ID NO: 8981 - DNA, 20 bp, synthetic construct
  misc_feature 1..20: note = chemically synthesized
  source 1..20: mol_type = other DNA
ctaaggaacaccccggccac

SEQ ID NO: 8982 - DNA, 20 bp, synthetic construct
  misc_feature 1..20: note = chemically synthesized
  source 1..20: mol_type = other DNA
aggaacaccccggccactgg

SEQ ID NO: 8983 - DNA, 20 bp, synthetic construct
  misc_feature 1..20: note = chemically synthesized
  source 1..20: mol_type = other DNA
ggaacaccccggccactggt

SEQ ID NO: 8984 - DNA, 20 bp, synthetic construct
  misc_feature 1..20: note = chemically synthesized
  source 1..20: mol_type = other DNA
cccggccactggtgggatcg

SEQ ID NO: 8985 - DNA, 20 bp, synthetic construct
  misc_feature 1..20: note = chemically synthesized
  source 1..20: mol_type = other DNA
actggtgggatcgcagtgct

SEQ ID NO: 8986 - DNA, 20 bp, synthetic construct
  misc_feature 1..20: note = chemically synthesized
  source 1..20: mol_type = other DNA
ggatcgcagtgctgagccat

SEQ ID NO: 8987 - DNA, 20 bp, synthetic construct
  misc_feature 1..20: note = chemically synthesized
  source 1..20: mol_type = other DNA
tgctgagccatgagccctac

SEQ ID NO: 8988 - DNA, 20 bp, synthetic construct
  misc_feature 1..20: note = chemically synthesized
  source 1..20: mol_type = other DNA
gctgagccatgagccctacc

SEQ ID NO: 8989 - DNA, 20 bp, synthetic construct
  misc_feature 1..20: note = chemically synthesized
  source 1..20: mol_type = other DNA
cctaccaggcaacccatttc

SEQ ID NO: 8990 - DNA, 20 bp, synthetic construct
  misc_feature 1..20: note = chemically synthesized
  source 1..20: mol_type = other DNA
ctaccaggcaacccatttct

SEQ ID NO: 8991 - DNA, 20 bp, synthetic construct
  misc_feature 1..20: note = chemically synthesized
  source 1..20: mol_type = other DNA
ccaggcaacccatttctggg

SEQ ID NO: 8992 - DNA, 20 bp, synthetic construct
  misc_feature 1..20: note = chemically synthesized
  source 1..20: mol_type = other DNA
acccatttctgggcagtccc

SEQ ID NO: 8993 - DNA, 20 bp, synthetic construct
  misc_feature 1..20: note = chemically synthesized
  source 1..20: mol_type = other DNA
ttctgggcagtcccaagact

SEQ ID NO: 8994 - DNA, 20 bp, synthetic construct
  misc_feature 1..20: note = chemically synthesized
  source 1..20: mol_type = other DNA
ctgggcagtcccaagacttg

SEQ ID NO: 8995 - DNA, 20 bp, synthetic construct
  misc_feature 1..20: note = chemically synthesized
  source 1..20: mol_type = other DNA
agtcccaagacttggagaac

SEQ ID NO: 8996 - DNA, 20 bp, synthetic construct
  misc_feature 1..20: note = chemically synthesized
  source 1..20: mol_type = other DNA
gagaacaagccatctgaaaa

SEQ ID NO: 8997 - DNA, 20 bp, synthetic construct
  misc_feature 1..20: note = chemically synthesized
  source 1..20: mol_type = other DNA
catctgaaaatagaattaaa

SEQ ID NO: 8998 - DNA, 20 bp, synthetic construct
  misc_feature 1..20: note = chemically synthesized
  source 1..20: mol_type = other DNA
tgaaaatagaattaaatagc

SEQ ID NO: 8999 - DNA, 20 bp, synthetic construct
  misc_feature 1..20: note = chemically synthesized
  source 1..20: mol_type = other DNA
gaaaatagaattaaatagcc

SEQ ID NO: 9000 - DNA, 20 bp, synthetic construct
  misc_feature 1..20: note = chemically synthesized
  source 1..20: mol_type = other DNA
tagaattaaatagccaggtg

SEQ ID NO: 9001 - DNA, 20 bp, synthetic construct
  misc_feature 1..20: note = chemically synthesized
  source 1..20: mol_type = other DNA
aattaaatagccaggtgcgg

SEQ ID NO: 9002 - DNA, 20 bp, synthetic construct
  misc_feature 1..20: note = chemically synthesized
  source 1..20: mol_type = other DNA
gtggctcacacctgtaatct

SEQ ID NO: 9003 - DNA, 20 bp, synthetic construct
  misc_feature 1..20: note = chemically synthesized
  source 1..20: mol_type = other DNA
cacctgtaatctcagcattt

SEQ ID NO: 9004 - DNA, 20 bp, synthetic construct
  misc_feature 1..20: note = chemically synthesized
  source 1..20: mol_type = other DNA
acctgtaatctcagcatttt

SEQ ID NO: 9005 - DNA, 20 bp, synthetic construct
  misc_feature 1..20: note = chemically synthesized
  source 1..20: mol_type = other DNA
ctgtaatctcagcattttgg

SEQ ID NO: 9006 - DNA, 20 bp, synthetic construct
  misc_feature 1..20: note = chemically synthesized
  source 1..20: mol_type = other DNA
tgtaatctcagcattttggg

SEQ ID NO: 9007 - DNA, 20 bp, synthetic construct
  misc_feature 1..20: note = chemically synthesized
  source 1..20: mol_type = other DNA
tctcagcattttgggaggcc

SEQ ID NO: 9008 - DNA, 20 bp, synthetic construct
  misc_feature 1..20: note = chemically synthesized
  source 1..20: mol_type = other DNA
ctcagcattttgggaggccg

SEQ ID NO: 9009 - DNA, 20 bp, synthetic construct
  misc_feature 1..20: note = chemically synthesized
  source 1..20: mol_type = other DNA
ttttgggaggccgaggcgtg

SEQ ID NO: 9010 - DNA, 20 bp, synthetic construct
  misc_feature 1..20: note = chemically synthesized
  source 1..20: mol_type = other DNA
tttgggaggccgaggcgtgt

SEQ ID NO: 9011 - DNA, 20 bp, synthetic construct
  misc_feature 1..20: note = chemically synthesized
  source 1..20: mol_type = other DNA
ccgaggcgtgtgggtcacct

SEQ ID NO: 9012 - DNA, 20 bp, synthetic construct
  misc_feature 1..20: note = chemically synthesized
  source 1..20: mol_type = other DNA
cgaggcgtgtgggtcacctg

SEQ ID NO: 9013 - DNA, 20 bp, synthetic construct
  misc_feature 1..20: note = chemically synthesized
  source 1..20: mol_type = other DNA
gcgtgtgggtcacctgaggt

SEQ ID NO: 9014 - DNA, 20 bp, synthetic construct
  misc_feature 1..20: note = chemically synthesized
  source 1..20: mol_type = other DNA
cgtgtgggtcacctgaggtc

SEQ ID NO: 9015 - DNA, 20 bp, synthetic construct
  misc_feature 1..20: note = chemically synthesized
  source 1..20: mol_type = other DNA
tgtgggtcacctgaggtcag

SEQ ID NO: 9016 - DNA, 20 bp, synthetic construct
  misc_feature 1..20: note = chemically synthesized
  source 1..20: mol_type = other DNA
tcacctgaggtcaggagttc

SEQ ID NO: 9017 - DNA, 20 bp, synthetic construct
  misc_feature 1..20: note = chemically synthesized
  source 1..20: mol_type = other DNA
tgaggtcaggagttcaagac

SEQ ID NO: 9018 - DNA, 20 bp, synthetic construct
  misc_feature 1..20: note = chemically synthesized
  source 1..20: mol_type = other DNA
tcaggagttcaagaccagcc

SEQ ID NO: 9019 - DNA, 20 bp, synthetic construct
  misc_feature 1..20: note = chemically synthesized
  source 1..20: mol_type = other DNA
caagaccagcctagccaaca

SEQ ID NO: 9020 - DNA, 20 bp, synthetic construct
  misc_feature 1..20: note = chemically synthesized
  source 1..20: mol_type = other DNA
aaaaaaaaaaaaaaaaaaat

SEQ ID NO: 9021 - DNA, 20 bp, synthetic construct
  misc_feature 1..20: note = chemically synthesized
  source 1..20: mol_type = other DNA
aaaaaaaaaaaaaaatcagc

SEQ ID NO: 9022 - DNA, 20 bp, synthetic construct
  misc_feature 1..20: note = chemically synthesized
  source 1..20: mol_type = other DNA
aaaaaaaaaaaaaatcagcc

SEQ ID NO: 9023 - DNA, 20 bp, synthetic construct
  misc_feature 1..20: note = chemically synthesized
  source 1..20: mol_type = other DNA
aaaaaatcagccaggtgtga

SEQ ID NO: 9024 - DNA, 20 bp, synthetic construct
  misc_feature 1..20: note = chemically synthesized
  source 1..20: mol_type = other DNA
atggcatgcacctataatcc

SEQ ID NO: 9025 - DNA, 20 bp, synthetic construct
  misc_feature 1..20: note = chemically synthesized
  source 1..20: mol_type = other DNA
cacctataatcccagctact

SEQ ID NO: 9026 - DNA, 20 bp, synthetic construct
  misc_feature 1..20: note = chemically synthesized
  source 1..20: mol_type = other DNA
acctataatcccagctactt

SEQ ID NO: 9027 - DNA, 20 bp, synthetic construct
  misc_feature 1..20: note = chemically synthesized
  source 1..20: mol_type = other DNA
ctataatcccagctacttgg

SEQ ID NO: 9028 - DNA, 20 bp, synthetic construct
  misc_feature 1..20: note = chemically synthesized
  source 1..20: mol_type = other DNA
tataatcccagctacttggg

SEQ ID NO: 9029 - DNA, 20 bp, synthetic construct
  misc_feature 1..20: note = chemically synthesized
  source 1..20: mol_type = other DNA
tcccagctacttgggaggct

SEQ ID NO: 9030 - DNA, 20 bp, synthetic construct
  misc_feature 1..20: note = chemically synthesized
  source 1..20: mol_type = other DNA
cccagctacttgggaggctg

SEQ ID NO: 9031 - DNA, 20 bp, synthetic construct
  misc_feature 1..20: note = chemically synthesized
  source 1..20: mol_type = other DNA
agctacttgggaggctgagg

SEQ ID NO: 9032 - DNA, 20 bp, synthetic construct
  misc_feature 1..20: note = chemically synthesized
  source 1..20: mol_type = other DNA
gctacttgggaggctgaggc

SEQ ID NO: 9033 - DNA, 20 bp, synthetic construct
  misc_feature 1..20: note = chemically synthesized
  source 1..20: mol_type = other DNA
tacttgggaggctgaggcag

SEQ ID NO: 9034 - DNA, 20 bp, synthetic construct
  misc_feature 1..20: note = chemically synthesized
  source 1..20: mol_type = other DNA
gcaggagaatcacttgaacc

SEQ ID NO: 9035 - DNA, 20 bp, synthetic construct
  misc_feature 1..20: note = chemically synthesized
  source 1..20: mol_type = other DNA
caggagaatcacttgaacct

SEQ ID NO: 9036 - DNA, 20 bp, synthetic construct
  misc_feature 1..20: note = chemically synthesized
  source 1..20: mol_type = other DNA
ggagaatcacttgaacctgg

SEQ ID NO: 9037 - DNA, 20 bp, synthetic construct
  misc_feature 1..20: note = chemically synthesized
  source 1..20: mol_type = other DNA
gagaatcacttgaacctggg

SEQ ID NO: 9038 - DNA, 20 bp, synthetic construct
  misc_feature 1..20: note = chemically synthesized
  source 1..20: mol_type = other DNA
aatcacttgaacctgggagg

SEQ ID NO: 9039 - DNA, 20 bp, synthetic construct
  misc_feature 1..20: note = chemically synthesized
  source 1..20: mol_type = other DNA
tcacttgaacctgggaggcg

SEQ ID NO: 9040 - DNA, 20 bp, synthetic construct
  misc_feature 1..20: note = chemically synthesized
  source 1..20: mol_type = other DNA
cacttgaacctgggaggcgg

SEQ ID NO: 9041 - DNA, 20 bp, synthetic construct
  misc_feature 1..20: note = chemically synthesized
  source 1..20: mol_type = other DNA
tgggaggcggaggctgcaat

SEQ ID NO: 9042 - DNA, 20 bp, synthetic construct
  misc_feature 1..20: note = chemically synthesized
  source 1..20: mol_type = other DNA
ggcggaggctgcaatgagcc

SEQ ID NO: 9043 - DNA, 20 bp, synthetic construct
  misc_feature 1..20: note = chemically synthesized
  source 1..20: mol_type = other DNA
gctgcaatgagccgagatcg

SEQ ID NO: 9044 - DNA, 20 bp, synthetic construct
  misc_feature 1..20: note = chemically synthesized
  source 1..20: mol_type = other DNA
gagatcgtagcactgcactc

SEQ ID NO: 9045 - DNA, 20 bp, synthetic construct
  misc_feature 1..20: note = chemically synthesized
  source 1..20: mol_type = other DNA
cgtagcactgcactccagcc

SEQ ID NO: 9046 - DNA, 20 bp, synthetic construct
  misc_feature 1..20: note = chemically synthesized
  source 1..20: mol_type = other DNA
gtagcactgcactccagcct

SEQ ID NO: 9047 - DNA, 20 bp, synthetic construct
  misc_feature 1..20: note = chemically synthesized
  source 1..20: mol_type = other DNA
ctgcactccagcctgggcga

SEQ ID NO: 9048 - DNA, 20 bp, synthetic construct
  misc_feature 1..20: note = chemically synthesized
  source 1..20: mol_type = other DNA
gcactccagcctgggcgaca

SEQ ID NO: 9049 - DNA, 20 bp, synthetic construct
  misc_feature 1..20: note = chemically synthesized
  source 1..20: mol_type = other DNA
tccagcctgggcgacagagc

SEQ ID NO: 9050 - DNA, 20 bp, synthetic construct
  misc_feature 1..20: note = chemically synthesized
  source 1..20: mol_type = other DNA
aaaaaaaaaaaaaattaaat

SEQ ID NO: 9051 - DNA, 20 bp, synthetic construct
  misc_feature 1..20: note = chemically synthesized
  source 1..20: mol_type = other DNA
aaaaaaaaaaaaattaaatt

SEQ ID NO: 9052 - DNA, 20 bp, synthetic construct
  misc_feature 1..20: note = chemically synthesized
  source 1..20: mol_type = other DNA
aaaaaaaaaattaaattggg

SEQ ID NO: 9053 - DNA, 20 bp, synthetic construct
  misc_feature 1..20: note = chemically synthesized
  source 1..20: mol_type = other DNA
aaaaaaaaattaaattgggt

SEQ ID NO: 9054 - DNA, 20 bp, synthetic construct
  misc_feature 1..20: note = chemically synthesized
  source 1..20: mol_type = other DNA
aaaaaaaattaaattgggtg

SEQ ID NO: 9055 - DNA, 20 bp, synthetic construct
  misc_feature 1..20: note = chemically synthesized
  source 1..20: mol_type = other DNA
aaaaaaattaaattgggtgg

SEQ ID NO: 9056 - DNA, 20 bp, synthetic construct
  misc_feature 1..20: note = chemically synthesized
  source 1..20: mol_type = other DNA
aaaaattaaattgggtgggg

SEQ ID NO: 9057 - DNA, 20 bp, synthetic construct
  misc_feature 1..20: note = chemically synthesized
  source 1..20: mol_type = other DNA
aattgggtgggggagtttct

SEQ ID NO: 9058 - DNA, 20 bp, synthetic construct
  misc_feature 1..20: note = chemically synthesized
  source 1..20: mol_type = other DNA
attgggtgggggagtttctt

SEQ ID NO: 9059 - DNA, 20 bp, synthetic construct
  misc_feature 1..20: note = chemically synthesized
  source 1..20: mol_type = other DNA
gagtttcttaggaaaaaaat

SEQ ID NO: 9060 - DNA, 20 bp, synthetic construct
  misc_feature 1..20: note = chemically synthesized
  source 1..20: mol_type = other DNA
gtttcttaggaaaaaaatca

SEQ ID NO: 9061 - DNA, 20 bp, synthetic construct
  misc_feature 1..20: note = chemically synthesized
  source 1..20: mol_type = other DNA
cagagttgtgcaaataaatc

SEQ ID NO: 9062 - DNA, 20 bp, synthetic construct
  misc_feature 1..20: note = chemically synthesized
  source 1..20: mol_type = other DNA
gttgtgcaaataaatctagt

SEQ ID NO: 9063 - DNA, 20 bp, synthetic construct
  misc_feature 1..20: note = chemically synthesized
  source 1..20: mol_type = other DNA
ctgtctttacaacacaatga

SEQ ID NO: 9064 - DNA, 20 bp, synthetic construct
  misc_feature 1..20: note = chemically synthesized
  source 1..20: mol_type = other DNA
tgtctttacaacacaatgaa

SEQ ID NO: 9065 - DNA, 20 bp, synthetic construct
  misc_feature 1..20: note = chemically synthesized
  source 1..20: mol_type = other DNA
gtctttacaacacaatgaaa

SEQ ID NO: 9066 - DNA, 20 bp, synthetic construct
  misc_feature 1..20: note = chemically synthesized
  source 1..20: mol_type = other DNA
ttacaacacaatgaaagggt

SEQ ID NO: 9067 - DNA, 20 bp, synthetic construct
  misc_feature 1..20: note = chemically synthesized
  source 1..20: mol_type = other DNA
tacaacacaatgaaagggta

SEQ ID NO: 9068 - DNA, 20 bp, synthetic construct
  misc_feature 1..20: note = chemically synthesized
  source 1..20: mol_type = other DNA
atgaaagggtaaggcaccat

SEQ ID NO: 9069 - DNA, 20 bp, synthetic construct
  misc_feature 1..20: note = chemically synthesized
  source 1..20: mol_type = other DNA
gaaagggtaaggcaccataa

SEQ ID NO: 9070 - DNA, 20 bp, synthetic construct
  misc_feature 1..20: note = chemically synthesized
  source 1..20: mol_type = other DNA
aaagggtaaggcaccataag

SEQ ID NO: 9071 - DNA, 20 bp, synthetic construct
  misc_feature 1..20: note = chemically synthesized
  source 1..20: mol_type = other DNA
aggctgtgaattccattgat

SEQ ID NO: 9072 - DNA, 20 bp, synthetic construct
  misc_feature 1..20: note = chemically synthesized
  source 1..20: mol_type = other DNA
gctgtgaattccattgataa

SEQ ID NO: 9073 - DNA, 20 bp, synthetic construct
  misc_feature 1..20: note = chemically synthesized
  source 1..20: mol_type = other DNA
tgtgaattccattgataaga

SEQ ID NO: 9074 - DNA, 20 bp, synthetic construct
  misc_feature 1..20: note = chemically synthesized
  source 1..20: mol_type = other DNA
gtgaattccattgataagag

SEQ ID NO: 9075 - DNA, 20 bp, synthetic construct
  misc_feature 1..20: note = chemically synthesized
  source 1..20: mol_type = other DNA
atttccctactcaaatatca

SEQ ID NO: 9076 - DNA, 20 bp, synthetic construct
  misc_feature 1..20: note = chemically synthesized
  source 1..20: mol_type = other DNA
tttccctactcaaatatcaa

SEQ ID NO: 9077 - DNA, 20 bp, synthetic construct
  misc_feature 1..20: note = chemically synthesized
  source 1..20: mol_type = other DNA
tgcatacacatacactaaaa

SEQ ID NO: 9078 - DNA, 20 bp, synthetic construct
  misc_feature 1..20: note = chemically synthesized
  source 1..20: mol_type = other DNA
acatacactaaaacagaaaa

SEQ ID NO: 9079 - DNA, 20 bp, synthetic construct
  misc_feature 1..20: note = chemically synthesized
  source 1..20: mol_type = other DNA
agaaaaaagaaaaaaaaaaa

SEQ ID NO: 9080 - DNA, 20 bp, synthetic construct
  misc_feature 1..20: note = chemically synthesized
  source 1..20: mol_type = other DNA
aaagaaaaaaaaaaaaagaa

SEQ ID NO: 9081 - DNA, 20 bp, synthetic construct
  misc_feature 1..20: note = chemically synthesized
  source 1..20: mol_type = other DNA
agaaaaaaaaaaaaagaaaa

SEQ ID NO: 9082 - DNA, 20 bp, synthetic construct
  misc_feature 1..20: note = chemically synthesized
  source 1..20: mol_type = other DNA
aaaaaaaaaaaaagaaaaga

SEQ ID NO: 9083 - DNA, 20 bp, synthetic construct
  misc_feature 1..20: note = chemically synthesized
  source 1..20: mol_type = other DNA
aaaaaaaaagaaaagagaga

SEQ ID NO: 9084 - DNA, 20 bp, synthetic construct
  misc_feature 1..20: note = chemically synthesized
  source 1..20: mol_type = other DNA
aaaaaaagaaaagagagaca

SEQ ID NO: 9085 - DNA, 20 bp, synthetic construct
  misc_feature 1..20: note = chemically synthesized
  source 1..20: mol_type = other DNA
aaaaagaaaagagagacaga

SEQ ID NO: 9086 - DNA, 20 bp, synthetic construct
  misc_feature 1..20: note = chemically synthesized
  source 1..20: mol_type = other DNA
aaagaaaagagagacagaga

SEQ ID NO: 9087 - DNA, 20 bp, synthetic construct
  misc_feature 1..20: note = chemically synthesized
  source 1..20: mol_type = other DNA
agaaaagagagacagagaga

SEQ ID NO: 9088 - DNA, 20 bp, synthetic construct
  misc_feature 1..20: note = chemically synthesized
  source 1..20: mol_type = other DNA
aaaagagagacagagagaga

SEQ ID NO: 9089 - DNA, 20 bp, synthetic construct
  misc_feature 1..20: note = chemically synthesized
  source 1..20: mol_type = other DNA
aagagagacagagagagaga

SEQ ID NO: 9090 - DNA, 20 bp, synthetic construct
  misc_feature 1..20: note = chemically synthesized
  source 1..20: mol_type = other DNA
atcaccttttaaactcatcc

SEQ ID NO: 9091 - DNA, 20 bp, synthetic construct
  misc_feature 1..20: note = chemically synthesized
  source 1..20: mol_type = other DNA
caccttttaaactcatccaa

SEQ ID NO: 9092 - DNA, 20 bp, synthetic construct
  misc_feature 1..20: note = chemically synthesized
  source 1..20: mol_type = other DNA
ttttaaactcatccaagagc

SEQ ID NO: 9093 - DNA, 20 bp, synthetic construct
  misc_feature 1..20: note = chemically synthesized
  source 1..20: mol_type = other DNA
actcatccaagagccagtca

SEQ ID NO: 9094 - DNA, 20 bp, synthetic construct
  misc_feature 1..20: note = chemically synthesized
  source 1..20: mol_type = other DNA
gagccagtcaaagccaccca

SEQ ID NO: 9095 - DNA, 20 bp, synthetic construct
  misc_feature 1..20: note = chemically synthesized
  source 1..20: mol_type = other DNA
agccagtcaaagccacccaa

SEQ ID NO: 9096 - DNA, 20 bp, synthetic construct
  misc_feature 1..20: note = chemically synthesized
  source 1..20: mol_type = other DNA
agtcaaagccacccaaagga

SEQ ID NO: 9097 - DNA, 20 bp, synthetic construct
  misc_feature 1..20: note = chemically synthesized
  source 1..20: mol_type = other DNA
caaagccacccaaaggaaag

SEQ ID NO: 9098 - DNA, 20 bp, synthetic construct
  misc_feature 1..20: note = chemically synthesized
  source 1..20: mol_type = other DNA
aaagccacccaaaggaaagc

SEQ ID NO: 9099 - DNA, 20 bp, synthetic construct
  misc_feature 1..20: note = chemically synthesized
  source 1..20: mol_type = other DNA
acccaaaggaaagcaggccc

SEQ ID NO: 9100 - DNA, 20 bp, synthetic construct
  misc_feature 1..20: note = chemically synthesized
  source 1..20: mol_type = other DNA
gccccagtcccttccgaact

SEQ ID NO: 9101 - DNA, 20 bp, synthetic construct
  misc_feature 1..20: note = chemically synthesized
  source 1..20: mol_type = other DNA
gaactcagccgttctccctc

SEQ ID NO: 9102 - DNA, 20 bp, synthetic construct
  misc_feature 1..20: note = chemically synthesized
  source 1..20: mol_type = other DNA
tcagccgttctccctctggt

SEQ ID NO: 9103 - DNA, 20 bp, synthetic construct
  misc_feature 1..20: note = chemically synthesized
  source 1..20: mol_type = other DNA
ccgttctccctctggtgaga

SEQ ID NO: 9104 - DNA, 20 bp, synthetic construct
  misc_feature 1..20: note = chemically synthesized
  source 1..20: mol_type = other DNA
cgttctccctctggtgagac

SEQ ID NO: 9105 - DNA, 20 bp, synthetic construct
  misc_feature 1..20: note = chemically synthesized
  source 1..20: mol_type = other DNA
ccctctggtgagacaggctc

SEQ ID NO: 9106 - DNA, 20 bp, synthetic construct
  misc_feature 1..20: note = chemically synthesized
  source 1..20: mol_type = other DNA
gacaggctctagcttgtttc

SEQ ID NO: 9107 - DNA, 20 bp, synthetic construct
  misc_feature 1..20: note = chemically synthesized
  source 1..20: mol_type = other DNA
tgtttccagaatgccactac

SEQ ID NO: 9108 - DNA, 20 bp, synthetic construct
  misc_feature 1..20: note = chemically synthesized
  source 1..20: mol_type = other DNA
ctaccagcttcccacacctc

SEQ ID NO: 9109 - DNA, 20 bp, synthetic construct
  misc_feature 1..20: note = chemically synthesized
  source 1..20: mol_type = other DNA
taccagcttcccacacctcc

SEQ ID NO: 9110 - DNA, 20 bp, synthetic construct
  misc_feature 1..20: note = chemically synthesized
  source 1..20: mol_type = other DNA
accagcttcccacacctcca

SEQ ID NO: 9111 - DNA, 20 bp, synthetic construct
  misc_feature 1..20: note = chemically synthesized
  source 1..20: mol_type = other DNA
ccagcttcccacacctccag

SEQ ID NO: 9112 - DNA, 20 bp, synthetic construct
  misc_feature 1..20: note = chemically synthesized
  source 1..20: mol_type = other DNA
caggggaccccctaactcca

SEQ ID NO: 9113 - DNA, 20 bp, synthetic construct
  misc_feature 1..20: note = chemically synthesized
  source 1..20: mol_type = other DNA
cctaactccaaagtgttgcc

SEQ ID NO: 9114 - DNA, 20 bp, synthetic construct
  misc_feature 1..20: note = chemically synthesized
  source 1..20: mol_type = other DNA
ccaaagtgttgcccagacct

SEQ ID NO: 9115 - DNA, 20 bp, synthetic construct
  misc_feature 1..20: note = chemically synthesized
  source 1..20: mol_type = other DNA
caaagtgttgcccagaccta

SEQ ID NO: 9116 - DNA, 20 bp, synthetic construct
  misc_feature 1..20: note = chemically synthesized
  source 1..20: mol_type = other DNA
acgtgctccttccccaacac

SEQ ID NO: 9117 - DNA, 20 bp, synthetic construct
  misc_feature 1..20: note = chemically synthesized
  source 1..20: mol_type = other DNA
ccttccccaacactggcttc

SEQ ID NO: 9118 - DNA, 20 bp, synthetic construct
  misc_feature 1..20: note = chemically synthesized
  source 1..20: mol_type = other DNA
cttccccaacactggcttcc

SEQ ID NO: 9119 - DNA, 20 bp, synthetic construct
  misc_feature 1..20: note = chemically synthesized
  source 1..20: mol_type = other DNA
cccaacactggcttccaggt

SEQ ID NO: 9120 - DNA, 20 bp, synthetic construct
  misc_feature 1..20: note = chemically synthesized
  source 1..20: mol_type = other DNA
acactggcttccaggtgagc

SEQ ID NO: 9121 - DNA, 20 bp, synthetic construct
  misc_feature 1..20: note = chemically synthesized
  source 1..20: mol_type = other DNA
tggcttccaggtgagcgaga

SEQ ID NO: 9122 - DNA, 20 bp, synthetic construct
  misc_feature 1..20: note = chemically synthesized
  source 1..20: mol_type = other DNA
gtgagcgagacagaatctgc

SEQ ID NO: 9123 - DNA, 20 bp, synthetic construct
  misc_feature 1..20: note = chemically synthesized
  source 1..20: mol_type = other DNA
agcgagacagaatctgcaag

SEQ ID NO: 9124 - DNA, 20 bp, synthetic construct
  misc_feature 1..20: note = chemically synthesized
  source 1..20: mol_type = other DNA
cgagacagaatctgcaagca

SEQ ID NO: 9125 - DNA, 20 bp, synthetic construct
  misc_feature 1..20: note = chemically synthesized
  source 1..20: mol_type = other DNA
cagagttcactgcttgacca

SEQ ID NO: 9126 - DNA, 20 bp, synthetic construct
  misc_feature 1..20: note = chemically synthesized
  source 1..20: mol_type = other DNA
agagttcactgcttgaccat

SEQ ID NO: 9127 - DNA, 20 bp, synthetic construct
  misc_feature 1..20: note = chemically synthesized
  source 1..20: mol_type = other DNA
gagttcactgcttgaccatg

SEQ ID NO: 9128 - DNA, 20 bp, synthetic construct
  misc_feature 1..20: note = chemically synthesized
  source 1..20: mol_type = other DNA
actgcttgaccatggggtga

SEQ ID NO: 9129 - DNA, 20 bp, synthetic construct
  misc_feature 1..20: note = chemically synthesized
  source 1..20: mol_type = other DNA
accatggggtgaaagccaca

SEQ ID NO: 9130 - DNA, 20 bp, synthetic construct
  misc_feature 1..20: note = chemically synthesized
  source 1..20: mol_type = other DNA
gaaagccacaaagacaccac

SEQ ID NO: 9131 - DNA, 20 bp, synthetic construct
  misc_feature 1..20: note = chemically synthesized
  source 1..20: mol_type = other DNA
accaccagctatcccaaccc

SEQ ID NO: 9132 - DNA, 20 bp, synthetic construct
  misc_feature 1..20: note = chemically synthesized
  source 1..20: mol_type = other DNA
tcactttttcactttctccc

SEQ ID NO: 9133 - DNA, 20 bp, synthetic construct
  misc_feature 1..20: note = chemically synthesized
  source 1..20: mol_type = other DNA
cactttttcactttctcccc

SEQ ID NO: 9134 - DNA, 20 bp, synthetic construct
  misc_feature 1..20: note = chemically synthesized
  source 1..20: mol_type = other DNA
actttttcactttctcccca

SEQ ID NO: 9135 - DNA, 20 bp, synthetic construct
  misc_feature 1..20: note = chemically synthesized
  source 1..20: mol_type = other DNA
tttttcactttctccccagg

SEQ ID NO: 9136 - DNA, 20 bp, synthetic construct
  misc_feature 1..20: note = chemically synthesized
  source 1..20: mol_type = other DNA
ttttcactttctccccaggg

SEQ ID NO: 9137 - DNA, 20 bp, synthetic construct
  misc_feature 1..20: note = chemically synthesized
  source 1..20: mol_type = other DNA
tcactttctccccagggagg

SEQ ID NO: 9138 - DNA, 20 bp, synthetic construct
  misc_feature 1..20: note = chemically synthesized
  source 1..20: mol_type = other DNA
cactttctccccagggagga

SEQ ID NO: 9139 - DNA, 20 bp, synthetic construct
  misc_feature 1..20: note = chemically synthesized
  source 1..20: mol_type = other DNA
actttctccccagggaggaa

SEQ ID NO: 9140 - DNA, 20 bp, synthetic construct
  misc_feature 1..20: note = chemically synthesized
  source 1..20: mol_type = other DNA
ctttctccccagggaggaag

SEQ ID NO: 9141 - DNA, 20 bp, synthetic construct
  misc_feature 1..20: note = chemically synthesized
  source 1..20: mol_type = other DNA
tttctccccagggaggaagg

SEQ ID NO: 9142 - DNA, 20 bp, synthetic construct
  misc_feature 1..20: note = chemically synthesized
  source 1..20: mol_type = other DNA
aagggggaaataaacttgcc

SEQ ID NO: 9143 - DNA, 20 bp, synthetic construct
  misc_feature 1..20: note = chemically synthesized
  source 1..20: mol_type = other DNA
gcccagcctcacaccttccc

SEQ ID NO: 9144 - DNA, 20 bp, synthetic construct
  misc_feature 1..20: note = chemically synthesized
  source 1..20: mol_type = other DNA
agcctcacaccttccctgga

SEQ ID NO: 9145 - DNA, 20 bp, synthetic construct
  misc_feature 1..20: note = chemically synthesized
  source 1..20: mol_type = other DNA
gcctcacaccttccctggac

SEQ ID NO: 9146 - DNA, 20 bp, synthetic construct
  misc_feature 1..20: note = chemically synthesized
  source 1..20: mol_type = other DNA
cctcacaccttccctggaca

SEQ ID NO: 9147 - DNA, 20 bp, synthetic construct
  misc_feature 1..20: note = chemically synthesized
  source 1..20: mol_type = other DNA
tcacaccttccctggacagg

SEQ ID NO: 9148 - DNA, 20 bp, synthetic construct
  misc_feature 1..20: note = chemically synthesized
  source 1..20: mol_type = other DNA
accttccctggacagggagc

SEQ ID NO: 9149 - DNA, 20 bp, synthetic construct
  misc_feature 1..20: note = chemically synthesized
  source 1..20: mol_type = other DNA
ccttccctggacagggagct

SEQ ID NO: 9150 - DNA, 20 bp, synthetic construct
  misc_feature 1..20: note = chemically synthesized
  source 1..20: mol_type = other DNA
cttccctggacagggagctg

SEQ ID NO: 9151 - DNA, 20 bp, synthetic construct
  misc_feature 1..20: note = chemically synthesized
  source 1..20: mol_type = other DNA
gggagctggggatccattca

SEQ ID NO: 9152 - DNA, 20 bp, synthetic construct
  misc_feature 1..20: note = chemically synthesized
  source 1..20: mol_type = other DNA
ctggggatccattcaaagcc

SEQ ID NO: 9153 - DNA, 20 bp, synthetic construct
  misc_feature 1..20: note = chemically synthesized
  source 1..20: mol_type = other DNA
cggtctttctctgttcaatc

SEQ ID NO: 9154 - DNA, 20 bp, synthetic construct
  misc_feature 1..20: note = chemically synthesized
  source 1..20: mol_type = other DNA
tctttctctgttcaatcaag

SEQ ID NO: 9155 - DNA, 20 bp, synthetic construct
  misc_feature 1..20: note = chemically synthesized
  source 1..20: mol_type = other DNA
tctgttcaatcaagcagcgt

SEQ ID NO: 9156 - DNA, 20 bp, synthetic construct
  misc_feature 1..20: note = chemically synthesized
  source 1..20: mol_type = other DNA
tcaatcaagcagcgtgagca

SEQ ID NO: 9157 - DNA, 20 bp, synthetic construct
  misc_feature 1..20: note = chemically synthesized
  source 1..20: mol_type = other DNA
caagcagcgtgagcaaagta

SEQ ID NO: 9158 - DNA, 20 bp, synthetic construct
  misc_feature 1..20: note = chemically synthesized
  source 1..20: mol_type = other DNA
attaaatactacatatgaac

SEQ ID NO: 9159 - DNA, 20 bp, synthetic construct
  misc_feature 1..20: note = chemically synthesized
  source 1..20: mol_type = other DNA
catatgaaccagcattatgt

SEQ ID NO: 9160 - DNA, 20 bp, synthetic construct
  misc_feature 1..20: note = chemically synthesized
  source 1..20: mol_type = other DNA
atatgaaccagcattatgtt

SEQ ID NO: 9161 - DNA, 20 bp, synthetic construct
  misc_feature 1..20: note = chemically synthesized
  source 1..20: mol_type = other DNA
ccagcattatgttaggcacc

SEQ ID NO: 9162 - DNA, 20 bp, synthetic construct
  misc_feature 1..20: note = chemically synthesized
  source 1..20: mol_type = other DNA
gcattatgttaggcaccaag

SEQ ID NO: 9163 - DNA, 20 bp, synthetic construct
  misc_feature 1..20: note = chemically synthesized
  source 1..20: mol_type = other DNA
cattatgttaggcaccaaga

SEQ ID NO: 9164 - DNA, 20 bp, synthetic construct
  misc_feature 1..20: note = chemically synthesized
  source 1..20: mol_type = other DNA
acatgactcctgccctccaa

SEQ ID NO: 9165 - DNA, 20 bp, synthetic construct
  misc_feature 1..20: note = chemically synthesized
  source 1..20: mol_type = other DNA
catgactcctgccctccaaa

SEQ ID NO: 9166 - DNA, 20 bp, synthetic construct
  misc_feature 1..20: note = chemically synthesized
  source 1..20: mol_type = other DNA
cctccaaaaggttataattt

SEQ ID NO: 9167 - DNA, 20 bp, synthetic construct
  misc_feature 1..20: note = chemically synthesized
  source 1..20: mol_type = other DNA
ctccaaaaggttataatttg

SEQ ID NO: 9168 - DNA, 20 bp, synthetic construct
  misc_feature 1..20: note = chemically synthesized
  source 1..20: mol_type = other DNA
ccaaaaggttataatttgag

SEQ ID NO: 9169 - DNA, 20 bp, synthetic construct
  misc_feature 1..20: note = chemically synthesized
  source 1..20: mol_type = other DNA
caaaaggttataatttgagg

SEQ ID NO: 9170 - DNA, 20 bp, synthetic construct
  misc_feature 1..20: note = chemically synthesized
  source 1..20: mol_type = other DNA
aaaggttataatttgaggag

SEQ ID NO: 9171 - DNA, 20 bp, synthetic construct
  misc_feature 1..20: note = chemically synthesized
  source 1..20: mol_type = other DNA
ggaggagaaaatacacccac

SEQ ID NO: 9172 - DNA, 20 bp, synthetic construct
  misc_feature 1..20: note = chemically synthesized
  source 1..20: mol_type = other DNA
gatccccttttaactaatcc

SEQ ID NO: 9173 - DNA, 20 bp, synthetic construct
  misc_feature 1..20: note = chemically synthesized
  source 1..20: mol_type = other DNA
tccccttttaactaatccca

SEQ ID NO: 9174 - DNA, 20 bp, synthetic construct
  misc_feature 1..20: note = chemically synthesized
  source 1..20: mol_type = other DNA
ccagagtgacacctcctcca

SEQ ID NO: 9175 - DNA, 20 bp, synthetic construct
  misc_feature 1..20: note = chemically synthesized
  source 1..20: mol_type = other DNA
agtgacacctcctccaaaga

SEQ ID NO: 9176 - DNA, 20 bp, synthetic construct
  misc_feature 1..20: note = chemically synthesized
  source 1..20: mol_type = other DNA
cacctcctccaaagaaagcc

SEQ ID NO: 9177 - DNA, 20 bp, synthetic construct
  misc_feature 1..20: note = chemically synthesized
  source 1..20: mol_type = other DNA
aaagaaagccaagttgctga

SEQ ID NO: 9178 - DNA, 20 bp, synthetic construct
  misc_feature 1..20: note = chemically synthesized
  source 1..20: mol_type = other DNA
agaaagccaagttgctgaca

SEQ ID NO: 9179 - DNA, 20 bp, synthetic construct
  misc_feature 1..20: note = chemically synthesized
  source 1..20: mol_type = other DNA
agccaagttgctgacagagt

SEQ ID NO: 9180 - DNA, 20 bp, synthetic construct
  misc_feature 1..20: note = chemically synthesized
  source 1..20: mol_type = other DNA
gccaagttgctgacagagtc

SEQ ID NO: 9181 - DNA, 20 bp, synthetic construct
  misc_feature 1..20: note = chemically synthesized
  source 1..20: mol_type = other DNA
ctgacagagtcaggccttcc

SEQ ID NO: 9182 - DNA, 20 bp, synthetic construct
  misc_feature 1..20: note = chemically synthesized
  source 1..20: mol_type = other DNA
gtcaggccttcctagttacc

SEQ ID NO: 9183 - DNA, 20 bp, synthetic construct
  misc_feature 1..20: note = chemically synthesized
  source 1..20: mol_type = other DNA
ttcctagttacctagaaaaa

SEQ ID NO: 9184 - DNA, 20 bp, synthetic construct
  misc_feature 1..20: note = chemically synthesized
  source 1..20: mol_type = other DNA
agttacctagaaaaatggcc

SEQ ID NO: 9185 - DNA, 20 bp, synthetic construct
  misc_feature 1..20: note = chemically synthesized
  source 1..20: mol_type = other DNA
gttacctagaaaaatggcct

SEQ ID NO: 9186 - DNA, 20 bp, synthetic construct
  misc_feature 1..20: note = chemically synthesized
  source 1..20: mol_type = other DNA
ttacctagaaaaatggcctg

SEQ ID NO: 9187 - DNA, 20 bp, synthetic construct
  misc_feature 1..20: note = chemically synthesized
  source 1..20: mol_type = other DNA
acctagaaaaatggcctggg

SEQ ID NO: 9188 - DNA, 20 bp, synthetic construct
  misc_feature 1..20: note = chemically synthesized
  source 1..20: mol_type = other DNA
cctagaaaaatggcctgggg

SEQ ID NO: 9189 - DNA, 20 bp, synthetic construct
  misc_feature 1..20: note = chemically synthesized
  source 1..20: mol_type = other DNA
aaaaatggcctggggaggtc

SEQ ID NO: 9190 - DNA, 20 bp, synthetic construct
  misc_feature 1..20: note = chemically synthesized
  source 1..20: mol_type = other DNA
cctggggaggtccagcccac

SEQ ID NO: 9191 - DNA, 20 bp, synthetic construct
  misc_feature 1..20: note = chemically synthesized
  source 1..20: mol_type = other DNA
ggggaggtccagcccactag

SEQ ID NO: 9192 - DNA, 20 bp, synthetic construct
  misc_feature 1..20: note = chemically synthesized
  source 1..20: mol_type = other DNA
gggaggtccagcccactaga

SEQ ID NO: 9193 - DNA, 20 bp, synthetic construct
  misc_feature 1..20: note = chemically synthesized
  source 1..20: mol_type = other DNA
gaggtccagcccactagaag

SEQ ID NO: 9194 - DNA, 20 bp, synthetic construct
  misc_feature 1..20: note = chemically synthesized
  source 1..20: mol_type = other DNA
cagcccactagaaggagata

SEQ ID NO: 9195 - DNA, 20 bp, synthetic construct
  misc_feature 1..20: note = chemically synthesized
  source 1..20: mol_type = other DNA
ctagaaggagatacagaaac

SEQ ID NO: 9196 - DNA, 20 bp, synthetic construct
  misc_feature 1..20: note = chemically synthesized
  source 1..20: mol_type = other DNA
aagccctccataaatatctg

SEQ ID NO: 9197 - DNA, 20 bp, synthetic construct
  misc_feature 1..20: note = chemically synthesized
  source 1..20: mol_type = other DNA
agccctccataaatatctgt

SEQ ID NO: 9198 - DNA, 20 bp, synthetic construct
  misc_feature 1..20: note = chemically synthesized
  source 1..20: mol_type = other DNA
ccataaatatctgtgggacc

SEQ ID NO: 9199 - DNA, 20 bp, synthetic construct
  misc_feature 1..20: note = chemically synthesized
  source 1..20: mol_type = other DNA
ccagctacctctctgaaaca

SEQ ID NO: 9200 - DNA, 20 bp, synthetic construct
  misc_feature 1..20: note = chemically synthesized
  source 1..20: mol_type = other DNA
tacctctctgaaacacagcc

SEQ ID NO: 9201 - DNA, 20 bp, synthetic construct
  misc_feature 1..20: note = chemically synthesized
  source 1..20: mol_type = other DNA
gaaacacagcccagtgcttt

SEQ ID NO: 9202 - DNA, 20 bp, synthetic construct
  misc_feature 1..20: note = chemically synthesized
  source 1..20: mol_type = other DNA
aaacacagcccagtgctttc

SEQ ID NO: 9203 - DNA, 20 bp, synthetic construct
  misc_feature 1..20: note = chemically synthesized
  source 1..20: mol_type = other DNA
cacagcccagtgctttcagg

SEQ ID NO: 9204 - DNA, 20 bp, synthetic construct
  misc_feature 1..20: note = chemically synthesized
  source 1..20: mol_type = other DNA
acagcccagtgctttcaggc

SEQ ID NO: 9205 - DNA, 20 bp, synthetic construct
  misc_feature 1..20: note = chemically synthesized
  source 1..20: mol_type = other DNA
cagcccagtgctttcaggca

SEQ ID NO: 9206 - DNA, 20 bp, synthetic construct
  misc_feature 1..20: note = chemically synthesized
  source 1..20: mol_type = other DNA
gcccagtgctttcaggcagg

SEQ ID NO: 9207 - DNA, 20 bp, synthetic construct
  misc_feature 1..20: note = chemically synthesized
  source 1..20: mol_type = other DNA
agtgctttcaggcagggaga

SEQ ID NO: 9208 - DNA, 20 bp, synthetic construct
  misc_feature 1..20: note = chemically synthesized
  source 1..20: mol_type = other DNA
gctttcaggcagggagaaag

SEQ ID NO: 9209 - DNA, 20 bp, synthetic construct
  misc_feature 1..20: note = chemically synthesized
  source 1..20: mol_type = other DNA
ttcaggcagggagaaagtgg

SEQ ID NO: 9210 - DNA, 20 bp, synthetic construct
  misc_feature 1..20: note = chemically synthesized
  source 1..20: mol_type = other DNA
aggcagggagaaagtggtgg

SEQ ID NO: 9211 - DNA, 20 bp, synthetic construct
  misc_feature 1..20: note = chemically synthesized
  source 1..20: mol_type = other DNA
ggcagggagaaagtggtggt

SEQ ID NO: 9212 - DNA, 20 bp, synthetic construct
  misc_feature 1..20: note = chemically synthesized
  source 1..20: mol_type = other DNA
agggagaaagtggtggtggg

SEQ ID NO: 9213 - DNA, 20 bp, synthetic construct
  misc_feature 1..20: note = chemically synthesized
  source 1..20: mol_type = other DNA
gagaaagtggtggtgggtgg

SEQ ID NO: 9214 - DNA, 20 bp, synthetic construct
  misc_feature 1..20: note = chemically synthesized
  source 1..20: mol_type = other DNA
aagtggtggtgggtggcgga

SEQ ID NO: 9215 - DNA, 20 bp, synthetic construct
  misc_feature 1..20: note = chemically synthesized
  source 1..20: mol_type = other DNA
gtggtggtgggtggcggaca

SEQ ID NO: 9216 - DNA, 20 bp, synthetic construct
  misc_feature 1..20: note = chemically synthesized
  source 1..20: mol_type = other DNA
tgggtggcggacagagatgt

SEQ ID NO: 9217 - DNA, 20 bp, synthetic construct
  misc_feature 1..20: note = chemically synthesized
  source 1..20: mol_type = other DNA
gtggcggacagagatgtgag

SEQ ID NO: 9218 - DNA, 20 bp, synthetic construct
  misc_feature 1..20: note = chemically synthesized
  source 1..20: mol_type = other DNA
gagatgtgagtggactgaca

SEQ ID NO: 9219 - DNA, 20 bp, synthetic construct
  misc_feature 1..20: note = chemically synthesized
  source 1..20: mol_type = other DNA
tgagtggactgacacagaca

SEQ ID NO: 9220 - DNA, 20 bp, synthetic construct
  misc_feature 1..20: note = chemically synthesized
  source 1..20: mol_type = other DNA
gagtggactgacacagacat

SEQ ID NO: 9221 - DNA, 20 bp, synthetic construct
  misc_feature 1..20: note = chemically synthesized
  source 1..20: mol_type = other DNA
agtggactgacacagacatg

SEQ ID NO: 9222 - DNA, 20 bp, synthetic construct
  misc_feature 1..20: note = chemically synthesized
  source 1..20: mol_type = other DNA
gtggactgacacagacatgg

SEQ ID NO: 9223 - DNA, 20 bp, synthetic construct
  misc_feature 1..20: note = chemically synthesized
  source 1..20: mol_type = other DNA
ctcttgatcacccaactttc

SEQ ID NO: 9224 - DNA, 20 bp, synthetic construct
  misc_feature 1..20: note = chemically synthesized
  source 1..20: mol_type = other DNA
cccatttctgcccctgactt

SEQ ID NO: 9225 - DNA, 20 bp, synthetic construct
  misc_feature 1..20: note = chemically synthesized
  source 1..20: mol_type = other DNA
ctgcccctgacttgagctcc

SEQ ID NO: 9226 - DNA, 20 bp, synthetic construct
  misc_feature 1..20: note = chemically synthesized
  source 1..20: mol_type = other DNA
tgcccctgacttgagctccc

SEQ ID NO: 9227 - DNA, 20 bp, synthetic construct
  misc_feature 1..20: note = chemically synthesized
  source 1..20: mol_type = other DNA
caggccactcaacccactgt

SEQ ID NO: 9228 - DNA, 20 bp, synthetic construct
  misc_feature 1..20: note = chemically synthesized
  source 1..20: mol_type = other DNA
aggccactcaacccactgtg

SEQ ID NO: 9229 - DNA, 20 bp, synthetic construct
  misc_feature 1..20: note = chemically synthesized
  source 1..20: mol_type = other DNA
cccactgtgaggtcttactg

SEQ ID NO: 9230 - DNA, 20 bp, synthetic construct
  misc_feature 1..20: note = chemically synthesized
  source 1..20: mol_type = other DNA
ccactgtgaggtcttactgt

SEQ ID NO: 9231 - DNA, 20 bp, synthetic construct
  misc_feature 1..20: note = chemically synthesized
  source 1..20: mol_type = other DNA
cactgtgaggtcttactgtg

SEQ ID NO: 9232 - DNA, 20 bp, synthetic construct
  misc_feature 1..20: note = chemically synthesized
  source 1..20: mol_type = other DNA
gtcttactgtggggattacc

SEQ ID NO: 9233 - DNA, 20 bp, synthetic construct
  misc_feature 1..20: note = chemically synthesized
  source 1..20: mol_type = other DNA
ggggattaccgagtcaccac

SEQ ID NO: 9234 - DNA, 20 bp, synthetic construct
  misc_feature 1..20: note = chemically synthesized
  source 1..20: mol_type = other DNA
gggattaccgagtcaccacc

SEQ ID NO: 9235 - DNA, 20 bp, synthetic construct
  misc_feature 1..20: note = chemically synthesized
  source 1..20: mol_type = other DNA
caccaccaggctgcgctgaa

SEQ ID NO: 9236 - DNA, 20 bp, synthetic construct
  misc_feature 1..20: note = chemically synthesized
  source 1..20: mol_type = other DNA
accaccaggctgcgctgaac

SEQ ID NO: 9237 - DNA, 20 bp, synthetic construct
  misc_feature 1..20: note = chemically synthesized
  source 1..20: mol_type = other DNA
accaggctgcgctgaacagg

SEQ ID NO: 9238 - DNA, 20 bp, synthetic construct
  misc_feature 1..20: note = chemically synthesized
  source 1..20: mol_type = other DNA
gcgctgaacaggaagtgaac

SEQ ID NO: 9239 - DNA, 20 bp, synthetic construct
  misc_feature 1..20: note = chemically synthesized
  source 1..20: mol_type = other DNA
ggaagtgaacaagtcaattc

SEQ ID NO: 9240 - DNA, 20 bp, synthetic construct
  misc_feature 1..20: note = chemically synthesized
  source 1..20: mol_type = other DNA
gtgaacaagtcaattcgaga

SEQ ID NO: 9241 - DNA, 20 bp, synthetic construct
  misc_feature 1..20: note = chemically synthesized
  source 1..20: mol_type = other DNA
caattcgagaaagatccaat

SEQ ID NO: 9242 - DNA, 20 bp, synthetic construct
  misc_feature 1..20: note = chemically synthesized
  source 1..20: mol_type = other DNA
aattcgagaaagatccaata

SEQ ID NO: 9243 - DNA, 20 bp, synthetic construct
  misc_feature 1..20: note = chemically synthesized
  source 1..20: mol_type = other DNA
attcgagaaagatccaataa

SEQ ID NO: 9244 - DNA, 20 bp, synthetic construct
  misc_feature 1..20: note = chemically synthesized
  source 1..20: mol_type = other DNA
tccaataagggaatattctc

SEQ ID NO: 9245 - DNA, 20 bp, synthetic construct
  misc_feature 1..20: note = chemically synthesized
  source 1..20: mol_type = other DNA
ccaataagggaatattctct

SEQ ID NO: 9246 - DNA, 20 bp, synthetic construct
  misc_feature 1..20: note = chemically synthesized
  source 1..20: mol_type = other DNA
gaatattctctgggcaccgc

SEQ ID NO: 9247 - DNA, 20 bp, synthetic construct
  misc_feature 1..20: note = chemically synthesized
  source 1..20: mol_type = other DNA
aatattctctgggcaccgct

SEQ ID NO: 9248 - DNA, 20 bp, synthetic construct
  misc_feature 1..20: note = chemically synthesized
  source 1..20: mol_type = other DNA
caccgctgggccaacaccca

SEQ ID NO: 9249 - DNA, 20 bp, synthetic construct
  misc_feature 1..20: note = chemically synthesized
  source 1..20: mol_type = other DNA
ccgctgggccaacacccacg

SEQ ID NO: 9250 - DNA, 20 bp, synthetic construct
  misc_feature 1..20: note = chemically synthesized
  source 1..20: mol_type = other DNA
cgctgggccaacacccacgg

SEQ ID NO: 9251 - DNA, 20 bp, synthetic construct
  misc_feature 1..20: note = chemically synthesized
  source 1..20: mol_type = other DNA
gctgggccaacacccacgga

SEQ ID NO: 9252 - DNA, 20 bp, synthetic construct
  misc_feature 1..20: note = chemically synthesized
  source 1..20: mol_type = other DNA
ctgggccaacacccacggag

SEQ ID NO: 9253 - DNA, 20 bp, synthetic construct
  misc_feature 1..20: note = chemically synthesized
  source 1..20: mol_type = other DNA
caacacccacggaggggtcc

SEQ ID NO: 9254 - DNA, 20 bp, synthetic construct
  misc_feature 1..20: note = chemically synthesized
  source 1..20: mol_type = other DNA
gtcctggaatacaaataccc

SEQ ID NO: 9255 - DNA, 20 bp, synthetic construct
  misc_feature 1..20: note = chemically synthesized
  source 1..20: mol_type = other DNA
cctggaatacaaataccctg

SEQ ID NO: 9256 - DNA, 20 bp, synthetic construct
  misc_feature 1..20: note = chemically synthesized
  source 1..20: mol_type = other DNA
tacaaataccctggagtctg

SEQ ID NO: 9257 - DNA, 20 bp, synthetic construct
  misc_feature 1..20: note = chemically synthesized
  source 1..20: mol_type = other DNA
acaaataccctggagtctga

SEQ ID NO: 9258 - DNA, 20 bp, synthetic construct
  misc_feature 1..20: note = chemically synthesized
  source 1..20: mol_type = other DNA
caaataccctggagtctgaa

SEQ ID NO: 9259 - DNA, 20 bp, synthetic construct
  misc_feature 1..20: note = chemically synthesized
  source 1..20: mol_type = other DNA
ataccctggagtctgaaggg

SEQ ID NO: 9260 - DNA, 20 bp, synthetic construct
  misc_feature 1..20: note = chemically synthesized
  source 1..20: mol_type = other DNA
ccctggagtctgaagggcgg

SEQ ID NO: 9261 - DNA, 20 bp, synthetic construct
  misc_feature 1..20: note = chemically synthesized
  source 1..20: mol_type = other DNA
caattatgtcttcattgaac

SEQ ID NO: 9262 - DNA, 20 bp, synthetic construct
  misc_feature 1..20: note = chemically synthesized
  source 1..20: mol_type = other DNA
aattatgtcttcattgaact

SEQ ID NO: 9263 - DNA, 20 bp, synthetic construct
  misc_feature 1..20: note = chemically synthesized
  source 1..20: mol_type = other DNA
cattgaactgggttatgaaa

SEQ ID NO: 9264 - DNA, 20 bp, synthetic construct
  misc_feature 1..20: note = chemically synthesized
  source 1..20: mol_type = other DNA
attgaactgggttatgaaaa

SEQ ID NO: 9265 - DNA, 20 bp, synthetic construct
  misc_feature 1..20: note = chemically synthesized
  source 1..20: mol_type = other DNA
ttgaactgggttatgaaaaa

SEQ ID NO: 9266 - DNA, 20 bp, synthetic construct
  misc_feature 1..20: note = chemically synthesized
  source 1..20: mol_type = other DNA
aactgggttatgaaaaaggg

SEQ ID NO: 9267 - DNA, 20 bp, synthetic construct
  misc_feature 1..20: note = chemically synthesized
  source 1..20: mol_type = other DNA
tgggttatgaaaaagggaag

SEQ ID NO: 9268 - DNA, 20 bp, synthetic construct
  misc_feature 1..20: note = chemically synthesized
  source 1..20: mol_type = other DNA
gggttatgaaaaagggaagc

SEQ ID NO: 9269 - DNA, 20 bp, synthetic construct
  misc_feature 1..20: note = chemically synthesized
  source 1..20: mol_type = other DNA
ggttatgaaaaagggaagca

SEQ ID NO: 9270 - DNA, 20 bp, synthetic construct
  misc_feature 1..20: note = chemically synthesized
  source 1..20: mol_type = other DNA
ggaagcagggattgaaaatc

SEQ ID NO: 9271 - DNA, 20 bp, synthetic construct
  misc_feature 1..20: note = chemically synthesized
  source 1..20: mol_type = other DNA
ggattgaaaatctagccttg

SEQ ID NO: 9272 - DNA, 20 bp, synthetic construct
  misc_feature 1..20: note = chemically synthesized
  source 1..20: mol_type = other DNA
aaatctagccttgtggccat

SEQ ID NO: 9273 - DNA, 20 bp, synthetic construct
  misc_feature 1..20: note = chemically synthesized
  source 1..20: mol_type = other DNA
aagcctgtgatgactcatgc

SEQ ID NO: 9274 - DNA, 20 bp, synthetic construct
  misc_feature 1..20: note = chemically synthesized
  source 1..20: mol_type = other DNA
gtgatgactcatgccagctt

SEQ ID NO: 9275 - DNA, 20 bp, synthetic construct
  misc_feature 1..20: note = chemically synthesized
  source 1..20: mol_type = other DNA
tgatgactcatgccagcttt

SEQ ID NO: 9276 - DNA, 20 bp, synthetic construct
  misc_feature 1..20: note = chemically synthesized
  source 1..20: mol_type = other DNA
atgccagctttgggtgctct

SEQ ID NO: 9277 - DNA, 20 bp, synthetic construct
  misc_feature 1..20: note = chemically synthesized
  source 1..20: mol_type = other DNA
actgtcacctctcctcaccc

SEQ ID NO: 9278 - DNA, 20 bp, synthetic construct
  misc_feature 1..20: note = chemically synthesized
  source 1..20: mol_type = other DNA
cctctcctcaccccagcaca

SEQ ID NO: 9279 - DNA, 20 bp, synthetic construct
  misc_feature 1..20: note = chemically synthesized
  source 1..20: mol_type = other DNA
cctcaccccagcacacagaa

SEQ ID NO: 9280 - DNA, 20 bp, synthetic construct
  misc_feature 1..20: note = chemically synthesized
  source 1..20: mol_type = other DNA
atgtgcttattatgtgcact

SEQ ID NO: 9281 - DNA, 20 bp, synthetic construct
  misc_feature 1..20: note = chemically synthesized
  source 1..20: mol_type = other DNA
tgtgcttattatgtgcactt

SEQ ID NO: 9282 - DNA, 20 bp, synthetic construct
  misc_feature 1..20: note = chemically synthesized
  source 1..20: mol_type = other DNA
ccactcctattattaaaaca

SEQ ID NO: 9283 - DNA, 20 bp, synthetic construct
  misc_feature 1..20: note = chemically synthesized
  source 1..20: mol_type = other DNA
cactcctattattaaaacac

SEQ ID NO: 9284 - DNA, 20 bp, synthetic construct
  misc_feature 1..20: note = chemically synthesized
  source 1..20: mol_type = other DNA
tattaaaacacaggttttgc

SEQ ID NO: 9285 - DNA, 20 bp, synthetic construct
  misc_feature 1..20: note = chemically synthesized
  source 1..20: mol_type = other DNA
gttttgctggaaactcaaaa

SEQ ID NO: 9286 - DNA, 20 bp, synthetic construct
  misc_feature 1..20: note = chemically synthesized
  source 1..20: mol_type = other DNA
ctggaaactcaaaaaagact

SEQ ID NO: 9287 - DNA, 20 bp, synthetic construct
  misc_feature 1..20: note = chemically synthesized
  source 1..20: mol_type = other DNA
caaaaaagacttggctctgc

SEQ ID NO: 9288 - DNA, 20 bp, synthetic construct
  misc_feature 1..20: note = chemically synthesized
  source 1..20: mol_type = other DNA
gacttggctctgctggctca

SEQ ID NO: 9289 - DNA, 20 bp, synthetic construct
  misc_feature 1..20: note = chemically synthesized
  source 1..20: mol_type = other DNA
acttggctctgctggctcac

SEQ ID NO: 9290 - DNA, 20 bp, synthetic construct
  misc_feature 1..20: note = chemically synthesized
  source 1..20: mol_type = other DNA
cttggctctgctggctcaca

SEQ ID NO: 9291 - DNA, 20 bp, synthetic construct
  misc_feature 1..20: note = chemically synthesized
  source 1..20: mol_type = other DNA
ctgctggctcacagggaatc

SEQ ID NO: 9292 - DNA, 20 bp, synthetic construct
  misc_feature 1..20: note = chemically synthesized
  source 1..20: mol_type = other DNA
tgctggctcacagggaatct

SEQ ID NO: 9293 - DNA, 20 bp, synthetic construct
  misc_feature 1..20: note = chemically synthesized
  source 1..20: mol_type = other DNA
cttccaaaacctttgttctc

SEQ ID NO: 9294 - DNA, 20 bp, synthetic construct
  misc_feature 1..20: note = chemically synthesized
  source 1..20: mol_type = other DNA
aacctttgttctccagatgt

SEQ ID NO: 9295 - DNA, 20 bp, synthetic construct
  misc_feature 1..20: note = chemically synthesized
  source 1..20: mol_type = other DNA
gttctccagatgtcagtgca

SEQ ID NO: 9296 - DNA, 20 bp, synthetic construct
  misc_feature 1..20: note = chemically synthesized
  source 1..20: mol_type = other DNA
tgtcagtgcaaagttatgaa

SEQ ID NO: 9297 - DNA, 20 bp, synthetic construct
  misc_feature 1..20: note = chemically synthesized
  source 1..20: mol_type = other DNA
ttatgaacagctctccccct

SEQ ID NO: 9298 - DNA, 20 bp, synthetic construct
  misc_feature 1..20: note = chemically synthesized
  source 1..20: mol_type = other DNA
tccccctgagctaacttacc

SEQ ID NO: 9299 - DNA, 20 bp, synthetic construct
  misc_feature 1..20: note = chemically synthesized
  source 1..20: mol_type = other DNA
ccctgagctaacttaccgag

SEQ ID NO: 9300 - DNA, 20 bp, synthetic construct
  misc_feature 1..20: note = chemically synthesized
  source 1..20: mol_type = other DNA
gagctaacttaccgagcagt

SEQ ID NO: 9301 - DNA, 20 bp, synthetic construct
  misc_feature 1..20: note = chemically synthesized
  source 1..20: mol_type = other DNA
taacttaccgagcagtaagt

SEQ ID NO: 9302 - DNA, 20 bp, synthetic construct
  misc_feature 1..20: note = chemically synthesized
  source 1..20: mol_type = other DNA
aacttaccgagcagtaagtg

SEQ ID NO: 9303 - DNA, 20 bp, synthetic construct
  misc_feature 1..20: note = chemically synthesized
  source 1..20: mol_type = other DNA
taccgagcagtaagtgaggc

SEQ ID NO: 9304 - DNA, 20 bp, synthetic construct
  misc_feature 1..20: note = chemically synthesized
  source 1..20: mol_type = other DNA
gagcagtaagtgaggcaaga

SEQ ID NO: 9305 - DNA, 20 bp, synthetic construct
  misc_feature 1..20: note = chemically synthesized
  source 1..20: mol_type = other DNA
agcagtaagtgaggcaagaa

SEQ ID NO: 9306 - DNA, 20 bp, synthetic construct
  misc_feature 1..20: note = chemically synthesized
  source 1..20: mol_type = other DNA
aggccactcactatatttct

SEQ ID NO: 9307 - DNA, 20 bp, synthetic construct
  misc_feature 1..20: note = chemically synthesized
  source 1..20: mol_type = other DNA
tatatttctcagcctccatg

SEQ ID NO: 9308 - DNA, 20 bp, synthetic construct
  misc_feature 1..20: note = chemically synthesized
  source 1..20: mol_type = other DNA
agcctccatgaagtcgtcac

SEQ ID NO: 9309 - DNA, 20 bp, synthetic construct
  misc_feature 1..20: note = chemically synthesized
  source 1..20: mol_type = other DNA
gcctccatgaagtcgtcact

SEQ ID NO: 9310 - DNA, 20 bp, synthetic construct
  misc_feature 1..20: note = chemically synthesized
  source 1..20: mol_type = other DNA
ctccatgaagtcgtcactgg

SEQ ID NO: 9311 - DNA, 20 bp, synthetic construct
  misc_feature 1..20: note = chemically synthesized
  source 1..20: mol_type = other DNA
ccatgaagtcgtcactggga

SEQ ID NO: 9312 - DNA, 20 bp, synthetic construct
  misc_feature 1..20: note = chemically synthesized
  source 1..20: mol_type = other DNA
catgaagtcgtcactgggag

SEQ ID NO: 9313 - DNA, 20 bp, synthetic construct
  misc_feature 1..20: note = chemically synthesized
  source 1..20: mol_type = other DNA
tgaagtcgtcactgggagag

SEQ ID NO: 9314 - DNA, 20 bp, synthetic construct
  misc_feature 1..20: note = chemically synthesized
  source 1..20: mol_type = other DNA
tcgtcactgggagaggagcc

SEQ ID NO: 9315 - DNA, 20 bp, synthetic construct
  misc_feature 1..20: note = chemically synthesized
  source 1..20: mol_type = other DNA
gtcactgggagaggagccaa

SEQ ID NO: 9316 - DNA, 20 bp, synthetic construct
  misc_feature 1..20: note = chemically synthesized
  source 1..20: mol_type = other DNA
tcactgggagaggagccaag

SEQ ID NO: 9317 - DNA, 20 bp, synthetic construct
  misc_feature 1..20: note = chemically synthesized
  source 1..20: mol_type = other DNA
cactgggagaggagccaaga

SEQ ID NO: 9318 - DNA, 20 bp, synthetic construct
  misc_feature 1..20: note = chemically synthesized
  source 1..20: mol_type = other DNA
ctgggagaggagccaagagg

SEQ ID NO: 9319 - DNA, 20 bp, synthetic construct
  misc_feature 1..20: note = chemically synthesized
  source 1..20: mol_type = other DNA
tgggagaggagccaagaggg

SEQ ID NO: 9320 - DNA, 20 bp, synthetic construct
  misc_feature 1..20: note = chemically synthesized
  source 1..20: mol_type = other DNA
gggagaggagccaagaggga

SEQ ID NO: 9321 - DNA, 20 bp, synthetic construct
  misc_feature 1..20: note = chemically synthesized
  source 1..20: mol_type = other DNA
ggagaggagccaagagggag

SEQ ID NO: 9322 - DNA, 20 bp, synthetic construct
  misc_feature 1..20: note = chemically synthesized
  source 1..20: mol_type = other DNA
gagaggagccaagagggagg

SEQ ID NO: 9323 - DNA, 20 bp, synthetic construct
  misc_feature 1..20: note = chemically synthesized
  source 1..20: mol_type = other DNA
ccaagagggagggggcacct

SEQ ID NO: 9324 - DNA, 20 bp, synthetic construct
  misc_feature 1..20: note = chemically synthesized
  source 1..20: mol_type = other DNA
caagagggagggggcacctt

SEQ ID NO: 9325 - DNA, 20 bp, synthetic construct
  misc_feature 1..20: note = chemically synthesized
  source 1..20: mol_type = other DNA
agagggagggggcaccttag

SEQ ID NO: 9326 - DNA, 20 bp, synthetic construct
  misc_feature 1..20: note = chemically synthesized
  source 1..20: mol_type = other DNA
gagggggcaccttaggagac

SEQ ID NO: 9327 - DNA, 20 bp, synthetic construct
  misc_feature 1..20: note = chemically synthesized
  source 1..20: mol_type = other DNA
gatcgtaactcaccgtcatc

SEQ ID NO: 9328 - DNA, 20 bp, synthetic construct
  misc_feature 1..20: note = chemically synthesized
  source 1..20: mol_type = other DNA
atcgtaactcaccgtcatcc

SEQ ID NO: 9329 - DNA, 20 bp, synthetic construct
  misc_feature 1..20: note = chemically synthesized
  source 1..20: mol_type = other DNA
tcgtaactcaccgtcatccg

SEQ ID NO: 9330 - DNA, 20 bp, synthetic construct
  misc_feature 1..20: note = chemically synthesized
  source 1..20: mol_type = other DNA
taactcaccgtcatccgggg

SEQ ID NO: 9331 - DNA, 20 bp, synthetic construct
  misc_feature 1..20: note = chemically synthesized
  source 1..20: mol_type = other DNA
ctcaccgtcatccggggaag

SEQ ID NO: 9332 - DNA, 20 bp, synthetic construct
  misc_feature 1..20: note = chemically synthesized
  source 1..20: mol_type = other DNA
caccgtcatccggggaagtg

SEQ ID NO: 9333 - DNA, 20 bp, synthetic construct
  misc_feature 1..20: note = chemically synthesized
  source 1..20: mol_type = other DNA
ccgtcatccggggaagtgga

SEQ ID NO: 9334 - DNA, 20 bp, synthetic construct
  misc_feature 1..20: note = chemically synthesized
  source 1..20: mol_type = other DNA
cgtcatccggggaagtggag

SEQ ID NO: 9335 - DNA, 20 bp, synthetic construct
  misc_feature 1..20: note = chemically synthesized
  source 1..20: mol_type = other DNA
catccggggaagtggagagg

SEQ ID NO: 9336 - DNA, 20 bp, synthetic construct
  misc_feature 1..20: note = chemically synthesized
  source 1..20: mol_type = other DNA
cggggaagtggagaggaagt

SEQ ID NO: 9337 - DNA, 20 bp, synthetic construct
  misc_feature 1..20: note = chemically synthesized
  source 1..20: mol_type = other DNA
ggggaagtggagaggaagtc

SEQ ID NO: 9338 - DNA, 20 bp, synthetic construct
  misc_feature 1..20: note = chemically synthesized
  source 1..20: mol_type = other DNA
gggaagtggagaggaagtca

SEQ ID NO: 9339 - DNA, 20 bp, synthetic construct
  misc_feature 1..20: note = chemically synthesized
  source 1..20: mol_type = other DNA
ggaagtcagggaactcgtgt

SEQ ID NO: 9340 - DNA, 20 bp, synthetic construct
  misc_feature 1..20: note = chemically synthesized
  source 1..20: mol_type = other DNA
gaagtcagggaactcgtgtc

SEQ ID NO: 9341 - DNA, 20 bp, synthetic construct
  misc_feature 1..20: note = chemically synthesized
  source 1..20: mol_type = other DNA
agtcagggaactcgtgtcag

SEQ ID NO: 9342 - DNA, 20 bp, synthetic construct
  misc_feature 1..20: note = chemically synthesized
  source 1..20: mol_type = other DNA
cagggaactcgtgtcaggag

SEQ ID NO: 9343 - DNA, 20 bp, synthetic construct
  misc_feature 1..20: note = chemically synthesized
  source 1..20: mol_type = other DNA
gggaactcgtgtcaggagtg

SEQ ID NO: 9344 - DNA, 20 bp, synthetic construct
  misc_feature 1..20: note = chemically synthesized
  source 1..20: mol_type = other DNA
gaactcgtgtcaggagtgga

SEQ ID NO: 9345 - DNA, 20 bp, synthetic construct
  misc_feature 1..20: note = chemically synthesized
  source 1..20: mol_type = other DNA
cgtgtcaggagtggagagct

SEQ ID NO: 9346 - DNA, 20 bp, synthetic construct
  misc_feature 1..20: note = chemically synthesized
  source 1..20: mol_type = other DNA
gtggagagctaagctcaata

SEQ ID NO: 9347 - DNA, 20 bp, synthetic construct
  misc_feature 1..20: note = chemically synthesized
  source 1..20: mol_type = other DNA
gagctaagctcaatatggac

SEQ ID NO: 9348 - DNA, 20 bp, synthetic construct
  misc_feature 1..20: note = chemically synthesized
  source 1..20: mol_type = other DNA
agctaagctcaatatggaca

SEQ ID NO: 9349 - DNA, 20 bp, synthetic construct
  misc_feature 1..20: note = chemically synthesized
  source 1..20: mol_type = other DNA
aagctcaatatggacaagga

SEQ ID NO: 9350 - DNA, 20 bp, synthetic construct
  misc_feature 1..20: note = chemically synthesized
  source 1..20: mol_type = other DNA
gctcaatatggacaaggaca

SEQ ID NO: 9351 - DNA, 20 bp, synthetic construct
  misc_feature 1..20: note = chemically synthesized
  source 1..20: mol_type = other DNA
tcaatatggacaaggacaga

SEQ ID NO: 9352 - DNA, 20 bp, synthetic construct
  misc_feature 1..20: note = chemically synthesized
  source 1..20: mol_type = other DNA
caatatggacaaggacagag

SEQ ID NO: 9353 - DNA, 20 bp, synthetic construct
  misc_feature 1..20: note = chemically synthesized
  source 1..20: mol_type = other DNA
aatatggacaaggacagaga

SEQ ID NO: 9354 - DNA, 20 bp, synthetic construct
  misc_feature 1..20: note = chemically synthesized
  source 1..20: mol_type = other DNA
atatggacaaggacagagag

SEQ ID NO: 9355 - DNA, 20 bp, synthetic construct
  misc_feature 1..20: note = chemically synthesized
  source 1..20: mol_type = other DNA
caaggacagagaggggcacc

SEQ ID NO: 9356 - DNA, 20 bp, synthetic construct
  misc_feature 1..20: note = chemically synthesized
  source 1..20: mol_type = other DNA
aaggacagagaggggcacct

SEQ ID NO: 9357 - DNA, 20 bp, synthetic construct
  misc_feature 1..20: note = chemically synthesized
  source 1..20: mol_type = other DNA
acagagaggggcacctggga

SEQ ID NO: 9358 - DNA, 20 bp, synthetic construct
  misc_feature 1..20: note = chemically synthesized
  source 1..20: mol_type = other DNA
cagagaggggcacctgggat

SEQ ID NO: 9359 - DNA, 20 bp, synthetic construct
  misc_feature 1..20: note = chemically synthesized
  source 1..20: mol_type = other DNA
gagaggggcacctgggatgg

SEQ ID NO: 9360 - DNA, 20 bp, synthetic construct
  misc_feature 1..20: note = chemically synthesized
  source 1..20: mol_type = other DNA
cacctgggatgggagaaatg

SEQ ID NO: 9361 - DNA, 20 bp, synthetic construct
  misc_feature 1..20: note = chemically synthesized
  source 1..20: mol_type = other DNA
ggatgggagaaatgtggcat

SEQ ID NO: 9362 - DNA, 20 bp, synthetic construct
  misc_feature 1..20: note = chemically synthesized
  source 1..20: mol_type = other DNA
gatgggagaaatgtggcatc

SEQ ID NO: 9363 - DNA, 20 bp, synthetic construct
  misc_feature 1..20: note = chemically synthesized
  source 1..20: mol_type = other DNA
aaatgtggcatcaggacaac

SEQ ID NO: 9364 - DNA, 20 bp, synthetic construct
  misc_feature 1..20: note = chemically synthesized
  source 1..20: mol_type = other DNA
aatgtggcatcaggacaact

SEQ ID NO: 9365 - DNA, 20 bp, synthetic construct
  misc_feature 1..20: note = chemically synthesized
  source 1..20: mol_type = other DNA
tgtggcatcaggacaactgg

SEQ ID NO: 9366 - DNA, 20 bp, synthetic construct
  misc_feature 1..20: note = chemically synthesized
  source 1..20: mol_type = other DNA
atcaggacaactgggagtga

SEQ ID NO: 9367 - DNA, 20 bp, synthetic construct
  misc_feature 1..20: note = chemically synthesized
  source 1..20: mol_type = other DNA
tgaaagtttaactgccctca

SEQ ID NO: 9368 - DNA, 20 bp, synthetic construct
  misc_feature 1..20: note = chemically synthesized
  source 1..20: mol_type = other DNA
agtttaactgccctcaaaga

SEQ ID NO: 9369 - DNA, 20 bp, synthetic construct
  misc_feature 1..20: note = chemically synthesized
  source 1..20: mol_type = other DNA
gccctcaaagatggctgaca

SEQ ID NO: 9370 - DNA, 20 bp, synthetic construct
  misc_feature 1..20: note = chemically synthesized
  source 1..20: mol_type = other DNA
aaagatggctgacaaagatc

SEQ ID NO: 9371 - DNA, 20 bp, synthetic construct
  misc_feature 1..20: note = chemically synthesized
  source 1..20: mol_type = other DNA
tgacaaagatctagcattcc

SEQ ID NO: 9372 - DNA, 20 bp, synthetic construct
  misc_feature 1..20: note = chemically synthesized
  source 1..20: mol_type = other DNA
caaagatctagcattcctag

SEQ ID NO: 9373 - DNA, 20 bp, synthetic construct
  misc_feature 1..20: note = chemically synthesized
  source 1..20: mol_type = other DNA
tagcattcctagtggacacc

SEQ ID NO: 9374 - DNA, 20 bp, synthetic construct
  misc_feature 1..20: note = chemically synthesized
  source 1..20: mol_type = other DNA
ttcctagtggacaccaagct

SEQ ID NO: 9375 - DNA, 20 bp, synthetic construct
  misc_feature 1..20: note = chemically synthesized
  source 1..20: mol_type = other DNA
gtggacaccaagctgagcat

SEQ ID NO: 9376 - DNA, 20 bp, synthetic construct
  misc_feature 1..20: note = chemically synthesized
  source 1..20: mol_type = other DNA
ctgagcatgagtcatcaatg

SEQ ID NO: 9377 - DNA, 20 bp, synthetic construct
  misc_feature 1..20: note = chemically synthesized
  source 1..20: mol_type = other DNA
atgagtcatcaatgaagcac

SEQ ID NO: 9378 - DNA, 20 bp, synthetic construct
  misc_feature 1..20: note = chemically synthesized
  source 1..20: mol_type = other DNA
tgaagcactggtttttaaaa

SEQ ID NO: 9379 - DNA, 20 bp, synthetic construct
  misc_feature 1..20: note = chemically synthesized
  source 1..20: mol_type = other DNA
gcactggtttttaaaaaagc

SEQ ID NO: 9380 - DNA, 20 bp, synthetic construct
  misc_feature 1..20: note = chemically synthesized
  source 1..20: mol_type = other DNA
ctggtttttaaaaaagcaag

SEQ ID NO: 9381 - DNA, 20 bp, synthetic construct
  misc_feature 1..20: note = chemically synthesized
  source 1..20: mol_type = other DNA
tggtttttaaaaaagcaagc

SEQ ID NO: 9382 - DNA, 20 bp, synthetic construct
  misc_feature 1..20: note = chemically synthesized
  source 1..20: mol_type = other DNA
taaaaaagcaagcaggacat

SEQ ID NO: 9383 - DNA, 20 bp, synthetic construct
  misc_feature 1..20: note = chemically synthesized
  source 1..20: mol_type = other DNA
aaaaagcaagcaggacataa

SEQ ID NO: 9384 - DNA, 20 bp, synthetic construct
  misc_feature 1..20: note = chemically synthesized
  source 1..20: mol_type = other DNA
gcaagcaggacataagagtg

SEQ ID NO: 9385 - DNA, 20 bp, synthetic construct
  misc_feature 1..20: note = chemically synthesized
  source 1..20: mol_type = other DNA
ggacataagagtgcagacat

SEQ ID NO: 9386 - DNA, 20 bp, synthetic construct
  misc_feature 1..20: note = chemically synthesized
  source 1..20: mol_type = other DNA
agagtgcagacataagacta

SEQ ID NO: 9387 - DNA, 20 bp, synthetic construct
  misc_feature 1..20: note = chemically synthesized
  source 1..20: mol_type = other DNA
agacataagactaaagaatg

SEQ ID NO: 9388 - DNA, 20 bp, synthetic construct
  misc_feature 1..20: note = chemically synthesized
  source 1..20: mol_type = other DNA
taaagaatgtggaaaacact

SEQ ID NO: 9389 - DNA, 20 bp, synthetic construct
  misc_feature 1..20: note = chemically synthesized
  source 1..20: mol_type = other DNA
acactaagatatcttgccat

SEQ ID NO: 9390 - DNA, 20 bp, synthetic construct
  misc_feature 1..20: note = chemically synthesized
  source 1..20: mol_type = other DNA
tatcttgccattggactctg

SEQ ID NO: 9391 - DNA, 20 bp, synthetic construct
  misc_feature 1..20: note = chemically synthesized
  source 1..20: mol_type = other DNA
ccattggactctgtagttat

SEQ ID NO: 9392 - DNA, 20 bp, synthetic construct
  misc_feature 1..20: note = chemically synthesized
  source 1..20: mol_type = other DNA
tagttatcagactaatgttt

SEQ ID NO: 9393 - DNA, 20 bp, synthetic construct
  misc_feature 1..20: note = chemically synthesized
  source 1..20: mol_type = other DNA
tcagactaatgtttgagtaa

SEQ ID NO: 9394 - DNA, 20 bp, synthetic construct
  misc_feature 1..20: note = chemically synthesized
  source 1..20: mol_type = other DNA
agactaatgtttgagtaaaa

SEQ ID NO: 9395 - DNA, 20 bp, synthetic construct
  misc_feature 1..20: note = chemically synthesized
  source 1..20: mol_type = other DNA
taatgtttgagtaaaagagc

SEQ ID NO: 9396 - DNA, 20 bp, synthetic construct
  misc_feature 1..20: note = chemically synthesized
  source 1..20: mol_type = other DNA
gagtaaaagagctggaaaac

SEQ ID NO: 9397 - DNA, 20 bp, synthetic construct
  misc_feature 1..20: note = chemically synthesized
  source 1..20: mol_type = other DNA
taaaagagctggaaaaccag

SEQ ID NO: 9398 - DNA, 20 bp, synthetic construct
  misc_feature 1..20: note = chemically synthesized
  source 1..20: mol_type = other DNA
tggaaaaccagcagattcta

SEQ ID NO: 9399 - DNA, 20 bp, synthetic construct
  misc_feature 1..20: note = chemically synthesized
  source 1..20: mol_type = other DNA
gaaaaccagcagattctaaa

SEQ ID NO: 9400 - DNA, 20 bp, synthetic construct
  misc_feature 1..20: note = chemically synthesized
  source 1..20: mol_type = other DNA
aaaccagcagattctaaaga

SEQ ID NO: 9401 - DNA, 20 bp, synthetic construct
  misc_feature 1..20: note = chemically synthesized
  source 1..20: mol_type = other DNA
aaccagcagattctaaagag

SEQ ID NO: 9402 - DNA, 20 bp, synthetic construct
  misc_feature 1..20: note = chemically synthesized
  source 1..20: mol_type = other DNA
gcagattctaaagagaggca

SEQ ID NO: 9403 - DNA, 20 bp, synthetic construct
  misc_feature 1..20: note = chemically synthesized
  source 1..20: mol_type = other DNA
agaggcatagaaacaataaa

SEQ ID NO: 9404 - DNA, 20 bp, synthetic construct
  misc_feature 1..20: note = chemically synthesized
  source 1..20: mol_type = other DNA
gaggcatagaaacaataaat

SEQ ID NO: 9405 - DNA, 20 bp, synthetic construct
  misc_feature 1..20: note = chemically synthesized
  source 1..20: mol_type = other DNA
agaaacaataaatgggttac

SEQ ID NO: 9406 - DNA, 20 bp, synthetic construct
  misc_feature 1..20: note = chemically synthesized
  source 1..20: mol_type = other DNA
ataaatgggttacaagataa

SEQ ID NO: 9407 - DNA, 20 bp, synthetic construct
  misc_feature 1..20: note = chemically synthesized
  source 1..20: mol_type = other DNA
ttacaagataatagatccat

SEQ ID NO: 9408 - DNA, 20 bp, synthetic construct
  misc_feature 1..20: note = chemically synthesized
  source 1..20: mol_type = other DNA
agataatagatccatgagtt

SEQ ID NO: 9409 - DNA, 20 bp, synthetic construct
  misc_feature 1..20: note = chemically synthesized
  source 1..20: mol_type = other DNA
gataatagatccatgagttc

SEQ ID NO: 9410 - DNA, 20 bp, synthetic construct
  misc_feature 1..20: note = chemically synthesized
  source 1..20: mol_type = other DNA
tagatccatgagttcaggtt

SEQ ID NO: 9411 - DNA, 20 bp, synthetic construct
  misc_feature 1..20: note = chemically synthesized
  source 1..20: mol_type = other DNA
agatccatgagttcaggttc

SEQ ID NO: 9412 - DNA, 20 bp, synthetic construct
  misc_feature 1..20: note = chemically synthesized
  source 1..20: mol_type = other DNA
ccatgagttcaggttcagga

SEQ ID NO: 9413 - DNA, 20 bp, synthetic construct
  misc_feature 1..20: note = chemically synthesized
  source 1..20: mol_type = other DNA
atgagttcaggttcaggaaa

SEQ ID NO: 9414 - DNA, 20 bp, synthetic construct
  misc_feature 1..20: note = chemically synthesized
  source 1..20: mol_type = other DNA
ggttcaggaaagagattatt

SEQ ID NO: 9415 - DNA, 20 bp, synthetic construct
  misc_feature 1..20: note = chemically synthesized
  source 1..20: mol_type = other DNA
gttcaggaaagagattattt

SEQ ID NO: 9416 - DNA, 20 bp, synthetic construct
  misc_feature 1..20: note = chemically synthesized
  source 1..20: mol_type = other DNA
caggaaagagattatttagg

SEQ ID NO: 9417 - DNA, 20 bp, synthetic construct
  misc_feature 1..20: note = chemically synthesized
  source 1..20: mol_type = other DNA
gaaagagattatttaggaag

SEQ ID NO: 9418 - DNA, 20 bp, synthetic construct
  misc_feature 1..20: note = chemically synthesized
  source 1..20: mol_type = other DNA
agagattatttaggaagaag

SEQ ID NO: 9419 - DNA, 20 bp, synthetic construct
  misc_feature 1..20: note = chemically synthesized
  source 1..20: mol_type = other DNA
gattatttaggaagaagaag

SEQ ID NO: 9420 - DNA, 20 bp, synthetic construct
  misc_feature 1..20: note = chemically synthesized
  source 1..20: mol_type = other DNA
tatttaggaagaagaagtgg

SEQ ID NO: 9421 - DNA, 20 bp, synthetic construct
  misc_feature 1..20: note = chemically synthesized
  source 1..20: mol_type = other DNA
tttaggaagaagaagtggcg

SEQ ID NO: 9422 - DNA, 20 bp, synthetic construct
  misc_feature 1..20: note = chemically synthesized
  source 1..20: mol_type = other DNA
gaagaagaagtggcggagaa

SEQ ID NO: 9423 - DNA, 20 bp, synthetic construct
  misc_feature 1..20: note = chemically synthesized
  source 1..20: mol_type = other DNA
aagtggcggagaatggaatg

SEQ ID NO: 9424 - DNA, 20 bp, synthetic construct
  misc_feature 1..20: note = chemically synthesized
  source 1..20: mol_type = other DNA
aatgaagaatgtaaaatatg

SEQ ID NO: 9425 - DNA, 20 bp, synthetic construct
  misc_feature 1..20: note = chemically synthesized
  source 1..20: mol_type = other DNA
atgtaaaatatgaagcattt

SEQ ID NO: 9426 - DNA, 20 bp, synthetic construct
  misc_feature 1..20: note = chemically synthesized
  source 1..20: mol_type = other DNA
atatgaagcatttcagccca

SEQ ID NO: 9427 - DNA, 20 bp, synthetic construct
  misc_feature 1..20: note = chemically synthesized
  source 1..20: mol_type = other DNA
gaagcatttcagcccaaagc

SEQ ID NO: 9428 - DNA, 20 bp, synthetic construct
  misc_feature 1..20: note = chemically synthesized
  source 1..20: mol_type = other DNA
ttcagcccaaagctggtgat

SEQ ID NO: 9429 - DNA, 20 bp, synthetic construct
  misc_feature 1..20: note = chemically synthesized
  source 1..20: mol_type = other DNA
atgagatactttgtcgtctc

SEQ ID NO: 9430 - DNA, 20 bp, synthetic construct
  misc_feature 1..20: note = chemically synthesized
  source 1..20: mol_type = other DNA
actttgtcgtctctggaatg

SEQ ID NO: 9431 - DNA, 20 bp, synthetic construct
  misc_feature 1..20: note = chemically synthesized
  source 1..20: mol_type = other DNA
tttgtcgtctctggaatgaa

SEQ ID NO: 9432 - DNA, 20 bp, synthetic construct
  misc_feature 1..20: note = chemically synthesized
  source 1..20: mol_type = other DNA
ttgtcgtctctggaatgaag

SEQ ID NO: 9433 - DNA, 20 bp, synthetic construct
  misc_feature 1..20: note = chemically synthesized
  source 1..20: mol_type = other DNA
tctctggaatgaagaggaaa

SEQ ID NO: 9434 - DNA, 20 bp, synthetic construct
  misc_feature 1..20: note = chemically synthesized
  source 1..20: mol_type = other DNA
ctctggaatgaagaggaaat

SEQ ID NO: 9435 - DNA, 20 bp, synthetic construct
  misc_feature 1..20: note = chemically synthesized
  source 1..20: mol_type = other DNA
gaggaaatgggtttaaaatg

SEQ ID NO: 9436 - DNA, 20 bp, synthetic construct
  misc_feature 1..20: note = chemically synthesized
  source 1..20: mol_type = other DNA
atgggtttaaaatgaagcat

SEQ ID NO: 9437 - DNA, 20 bp, synthetic construct
  misc_feature 1..20: note = chemically synthesized
  source 1..20: mol_type = other DNA
tgggtttaaaatgaagcata

SEQ ID NO: 9438 - DNA, 20 bp, synthetic construct
  misc_feature 1..20: note = chemically synthesized
  source 1..20: mol_type = other DNA
gggtttaaaatgaagcataa

SEQ ID NO: 9439 - DNA, 20 bp, synthetic construct
  misc_feature 1..20: note = chemically synthesized
  source 1..20: mol_type = other DNA
aaatgaagcataagggatcg

SEQ ID NO: 9440 - DNA, 20 bp, synthetic construct
  misc_feature 1..20: note = chemically synthesized
  source 1..20: mol_type = other DNA
aatgaagcataagggatcga

SEQ ID NO: 9441 - DNA, 20 bp, synthetic construct
  misc_feature 1..20: note = chemically synthesized
  source 1..20: mol_type = other DNA
gaagcataagggatcgaagg

SEQ ID NO: 9442 - DNA, 20 bp, synthetic construct
  misc_feature 1..20: note = chemically synthesized
  source 1..20: mol_type = other DNA
aagggatcgaaggtagacaa

SEQ ID NO: 9443 - DNA, 20 bp, synthetic construct
  misc_feature 1..20: note = chemically synthesized
  source 1..20: mol_type = other DNA
agggatcgaaggtagacaaa

SEQ ID NO: 9444 - DNA, 20 bp, synthetic construct
  misc_feature 1..20: note = chemically synthesized
  source 1..20: mol_type = other DNA
gatcgaaggtagacaaaagg

SEQ ID NO: 9445 - DNA, 20 bp, synthetic construct
  misc_feature 1..20: note = chemically synthesized
  source 1..20: mol_type = other DNA
atcgaaggtagacaaaagga

SEQ ID NO: 9446 - DNA, 20 bp, synthetic construct
  misc_feature 1..20: note = chemically synthesized
  source 1..20: mol_type = other DNA
aggaaggatttcctgcgatt

SEQ ID NO: 9447 - DNA, 20 bp, synthetic construct
  misc_feature 1..20: note = chemically synthesized
  source 1..20: mol_type = other DNA
gaaggatttcctgcgattga

SEQ ID NO: 9448 - DNA, 20 bp, synthetic construct
  misc_feature 1..20: note = chemically synthesized
  source 1..20: mol_type = other DNA
aaggatttcctgcgattgag

SEQ ID NO: 9449 - DNA, 20 bp, synthetic construct
  misc_feature 1..20: note = chemically synthesized
  source 1..20: mol_type = other DNA
ttgagaggtgtctttaaaaa

SEQ ID NO: 9450 - DNA, 20 bp, synthetic construct
  misc_feature 1..20: note = chemically synthesized
  source 1..20: mol_type = other DNA
ggtgtctttaaaaatagaac

SEQ ID NO: 9451 - DNA, 20 bp, synthetic construct
  misc_feature 1..20: note = chemically synthesized
  source 1..20: mol_type = other DNA
gtgtctttaaaaatagaact

SEQ ID NO: 9452 - DNA, 20 bp, synthetic construct
  misc_feature 1..20: note = chemically synthesized
  source 1..20: mol_type = other DNA
tgtctttaaaaatagaacta

SEQ ID NO: 9453 - DNA, 20 bp, synthetic construct
  misc_feature 1..20: note = chemically synthesized
  source 1..20: mol_type = other DNA
ctttaaaaatagaactaggg

SEQ ID NO: 9454 - DNA, 20 bp, synthetic construct
  misc_feature 1..20: note = chemically synthesized
  source 1..20: mol_type = other DNA
aaaaatagaactagggtggt

SEQ ID NO: 9455 - DNA, 20 bp, synthetic construct
  misc_feature 1..20: note = chemically synthesized
  source 1..20: mol_type = other DNA
aaaatagaactagggtggtg

SEQ ID NO: 9456 - DNA, 20 bp, synthetic construct
  misc_feature 1..20: note = chemically synthesized
  source 1..20: mol_type = other DNA
atagaactagggtggtgagg

SEQ ID NO: 9457 - DNA, 20 bp, synthetic construct
  misc_feature 1..20: note = chemically synthesized
  source 1..20: mol_type = other DNA
agaactagggtggtgaggaa

SEQ ID NO: 9458 - DNA, 20 bp, synthetic construct
  misc_feature 1..20: note = chemically synthesized
  source 1..20: mol_type = other DNA
gaactagggtggtgaggaag

SEQ ID NO: 9459 - DNA, 20 bp, synthetic construct
  misc_feature 1..20: note = chemically synthesized
  source 1..20: mol_type = other DNA
tagggtggtgaggaagaggt

SEQ ID NO: 9460 - DNA, 20 bp, synthetic construct
  misc_feature 1..20: note = chemically synthesized
  source 1..20: mol_type = other DNA
agggtggtgaggaagaggtt

SEQ ID NO: 9461 - DNA, 20 bp, synthetic construct
  misc_feature 1..20: note = chemically synthesized
  source 1..20: mol_type = other DNA
tggtgaggaagaggttgggc

SEQ ID NO: 9462 - DNA, 20 bp, synthetic construct
  misc_feature 1..20: note = chemically synthesized
  source 1..20: mol_type = other DNA
gaggttgggctggccaattc

SEQ ID NO: 9463 - DNA, 20 bp, synthetic construct
  misc_feature 1..20: note = chemically synthesized
  source 1..20: mol_type = other DNA
ggttgggctggccaattctg

SEQ ID NO: 9464 - DNA, 20 bp, synthetic construct
  misc_feature 1..20: note = chemically synthesized
  source 1..20: mol_type = other DNA
gttgggctggccaattctgg

SEQ ID NO: 9465 - DNA, 20 bp, synthetic construct
  misc_feature 1..20: note = chemically synthesized
  source 1..20: mol_type = other DNA
ttgggctggccaattctgga

SEQ ID NO: 9466 - DNA, 20 bp, synthetic construct
  misc_feature 1..20: note = chemically synthesized
  source 1..20: mol_type = other DNA
ctggagggccatctgcccct

SEQ ID NO: 9467 - DNA, 20 bp, synthetic construct
  misc_feature 1..20: note = chemically synthesized
  source 1..20: mol_type = other DNA
ggagggccatctgcccctga

SEQ ID NO: 9468 - DNA, 20 bp, synthetic construct
  misc_feature 1..20: note = chemically synthesized
  source 1..20: mol_type = other DNA
gagggccatctgcccctgag

SEQ ID NO: 9469 - DNA, 20 bp, synthetic construct
  misc_feature 1..20: note = chemically synthesized
  source 1..20: mol_type = other DNA
agggccatctgcccctgaga

SEQ ID NO: 9470 - DNA, 20 bp, synthetic construct
  misc_feature 1..20: note = chemically synthesized
  source 1..20: mol_type = other DNA
tccatctactccattatctc

SEQ ID NO: 9471 - DNA, 20 bp, synthetic construct
  misc_feature 1..20: note = chemically synthesized
  source 1..20: mol_type = other DNA
ctccagttatctgaataaaa

SEQ ID NO: 9472 - DNA, 20 bp, synthetic construct
  misc_feature 1..20: note = chemically synthesized
  source 1..20: mol_type = other DNA
gttatctgaataaaaaagcc

SEQ ID NO: 9473 - DNA, 20 bp, synthetic construct
  misc_feature 1..20: note = chemically synthesized
  source 1..20: mol_type = other DNA
aaaaaagccaagctattccc

SEQ ID NO: 9474 - DNA, 20 bp, synthetic construct
  misc_feature 1..20: note = chemically synthesized
  source 1..20: mol_type = other DNA
aaaaagccaagctattccct

SEQ ID NO: 9475 - DNA, 20 bp, synthetic construct
  misc_feature 1..20: note = chemically synthesized
  source 1..20: mol_type = other DNA
tgggcacaccatgtaaaccc

SEQ ID NO: 9476 - DNA, 20 bp, synthetic construct
  misc_feature 1..20: note = chemically synthesized
  source 1..20: mol_type = other DNA
gcacaccatgtaaaccccag

SEQ ID NO: 9477 - DNA, 20 bp, synthetic construct
  misc_feature 1..20: note = chemically synthesized
  source 1..20: mol_type = other DNA
cacaccatgtaaaccccaga

SEQ ID NO: 9478 - DNA, 20 bp, synthetic construct
  misc_feature 1..20: note = chemically synthesized
  source 1..20: mol_type = other DNA
acaccatgtaaaccccagaa

SEQ ID NO: 9479 - DNA, 20 bp, synthetic construct
  misc_feature 1..20: note = chemically synthesized
  source 1..20: mol_type = other DNA
accccagaagggccacactt

SEQ ID NO: 9480 - DNA, 20 bp, synthetic construct
  misc_feature 1..20: note = chemically synthesized
  source 1..20: mol_type = other DNA
ccccagaagggccacacttt

SEQ ID NO: 9481 - DNA, 20 bp, synthetic construct
  misc_feature 1..20: note = chemically synthesized
  source 1..20: mol_type = other DNA
ccagaagggccacactttgg

SEQ ID NO: 9482 - DNA, 20 bp, synthetic construct
  misc_feature 1..20: note = chemically synthesized
  source 1..20: mol_type = other DNA
gggccacactttgggagccc

SEQ ID NO: 9483 - DNA, 20 bp, synthetic construct
  misc_feature 1..20: note = chemically synthesized
  source 1..20: mol_type = other DNA
ccacactttgggagccctag

SEQ ID NO: 9484 - DNA, 20 bp, synthetic construct
  misc_feature 1..20: note = chemically synthesized
  source 1..20: mol_type = other DNA
cacactttgggagccctagc

SEQ ID NO: 9485 - DNA, 20 bp, synthetic construct
  misc_feature 1..20: note = chemically synthesized
  source 1..20: mol_type = other DNA
ctttgggagccctagcagga

SEQ ID NO: 9486 - DNA, 20 bp, synthetic construct
  misc_feature 1..20: note = chemically synthesized
  source 1..20: mol_type = other DNA
tttgggagccctagcaggaa

SEQ ID NO: 9487 - DNA, 20 bp, synthetic construct
  misc_feature 1..20: note = chemically synthesized
  source 1..20: mol_type = other DNA
gggagccctagcaggaaagg

SEQ ID NO: 9488 - DNA, 20 bp, synthetic construct
  misc_feature 1..20: note = chemically synthesized
  source 1..20: mol_type = other DNA
agccctagcaggaaaggtgg

SEQ ID NO: 9489 - DNA, 20 bp, synthetic construct
  misc_feature 1..20: note = chemically synthesized
  source 1..20: mol_type = other DNA
gccctagcaggaaaggtggt

SEQ ID NO: 9490 - DNA, 20 bp, synthetic construct
  misc_feature 1..20: note = chemically synthesized
  source 1..20: mol_type = other DNA
ctagcaggaaaggtggtagg

SEQ ID NO: 9491 - DNA, 20 bp, synthetic construct
  misc_feature 1..20: note = chemically synthesized
  source 1..20: mol_type = other DNA
aggaaaggtggtaggaagac

SEQ ID NO: 9492 - DNA, 20 bp, synthetic construct
  misc_feature 1..20: note = chemically synthesized
  source 1..20: mol_type = other DNA
taggaagaccagccccgaaa

SEQ ID NO: 9493 - DNA, 20 bp, synthetic construct
  misc_feature 1..20: note = chemically synthesized
  source 1..20: mol_type = other DNA
aggaagaccagccccgaaaa

SEQ ID NO: 9494 - DNA, 20 bp, synthetic construct
  misc_feature 1..20: note = chemically synthesized
  source 1..20: mol_type = other DNA
ggaagaccagccccgaaaaa

SEQ ID NO: 9495 - DNA, 20 bp, synthetic construct
  misc_feature 1..20: note = chemically synthesized
  source 1..20: mol_type = other DNA
agaccagccccgaaaaaggg

SEQ ID NO: 9496 - DNA, 20 bp, synthetic construct
  misc_feature 1..20: note = chemically synthesized
  source 1..20: mol_type = other DNA
accagccccgaaaaagggca

SEQ ID NO: 9497 - DNA, 20 bp, synthetic construct
  misc_feature 1..20: note = chemically synthesized
  source 1..20: mol_type = other DNA
ccgaaaaagggcagagaaaa

SEQ ID NO: 9498 - DNA, 20 bp, synthetic construct
  misc_feature 1..20: note = chemically synthesized
  source 1..20: mol_type = other DNA
cgaaaaagggcagagaaaac

SEQ ID NO: 9499 - DNA, 20 bp, synthetic construct
  misc_feature 1..20: note = chemically synthesized
  source 1..20: mol_type = other DNA
gaaaaagggcagagaaaaca

SEQ ID NO: 9500 - DNA, 20 bp, synthetic construct
  misc_feature 1..20: note = chemically synthesized
  source 1..20: mol_type = other DNA
aagggcagagaaaacaggga

SEQ ID NO: 9501 - DNA, 20 bp, synthetic construct
  misc_feature 1..20: note = chemically synthesized
  source 1..20: mol_type = other DNA
agggcagagaaaacagggaa

SEQ ID NO: 9502 - DNA, 20 bp, synthetic construct
  misc_feature 1..20: note = chemically synthesized
  source 1..20: mol_type = other DNA
gagaaaacagggaaaggaac

SEQ ID NO: 9503 - DNA, 20 bp, synthetic construct
  misc_feature 1..20: note = chemically synthesized
  source 1..20: mol_type = other DNA
agaaaacagggaaaggaaca

SEQ ID NO: 9504 - DNA, 20 bp, synthetic construct
  misc_feature 1..20: note = chemically synthesized
  source 1..20: mol_type = other DNA
aacagggaaaggaacaaggc

SEQ ID NO: 9505 - DNA, 20 bp, synthetic construct
  misc_feature 1..20: note = chemically synthesized
  source 1..20: mol_type = other DNA
agggaaaggaacaaggcaag

SEQ ID NO: 9506 - DNA, 20 bp, synthetic construct
  misc_feature 1..20: note = chemically synthesized
  source 1..20: mol_type = other DNA
aaaggaacaaggcaagaaga

SEQ ID NO: 9507 - DNA, 20 bp, synthetic construct
  misc_feature 1..20: note = chemically synthesized
  source 1..20: mol_type = other DNA
aaggaacaaggcaagaagaa

SEQ ID NO: 9508 - DNA, 20 bp, synthetic construct
  misc_feature 1..20: note = chemically synthesized
  source 1..20: mol_type = other DNA
aggaacaaggcaagaagaaa

SEQ ID NO: 9509 - DNA, 20 bp, synthetic construct
  misc_feature 1..20: note = chemically synthesized
  source 1..20: mol_type = other DNA
caaggcaagaagaaagggca

SEQ ID NO: 9510 - DNA, 20 bp, synthetic construct
  misc_feature 1..20: note = chemically synthesized
  source 1..20: mol_type = other DNA
aaggcaagaagaaagggcaa

SEQ ID NO: 9511 - DNA, 20 bp, synthetic construct
  misc_feature 1..20: note = chemically synthesized
  source 1..20: mol_type = other DNA
caaaggaccattctctgcaa

SEQ ID NO: 9512 - DNA, 20 bp, synthetic construct
  misc_feature 1..20: note = chemically synthesized
  source 1..20: mol_type = other DNA
gaccattctctgcaacagca

SEQ ID NO: 9513 - DNA, 20 bp, synthetic construct
  misc_feature 1..20: note = chemically synthesized
  source 1..20: mol_type = other DNA
accattctctgcaacagcac

SEQ ID NO: 9514 - DNA, 20 bp, synthetic construct
  misc_feature 1..20: note = chemically synthesized
  source 1..20: mol_type = other DNA
tctgcaacagcacaggtgat

SEQ ID NO: 9515 - DNA, 20 bp, synthetic construct
  misc_feature 1..20: note = chemically synthesized
  source 1..20: mol_type = other DNA
ctgcaacagcacaggtgatt

SEQ ID NO: 9516 - DNA, 20 bp, synthetic construct
  misc_feature 1..20: note = chemically synthesized
  source 1..20: mol_type = other DNA
caacagcacaggtgattggg

SEQ ID NO: 9517 - DNA, 20 bp, synthetic construct
  misc_feature 1..20: note = chemically synthesized
  source 1..20: mol_type = other DNA
cagcacaggtgattgggtgg

SEQ ID NO: 9518 - DNA, 20 bp, synthetic construct
  misc_feature 1..20: note = chemically synthesized
  source 1..20: mol_type = other DNA
tgggtggtggttttgttgct

SEQ ID NO: 9519 - DNA, 20 bp, synthetic construct
  misc_feature 1..20: note = chemically synthesized
  source 1..20: mol_type = other DNA
gggtggtggttttgttgctt

SEQ ID NO: 9520 - DNA, 20 bp, synthetic construct
  misc_feature 1..20: note = chemically synthesized
  source 1..20: mol_type = other DNA
ttgttgcttgggttttacca

SEQ ID NO: 9521 - DNA, 20 bp, synthetic construct
  misc_feature 1..20: note = chemically synthesized
  source 1..20: mol_type = other DNA
tgttgcttgggttttaccat

SEQ ID NO: 9522 - DNA, 20 bp, synthetic construct
  misc_feature 1..20: note = chemically synthesized
  source 1..20: mol_type = other DNA
gggttttaccatgggctccc

SEQ ID NO: 9523 - DNA, 20 bp, synthetic construct
  misc_feature 1..20: note = chemically synthesized
  source 1..20: mol_type = other DNA
ggttttaccatgggctcccc

SEQ ID NO: 9524 - DNA, 20 bp, synthetic construct
  misc_feature 1..20: note = chemically synthesized
  source 1..20: mol_type = other DNA
ttaccatgggctccccaggt

SEQ ID NO: 9525 - DNA, 20 bp, synthetic construct
  misc_feature 1..20: note = chemically synthesized
  source 1..20: mol_type = other DNA
ccaggttagcactgccacaa

SEQ ID NO: 9526 - DNA, 20 bp, synthetic construct
  misc_feature 1..20: note = chemically synthesized
  source 1..20: mol_type = other DNA
tagcactgccacaaaagcac

SEQ ID NO: 9527 - DNA, 20 bp, synthetic construct
  misc_feature 1..20: note = chemically synthesized
  source 1..20: mol_type = other DNA
agcactgccacaaaagcacc

SEQ ID NO: 9528 - DNA, 20 bp, synthetic construct
  misc_feature 1..20: note = chemically synthesized
  source 1..20: mol_type = other DNA
aagcaccaggctcttcaaca

SEQ ID NO: 9529 - DNA, 20 bp, synthetic construct
  misc_feature 1..20: note = chemically synthesized
  source 1..20: mol_type = other DNA
caggctcttcaacaaagctc

SEQ ID NO: 9530 - DNA, 20 bp, synthetic construct
  misc_feature 1..20: note = chemically synthesized
  source 1..20: mol_type = other DNA
tcttcaacaaagctccagtt

SEQ ID NO: 9531 - DNA, 20 bp, synthetic construct
  misc_feature 1..20: note = chemically synthesized
  source 1..20: mol_type = other DNA
aacaaagctccagttaagaa

SEQ ID NO: 9532 - DNA, 20 bp, synthetic construct
  misc_feature 1..20: note = chemically synthesized
  source 1..20: mol_type = other DNA
tccagttaagaaaagcattc

SEQ ID NO: 9533 - DNA, 20 bp, synthetic construct
  misc_feature 1..20: note = chemically synthesized
  source 1..20: mol_type = other DNA
attccagccatcaccgataa

SEQ ID NO: 9534 - DNA, 20 bp, synthetic construct
  misc_feature 1..20: note = chemically synthesized
  source 1..20: mol_type = other DNA
agccatcaccgataaaagcg

SEQ ID NO: 9535 - DNA, 20 bp, synthetic construct
  misc_feature 1..20: note = chemically synthesized
  source 1..20: mol_type = other DNA
gccatcaccgataaaagcgt

SEQ ID NO: 9536 - DNA, 20 bp, synthetic construct
  misc_feature 1..20: note = chemically synthesized
  source 1..20: mol_type = other DNA
accgataaaagcgtgggtgc

SEQ ID NO: 9537 - DNA, 20 bp, synthetic construct
  misc_feature 1..20: note = chemically synthesized
  source 1..20: mol_type = other DNA
tgggtgcaagttcctctgca

SEQ ID NO: 9538 - DNA, 20 bp, synthetic construct
  misc_feature 1..20: note = chemically synthesized
  source 1..20: mol_type = other DNA
gttcctctgcaaagcacatg

SEQ ID NO: 9539 - DNA, 20 bp, synthetic construct
  misc_feature 1..20: note = chemically synthesized
  source 1..20: mol_type = other DNA
ttcctctgcaaagcacatgc

SEQ ID NO: 9540 - DNA, 20 bp, synthetic construct
  misc_feature 1..20: note = chemically synthesized
  source 1..20: mol_type = other DNA
aagcacatgcgggccacctc

SEQ ID NO: 9541 - DNA, 20 bp, synthetic construct
  misc_feature 1..20: note = chemically synthesized
  source 1..20: mol_type = other DNA
gggccacctctggctcctgc

SEQ ID NO: 9542 - DNA, 20 bp, synthetic construct
  misc_feature 1..20: note = chemically synthesized
  source 1..20: mol_type = other DNA
cctctggctcctgctggcca

SEQ ID NO: 9543 - DNA, 20 bp, synthetic construct
  misc_feature 1..20: note = chemically synthesized
  source 1..20: mol_type = other DNA
tctggctcctgctggccatg

SEQ ID NO: 9544 - DNA, 20 bp, synthetic construct
  misc_feature 1..20: note = chemically synthesized
  source 1..20: mol_type = other DNA
tggctcctgctggccatgga

SEQ ID NO: 9545 - DNA, 20 bp, synthetic construct
  misc_feature 1..20: note = chemically synthesized
  source 1..20: mol_type = other DNA
ggctcctgctggccatggag

SEQ ID NO: 9546 - DNA, 20 bp, synthetic construct
  misc_feature 1..20: note = chemically synthesized
  source 1..20: mol_type = other DNA
atggagaggccatgtgcgat

SEQ ID NO: 9547 - DNA, 20 bp, synthetic construct
  misc_feature 1..20: note = chemically synthesized
  source 1..20: mol_type = other DNA
gaggccatgtgcgattggta

SEQ ID NO: 9548 - DNA, 20 bp, synthetic construct
  misc_feature 1..20: note = chemically synthesized
  source 1..20: mol_type = other DNA
ccatgtgcgattggtacagt

SEQ ID NO: 9549 - DNA, 20 bp, synthetic construct
  misc_feature 1..20: note = chemically synthesized
  source 1..20: mol_type = other DNA
gtgcgattggtacagtcagc

SEQ ID NO: 9550 - DNA, 20 bp, synthetic construct
  misc_feature 1..20: note = chemically synthesized
  source 1..20: mol_type = other DNA
tgcgattggtacagtcagcc

SEQ ID NO: 9551 - DNA, 20 bp, synthetic construct
  misc_feature 1..20: note = chemically synthesized
  source 1..20: mol_type = other DNA
gtacagtcagccaggaatga

SEQ ID NO: 9552 - DNA, 20 bp, synthetic construct
  misc_feature 1..20: note = chemically synthesized
  source 1..20: mol_type = other DNA
cagtcagccaggaatgaaag

SEQ ID NO: 9553 - DNA, 20 bp, synthetic construct
  misc_feature 1..20: note = chemically synthesized
  source 1..20: mol_type = other DNA
agtcagccaggaatgaaagt

SEQ ID NO: 9554 - DNA, 20 bp, synthetic construct
  misc_feature 1..20: note = chemically synthesized
  source 1..20: mol_type = other DNA
cagccaggaatgaaagtggg

SEQ ID NO: 9555 - DNA, 20 bp, synthetic construct
  misc_feature 1..20: note = chemically synthesized
  source 1..20: mol_type = other DNA
ggaatgaaagtgggaagccc

SEQ ID NO: 9556 - DNA, 20 bp, synthetic construct
  misc_feature 1..20: note = chemically synthesized
  source 1..20: mol_type = other DNA
gaatgaaagtgggaagcccc

SEQ ID NO: 9557 - DNA, 20 bp, synthetic construct
  misc_feature 1..20: note = chemically synthesized
  source 1..20: mol_type = other DNA
aagtgggaagccccaggctc

SEQ ID NO: 9558 - DNA, 20 bp, synthetic construct
  misc_feature 1..20: note = chemically synthesized
  source 1..20: mol_type = other DNA
agtgggaagccccaggctct

SEQ ID NO: 9559 - DNA, 20 bp, synthetic construct
  misc_feature 1..20: note = chemically synthesized
  source 1..20: mol_type = other DNA
gaagccccaggctctgggcc

SEQ ID NO: 9560 - DNA, 20 bp, synthetic construct
  misc_feature 1..20: note = chemically synthesized
  source 1..20: mol_type = other DNA
gggccaagtctaccactgcc

SEQ ID NO: 9561 - DNA, 20 bp, synthetic construct
  misc_feature 1..20: note = chemically synthesized
  source 1..20: mol_type = other DNA
caagtctaccactgcctagc

SEQ ID NO: 9562 - DNA, 20 bp, synthetic construct
  misc_feature 1..20: note = chemically synthesized
  source 1..20: mol_type = other DNA
gtctaccactgcctagcaag

SEQ ID NO: 9563 - DNA, 20 bp, synthetic construct
  misc_feature 1..20: note = chemically synthesized
  source 1..20: mol_type = other DNA
actgcctagcaagtagactc

SEQ ID NO: 9564 - DNA, 20 bp, synthetic construct
  misc_feature 1..20: note = chemically synthesized
  source 1..20: mol_type = other DNA
tctggcactcactcccctct

SEQ ID NO: 9565 - DNA, 20 bp, synthetic construct
  misc_feature 1..20: note = chemically synthesized
  source 1..20: mol_type = other DNA
ctttctcatctgtaaaatga

SEQ ID NO: 9566 - DNA, 20 bp, synthetic construct
  misc_feature 1..20: note = chemically synthesized
  source 1..20: mol_type = other DNA
tttctcatctgtaaaatgac

SEQ ID NO: 9567 - DNA, 20 bp, synthetic construct
  misc_feature 1..20: note = chemically synthesized
  source 1..20: mol_type = other DNA
ttctcatctgtaaaatgaca

SEQ ID NO: 9568 - DNA, 20 bp, synthetic construct
  misc_feature 1..20: note = chemically synthesized
  source 1..20: mol_type = other DNA
ggttaatgatatgacttcac

SEQ ID NO: 9569 - DNA, 20 bp, synthetic construct
  misc_feature 1..20: note = chemically synthesized
  source 1..20: mol_type = other DNA
ttcacaagtctatgtctaca

SEQ ID NO: 9570 - DNA, 20 bp, synthetic construct
  misc_feature 1..20: note = chemically synthesized
  source 1..20: mol_type = other DNA
acaagtctatgtctacatag

SEQ ID NO: 9571 - DNA, 20 bp, synthetic construct
  misc_feature 1..20: note = chemically synthesized
  source 1..20: mol_type = other DNA
ctacatagaagatgctcaat

SEQ ID NO: 9572 - DNA, 20 bp, synthetic construct
  misc_feature 1..20: note = chemically synthesized
  source 1..20: mol_type = other DNA
tgctcaataagtattcactt

SEQ ID NO: 9573 - DNA, 20 bp, synthetic construct
  misc_feature 1..20: note = chemically synthesized
  source 1..20: mol_type = other DNA
attcactttggctttccacg

SEQ ID NO: 9574 - DNA, 20 bp, synthetic construct
  misc_feature 1..20: note = chemically synthesized
  source 1..20: mol_type = other DNA
ttcactttggctttccacga

SEQ ID NO: 9575 - DNA, 20 bp, synthetic construct
  misc_feature 1..20: note = chemically synthesized
  source 1..20: mol_type = other DNA
aaggaaactatctatgctca

SEQ ID NO: 9576 - DNA, 20 bp, synthetic construct
  misc_feature 1..20: note = chemically synthesized
  source 1..20: mol_type = other DNA
ggaaactatctatgctcaaa

SEQ ID NO: 9577 - DNA, 20 bp, synthetic construct
  misc_feature 1..20: note = chemically synthesized
  source 1..20: mol_type = other DNA
tgctttcttctatgattcct

SEQ ID NO: 9578 - DNA, 20 bp, synthetic construct
  misc_feature 1..20: note = chemically synthesized
  source 1..20: mol_type = other DNA
cctcagaaactcttgtcgac

SEQ ID NO: 9579 - DNA, 20 bp, synthetic construct
  misc_feature 1..20: note = chemically synthesized
  source 1..20: mol_type = other DNA
tcagaaactcttgtcgacta

SEQ ID NO: 9580 - DNA, 20 bp, synthetic construct
  misc_feature 1..20: note = chemically synthesized
  source 1..20: mol_type = other DNA
cagaaactcttgtcgactag

SEQ ID NO: 9581 - DNA, 20 bp, synthetic construct
  misc_feature 1..20: note = chemically synthesized
  source 1..20: mol_type = other DNA
ctcttgtcgactagaggaac

SEQ ID NO: 9582 - DNA, 20 bp, synthetic construct
  misc_feature 1..20: note = chemically synthesized
  source 1..20: mol_type = other DNA
cttactctaaaacccaattt

SEQ ID NO: 9583 - DNA, 20 bp, synthetic construct
  misc_feature 1..20: note = chemically synthesized
  source 1..20: mol_type = other DNA
ttactctaaaacccaatttt

SEQ ID NO: 9584 - DNA, 20 bp, synthetic construct
  misc_feature 1..20: note = chemically synthesized
  source 1..20: mol_type = other DNA
tactctaaaacccaatttta

SEQ ID NO: 9585 - DNA, 20 bp, synthetic construct
  misc_feature 1..20: note = chemically synthesized
  source 1..20: mol_type = other DNA
actctaaaacccaattttag

SEQ ID NO: 9586 - DNA, 20 bp, synthetic construct
  misc_feature 1..20: note = chemically synthesized
  source 1..20: mol_type = other DNA
tctaaaacccaattttaggg

SEQ ID NO: 9587 - DNA, 20 bp, synthetic construct
  misc_feature 1..20: note = chemically synthesized
  source 1..20: mol_type = other DNA
ctaaaacccaattttagggg

SEQ ID NO: 9588 - DNA, 20 bp, synthetic construct
  misc_feature 1..20: note = chemically synthesized
  source 1..20: mol_type = other DNA
aaaacccaattttaggggag

SEQ ID NO: 9589 - DNA, 20 bp, synthetic construct
  misc_feature 1..20: note = chemically synthesized
  source 1..20: mol_type = other DNA
aacccaattttaggggagga

SEQ ID NO: 9590 - DNA, 20 bp, synthetic construct
  misc_feature 1..20: note = chemically synthesized
  source 1..20: mol_type = other DNA
ggaggagagaaaatttttaa

SEQ ID NO: 9591 - DNA, 20 bp, synthetic construct
  misc_feature 1..20: note = chemically synthesized
  source 1..20: mol_type = other DNA
gactttaaattaattacttg

SEQ ID NO: 9592 - DNA, 20 bp, synthetic construct
  misc_feature 1..20: note = chemically synthesized
  source 1..20: mol_type = other DNA
actttaaattaattacttga

SEQ ID NO: 9593 - DNA, 20 bp, synthetic construct
  misc_feature 1..20: note = chemically synthesized
  source 1..20: mol_type = other DNA
taaattaattacttgaaggc

SEQ ID NO: 9594 - DNA, 20 bp, synthetic construct
  misc_feature 1..20: note = chemically synthesized
  source 1..20: mol_type = other DNA
aattaattacttgaaggcca

SEQ ID NO: 9595 - DNA, 20 bp, synthetic construct
  misc_feature 1..20: note = chemically synthesized
  source 1..20: mol_type = other DNA
attaattacttgaaggccag

SEQ ID NO: 9596 - DNA, 20 bp, synthetic construct
  misc_feature 1..20: note = chemically synthesized
  source 1..20: mol_type = other DNA
tttgcttatgcctataatct

SEQ ID NO: 9597 - DNA, 20 bp, synthetic construct
  misc_feature 1..20: note = chemically synthesized
  source 1..20: mol_type = other DNA
tgcctataatctcagaaatt

SEQ ID NO: 9598 - DNA, 20 bp, synthetic construct
  misc_feature 1..20: note = chemically synthesized
  source 1..20: mol_type = other DNA
ctataatctcagaaatttgg

SEQ ID NO: 9599 - DNA, 20 bp, synthetic construct
  misc_feature 1..20: note = chemically synthesized
  source 1..20: mol_type = other DNA
tataatctcagaaatttgga

SEQ ID NO: 9600 - DNA, 20 bp, synthetic construct
  misc_feature 1..20: note = chemically synthesized
  source 1..20: mol_type = other DNA
ctcagaaatttggaaggcca

SEQ ID NO: 9601 - DNA, 20 bp, synthetic construct
  misc_feature 1..20: note = chemically synthesized
  source 1..20: mol_type = other DNA
cagaaatttggaaggccaca

SEQ ID NO: 9602 - DNA, 20 bp, synthetic construct
  misc_feature 1..20: note = chemically synthesized
  source 1..20: mol_type = other DNA
agaaatttggaaggccacag

SEQ ID NO: 9603 - DNA, 20 bp, synthetic construct
  misc_feature 1..20: note = chemically synthesized
  source 1..20: mol_type = other DNA
gaaatttggaaggccacaga

SEQ ID NO: 9604 - DNA, 20 bp, synthetic construct
  misc_feature 1..20: note = chemically synthesized
  source 1..20: mol_type = other DNA
atttggaaggccacagaggg

SEQ ID NO: 9605 - DNA, 20 bp, synthetic construct
  misc_feature 1..20: note = chemically synthesized
  source 1..20: mol_type = other DNA
cacagagggaagattgcttg

SEQ ID NO: 9606 - DNA, 20 bp, synthetic construct
  misc_feature 1..20: note = chemically synthesized
  source 1..20: mol_type = other DNA
gagggaagattgcttgaagc

SEQ ID NO: 9607 - DNA, 20 bp, synthetic construct
  misc_feature 1..20: note = chemically synthesized
  source 1..20: mol_type = other DNA
agggaagattgcttgaagct

SEQ ID NO: 9608 - DNA, 20 bp, synthetic construct
  misc_feature 1..20: note = chemically synthesized
  source 1..20: mol_type = other DNA
ggaagattgcttgaagctag

SEQ ID NO: 9609 - DNA, 20 bp, synthetic construct
  misc_feature 1..20: note = chemically synthesized
  source 1..20: mol_type = other DNA
ttgcttgaagctaggagttc

SEQ ID NO: 9610 - DNA, 20 bp, synthetic construct
  misc_feature 1..20: note = chemically synthesized
  source 1..20: mol_type = other DNA
tgaagctaggagttcaagac

SEQ ID NO: 9611 - DNA, 20 bp, synthetic construct
  misc_feature 1..20: note = chemically synthesized
  source 1..20: mol_type = other DNA
ctaggagttcaagaccagcc

SEQ ID NO: 9612 - DNA, 20 bp, synthetic construct
  misc_feature 1..20: note = chemically synthesized
  source 1..20: mol_type = other DNA
taggagttcaagaccagcct

SEQ ID NO: 9613 - DNA, 20 bp, synthetic construct
  misc_feature 1..20: note = chemically synthesized
  source 1..20: mol_type = other DNA
caagaccagcctgggcaaca

SEQ ID NO: 9614 - DNA, 20 bp, synthetic construct
  misc_feature 1..20: note = chemically synthesized
  source 1..20: mol_type = other DNA
caaaaccctgtctctacaaa

SEQ ID NO: 9615 - DNA, 20 bp, synthetic construct
  misc_feature 1..20: note = chemically synthesized
  source 1..20: mol_type = other DNA
aataaaataaaataattgct

SEQ ID NO: 9616 - DNA, 20 bp, synthetic construct
  misc_feature 1..20: note = chemically synthesized
  source 1..20: mol_type = other DNA
ataaaataattgctgagatt

SEQ ID NO: 9617 - DNA, 20 bp, synthetic construct
  misc_feature 1..20: note = chemically synthesized
  source 1..20: mol_type = other DNA
gagatttagctatcttttca

SEQ ID NO: 9618 - DNA, 20 bp, synthetic construct
  misc_feature 1..20: note = chemically synthesized
  source 1..20: mol_type = other DNA
ttcaaagaaaatataaaatt

SEQ ID NO: 9619 - DNA, 20 bp, synthetic construct
  misc_feature 1..20: note = chemically synthesized
  source 1..20: mol_type = other DNA
agaaaatataaaatttggcc

SEQ ID NO: 9620 - DNA, 20 bp, synthetic construct
  misc_feature 1..20: note = chemically synthesized
  source 1..20: mol_type = other DNA
agttttttatctatcaaacc

SEQ ID NO: 9621 - DNA, 20 bp, synthetic construct
  misc_feature 1..20: note = chemically synthesized
  source 1..20: mol_type = other DNA
tccctctgtcaacatctgct

SEQ ID NO: 9622 - DNA, 20 bp, synthetic construct
  misc_feature 1..20: note = chemically synthesized
  source 1..20: mol_type = other DNA
tcataatacataaaacatca

SEQ ID NO: 9623 - DNA, 20 bp, synthetic construct
  misc_feature 1..20: note = chemically synthesized
  source 1..20: mol_type = other DNA
tacataaaacatcatagata

SEQ ID NO: 9624 - DNA, 20 bp, synthetic construct
  misc_feature 1..20: note = chemically synthesized
  source 1..20: mol_type = other DNA
acataaaacatcatagataa

SEQ ID NO: 9625 - DNA, 20 bp, synthetic construct
  misc_feature 1..20: note = chemically synthesized
  source 1..20: mol_type = other DNA
ataaaacatcatagataaag

SEQ ID NO: 9626 - DNA, 20 bp, synthetic construct
  misc_feature 1..20: note = chemically synthesized
  source 1..20: mol_type = other DNA
catcatagataaaggagtca

SEQ ID NO: 9627 - DNA, 20 bp, synthetic construct
  misc_feature 1..20: note = chemically synthesized
  source 1..20: mol_type = other DNA
atcatagataaaggagtcac

SEQ ID NO: 9628 - DNA, 20 bp, synthetic construct
  misc_feature 1..20: note = chemically synthesized
  source 1..20: mol_type = other DNA
agataaaggagtcacaggat

SEQ ID NO: 9629 - DNA, 20 bp, synthetic construct
  misc_feature 1..20: note = chemically synthesized
  source 1..20: mol_type = other DNA
ttagacctaccgttccatac

SEQ ID NO: 9630 - DNA, 20 bp, synthetic construct
  misc_feature 1..20: note = chemically synthesized
  source 1..20: mol_type = other DNA
cgttccataccagtgtgtta

SEQ ID NO: 9631 - DNA, 20 bp, synthetic construct
  misc_feature 1..20: note = chemically synthesized
  source 1..20: mol_type = other DNA
gtgtgttacagcctgtcatg

SEQ ID NO: 9632 - DNA, 20 bp, synthetic construct
  misc_feature 1..20: note = chemically synthesized
  source 1..20: mol_type = other DNA
tgttacagcctgtcatgaag

SEQ ID NO: 9633 - DNA, 20 bp, synthetic construct
  misc_feature 1..20: note = chemically synthesized
  source 1..20: mol_type = other DNA
agcctgtcatgaagcagact

SEQ ID NO: 9634 - DNA, 20 bp, synthetic construct
  misc_feature 1..20: note = chemically synthesized
  source 1..20: mol_type = other DNA
cctgtcatgaagcagactca

SEQ ID NO: 9635 - DNA, 20 bp, synthetic construct
  misc_feature 1..20: note = chemically synthesized
  source 1..20: mol_type = other DNA
tgaagcagactcagagaatt

SEQ ID NO: 9636 - DNA, 20 bp, synthetic construct
  misc_feature 1..20: note = chemically synthesized
  source 1..20: mol_type = other DNA
cagagaatttggctactact

SEQ ID NO: 9637 - DNA, 20 bp, synthetic construct
  misc_feature 1..20: note = chemically synthesized
  source 1..20: mol_type = other DNA
cttagtactaacatttaatt

SEQ ID NO: 9638 - DNA, 20 bp, synthetic construct
  misc_feature 1..20: note = chemically synthesized
  source 1..20: mol_type = other DNA
tagttttaaaatgtctgcga

SEQ ID NO: 9639 - DNA, 20 bp, synthetic construct
  misc_feature 1..20: note = chemically synthesized
  source 1..20: mol_type = other DNA
gttttaaaatgtctgcgata

SEQ ID NO: 9640 - DNA, 20 bp, synthetic construct
  misc_feature 1..20: note = chemically synthesized
  source 1..20: mol_type = other DNA
ttaaaatgtctgcgatagag

SEQ ID NO: 9641 - DNA, 20 bp, synthetic construct
  misc_feature 1..20: note = chemically synthesized
  source 1..20: mol_type = other DNA
tgtctgcgatagagcagatt

SEQ ID NO: 9642 - DNA, 20 bp, synthetic construct
  misc_feature 1..20: note = chemically synthesized
  source 1..20: mol_type = other DNA
gtctgcgatagagcagattc

SEQ ID NO: 9643 - DNA, 20 bp, synthetic construct
  misc_feature 1..20: note = chemically synthesized
  source 1..20: mol_type = other DNA
agattcaggattatgcctgt

SEQ ID NO: 9644 - DNA, 20 bp, synthetic construct
  misc_feature 1..20: note = chemically synthesized
  source 1..20: mol_type = other DNA
cctgcatttaaatatgaata

SEQ ID NO: 9645 - DNA, 20 bp, synthetic construct
  misc_feature 1..20: note = chemically synthesized
  source 1..20: mol_type = other DNA
tgcatttaaatatgaataaa

SEQ ID NO: 9646 - DNA, 20 bp, synthetic construct
  misc_feature 1..20: note = chemically synthesized
  source 1..20: mol_type = other DNA
tttaaatatgaataaagagt

SEQ ID NO: 9647 - DNA, 20 bp, synthetic construct
  misc_feature 1..20: note = chemically synthesized
  source 1..20: mol_type = other DNA
aaatatgaataaagagtgag

SEQ ID NO: 9648 - DNA, 20 bp, synthetic construct
  misc_feature 1..20: note = chemically synthesized
  source 1..20: mol_type = other DNA
tatgaataaagagtgagcag

SEQ ID NO: 9649 - DNA, 20 bp, synthetic construct
  misc_feature 1..20: note = chemically synthesized
  source 1..20: mol_type = other DNA
atgaataaagagtgagcaga

SEQ ID NO: 9650 - DNA, 20 bp, synthetic construct
  misc_feature 1..20: note = chemically synthesized
  source 1..20: mol_type = other DNA
tgaataaagagtgagcagaa

SEQ ID NO: 9651 - DNA, 20 bp, synthetic construct
  misc_feature 1..20: note = chemically synthesized
  source 1..20: mol_type = other DNA
aaagagtgagcagaagggac

SEQ ID NO: 9652 - DNA, 20 bp, synthetic construct
  misc_feature 1..20: note = chemically synthesized
  source 1..20: mol_type = other DNA
aagagtgagcagaagggacc

SEQ ID NO: 9653 - DNA, 20 bp, synthetic construct
  misc_feature 1..20: note = chemically synthesized
  source 1..20: mol_type = other DNA
cagaagggaccaggtaaaaa

SEQ ID NO: 9654 - DNA, 20 bp, synthetic construct
  misc_feature 1..20: note = chemically synthesized
  source 1..20: mol_type = other DNA
gaccaggtaaaaatggcaca

SEQ ID NO: 9655 - DNA, 20 bp, synthetic construct
  misc_feature 1..20: note = chemically synthesized
  source 1..20: mol_type = other DNA
accaggtaaaaatggcacat

SEQ ID NO: 9656 - DNA, 20 bp, synthetic construct
  misc_feature 1..20: note = chemically synthesized
  source 1..20: mol_type = other DNA
caggtaaaaatggcacatgg

SEQ ID NO: 9657 - DNA, 20 bp, synthetic construct
  misc_feature 1..20: note = chemically synthesized
  source 1..20: mol_type = other DNA
aggtaaaaatggcacatggg

SEQ ID NO: 9658 - DNA, 20 bp, synthetic construct
  misc_feature 1..20: note = chemically synthesized
  source 1..20: mol_type = other DNA
ggtaaaaatggcacatggga

SEQ ID NO: 9659 - DNA, 20 bp, synthetic construct
  misc_feature 1..20: note = chemically synthesized
  source 1..20: mol_type = other DNA
ggcatcgcacatgtgaattt

SEQ ID NO: 9660 - DNA, 20 bp, synthetic construct
  misc_feature 1..20: note = chemically synthesized
  source 1..20: mol_type = other DNA
attttagcttcccacacgca

SEQ ID NO: 9661 - DNA, 20 bp, synthetic construct
  misc_feature 1..20: note = chemically synthesized
  source 1..20: mol_type = other DNA
ttttagcttcccacacgcaa

SEQ ID NO: 9662 - DNA, 20 bp, synthetic construct
  misc_feature 1..20: note = chemically synthesized
  source 1..20: mol_type = other DNA
gcttcccacacgcaaaggca

SEQ ID NO: 9663 - DNA, 20 bp, synthetic construct
  misc_feature 1..20: note = chemically synthesized
  source 1..20: mol_type = other DNA
cttcccacacgcaaaggcat

SEQ ID NO: 9664 - DNA, 20 bp, synthetic construct
  misc_feature 1..20: note = chemically synthesized
  source 1..20: mol_type = other DNA
ttcccacacgcaaaggcatg

SEQ ID NO: 9665 - DNA, 20 bp, synthetic construct
  misc_feature 1..20: note = chemically synthesized
  source 1..20: mol_type = other DNA
tcccacacgcaaaggcatgg

SEQ ID NO: 9666 - DNA, 20 bp, synthetic construct
  misc_feature 1..20: note = chemically synthesized
  source 1..20: mol_type = other DNA
cccacacgcaaaggcatggg

SEQ ID NO: 9667 - DNA, 20 bp, synthetic construct
  misc_feature 1..20: note = chemically synthesized
  source 1..20: mol_type = other DNA
acgcaaaggcatggggggac

SEQ ID NO: 9668 - DNA, 20 bp, synthetic construct
  misc_feature 1..20: note = chemically synthesized
  source 1..20: mol_type = other DNA
cgcaaaggcatggggggaca

SEQ ID NO: 9669 - DNA, 20 bp, synthetic construct
  misc_feature 1..20: note = chemically synthesized
  source 1..20: mol_type = other DNA
aaaggcatggggggacaagg

SEQ ID NO: 9670 - DNA, 20 bp, synthetic construct
  misc_feature 1..20: note = chemically synthesized
  source 1..20: mol_type = other DNA
aaggcatggggggacaaggc

SEQ ID NO: 9671 - DNA, 20 bp, synthetic construct
  misc_feature 1..20: note = chemically synthesized
  source 1..20: mol_type = other DNA
gcatggggggacaaggcagg

SEQ ID NO: 9672 - DNA, 20 bp, synthetic construct
  misc_feature 1..20: note = chemically synthesized
  source 1..20: mol_type = other DNA
caaggcaggaagcattgctc

SEQ ID NO: 9673 - DNA, 20 bp, synthetic construct
  misc_feature 1..20: note = chemically synthesized
  source 1..20: mol_type = other DNA
ggaagcattgctctagatct

SEQ ID NO: 9674 - DNA, 20 bp, synthetic construct
  misc_feature 1..20: note = chemically synthesized
  source 1..20: mol_type = other DNA
atctgagaatcaccacacac

SEQ ID NO: 9675 - DNA, 20 bp, synthetic construct
  misc_feature 1..20: note = chemically synthesized
  source 1..20: mol_type = other DNA
ctgagaatcaccacacacca

SEQ ID NO: 9676 - DNA, 20 bp, synthetic construct
  misc_feature 1..20: note = chemically synthesized
  source 1..20: mol_type = other DNA
gagaatcaccacacaccaga

SEQ ID NO: 9677 - DNA, 20 bp, synthetic construct
  misc_feature 1..20: note = chemically synthesized
  source 1..20: mol_type = other DNA
agaatcaccacacaccagag

SEQ ID NO: 9678 - DNA, 20 bp, synthetic construct
  misc_feature 1..20: note = chemically synthesized
  source 1..20: mol_type = other DNA
gaatcaccacacaccagaga

SEQ ID NO: 9679 - DNA, 20 bp, synthetic construct
  misc_feature 1..20: note = chemically synthesized
  source 1..20: mol_type = other DNA
accacacaccagagagggca

SEQ ID NO: 9680 - DNA, 20 bp, synthetic construct
  misc_feature 1..20: note = chemically synthesized
  source 1..20: mol_type = other DNA
ccacacaccagagagggcat

SEQ ID NO: 9681 - DNA, 20 bp, synthetic construct
  misc_feature 1..20: note = chemically synthesized
  source 1..20: mol_type = other DNA
acacaccagagagggcatgg

SEQ ID NO: 9682 - DNA, 20 bp, synthetic construct
  misc_feature 1..20: note = chemically synthesized
  source 1..20: mol_type = other DNA
cacaccagagagggcatggg

SEQ ID NO: 9683 - DNA, 20 bp, synthetic construct
  misc_feature 1..20: note = chemically synthesized
  source 1..20: mol_type = other DNA
tgggaggtgacacacaaacc

SEQ ID NO: 9684 - DNA, 20 bp, synthetic construct
  misc_feature 1..20: note = chemically synthesized
  source 1..20: mol_type = other DNA
gaggtgacacacaaacccag

SEQ ID NO: 9685 - DNA, 20 bp, synthetic construct
  misc_feature 1..20: note = chemically synthesized
  source 1..20: mol_type = other DNA
ggtgacacacaaacccagca

SEQ ID NO: 9686 - DNA, 20 bp, synthetic construct
  misc_feature 1..20: note = chemically synthesized
  source 1..20: mol_type = other DNA
caaacccagcagagaacgtt

SEQ ID NO: 9687 - DNA, 20 bp, synthetic construct
  misc_feature 1..20: note = chemically synthesized
  source 1..20: mol_type = other DNA
cccagcagagaacgttgaga

SEQ ID NO: 9688 - DNA, 20 bp, synthetic construct
  misc_feature 1..20: note = chemically synthesized
  source 1..20: mol_type = other DNA
cagcagagaacgttgagaaa

SEQ ID NO: 9689 - DNA, 20 bp, synthetic construct
  misc_feature 1..20: note = chemically synthesized
  source 1..20: mol_type = other DNA
gaacgttgagaaagagtttt

SEQ ID NO: 9690 - DNA, 20 bp, synthetic construct
  misc_feature 1..20: note = chemically synthesized
  source 1..20: mol_type = other DNA
acgttgagaaagagttttaa

SEQ ID NO: 9691 - DNA, 20 bp, synthetic construct
  misc_feature 1..20: note = chemically synthesized
  source 1..20: mol_type = other DNA
tttaagagcctactcatcat

SEQ ID NO: 9692 - DNA, 20 bp, synthetic construct
  misc_feature 1..20: note = chemically synthesized
  source 1..20: mol_type = other DNA
taagagcctactcatcatca

SEQ ID NO: 9693 - DNA, 20 bp, synthetic construct
  misc_feature 1..20: note = chemically synthesized
  source 1..20: mol_type = other DNA
catcatcagagttcacttaa

SEQ ID NO: 9694 - DNA, 20 bp, synthetic construct
  misc_feature 1..20: note = chemically synthesized
  source 1..20: mol_type = other DNA
agttcacttaaaagtccatc

SEQ ID NO: 9695 - DNA, 20 bp, synthetic construct
  misc_feature 1..20: note = chemically synthesized
  source 1..20: mol_type = other DNA
cttaaaagtccatccagaat

SEQ ID NO: 9696 - DNA, 20 bp, synthetic construct
  misc_feature 1..20: note = chemically synthesized
  source 1..20: mol_type = other DNA
gtccatccagaatcagaacg

SEQ ID NO: 9697 - DNA, 20 bp, synthetic construct
  misc_feature 1..20: note = chemically synthesized
  source 1..20: mol_type = other DNA
tccatccagaatcagaacgt

SEQ ID NO: 9698 - DNA, 20 bp, synthetic construct
  misc_feature 1..20: note = chemically synthesized
  source 1..20: mol_type = other DNA
tccagaatcagaacgtggga

SEQ ID NO: 9699 - DNA, 20 bp, synthetic construct
  misc_feature 1..20: note = chemically synthesized
  source 1..20: mol_type = other DNA
ccagaatcagaacgtgggat

SEQ ID NO: 9700 - DNA, 20 bp, synthetic construct
  misc_feature 1..20: note = chemically synthesized
  source 1..20: mol_type = other DNA
cagaatcagaacgtgggatg

SEQ ID NO: 9701 - DNA, 20 bp, synthetic construct
  misc_feature 1..20: note = chemically synthesized
  source 1..20: mol_type = other DNA
aacgtgggatggggtgcccc

SEQ ID NO: 9702 - DNA, 20 bp, synthetic construct
  misc_feature 1..20: note = chemically synthesized
  source 1..20: mol_type = other DNA
acgtgggatggggtgcccca

SEQ ID NO: 9703 - DNA, 20 bp, synthetic construct
  misc_feature 1..20: note = chemically synthesized
  source 1..20: mol_type = other DNA
ggggtgccccaaggcattcc

SEQ ID NO: 9704 - DNA, 20 bp, synthetic construct
  misc_feature 1..20: note = chemically synthesized
  source 1..20: mol_type = other DNA
gggtgccccaaggcattcct

SEQ ID NO: 9705 - DNA, 20 bp, synthetic construct
  misc_feature 1..20: note = chemically synthesized
  source 1..20: mol_type = other DNA
ggtgccccaaggcattcctg

SEQ ID NO: 9706 - DNA, 20 bp, synthetic construct
  misc_feature 1..20: note = chemically synthesized
  source 1..20: mol_type = other DNA
gtgccccaaggcattcctgg

SEQ ID NO: 9707 - DNA, 20 bp, synthetic construct
  misc_feature 1..20: note = chemically synthesized
  source 1..20: mol_type = other DNA
cccaaggcattcctgggggc

SEQ ID NO: 9708 - DNA, 20 bp, synthetic construct
  misc_feature 1..20: note = chemically synthesized
  source 1..20: mol_type = other DNA
ccaaggcattcctgggggcc

SEQ ID NO: 9709 - DNA, 20 bp, synthetic construct
  misc_feature 1..20: note = chemically synthesized
  source 1..20: mol_type = other DNA
gcattcctgggggccgggcg

SEQ ID NO: 9710 - DNA, 20 bp, synthetic construct
  misc_feature 1..20: note = chemically synthesized
  source 1..20: mol_type = other DNA
gggggccgggcgtggatttt

SEQ ID NO: 9711 - DNA, 20 bp, synthetic construct
  misc_feature 1..20: note = chemically synthesized
  source 1..20: mol_type = other DNA
ggggccgggcgtggatttta

SEQ ID NO: 9712 - DNA, 20 bp, synthetic construct
  misc_feature 1..20: note = chemically synthesized
  source 1..20: mol_type = other DNA
ggactcatcaattactgttc

SEQ ID NO: 9713 - DNA, 20 bp, synthetic construct
  misc_feature 1..20: note = chemically synthesized
  source 1..20: mol_type = other DNA
catcaattactgttcaagtt

SEQ ID NO: 9714 - DNA, 20 bp, synthetic construct
  misc_feature 1..20: note = chemically synthesized
  source 1..20: mol_type = other DNA
atcaattactgttcaagttc

SEQ ID NO: 9715 - DNA, 20 bp, synthetic construct
  misc_feature 1..20: note = chemically synthesized
  source 1..20: mol_type = other DNA
ttactgttcaagttcaggtc

SEQ ID NO: 9716 - DNA, 20 bp, synthetic construct
  misc_feature 1..20: note = chemically synthesized
  source 1..20: mol_type = other DNA
tgttcaagttcaggtcaagc

SEQ ID NO: 9717 - DNA, 20 bp, synthetic construct
  misc_feature 1..20: note = chemically synthesized
  source 1..20: mol_type = other DNA
caagttcaggtcaagctgga

SEQ ID NO: 9718 - DNA, 20 bp, synthetic construct
  misc_feature 1..20: note = chemically synthesized
  source 1..20: mol_type = other DNA
ctggatggacaccatccaca

SEQ ID NO: 9719 - DNA, 20 bp, synthetic construct
  misc_feature 1..20: note = chemically synthesized
  source 1..20: mol_type = other DNA
atccacatggtgttgctcga

SEQ ID NO: 9720 - DNA, 20 bp, synthetic construct
  misc_feature 1..20: note = chemically synthesized
  source 1..20: mol_type = other DNA
tccacatggtgttgctcgat

SEQ ID NO: 9721 - DNA, 20 bp, synthetic construct
  misc_feature 1..20: note = chemically synthesized
  source 1..20: mol_type = other DNA
atggtgttgctcgatgggca

SEQ ID NO: 9722 - DNA, 20 bp, synthetic construct
  misc_feature 1..20: note = chemically synthesized
  source 1..20: mol_type = other DNA
ttgctcgatgggcaaagatc

SEQ ID NO: 9723 - DNA, 20 bp, synthetic construct
  misc_feature 1..20: note = chemically synthesized
  source 1..20: mol_type = other DNA
gctcgatgggcaaagatcaa

SEQ ID NO: 9724 - DNA, 20 bp, synthetic construct
  misc_feature 1..20: note = chemically synthesized
  source 1..20: mol_type = other DNA
ctcgatgggcaaagatcaag

SEQ ID NO: 9725 - DNA, 20 bp, synthetic construct
  misc_feature 1..20: note = chemically synthesized
  source 1..20: mol_type = other DNA
gatgggcaaagatcaagagg

SEQ ID NO: 9726 - DNA, 20 bp, synthetic construct
  misc_feature 1..20: note = chemically synthesized
  source 1..20: mol_type = other DNA
aagaggcagtcgttcaccac

SEQ ID NO: 9727 - DNA, 20 bp, synthetic construct
  misc_feature 1..20: note = chemically synthesized
  source 1..20: mol_type = other DNA
tcaccaccagccgtatttcc

SEQ ID NO: 9728 - DNA, 20 bp, synthetic construct
  misc_feature 1..20: note = chemically synthesized
  source 1..20: mol_type = other DNA
caccaccagccgtatttcct

SEQ ID NO: 9729 - DNA, 20 bp, synthetic construct
  misc_feature 1..20: note = chemically synthesized
  source 1..20: mol_type = other DNA
accaccagccgtatttcctg

SEQ ID NO: 9730 - DNA, 20 bp, synthetic construct
  misc_feature 1..20: note = chemically synthesized
  source 1..20: mol_type = other DNA
ttactgacattctgtcattc

SEQ ID NO: 9731 - DNA, 20 bp, synthetic construct
  misc_feature 1..20: note = chemically synthesized
  source 1..20: mol_type = other DNA
tactgacattctgtcattca

SEQ ID NO: 9732 - DNA, 20 bp, synthetic construct
  misc_feature 1..20: note = chemically synthesized
  source 1..20: mol_type = other DNA
tgacattctgtcattcaagg

SEQ ID NO: 9733 - DNA, 20 bp, synthetic construct
  misc_feature 1..20: note = chemically synthesized
  source 1..20: mol_type = other DNA
gacattctgtcattcaaggt

SEQ ID NO: 9734 - DNA, 20 bp, synthetic construct
  misc_feature 1..20: note = chemically synthesized
  source 1..20: mol_type = other DNA
gtcattcaaggtgggtcctg

SEQ ID NO: 9735 - DNA, 20 bp, synthetic construct
  misc_feature 1..20: note = chemically synthesized
  source 1..20: mol_type = other DNA
caaggtgggtcctgaagcca

SEQ ID NO: 9736 - DNA, 20 bp, synthetic construct
  misc_feature 1..20: note = chemically synthesized
  source 1..20: mol_type = other DNA
gtgggtcctgaagccacagt

SEQ ID NO: 9737 - DNA, 20 bp, synthetic construct
  misc_feature 1..20: note = chemically synthesized
  source 1..20: mol_type = other DNA
aatctgctccctacaatcca

SEQ ID NO: 9738 - DNA, 20 bp, synthetic construct
  misc_feature 1..20: note = chemically synthesized
  source 1..20: mol_type = other DNA
ctccctacaatccacagcaa

SEQ ID NO: 9739 - DNA, 20 bp, synthetic construct
  misc_feature 1..20: note = chemically synthesized
  source 1..20: mol_type = other DNA
tccctacaatccacagcaaa

SEQ ID NO: 9740 - DNA, 20 bp, synthetic construct
  misc_feature 1..20: note = chemically synthesized
  source 1..20: mol_type = other DNA
cctacaatccacagcaaaag

SEQ ID NO: 9741 - DNA, 20 bp, synthetic construct
  misc_feature 1..20: note = chemically synthesized
  source 1..20: mol_type = other DNA
tacaatccacagcaaaagga

SEQ ID NO: 9742 - DNA, 20 bp, synthetic construct
  misc_feature 1..20: note = chemically synthesized
  source 1..20: mol_type = other DNA
aaggagagttccttctttta

SEQ ID NO: 9743 - DNA, 20 bp, synthetic construct
  misc_feature 1..20: note = chemically synthesized
  source 1..20: mol_type = other DNA
ggagagttccttcttttaaa

SEQ ID NO: 9744 - DNA, 20 bp, synthetic construct
  misc_feature 1..20: note = chemically synthesized
  source 1..20: mol_type = other DNA
ttccttcttttaaagagcga

SEQ ID NO: 9745 - DNA, 20 bp, synthetic construct
  misc_feature 1..20: note = chemically synthesized
  source 1..20: mol_type = other DNA
gcacacatctctcaactctt

SEQ ID NO: 9746 - DNA, 20 bp, synthetic construct
  misc_feature 1..20: note = chemically synthesized
  source 1..20: mol_type = other DNA
acacatctctcaactcttga

SEQ ID NO: 9747 - DNA, 20 bp, synthetic construct
  misc_feature 1..20: note = chemically synthesized
  source 1..20: mol_type = other DNA
tctcaactcttgagagaaaa

SEQ ID NO: 9748 - DNA, 20 bp, synthetic construct
  misc_feature 1..20: note = chemically synthesized
  source 1..20: mol_type = other DNA
aactcttgagagaaaatgga

SEQ ID NO: 9749 - DNA, 20 bp, synthetic construct
  misc_feature 1..20: note = chemically synthesized
  source 1..20: mol_type = other DNA
tcttgagagaaaatggacag

SEQ ID NO: 9750 - DNA, 20 bp, synthetic construct
  misc_feature 1..20: note = chemically synthesized
  source 1..20: mol_type = other DNA
tgagagaaaatggacagaag

SEQ ID NO: 9751 - DNA, 20 bp, synthetic construct
  misc_feature 1..20: note = chemically synthesized
  source 1..20: mol_type = other DNA
gagagaaaatggacagaagt

SEQ ID NO: 9752 - DNA, 20 bp, synthetic construct
  misc_feature 1..20: note = chemically synthesized
  source 1..20: mol_type = other DNA
ggatttttcaatcctgatac

SEQ ID NO: 9753 - DNA, 20 bp, synthetic construct
  misc_feature 1..20: note = chemically synthesized
  source 1..20: mol_type = other DNA
tttttcaatcctgataccag

SEQ ID NO: 9754 - DNA, 20 bp, synthetic construct
  misc_feature 1..20: note = chemically synthesized
  source 1..20: mol_type = other DNA
ttttcaatcctgataccagc

SEQ ID NO: 9755 - DNA, 20 bp, synthetic construct
  misc_feature 1..20: note = chemically synthesized
  source 1..20: mol_type = other DNA
atcctgataccagcaggaaa

SEQ ID NO: 9756 - DNA, 20 bp, synthetic construct
  misc_feature 1..20: note = chemically synthesized
  source 1..20: mol_type = other DNA
tcctgataccagcaggaaac

SEQ ID NO: 9757 - DNA, 20 bp, synthetic construct
  misc_feature 1..20: note = chemically synthesized
  source 1..20: mol_type = other DNA
cctgataccagcaggaaaca

SEQ ID NO: 9758 - DNA, 20 bp, synthetic construct
  misc_feature 1..20: note = chemically synthesized
  source 1..20: mol_type = other DNA
tgataccagcaggaaacagg

SEQ ID NO: 9759 - DNA, 20 bp, synthetic construct
  misc_feature 1..20: note = chemically synthesized
  source 1..20: mol_type = other DNA
agcaggaaacagggagtctc

SEQ ID NO: 9760 - DNA, 20 bp, synthetic construct
  misc_feature 1..20: note = chemically synthesized
  source 1..20: mol_type = other DNA
aggaaacagggagtctctgg

SEQ ID NO: 9761 - DNA, 20 bp, synthetic construct
  misc_feature 1..20: note = chemically synthesized
  source 1..20: mol_type = other DNA
ggaaacagggagtctctggt

SEQ ID NO: 9762 - DNA, 20 bp, synthetic construct
  misc_feature 1..20: note = chemically synthesized
  source 1..20: mol_type = other DNA
ctggtaggtactaccaaacc

SEQ ID NO: 9763 - DNA, 20 bp, synthetic construct
  misc_feature 1..20: note = chemically synthesized
  source 1..20: mol_type = other DNA
gtaggtactaccaaaccaag

SEQ ID NO: 9764 - DNA, 20 bp, synthetic construct
  misc_feature 1..20: note = chemically synthesized
  source 1..20: mol_type = other DNA
caagaagcttcttttctccc

SEQ ID NO: 9765 - DNA, 20 bp, synthetic construct
  misc_feature 1..20: note = chemically synthesized
  source 1..20: mol_type = other DNA
ttcttttctcccaagtacac

SEQ ID NO: 9766 - DNA, 20 bp, synthetic construct
  misc_feature 1..20: note = chemically synthesized
  source 1..20: mol_type = other DNA
tcttttctcccaagtacacc

SEQ ID NO: 9767 - DNA, 20 bp, synthetic construct
  misc_feature 1..20: note = chemically synthesized
  source 1..20: mol_type = other DNA
ccaggaacccctttcaaata

SEQ ID NO: 9768 - DNA, 20 bp, synthetic construct
  misc_feature 1..20: note = chemically synthesized
  source 1..20: mol_type = other DNA
caggaacccctttcaaatac

SEQ ID NO: 9769 - DNA, 20 bp, synthetic construct
  misc_feature 1..20: note = chemically synthesized
  source 1..20: mol_type = other DNA
aaatacaggcgctacaaaaa

SEQ ID NO: 9770 - DNA, 20 bp, synthetic construct
  misc_feature 1..20: note = chemically synthesized
  source 1..20: mol_type = other DNA
aggcgctacaaaaaaagaaa

SEQ ID NO: 9771 - DNA, 20 bp, synthetic construct
  misc_feature 1..20: note = chemically synthesized
  source 1..20: mol_type = other DNA
ggcgctacaaaaaaagaaat

SEQ ID NO: 9772 - DNA, 20 bp, synthetic construct
  misc_feature 1..20: note = chemically synthesized
  source 1..20: mol_type = other DNA
aaaaaaagaaataggtgtga

SEQ ID NO: 9773 - DNA, 20 bp, synthetic construct
  misc_feature 1..20: note = chemically synthesized
  source 1..20: mol_type = other DNA
aaaagaaataggtgtgaaag

SEQ ID NO: 9774 - DNA, 20 bp, synthetic construct
  misc_feature 1..20: note = chemically synthesized
  source 1..20: mol_type = other DNA
aaagaaataggtgtgaaagc

SEQ ID NO: 9775 - DNA, 20 bp, synthetic construct
  misc_feature 1..20: note = chemically synthesized
  source 1..20: mol_type = other DNA
aagaaataggtgtgaaagcg

SEQ ID NO: 9776 - DNA, 20 bp, synthetic construct
  misc_feature 1..20: note = chemically synthesized
  source 1..20: mol_type = other DNA
aataggtgtgaaagcggggc

SEQ ID NO: 9777 - DNA, 20 bp, synthetic construct
  misc_feature 1..20: note = chemically synthesized
  source 1..20: mol_type = other DNA
ggtgtgaaagcggggcaaga

SEQ ID NO: 9778 - DNA, 20 bp, synthetic construct
  misc_feature 1..20: note = chemically synthesized
  source 1..20: mol_type = other DNA
gtgtgaaagcggggcaagaa

SEQ ID NO: 9779 - DNA, 20 bp, synthetic construct
  misc_feature 1..20: note = chemically synthesized
  source 1..20: mol_type = other DNA
tgtgaaagcggggcaagaaa

SEQ ID NO: 9780 - DNA, 20 bp, synthetic construct
  misc_feature 1..20: note = chemically synthesized
  source 1..20: mol_type = other DNA
cggggcaagaaagggaacct

SEQ ID NO: 9781 - DNA, 20 bp, synthetic construct
  misc_feature 1..20: note = chemically synthesized
  source 1..20: mol_type = other DNA
ggggcaagaaagggaacctg

SEQ ID NO: 9782 - DNA, 20 bp, synthetic construct
  misc_feature 1..20: note = chemically synthesized
  source 1..20: mol_type = other DNA
gactatgcatgctctgtcta

SEQ ID NO: 9783 - DNA, 20 bp, synthetic construct
  misc_feature 1..20: note = chemically synthesized
  source 1..20: mol_type = other DNA
actatgcatgctctgtctat

SEQ ID NO: 9784 - DNA, 20 bp, synthetic construct
  misc_feature 1..20: note = chemically synthesized
  source 1..20: mol_type = other DNA
ctatgggtatcaacaccttt

SEQ ID NO: 9785 - DNA, 20 bp, synthetic construct
  misc_feature 1..20: note = chemically synthesized
  source 1..20: mol_type = other DNA
tatgggtatcaacaccttta

SEQ ID NO: 9786 - DNA, 20 bp, synthetic construct
  misc_feature 1..20: note = chemically synthesized
  source 1..20: mol_type = other DNA
aacacctttaaggcattttg

SEQ ID NO: 9787 - DNA, 20 bp, synthetic construct
  misc_feature 1..20: note = chemically synthesized
  source 1..20: mol_type = other DNA
gattctataacctccatatt

SEQ ID NO: 9788 - DNA, 20 bp, synthetic construct
  misc_feature 1..20: note = chemically synthesized
  source 1..20: mol_type = other DNA
ttctataacctccatattga

SEQ ID NO: 9789 - DNA, 20 bp, synthetic construct
  misc_feature 1..20: note = chemically synthesized
  source 1..20: mol_type = other DNA
atattgagagacataaaaca

SEQ ID NO: 9790 - DNA, 20 bp, synthetic construct
  misc_feature 1..20: note = chemically synthesized
  source 1..20: mol_type = other DNA
acacagaacattacacctgt

SEQ ID NO: 9791 - DNA, 20 bp, synthetic construct
  misc_feature 1..20: note = chemically synthesized
  source 1..20: mol_type = other DNA
cacagaacattacacctgtc

SEQ ID NO: 9792 - DNA, 20 bp, synthetic construct
  misc_feature 1..20: note = chemically synthesized
  source 1..20: mol_type = other DNA
acattacacctgtcaggtgc

SEQ ID NO: 9793 - DNA, 20 bp, synthetic construct
  misc_feature 1..20: note = chemically synthesized
  source 1..20: mol_type = other DNA
cattacacctgtcaggtgct

SEQ ID NO: 9794 - DNA, 20 bp, synthetic construct
  misc_feature 1..20: note = chemically synthesized
  source 1..20: mol_type = other DNA
gctgggccctgaactatctc

SEQ ID NO: 9795 - DNA, 20 bp, synthetic construct
  misc_feature 1..20: note = chemically synthesized
  source 1..20: mol_type = other DNA
ctgggccctgaactatctcc

SEQ ID NO: 9796 - DNA, 20 bp, synthetic construct
  misc_feature 1..20: note = chemically synthesized
  source 1..20: mol_type = other DNA
ggccctgaactatctccagg

SEQ ID NO: 9797 - DNA, 20 bp, synthetic construct
  misc_feature 1..20: note = chemically synthesized
  source 1..20: mol_type = other DNA
aactatctccaggcagctga

SEQ ID NO: 9798 - DNA, 20 bp, synthetic construct
  misc_feature 1..20: note = chemically synthesized
  source 1..20: mol_type = other DNA
atctccaggcagctgaaagt

SEQ ID NO: 9799 - DNA, 20 bp, synthetic construct
  misc_feature 1..20: note = chemically synthesized
  source 1..20: mol_type = other DNA
gcagctgaaagtcagtacat

SEQ ID NO: 9800 - DNA, 20 bp, synthetic construct
  misc_feature 1..20: note = chemically synthesized
  source 1..20: mol_type = other DNA
tcagctttttaatgatgtga

SEQ ID NO: 9801 - DNA, 20 bp, synthetic construct
  misc_feature 1..20: note = chemically synthesized
  source 1..20: mol_type = other DNA
ttttaatgatgtgaaagtta

SEQ ID NO: 9802 - DNA, 20 bp, synthetic construct
  misc_feature 1..20: note = chemically synthesized
  source 1..20: mol_type = other DNA
gttaaagattaaaaacatgt

SEQ ID NO: 9803 - DNA, 20 bp, synthetic construct
  misc_feature 1..20: note = chemically synthesized
  source 1..20: mol_type = other DNA
gttggaacgcttactttatg

SEQ ID NO: 9804 - DNA, 20 bp, synthetic construct
  misc_feature 1..20: note = chemically synthesized
  source 1..20: mol_type = other DNA
aaaatgtgtctataacctgt

SEQ ID NO: 9805 - DNA, 20 bp, synthetic construct
  misc_feature 1..20: note = chemically synthesized
  source 1..20: mol_type = other DNA
aaatgtgtctataacctgta

SEQ ID NO: 9806 - DNA, 20 bp, synthetic construct
  misc_feature 1..20: note = chemically synthesized
  source 1..20: mol_type = other DNA
atgtgtctataacctgtaag

SEQ ID NO: 9807 - DNA, 20 bp, synthetic construct
  misc_feature 1..20: note = chemically synthesized
  source 1..20: mol_type = other DNA
gtgtctataacctgtaagga

SEQ ID NO: 9808 - DNA, 20 bp, synthetic construct
  misc_feature 1..20: note = chemically synthesized
  source 1..20: mol_type = other DNA
ctataacctgtaaggagaga

SEQ ID NO: 9809 - DNA, 20 bp, synthetic construct
  misc_feature 1..20: note = chemically synthesized
  source 1..20: mol_type = other DNA
tataacctgtaaggagagat

SEQ ID NO: 9810 - DNA, 20 bp, synthetic construct
  misc_feature 1..20: note = chemically synthesized
  source 1..20: mol_type = other DNA
cctgtaaggagagatgggtg

SEQ ID NO: 9811 - DNA, 20 bp, synthetic construct
  misc_feature 1..20: note = chemically synthesized
  source 1..20: mol_type = other DNA
gagatgggtgtggaacatcg

SEQ ID NO: 9812 - DNA, 20 bp, synthetic construct
  misc_feature 1..20: note = chemically synthesized
  source 1..20: mol_type = other DNA
agatgggtgtggaacatcgt

SEQ ID NO: 9813 - DNA, 20 bp, synthetic construct
  misc_feature 1..20: note = chemically synthesized
  source 1..20: mol_type = other DNA
gtgtggaacatcgtaggaaa

SEQ ID NO: 9814 - DNA, 20 bp, synthetic construct
  misc_feature 1..20: note = chemically synthesized
  source 1..20: mol_type = other DNA
tgtggaacatcgtaggaaaa

SEQ ID NO: 9815 - DNA, 20 bp, synthetic construct
  misc_feature 1..20: note = chemically synthesized
  source 1..20: mol_type = other DNA
aggtgactgcactcatgctg

SEQ ID NO: 9816 - DNA, 20 bp, synthetic construct
  misc_feature 1..20: note = chemically synthesized
  source 1..20: mol_type = other DNA
gtgactgcactcatgctgca

SEQ ID NO: 9817 - DNA, 20 bp, synthetic construct
  misc_feature 1..20: note = chemically synthesized
  source 1..20: mol_type = other DNA
tcatgctgcagagaaaaaat

SEQ ID NO: 9818 - DNA, 20 bp, synthetic construct
  misc_feature 1..20: note = chemically synthesized
  source 1..20: mol_type = other DNA
catgctgcagagaaaaaata

SEQ ID NO: 9819 - DNA, 20 bp, synthetic construct
  misc_feature 1..20: note = chemically synthesized
  source 1..20: mol_type = other DNA
tgcctgccttctttccttac

SEQ ID NO: 9820 - DNA, 20 bp, synthetic construct
  misc_feature 1..20: note = chemically synthesized
  source 1..20: mol_type = other DNA
cctgccttctttccttacaa

SEQ ID NO: 9821 - DNA, 20 bp, synthetic construct
  misc_feature 1..20: note = chemically synthesized
  source 1..20: mol_type = other DNA
aaatctgacgtgctttgcaa

SEQ ID NO: 9822 - DNA, 20 bp, synthetic construct
  misc_feature 1..20: note = chemically synthesized
  source 1..20: mol_type = other DNA
tctgacgtgctttgcaacag

SEQ ID NO: 9823 - DNA, 20 bp, synthetic construct
  misc_feature 1..20: note = chemically synthesized
  source 1..20: mol_type = other DNA
acgtgctttgcaacagcagt

SEQ ID NO: 9824 - DNA, 20 bp, synthetic construct
  misc_feature 1..20: note = chemically synthesized
  source 1..20: mol_type = other DNA
aacagcagtaagttgaccac

SEQ ID NO: 9825 - DNA, 20 bp, synthetic construct
  misc_feature 1..20: note = chemically synthesized
  source 1..20: mol_type = other DNA
cagcagtaagttgaccactg

SEQ ID NO: 9826 - DNA, 20 bp, synthetic construct
  misc_feature 1..20: note = chemically synthesized
  source 1..20: mol_type = other DNA
agtaagttgaccactggaga

SEQ ID NO: 9827 - DNA, 20 bp, synthetic construct
  misc_feature 1..20: note = chemically synthesized
  source 1..20: mol_type = other DNA
agttgaccactggagaaagt

SEQ ID NO: 9828 - DNA, 20 bp, synthetic construct
  misc_feature 1..20: note = chemically synthesized
  source 1..20: mol_type = other DNA
gttgaccactggagaaagtg

SEQ ID NO: 9829 - DNA, 20 bp, synthetic construct
  misc_feature 1..20: note = chemically synthesized
  source 1..20: mol_type = other DNA
accactggagaaagtgaggc

SEQ ID NO: 9830 - DNA, 20 bp, synthetic construct
  misc_feature 1..20: note = chemically synthesized
  source 1..20: mol_type = other DNA
gaaagtgaggctggaaccac

SEQ ID NO: 9831 - DNA, 20 bp, synthetic construct
  misc_feature 1..20: note = chemically synthesized
  source 1..20: mol_type = other DNA
ctggaaccactggaatcttg

SEQ ID NO: 9832 - DNA, 20 bp, synthetic construct
  misc_feature 1..20: note = chemically synthesized
  source 1..20: mol_type = other DNA
ctggaatcttgtagatttct

SEQ ID NO: 9833 - DNA, 20 bp, synthetic construct
  misc_feature 1..20: note = chemically synthesized
  source 1..20: mol_type = other DNA
tggaatcttgtagatttctg

SEQ ID NO: 9834 - DNA, 20 bp, synthetic construct
  misc_feature 1..20: note = chemically synthesized
  source 1..20: mol_type = other DNA
atcttgtagatttctgaggc

SEQ ID NO: 9835 - DNA, 20 bp, synthetic construct
  misc_feature 1..20: note = chemically synthesized
  source 1..20: mol_type = other DNA
cagttctgttctgacacatg

SEQ ID NO: 9836 - DNA, 20 bp, synthetic construct
  misc_feature 1..20: note = chemically synthesized
  source 1..20: mol_type = other DNA
tctgttctgacacatgcagc

SEQ ID NO: 9837 - DNA, 20 bp, synthetic construct
  misc_feature 1..20: note = chemically synthesized
  source 1..20: mol_type = other DNA
ctgttctgacacatgcagct

SEQ ID NO: 9838 - DNA, 20 bp, synthetic construct
  misc_feature 1..20: note = chemically synthesized
  source 1..20: mol_type = other DNA
gttctgacacatgcagctgg

SEQ ID NO: 9839 - DNA, 20 bp, synthetic construct
  misc_feature 1..20: note = chemically synthesized
  source 1..20: mol_type = other DNA
cacatgcagctgggagccac

SEQ ID NO: 9840 - DNA, 20 bp, synthetic construct
  misc_feature 1..20: note = chemically synthesized
  source 1..20: mol_type = other DNA
gcagctgggagccactggtt

SEQ ID NO: 9841 - DNA, 20 bp, synthetic construct
  misc_feature 1..20: note = chemically synthesized
  source 1..20: mol_type = other DNA
cagctgggagccactggttt

SEQ ID NO: 9842 - DNA, 20 bp, synthetic construct
  misc_feature 1..20: note = chemically synthesized
  source 1..20: mol_type = other DNA
cactggtttaggaattcacg

SEQ ID NO: 9843 - DNA, 20 bp, synthetic construct
  misc_feature 1..20: note = chemically synthesized
  source 1..20: mol_type = other DNA
actggtttaggaattcacgt

SEQ ID NO: 9844 - DNA, 20 bp, synthetic construct
  misc_feature 1..20: note = chemically synthesized
  source 1..20: mol_type = other DNA
tttaggaattcacgtgggca

SEQ ID NO: 9845 - DNA, 20 bp, synthetic construct
  misc_feature 1..20: note = chemically synthesized
  source 1..20: mol_type = other DNA
ttaggaattcacgtgggcat

SEQ ID NO: 9846 - DNA, 20 bp, synthetic construct
  misc_feature 1..20: note = chemically synthesized
  source 1..20: mol_type = other DNA
ggcatgggactgtgcttatt

SEQ ID NO: 9847 - DNA, 20 bp, synthetic construct
  misc_feature 1..20: note = chemically synthesized
  source 1..20: mol_type = other DNA
tgggactgtgcttattcaga

SEQ ID NO: 9848 - DNA, 20 bp, synthetic construct
  misc_feature 1..20: note = chemically synthesized
  source 1..20: mol_type = other DNA
gggactgtgcttattcagaa

SEQ ID NO: 9849 - DNA, 20 bp, synthetic construct
  misc_feature 1..20: note = chemically synthesized
  source 1..20: mol_type = other DNA
ggactgtgcttattcagaaa

SEQ ID NO: 9850 - DNA, 20 bp, synthetic construct
  misc_feature 1..20: note = chemically synthesized
  source 1..20: mol_type = other DNA
gcttattcagaaagggctcc

SEQ ID NO: 9851 - DNA, 20 bp, synthetic construct
  misc_feature 1..20: note = chemically synthesized
  source 1..20: mol_type = other DNA
cctaaattactccaatgaca

SEQ ID NO: 9852 - DNA, 20 bp, synthetic construct
  misc_feature 1..20: note = chemically synthesized
  source 1..20: mol_type = other DNA
ctccaatgacaaagaaaact

SEQ ID NO: 9853 - DNA, 20 bp, synthetic construct
  misc_feature 1..20: note = chemically synthesized
  source 1..20: mol_type = other DNA
atgacaaagaaaactcagtg

SEQ ID NO: 9854 - DNA, 20 bp, synthetic construct
  misc_feature 1..20: note = chemically synthesized
  source 1..20: mol_type = other DNA
aagaaaactcagtgaagaca

SEQ ID NO: 9855 - DNA, 20 bp, synthetic construct
  misc_feature 1..20: note = chemically synthesized
  source 1..20: mol_type = other DNA
gaaaactcagtgaagacaaa

SEQ ID NO: 9856 - DNA, 20 bp, synthetic construct
  misc_feature 1..20: note = chemically synthesized
  source 1..20: mol_type = other DNA
agacaaagagatcgttttca

SEQ ID NO: 9857 - DNA, 20 bp, synthetic construct
  misc_feature 1..20: note = chemically synthesized
  source 1..20: mol_type = other DNA
gacaaagagatcgttttcat

SEQ ID NO: 9858 - DNA, 20 bp, synthetic construct
  misc_feature 1..20: note = chemically synthesized
  source 1..20: mol_type = other DNA
tcatttgccaatccataact

SEQ ID NO: 9859 - DNA, 20 bp, synthetic construct
  misc_feature 1..20: note = chemically synthesized
  source 1..20: mol_type = other DNA
catttgccaatccataactc

SEQ ID NO: 9860 - DNA, 20 bp, synthetic construct
  misc_feature 1..20: note = chemically synthesized
  source 1..20: mol_type = other DNA
atccataactcaggaattca

SEQ ID NO: 9861 - DNA, 20 bp, synthetic construct
  misc_feature 1..20: note = chemically synthesized
  source 1..20: mol_type = other DNA
caggaattcatggctatgct

SEQ ID NO: 9862 - DNA, 20 bp, synthetic construct
  misc_feature 1..20: note = chemically synthesized
  source 1..20: mol_type = other DNA
tatgcttggataattctctc

SEQ ID NO: 9863 - DNA, 20 bp, synthetic construct
  misc_feature 1..20: note = chemically synthesized
  source 1..20: mol_type = other DNA
tggataattctctctagact

SEQ ID NO: 9864 - DNA, 20 bp, synthetic construct
  misc_feature 1..20: note = chemically synthesized
  source 1..20: mol_type = other DNA
gataattctctctagacttg

SEQ ID NO: 9865 - DNA, 20 bp, synthetic construct
  misc_feature 1..20: note = chemically synthesized
  source 1..20: mol_type = other DNA
ctctagacttggagtgttaa

SEQ ID NO: 9866 - DNA, 20 bp, synthetic construct
  misc_feature 1..20: note = chemically synthesized
  source 1..20: mol_type = other DNA
gagtgttaaaagtttgcacc

SEQ ID NO: 9867 - DNA, 20 bp, synthetic construct
  misc_feature 1..20: note = chemically synthesized
  source 1..20: mol_type = other DNA
tagttattctcccctctctc

SEQ ID NO: 9868 - DNA, 20 bp, synthetic construct
  misc_feature 1..20: note = chemically synthesized
  source 1..20: mol_type = other DNA
ttattctcccctctctctgg

SEQ ID NO: 9869 - DNA, 20 bp, synthetic construct
  misc_feature 1..20: note = chemically synthesized
  source 1..20: mol_type = other DNA
tattctcccctctctctggc

SEQ ID NO: 9870 - DNA, 20 bp, synthetic construct
  misc_feature 1..20: note = chemically synthesized
  source 1..20: mol_type = other DNA
ttctcccctctctctggcag

SEQ ID NO: 9871 - DNA, 20 bp, synthetic construct
  misc_feature 1..20: note = chemically synthesized
  source 1..20: mol_type = other DNA
tggcaggagaatcatgtcac

SEQ ID NO: 9872 - DNA, 20 bp, synthetic construct
  misc_feature 1..20: note = chemically synthesized
  source 1..20: mol_type = other DNA
aggagaatcatgtcactggc

SEQ ID NO: 9873 - DNA, 20 bp, synthetic construct
  misc_feature 1..20: note = chemically synthesized
  source 1..20: mol_type = other DNA
tgtatcctcttcaaataatt

SEQ ID NO: 9874 - DNA, 20 bp, synthetic construct
  misc_feature 1..20: note = chemically synthesized
  source 1..20: mol_type = other DNA
gcacaaatgtgtgtatgata

SEQ ID NO: 9875 - DNA, 20 bp, synthetic construct
  misc_feature 1..20: note = chemically synthesized
  source 1..20: mol_type = other DNA
gtgtgtatgatatagtatta

SEQ ID NO: 9876 - DNA, 20 bp, synthetic construct
  misc_feature 1..20: note = chemically synthesized
  source 1..20: mol_type = other DNA
tttctgaaaattgaaaaatt

SEQ ID NO: 9877 - DNA, 20 bp, synthetic construct
  misc_feature 1..20: note = chemically synthesized
  source 1..20: mol_type = other DNA
tgaaaattgaaaaattcaga

SEQ ID NO: 9878 - DNA, 20 bp, synthetic construct
  misc_feature 1..20: note = chemically synthesized
  source 1..20: mol_type = other DNA
ttgaaaaattcagaaagcca

SEQ ID NO: 9879 - DNA, 20 bp, synthetic construct
  misc_feature 1..20: note = chemically synthesized
  source 1..20: mol_type = other DNA
attcagaaagccaaagataa

SEQ ID NO: 9880 - DNA, 20 bp, synthetic construct
  misc_feature 1..20: note = chemically synthesized
  source 1..20: mol_type = other DNA
ataatagaatataccttgcg

SEQ ID NO: 9881 - DNA, 20 bp, synthetic construct
  misc_feature 1..20: note = chemically synthesized
  source 1..20: mol_type = other DNA
tagaatataccttgcgtggc

SEQ ID NO: 9882 - DNA, 20 bp, synthetic construct
  misc_feature 1..20: note = chemically synthesized
  source 1..20: mol_type = other DNA
agaatataccttgcgtggca

SEQ ID NO: 9883 - DNA, 20 bp, synthetic construct
  misc_feature 1..20: note = chemically synthesized
  source 1..20: mol_type = other DNA
gcgtggcaaggtatattgat

SEQ ID NO: 9884 - DNA, 20 bp, synthetic construct
  misc_feature 1..20: note = chemically synthesized
  source 1..20: mol_type = other DNA
cgtggcaaggtatattgatt

SEQ ID NO: 9885 - DNA, 20 bp, synthetic construct
  misc_feature 1..20: note = chemically synthesized
  source 1..20: mol_type = other DNA
ggcaaggtatattgattagg

SEQ ID NO: 9886 - DNA, 20 bp, synthetic construct
  misc_feature 1..20: note = chemically synthesized
  source 1..20: mol_type = other DNA
gcaaggtatattgattaggt

SEQ ID NO: 9887 - DNA, 20 bp, synthetic construct
  misc_feature 1..20: note = chemically synthesized
  source 1..20: mol_type = other DNA
taattgcaaaattatttatg

SEQ ID NO: 9888 - DNA, 20 bp, synthetic construct
  misc_feature 1..20: note = chemically synthesized
  source 1..20: mol_type = other DNA
aattgcaaaattatttatgc

SEQ ID NO: 9889 - DNA, 20 bp, synthetic construct
  misc_feature 1..20: note = chemically synthesized
  source 1..20: mol_type = other DNA
ttgcaaaattatttatgcag

SEQ ID NO: 9890 - DNA, 20 bp, synthetic construct
  misc_feature 1..20: note = chemically synthesized
  source 1..20: mol_type = other DNA
agtattaaaattttcctcaa

SEQ ID NO: 9891 - DNA, 20 bp, synthetic construct
  misc_feature 1..20: note = chemically synthesized
  source 1..20: mol_type = other DNA
aaattttcctcaaaagttcc

SEQ ID NO: 9892 - DNA, 20 bp, synthetic construct
  misc_feature 1..20: note = chemically synthesized
  source 1..20: mol_type = other DNA
aattttcctcaaaagttccc

SEQ ID NO: 9893 - DNA, 20 bp, synthetic construct
  misc_feature 1..20: note = chemically synthesized
  source 1..20: mol_type = other DNA
ctcaaaagttcccaggcaaa

SEQ ID NO: 9894 - DNA, 20 bp, synthetic construct
  misc_feature 1..20: note = chemically synthesized
  source 1..20: mol_type = other DNA
tcaaaagttcccaggcaaat

SEQ ID NO: 9895 - DNA, 20 bp, synthetic construct
  misc_feature 1..20: note = chemically synthesized
  source 1..20: mol_type = other DNA
ccttacaataaactcttctg

SEQ ID NO: 9896 - DNA, 20 bp, synthetic construct
  misc_feature 1..20: note = chemically synthesized
  source 1..20: mol_type = other DNA
cttacaataaactcttctgc

SEQ ID NO: 9897 - DNA, 20 bp, synthetic construct
  misc_feature 1..20: note = chemically synthesized
  source 1..20: mol_type = other DNA
ctgcaggttttgtttatttt

SEQ ID NO: 9898 - DNA, 20 bp, synthetic construct
  misc_feature 1..20: note = chemically synthesized
  source 1..20: mol_type = other DNA
tgcaggttttgtttattttg

SEQ ID NO: 9899 - DNA, 20 bp, synthetic construct
  misc_feature 1..20: note = chemically synthesized
  source 1..20: mol_type = other DNA
aacatttcactttttttttc

SEQ ID NO: 9900 - DNA, 20 bp, synthetic construct
  misc_feature 1..20: note = chemically synthesized
  source 1..20: mol_type = other DNA
cactttttttttcaagacat

SEQ ID NO: 9901 - DNA, 20 bp, synthetic construct
  misc_feature 1..20: note = chemically synthesized
  source 1..20: mol_type = other DNA
actttttttttcaagacatg

SEQ ID NO: 9902 - DNA, 20 bp, synthetic construct
  misc_feature 1..20: note = chemically synthesized
  source 1..20: mol_type = other DNA
gaggtgtgaatgatgcaaaa

SEQ ID NO: 9903 - DNA, 20 bp, synthetic construct
  misc_feature 1..20: note = chemically synthesized
  source 1..20: mol_type = other DNA
gaatgatgcaaaacagtatt

SEQ ID NO: 9904 - DNA, 20 bp, synthetic construct
  misc_feature 1..20: note = chemically synthesized
  source 1..20: mol_type = other DNA
ttgcataatgcattactaat

SEQ ID NO: 9905 - DNA, 20 bp, synthetic construct
  misc_feature 1..20: note = chemically synthesized
  source 1..20: mol_type = other DNA
ataatgcattactaatcagt

SEQ ID NO: 9906 - DNA, 20 bp, synthetic construct
  misc_feature 1..20: note = chemically synthesized
  source 1..20: mol_type = other DNA
taatcagtgagtataaattc

SEQ ID NO: 9907 - DNA, 20 bp, synthetic construct
  misc_feature 1..20: note = chemically synthesized
  source 1..20: mol_type = other DNA
atcagtgagtataaattctg

SEQ ID NO: 9908 - DNA, 20 bp, synthetic construct
  misc_feature 1..20: note = chemically synthesized
  source 1..20: mol_type = other DNA
gagtataaattctggagtct

SEQ ID NO: 9909 - DNA, 20 bp, synthetic construct
  misc_feature 1..20: note = chemically synthesized
  source 1..20: mol_type = other DNA
agtataaattctggagtctg

SEQ ID NO: 9910 - DNA, 20 bp, synthetic construct
  misc_feature 1..20: note = chemically synthesized
  source 1..20: mol_type = other DNA
gagtctgaggacctgaaatc

SEQ ID NO: 9911 - DNA, 20 bp, synthetic construct
  misc_feature 1..20: note = chemically synthesized
  source 1..20: mol_type = other DNA
ccaccaaattttttaaaatc

SEQ ID NO: 9912 - DNA, 20 bp, synthetic construct
  misc_feature 1..20: note = chemically synthesized
  source 1..20: mol_type = other DNA
ttttaaaatctagattataa

SEQ ID NO: 9913 - DNA, 20 bp, synthetic construct
  misc_feature 1..20: note = chemically synthesized
  source 1..20: mol_type = other DNA
aaatctagattataaaagta

SEQ ID NO: 9914 - DNA, 20 bp, synthetic construct
  misc_feature 1..20: note = chemically synthesized
  source 1..20: mol_type = other DNA
atctagattataaaagtaaa

SEQ ID NO: 9915 - DNA, 20 bp, synthetic construct
  misc_feature 1..20: note = chemically synthesized
  source 1..20: mol_type = other DNA
aagtaaagagcatcaccctt

SEQ ID NO: 9916 - DNA, 20 bp, synthetic construct
  misc_feature 1..20: note = chemically synthesized
  source 1..20: mol_type = other DNA
taaagagcatcacccttcgg

SEQ ID NO: 9917 - DNA, 20 bp, synthetic construct
  misc_feature 1..20: note = chemically synthesized
  source 1..20: mol_type = other DNA
aaagagcatcacccttcggt

SEQ ID NO: 9918 - DNA, 20 bp, synthetic construct
  misc_feature 1..20: note = chemically synthesized
  source 1..20: mol_type = other DNA
cacattcgcattccgtttat

SEQ ID NO: 9919 - DNA, 20 bp, synthetic construct
  misc_feature 1..20: note = chemically synthesized
  source 1..20: mol_type = other DNA
attcgcattccgtttataag

SEQ ID NO: 9920 - DNA, 20 bp, synthetic construct
  misc_feature 1..20: note = chemically synthesized
  source 1..20: mol_type = other DNA
ttcgcattccgtttataaga

SEQ ID NO: 9921 - DNA, 20 bp, synthetic construct
  misc_feature 1..20: note = chemically synthesized
  source 1..20: mol_type = other DNA
cgcattccgtttataagaag

SEQ ID NO: 9922 - DNA, 20 bp, synthetic construct
  misc_feature 1..20: note = chemically synthesized
  source 1..20: mol_type = other DNA
agaaggagaaattatcctca

SEQ ID NO: 9923 - DNA, 20 bp, synthetic construct
  misc_feature 1..20: note = chemically synthesized
  source 1..20: mol_type = other DNA
aaggagaaattatcctcaca

SEQ ID NO: 9924 - DNA, 20 bp, synthetic construct
  misc_feature 1..20: note = chemically synthesized
  source 1..20: mol_type = other DNA
ttatcctcacagagttttct

SEQ ID NO: 9925 - DNA, 20 bp, synthetic construct
  misc_feature 1..20: note = chemically synthesized
  source 1..20: mol_type = other DNA
tatcctcacagagttttctg

SEQ ID NO: 9926 - DNA, 20 bp, synthetic construct
  misc_feature 1..20: note = chemically synthesized
  source 1..20: mol_type = other DNA
ttttctgaggaaaattaaat

SEQ ID NO: 9927 - DNA, 20 bp, synthetic construct
  misc_feature 1..20: note = chemically synthesized
  source 1..20: mol_type = other DNA
tctgaggaaaattaaataag

SEQ ID NO: 9928 - DNA, 20 bp, synthetic construct
  misc_feature 1..20: note = chemically synthesized
  source 1..20: mol_type = other DNA
ttgctctgactcaacactat

SEQ ID NO: 9929 - DNA, 20 bp, synthetic construct
  misc_feature 1..20: note = chemically synthesized
  source 1..20: mol_type = other DNA
tgctctgactcaacactatg

SEQ ID NO: 9930 - DNA, 20 bp, synthetic construct
  misc_feature 1..20: note = chemically synthesized
  source 1..20: mol_type = other DNA
gactcaacactatgaggcat

SEQ ID NO: 9931 - DNA, 20 bp, synthetic construct
  misc_feature 1..20: note = chemically synthesized
  source 1..20: mol_type = other DNA
actcaacactatgaggcata

SEQ ID NO: 9932 - DNA, 20 bp, synthetic construct
  misc_feature 1..20: note = chemically synthesized
  source 1..20: mol_type = other DNA
ggcataaggtcctaaattca

SEQ ID NO: 9933 - DNA, 20 bp, synthetic construct
  misc_feature 1..20: note = chemically synthesized
  source 1..20: mol_type = other DNA
gcataaggtcctaaattcat

SEQ ID NO: 9934 - DNA, 20 bp, synthetic construct
  misc_feature 1..20: note = chemically synthesized
  source 1..20: mol_type = other DNA
taaattcataggcacaacca

SEQ ID NO: 9935 - DNA, 20 bp, synthetic construct
  misc_feature 1..20: note = chemically synthesized
  source 1..20: mol_type = other DNA
attcataggcacaaccacag

SEQ ID NO: 9936 - DNA, 20 bp, synthetic construct
  misc_feature 1..20: note = chemically synthesized
  source 1..20: mol_type = other DNA
ggcacaaccacagaagcacc

SEQ ID NO: 9937 - DNA, 20 bp, synthetic construct
  misc_feature 1..20: note = chemically synthesized
  source 1..20: mol_type = other DNA
gcacaaccacagaagcacca

SEQ ID NO: 9938 - DNA, 20 bp, synthetic construct
  misc_feature 1..20: note = chemically synthesized
  source 1..20: mol_type = other DNA
acaaccacagaagcaccaag

SEQ ID NO: 9939 - DNA, 20 bp, synthetic construct
  misc_feature 1..20: note = chemically synthesized
  source 1..20: mol_type = other DNA
aaccacagaagcaccaagga

SEQ ID NO: 9940 - DNA, 20 bp, synthetic construct
  misc_feature 1..20: note = chemically synthesized
  source 1..20: mol_type = other DNA
cagaagcaccaaggagagtg

SEQ ID NO: 9941 - DNA, 20 bp, synthetic construct
  misc_feature 1..20: note = chemically synthesized
  source 1..20: mol_type = other DNA
gtgaagatatttgcatcaaa

SEQ ID NO: 9942 - DNA, 20 bp, synthetic construct
  misc_feature 1..20: note = chemically synthesized
  source 1..20: mol_type = other DNA
gaagatatttgcatcaaaaa

SEQ ID NO: 9943 - DNA, 20 bp, synthetic construct
  misc_feature 1..20: note = chemically synthesized
  source 1..20: mol_type = other DNA
gatatttgcatcaaaaagag

SEQ ID NO: 9944 - DNA, 20 bp, synthetic construct
  misc_feature 1..20: note = chemically synthesized
  source 1..20: mol_type = other DNA
tttgcatcaaaaagagcaga

SEQ ID NO: 9945 - DNA, 20 bp, synthetic construct
  misc_feature 1..20: note = chemically synthesized
  source 1..20: mol_type = other DNA
cccccacccccaccccatgt

SEQ ID NO: 9946 - DNA, 20 bp, synthetic construct
  misc_feature 1..20: note = chemically synthesized
  source 1..20: mol_type = other DNA
caccccatgttggtcgccta

SEQ ID NO: 9947 - DNA, 20 bp, synthetic construct
  misc_feature 1..20: note = chemically synthesized
  source 1..20: mol_type = other DNA
ttggtcgcctacggaatcta

SEQ ID NO: 9948 - DNA, 20 bp, synthetic construct
  misc_feature 1..20: note = chemically synthesized
  source 1..20: mol_type = other DNA
tggtcgcctacggaatctac

SEQ ID NO: 9949 - DNA, 20 bp, synthetic construct
  misc_feature 1..20: note = chemically synthesized
  source 1..20: mol_type = other DNA
acggaatctacaggaatctg

SEQ ID NO: 9950 - DNA, 20 bp, synthetic construct
  misc_feature 1..20: note = chemically synthesized
  source 1..20: mol_type = other DNA
cggaatctacaggaatctga

SEQ ID NO: 9951 - DNA, 20 bp, synthetic construct
  misc_feature 1..20: note = chemically synthesized
  source 1..20: mol_type = other DNA
ggaatctacaggaatctgaa

SEQ ID NO: 9952 - DNA, 20 bp, synthetic construct
  misc_feature 1..20: note = chemically synthesized
  source 1..20: mol_type = other DNA
gaatctacaggaatctgaag

SEQ ID NO: 9953 - DNA, 20 bp, synthetic construct
  misc_feature 1..20: note = chemically synthesized
  source 1..20: mol_type = other DNA
tctacaggaatctgaagggg

SEQ ID NO: 9954 - DNA, 20 bp, synthetic construct
  misc_feature 1..20: note = chemically synthesized
  source 1..20: mol_type = other DNA
caggaatctgaaggggcagc

SEQ ID NO: 9955 - DNA, 20 bp, synthetic construct
  misc_feature 1..20: note = chemically synthesized
  source 1..20: mol_type = other DNA
attctgcctataccacccat

SEQ ID NO: 9956 - DNA, 20 bp, synthetic construct
  misc_feature 1..20: note = chemically synthesized
  source 1..20: mol_type = other DNA
gcctataccacccatcagat

SEQ ID NO: 9957 - DNA, 20 bp, synthetic construct
  misc_feature 1..20: note = chemically synthesized
  source 1..20: mol_type = other DNA
aaaccacccatgcccttctc

SEQ ID NO: 9958 - DNA, 20 bp, synthetic construct
  misc_feature 1..20: note = chemically synthesized
  source 1..20: mol_type = other DNA
ccacccatgcccttctccag

SEQ ID NO: 9959 - DNA, 20 bp, synthetic construct
  misc_feature 1..20: note = chemically synthesized
  source 1..20: mol_type = other DNA
cacccatgcccttctccagt

SEQ ID NO: 9960 - DNA, 20 bp, synthetic construct
  misc_feature 1..20: note = chemically synthesized
  source 1..20: mol_type = other DNA
cttctccagtgggttcccac

SEQ ID NO: 9961 - DNA, 20 bp, synthetic construct
  misc_feature 1..20: note = chemically synthesized
  source 1..20: mol_type = other DNA
tcccaccggtgttttcgtgc

SEQ ID NO: 9962 - DNA, 20 bp, synthetic construct
  misc_feature 1..20: note = chemically synthesized
  source 1..20: mol_type = other DNA
ccggtgttttcgtgcaagct

SEQ ID NO: 9963 - DNA, 20 bp, synthetic construct
  misc_feature 1..20: note = chemically synthesized
  source 1..20: mol_type = other DNA
caagcttagccccttctttg

SEQ ID NO: 9964 - DNA, 20 bp, synthetic construct
  misc_feature 1..20: note = chemically synthesized
  source 1..20: mol_type = other DNA
gccccttctttgcagaaaaa

SEQ ID NO: 9965 - DNA, 20 bp, synthetic construct
  misc_feature 1..20: note = chemically synthesized
  source 1..20: mol_type = other DNA
aaaagatattgatgtgccaa

SEQ ID NO: 9966 - DNA, 20 bp, synthetic construct
  misc_feature 1..20: note = chemically synthesized
  source 1..20: mol_type = other DNA
agatattgatgtgccaacag

SEQ ID NO: 9967 - DNA, 20 bp, synthetic construct
  misc_feature 1..20: note = chemically synthesized
  source 1..20: mol_type = other DNA
attgatgtgccaacagtaga

SEQ ID NO: 9968 - DNA, 20 bp, synthetic construct
  misc_feature 1..20: note = chemically synthesized
  source 1..20: mol_type = other DNA
gatgtgccaacagtagaaag

SEQ ID NO: 9969 - DNA, 20 bp, synthetic construct
  misc_feature 1..20: note = chemically synthesized
  source 1..20: mol_type = other DNA
gaaagaagaaaaaattattc

SEQ ID NO: 9970 - DNA, 20 bp, synthetic construct
  misc_feature 1..20: note = chemically synthesized
  source 1..20: mol_type = other DNA
gtacacaacctttgtcaacc

SEQ ID NO: 9971 - DNA, 20 bp, synthetic construct
  misc_feature 1..20: note = chemically synthesized
  source 1..20: mol_type = other DNA
caacccagcatgataaaacc

SEQ ID NO: 9972 - DNA, 20 bp, synthetic construct
  misc_feature 1..20: note = chemically synthesized
  source 1..20: mol_type = other DNA
cagcatgataaaaccaagtc

SEQ ID NO: 9973 - DNA, 20 bp, synthetic construct
  misc_feature 1..20: note = chemically synthesized
  source 1..20: mol_type = other DNA
agcatgataaaaccaagtct

SEQ ID NO: 9974 - DNA, 20 bp, synthetic construct
  misc_feature 1..20: note = chemically synthesized
  source 1..20: mol_type = other DNA
ctatttgtctaaacactttt

SEQ ID NO: 9975 - DNA, 20 bp, synthetic construct
  misc_feature 1..20: note = chemically synthesized
  source 1..20: mol_type = other DNA
ttgtctaaacactttttgga

SEQ ID NO: 9976 - DNA, 20 bp, synthetic construct
  misc_feature 1..20: note = chemically synthesized
  source 1..20: mol_type = other DNA
tgtctaaacactttttggaa

SEQ ID NO: 9977 - DNA, 20 bp, synthetic construct
  misc_feature 1..20: note = chemically synthesized
  source 1..20: mol_type = other DNA
gtctaaacactttttggaaa

SEQ ID NO: 9978 - DNA, 20 bp, synthetic construct
  misc_feature 1..20: note = chemically synthesized
  source 1..20: mol_type = other DNA
ctttttggaaagggatgaaa

SEQ ID NO: 9979 - DNA, 20 bp, synthetic construct
  misc_feature 1..20: note = chemically synthesized
  source 1..20: mol_type = other DNA
ttttggaaagggatgaaatg

SEQ ID NO: 9980 - DNA, 20 bp, synthetic construct
  misc_feature 1..20: note = chemically synthesized
  source 1..20: mol_type = other DNA
ttggaaagggatgaaatgga

SEQ ID NO: 9981 - DNA, 20 bp, synthetic construct
  misc_feature 1..20: note = chemically synthesized
  source 1..20: mol_type = other DNA
tggaaagggatgaaatggag

SEQ ID NO: 9982 - DNA, 20 bp, synthetic construct
  misc_feature 1..20: note = chemically synthesized
  source 1..20: mol_type = other DNA
aagggatgaaatggagagga

SEQ ID NO: 9983 - DNA, 20 bp, synthetic construct
  misc_feature 1..20: note = chemically synthesized
  source 1..20: mol_type = other DNA
agggatgaaatggagaggaa

SEQ ID NO: 9984 - DNA, 20 bp, synthetic construct
  misc_feature 1..20: note = chemically synthesized
  source 1..20: mol_type = other DNA
tgaaatggagaggaaaggaa

SEQ ID NO: 9985 - DNA, 20 bp, synthetic construct
  misc_feature 1..20: note = chemically synthesized
  source 1..20: mol_type = other DNA
gaaatggagaggaaaggaaa

SEQ ID NO: 9986 - DNA, 20 bp, synthetic construct
  misc_feature 1..20: note = chemically synthesized
  source 1..20: mol_type = other DNA
atggagaggaaaggaaaagg

SEQ ID NO: 9987 - DNA, 20 bp, synthetic construct
  misc_feature 1..20: note = chemically synthesized
  source 1..20: mol_type = other DNA
gaggaaaggaaaaggaagtg

SEQ ID NO: 9988 - DNA, 20 bp, synthetic construct
  misc_feature 1..20: note = chemically synthesized
  source 1..20: mol_type = other DNA
aaggaaaaggaagtgtagcc

SEQ ID NO: 9989 - DNA, 20 bp, synthetic construct
  misc_feature 1..20: note = chemically synthesized
  source 1..20: mol_type = other DNA
gaaaaggaagtgtagcctag

SEQ ID NO: 9990 - DNA, 20 bp, synthetic construct
  misc_feature 1..20: note = chemically synthesized
  source 1..20: mol_type = other DNA
aggaagtgtagcctagtggt

SEQ ID NO: 9991 - DNA, 20 bp, synthetic construct
  misc_feature 1..20: note = chemically synthesized
  source 1..20: mol_type = other DNA
acacactcacacaaatcctt

SEQ ID NO: 9992 - DNA, 20 bp, synthetic construct
  misc_feature 1..20: note = chemically synthesized
  source 1..20: mol_type = other DNA
cacactcacacaaatccttg

SEQ ID NO: 9993 - DNA, 20 bp, synthetic construct
  misc_feature 1..20: note = chemically synthesized
  source 1..20: mol_type = other DNA
acactcacacaaatccttga

SEQ ID NO: 9994 - DNA, 20 bp, synthetic construct
  misc_feature 1..20: note = chemically synthesized
  source 1..20: mol_type = other DNA
acacaaatccttgagggtgc

SEQ ID NO: 9995 - DNA, 20 bp, synthetic construct
  misc_feature 1..20: note = chemically synthesized
  source 1..20: mol_type = other DNA
cacaaatccttgagggtgcc

SEQ ID NO: 9996 - DNA, 20 bp, synthetic construct
  misc_feature 1..20: note = chemically synthesized
  source 1..20: mol_type = other DNA
gccaggttacatttctacaa

SEQ ID NO: 9997 - DNA, 20 bp, synthetic construct
  misc_feature 1..20: note = chemically synthesized
  source 1..20: mol_type = other DNA
tgccttccattgtctactgc

SEQ ID NO: 9998 - DNA, 20 bp, synthetic construct
  misc_feature 1..20: note = chemically synthesized
  source 1..20: mol_type = other DNA
tccattgtctactgccagtg

SEQ ID NO: 9999 - DNA, 20 bp, synthetic construct
  misc_feature 1..20: note = chemically synthesized
  source 1..20: mol_type = other DNA
tactgccagtgaagccaaac

SEQ ID NO: 10000 - DNA, 20 bp, synthetic construct
  misc_feature 1..20: note = chemically synthesized
  source 1..20: mol_type = other DNA
atttaatctgctgtaaaccc

SEQ ID NO: 10001 - DNA, 20 bp, synthetic construct
  misc_feature 1..20: note = chemically synthesized
  source 1..20: mol_type = other DNA
tctgctgtaaacccaagtat

SEQ ID NO: 10002 - DNA, 20 bp, synthetic construct
  misc_feature 1..20: note = chemically synthesized
  source 1..20: mol_type = other DNA
ctgctgtaaacccaagtatc

SEQ ID NO: 10003 - DNA, 20 bp, synthetic construct
  misc_feature 1..20: note = chemically synthesized
  source 1..20: mol_type = other DNA
aaacccaagtatcaggcact

SEQ ID NO: 10004 - DNA, 20 bp, synthetic construct
  misc_feature 1..20: note = chemically synthesized
  source 1..20: mol_type = other DNA
ccaagtatcaggcacttaga

SEQ ID NO: 10005 - DNA, 20 bp, synthetic construct
  misc_feature 1..20: note = chemically synthesized
  source 1..20: mol_type = other DNA
agtatcaggcacttagatgg

SEQ ID NO: 10006 - DNA, 20 bp, synthetic construct
  misc_feature 1..20: note = chemically synthesized
  source 1..20: mol_type = other DNA
ggcacttagatggcagctaa

SEQ ID NO: 10007 - DNA, 20 bp, synthetic construct
  misc_feature 1..20: note = chemically synthesized
  source 1..20: mol_type = other DNA
gcagctaaaagcgccactct

SEQ ID NO: 10008 - DNA, 20 bp, synthetic construct
  misc_feature 1..20: note = chemically synthesized
  source 1..20: mol_type = other DNA
agcgccactctcagataact

SEQ ID NO: 10009 - DNA, 20 bp, synthetic construct
  misc_feature 1..20: note = chemically synthesized
  source 1..20: mol_type = other DNA
tgagtgacacttgctaataa

SEQ ID NO: 10010 - DNA, 20 bp, synthetic construct
  misc_feature 1..20: note = chemically synthesized
  source 1..20: mol_type = other DNA
ctaataatagcctctgtgtg

SEQ ID NO: 10011 - DNA, 20 bp, synthetic construct
  misc_feature 1..20: note = chemically synthesized
  source 1..20: mol_type = other DNA
taatagcctctgtgtgaagc

SEQ ID NO: 10012 - DNA, 20 bp, synthetic construct
  misc_feature 1..20: note = chemically synthesized
  source 1..20: mol_type = other DNA
atagcctctgtgtgaagcga

SEQ ID NO: 10013 - DNA, 20 bp, synthetic construct
  misc_feature 1..20: note = chemically synthesized
  source 1..20: mol_type = other DNA
agcctctgtgtgaagcgaga

SEQ ID NO: 10014 - DNA, 20 bp, synthetic construct
  misc_feature 1..20: note = chemically synthesized
  source 1..20: mol_type = other DNA
cctctgtgtgaagcgagaga

SEQ ID NO: 10015 - DNA, 20 bp, synthetic construct
  misc_feature 1..20: note = chemically synthesized
  source 1..20: mol_type = other DNA
ctgtgtgaagcgagagagag

SEQ ID NO: 10016 - DNA, 20 bp, synthetic construct
  misc_feature 1..20: note = chemically synthesized
  source 1..20: mol_type = other DNA
gagcggacattttgtaaaac

SEQ ID NO: 10017 - DNA, 20 bp, synthetic construct
  misc_feature 1..20: note = chemically synthesized
  source 1..20: mol_type = other DNA
gcggacattttgtaaaacca

SEQ ID NO: 10018 - DNA, 20 bp, synthetic construct
  misc_feature 1..20: note = chemically synthesized
  source 1..20: mol_type = other DNA
cggacattttgtaaaaccag

SEQ ID NO: 10019 - DNA, 20 bp, synthetic construct
  misc_feature 1..20: note = chemically synthesized
  source 1..20: mol_type = other DNA
ggacattttgtaaaaccaga

SEQ ID NO: 10020 - DNA, 20 bp, synthetic construct
  misc_feature 1..20: note = chemically synthesized
  source 1..20: mol_type = other DNA
tttgtaaaaccagagggacc

SEQ ID NO: 10021 - DNA, 20 bp, synthetic construct
  misc_feature 1..20: note = chemically synthesized
  source 1..20: mol_type = other DNA
ttgtaaaaccagagggaccc

SEQ ID NO: 10022 - DNA, 20 bp, synthetic construct
  misc_feature 1..20: note = chemically synthesized
  source 1..20: mol_type = other DNA
aaaccagagggacccgggcc

SEQ ID NO: 10023 - DNA, 20 bp, synthetic construct
  misc_feature 1..20: note = chemically synthesized
  source 1..20: mol_type = other DNA
aaccagagggacccgggcct

SEQ ID NO: 10024 - DNA, 20 bp, synthetic construct
  misc_feature 1..20: note = chemically synthesized
  source 1..20: mol_type = other DNA
gagggacccgggcctgggcc

SEQ ID NO: 10025 - DNA, 20 bp, synthetic construct
  misc_feature 1..20: note = chemically synthesized
  source 1..20: mol_type = other DNA
agggacccgggcctgggcct

SEQ ID NO: 10026 - DNA, 20 bp, synthetic construct
  misc_feature 1..20: note = chemically synthesized
  source 1..20: mol_type = other DNA
cccgggcctgggcctgggcc

SEQ ID NO: 10027 - DNA, 20 bp, synthetic construct
  misc_feature 1..20: note = chemically synthesized
  source 1..20: mol_type = other DNA
ccgggcctgggcctgggcct

SEQ ID NO: 10028 - DNA, 20 bp, synthetic construct
  misc_feature 1..20: note = chemically synthesized
  source 1..20: mol_type = other DNA
cctgggcctgggcctgggtc

SEQ ID NO: 10029 - DNA, 20 bp, synthetic construct
  misc_feature 1..20: note = chemically synthesized
  source 1..20: mol_type = other DNA
ctgggcctgggcctgggtct

SEQ ID NO: 10030 - DNA, 20 bp, synthetic construct
  misc_feature 1..20: note = chemically synthesized
  source 1..20: mol_type = other DNA
cctgggcctgggtctgggaa

SEQ ID NO: 10031 - DNA, 20 bp, synthetic construct
  misc_feature 1..20: note = chemically synthesized
  source 1..20: mol_type = other DNA
ggtctgggaatggtgtgatg

SEQ ID NO: 10032 - DNA, 20 bp, synthetic construct
  misc_feature 1..20: note = chemically synthesized
  source 1..20: mol_type = other DNA
tgggaatggtgtgatgtggt

SEQ ID NO: 10033 - DNA, 20 bp, synthetic construct
  misc_feature 1..20: note = chemically synthesized
  source 1..20: mol_type = other DNA
gggaatggtgtgatgtggtt

SEQ ID NO: 10034 - DNA, 20 bp, synthetic construct
  misc_feature 1..20: note = chemically synthesized
  source 1..20: mol_type = other DNA
atggtgtgatgtggttaggc

SEQ ID NO: 10035 - DNA, 20 bp, synthetic construct
  misc_feature 1..20: note = chemically synthesized
  source 1..20: mol_type = other DNA
tgatgtggttaggccagtct

SEQ ID NO: 10036 - DNA, 20 bp, synthetic construct
  misc_feature 1..20: note = chemically synthesized
  source 1..20: mol_type = other DNA
gttaggccagtctcagcttc

SEQ ID NO: 10037 - DNA, 20 bp, synthetic construct
  misc_feature 1..20: note = chemically synthesized
  source 1..20: mol_type = other DNA
ttaggccagtctcagcttcc

SEQ ID NO: 10038 - DNA, 20 bp, synthetic construct
  misc_feature 1..20: note = chemically synthesized
  source 1..20: mol_type = other DNA
ggccagtctcagcttccagg

SEQ ID NO: 10039 - DNA, 20 bp, synthetic construct
  misc_feature 1..20: note = chemically synthesized
  source 1..20: mol_type = other DNA
cagtctcagcttccaggcag

SEQ ID NO: 10040 - DNA, 20 bp, synthetic construct
  misc_feature 1..20: note = chemically synthesized
  source 1..20: mol_type = other DNA
cagcttccaggcagcagata

SEQ ID NO: 10041 - DNA, 20 bp, synthetic construct
  misc_feature 1..20: note = chemically synthesized
  source 1..20: mol_type = other DNA
cttccaggcagcagatacgg

SEQ ID NO: 10042 - DNA, 20 bp, synthetic construct
  misc_feature 1..20: note = chemically synthesized
  source 1..20: mol_type = other DNA
tccaggcagcagatacggca

SEQ ID NO: 10043 - DNA, 20 bp, synthetic construct
  misc_feature 1..20: note = chemically synthesized
  source 1..20: mol_type = other DNA
gcagcagatacggcagagac

SEQ ID NO: 10044 - DNA, 20 bp, synthetic construct
  misc_feature 1..20: note = chemically synthesized
  source 1..20: mol_type = other DNA
cagcagatacggcagagacg

SEQ ID NO: 10045 - DNA, 20 bp, synthetic construct
  misc_feature 1..20: note = chemically synthesized
  source 1..20: mol_type = other DNA
ggcagagacgaggcccacca

SEQ ID NO: 10046 - DNA, 20 bp, synthetic construct
  misc_feature 1..20: note = chemically synthesized
  source 1..20: mol_type = other DNA
ccaccatggctcccctgtga

SEQ ID NO: 10047 - DNA, 20 bp, synthetic construct
  misc_feature 1..20: note = chemically synthesized
  source 1..20: mol_type = other DNA
caccatggctcccctgtgac

SEQ ID NO: 10048 - DNA, 20 bp, synthetic construct
  misc_feature 1..20: note = chemically synthesized
  source 1..20: mol_type = other DNA
cccctgtgacgggctgcacg

SEQ ID NO: 10049 - DNA, 20 bp, synthetic construct
  misc_feature 1..20: note = chemically synthesized
  source 1..20: mol_type = other DNA
acgggctgcacgaagcccac

SEQ ID NO: 10050 - DNA, 20 bp, synthetic construct
  misc_feature 1..20: note = chemically synthesized
  source 1..20: mol_type = other DNA
cacgaagcccaccagtgacc

SEQ ID NO: 10051 - DNA, 20 bp, synthetic construct
  misc_feature 1..20: note = chemically synthesized
  source 1..20: mol_type = other DNA
ccaccagtgacctagctttc

SEQ ID NO: 10052 - DNA, 20 bp, synthetic construct
  misc_feature 1..20: note = chemically synthesized
  source 1..20: mol_type = other DNA
gacctagctttcaagtcaca

SEQ ID NO: 10053 - DNA, 20 bp, synthetic construct
  misc_feature 1..20: note = chemically synthesized
  source 1..20: mol_type = other DNA
gctttcaagtcacacagcga

SEQ ID NO: 10054 - DNA, 20 bp, synthetic construct
  misc_feature 1..20: note = chemically synthesized
  source 1..20: mol_type = other DNA
aagtcacacagcgacagtcc

SEQ ID NO: 10055 - DNA, 20 bp, synthetic construct
  misc_feature 1..20: note = chemically synthesized
  source 1..20: mol_type = other DNA
cagtcctggcttttgctatc

SEQ ID NO: 10056 - DNA, 20 bp, synthetic construct
  misc_feature 1..20: note = chemically synthesized
  source 1..20: mol_type = other DNA
tcctggcttttgctatctag

SEQ ID NO: 10057 - DNA, 20 bp, synthetic construct
  misc_feature 1..20: note = chemically synthesized
  source 1..20: mol_type = other DNA
aagaacaaaattcccctttc

SEQ ID NO: 10058 - DNA, 20 bp, synthetic construct
  misc_feature 1..20: note = chemically synthesized
  source 1..20: mol_type = other DNA
tcatcttccatcttgtgccc

SEQ ID NO: 10059 - DNA, 20 bp, synthetic construct
  misc_feature 1..20: note = chemically synthesized
  source 1..20: mol_type = other DNA
tgtgccccagtcctccctta

SEQ ID NO: 10060 - DNA, 20 bp, synthetic construct
  misc_feature 1..20: note = chemically synthesized
  source 1..20: mol_type = other DNA
gtgccccagtcctcccttaa

SEQ ID NO: 10061 - DNA, 20 bp, synthetic construct
  misc_feature 1..20: note = chemically synthesized
  source 1..20: mol_type = other DNA
tgccccagtcctcccttaaa

SEQ ID NO: 10062 - DNA, 20 bp, synthetic construct
  misc_feature 1..20: note = chemically synthesized
  source 1..20: mol_type = other DNA
cccagtcctcccttaaaggg

SEQ ID NO: 10063 - DNA, 20 bp, synthetic construct
  misc_feature 1..20: note = chemically synthesized
  source 1..20: mol_type = other DNA
ccagtcctcccttaaaggga

SEQ ID NO: 10064 - DNA, 20 bp, synthetic construct
  misc_feature 1..20: note = chemically synthesized
  source 1..20: mol_type = other DNA
ttctttgtccccttctttct

SEQ ID NO: 10065 - DNA, 20 bp, synthetic construct
  misc_feature 1..20: note = chemically synthesized
  source 1..20: mol_type = other DNA
ctttgtccccttctttctga

SEQ ID NO: 10066 - DNA, 20 bp, synthetic construct
  misc_feature 1..20: note = chemically synthesized
  source 1..20: mol_type = other DNA
tccccttctttctgagagtg

SEQ ID NO: 10067 - DNA, 20 bp, synthetic construct
  misc_feature 1..20: note = chemically synthesized
  source 1..20: mol_type = other DNA
gagtgtggtcaatctcctct

SEQ ID NO: 10068 - DNA, 20 bp, synthetic construct
  misc_feature 1..20: note = chemically synthesized
  source 1..20: mol_type = other DNA
agtgtggtcaatctcctctc

SEQ ID NO: 10069 - DNA, 20 bp, synthetic construct
  misc_feature 1..20: note = chemically synthesized
  source 1..20: mol_type = other DNA
ggcaaatcatctttctctaa

SEQ ID NO: 10070 - DNA, 20 bp, synthetic construct
  misc_feature 1..20: note = chemically synthesized
  source 1..20: mol_type = other DNA
aatcatctttctctaatagc

SEQ ID NO: 10071 - DNA, 20 bp, synthetic construct
  misc_feature 1..20: note = chemically synthesized
  source 1..20: mol_type = other DNA
atcatctttctctaatagcc

SEQ ID NO: 10072 - DNA, 20 bp, synthetic construct
  misc_feature 1..20: note = chemically synthesized
  source 1..20: mol_type = other DNA
tcatctttctctaatagcca

SEQ ID NO: 10073 - DNA, 20 bp, synthetic construct
  misc_feature 1..20: note = chemically synthesized
  source 1..20: mol_type = other DNA
tctaatagccagggctcaaa

SEQ ID NO: 10074 - DNA, 20 bp, synthetic construct
  misc_feature 1..20: note = chemically synthesized
  source 1..20: mol_type = other DNA
agccagggctcaaatggcca

SEQ ID NO: 10075 - DNA, 20 bp, synthetic construct
  misc_feature 1..20: note = chemically synthesized
  source 1..20: mol_type = other DNA
agggctcaaatggccaaaga

SEQ ID NO: 10076 - DNA, 20 bp, synthetic construct
  misc_feature 1..20: note = chemically synthesized
  source 1..20: mol_type = other DNA
gggctcaaatggccaaagaa

SEQ ID NO: 10077 - DNA, 20 bp, synthetic construct
  misc_feature 1..20: note = chemically synthesized
  source 1..20: mol_type = other DNA
atggccaaagaaaggtccca

SEQ ID NO: 10078 - DNA, 20 bp, synthetic construct
  misc_feature 1..20: note = chemically synthesized
  source 1..20: mol_type = other DNA
ccttgtcttcataacactac

SEQ ID NO: 10079 - DNA, 20 bp, synthetic construct
  misc_feature 1..20: note = chemically synthesized
  source 1..20: mol_type = other DNA
cataacactaccagccacgt

SEQ ID NO: 10080 - DNA, 20 bp, synthetic construct
  misc_feature 1..20: note = chemically synthesized
  source 1..20: mol_type = other DNA
ccagccacgtgagcacgtcc

SEQ ID NO: 10081 - DNA, 20 bp, synthetic construct
  misc_feature 1..20: note = chemically synthesized
  source 1..20: mol_type = other DNA
ttcttcctgaccctcaccac

SEQ ID NO: 10082 - DNA, 20 bp, synthetic construct
  misc_feature 1..20: note = chemically synthesized
  source 1..20: mol_type = other DNA
tcttcctgaccctcaccacg

SEQ ID NO: 10083 - DNA, 20 bp, synthetic construct
  misc_feature 1..20: note = chemically synthesized
  source 1..20: mol_type = other DNA
ctgaccctcaccacgaggca

SEQ ID NO: 10084 - DNA, 20 bp, synthetic construct
  misc_feature 1..20: note = chemically synthesized
  source 1..20: mol_type = other DNA
gaccctcaccacgaggcaca

SEQ ID NO: 10085 - DNA, 20 bp, synthetic construct
  misc_feature 1..20: note = chemically synthesized
  source 1..20: mol_type = other DNA
accctcaccacgaggcacag

SEQ ID NO: 10086 - DNA, 20 bp, synthetic construct
  misc_feature 1..20: note = chemically synthesized
  source 1..20: mol_type = other DNA
aggcacctgtgctgaaactc

SEQ ID NO: 10087 - DNA, 20 bp, synthetic construct
  misc_feature 1..20: note = chemically synthesized
  source 1..20: mol_type = other DNA
ctctgcctcatgcactgaaa

SEQ ID NO: 10088 - DNA, 20 bp, synthetic construct
  misc_feature 1..20: note = chemically synthesized
  source 1..20: mol_type = other DNA
cctcatgcactgaaaaagac

SEQ ID NO: 10089 - DNA, 20 bp, synthetic construct
  misc_feature 1..20: note = chemically synthesized
  source 1..20: mol_type = other DNA
ctcatgcactgaaaaagaca

SEQ ID NO: 10090 - DNA, 20 bp, synthetic construct
  misc_feature 1..20: note = chemically synthesized
  source 1..20: mol_type = other DNA
tcatgcactgaaaaagacaa

SEQ ID NO: 10091 - DNA, 20 bp, synthetic construct
  misc_feature 1..20: note = chemically synthesized
  source 1..20: mol_type = other DNA
acaagggatctctgttcttc

SEQ ID NO: 10092 - DNA, 20 bp, synthetic construct
  misc_feature 1..20: note = chemically synthesized
  source 1..20: mol_type = other DNA
caagggatctctgttcttcc

SEQ ID NO: 10093 - DNA, 20 bp, synthetic construct
  misc_feature 1..20: note = chemically synthesized
  source 1..20: mol_type = other DNA
agggatctctgttcttccag

SEQ ID NO: 10094 - DNA, 20 bp, synthetic construct
  misc_feature 1..20: note = chemically synthesized
  source 1..20: mol_type = other DNA
tctctgttcttccaggagaa

SEQ ID NO: 10095 - DNA, 20 bp, synthetic construct
  misc_feature 1..20: note = chemically synthesized
  source 1..20: mol_type = other DNA
ctctgttcttccaggagaat

SEQ ID NO: 10096 - DNA, 20 bp, synthetic construct
  misc_feature 1..20: note = chemically synthesized
  source 1..20: mol_type = other DNA
tctgttcttccaggagaatg

SEQ ID NO: 10097 - DNA, 20 bp, synthetic construct
  misc_feature 1..20: note = chemically synthesized
  source 1..20: mol_type = other DNA
ctgttcttccaggagaatgg

SEQ ID NO: 10098 - DNA, 20 bp, synthetic construct
  misc_feature 1..20: note = chemically synthesized
  source 1..20: mol_type = other DNA
tcttccaggagaatggggga

SEQ ID NO: 10099 - DNA, 20 bp, synthetic construct
  misc_feature 1..20: note = chemically synthesized
  source 1..20: mol_type = other DNA
ggagaatgggggacagtgca

SEQ ID NO: 10100 - DNA, 20 bp, synthetic construct
  misc_feature 1..20: note = chemically synthesized
  source 1..20: mol_type = other DNA
atgggggacagtgcacagta

SEQ ID NO: 10101 - DNA, 20 bp, synthetic construct
  misc_feature 1..20: note = chemically synthesized
  source 1..20: mol_type = other DNA
ccccttcacaatgaacttcc

SEQ ID NO: 10102 - DNA, 20 bp, synthetic construct
  misc_feature 1..20: note = chemically synthesized
  source 1..20: mol_type = other DNA
acaatgaacttcccagatac

SEQ ID NO: 10103 - DNA, 20 bp, synthetic construct
  misc_feature 1..20: note = chemically synthesized
  source 1..20: mol_type = other DNA
acttcccagatacaagactt

SEQ ID NO: 10104 - DNA, 20 bp, synthetic construct
  misc_feature 1..20: note = chemically synthesized
  source 1..20: mol_type = other DNA
agatacaagacttgagctca

SEQ ID NO: 10105 - DNA, 20 bp, synthetic construct
  misc_feature 1..20: note = chemically synthesized
  source 1..20: mol_type = other DNA
gatacaagacttgagctcac

SEQ ID NO: 10106 - DNA, 20 bp, synthetic construct
  misc_feature 1..20: note = chemically synthesized
  source 1..20: mol_type = other DNA
cacaggtactttcttgccca

SEQ ID NO: 10107 - DNA, 20 bp, synthetic construct
  misc_feature 1..20: note = chemically synthesized
  source 1..20: mol_type = other DNA
acaggtactttcttgcccat

SEQ ID NO: 10108 - DNA, 20 bp, synthetic construct
  misc_feature 1..20: note = chemically synthesized
  source 1..20: mol_type = other DNA
cttgtccccttgctacctct

SEQ ID NO: 10109 - DNA, 20 bp, synthetic construct
  misc_feature 1..20: note = chemically synthesized
  source 1..20: mol_type = other DNA
ctacctctgagccaaaccct

SEQ ID NO: 10110 - DNA, 20 bp, synthetic construct
  misc_feature 1..20: note = chemically synthesized
  source 1..20: mol_type = other DNA
tctgagccaaacccttggtg

SEQ ID NO: 10111 - DNA, 20 bp, synthetic construct
  misc_feature 1..20: note = chemically synthesized
  source 1..20: mol_type = other DNA
agaaacaacaccgactaaac

SEQ ID NO: 10112 - DNA, 20 bp, synthetic construct
  misc_feature 1..20: note = chemically synthesized
  source 1..20: mol_type = other DNA
gaaacaacaccgactaaaca

SEQ ID NO: 10113 - DNA, 20 bp, synthetic construct
  misc_feature 1..20: note = chemically synthesized
  source 1..20: mol_type = other DNA
aaggccatactgctctccac

SEQ ID NO: 10114 - DNA, 20 bp, synthetic construct
  misc_feature 1..20: note = chemically synthesized
  source 1..20: mol_type = other DNA
ccatactgctctccaccagt

SEQ ID NO: 10115 - DNA, 20 bp, synthetic construct
  misc_feature 1..20: note = chemically synthesized
  source 1..20: mol_type = other DNA
catactgctctccaccagtc

SEQ ID NO: 10116 - DNA, 20 bp, synthetic construct
  misc_feature 1..20: note = chemically synthesized
  source 1..20: mol_type = other DNA
caggcaatacctttattttc

SEQ ID NO: 10117 - DNA, 20 bp, synthetic construct
  misc_feature 1..20: note = chemically synthesized
  source 1..20: mol_type = other DNA
aaaaatctcaaatactacaa

SEQ ID NO: 10118 - DNA, 20 bp, synthetic construct
  misc_feature 1..20: note = chemically synthesized
  source 1..20: mol_type = other DNA
aatctcaaatactacaaaag

SEQ ID NO: 10119 - DNA, 20 bp, synthetic construct
  misc_feature 1..20: note = chemically synthesized
  source 1..20: mol_type = other DNA
tctcaaatactacaaaagta

SEQ ID NO: 10120 - DNA, 20 bp, synthetic construct
  misc_feature 1..20: note = chemically synthesized
  source 1..20: mol_type = other DNA
tcaaatactacaaaagtaga

SEQ ID NO: 10121 - DNA, 20 bp, synthetic construct
  misc_feature 1..20: note = chemically synthesized
  source 1..20: mol_type = other DNA
gtagagagaatgttataaat

SEQ ID NO: 10122 - DNA, 20 bp, synthetic construct
  misc_feature 1..20: note = chemically synthesized
  source 1..20: mol_type = other DNA
aatgttataaatcagtcccc

SEQ ID NO: 10123 - DNA, 20 bp, synthetic construct
  misc_feature 1..20: note = chemically synthesized
  source 1..20: mol_type = other DNA
gtccccaagtccacatcttc

SEQ ID NO: 10124 - DNA, 20 bp, synthetic construct
  misc_feature 1..20: note = chemically synthesized
  source 1..20: mol_type = other DNA
tcttccagctccaaccacca

SEQ ID NO: 10125 - DNA, 20 bp, synthetic construct
  misc_feature 1..20: note = chemically synthesized
  source 1..20: mol_type = other DNA
gctccaaccaccacagctca

SEQ ID NO: 10126 - DNA, 20 bp, synthetic construct
  misc_feature 1..20: note = chemically synthesized
  source 1..20: mol_type = other DNA
ctgtaaccctatcgcctccc

SEQ ID NO: 10127 - DNA, 20 bp, synthetic construct
  misc_feature 1..20: note = chemically synthesized
  source 1..20: mol_type = other DNA
cctagcccattttattattt

SEQ ID NO: 10128 - DNA, 20 bp, synthetic construct
  misc_feature 1..20: note = chemically synthesized
  source 1..20: mol_type = other DNA
tttattatttaagttgatcc

SEQ ID NO: 10129 - DNA, 20 bp, synthetic construct
  misc_feature 1..20: note = chemically synthesized
  source 1..20: mol_type = other DNA
cagacgtcatatcatttcat

SEQ ID NO: 10130 - DNA, 20 bp, synthetic construct
  misc_feature 1..20: note = chemically synthesized
  source 1..20: mol_type = other DNA
ctgtatgtattttttaaaca

SEQ ID NO: 10131 - DNA, 20 bp, synthetic construct
  misc_feature 1..20: note = chemically synthesized
  source 1..20: mol_type = other DNA
tgtatgtattttttaaacat

SEQ ID NO: 10132 - DNA, 20 bp, synthetic construct
  misc_feature 1..20: note = chemically synthesized
  source 1..20: mol_type = other DNA
tatcacacctaaaaataata

SEQ ID NO: 10133 - DNA, 20 bp, synthetic construct
  misc_feature 1..20: note = chemically synthesized
  source 1..20: mol_type = other DNA
aaataataaagtcacaaata

SEQ ID NO: 10134 - DNA, 20 bp, synthetic construct
  misc_feature 1..20: note = chemically synthesized
  source 1..20: mol_type = other DNA
taaagtcccgtattaccaaa

SEQ ID NO: 10135 - DNA, 20 bp, synthetic construct
  misc_feature 1..20: note = chemically synthesized
  source 1..20: mol_type = other DNA
aaagtcccgtattaccaaat

SEQ ID NO: 10136 - DNA, 20 bp, synthetic construct
  misc_feature 1..20: note = chemically synthesized
  source 1..20: mol_type = other DNA
aagtcccgtattaccaaata

SEQ ID NO: 10137 - DNA, 20 bp, synthetic construct
  misc_feature 1..20: note = chemically synthesized
  source 1..20: mol_type = other DNA
agtcccgtattaccaaatag

SEQ ID NO: 10138 - DNA, 20 bp, synthetic construct
  misc_feature 1..20: note = chemically synthesized
  source 1..20: mol_type = other DNA
tcccgtattaccaaataggg

SEQ ID NO: 10139 - DNA, 20 bp, synthetic construct
  misc_feature 1..20: note = chemically synthesized
  source 1..20: mol_type = other DNA
taggggagttattttaaact

SEQ ID NO: 10140 - DNA, 20 bp, synthetic construct
  misc_feature 1..20: note = chemically synthesized
  source 1..20: mol_type = other DNA
cagaaatacttctttccatc

SEQ ID NO: 10141 - DNA, 20 bp, synthetic construct
  misc_feature 1..20: note = chemically synthesized
  source 1..20: mol_type = other DNA
agaaatacttctttccatct

SEQ ID NO: 10142 - DNA, 20 bp, synthetic construct
  misc_feature 1..20: note = chemically synthesized
  source 1..20: mol_type = other DNA
tttccatctgggtcatgttt

SEQ ID NO: 10143 - DNA, 20 bp, synthetic construct
  misc_feature 1..20: note = chemically synthesized
  source 1..20: mol_type = other DNA
tccatctgggtcatgttttg

SEQ ID NO: 10144 - DNA, 20 bp, synthetic construct
  misc_feature 1..20: note = chemically synthesized
  source 1..20: mol_type = other DNA
ccatctgggtcatgttttgg

SEQ ID NO: 10145 - DNA, 20 bp, synthetic construct
  misc_feature 1..20: note = chemically synthesized
  source 1..20: mol_type = other DNA
atgttttggaggatcccttc

SEQ ID NO: 10146 - DNA, 20 bp, synthetic construct
  misc_feature 1..20: note = chemically synthesized
  source 1..20: mol_type = other DNA
tttggaggatcccttccagt

SEQ ID NO: 10147 - DNA, 20 bp, synthetic construct
  misc_feature 1..20: note = chemically synthesized
  source 1..20: mol_type = other DNA
ttggaggatcccttccagtg

SEQ ID NO: 10148 - DNA, 20 bp, synthetic construct
  misc_feature 1..20: note = chemically synthesized
  source 1..20: mol_type = other DNA
gatcccttccagtgaggttc

SEQ ID NO: 10149 - DNA, 20 bp, synthetic construct
  misc_feature 1..20: note = chemically synthesized
  source 1..20: mol_type = other DNA
tccagtgaggttcaagactg

SEQ ID NO: 10150 - DNA, 20 bp, synthetic construct
  misc_feature 1..20: note = chemically synthesized
  source 1..20: mol_type = other DNA
ggttcaagactgaagctgcc

SEQ ID NO: 10151 - DNA, 20 bp, synthetic construct
  misc_feature 1..20: note = chemically synthesized
  source 1..20: mol_type = other DNA
aagactgaagctgccaagaa

SEQ ID NO: 10152 - DNA, 20 bp, synthetic construct
  misc_feature 1..20: note = chemically synthesized
  source 1..20: mol_type = other DNA
gaagctgccaagaaaagctt

SEQ ID NO: 10153 - DNA, 20 bp, synthetic construct
  misc_feature 1..20: note = chemically synthesized
  source 1..20: mol_type = other DNA
agctgccaagaaaagcttca

SEQ ID NO: 10154 - DNA, 20 bp, synthetic construct
  misc_feature 1..20: note = chemically synthesized
  source 1..20: mol_type = other DNA
agagaatcacactctctaaa

SEQ ID NO: 10155 - DNA, 20 bp, synthetic construct
  misc_feature 1..20: note = chemically synthesized
  source 1..20: mol_type = other DNA
gagaatcacactctctaaaa

SEQ ID NO: 10156 - DNA, 20 bp, synthetic construct
  misc_feature 1..20: note = chemically synthesized
  source 1..20: mol_type = other DNA
agaatcacactctctaaaaa

SEQ ID NO: 10157 - DNA, 20 bp, synthetic construct
  misc_feature 1..20: note = chemically synthesized
  source 1..20: mol_type = other DNA
tctaaaaagggccttgtgta

SEQ ID NO: 10158 - DNA, 20 bp, synthetic construct
  misc_feature 1..20: note = chemically synthesized
  source 1..20: mol_type = other DNA
tgtaaagccaccttgcatgt

SEQ ID NO: 10159 - DNA, 20 bp, synthetic construct
  misc_feature 1..20: note = chemically synthesized
  source 1..20: mol_type = other DNA
gccaccttgcatgtcagccc

SEQ ID NO: 10160 - DNA, 20 bp, synthetic construct
  misc_feature 1..20: note = chemically synthesized
  source 1..20: mol_type = other DNA
gcccaagctcctgccccttg

SEQ ID NO: 10161 - DNA, 20 bp, synthetic construct
  misc_feature 1..20: note = chemically synthesized
  source 1..20: mol_type = other DNA
ttgcagtcctttgccctgtt

SEQ ID NO: 10162 - DNA, 20 bp, synthetic construct
  misc_feature 1..20: note = chemically synthesized
  source 1..20: mol_type = other DNA
tgcagtcctttgccctgttc

SEQ ID NO: 10163 - DNA, 20 bp, synthetic construct
  misc_feature 1..20: note = chemically synthesized
  source 1..20: mol_type = other DNA
gcagtcctttgccctgttca

SEQ ID NO: 10164 - DNA, 20 bp, synthetic construct
  misc_feature 1..20: note = chemically synthesized
  source 1..20: mol_type = other DNA
cagggctgaatgcaccctct

SEQ ID NO: 10165 - DNA, 20 bp, synthetic construct
  misc_feature 1..20: note = chemically synthesized
  source 1..20: mol_type = other DNA
gggctgaatgcaccctctga

SEQ ID NO: 10166 - DNA, 20 bp, synthetic construct
  misc_feature 1..20: note = chemically synthesized
  source 1..20: mol_type = other DNA
ccctctgagagtctctgtga

SEQ ID NO: 10167 - DNA, 20 bp, synthetic construct
  misc_feature 1..20: note = chemically synthesized
  source 1..20: mol_type = other DNA
ctcccacatcgactgcccca

SEQ ID NO: 10168 - DNA, 20 bp, synthetic construct
  misc_feature 1..20: note = chemically synthesized
  source 1..20: mol_type = other DNA
tcccacatcgactgccccac

SEQ ID NO: 10169 - DNA, 20 bp, synthetic construct
  misc_feature 1..20: note = chemically synthesized
  source 1..20: mol_type = other DNA
tcgactgccccacaggccct

SEQ ID NO: 10170 - DNA, 20 bp, synthetic construct
  misc_feature 1..20: note = chemically synthesized
  source 1..20: mol_type = other DNA
ctccctcactccccaccatg

SEQ ID NO: 10171 - DNA, 20 bp, synthetic construct
  misc_feature 1..20: note = chemically synthesized
  source 1..20: mol_type = other DNA
ggcccatcaccacatccgac

SEQ ID NO: 10172 - DNA, 20 bp, synthetic construct
  misc_feature 1..20: note = chemically synthesized
  source 1..20: mol_type = other DNA
ccatcaccacatccgacaag

SEQ ID NO: 10173 - DNA, 20 bp, synthetic construct
  misc_feature 1..20: note = chemically synthesized
  source 1..20: mol_type = other DNA
catcaccacatccgacaagc

SEQ ID NO: 10174 - DNA, 20 bp, synthetic construct
  misc_feature 1..20: note = chemically synthesized
  source 1..20: mol_type = other DNA
ccgacaagcaggtgcactcc

SEQ ID NO: 10175 - DNA, 20 bp, synthetic construct
  misc_feature 1..20: note = chemically synthesized
  source 1..20: mol_type = other DNA
gcaggtgcactcccagtgtt

SEQ ID NO: 10176 - DNA, 20 bp, synthetic construct
  misc_feature 1..20: note = chemically synthesized
  source 1..20: mol_type = other DNA
gcactcccagtgttcagaac

SEQ ID NO: 10177 - DNA, 20 bp, synthetic construct
  misc_feature 1..20: note = chemically synthesized
  source 1..20: mol_type = other DNA
gaactggaattcatttgtct

SEQ ID NO: 10178 - DNA, 20 bp, synthetic construct
  misc_feature 1..20: note = chemically synthesized
  source 1..20: mol_type = other DNA
ctggaattcatttgtcttgg

SEQ ID NO: 10179 - DNA, 20 bp, synthetic construct
  misc_feature 1..20: note = chemically synthesized
  source 1..20: mol_type = other DNA
aattcatttgtcttggaaga

SEQ ID NO: 10180 - DNA, 20 bp, synthetic construct
  misc_feature 1..20: note = chemically synthesized
  source 1..20: mol_type = other DNA
cttggaagaaagtgttctcc

SEQ ID NO: 10181 - DNA, 20 bp, synthetic construct
  misc_feature 1..20: note = chemically synthesized
  source 1..20: mol_type = other DNA
gaagaaagtgttctcctgga

SEQ ID NO: 10182 - DNA, 20 bp, synthetic construct
  misc_feature 1..20: note = chemically synthesized
  source 1..20: mol_type = other DNA
ttctcctggacggttctgca

SEQ ID NO: 10183 - DNA, 20 bp, synthetic construct
  misc_feature 1..20: note = chemically synthesized
  source 1..20: mol_type = other DNA
ttctgcacagaattcattca

SEQ ID NO: 10184 - DNA, 20 bp, synthetic construct
  misc_feature 1..20: note = chemically synthesized
  source 1..20: mol_type = other DNA
ctgcacagaattcattcaca

SEQ ID NO: 10185 - DNA, 20 bp, synthetic construct
  misc_feature 1..20: note = chemically synthesized
  source 1..20: mol_type = other DNA
ttcattcacagagcatgtct

SEQ ID NO: 10186 - DNA, 20 bp, synthetic construct
  misc_feature 1..20: note = chemically synthesized
  source 1..20: mol_type = other DNA
cagagcatgtcttggatata

SEQ ID NO: 10187 - DNA, 20 bp, synthetic construct
  misc_feature 1..20: note = chemically synthesized
  source 1..20: mol_type = other DNA
gtcttggatatacagctgac

SEQ ID NO: 10188 - DNA, 20 bp, synthetic construct
  misc_feature 1..20: note = chemically synthesized
  source 1..20: mol_type = other DNA
atacagctgactagatatgt

SEQ ID NO: 10189 - DNA, 20 bp, synthetic construct
  misc_feature 1..20: note = chemically synthesized
  source 1..20: mol_type = other DNA
tatgtcagttatgttccaaa

SEQ ID NO: 10190 - DNA, 20 bp, synthetic construct
  misc_feature 1..20: note = chemically synthesized
  source 1..20: mol_type = other DNA
atgtcagttatgttccaaat

SEQ ID NO: 10191 - DNA, 20 bp, synthetic construct
  misc_feature 1..20: note = chemically synthesized
  source 1..20: mol_type = other DNA
atgttccaaatgggttttca

SEQ ID NO: 10192 - DNA, 20 bp, synthetic construct
  misc_feature 1..20: note = chemically synthesized
  source 1..20: mol_type = other DNA
tgttccaaatgggttttcac

SEQ ID NO: 10193 - DNA, 20 bp, synthetic construct
  misc_feature 1..20: note = chemically synthesized
  source 1..20: mol_type = other DNA
caaatgggttttcacaggtc

SEQ ID NO: 10194 - DNA, 20 bp, synthetic construct
  misc_feature 1..20: note = chemically synthesized
  source 1..20: mol_type = other DNA
aaatgggttttcacaggtca

SEQ ID NO: 10195 - DNA, 20 bp, synthetic construct
  misc_feature 1..20: note = chemically synthesized
  source 1..20: mol_type = other DNA
tttcacaggtcaaggttctg

SEQ ID NO: 10196 - DNA, 20 bp, synthetic construct
  misc_feature 1..20: note = chemically synthesized
  source 1..20: mol_type = other DNA
ttcacaggtcaaggttctgc

SEQ ID NO: 10197 - DNA, 20 bp, synthetic construct
  misc_feature 1..20: note = chemically synthesized
  source 1..20: mol_type = other DNA
caggtcaaggttctgcaggc

SEQ ID NO: 10198 - DNA, 20 bp, synthetic construct
  misc_feature 1..20: note = chemically synthesized
  source 1..20: mol_type = other DNA
ggtcaaggttctgcaggcaa

SEQ ID NO: 10199 - DNA, 20 bp, synthetic construct
  misc_feature 1..20: note = chemically synthesized
  source 1..20: mol_type = other DNA
gcaagagcaaatactatttt

SEQ ID NO: 10200 - DNA, 20 bp, synthetic construct
  misc_feature 1..20: note = chemically synthesized
  source 1..20: mol_type = other DNA
gagcaaatactatttttaga

SEQ ID NO: 10201 - DNA, 20 bp, synthetic construct
  misc_feature 1..20: note = chemically synthesized
  source 1..20: mol_type = other DNA
agcaaatactatttttagac

SEQ ID NO: 10202 - DNA, 20 bp, synthetic construct
  misc_feature 1..20: note = chemically synthesized
  source 1..20: mol_type = other DNA
atactatttttagacaggat

SEQ ID NO: 10203 - DNA, 20 bp, synthetic construct
  misc_feature 1..20: note = chemically synthesized
  source 1..20: mol_type = other DNA
tactatttttagacaggata

SEQ ID NO: 10204 - DNA, 20 bp, synthetic construct
  misc_feature 1..20: note = chemically synthesized
  source 1..20: mol_type = other DNA
ggataaggtcaaaatgcttt

SEQ ID NO: 10205 - DNA, 20 bp, synthetic construct
  misc_feature 1..20: note = chemically synthesized
  source 1..20: mol_type = other DNA
ataaggtcaaaatgctttta

SEQ ID NO: 10206 - DNA, 20 bp, synthetic construct
  misc_feature 1..20: note = chemically synthesized
  source 1..20: mol_type = other DNA
ggtcaaaatgcttttagaga

SEQ ID NO: 10207 - DNA, 20 bp, synthetic construct
  misc_feature 1..20: note = chemically synthesized
  source 1..20: mol_type = other DNA
aaaatgcttttagagacagt

SEQ ID NO: 10208 - DNA, 20 bp, synthetic construct
  misc_feature 1..20: note = chemically synthesized
  source 1..20: mol_type = other DNA
aaatgcttttagagacagtg

SEQ ID NO: 10209 - DNA, 20 bp, synthetic construct
  misc_feature 1..20: note = chemically synthesized
  source 1..20: mol_type = other DNA
ctacaataaaacctattgat

SEQ ID NO: 10210 - DNA, 20 bp, synthetic construct
  misc_feature 1..20: note = chemically synthesized
  source 1..20: mol_type = other DNA
aaaacctattgatcagcctc

SEQ ID NO: 10211 - DNA, 20 bp, synthetic construct
  misc_feature 1..20: note = chemically synthesized
  source 1..20: mol_type = other DNA
tattgatcagcctctggaac

SEQ ID NO: 10212 - DNA, 20 bp, synthetic construct
  misc_feature 1..20: note = chemically synthesized
  source 1..20: mol_type = other DNA
agcctctggaactagtgctc

SEQ ID NO: 10213 - DNA, 20 bp, synthetic construct
  misc_feature 1..20: note = chemically synthesized
  source 1..20: mol_type = other DNA
cctctggaactagtgctcca

SEQ ID NO: 10214 - DNA, 20 bp, synthetic construct
  misc_feature 1..20: note = chemically synthesized
  source 1..20: mol_type = other DNA
tctggaactagtgctccaga

SEQ ID NO: 10215 - DNA, 20 bp, synthetic construct
  misc_feature 1..20: note = chemically synthesized
  source 1..20: mol_type = other DNA
actagtgctccagagagaca

SEQ ID NO: 10216 - DNA, 20 bp, synthetic construct
  misc_feature 1..20: note = chemically synthesized
  source 1..20: mol_type = other DNA
tagtgctccagagagacaca

SEQ ID NO: 10217 - DNA, 20 bp, synthetic construct
  misc_feature 1..20: note = chemically synthesized
  source 1..20: mol_type = other DNA
agattgaaacaaaaattgcc

SEQ ID NO: 10218 - DNA, 20 bp, synthetic construct
  misc_feature 1..20: note = chemically synthesized
  source 1..20: mol_type = other DNA
ttgcctggccgttttctctg

SEQ ID NO: 10219 - DNA, 20 bp, synthetic construct
  misc_feature 1..20: note = chemically synthesized
  source 1..20: mol_type = other DNA
cgttttctctgtagactctg

SEQ ID NO: 10220 - DNA, 20 bp, synthetic construct
  misc_feature 1..20: note = chemically synthesized
  source 1..20: mol_type = other DNA
gttttctctgtagactctgt

SEQ ID NO: 10221 - DNA, 20 bp, synthetic construct
  misc_feature 1..20: note = chemically synthesized
  source 1..20: mol_type = other DNA
tctgtagactctgtgggtaa

SEQ ID NO: 10222 - DNA, 20 bp, synthetic construct
  misc_feature 1..20: note = chemically synthesized
  source 1..20: mol_type = other DNA
ctctgtgggtaaaagcttgt

SEQ ID NO: 10223 - DNA, 20 bp, synthetic construct
  misc_feature 1..20: note = chemically synthesized
  source 1..20: mol_type = other DNA
ttgttggacttaatatcttt

SEQ ID NO: 10224 - DNA, 20 bp, synthetic construct
  misc_feature 1..20: note = chemically synthesized
  source 1..20: mol_type = other DNA
tgttggacttaatatctttc

SEQ ID NO: 10225 - DNA, 20 bp, synthetic construct
  misc_feature 1..20: note = chemically synthesized
  source 1..20: mol_type = other DNA
tatctttcaggatataaaat

SEQ ID NO: 10226 - DNA, 20 bp, synthetic construct
  misc_feature 1..20: note = chemically synthesized
  source 1..20: mol_type = other DNA
tttcaggatataaaataagt

SEQ ID NO: 10227 - DNA, 20 bp, synthetic construct
  misc_feature 1..20: note = chemically synthesized
  source 1..20: mol_type = other DNA
caggatataaaataagtaag

SEQ ID NO: 10228 - DNA, 20 bp, synthetic construct
  misc_feature 1..20: note = chemically synthesized
  source 1..20: mol_type = other DNA
aagtaagaagtaactgtgta

SEQ ID NO: 10229 - DNA, 20 bp, synthetic construct
  misc_feature 1..20: note = chemically synthesized
  source 1..20: mol_type = other DNA
taactgtgtacagattactg

SEQ ID NO: 10230 - DNA, 20 bp, synthetic construct
  misc_feature 1..20: note = chemically synthesized
  source 1..20: mol_type = other DNA
attactgaagtccatttaac

SEQ ID NO: 10231 - DNA, 20 bp, synthetic construct
  misc_feature 1..20: note = chemically synthesized
  source 1..20: mol_type = other DNA
gaagtccatttaaccagatg

SEQ ID NO: 10232 - DNA, 20 bp, synthetic construct
  misc_feature 1..20: note = chemically synthesized
  source 1..20: mol_type = other DNA
agtccatttaaccagatgca

SEQ ID NO: 10233 - DNA, 20 bp, synthetic construct
  misc_feature 1..20: note = chemically synthesized
  source 1..20: mol_type = other DNA
gtccatttaaccagatgcag

SEQ ID NO: 10234 - DNA, 20 bp, synthetic construct
  misc_feature 1..20: note = chemically synthesized
  source 1..20: mol_type = other DNA
catttaaccagatgcagagg

SEQ ID NO: 10235 - DNA, 20 bp, synthetic construct
  misc_feature 1..20: note = chemically synthesized
  source 1..20: mol_type = other DNA
atttaaccagatgcagaggc

SEQ ID NO: 10236 - DNA, 20 bp, synthetic construct
  misc_feature 1..20: note = chemically synthesized
  source 1..20: mol_type = other DNA
ccagatgcagaggcaggtca

SEQ ID NO: 10237 - DNA, 20 bp, synthetic construct
  misc_feature 1..20: note = chemically synthesized
  source 1..20: mol_type = other DNA
ggtcacagaaaatacactca

SEQ ID NO: 10238 - DNA, 20 bp, synthetic construct
  misc_feature 1..20: note = chemically synthesized
  source 1..20: mol_type = other DNA
cacagaaaatacactcatgg

SEQ ID NO: 10239 - DNA, 20 bp, synthetic construct
  misc_feature 1..20: note = chemically synthesized
  source 1..20: mol_type = other DNA
acactcatggcagaaccgta

SEQ ID NO: 10240 - DNA, 20 bp, synthetic construct
  misc_feature 1..20: note = chemically synthesized
  source 1..20: mol_type = other DNA
ctcatggcagaaccgtaaag

SEQ ID NO: 10241 - DNA, 20 bp, synthetic construct
  misc_feature 1..20: note = chemically synthesized
  source 1..20: mol_type = other DNA
tcatggcagaaccgtaaaga

SEQ ID NO: 10242 - DNA, 20 bp, synthetic construct
  misc_feature 1..20: note = chemically synthesized
  source 1..20: mol_type = other DNA
catggcagaaccgtaaagaa

SEQ ID NO: 10243 - DNA, 20 bp, synthetic construct
  misc_feature 1..20: note = chemically synthesized
  source 1..20: mol_type = other DNA
tggcagaaccgtaaagaagg

SEQ ID NO: 10244 - DNA, 20 bp, synthetic construct
  misc_feature 1..20: note = chemically synthesized
  source 1..20: mol_type = other DNA
ccgtaaagaagggagatttc

SEQ ID NO: 10245 - DNA, 20 bp, synthetic construct
  misc_feature 1..20: note = chemically synthesized
  source 1..20: mol_type = other DNA
cgtaaagaagggagatttca

SEQ ID NO: 10246 - DNA, 20 bp, synthetic construct
  misc_feature 1..20: note = chemically synthesized
  source 1..20: mol_type = other DNA
aggcaacacgtgttgcaacc

SEQ ID NO: 10247 - DNA, 20 bp, synthetic construct
  misc_feature 1..20: note = chemically synthesized
  source 1..20: mol_type = other DNA
gcaacacgtgttgcaaccta

SEQ ID NO: 10248 - DNA, 20 bp, synthetic construct
  misc_feature 1..20: note = chemically synthesized
  source 1..20: mol_type = other DNA
cacgtgttgcaacctagaga

SEQ ID NO: 10249 - DNA, 20 bp, synthetic construct
  misc_feature 1..20: note = chemically synthesized
  source 1..20: mol_type = other DNA
cctagagaaagaataaacac

SEQ ID NO: 10250 - DNA, 20 bp, synthetic construct
  misc_feature 1..20: note = chemically synthesized
  source 1..20: mol_type = other DNA
aaacaccagtcttctcaact

SEQ ID NO: 10251 - DNA, 20 bp, synthetic construct
  misc_feature 1..20: note = chemically synthesized
  source 1..20: mol_type = other DNA
aacaccagtcttctcaactc

SEQ ID NO: 10252 - DNA, 20 bp, synthetic construct
  misc_feature 1..20: note = chemically synthesized
  source 1..20: mol_type = other DNA
acaccagtcttctcaactca

SEQ ID NO: 10253 - DNA, 20 bp, synthetic construct
  misc_feature 1..20: note = chemically synthesized
  source 1..20: mol_type = other DNA
caccagtcttctcaactcag

SEQ ID NO: 10254 - DNA, 20 bp, synthetic construct
  misc_feature 1..20: note = chemically synthesized
  source 1..20: mol_type = other DNA
ccagtcttctcaactcaggg

SEQ ID NO: 10255 - DNA, 20 bp, synthetic construct
  misc_feature 1..20: note = chemically synthesized
  source 1..20: mol_type = other DNA
cagtcttctcaactcagggg

SEQ ID NO: 10256 - DNA, 20 bp, synthetic construct
  misc_feature 1..20: note = chemically synthesized
  source 1..20: mol_type = other DNA
ctcaactcaggggaggcaca

SEQ ID NO: 10257 - DNA, 20 bp, synthetic construct
  misc_feature 1..20: note = chemically synthesized
  source 1..20: mol_type = other DNA
tcaactcaggggaggcacaa

SEQ ID NO: 10258 - DNA, 20 bp, synthetic construct
  misc_feature 1..20: note = chemically synthesized
  source 1..20: mol_type = other DNA
ctcaggggaggcacaaagga

SEQ ID NO: 10259 - DNA, 20 bp, synthetic construct
  misc_feature 1..20: note = chemically synthesized
  source 1..20: mol_type = other DNA
acaaaggacagcctgccatc

SEQ ID NO: 10260 - DNA, 20 bp, synthetic construct
  misc_feature 1..20: note = chemically synthesized
  source 1..20: mol_type = other DNA
caaaggacagcctgccatcc

SEQ ID NO: 10261 - DNA, 20 bp, synthetic construct
  misc_feature 1..20: note = chemically synthesized
  source 1..20: mol_type = other DNA
tgccatccaggattcctgct

SEQ ID NO: 10262 - DNA, 20 bp, synthetic construct
  misc_feature 1..20: note = chemically synthesized
  source 1..20: mol_type = other DNA
gccatccaggattcctgctt

SEQ ID NO: 10263 - DNA, 20 bp, synthetic construct
  misc_feature 1..20: note = chemically synthesized
  source 1..20: mol_type = other DNA
tgccactatgatcctcaatc

SEQ ID NO: 10264 - DNA, 20 bp, synthetic construct
  misc_feature 1..20: note = chemically synthesized
  source 1..20: mol_type = other DNA
atccagcgctatgtgaacaa

SEQ ID NO: 10265 - DNA, 20 bp, synthetic construct
  misc_feature 1..20: note = chemically synthesized
  source 1..20: mol_type = other DNA
ctatgtgaacaacagacttt

SEQ ID NO: 10266 - DNA, 20 bp, synthetic construct
  misc_feature 1..20: note = chemically synthesized
  source 1..20: mol_type = other DNA
acaacagactttcagataaa

SEQ ID NO: 10267 - DNA, 20 bp, synthetic construct
  misc_feature 1..20: note = chemically synthesized
  source 1..20: mol_type = other DNA
agactttcagataaatagta

SEQ ID NO: 10268 - DNA, 20 bp, synthetic construct
  misc_feature 1..20: note = chemically synthesized
  source 1..20: mol_type = other DNA
actttcagataaatagtatg

SEQ ID NO: 10269 - DNA, 20 bp, synthetic construct
  misc_feature 1..20: note = chemically synthesized
  source 1..20: mol_type = other DNA
agtatggagataatttgctt

SEQ ID NO: 10270 - DNA, 20 bp, synthetic construct
  misc_feature 1..20: note = chemically synthesized
  source 1..20: mol_type = other DNA
tggagataatttgcttaagt

SEQ ID NO: 10271 - DNA, 20 bp, synthetic construct
  misc_feature 1..20: note = chemically synthesized
  source 1..20: mol_type = other DNA
ttaagtcagattttgatgaa

SEQ ID NO: 10272 - DNA, 20 bp, synthetic construct
  misc_feature 1..20: note = chemically synthesized
  source 1..20: mol_type = other DNA
agtcagattttgatgaaaag

SEQ ID NO: 10273 - DNA, 20 bp, synthetic construct
  misc_feature 1..20: note = chemically synthesized
  source 1..20: mol_type = other DNA
gatgaaaagtggtttctaca

SEQ ID NO: 10274 - DNA, 20 bp, synthetic construct
  misc_feature 1..20: note = chemically synthesized
  source 1..20: mol_type = other DNA
aaaagtggtttctacatgga

SEQ ID NO: 10275 - DNA, 20 bp, synthetic construct
  misc_feature 1..20: note = chemically synthesized
  source 1..20: mol_type = other DNA
aaacttctatattgatttga

SEQ ID NO: 10276 - DNA, 20 bp, synthetic construct
  misc_feature 1..20: note = chemically synthesized
  source 1..20: mol_type = other DNA
atattgatttgatggaatca

SEQ ID NO: 10277 - DNA, 20 bp, synthetic construct
  misc_feature 1..20: note = chemically synthesized
  source 1..20: mol_type = other DNA
tggaatcatggtgaattcta

SEQ ID NO: 10278 - DNA, 20 bp, synthetic construct
  misc_feature 1..20: note = chemically synthesized
  source 1..20: mol_type = other DNA
tctccctttctacacacaca

SEQ ID NO: 10279 - DNA, 20 bp, synthetic construct
  misc_feature 1..20: note = chemically synthesized
  source 1..20: mol_type = other DNA
ctccctttctacacacacac

SEQ ID NO: 10280 - DNA, 20 bp, synthetic construct
  misc_feature 1..20: note = chemically synthesized
  source 1..20: mol_type = other DNA
catatacgtatgtatatatg

SEQ ID NO: 10281 - DNA, 20 bp, synthetic construct
  misc_feature 1..20: note = chemically synthesized
  source 1..20: mol_type = other DNA
tacatatgtatgtgtgtata

SEQ ID NO: 10282 - DNA, 20 bp, synthetic construct
  misc_feature 1..20: note = chemically synthesized
  source 1..20: mol_type = other DNA
tatgctttatcttatgatga

SEQ ID NO: 10283 - DNA, 20 bp, synthetic construct
  misc_feature 1..20: note = chemically synthesized
  source 1..20: mol_type = other DNA
gatgacagtgttgatgtgtt

SEQ ID NO: 10284 - DNA, 20 bp, synthetic construct
  misc_feature 1..20: note = chemically synthesized
  source 1..20: mol_type = other DNA
atgacagtgttgatgtgttt

SEQ ID NO: 10285 - DNA, 20 bp, synthetic construct
  misc_feature 1..20: note = chemically synthesized
  source 1..20: mol_type = other DNA
tgacagtgttgatgtgtttg

SEQ ID NO: 10286 - DNA, 20 bp, synthetic construct
  misc_feature 1..20: note = chemically synthesized
  source 1..20: mol_type = other DNA
ggatttttttttttttcaaa

SEQ ID NO: 10287 - DNA, 20 bp, synthetic construct
  misc_feature 1..20: note = chemically synthesized
  source 1..20: mol_type = other DNA
atttttttttttttcaaaaa

SEQ ID NO: 10288 - DNA, 20 bp, synthetic construct
  misc_feature 1..20: note = chemically synthesized
  source 1..20: mol_type = other DNA
ttttttcaaaaagagttaat

SEQ ID NO: 10289 - DNA, 20 bp, synthetic construct
  misc_feature 1..20: note = chemically synthesized
  source 1..20: mol_type = other DNA
aagagttaataagcctttta

SEQ ID NO: 10290 - DNA, 20 bp, synthetic construct
  misc_feature 1..20: note = chemically synthesized
  source 1..20: mol_type = other DNA
agagttaataagccttttat

SEQ ID NO: 10291 - DNA, 20 bp, synthetic construct
  misc_feature 1..20: note = chemically synthesized
  source 1..20: mol_type = other DNA
cttttataggtgtaccacac

SEQ ID NO: 10292 - DNA, 20 bp, synthetic construct
  misc_feature 1..20: note = chemically synthesized
  source 1..20: mol_type = other DNA
aggtgtaccacacaagactc

SEQ ID NO: 10293 - DNA, 20 bp, synthetic construct
  misc_feature 1..20: note = chemically synthesized
  source 1..20: mol_type = other DNA
gtaccacacaagactccagt

SEQ ID NO: 10294 - DNA, 20 bp, synthetic construct
  misc_feature 1..20: note = chemically synthesized
  source 1..20: mol_type = other DNA
taagcaaaatcattcattgc

SEQ ID NO: 10295 - DNA, 20 bp, synthetic construct
  misc_feature 1..20: note = chemically synthesized
  source 1..20: mol_type = other DNA
aagcaaaatcattcattgcc

SEQ ID NO: 10296 - DNA, 20 bp, synthetic construct
  misc_feature 1..20: note = chemically synthesized
  source 1..20: mol_type = other DNA
ttcattgccaggcaaaactt

SEQ ID NO: 10297 - DNA, 20 bp, synthetic construct
  misc_feature 1..20: note = chemically synthesized
  source 1..20: mol_type = other DNA
caaaacttgagaaatacatt

SEQ ID NO: 10298 - DNA, 20 bp, synthetic construct
  misc_feature 1..20: note = chemically synthesized
  source 1..20: mol_type = other DNA
aatacatttagaaatcatac

SEQ ID NO: 10299 - DNA, 20 bp, synthetic construct
  misc_feature 1..20: note = chemically synthesized
  source 1..20: mol_type = other DNA
ttagaaatcatacgagcaca

SEQ ID NO: 10300 - DNA, 20 bp, synthetic construct
  misc_feature 1..20: note = chemically synthesized
  source 1..20: mol_type = other DNA
tagaaatcatacgagcacac

SEQ ID NO: 10301 - DNA, 20 bp, synthetic construct
  misc_feature 1..20: note = chemically synthesized
  source 1..20: mol_type = other DNA
gaaatcatacgagcacacag

SEQ ID NO: 10302 - DNA, 20 bp, synthetic construct
  misc_feature 1..20: note = chemically synthesized
  source 1..20: mol_type = other DNA
gagcacacaggagctcaatc

SEQ ID NO: 10303 - DNA, 20 bp, synthetic construct
  misc_feature 1..20: note = chemically synthesized
  source 1..20: mol_type = other DNA
aatcaagtaaatgaatcacc

SEQ ID NO: 10304 - DNA, 20 bp, synthetic construct
  misc_feature 1..20: note = chemically synthesized
  source 1..20: mol_type = other DNA
atcaagtaaatgaatcacca

SEQ ID NO: 10305 - DNA, 20 bp, synthetic construct
  misc_feature 1..20: note = chemically synthesized
  source 1..20: mol_type = other DNA
gtaaatgaatcaccaaggca

SEQ ID NO: 10306 - DNA, 20 bp, synthetic construct
  misc_feature 1..20: note = chemically synthesized
  source 1..20: mol_type = other DNA
atgaatcaccaaggcacaga

SEQ ID NO: 10307 - DNA, 20 bp, synthetic construct
  misc_feature 1..20: note = chemically synthesized
  source 1..20: mol_type = other DNA
accaaggcacagaaagtcac

SEQ ID NO: 10308 - DNA, 20 bp, synthetic construct
  misc_feature 1..20: note = chemically synthesized
  source 1..20: mol_type = other DNA
tcactggaaaattacttaac

SEQ ID NO: 10309 - DNA, 20 bp, synthetic construct
  misc_feature 1..20: note = chemically synthesized
  source 1..20: mol_type = other DNA
cttaactagcccaaacgttc

SEQ ID NO: 10310 - DNA, 20 bp, synthetic construct
  misc_feature 1..20: note = chemically synthesized
  source 1..20: mol_type = other DNA
caaacgttcaagaattgacc

SEQ ID NO: 10311 - DNA, 20 bp, synthetic construct
  misc_feature 1..20: note = chemically synthesized
  source 1..20: mol_type = other DNA
aaacgttcaagaattgacca

SEQ ID NO: 10312 - DNA, 20 bp, synthetic construct
  misc_feature 1..20: note = chemically synthesized
  source 1..20: mol_type = other DNA
tcaagaattgaccaaggttt

SEQ ID NO: 10313 - DNA, 20 bp, synthetic construct
  misc_feature 1..20: note = chemically synthesized
  source 1..20: mol_type = other DNA
agaattgaccaaggtttaag

SEQ ID NO: 10314 - DNA, 20 bp, synthetic construct
  misc_feature 1..20: note = chemically synthesized
  source 1..20: mol_type = other DNA
aaaccctaaataatttattt

SEQ ID NO: 10315 - DNA, 20 bp, synthetic construct
  misc_feature 1..20: note = chemically synthesized
  source 1..20: mol_type = other DNA
aataatttatttaagccaaa

SEQ ID NO: 10316 - DNA, 20 bp, synthetic construct
  misc_feature 1..20: note = chemically synthesized
  source 1..20: mol_type = other DNA
ataatttatttaagccaaat

SEQ ID NO: 10317 - DNA, 20 bp, synthetic construct
  misc_feature 1..20: note = chemically synthesized
  source 1..20: mol_type = other DNA
aatttatttaagccaaatag

SEQ ID NO: 10318 - DNA, 20 bp, synthetic construct
  misc_feature 1..20: note = chemically synthesized
  source 1..20: mol_type = other DNA
ttaagccaaataggagcttt

SEQ ID NO: 10319 - DNA, 20 bp, synthetic construct
  misc_feature 1..20: note = chemically synthesized
  source 1..20: mol_type = other DNA
ccaaataggagctttaagca

SEQ ID NO: 10320 - DNA, 20 bp, synthetic construct
  misc_feature 1..20: note = chemically synthesized
  source 1..20: mol_type = other DNA
aagcacagacattaatgtaa

SEQ ID NO: 10321 - DNA, 20 bp, synthetic construct
  misc_feature 1..20: note = chemically synthesized
  source 1..20: mol_type = other DNA
gactatcccatcttaaactt

SEQ ID NO: 10322 - DNA, 20 bp, synthetic construct
  misc_feature 1..20: note = chemically synthesized
  source 1..20: mol_type = other DNA
atcccatcttaaacttcagc

SEQ ID NO: 10323 - DNA, 20 bp, synthetic construct
  misc_feature 1..20: note = chemically synthesized
  source 1..20: mol_type = other DNA
cccatcttaaacttcagcca

SEQ ID NO: 10324 - DNA, 20 bp, synthetic construct
  misc_feature 1..20: note = chemically synthesized
  source 1..20: mol_type = other DNA
gccagagatctaaaactttg

SEQ ID NO: 10325 - DNA, 20 bp, synthetic construct
  misc_feature 1..20: note = chemically synthesized
  source 1..20: mol_type = other DNA
cataaatacctctccattat

SEQ ID NO: 10326 - DNA, 20 bp, synthetic construct
  misc_feature 1..20: note = chemically synthesized
  source 1..20: mol_type = other DNA
ataaatacctctccattatc

SEQ ID NO: 10327 - DNA, 20 bp, synthetic construct
  misc_feature 1..20: note = chemically synthesized
  source 1..20: mol_type = other DNA
taaatacctctccattatca

SEQ ID NO: 10328 - DNA, 20 bp, synthetic construct
  misc_feature 1..20: note = chemically synthesized
  source 1..20: mol_type = other DNA
aaatacctctccattatcag

SEQ ID NO: 10329 - DNA, 20 bp, synthetic construct
  misc_feature 1..20: note = chemically synthesized
  source 1..20: mol_type = other DNA
tcaggggtgctttattgttt

SEQ ID NO: 10330 - DNA, 20 bp, synthetic construct
  misc_feature 1..20: note = chemically synthesized
  source 1..20: mol_type = other DNA
aggggtgctttattgtttga

SEQ ID NO: 10331 - DNA, 20 bp, synthetic construct
  misc_feature 1..20: note = chemically synthesized
  source 1..20: mol_type = other DNA
ctttattgtttgagagactc

SEQ ID NO: 10332 - DNA, 20 bp, synthetic construct
  misc_feature 1..20: note = chemically synthesized
  source 1..20: mol_type = other DNA
gtttgagagactccggacca

SEQ ID NO: 10333 - DNA, 20 bp, synthetic construct
  misc_feature 1..20: note = chemically synthesized
  source 1..20: mol_type = other DNA
tttgagagactccggaccac

SEQ ID NO: 10334 - DNA, 20 bp, synthetic construct
  misc_feature 1..20: note = chemically synthesized
  source 1..20: mol_type = other DNA
agactccggaccacaggaac

SEQ ID NO: 10335 - DNA, 20 bp, synthetic construct
  misc_feature 1..20: note = chemically synthesized
  source 1..20: mol_type = other DNA
acaggaactagtgtgaaaac

SEQ ID NO: 10336 - DNA, 20 bp, synthetic construct
  misc_feature 1..20: note = chemically synthesized
  source 1..20: mol_type = other DNA
aggaactagtgtgaaaactg

SEQ ID NO: 10337 - DNA, 20 bp, synthetic construct
  misc_feature 1..20: note = chemically synthesized
  source 1..20: mol_type = other DNA
ggaactagtgtgaaaactgg

SEQ ID NO: 10338 - DNA, 20 bp, synthetic construct
  misc_feature 1..20: note = chemically synthesized
  source 1..20: mol_type = other DNA
gaactagtgtgaaaactgga

SEQ ID NO: 10339 - DNA, 20 bp, synthetic construct
  misc_feature 1..20: note = chemically synthesized
  source 1..20: mol_type = other DNA
ttcgcaaacaaaatatgcca

SEQ ID NO: 10340 - DNA, 20 bp, synthetic construct
  misc_feature 1..20: note = chemically synthesized
  source 1..20: mol_type = other DNA
ctatatatcacattgtgaca

SEQ ID NO: 10341 - DNA, 20 bp, synthetic construct
  misc_feature 1..20: note = chemically synthesized
  source 1..20: mol_type = other DNA
tgtgacacagctgaccgcat

SEQ ID NO: 10342 - DNA, 20 bp, synthetic construct
  misc_feature 1..20: note = chemically synthesized
  source 1..20: mol_type = other DNA
acacagctgaccgcattagt

SEQ ID NO: 10343 - DNA, 20 bp, synthetic construct
  misc_feature 1..20: note = chemically synthesized
  source 1..20: mol_type = other DNA
gctgaccgcattagtgagcc

SEQ ID NO: 10344 - DNA, 20 bp, synthetic construct
  misc_feature 1..20: note = chemically synthesized
  source 1..20: mol_type = other DNA
ttagtgagccaagactgtcc

SEQ ID NO: 10345 - DNA, 20 bp, synthetic construct
  misc_feature 1..20: note = chemically synthesized
  source 1..20: mol_type = other DNA
gtgagccaagactgtcctag

SEQ ID NO: 10346 - DNA, 20 bp, synthetic construct
  misc_feature 1..20: note = chemically synthesized
  source 1..20: mol_type = other DNA
agccaagactgtcctagcgg

SEQ ID NO: 10347 - DNA, 20 bp, synthetic construct
  misc_feature 1..20: note = chemically synthesized
  source 1..20: mol_type = other DNA
atcatgcattaacaatacaa

SEQ ID NO: 10348 - DNA, 20 bp, synthetic construct
  misc_feature 1..20: note = chemically synthesized
  source 1..20: mol_type = other DNA
atacatttgcacaacacaat

SEQ ID NO: 10349 - DNA, 20 bp, synthetic construct
  misc_feature 1..20: note = chemically synthesized
  source 1..20: mol_type = other DNA
acatttgcacaacacaataa

SEQ ID NO: 10350 - DNA, 20 bp, synthetic construct
  misc_feature 1..20: note = chemically synthesized
  source 1..20: mol_type = other DNA
catttgcacaacacaataag

SEQ ID NO: 10351 - DNA, 20 bp, synthetic construct
  misc_feature 1..20: note = chemically synthesized
  source 1..20: mol_type = other DNA
ttgcacaacacaataagagg

SEQ ID NO: 10352 - DNA, 20 bp, synthetic construct
  misc_feature 1..20: note = chemically synthesized
  source 1..20: mol_type = other DNA
tgcacaacacaataagaggt

SEQ ID NO: 10353 - DNA, 20 bp, synthetic construct
  misc_feature 1..20: note = chemically synthesized
  source 1..20: mol_type = other DNA
gcacaacacaataagaggtg

SEQ ID NO: 10354 - DNA, 20 bp, synthetic construct
  misc_feature 1..20: note = chemically synthesized
  source 1..20: mol_type = other DNA
cacaacacaataagaggtgg

SEQ ID NO: 10355 - DNA, 20 bp, synthetic construct
  misc_feature 1..20: note = chemically synthesized
  source 1..20: mol_type = other DNA
caacacaataagaggtgggg

SEQ ID NO: 10356 - DNA, 20 bp, synthetic construct
  misc_feature 1..20: note = chemically synthesized
  source 1..20: mol_type = other DNA
cacaataagaggtgggggag

SEQ ID NO: 10357 - DNA, 20 bp, synthetic construct
  misc_feature 1..20: note = chemically synthesized
  source 1..20: mol_type = other DNA
caataagaggtgggggagaa

SEQ ID NO: 10358 - DNA, 20 bp, synthetic construct
  misc_feature 1..20: note = chemically synthesized
  source 1..20: mol_type = other DNA
ataagaggtgggggagaaga

SEQ ID NO: 10359 - DNA, 20 bp, synthetic construct
  misc_feature 1..20: note = chemically synthesized
  source 1..20: mol_type = other DNA
tgggggagaagagagaacat

SEQ ID NO: 10360 - DNA, 20 bp, synthetic construct
  misc_feature 1..20: note = chemically synthesized
  source 1..20: mol_type = other DNA
gggggagaagagagaacatt

SEQ ID NO: 10361 - DNA, 20 bp, synthetic construct
  misc_feature 1..20: note = chemically synthesized
  source 1..20: mol_type = other DNA
ataattttgtcacctatctc

SEQ ID NO: 10362 - DNA, 20 bp, synthetic construct
  misc_feature 1..20: note = chemically synthesized
  source 1..20: mol_type = other DNA
atgttatcatgcttttattt

SEQ ID NO: 10363 - DNA, 20 bp, synthetic construct
  misc_feature 1..20: note = chemically synthesized
  source 1..20: mol_type = other DNA
tgttatcatgcttttatttc

SEQ ID NO: 10364 - DNA, 20 bp, synthetic construct
  misc_feature 1..20: note = chemically synthesized
  source 1..20: mol_type = other DNA
gcttttatttcaggtaataa

SEQ ID NO: 10365 - DNA, 20 bp, synthetic construct
  misc_feature 1..20: note = chemically synthesized
  source 1..20: mol_type = other DNA
tttatttcaggtaataatgg

SEQ ID NO: 10366 - DNA, 20 bp, synthetic construct
  misc_feature 1..20: note = chemically synthesized
  source 1..20: mol_type = other DNA
ttatttcaggtaataatgga

SEQ ID NO: 10367 - DNA, 20 bp, synthetic construct
  misc_feature 1..20: note = chemically synthesized
  source 1..20: mol_type = other DNA
tatttcaggtaataatggaa

SEQ ID NO: 10368 - DNA, 20 bp, synthetic construct
  misc_feature 1..20: note = chemically synthesized
  source 1..20: mol_type = other DNA
atttcaggtaataatggaag

SEQ ID NO: 10369 - DNA, 20 bp, synthetic construct
  misc_feature 1..20: note = chemically synthesized
  source 1..20: mol_type = other DNA
caggtaataatggaagggga

SEQ ID NO: 10370 - DNA, 20 bp, synthetic construct
  misc_feature 1..20: note = chemically synthesized
  source 1..20: mol_type = other DNA
gtaataatggaaggggaaag

SEQ ID NO: 10371 - DNA, 20 bp, synthetic construct
  misc_feature 1..20: note = chemically synthesized
  source 1..20: mol_type = other DNA
aataatggaaggggaaagta

SEQ ID NO: 10372 - DNA, 20 bp, synthetic construct
  misc_feature 1..20: note = chemically synthesized
  source 1..20: mol_type = other DNA
gaaggggaaagtagagcctc

SEQ ID NO: 10373 - DNA, 20 bp, synthetic construct
  misc_feature 1..20: note = chemically synthesized
  source 1..20: mol_type = other DNA
aaggggaaagtagagcctct

SEQ ID NO: 10374 - DNA, 20 bp, synthetic construct
  misc_feature 1..20: note = chemically synthesized
  source 1..20: mol_type = other DNA
aggggaaagtagagcctctg

SEQ ID NO: 10375 - DNA, 20 bp, synthetic construct
  misc_feature 1..20: note = chemically synthesized
  source 1..20: mol_type = other DNA
ggggaaagtagagcctctgg

SEQ ID NO: 10376 - DNA, 20 bp, synthetic construct
  misc_feature 1..20: note = chemically synthesized
  source 1..20: mol_type = other DNA
gggaaagtagagcctctggg

SEQ ID NO: 10377 - DNA, 20 bp, synthetic construct
  misc_feature 1..20: note = chemically synthesized
  source 1..20: mol_type = other DNA
ctggggggctgccattcatt

SEQ ID NO: 10378 - DNA, 20 bp, synthetic construct
  misc_feature 1..20: note = chemically synthesized
  source 1..20: mol_type = other DNA
ttcggcctgttatttgcttt

SEQ ID NO: 10379 - DNA, 20 bp, synthetic construct
  misc_feature 1..20: note = chemically synthesized
  source 1..20: mol_type = other DNA
tcggcctgttatttgctttt

SEQ ID NO: 10380 - DNA, 20 bp, synthetic construct
  misc_feature 1..20: note = chemically synthesized
  source 1..20: mol_type = other DNA
cctgttatttgcttttgggt

SEQ ID NO: 10381 - DNA, 20 bp, synthetic construct
  misc_feature 1..20: note = chemically synthesized
  source 1..20: mol_type = other DNA
ctgttatttgcttttgggtt

SEQ ID NO: 10382 - DNA, 20 bp, synthetic construct
  misc_feature 1..20: note = chemically synthesized
  source 1..20: mol_type = other DNA
tatttgcttttgggttgggt

SEQ ID NO: 10383 - DNA, 20 bp, synthetic construct
  misc_feature 1..20: note = chemically synthesized
  source 1..20: mol_type = other DNA
atttgcttttgggttgggtt

SEQ ID NO: 10384 - DNA, 20 bp, synthetic construct
  misc_feature 1..20: note = chemically synthesized
  source 1..20: mol_type = other DNA
tttgcttttgggttgggtta

SEQ ID NO: 10385 - DNA, 20 bp, synthetic construct
  misc_feature 1..20: note = chemically synthesized
  source 1..20: mol_type = other DNA
tttcttttttcttgtttttt

SEQ ID NO: 10386 - DNA, 20 bp, synthetic construct
  misc_feature 1..20: note = chemically synthesized
  source 1..20: mol_type = other DNA
ttaagattttattttgttac

SEQ ID NO: 10387 - DNA, 20 bp, synthetic construct
  misc_feature 1..20: note = chemically synthesized
  source 1..20: mol_type = other DNA
aagattttattttgttacca

SEQ ID NO: 10388 - DNA, 20 bp, synthetic construct
  misc_feature 1..20: note = chemically synthesized
  source 1..20: mol_type = other DNA
ttttattttgttaccagaga

SEQ ID NO: 10389 - DNA, 20 bp, synthetic construct
  misc_feature 1..20: note = chemically synthesized
  source 1..20: mol_type = other DNA
tattttgttaccagagatag

SEQ ID NO: 10390 - DNA, 20 bp, synthetic construct
  misc_feature 1..20: note = chemically synthesized
  source 1..20: mol_type = other DNA
ttttgttaccagagatagaa

SEQ ID NO: 10391 - DNA, 20 bp, synthetic construct
  misc_feature 1..20: note = chemically synthesized
  source 1..20: mol_type = other DNA
gatagaagagcatgcaaaat

SEQ ID NO: 10392 - DNA, 20 bp, synthetic construct
  misc_feature 1..20: note = chemically synthesized
  source 1..20: mol_type = other DNA
agagcatgcaaaatcagaaa

SEQ ID NO: 10393 - DNA, 20 bp, synthetic construct
  misc_feature 1..20: note = chemically synthesized
  source 1..20: mol_type = other DNA
aatcagaaacagctgattac

SEQ ID NO: 10394 - DNA, 20 bp, synthetic construct
  misc_feature 1..20: note = chemically synthesized
  source 1..20: mol_type = other DNA
gctgattaccagtgccctta

SEQ ID NO: 10395 - DNA, 20 bp, synthetic construct
  misc_feature 1..20: note = chemically synthesized
  source 1..20: mol_type = other DNA
tgattaccagtgcccttaca

SEQ ID NO: 10396 - DNA, 20 bp, synthetic construct
  misc_feature 1..20: note = chemically synthesized
  source 1..20: mol_type = other DNA
ccccaaaacattataaatta

SEQ ID NO: 10397 - DNA, 20 bp, synthetic construct
  misc_feature 1..20: note = chemically synthesized
  source 1..20: mol_type = other DNA
ccaaaacattataaattaaa

SEQ ID NO: 10398 - DNA, 20 bp, synthetic construct
  misc_feature 1..20: note = chemically synthesized
  source 1..20: mol_type = other DNA
caaaacattataaattaaag

SEQ ID NO: 10399 - DNA, 20 bp, synthetic construct
  misc_feature 1..20: note = chemically synthesized
  source 1..20: mol_type = other DNA
aacattataaattaaagagg

SEQ ID NO: 10400 - DNA, 20 bp, synthetic construct
  misc_feature 1..20: note = chemically synthesized
  source 1..20: mol_type = other DNA
aataaattacctttttattg

SEQ ID NO: 10401 - DNA, 20 bp, synthetic construct
  misc_feature 1..20: note = chemically synthesized
  source 1..20: mol_type = other DNA
ttacctttttattgaagcta

SEQ ID NO: 10402 - DNA, 20 bp, synthetic construct
  misc_feature 1..20: note = chemically synthesized
  source 1..20: mol_type = other DNA
ttattgaagctatagatctc

SEQ ID NO: 10403 - DNA, 20 bp, synthetic construct
  misc_feature 1..20: note = chemically synthesized
  source 1..20: mol_type = other DNA
attgaagctatagatctcaa

SEQ ID NO: 10404 - DNA, 20 bp, synthetic construct
  misc_feature 1..20: note = chemically synthesized
  source 1..20: mol_type = other DNA
caagagtgcctgtgtcctac

SEQ ID NO: 10405 - DNA, 20 bp, synthetic construct
  misc_feature 1..20: note = chemically synthesized
  source 1..20: mol_type = other DNA
aagagtgcctgtgtcctaca

SEQ ID NO: 10406 - DNA, 20 bp, synthetic construct
  misc_feature 1..20: note = chemically synthesized
  source 1..20: mol_type = other DNA
attcatttgccccttactct

SEQ ID NO: 10407 - DNA, 20 bp, synthetic construct
  misc_feature 1..20: note = chemically synthesized
  source 1..20: mol_type = other DNA
tgccccttactctgagcaca

SEQ ID NO: 10408 - DNA, 20 bp, synthetic construct
  misc_feature 1..20: note = chemically synthesized
  source 1..20: mol_type = other DNA
gccccttactctgagcacat

SEQ ID NO: 10409 - DNA, 20 bp, synthetic construct
  misc_feature 1..20: note = chemically synthesized
  source 1..20: mol_type = other DNA
ctgagcacatgggataataa

SEQ ID NO: 10410 - DNA, 20 bp, synthetic construct
  misc_feature 1..20: note = chemically synthesized
  source 1..20: mol_type = other DNA
gcacatgggataataaaaga

SEQ ID NO: 10411 - DNA, 20 bp, synthetic construct
  misc_feature 1..20: note = chemically synthesized
  source 1..20: mol_type = other DNA
gggataataaaagaaagttt

SEQ ID NO: 10412 - DNA, 20 bp, synthetic construct
  misc_feature 1..20: note = chemically synthesized
  source 1..20: mol_type = other DNA
ttttagatcatcattatcca

SEQ ID NO: 10413 - DNA, 20 bp, synthetic construct
  misc_feature 1..20: note = chemically synthesized
  source 1..20: mol_type = other DNA
tttagatcatcattatccaa

SEQ ID NO: 10414 - DNA, 20 bp, synthetic construct
  misc_feature 1..20: note = chemically synthesized
  source 1..20: mol_type = other DNA
taactttgaatgcccttttt

SEQ ID NO: 10415 - DNA, 20 bp, synthetic construct
  misc_feature 1..20: note = chemically synthesized
  source 1..20: mol_type = other DNA
cattcaatgccacatataaa

SEQ ID NO: 10416 - DNA, 20 bp, synthetic construct
  misc_feature 1..20: note = chemically synthesized
  source 1..20: mol_type = other DNA
cacatataaatggtatttgc

SEQ ID NO: 10417 - DNA, 20 bp, synthetic construct
  misc_feature 1..20: note = chemically synthesized
  source 1..20: mol_type = other DNA
tataaatggtatttgctgga

SEQ ID NO: 10418 - DNA, 20 bp, synthetic construct
  misc_feature 1..20: note = chemically synthesized
  source 1..20: mol_type = other DNA
atggtatttgctggacagtg

SEQ ID NO: 10419 - DNA, 20 bp, synthetic construct
  misc_feature 1..20: note = chemically synthesized
  source 1..20: mol_type = other DNA
ttgctggacagtgtggaaaa

SEQ ID NO: 10420 - DNA, 20 bp, synthetic construct
  misc_feature 1..20: note = chemically synthesized
  source 1..20: mol_type = other DNA
aacagaaacatccgtgctaa

SEQ ID NO: 10421 - DNA, 20 bp, synthetic construct
  misc_feature 1..20: note = chemically synthesized
  source 1..20: mol_type = other DNA
acatccgtgctaaaagccaa

SEQ ID NO: 10422 - DNA, 20 bp, synthetic construct
  misc_feature 1..20: note = chemically synthesized
  source 1..20: mol_type = other DNA
aaaagccaatggtaaacacc

SEQ ID NO: 10423 - DNA, 20 bp, synthetic construct
  misc_feature 1..20: note = chemically synthesized
  source 1..20: mol_type = other DNA
taaacaccaagtttaaaaaa

SEQ ID NO: 10424 - DNA, 20 bp, synthetic construct
  misc_feature 1..20: note = chemically synthesized
  source 1..20: mol_type = other DNA
agtttaaaaaatggattgca

SEQ ID NO: 10425 - DNA, 20 bp, synthetic construct
  misc_feature 1..20: note = chemically synthesized
  source 1..20: mol_type = other DNA
attgcaaagatcgcatgtcc

SEQ ID NO: 10426 - DNA, 20 bp, synthetic construct
  misc_feature 1..20: note = chemically synthesized
  source 1..20: mol_type = other DNA
aaagatcgcatgtcccagaa

SEQ ID NO: 10427 - DNA, 20 bp, synthetic construct
  misc_feature 1..20: note = chemically synthesized
  source 1..20: mol_type = other DNA
aagatcgcatgtcccagaac

SEQ ID NO: 10428 - DNA, 20 bp, synthetic construct
  misc_feature 1..20: note = chemically synthesized
  source 1..20: mol_type = other DNA
acctacatgatgaataaaaa

SEQ ID NO: 10429 - DNA, 20 bp, synthetic construct
  misc_feature 1..20: note = chemically synthesized
  source 1..20: mol_type = other DNA
tatgctgtcttcaacactaa

SEQ ID NO: 10430 - DNA, 20 bp, synthetic construct
  misc_feature 1..20: note = chemically synthesized
  source 1..20: mol_type = other DNA
tgctgtcttcaacactaaca

SEQ ID NO: 10431 - DNA, 20 bp, synthetic construct
  misc_feature 1..20: note = chemically synthesized
  source 1..20: mol_type = other DNA
gctgtcttcaacactaacag

SEQ ID NO: 10432 - DNA, 20 bp, synthetic construct
  misc_feature 1..20: note = chemically synthesized
  source 1..20: mol_type = other DNA
ctgtcttcaacactaacaga

SEQ ID NO: 10433 - DNA, 20 bp, synthetic construct
  misc_feature 1..20: note = chemically synthesized
  source 1..20: mol_type = other DNA
gtcttcaacactaacagagg

SEQ ID NO: 10434 - DNA, 20 bp, synthetic construct
  misc_feature 1..20: note = chemically synthesized
  source 1..20: mol_type = other DNA
cttcaacactaacagaggga

SEQ ID NO: 10435 - DNA, 20 bp, synthetic construct
  misc_feature 1..20: note = chemically synthesized
  source 1..20: mol_type = other DNA
ttcttctaaacatgttgcat

SEQ ID NO: 10436 - DNA, 20 bp, synthetic construct
  misc_feature 1..20: note = chemically synthesized
  source 1..20: mol_type = other DNA
ttgcatcggatgcctttaac

SEQ ID NO: 10437 - DNA, 20 bp, synthetic construct
  misc_feature 1..20: note = chemically synthesized
  source 1..20: mol_type = other DNA
caagcaaaaattcctaactc

SEQ ID NO: 10438 - DNA, 20 bp, synthetic construct
  misc_feature 1..20: note = chemically synthesized
  source 1..20: mol_type = other DNA
aagcaaaaattcctaactcc

SEQ ID NO: 10439 - DNA, 20 bp, synthetic construct
  misc_feature 1..20: note = chemically synthesized
  source 1..20: mol_type = other DNA
agcaaaaattcctaactcca

SEQ ID NO: 10440 - DNA, 20 bp, synthetic construct
  misc_feature 1..20: note = chemically synthesized
  source 1..20: mol_type = other DNA
aattcctaactccagggact

SEQ ID NO: 10441 - DNA, 20 bp, synthetic construct
  misc_feature 1..20: note = chemically synthesized
  source 1..20: mol_type = other DNA
ctccagggactcagcatatg

SEQ ID NO: 10442 - DNA, 20 bp, synthetic construct
  misc_feature 1..20: note = chemically synthesized
  source 1..20: mol_type = other DNA
tccagggactcagcatatgt

SEQ ID NO: 10443 - DNA, 20 bp, synthetic construct
  misc_feature 1..20: note = chemically synthesized
  source 1..20: mol_type = other DNA
atatgtaggctatgtccata

SEQ ID NO: 10444 - DNA, 20 bp, synthetic construct
  misc_feature 1..20: note = chemically synthesized
  source 1..20: mol_type = other DNA
atgtaggctatgtccataca

SEQ ID NO: 10445 - DNA, 20 bp, synthetic construct
  misc_feature 1..20: note = chemically synthesized
  source 1..20: mol_type = other DNA
ctatgtccatacagagaaac

SEQ ID NO: 10446 - DNA, 20 bp, synthetic construct
  misc_feature 1..20: note = chemically synthesized
  source 1..20: mol_type = other DNA
catacagagaaaccagcttt

SEQ ID NO: 10447 - DNA, 20 bp, synthetic construct
  misc_feature 1..20: note = chemically synthesized
  source 1..20: mol_type = other DNA
atacagagaaaccagctttt

SEQ ID NO: 10448 - DNA, 20 bp, synthetic construct
  misc_feature 1..20: note = chemically synthesized
  source 1..20: mol_type = other DNA
acagagaaaccagcttttgg

SEQ ID NO: 10449 - DNA, 20 bp, synthetic construct
  misc_feature 1..20: note = chemically synthesized
  source 1..20: mol_type = other DNA
cagagaaaccagcttttggg

SEQ ID NO: 10450 - DNA, 20 bp, synthetic construct
  misc_feature 1..20: note = chemically synthesized
  source 1..20: mol_type = other DNA
gagaaaccagcttttgggag

SEQ ID NO: 10451 - DNA, 20 bp, synthetic construct
  misc_feature 1..20: note = chemically synthesized
  source 1..20: mol_type = other DNA
agaaaccagcttttgggagg

SEQ ID NO: 10452 - DNA, 20 bp, synthetic construct
  misc_feature 1..20: note = chemically synthesized
  source 1..20: mol_type = other DNA
aaccagcttttgggaggagg

SEQ ID NO: 10453 - DNA, 20 bp, synthetic construct
  misc_feature 1..20: note = chemically synthesized
  source 1..20: mol_type = other DNA
accagcttttgggaggagga

SEQ ID NO: 10454 - DNA, 20 bp, synthetic construct
  misc_feature 1..20: note = chemically synthesized
  source 1..20: mol_type = other DNA
cagcttttgggaggaggaag

SEQ ID NO: 10455 - DNA, 20 bp, synthetic construct
  misc_feature 1..20: note = chemically synthesized
  source 1..20: mol_type = other DNA
agcttttgggaggaggaagg

SEQ ID NO: 10456 - DNA, 20 bp, synthetic construct
  misc_feature 1..20: note = chemically synthesized
  source 1..20: mol_type = other DNA
gaggaaaatatcactgaatt

SEQ ID NO: 10457 - DNA, 20 bp, synthetic construct
  misc_feature 1..20: note = chemically synthesized
  source 1..20: mol_type = other DNA
aaaatatcactgaattcagt

SEQ ID NO: 10458 - DNA, 20 bp, synthetic construct
  misc_feature 1..20: note = chemically synthesized
  source 1..20: mol_type = other DNA
ttaattgaatttaaaatacc

SEQ ID NO: 10459 - DNA, 20 bp, synthetic construct
  misc_feature 1..20: note = chemically synthesized
  source 1..20: mol_type = other DNA
aacgtacttctattttgatg

SEQ ID NO: 10460 - DNA, 20 bp, synthetic construct
  misc_feature 1..20: note = chemically synthesized
  source 1..20: mol_type = other DNA
gtagttacatttgcccaaaa

SEQ ID NO: 10461 - DNA, 20 bp, synthetic construct
  misc_feature 1..20: note = chemically synthesized
  source 1..20: mol_type = other DNA
tttgcccaaaaaagcaaact

SEQ ID NO: 10462 - DNA, 20 bp, synthetic construct
  misc_feature 1..20: note = chemically synthesized
  source 1..20: mol_type = other DNA
tgcccaaaaaagcaaacttg

SEQ ID NO: 10463 - DNA, 20 bp, synthetic construct
  misc_feature 1..20: note = chemically synthesized
  source 1..20: mol_type = other DNA
aaaatacacattacattctt

SEQ ID NO: 10464 - DNA, 20 bp, synthetic construct
  misc_feature 1..20: note = chemically synthesized
  source 1..20: mol_type = other DNA
aatacacattacattctttg

SEQ ID NO: 10465 - DNA, 20 bp, synthetic construct
  misc_feature 1..20: note = chemically synthesized
  source 1..20: mol_type = other DNA
ttggagtttttcaaaaaaaa

SEQ ID NO: 10466 - DNA, 20 bp, synthetic construct
  misc_feature 1..20: note = chemically synthesized
  source 1..20: mol_type = other DNA
aaacagcttgcaacaattaa

SEQ ID NO: 10467 - DNA, 20 bp, synthetic construct
  misc_feature 1..20: note = chemically synthesized
  source 1..20: mol_type = other DNA
agcttgcaacaattaaaaga

SEQ ID NO: 10468 - DNA, 20 bp, synthetic construct
  misc_feature 1..20: note = chemically synthesized
  source 1..20: mol_type = other DNA
cttgcaacaattaaaagatg

SEQ ID NO: 10469 - DNA, 20 bp, synthetic construct
  misc_feature 1..20: note = chemically synthesized
  source 1..20: mol_type = other DNA
aaaagatggagaaatcttat

SEQ ID NO: 10470 - DNA, 20 bp, synthetic construct
  misc_feature 1..20: note = chemically synthesized
  source 1..20: mol_type = other DNA
aaagatggagaaatcttata

SEQ ID NO: 10471 - DNA, 20 bp, synthetic construct
  misc_feature 1..20: note = chemically synthesized
  source 1..20: mol_type = other DNA
atggagaaatcttataaggc

SEQ ID NO: 10472 - DNA, 20 bp, synthetic construct
  misc_feature 1..20: note = chemically synthesized
  source 1..20: mol_type = other DNA
ctgcacttcaattttgcttc

SEQ ID NO: 10473 - DNA, 20 bp, synthetic construct
  misc_feature 1..20: note = chemically synthesized
  source 1..20: mol_type = other DNA
ttttgcttccagcaatttga

SEQ ID NO: 10474 - DNA, 20 bp, synthetic construct
  misc_feature 1..20: note = chemically synthesized
  source 1..20: mol_type = other DNA
gcaatttgaaagatgccttt

SEQ ID NO: 10475 - DNA, 20 bp, synthetic construct
  misc_feature 1..20: note = chemically synthesized
  source 1..20: mol_type = other DNA
gatgcctttaagctttctgt

SEQ ID NO: 10476 - DNA, 20 bp, synthetic construct
  misc_feature 1..20: note = chemically synthesized
  source 1..20: mol_type = other DNA
atgcctttaagctttctgtt

SEQ ID NO: 10477 - DNA, 20 bp, synthetic construct
  misc_feature 1..20: note = chemically synthesized
  source 1..20: mol_type = other DNA
tgcctttaagctttctgttg

SEQ ID NO: 10478 - DNA, 20 bp, synthetic construct
  misc_feature 1..20: note = chemically synthesized
  source 1..20: mol_type = other DNA
tgttggggaatcacgaatcc

SEQ ID NO: 10479 - DNA, 20 bp, synthetic construct
  misc_feature 1..20: note = chemically synthesized
  source 1..20: mol_type = other DNA
ccaagccttaatctccacca

SEQ ID NO: 10480 - DNA, 20 bp, synthetic construct
  misc_feature 1..20: note = chemically synthesized
  source 1..20: mol_type = other DNA
ccaccatagcttccatcttt

SEQ ID NO: 10481 - DNA, 20 bp, synthetic construct
  misc_feature 1..20: note = chemically synthesized
  source 1..20: mol_type = other DNA
caccatagcttccatctttg

SEQ ID NO: 10482 - DNA, 20 bp, synthetic construct
  misc_feature 1..20: note = chemically synthesized
  source 1..20: mol_type = other DNA
ttccatctttgaggcaaatc

SEQ ID NO: 10483 - DNA, 20 bp, synthetic construct
  misc_feature 1..20: note = chemically synthesized
  source 1..20: mol_type = other DNA
ataatattctgctgtctttg

SEQ ID NO: 10484 - DNA, 20 bp, synthetic construct
  misc_feature 1..20: note = chemically synthesized
  source 1..20: mol_type = other DNA
taatattctgctgtctttgc

SEQ ID NO: 10485 - DNA, 20 bp, synthetic construct
  misc_feature 1..20: note = chemically synthesized
  source 1..20: mol_type = other DNA
attctgctgtctttgcaggt

SEQ ID NO: 10486 - DNA, 20 bp, synthetic construct
  misc_feature 1..20: note = chemically synthesized
  source 1..20: mol_type = other DNA
ctttgcaggtgagccccatt

SEQ ID NO: 10487 - DNA, 20 bp, synthetic construct
  misc_feature 1..20: note = chemically synthesized
  source 1..20: mol_type = other DNA
ggtgagccccattcagcaac

SEQ ID NO: 10488 - DNA, 20 bp, synthetic construct
  misc_feature 1..20: note = chemically synthesized
  source 1..20: mol_type = other DNA
agcaactagattccaaaaaa

SEQ ID NO: 10489 - DNA, 20 bp, synthetic construct
  misc_feature 1..20: note = chemically synthesized
  source 1..20: mol_type = other DNA
aactagattccaaaaaatag

SEQ ID NO: 10490 - DNA, 20 bp, synthetic construct
  misc_feature 1..20: note = chemically synthesized
  source 1..20: mol_type = other DNA
actagattccaaaaaatagc

SEQ ID NO: 10491 - DNA, 20 bp, synthetic construct
  misc_feature 1..20: note = chemically synthesized
  source 1..20: mol_type = other DNA
ctagattccaaaaaatagca

SEQ ID NO: 10492 - DNA, 20 bp, synthetic construct
  misc_feature 1..20: note = chemically synthesized
  source 1..20: mol_type = other DNA
agattccaaaaaatagcagg

SEQ ID NO: 10493 - DNA, 20 bp, synthetic construct
  misc_feature 1..20: note = chemically synthesized
  source 1..20: mol_type = other DNA
aaaaatagcagggagaaaac

SEQ ID NO: 10494 - DNA, 20 bp, synthetic construct
  misc_feature 1..20: note = chemically synthesized
  source 1..20: mol_type = other DNA
atagcagggagaaaactggt

SEQ ID NO: 10495 - DNA, 20 bp, synthetic construct
  misc_feature 1..20: note = chemically synthesized
  source 1..20: mol_type = other DNA
gcagggagaaaactggtcag

SEQ ID NO: 10496 - DNA, 20 bp, synthetic construct
  misc_feature 1..20: note = chemically synthesized
  source 1..20: mol_type = other DNA
cagtggtgttcatactatgc

SEQ ID NO: 10497 - DNA, 20 bp, synthetic construct
  misc_feature 1..20: note = chemically synthesized
  source 1..20: mol_type = other DNA
catactatgctagaacatca

SEQ ID NO: 10498 - DNA, 20 bp, synthetic construct
  misc_feature 1..20: note = chemically synthesized
  source 1..20: mol_type = other DNA
atactatgctagaacatcat

SEQ ID NO: 10499 - DNA, 20 bp, synthetic construct
  misc_feature 1..20: note = chemically synthesized
  source 1..20: mol_type = other DNA
tactatgctagaacatcatg

SEQ ID NO: 10500 - DNA, 20 bp, synthetic construct
  misc_feature 1..20: note = chemically synthesized
  source 1..20: mol_type = other DNA
gctagaacatcatggggact

SEQ ID NO: 10501 - DNA, 20 bp, synthetic construct
  misc_feature 1..20: note = chemically synthesized
  source 1..20: mol_type = other DNA
tagaacatcatggggactta

SEQ ID NO: 10502 - DNA, 20 bp, synthetic construct
  misc_feature 1..20: note = chemically synthesized
  source 1..20: mol_type = other DNA
tggggacttagagacccacc

SEQ ID NO: 10503 - DNA, 20 bp, synthetic construct
  misc_feature 1..20: note = chemically synthesized
  source 1..20: mol_type = other DNA
atctattttacctactttac

SEQ ID NO: 10504 - DNA, 20 bp, synthetic construct
  misc_feature 1..20: note = chemically synthesized
  source 1..20: mol_type = other DNA
ttttacctactttacaagac

SEQ ID NO: 10505 - DNA, 20 bp, synthetic construct
  misc_feature 1..20: note = chemically synthesized
  source 1..20: mol_type = other DNA
tttacctactttacaagaca

SEQ ID NO: 10506 - DNA, 20 bp, synthetic construct
  misc_feature 1..20: note = chemically synthesized
  source 1..20: mol_type = other DNA
gacaaggaaacaaatgctaa

SEQ ID NO: 10507 - DNA, 20 bp, synthetic construct
  misc_feature 1..20: note = chemically synthesized
  source 1..20: mol_type = other DNA
acaaggaaacaaatgctaac

SEQ ID NO: 10508 - DNA, 20 bp, synthetic construct
  misc_feature 1..20: note = chemically synthesized
  source 1..20: mol_type = other DNA
gaaacaaatgctaacaggtg

SEQ ID NO: 10509 - DNA, 20 bp, synthetic construct
  misc_feature 1..20: note = chemically synthesized
  source 1..20: mol_type = other DNA
aaacaaatgctaacaggtga

SEQ ID NO: 10510 - DNA, 20 bp, synthetic construct
  misc_feature 1..20: note = chemically synthesized
  source 1..20: mol_type = other DNA
aacaaatgctaacaggtgaa

SEQ ID NO: 10511 - DNA, 20 bp, synthetic construct
  misc_feature 1..20: note = chemically synthesized
  source 1..20: mol_type = other DNA
caaatgctaacaggtgaagg

SEQ ID NO: 10512 - DNA, 20 bp, synthetic construct
  misc_feature 1..20: note = chemically synthesized
  source 1..20: mol_type = other DNA
gaagggagcccaaaatctca

SEQ ID NO: 10513 - DNA, 20 bp, synthetic construct
  misc_feature 1..20: note = chemically synthesized
  source 1..20: mol_type = other DNA
atctcacagcatgatacaat

SEQ ID NO: 10514 - DNA, 20 bp, synthetic construct
  misc_feature 1..20: note = chemically synthesized
  source 1..20: mol_type = other DNA
tctcacagcatgatacaata

SEQ ID NO: 10515 - DNA, 20 bp, synthetic construct
  misc_feature 1..20: note = chemically synthesized
  source 1..20: mol_type = other DNA
ctcacagcatgatacaataa

SEQ ID NO: 10516 - DNA, 20 bp, synthetic construct
  misc_feature 1..20: note = chemically synthesized
  source 1..20: mol_type = other DNA
cagcatgatacaataagggt

SEQ ID NO: 10517 - DNA, 20 bp, synthetic construct
  misc_feature 1..20: note = chemically synthesized
  source 1..20: mol_type = other DNA
atacaataagggtcagaacc

SEQ ID NO: 10518 - DNA, 20 bp, synthetic construct
  misc_feature 1..20: note = chemically synthesized
  source 1..20: mol_type = other DNA
tacaataagggtcagaaccc

SEQ ID NO: 10519 - DNA, 20 bp, synthetic construct
  misc_feature 1..20: note = chemically synthesized
  source 1..20: mol_type = other DNA
gggtcagaacccaggtgtcc

SEQ ID NO: 10520 - DNA, 20 bp, synthetic construct
  misc_feature 1..20: note = chemically synthesized
  source 1..20: mol_type = other DNA
aacccaggtgtcctggtttt

SEQ ID NO: 10521 - DNA, 20 bp, synthetic construct
  misc_feature 1..20: note = chemically synthesized
  source 1..20: mol_type = other DNA
aggtgtcctggttttcagat

SEQ ID NO: 10522 - DNA, 20 bp, synthetic construct
  misc_feature 1..20: note = chemically synthesized
  source 1..20: mol_type = other DNA
tgtctctctgttaacactaa

SEQ ID NO: 10523 - DNA, 20 bp, synthetic construct
  misc_feature 1..20: note = chemically synthesized
  source 1..20: mol_type = other DNA
tctgttaacactaaaagtca

SEQ ID NO: 10524 - DNA, 20 bp, synthetic construct
  misc_feature 1..20: note = chemically synthesized
  source 1..20: mol_type = other DNA
taacactaaaagtcaaagtt

SEQ ID NO: 10525 - DNA, 20 bp, synthetic construct
  misc_feature 1..20: note = chemically synthesized
  source 1..20: mol_type = other DNA
taaaagtcaaagtttggttc

SEQ ID NO: 10526 - DNA, 20 bp, synthetic construct
  misc_feature 1..20: note = chemically synthesized
  source 1..20: mol_type = other DNA
ggaaaatctgtaatgcccaa

SEQ ID NO: 10527 - DNA, 20 bp, synthetic construct
  misc_feature 1..20: note = chemically synthesized
  source 1..20: mol_type = other DNA
taaatgccctccccccaaac

SEQ ID NO: 10528 - DNA, 20 bp, synthetic construct
  misc_feature 1..20: note = chemically synthesized
  source 1..20: mol_type = other DNA
ccctccccccaaaccagtct

SEQ ID NO: 10529 - DNA, 20 bp, synthetic construct
  misc_feature 1..20: note = chemically synthesized
  source 1..20: mol_type = other DNA
cagtcttggtaatttctcca

SEQ ID NO: 10530 - DNA, 20 bp, synthetic construct
  misc_feature 1..20: note = chemically synthesized
  source 1..20: mol_type = other DNA
taatttctccatggctttca

SEQ ID NO: 10531 - DNA, 20 bp, synthetic construct
  misc_feature 1..20: note = chemically synthesized
  source 1..20: mol_type = other DNA
tttctccatggctttcacag

SEQ ID NO: 10532 - DNA, 20 bp, synthetic construct
  misc_feature 1..20: note = chemically synthesized
  source 1..20: mol_type = other DNA
ttctccatggctttcacaga

SEQ ID NO: 10533 - DNA, 20 bp, synthetic construct
  misc_feature 1..20: note = chemically synthesized
  source 1..20: mol_type = other DNA
tctccatggctttcacagaa

SEQ ID NO: 10534 - DNA, 20 bp, synthetic construct
  misc_feature 1..20: note = chemically synthesized
  source 1..20: mol_type = other DNA
cagaagggtaaatgtctact

SEQ ID NO: 10535 - DNA, 20 bp, synthetic construct
  misc_feature 1..20: note = chemically synthesized
  source 1..20: mol_type = other DNA
aagggtaaatgtctacttgg

SEQ ID NO: 10536 - DNA, 20 bp, synthetic construct
  misc_feature 1..20: note = chemically synthesized
  source 1..20: mol_type = other DNA
agggtaaatgtctacttgga

SEQ ID NO: 10537 - DNA, 20 bp, synthetic construct
  misc_feature 1..20: note = chemically synthesized
  source 1..20: mol_type = other DNA
cttcttccttcattcgtgtt

SEQ ID NO: 10538 - DNA, 20 bp, synthetic construct
  misc_feature 1..20: note = chemically synthesized
  source 1..20: mol_type = other DNA
tcgtgtttggtaatcaaaaa

SEQ ID NO: 10539 - DNA, 20 bp, synthetic construct
  misc_feature 1..20: note = chemically synthesized
  source 1..20: mol_type = other DNA
tttatcataatgctctcaat

SEQ ID NO: 10540 - DNA, 20 bp, synthetic construct
  misc_feature 1..20: note = chemically synthesized
  source 1..20: mol_type = other DNA
atcataatgctctcaattgg

SEQ ID NO: 10541 - DNA, 20 bp, synthetic construct
  misc_feature 1..20: note = chemically synthesized
  source 1..20: mol_type = other DNA
tcataatgctctcaattgga

SEQ ID NO: 10542 - DNA, 20 bp, synthetic construct
  misc_feature 1..20: note = chemically synthesized
  source 1..20: mol_type = other DNA
attggaaggtcttcatacta

SEQ ID NO: 10543 - DNA, 20 bp, synthetic construct
  misc_feature 1..20: note = chemically synthesized
  source 1..20: mol_type = other DNA
ttggaaggtcttcatactac

SEQ ID NO: 10544 - DNA, 20 bp, synthetic construct
  misc_feature 1..20: note = chemically synthesized
  source 1..20: mol_type = other DNA
gaaggtcttcatactacagg

SEQ ID NO: 10545 - DNA, 20 bp, synthetic construct
  misc_feature 1..20: note = chemically synthesized
  source 1..20: mol_type = other DNA
aggcagatactgttattttc

SEQ ID NO: 10546 - DNA, 20 bp, synthetic construct
  misc_feature 1..20: note = chemically synthesized
  source 1..20: mol_type = other DNA
cagatactgttattttctgg

SEQ ID NO: 10547 - DNA, 20 bp, synthetic construct
  misc_feature 1..20: note = chemically synthesized
  source 1..20: mol_type = other DNA
gatactgttattttctggta

SEQ ID NO: 10548 - DNA, 20 bp, synthetic construct
  misc_feature 1..20: note = chemically synthesized
  source 1..20: mol_type = other DNA
atactgttattttctggtag

SEQ ID NO: 10549 - DNA, 20 bp, synthetic construct
  misc_feature 1..20: note = chemically synthesized
  source 1..20: mol_type = other DNA
tgttattttctggtagagga

SEQ ID NO: 10550 - DNA, 20 bp, synthetic construct
  misc_feature 1..20: note = chemically synthesized
  source 1..20: mol_type = other DNA
tattttctggtagaggatgg

SEQ ID NO: 10551 - DNA, 20 bp, synthetic construct
  misc_feature 1..20: note = chemically synthesized
  source 1..20: mol_type = other DNA
tttctggtagaggatggcag

SEQ ID NO: 10552 - DNA, 20 bp, synthetic construct
  misc_feature 1..20: note = chemically synthesized
  source 1..20: mol_type = other DNA
ttctggtagaggatggcagc

SEQ ID NO: 10553 - DNA, 20 bp, synthetic construct
  misc_feature 1..20: note = chemically synthesized
  source 1..20: mol_type = other DNA
tctggtagaggatggcagca

SEQ ID NO: 10554 - DNA, 20 bp, synthetic construct
  misc_feature 1..20: note = chemically synthesized
  source 1..20: mol_type = other DNA
gtagaggatggcagcagggc

SEQ ID NO: 10555 - DNA, 20 bp, synthetic construct
  misc_feature 1..20: note = chemically synthesized
  source 1..20: mol_type = other DNA
tagaggatggcagcagggct

SEQ ID NO: 10556 - DNA, 20 bp, synthetic construct
  misc_feature 1..20: note = chemically synthesized
  source 1..20: mol_type = other DNA
tggcagcagggctgggaaaa

SEQ ID NO: 10557 - DNA, 20 bp, synthetic construct
  misc_feature 1..20: note = chemically synthesized
  source 1..20: mol_type = other DNA
agggctgggaaaaaagaatg

SEQ ID NO: 10558 - DNA, 20 bp, synthetic construct
  misc_feature 1..20: note = chemically synthesized
  source 1..20: mol_type = other DNA
atgtggtttttttctaacca

SEQ ID NO: 10559 - DNA, 20 bp, synthetic construct
  misc_feature 1..20: note = chemically synthesized
  source 1..20: mol_type = other DNA
tggtttttttctaaccacag

SEQ ID NO: 10560 - DNA, 20 bp, synthetic construct
  misc_feature 1..20: note = chemically synthesized
  source 1..20: mol_type = other DNA
ggtttttttctaaccacagt

SEQ ID NO: 10561 - DNA, 20 bp, synthetic construct
  misc_feature 1..20: note = chemically synthesized
  source 1..20: mol_type = other DNA
ataacaatgatttcactttc

SEQ ID NO: 10562 - DNA, 20 bp, synthetic construct
  misc_feature 1..20: note = chemically synthesized
  source 1..20: mol_type = other DNA
ttcactttctagatataaaa

SEQ ID NO: 10563 - DNA, 20 bp, synthetic construct
  misc_feature 1..20: note = chemically synthesized
  source 1..20: mol_type = other DNA
tcactttctagatataaaac

SEQ ID NO: 10564 - DNA, 20 bp, synthetic construct
  misc_feature 1..20: note = chemically synthesized
  source 1..20: mol_type = other DNA
ttctagatataaaacaggca

SEQ ID NO: 10565 - DNA, 20 bp, synthetic construct
  misc_feature 1..20: note = chemically synthesized
  source 1..20: mol_type = other DNA
ccctgaacttctgcaaaatc

SEQ ID NO: 10566 - DNA, 20 bp, synthetic construct
  misc_feature 1..20: note = chemically synthesized
  source 1..20: mol_type = other DNA
aatctagatttgatcaaatt

SEQ ID NO: 10567 - DNA, 20 bp, synthetic construct
  misc_feature 1..20: note = chemically synthesized
  source 1..20: mol_type = other DNA
atttgatcaaattcagaaac

SEQ ID NO: 10568 - DNA, 20 bp, synthetic construct
  misc_feature 1..20: note = chemically synthesized
  source 1..20: mol_type = other DNA
actggtgatttgatcaaatt

SEQ ID NO: 10569 - DNA, 20 bp, synthetic construct
  misc_feature 1..20: note = chemically synthesized
  source 1..20: mol_type = other DNA
aaattcagaatcccatattt

SEQ ID NO: 10570 - DNA, 20 bp, synthetic construct
  misc_feature 1..20: note = chemically synthesized
  source 1..20: mol_type = other DNA
aattcagaatcccatatttt

SEQ ID NO: 10571 - DNA, 20 bp, synthetic construct
  misc_feature 1..20: note = chemically synthesized
  source 1..20: mol_type = other DNA
tattttgggatgatgtgttc

SEQ ID NO: 10572 - DNA, 20 bp, synthetic construct
  misc_feature 1..20: note = chemically synthesized
  source 1..20: mol_type = other DNA
tttgggatgatgtgttctag

SEQ ID NO: 10573 - DNA, 20 bp, synthetic construct
  misc_feature 1..20: note = chemically synthesized
  source 1..20: mol_type = other DNA
ggatgatgtgttctagcaga

SEQ ID NO: 10574 - DNA, 20 bp, synthetic construct
  misc_feature 1..20: note = chemically synthesized
  source 1..20: mol_type = other DNA
gtgttctagcagaaagctat

SEQ ID NO: 10575 - DNA, 20 bp, synthetic construct
  misc_feature 1..20: note = chemically synthesized
  source 1..20: mol_type = other DNA
tctagcagaaagctattggt

SEQ ID NO: 10576 - DNA, 20 bp, synthetic construct
  misc_feature 1..20: note = chemically synthesized
  source 1..20: mol_type = other DNA
ttttgctctttcttccccaa

SEQ ID NO: 10577 - DNA, 20 bp, synthetic construct
  misc_feature 1..20: note = chemically synthesized
  source 1..20: mol_type = other DNA
ttccccaaaagatttttaaa

SEQ ID NO: 10578 - DNA, 20 bp, synthetic construct
  misc_feature 1..20: note = chemically synthesized
  source 1..20: mol_type = other DNA
taaatagttttcatctttaa

SEQ ID NO: 10579 - DNA, 20 bp, synthetic construct
  misc_feature 1..20: note = chemically synthesized
  source 1..20: mol_type = other DNA
aaatagttttcatctttaaa

SEQ ID NO: 10580 - DNA, 20 bp, synthetic construct
  misc_feature 1..20: note = chemically synthesized
  source 1..20: mol_type = other DNA
ctttaaaaggatttcaactt

SEQ ID NO: 10581 - DNA, 20 bp, synthetic construct
  misc_feature 1..20: note = chemically synthesized
  source 1..20: mol_type = other DNA
ttcagattgtgcccacgcca

SEQ ID NO: 10582 - DNA, 20 bp, synthetic construct
  misc_feature 1..20: note = chemically synthesized
  source 1..20: mol_type = other DNA
catctaatcaataaataaat

SEQ ID NO: 10583 - DNA, 20 bp, synthetic construct
  misc_feature 1..20: note = chemically synthesized
  source 1..20: mol_type = other DNA
ataaataaataagacaaaca

SEQ ID NO: 10584 - DNA, 20 bp, synthetic construct
  misc_feature 1..20: note = chemically synthesized
  source 1..20: mol_type = other DNA
aataaataagacaaacaaag

SEQ ID NO: 10585 - DNA, 20 bp, synthetic construct
  misc_feature 1..20: note = chemically synthesized
  source 1..20: mol_type = other DNA
tatgtttatcctttaccatt

SEQ ID NO: 10586 - DNA, 20 bp, synthetic construct
  misc_feature 1..20: note = chemically synthesized
  source 1..20: mol_type = other DNA
atgtttatcctttaccattt

SEQ ID NO: 10587 - DNA, 20 bp, synthetic construct
  misc_feature 1..20: note = chemically synthesized
  source 1..20: mol_type = other DNA
tttatcctttaccatttggg

SEQ ID NO: 10588 - DNA, 20 bp, synthetic construct
  misc_feature 1..20: note = chemically synthesized
  source 1..20: mol_type = other DNA
gaagtgtacattaattactg

SEQ ID NO: 10589 - DNA, 20 bp, synthetic construct
  misc_feature 1..20: note = chemically synthesized
  source 1..20: mol_type = other DNA
cccccaccccctctgcatcg

SEQ ID NO: 10590 - DNA, 20 bp, synthetic construct
  misc_feature 1..20: note = chemically synthesized
  source 1..20: mol_type = other DNA
caccccctctgcatcgcaga

SEQ ID NO: 10591 - DNA, 20 bp, synthetic construct
  misc_feature 1..20: note = chemically synthesized
  source 1..20: mol_type = other DNA
cccctctgcatcgcagacag

SEQ ID NO: 10592 - DNA, 20 bp, synthetic construct
  misc_feature 1..20: note = chemically synthesized
  source 1..20: mol_type = other DNA
tcgcagacagcagtgctcaa

SEQ ID NO: 10593 - DNA, 20 bp, synthetic construct
  misc_feature 1..20: note = chemically synthesized
  source 1..20: mol_type = other DNA
cgcagacagcagtgctcaaa

SEQ ID NO: 10594 - DNA, 20 bp, synthetic construct
  misc_feature 1..20: note = chemically synthesized
  source 1..20: mol_type = other DNA
gcagacagcagtgctcaaaa

SEQ ID NO: 10595 - DNA, 20 bp, synthetic construct
  misc_feature 1..20: note = chemically synthesized
  source 1..20: mol_type = other DNA
tccgcaaaataaaaatgtgt

SEQ ID NO: 10596 - DNA, 20 bp, synthetic construct
  misc_feature 1..20: note = chemically synthesized
  source 1..20: mol_type = other DNA
ccgcaaaataaaaatgtgtc

SEQ ID NO: 10597 - DNA, 20 bp, synthetic construct
  misc_feature 1..20: note = chemically synthesized
  source 1..20: mol_type = other DNA
aaatgtgtcgggtaattaaa

SEQ ID NO: 10598 - DNA, 20 bp, synthetic construct
  misc_feature 1..20: note = chemically synthesized
  source 1..20: mol_type = other DNA
aatgtgtcgggtaattaaat

SEQ ID NO: 10599 - DNA, 20 bp, synthetic construct
  misc_feature 1..20: note = chemically synthesized
  source 1..20: mol_type = other DNA
attaaatgggtatttataat

SEQ ID NO: 10600 - DNA, 20 bp, synthetic construct
  misc_feature 1..20: note = chemically synthesized
  source 1..20: mol_type = other DNA
tagaacttaataatttgcat

SEQ ID NO: 10601 - DNA, 20 bp, synthetic construct
  misc_feature 1..20: note = chemically synthesized
  source 1..20: mol_type = other DNA
agaacttaataatttgcatc

SEQ ID NO: 10602 - DNA, 20 bp, synthetic construct
  misc_feature 1..20: note = chemically synthesized
  source 1..20: mol_type = other DNA
gaacttaataatttgcatca

SEQ ID NO: 10603 - DNA, 20 bp, synthetic construct
  misc_feature 1..20: note = chemically synthesized
  source 1..20: mol_type = other DNA
aatttgcatcagggacaaat

SEQ ID NO: 10604 - DNA, 20 bp, synthetic construct
  misc_feature 1..20: note = chemically synthesized
  source 1..20: mol_type = other DNA
tgagctctgattttaatctg

SEQ ID NO: 10605 - DNA, 20 bp, synthetic construct
  misc_feature 1..20: note = chemically synthesized
  source 1..20: mol_type = other DNA
attttaatctgcagcgcatt

SEQ ID NO: 10606 - DNA, 20 bp, synthetic construct
  misc_feature 1..20: note = chemically synthesized
  source 1..20: mol_type = other DNA
aatctgcagcgcatttagat

SEQ ID NO: 10607 - DNA, 20 bp, synthetic construct
  misc_feature 1..20: note = chemically synthesized
  source 1..20: mol_type = other DNA
agcgcatttagattagccca

SEQ ID NO: 10608 - DNA, 20 bp, synthetic construct
  misc_feature 1..20: note = chemically synthesized
  source 1..20: mol_type = other DNA
catttagattagcccaaaga

SEQ ID NO: 10609 - DNA, 20 bp, synthetic construct
  misc_feature 1..20: note = chemically synthesized
  source 1..20: mol_type = other DNA
ccaaagatagtgtaatttga

SEQ ID NO: 10610 - DNA, 20 bp, synthetic construct
  misc_feature 1..20: note = chemically synthesized
  source 1..20: mol_type = other DNA
tagtgtaatttgatggttta

SEQ ID NO: 10611 - DNA, 20 bp, synthetic construct
  misc_feature 1..20: note = chemically synthesized
  source 1..20: mol_type = other DNA
agtgtaatttgatggtttat

SEQ ID NO: 10612 - DNA, 20 bp, synthetic construct
  misc_feature 1..20: note = chemically synthesized
  source 1..20: mol_type = other DNA
atggtttataggcctcctct

SEQ ID NO: 10613 - DNA, 20 bp, synthetic construct
  misc_feature 1..20: note = chemically synthesized
  source 1..20: mol_type = other DNA
tcggattatgaaacaatacc

SEQ ID NO: 10614 - DNA, 20 bp, synthetic construct
  misc_feature 1..20: note = chemically synthesized
  source 1..20: mol_type = other DNA
tgaaacaataccaagccttc

SEQ ID NO: 10615 - DNA, 20 bp, synthetic construct
  misc_feature 1..20: note = chemically synthesized
  source 1..20: mol_type = other DNA
caataccaagccttcaagtg

SEQ ID NO: 10616 - DNA, 20 bp, synthetic construct
  misc_feature 1..20: note = chemically synthesized
  source 1..20: mol_type = other DNA
caagtgcagtgtgtctatgt

SEQ ID NO: 10617 - DNA, 20 bp, synthetic construct
  misc_feature 1..20: note = chemically synthesized
  source 1..20: mol_type = other DNA
aagtgcagtgtgtctatgtc

SEQ ID NO: 10618 - DNA, 20 bp, synthetic construct
  misc_feature 1..20: note = chemically synthesized
  source 1..20: mol_type = other DNA
gtgcagtgtgtctatgtcag

SEQ ID NO: 10619 - DNA, 20 bp, synthetic construct
  misc_feature 1..20: note = chemically synthesized
  source 1..20: mol_type = other DNA
tgcagtgtgtctatgtcagg

SEQ ID NO: 10620 - DNA, 20 bp, synthetic construct
  misc_feature 1..20: note = chemically synthesized
  source 1..20: mol_type = other DNA
gcagtgtgtctatgtcagga

SEQ ID NO: 10621 - DNA, 20 bp, synthetic construct
  misc_feature 1..20: note = chemically synthesized
  source 1..20: mol_type = other DNA
tctatgtcaggagggtgtta

SEQ ID NO: 10622 - DNA, 20 bp, synthetic construct
  misc_feature 1..20: note = chemically synthesized
  source 1..20: mol_type = other DNA
atgtcaggagggtgttaaag

SEQ ID NO: 10623 - DNA, 20 bp, synthetic construct
  misc_feature 1..20: note = chemically synthesized
  source 1..20: mol_type = other DNA
tcaggagggtgttaaagaag

SEQ ID NO: 10624 - DNA, 20 bp, synthetic construct
  misc_feature 1..20: note = chemically synthesized
  source 1..20: mol_type = other DNA
gaaaatgtttgacaacgtga

SEQ ID NO: 10625 - DNA, 20 bp, synthetic construct
  misc_feature 1..20: note = chemically synthesized
  source 1..20: mol_type = other DNA
aatgtttgacaacgtgaaag

SEQ ID NO: 10626 - DNA, 20 bp, synthetic construct
  misc_feature 1..20: note = chemically synthesized
  source 1..20: mol_type = other DNA
attacatgacaactgtgtaa

SEQ ID NO: 10627 - DNA, 20 bp, synthetic construct
  misc_feature 1..20: note = chemically synthesized
  source 1..20: mol_type = other DNA
aagtcatgatgaaacaaata

SEQ ID NO: 10628 - DNA, 20 bp, synthetic construct
  misc_feature 1..20: note = chemically synthesized
  source 1..20: mol_type = other DNA
agtcatgatgaaacaaataa

SEQ ID NO: 10629 - DNA, 20 bp, synthetic construct
  misc_feature 1..20: note = chemically synthesized
  source 1..20: mol_type = other DNA
gtcatgatgaaacaaataaa

SEQ ID NO: 10630 - DNA, 20 bp, synthetic construct
  misc_feature 1..20: note = chemically synthesized
  source 1..20: mol_type = other DNA
tccctgcgctaatctctgcc

SEQ ID NO: 10631 - DNA, 20 bp, synthetic construct
  misc_feature 1..20: note = chemically synthesized
  source 1..20: mol_type = other DNA
tgcccagccaacgcattctt

SEQ ID NO: 10632 - DNA, 20 bp, synthetic construct
  misc_feature 1..20: note = chemically synthesized
  source 1..20: mol_type = other DNA
ccagccaacgcattcttaag

SEQ ID NO: 10633 - DNA, 20 bp, synthetic construct
  misc_feature 1..20: note = chemically synthesized
  source 1..20: mol_type = other DNA
cagccaacgcattcttaagc

SEQ ID NO: 10634 - DNA, 20 bp, synthetic construct
  misc_feature 1..20: note = chemically synthesized
  source 1..20: mol_type = other DNA
agccaacgcattcttaagcg

SEQ ID NO: 10635 - DNA, 20 bp, synthetic construct
  misc_feature 1..20: note = chemically synthesized
  source 1..20: mol_type = other DNA
ttcttaagcggggaactact

SEQ ID NO: 10636 - DNA, 20 bp, synthetic construct
  misc_feature 1..20: note = chemically synthesized
  source 1..20: mol_type = other DNA
agcggggaactacttagcac

SEQ ID NO: 10637 - DNA, 20 bp, synthetic construct
  misc_feature 1..20: note = chemically synthesized
  source 1..20: mol_type = other DNA
gcggggaactacttagcacc

SEQ ID NO: 10638 - DNA, 20 bp, synthetic construct
  misc_feature 1..20: note = chemically synthesized
  source 1..20: mol_type = other DNA
ggaacgttgtaaattatcac

SEQ ID NO: 10639 - DNA, 20 bp, synthetic construct
  misc_feature 1..20: note = chemically synthesized
  source 1..20: mol_type = other DNA
tgtaaattatcactagtcaa

SEQ ID NO: 10640 - DNA, 20 bp, synthetic construct
  misc_feature 1..20: note = chemically synthesized
  source 1..20: mol_type = other DNA
tagtcaacagcattgatttt

SEQ ID NO: 10641 - DNA, 20 bp, synthetic construct
  misc_feature 1..20: note = chemically synthesized
  source 1..20: mol_type = other DNA
tttttagtcgacatttcaat

SEQ ID NO: 10642 - DNA, 20 bp, synthetic construct
  misc_feature 1..20: note = chemically synthesized
  source 1..20: mol_type = other DNA
ttttagtcgacatttcaatc

SEQ ID NO: 10643 - DNA, 20 bp, synthetic construct
  misc_feature 1..20: note = chemically synthesized
  source 1..20: mol_type = other DNA
tcgacatttcaatcaggttg

SEQ ID NO: 10644 - DNA, 20 bp, synthetic construct
  misc_feature 1..20: note = chemically synthesized
  source 1..20: mol_type = other DNA
acatttcaatcaggttgaag

SEQ ID NO: 10645 - DNA, 20 bp, synthetic construct
  misc_feature 1..20: note = chemically synthesized
  source 1..20: mol_type = other DNA
gttgaagtagaaatactacc

SEQ ID NO: 10646 - DNA, 20 bp, synthetic construct
  misc_feature 1..20: note = chemically synthesized
  source 1..20: mol_type = other DNA
atactacccggctcatccaa

SEQ ID NO: 10647 - DNA, 20 bp, synthetic construct
  misc_feature 1..20: note = chemically synthesized
  source 1..20: mol_type = other DNA
tcatccaacagcctcttaac

SEQ ID NO: 10648 - DNA, 20 bp, synthetic construct
  misc_feature 1..20: note = chemically synthesized
  source 1..20: mol_type = other DNA
aaccagtccactgcccctct

SEQ ID NO: 10649 - DNA, 20 bp, synthetic construct
  misc_feature 1..20: note = chemically synthesized
  source 1..20: mol_type = other DNA
accagtccactgcccctctg

SEQ ID NO: 10650 - DNA, 20 bp, synthetic construct
  misc_feature 1..20: note = chemically synthesized
  source 1..20: mol_type = other DNA
ctgcccctctgaggtctccc

SEQ ID NO: 10651 - DNA, 20 bp, synthetic construct
  misc_feature 1..20: note = chemically synthesized
  source 1..20: mol_type = other DNA
ctctgaggtctccccggtta

SEQ ID NO: 10652 - DNA, 20 bp, synthetic construct
  misc_feature 1..20: note = chemically synthesized
  source 1..20: mol_type = other DNA
tcaccattcgatatttattg

SEQ ID NO: 10653 - DNA, 20 bp, synthetic construct
  misc_feature 1..20: note = chemically synthesized
  source 1..20: mol_type = other DNA
tattgtagctttgccacatc

SEQ ID NO: 10654 - DNA, 20 bp, synthetic construct
  misc_feature 1..20: note = chemically synthesized
  source 1..20: mol_type = other DNA
attgtagctttgccacatcc

SEQ ID NO: 10655 - DNA, 20 bp, synthetic construct
  misc_feature 1..20: note = chemically synthesized
  source 1..20: mol_type = other DNA
ctttgccacatccaggcact

SEQ ID NO: 10656 - DNA, 20 bp, synthetic construct
  misc_feature 1..20: note = chemically synthesized
  source 1..20: mol_type = other DNA
acatccaggcacttggcctg

SEQ ID NO: 10657 - DNA, 20 bp, synthetic construct
  misc_feature 1..20: note = chemically synthesized
  source 1..20: mol_type = other DNA
catccaggcacttggcctga

SEQ ID NO: 10658 - DNA, 20 bp, synthetic construct
  misc_feature 1..20: note = chemically synthesized
  source 1..20: mol_type = other DNA
atccaggcacttggcctgaa

SEQ ID NO: 10659 - DNA, 20 bp, synthetic construct
  misc_feature 1..20: note = chemically synthesized
  source 1..20: mol_type = other DNA
cacttggcctgaagggtcac

SEQ ID NO: 10660 - DNA, 20 bp, synthetic construct
  misc_feature 1..20: note = chemically synthesized
  source 1..20: mol_type = other DNA
agggtcaccggcctgcctct

SEQ ID NO: 10661 - DNA, 20 bp, synthetic construct
  misc_feature 1..20: note = chemically synthesized
  source 1..20: mol_type = other DNA
gggtcaccggcctgcctctt

SEQ ID NO: 10662 - DNA, 20 bp, synthetic construct
  misc_feature 1..20: note = chemically synthesized
  source 1..20: mol_type = other DNA
aaatttgtgcttacctaacg

SEQ ID NO: 10663 - DNA, 20 bp, synthetic construct
  misc_feature 1..20: note = chemically synthesized
  source 1..20: mol_type = other DNA
aatttgtgcttacctaacga

SEQ ID NO: 10664 - DNA, 20 bp, synthetic construct
  misc_feature 1..20: note = chemically synthesized
  source 1..20: mol_type = other DNA
ttgtgcttacctaacgaagg

SEQ ID NO: 10665 - DNA, 20 bp, synthetic construct
  misc_feature 1..20: note = chemically synthesized
  source 1..20: mol_type = other DNA
ttacctaacgaaggcagaaa

SEQ ID NO: 10666 - DNA, 20 bp, synthetic construct
  misc_feature 1..20: note = chemically synthesized
  source 1..20: mol_type = other DNA
aacgaaggcagaaacagaaa

SEQ ID NO: 10667 - DNA, 20 bp, synthetic construct
  misc_feature 1..20: note = chemically synthesized
  source 1..20: mol_type = other DNA
ggcagaaacagaaaaagaaa

SEQ ID NO: 10668 - DNA, 20 bp, synthetic construct
  misc_feature 1..20: note = chemically synthesized
  source 1..20: mol_type = other DNA
agaaaaagaaaaagaaacaa

SEQ ID NO: 10669 - DNA, 20 bp, synthetic construct
  misc_feature 1..20: note = chemically synthesized
  source 1..20: mol_type = other DNA
gaaaaagaaaaagaaacaaa

SEQ ID NO: 10670 - DNA, 20 bp, synthetic construct
  misc_feature 1..20: note = chemically synthesized
  source 1..20: mol_type = other DNA
aagaaacaaaaggccatcat

SEQ ID NO: 10671 - DNA, 20 bp, synthetic construct
  misc_feature 1..20: note = chemically synthesized
  source 1..20: mol_type = other DNA
gaaacaaaaggccatcatca

SEQ ID NO: 10672 - DNA, 20 bp, synthetic construct
  misc_feature 1..20: note = chemically synthesized
  source 1..20: mol_type = other DNA
aaaggccatcatcagagatg

SEQ ID NO: 10673 - DNA, 20 bp, synthetic construct
  misc_feature 1..20: note = chemically synthesized
  source 1..20: mol_type = other DNA
cctgattttcactgattttc

SEQ ID NO: 10674 - DNA, 20 bp, synthetic construct
  misc_feature 1..20: note = chemically synthesized
  source 1..20: mol_type = other DNA
ctgattttcactgattttca

SEQ ID NO: 10675 - DNA, 20 bp, synthetic construct
  misc_feature 1..20: note = chemically synthesized
  source 1..20: mol_type = other DNA
tgattttcactgattttcaa

SEQ ID NO: 10676 - DNA, 20 bp, synthetic construct
  misc_feature 1..20: note = chemically synthesized
  source 1..20: mol_type = other DNA
ttttcactgattttcaaggg

SEQ ID NO: 10677 - DNA, 20 bp, synthetic construct
  misc_feature 1..20: note = chemically synthesized
  source 1..20: mol_type = other DNA
ttcactgattttcaagggaa

SEQ ID NO: 10678 - DNA, 20 bp, synthetic construct
  misc_feature 1..20: note = chemically synthesized
  source 1..20: mol_type = other DNA
actgattttcaagggaagag

SEQ ID NO: 10679 - DNA, 20 bp, synthetic construct
  misc_feature 1..20: note = chemically synthesized
  source 1..20: mol_type = other DNA
ctgattttcaagggaagaga

SEQ ID NO: 10680 - DNA, 20 bp, synthetic construct
  misc_feature 1..20: note = chemically synthesized
  source 1..20: mol_type = other DNA
caagggaagagaaggaaaac

SEQ ID NO: 10681 - DNA, 20 bp, synthetic construct
  misc_feature 1..20: note = chemically synthesized
  source 1..20: mol_type = other DNA
aagggaagagaaggaaaact

SEQ ID NO: 10682 - DNA, 20 bp, synthetic construct
  misc_feature 1..20: note = chemically synthesized
  source 1..20: mol_type = other DNA
agggaagagaaggaaaacta

SEQ ID NO: 10683 - DNA, 20 bp, synthetic construct
  misc_feature 1..20: note = chemically synthesized
  source 1..20: mol_type = other DNA
gggaagagaaggaaaactag

SEQ ID NO: 10684 - DNA, 20 bp, synthetic construct
  misc_feature 1..20: note = chemically synthesized
  source 1..20: mol_type = other DNA
ggaagagaaggaaaactagg

SEQ ID NO: 10685 - DNA, 20 bp, synthetic construct
  misc_feature 1..20: note = chemically synthesized
  source 1..20: mol_type = other DNA
gaaggaaaactagggggtgc

SEQ ID NO: 10686 - DNA, 20 bp, synthetic construct
  misc_feature 1..20: note = chemically synthesized
  source 1..20: mol_type = other DNA
gaaaactagggggtgcgagc

SEQ ID NO: 10687 - DNA, 20 bp, synthetic construct
  misc_feature 1..20: note = chemically synthesized
  source 1..20: mol_type = other DNA
aaaactagggggtgcgagcg

SEQ ID NO: 10688 - DNA, 20 bp, synthetic construct
  misc_feature 1..20: note = chemically synthesized
  source 1..20: mol_type = other DNA
aaactagggggtgcgagcga

SEQ ID NO: 10689 - DNA, 20 bp, synthetic construct
  misc_feature 1..20: note = chemically synthesized
  source 1..20: mol_type = other DNA
ggggtgcgagcgagggaaat

SEQ ID NO: 10690 - DNA, 20 bp, synthetic construct
  misc_feature 1..20: note = chemically synthesized
  source 1..20: mol_type = other DNA
gtgcgagcgagggaaataag

SEQ ID NO: 10691 - DNA, 20 bp, synthetic construct
  misc_feature 1..20: note = chemically synthesized
  source 1..20: mol_type = other DNA
tgcgagcgagggaaataaga

SEQ ID NO: 10692 - DNA, 20 bp, synthetic construct
  misc_feature 1..20: note = chemically synthesized
  source 1..20: mol_type = other DNA
gcgagcgagggaaataagaa

SEQ ID NO: 10693 - DNA, 20 bp, synthetic construct
  misc_feature 1..20: note = chemically synthesized
  source 1..20: mol_type = other DNA
gggaaataagaagggttcta

SEQ ID NO: 10694 - DNA, 20 bp, synthetic construct
  misc_feature 1..20: note = chemically synthesized
  source 1..20: mol_type = other DNA
tgatacgccttttatcattt

SEQ ID NO: 10695 - DNA, 20 bp, synthetic construct
  misc_feature 1..20: note = chemically synthesized
  source 1..20: mol_type = other DNA
tcatttcagctttatcattt

SEQ ID NO: 10696 - DNA, 20 bp, synthetic construct
  misc_feature 1..20: note = chemically synthesized
  source 1..20: mol_type = other DNA
tcagctttatcatttcagtc

SEQ ID NO: 10697 - DNA, 20 bp, synthetic construct
  misc_feature 1..20: note = chemically synthesized
  source 1..20: mol_type = other DNA
cagctttatcatttcagtct

SEQ ID NO: 10698 - DNA, 20 bp, synthetic construct
  misc_feature 1..20: note = chemically synthesized
  source 1..20: mol_type = other DNA
gctttatcatttcagtctag

SEQ ID NO: 10699 - DNA, 20 bp, synthetic construct
  misc_feature 1..20: note = chemically synthesized
  source 1..20: mol_type = other DNA
tcatttcagtctaggagacc

SEQ ID NO: 10700 - DNA, 20 bp, synthetic construct
  misc_feature 1..20: note = chemically synthesized
  source 1..20: mol_type = other DNA
gagacccagcaaataaaact

SEQ ID NO: 10701 - DNA, 20 bp, synthetic construct
  misc_feature 1..20: note = chemically synthesized
  source 1..20: mol_type = other DNA
gacccagcaaataaaactaa

SEQ ID NO: 10702 - DNA, 20 bp, synthetic construct
  misc_feature 1..20: note = chemically synthesized
  source 1..20: mol_type = other DNA
aaaactaagagcttctcttc

SEQ ID NO: 10703 - DNA, 20 bp, synthetic construct
  misc_feature 1..20: note = chemically synthesized
  source 1..20: mol_type = other DNA
aaactaagagcttctcttcc

SEQ ID NO: 10704 - DNA, 20 bp, synthetic construct
  misc_feature 1..20: note = chemically synthesized
  source 1..20: mol_type = other DNA
aactaagagcttctcttcca

SEQ ID NO: 10705 - DNA, 20 bp, synthetic construct
  misc_feature 1..20: note = chemically synthesized
  source 1..20: mol_type = other DNA
agcttctcttccagggtgac

SEQ ID NO: 10706 - DNA, 20 bp, synthetic construct
  misc_feature 1..20: note = chemically synthesized
  source 1..20: mol_type = other DNA
gcttctcttccagggtgaca

SEQ ID NO: 10707 - DNA, 20 bp, synthetic construct
  misc_feature 1..20: note = chemically synthesized
  source 1..20: mol_type = other DNA
cttctcttccagggtgacaa

SEQ ID NO: 10708 - DNA, 20 bp, synthetic construct
  misc_feature 1..20: note = chemically synthesized
  source 1..20: mol_type = other DNA
tctcttccagggtgacaagg

SEQ ID NO: 10709 - DNA, 20 bp, synthetic construct
  misc_feature 1..20: note = chemically synthesized
  source 1..20: mol_type = other DNA
aaccactacactcttgaccc

SEQ ID NO: 10710 - DNA, 20 bp, synthetic construct
  misc_feature 1..20: note = chemically synthesized
  source 1..20: mol_type = other DNA
accactacactcttgaccca

SEQ ID NO: 10711 - DNA, 20 bp, synthetic construct
  misc_feature 1..20: note = chemically synthesized
  source 1..20: mol_type = other DNA
ccactacactcttgacccaa

SEQ ID NO: 10712 - DNA, 20 bp, synthetic construct
  misc_feature 1..20: note = chemically synthesized
  source 1..20: mol_type = other DNA
actcttgacccaagggtatg

SEQ ID NO: 10713 - DNA, 20 bp, synthetic construct
  misc_feature 1..20: note = chemically synthesized
  source 1..20: mol_type = other DNA
tcttgacccaagggtatgta

SEQ ID NO: 10714 - DNA, 20 bp, synthetic construct
  misc_feature 1..20: note = chemically synthesized
  source 1..20: mol_type = other DNA
aagggtatgtagagacaatg

SEQ ID NO: 10715 - DNA, 20 bp, synthetic construct
  misc_feature 1..20: note = chemically synthesized
  source 1..20: mol_type = other DNA
gggtatgtagagacaatgaa

SEQ ID NO: 10716 - DNA, 20 bp, synthetic construct
  misc_feature 1..20: note = chemically synthesized
  source 1..20: mol_type = other DNA
ggtatgtagagacaatgaag

SEQ ID NO: 10717 - DNA, 20 bp, synthetic construct
  misc_feature 1..20: note = chemically synthesized
  source 1..20: mol_type = other DNA
gtatgtagagacaatgaaga

SEQ ID NO: 10718 - DNA, 20 bp, synthetic construct
  misc_feature 1..20: note = chemically synthesized
  source 1..20: mol_type = other DNA
tagagacaatgaagagggcc

SEQ ID NO: 10719 - DNA, 20 bp, synthetic construct
  misc_feature 1..20: note = chemically synthesized
  source 1..20: mol_type = other DNA
gagacaatgaagagggccaa

SEQ ID NO: 10720 - DNA, 20 bp, synthetic construct
  misc_feature 1..20: note = chemically synthesized
  source 1..20: mol_type = other DNA
acaatgaagagggccaagag

SEQ ID NO: 10721 - DNA, 20 bp, synthetic construct
  misc_feature 1..20: note = chemically synthesized
  source 1..20: mol_type = other DNA
caatgaagagggccaagaga

SEQ ID NO: 10722 - DNA, 20 bp, synthetic construct
  misc_feature 1..20: note = chemically synthesized
  source 1..20: mol_type = other DNA
aatgaagagggccaagagaa

SEQ ID NO: 10723 - DNA, 20 bp, synthetic construct
  misc_feature 1..20: note = chemically synthesized
  source 1..20: mol_type = other DNA
atgaagagggccaagagaag

SEQ ID NO: 10724 - DNA, 20 bp, synthetic construct
  misc_feature 1..20: note = chemically synthesized
  source 1..20: mol_type = other DNA
agagggccaagagaaggggt

SEQ ID NO: 10725 - DNA, 20 bp, synthetic construct
  misc_feature 1..20: note = chemically synthesized
  source 1..20: mol_type = other DNA
gagggccaagagaaggggtg

SEQ ID NO: 10726 - DNA, 20 bp, synthetic construct
  misc_feature 1..20: note = chemically synthesized
  source 1..20: mol_type = other DNA
agggccaagagaaggggtga

SEQ ID NO: 10727 - DNA, 20 bp, synthetic construct
  misc_feature 1..20: note = chemically synthesized
  source 1..20: mol_type = other DNA
gggccaagagaaggggtgag

SEQ ID NO: 10728 - DNA, 20 bp, synthetic construct
  misc_feature 1..20: note = chemically synthesized
  source 1..20: mol_type = other DNA
ggccaagagaaggggtgagg

SEQ ID NO: 10729 - DNA, 20 bp, synthetic construct
  misc_feature 1..20: note = chemically synthesized
  source 1..20: mol_type = other DNA
caagagaaggggtgaggggg

SEQ ID NO: 10730 - DNA, 20 bp, synthetic construct
  misc_feature 1..20: note = chemically synthesized
  source 1..20: mol_type = other DNA
aagagaaggggtgaggggga

SEQ ID NO: 10731 - DNA, 20 bp, synthetic construct
  misc_feature 1..20: note = chemically synthesized
  source 1..20: mol_type = other DNA
agagaaggggtgagggggaa

SEQ ID NO: 10732 - DNA, 20 bp, synthetic construct
  misc_feature 1..20: note = chemically synthesized
  source 1..20: mol_type = other DNA
gggcttgcatgacctccatt

SEQ ID NO: 10733 - DNA, 20 bp, synthetic construct
  misc_feature 1..20: note = chemically synthesized
  source 1..20: mol_type = other DNA
ggcttgcatgacctccattg

SEQ ID NO: 10734 - DNA, 20 bp, synthetic construct
  misc_feature 1..20: note = chemically synthesized
  source 1..20: mol_type = other DNA
cattgaggacgtccatgccc

SEQ ID NO: 10735 - DNA, 20 bp, synthetic construct
  misc_feature 1..20: note = chemically synthesized
  source 1..20: mol_type = other DNA
attgaggacgtccatgcccc

SEQ ID NO: 10736 - DNA, 20 bp, synthetic construct
  misc_feature 1..20: note = chemically synthesized
  source 1..20: mol_type = other DNA
aggacgtccatgccccggga

SEQ ID NO: 10737 - DNA, 20 bp, synthetic construct
  misc_feature 1..20: note = chemically synthesized
  source 1..20: mol_type = other DNA
gacgtccatgccccgggaca

SEQ ID NO: 10738 - DNA, 20 bp, synthetic construct
  misc_feature 1..20: note = chemically synthesized
  source 1..20: mol_type = other DNA
atgccccgggacagagtgcg

SEQ ID NO: 10739 - DNA, 20 bp, synthetic construct
  misc_feature 1..20: note = chemically synthesized
  source 1..20: mol_type = other DNA
cgggacagagtgcgaagtaa

SEQ ID NO: 10740 - DNA, 20 bp, synthetic construct
  misc_feature 1..20: note = chemically synthesized
  source 1..20: mol_type = other DNA
cagagtgcgaagtaaaagtg

SEQ ID NO: 10741 - DNA, 20 bp, synthetic construct
  misc_feature 1..20: note = chemically synthesized
  source 1..20: mol_type = other DNA
gcgaagtaaaagtgaagctt

SEQ ID NO: 10742 - DNA, 20 bp, synthetic construct
  misc_feature 1..20: note = chemically synthesized
  source 1..20: mol_type = other DNA
gaagtaaaagtgaagctttg

SEQ ID NO: 10743 - DNA, 20 bp, synthetic construct
  misc_feature 1..20: note = chemically synthesized
  source 1..20: mol_type = other DNA
tttggagctcttgacccaca

SEQ ID NO: 10744 - DNA, 20 bp, synthetic construct
  misc_feature 1..20: note = chemically synthesized
  source 1..20: mol_type = other DNA
tcttgacccacatggattct

SEQ ID NO: 10745 - DNA, 20 bp, synthetic construct
  misc_feature 1..20: note = chemically synthesized
  source 1..20: mol_type = other DNA
tgacccacatggattctcag

SEQ ID NO: 10746 - DNA, 20 bp, synthetic construct
  misc_feature 1..20: note = chemically synthesized
  source 1..20: mol_type = other DNA
cctccatcccacctcaaact

SEQ ID NO: 10747 - DNA, 20 bp, synthetic construct
  misc_feature 1..20: note = chemically synthesized
  source 1..20: mol_type = other DNA
ccatcccacctcaaactcag

SEQ ID NO: 10748 - DNA, 20 bp, synthetic construct
  misc_feature 1..20: note = chemically synthesized
  source 1..20: mol_type = other DNA
ctcaaactcagaagacaacc

SEQ ID NO: 10749 - DNA, 20 bp, synthetic construct
  misc_feature 1..20: note = chemically synthesized
  source 1..20: mol_type = other DNA
gaccgacaacttctttgtga

SEQ ID NO: 10750 - DNA, 20 bp, synthetic construct
  misc_feature 1..20: note = chemically synthesized
  source 1..20: mol_type = other DNA
ttctttgtgatggatctgaa

SEQ ID NO: 10751 - DNA, 20 bp, synthetic construct
  misc_feature 1..20: note = chemically synthesized
  source 1..20: mol_type = other DNA
tggatctgaacagcctccct

SEQ ID NO: 10752 - DNA, 20 bp, synthetic construct
  misc_feature 1..20: note = chemically synthesized
  source 1..20: mol_type = other DNA
tgaacagcctcccttggttc

SEQ ID NO: 10753 - DNA, 20 bp, synthetic construct
  misc_feature 1..20: note = chemically synthesized
  source 1..20: mol_type = other DNA
acagcctcccttggttctag

SEQ ID NO: 10754 - DNA, 20 bp, synthetic construct
  misc_feature 1..20: note = chemically synthesized
  source 1..20: mol_type = other DNA
gcctcccttggttctagcag

SEQ ID NO: 10755 - DNA, 20 bp, synthetic construct
  misc_feature 1..20: note = chemically synthesized
  source 1..20: mol_type = other DNA
cctcccttggttctagcaga

SEQ ID NO: 10756 - DNA, 20 bp, synthetic construct
  misc_feature 1..20: note = chemically synthesized
  source 1..20: mol_type = other DNA
ttctagcagaaggacttacc

SEQ ID NO: 10757 - DNA, 20 bp, synthetic construct
  misc_feature 1..20: note = chemically synthesized
  source 1..20: mol_type = other DNA
agcagaaggacttaccaagt

SEQ ID NO: 10758 - DNA, 20 bp, synthetic construct
  misc_feature 1..20: note = chemically synthesized
  source 1..20: mol_type = other DNA
agaaggacttaccaagtgag

SEQ ID NO: 10759 - DNA, 20 bp, synthetic construct
  misc_feature 1..20: note = chemically synthesized
  source 1..20: mol_type = other DNA
aaggacttaccaagtgagca

SEQ ID NO: 10760 - DNA, 20 bp, synthetic construct
  misc_feature 1..20: note = chemically synthesized
  source 1..20: mol_type = other DNA
agctcccatccgatactcgc

SEQ ID NO: 10761 - DNA, 20 bp, synthetic construct
  misc_feature 1..20: note = chemically synthesized
  source 1..20: mol_type = other DNA
atccgatactcgccagtgct

SEQ ID NO: 10762 - DNA, 20 bp, synthetic construct
  misc_feature 1..20: note = chemically synthesized
  source 1..20: mol_type = other DNA
tccgatactcgccagtgctg

SEQ ID NO: 10763 - DNA, 20 bp, synthetic construct
  misc_feature 1..20: note = chemically synthesized
  source 1..20: mol_type = other DNA
caactcttccactcctccca

SEQ ID NO: 10764 - DNA, 20 bp, synthetic construct
  misc_feature 1..20: note = chemically synthesized
  source 1..20: mol_type = other DNA
aactcttccactcctcccac

SEQ ID NO: 10765 - DNA, 20 bp, synthetic construct
  misc_feature 1..20: note = chemically synthesized
  source 1..20: mol_type = other DNA
actcttccactcctcccacg

SEQ ID NO: 10766 - DNA, 20 bp, synthetic construct
  misc_feature 1..20: note = chemically synthesized
  source 1..20: mol_type = other DNA
tcccacggggcctccgcatg

SEQ ID NO: 10767 - DNA, 20 bp, synthetic construct
  misc_feature 1..20: note = chemically synthesized
  source 1..20: mol_type = other DNA
cacggggcctccgcatgaag

SEQ ID NO: 10768 - DNA, 20 bp, synthetic construct
  misc_feature 1..20: note = chemically synthesized
  source 1..20: mol_type = other DNA
acggggcctccgcatgaagt

SEQ ID NO: 10769 - DNA, 20 bp, synthetic construct
  misc_feature 1..20: note = chemically synthesized
  source 1..20: mol_type = other DNA
aaatgattctgaaattctct

SEQ ID NO: 10770 - DNA, 20 bp, synthetic construct
  misc_feature 1..20: note = chemically synthesized
  source 1..20: mol_type = other DNA
tgattctgaaattctctcag

SEQ ID NO: 10771 - DNA, 20 bp, synthetic construct
  misc_feature 1..20: note = chemically synthesized
  source 1..20: mol_type = other DNA
attctgaaattctctcagtg

SEQ ID NO: 10772 - DNA, 20 bp, synthetic construct
  misc_feature 1..20: note = chemically synthesized
  source 1..20: mol_type = other DNA
ttctgaaattctctcagtgg

SEQ ID NO: 10773 - DNA, 20 bp, synthetic construct
  misc_feature 1..20: note = chemically synthesized
  source 1..20: mol_type = other DNA
ctctcagtggaggtctatgt

SEQ ID NO: 10774 - DNA, 20 bp, synthetic construct
  misc_feature 1..20: note = chemically synthesized
  source 1..20: mol_type = other DNA
agtggaggtctatgttagcc

SEQ ID NO: 10775 - DNA, 20 bp, synthetic construct
  misc_feature 1..20: note = chemically synthesized
  source 1..20: mol_type = other DNA
tgttagcctggccaatttga

SEQ ID NO: 10776 - DNA, 20 bp, synthetic construct
  misc_feature 1..20: note = chemically synthesized
  source 1..20: mol_type = other DNA
gttagcctggccaatttgaa

SEQ ID NO: 10777 - DNA, 20 bp, synthetic construct
  misc_feature 1..20: note = chemically synthesized
  source 1..20: mol_type = other DNA
gcctggccaatttgaaagga

SEQ ID NO: 10778 - DNA, 20 bp, synthetic construct
  misc_feature 1..20: note = chemically synthesized
  source 1..20: mol_type = other DNA
ctggccaatttgaaaggatg

SEQ ID NO: 10779 - DNA, 20 bp, synthetic construct
  misc_feature 1..20: note = chemically synthesized
  source 1..20: mol_type = other DNA
atttgaaaggatggagaata

SEQ ID NO: 10780 - DNA, 20 bp, synthetic construct
  misc_feature 1..20: note = chemically synthesized
  source 1..20: mol_type = other DNA
tttgaaaggatggagaatac

SEQ ID NO: 10781 - DNA, 20 bp, synthetic construct
  misc_feature 1..20: note = chemically synthesized
  source 1..20: mol_type = other DNA
ggatggagaatacaggaaaa

SEQ ID NO: 10782 - DNA, 20 bp, synthetic construct
  misc_feature 1..20: note = chemically synthesized
  source 1..20: mol_type = other DNA
tacaggaaaacagtaacatt

SEQ ID NO: 10783 - DNA, 20 bp, synthetic construct
  misc_feature 1..20: note = chemically synthesized
  source 1..20: mol_type = other DNA
aaaacagtaacatttggttt

SEQ ID NO: 10784 - DNA, 20 bp, synthetic construct
  misc_feature 1..20: note = chemically synthesized
  source 1..20: mol_type = other DNA
aatccatctgcaacgaacct

SEQ ID NO: 10785 - DNA, 20 bp, synthetic construct
  misc_feature 1..20: note = chemically synthesized
  source 1..20: mol_type = other DNA
atccatctgcaacgaacctc

SEQ ID NO: 10786 - DNA, 20 bp, synthetic construct
  misc_feature 1..20: note = chemically synthesized
  source 1..20: mol_type = other DNA
acgaacctcaggtcttgctt

SEQ ID NO: 10787 - DNA, 20 bp, synthetic construct
  misc_feature 1..20: note = chemically synthesized
  source 1..20: mol_type = other DNA
cttgcttcagcaaatattaa

SEQ ID NO: 10788 - DNA, 20 bp, synthetic construct
  misc_feature 1..20: note = chemically synthesized
  source 1..20: mol_type = other DNA
tcagcaaatattaatagcgt

SEQ ID NO: 10789 - DNA, 20 bp, synthetic construct
  misc_feature 1..20: note = chemically synthesized
  source 1..20: mol_type = other DNA
cagcaaatattaatagcgtc

SEQ ID NO: 10790 - DNA, 20 bp, synthetic construct
  misc_feature 1..20: note = chemically synthesized
  source 1..20: mol_type = other DNA
agcaaatattaatagcgtca

SEQ ID NO: 10791 - DNA, 20 bp, synthetic construct
  misc_feature 1..20: note = chemically synthesized
  source 1..20: mol_type = other DNA
aaatattaatagcgtcaggg

SEQ ID NO: 10792 - DNA, 20 bp, synthetic construct
  misc_feature 1..20: note = chemically synthesized
  source 1..20: mol_type = other DNA
aatagcgtcagggcagcctg

SEQ ID NO: 10793 - DNA, 20 bp, synthetic construct
  misc_feature 1..20: note = chemically synthesized
  source 1..20: mol_type = other DNA
tagcgtcagggcagcctgtg

SEQ ID NO: 10794 - DNA, 20 bp, synthetic construct
  misc_feature 1..20: note = chemically synthesized
  source 1..20: mol_type = other DNA
agggcagcctgtggagtgac

SEQ ID NO: 10795 - DNA, 20 bp, synthetic construct
  misc_feature 1..20: note = chemically synthesized
  source 1..20: mol_type = other DNA
gggcagcctgtggagtgact

SEQ ID NO: 10796 - DNA, 20 bp, synthetic construct
  misc_feature 1..20: note = chemically synthesized
  source 1..20: mol_type = other DNA
gcagcctgtggagtgactgg

SEQ ID NO: 10797 - DNA, 20 bp, synthetic construct
  misc_feature 1..20: note = chemically synthesized
  source 1..20: mol_type = other DNA
agcctgtggagtgactggga

SEQ ID NO: 10798 - DNA, 20 bp, synthetic construct
  misc_feature 1..20: note = chemically synthesized
  source 1..20: mol_type = other DNA
gcctgtggagtgactgggag

SEQ ID NO: 10799 - DNA, 20 bp, synthetic construct
  misc_feature 1..20: note = chemically synthesized
  source 1..20: mol_type = other DNA
gactgggagaggccaccacg

SEQ ID NO: 10800 - DNA, 20 bp, synthetic construct
  misc_feature 1..20: note = chemically synthesized
  source 1..20: mol_type = other DNA
cgcagctgaaaacttgcctc

SEQ ID NO: 10801 - DNA, 20 bp, synthetic construct
  misc_feature 1..20: note = chemically synthesized
  source 1..20: mol_type = other DNA
gcagctgaaaacttgcctct

SEQ ID NO: 10802 - DNA, 20 bp, synthetic construct
  misc_feature 1..20: note = chemically synthesized
  source 1..20: mol_type = other DNA
cagctgaaaacttgcctctg

SEQ ID NO: 10803 - DNA, 20 bp, synthetic construct
  misc_feature 1..20: note = chemically synthesized
  source 1..20: mol_type = other DNA
ctgaaaacttgcctctgggg

SEQ ID NO: 10804 - DNA, 20 bp, synthetic construct
  misc_feature 1..20: note = chemically synthesized
  source 1..20: mol_type = other DNA
gcctctggggaagccacatg

SEQ ID NO: 10805 - DNA, 20 bp, synthetic construct
  misc_feature 1..20: note = chemically synthesized
  source 1..20: mol_type = other DNA
gaagccacatgcggatcata

SEQ ID NO: 10806 - DNA, 20 bp, synthetic construct
  misc_feature 1..20: note = chemically synthesized
  source 1..20: mol_type = other DNA
agccacatgcggatcatatg

SEQ ID NO: 10807 - DNA, 20 bp, synthetic construct
  misc_feature 1..20: note = chemically synthesized
  source 1..20: mol_type = other DNA
tcatatggagctgttgactg

SEQ ID NO: 10808 - DNA, 20 bp, synthetic construct
  misc_feature 1..20: note = chemically synthesized
  source 1..20: mol_type = other DNA
ttccattcaaaacttccctc

SEQ ID NO: 10809 - DNA, 20 bp, synthetic construct
  misc_feature 1..20: note = chemically synthesized
  source 1..20: mol_type = other DNA
caaaacttccctcaagtttc

SEQ ID NO: 10810 - DNA, 20 bp, synthetic construct
  misc_feature 1..20: note = chemically synthesized
  source 1..20: mol_type = other DNA
caagtttccagcatgccttc

SEQ ID NO: 10811 - DNA, 20 bp, synthetic construct
  misc_feature 1..20: note = chemically synthesized
  source 1..20: mol_type = other DNA
cttccggacttgccttacca

SEQ ID NO: 10812 - DNA, 20 bp, synthetic construct
  misc_feature 1..20: note = chemically synthesized
  source 1..20: mol_type = other DNA
tgccttaccacagccttgtt

SEQ ID NO: 10813 - DNA, 20 bp, synthetic construct
  misc_feature 1..20: note = chemically synthesized
  source 1..20: mol_type = other DNA
ttaccacagccttgttcagc

SEQ ID NO: 10814 - DNA, 20 bp, synthetic construct
  misc_feature 1..20: note = chemically synthesized
  source 1..20: mol_type = other DNA
cagaaatgaaaacctcctcg

SEQ ID NO: 10815 - DNA, 20 bp, synthetic construct
  misc_feature 1..20: note = chemically synthesized
  source 1..20: mol_type = other DNA
aaatgaaaacctcctcgaag

SEQ ID NO: 10816 - DNA, 20 bp, synthetic construct
  misc_feature 1..20: note = chemically synthesized
  source 1..20: mol_type = other DNA
cgaagcagattatgaccccc

SEQ ID NO: 10817 - DNA, 20 bp, synthetic construct
  misc_feature 1..20: note = chemically synthesized
  source 1..20: mol_type = other DNA
cccccagaacccatcgtcct

SEQ ID NO: 10818 - DNA, 20 bp, synthetic construct
  misc_feature 1..20: note = chemically synthesized
  source 1..20: mol_type = other DNA
cacgcacactcactcacact

SEQ ID NO: 10819 - DNA, 20 bp, synthetic construct
  misc_feature 1..20: note = chemically synthesized
  source 1..20: mol_type = other DNA
tgtataattctgattctccc

SEQ ID NO: 10820 - DNA, 20 bp, synthetic construct
  misc_feature 1..20: note = chemically synthesized
  source 1..20: mol_type = other DNA
ctgattctccccagcctttg

SEQ ID NO: 10821 - DNA, 20 bp, synthetic construct
  misc_feature 1..20: note = chemically synthesized
  source 1..20: mol_type = other DNA
tgattctccccagcctttga

SEQ ID NO: 10822 - DNA, 20 bp, synthetic construct
  misc_feature 1..20: note = chemically synthesized
  source 1..20: mol_type = other DNA
agcctttgaaggtacgatcc

SEQ ID NO: 10823 - DNA, 20 bp, synthetic construct
  misc_feature 1..20: note = chemically synthesized
  source 1..20: mol_type = other DNA
ctttgaaggtacgatccgag

SEQ ID NO: 10824 - DNA, 20 bp, synthetic construct
  misc_feature 1..20: note = chemically synthesized
  source 1..20: mol_type = other DNA
gatccgagaagtaaatgcca

SEQ ID NO: 10825 - DNA, 20 bp, synthetic construct
  misc_feature 1..20: note = chemically synthesized
  source 1..20: mol_type = other DNA
tccgagaagtaaatgccaca

SEQ ID NO: 10826 - DNA, 20 bp, synthetic construct
  misc_feature 1..20: note = chemically synthesized
  source 1..20: mol_type = other DNA
aatgccacagagacaacaca

SEQ ID NO: 10827 - DNA, 20 bp, synthetic construct
  misc_feature 1..20: note = chemically synthesized
  source 1..20: mol_type = other DNA
gacaacacacagaactgctg

SEQ ID NO: 10828 - DNA, 20 bp, synthetic construct
  misc_feature 1..20: note = chemically synthesized
  source 1..20: mol_type = other DNA
acaacacacagaactgctgc

SEQ ID NO: 10829 - DNA, 20 bp, synthetic construct
  misc_feature 1..20: note = chemically synthesized
  source 1..20: mol_type = other DNA
acacagaactgctgcaggcc

SEQ ID NO: 10830 - DNA, 20 bp, synthetic construct
  misc_feature 1..20: note = chemically synthesized
  source 1..20: mol_type = other DNA
caagcctcaccacttcttaa

SEQ ID NO: 10831 - DNA, 20 bp, synthetic construct
  misc_feature 1..20: note = chemically synthesized
  source 1..20: mol_type = other DNA
tcaccacttcttaaaagtcc

SEQ ID NO: 10832 - DNA, 20 bp, synthetic construct
  misc_feature 1..20: note = chemically synthesized
  source 1..20: mol_type = other DNA
acttcttaaaagtccgagct

SEQ ID NO: 10833 - DNA, 20 bp, synthetic construct
  misc_feature 1..20: note = chemically synthesized
  source 1..20: mol_type = other DNA
tccgagcttagtttctcatt

SEQ ID NO: 10834 - DNA, 20 bp, synthetic construct
  misc_feature 1..20: note = chemically synthesized
  source 1..20: mol_type = other DNA
gtttctcattcagcccactg

SEQ ID NO: 10835 - DNA, 20 bp, synthetic construct
  misc_feature 1..20: note = chemically synthesized
  source 1..20: mol_type = other DNA
cccactgcagtctcctgacc

SEQ ID NO: 10836 - DNA, 20 bp, synthetic construct
  misc_feature 1..20: note = chemically synthesized
  source 1..20: mol_type = other DNA
ctgaccaagccacacacaaa

SEQ ID NO: 10837 - DNA, 20 bp, synthetic construct
  misc_feature 1..20: note = chemically synthesized
  source 1..20: mol_type = other DNA
aacctcctccctctgtttct

SEQ ID NO: 10838 - DNA, 20 bp, synthetic construct
  misc_feature 1..20: note = chemically synthesized
  source 1..20: mol_type = other DNA
acctcctccctctgtttctc

SEQ ID NO: 10839 - DNA, 20 bp, synthetic construct
  misc_feature 1..20: note = chemically synthesized
  source 1..20: mol_type = other DNA
tcaggaccctcacttgattt

SEQ ID NO: 10840 - DNA, 20 bp, synthetic construct
  misc_feature 1..20: note = chemically synthesized
  source 1..20: mol_type = other DNA
caggaccctcacttgatttc

SEQ ID NO: 10841 - DNA, 20 bp, synthetic construct
  misc_feature 1..20: note = chemically synthesized
  source 1..20: mol_type = other DNA
acttgatttcaggctcattc

SEQ ID NO: 10842 - DNA, 20 bp, synthetic construct
  misc_feature 1..20: note = chemically synthesized
  source 1..20: mol_type = other DNA
gatttcaggctcattctgga

SEQ ID NO: 10843 - DNA, 20 bp, synthetic construct
  misc_feature 1..20: note = chemically synthesized
  source 1..20: mol_type = other DNA
tcaggctcattctggacaga

SEQ ID NO: 10844 - DNA, 20 bp, synthetic construct
  misc_feature 1..20: note = chemically synthesized
  source 1..20: mol_type = other DNA
caggctcattctggacagat

SEQ ID NO: 10845 - DNA, 20 bp, synthetic construct
  misc_feature 1..20: note = chemically synthesized
  source 1..20: mol_type = other DNA
aggctcattctggacagatg

SEQ ID NO: 10846 - DNA, 20 bp, synthetic construct
  misc_feature 1..20: note = chemically synthesized
  source 1..20: mol_type = other DNA
tggggaaatgactacttgca

SEQ ID NO: 10847 - DNA, 20 bp, synthetic construct
  misc_feature 1..20: note = chemically synthesized
  source 1..20: mol_type = other DNA
ggaaatgactacttgcaaag

SEQ ID NO: 10848 - DNA, 20 bp, synthetic construct
  misc_feature 1..20: note = chemically synthesized
  source 1..20: mol_type = other DNA
gaaatgactacttgcaaagc

SEQ ID NO: 10849 - DNA, 20 bp, synthetic construct
  misc_feature 1..20: note = chemically synthesized
  source 1..20: mol_type = other DNA
tacattgcaacttttcccaa

SEQ ID NO: 10850 - DNA, 20 bp, synthetic construct
  misc_feature 1..20: note = chemically synthesized
  source 1..20: mol_type = other DNA
ccgtgctccttcaatatgcc

SEQ ID NO: 10851 - DNA, 20 bp, synthetic construct
  misc_feature 1..20: note = chemically synthesized
  source 1..20: mol_type = other DNA
tccttcaatatgcccagaac

SEQ ID NO: 10852 - DNA, 20 bp, synthetic construct
  misc_feature 1..20: note = chemically synthesized
  source 1..20: mol_type = other DNA
cttcaatatgcccagaactg

SEQ ID NO: 10853 - DNA, 20 bp, synthetic construct
  misc_feature 1..20: note = chemically synthesized
  source 1..20: mol_type = other DNA
ttcaatatgcccagaactgg

SEQ ID NO: 10854 - DNA, 20 bp, synthetic construct
  misc_feature 1..20: note = chemically synthesized
  source 1..20: mol_type = other DNA
tcaatatgcccagaactgga

SEQ ID NO: 10855 - DNA, 20 bp, synthetic construct
  misc_feature 1..20: note = chemically synthesized
  source 1..20: mol_type = other DNA
caatatgcccagaactggag

SEQ ID NO: 10856 - DNA, 20 bp, synthetic construct
  misc_feature 1..20: note = chemically synthesized
  source 1..20: mol_type = other DNA
gggaacattcttctctttcc

SEQ ID NO: 10857 - DNA, 20 bp, synthetic construct
  misc_feature 1..20: note = chemically synthesized
  source 1..20: mol_type = other DNA
aacattcttctctttcccag

SEQ ID NO: 10858 - DNA, 20 bp, synthetic construct
  misc_feature 1..20: note = chemically synthesized
  source 1..20: mol_type = other DNA
aagattgaaaaacttgacca

SEQ ID NO: 10859 - DNA, 20 bp, synthetic construct
  misc_feature 1..20: note = chemically synthesized
  source 1..20: mol_type = other DNA
aaacttgaccacagaaccca

SEQ ID NO: 10860 - DNA, 20 bp, synthetic construct
  misc_feature 1..20: note = chemically synthesized
  source 1..20: mol_type = other DNA
aacttgaccacagaacccat

SEQ ID NO: 10861 - DNA, 20 bp, synthetic construct
  misc_feature 1..20: note = chemically synthesized
  source 1..20: mol_type = other DNA
cttgaccacagaacccatgg

SEQ ID NO: 10862 - DNA, 20 bp, synthetic construct
  misc_feature 1..20: note = chemically synthesized
  source 1..20: mol_type = other DNA
ttgaccacagaacccatggg

SEQ ID NO: 10863 - DNA, 20 bp, synthetic construct
  misc_feature 1..20: note = chemically synthesized
  source 1..20: mol_type = other DNA
tgaccacagaacccatggga

SEQ ID NO: 10864 - DNA, 20 bp, synthetic construct
  misc_feature 1..20: note = chemically synthesized
  source 1..20: mol_type = other DNA
ccatgggagggacaactgtc

SEQ ID NO: 10865 - DNA, 20 bp, synthetic construct
  misc_feature 1..20: note = chemically synthesized
  source 1..20: mol_type = other DNA
gagggacaactgtccagcac

SEQ ID NO: 10866 - DNA, 20 bp, synthetic construct
  misc_feature 1..20: note = chemically synthesized
  source 1..20: mol_type = other DNA
gggacaactgtccagcacca

SEQ ID NO: 10867 - DNA, 20 bp, synthetic construct
  misc_feature 1..20: note = chemically synthesized
  source 1..20: mol_type = other DNA
cagcaccagagcttcctgcc

SEQ ID NO: 10868 - DNA, 20 bp, synthetic construct
  misc_feature 1..20: note = chemically synthesized
  source 1..20: mol_type = other DNA
cttcctgcccagttgttgcc

SEQ ID NO: 10869 - DNA, 20 bp, synthetic construct
  misc_feature 1..20: note = chemically synthesized
  source 1..20: mol_type = other DNA
gttgttgcctggcaccgctg

SEQ ID NO: 10870 - DNA, 20 bp, synthetic construct
  misc_feature 1..20: note = chemically synthesized
  source 1..20: mol_type = other DNA
ttgcctggcaccgctgaaga

SEQ ID NO: 10871 - DNA, 20 bp, synthetic construct
  misc_feature 1..20: note = chemically synthesized
  source 1..20: mol_type = other DNA
agaaagctgcaaacgtactg

SEQ ID NO: 10872 - DNA, 20 bp, synthetic construct
  misc_feature 1..20: note = chemically synthesized
  source 1..20: mol_type = other DNA
aaagctgcaaacgtactgaa

SEQ ID NO: 10873 - DNA, 20 bp, synthetic construct
  misc_feature 1..20: note = chemically synthesized
  source 1..20: mol_type = other DNA
aagctgcaaacgtactgaag

SEQ ID NO: 10874 - DNA, 20 bp, synthetic construct
  misc_feature 1..20: note = chemically synthesized
  source 1..20: mol_type = other DNA
ctgcaaacgtactgaagagg

SEQ ID NO: 10875 - DNA, 20 bp, synthetic construct
  misc_feature 1..20: note = chemically synthesized
  source 1..20: mol_type = other DNA
caaacgtactgaagaggtag

SEQ ID NO: 10876 - DNA, 20 bp, synthetic construct
  misc_feature 1..20: note = chemically synthesized
  source 1..20: mol_type = other DNA
aacgtactgaagaggtagca

SEQ ID NO: 10877 - DNA, 20 bp, synthetic construct
  misc_feature 1..20: note = chemically synthesized
  source 1..20: mol_type = other DNA
acgtactgaagaggtagcag

SEQ ID NO: 10878 - DNA, 20 bp, synthetic construct
  misc_feature 1..20: note = chemically synthesized
  source 1..20: mol_type = other DNA
cgtactgaagaggtagcaga

SEQ ID NO: 10879 - DNA, 20 bp, synthetic construct
  misc_feature 1..20: note = chemically synthesized
  source 1..20: mol_type = other DNA
actgaagaggtagcagaggg

SEQ ID NO: 10880 - DNA, 20 bp, synthetic construct
  misc_feature 1..20: note = chemically synthesized
  source 1..20: mol_type = other DNA
gaagaggtagcagagggtgg

SEQ ID NO: 10881 - DNA, 20 bp, synthetic construct
  misc_feature 1..20: note = chemically synthesized
  source 1..20: mol_type = other DNA
gtagcagagggtggcggccg

SEQ ID NO: 10882 - DNA, 20 bp, synthetic construct
  misc_feature 1..20: note = chemically synthesized
  source 1..20: mol_type = other DNA
tagcagagggtggcggccgc

SEQ ID NO: 10883 - DNA, 20 bp, synthetic construct
  misc_feature 1..20: note = chemically synthesized
  source 1..20: mol_type = other DNA
agggtggcggccgcaggcca

SEQ ID NO: 10884 - DNA, 20 bp, synthetic construct
  misc_feature 1..20: note = chemically synthesized
  source 1..20: mol_type = other DNA
gggtggcggccgcaggccaa

SEQ ID NO: 10885 - DNA, 20 bp, synthetic construct
  misc_feature 1..20: note = chemically synthesized
  source 1..20: mol_type = other DNA
gccaaaggattgaacaactg

SEQ ID NO: 10886 - DNA, 20 bp, synthetic construct
  misc_feature 1..20: note = chemically synthesized
  source 1..20: mol_type = other DNA
attgaacaactgtggaccct

SEQ ID NO: 10887 - DNA, 20 bp, synthetic construct
  misc_feature 1..20: note = chemically synthesized
  source 1..20: mol_type = other DNA
ttgaacaactgtggaccctc

SEQ ID NO: 10888 - DNA, 20 bp, synthetic construct
  misc_feature 1..20: note = chemically synthesized
  source 1..20: mol_type = other DNA
tgaacaactgtggaccctca

SEQ ID NO: 10889 - DNA, 20 bp, synthetic construct
  misc_feature 1..20: note = chemically synthesized
  source 1..20: mol_type = other DNA
acaactgtggaccctcaggg

SEQ ID NO: 10890 - DNA, 20 bp, synthetic construct
  misc_feature 1..20: note = chemically synthesized
  source 1..20: mol_type = other DNA
aatttcctcctctaccaaat

SEQ ID NO: 10891 - DNA, 20 bp, synthetic construct
  misc_feature 1..20: note = chemically synthesized
  source 1..20: mol_type = other DNA
atttcctcctctaccaaatg

SEQ ID NO: 10892 - DNA, 20 bp, synthetic construct
  misc_feature 1..20: note = chemically synthesized
  source 1..20: mol_type = other DNA
cctctaccaaatgaggctaa

SEQ ID NO: 10893 - DNA, 20 bp, synthetic construct
  misc_feature 1..20: note = chemically synthesized
  source 1..20: mol_type = other DNA
ctctaccaaatgaggctaat

SEQ ID NO: 10894 - DNA, 20 bp, synthetic construct
  misc_feature 1..20: note = chemically synthesized
  source 1..20: mol_type = other DNA
ctaccaaatgaggctaatgg

SEQ ID NO: 10895 - DNA, 20 bp, synthetic construct
  misc_feature 1..20: note = chemically synthesized
  source 1..20: mol_type = other DNA
aatgggagtgtttcctttcc

SEQ ID NO: 10896 - DNA, 20 bp, synthetic construct
  misc_feature 1..20: note = chemically synthesized
  source 1..20: mol_type = other DNA
atgggagtgtttcctttccg

SEQ ID NO: 10897 - DNA, 20 bp, synthetic construct
  misc_feature 1..20: note = chemically synthesized
  source 1..20: mol_type = other DNA
tttcctttccgaggttgttg

SEQ ID NO: 10898 - DNA, 20 bp, synthetic construct
  misc_feature 1..20: note = chemically synthesized
  source 1..20: mol_type = other DNA
ttcctttccgaggttgttgt

SEQ ID NO: 10899 - DNA, 20 bp, synthetic construct
  misc_feature 1..20: note = chemically synthesized
  source 1..20: mol_type = other DNA
tttccgaggttgttgtggga

SEQ ID NO: 10900 - DNA, 20 bp, synthetic construct
  misc_feature 1..20: note = chemically synthesized
  source 1..20: mol_type = other DNA
gggatggaatatcaatgtgt

SEQ ID NO: 10901 - DNA, 20 bp, synthetic construct
  misc_feature 1..20: note = chemically synthesized
  source 1..20: mol_type = other DNA
atatcaatgtgtcagacaca

SEQ ID NO: 10902 - DNA, 20 bp, synthetic construct
  misc_feature 1..20: note = chemically synthesized
  source 1..20: mol_type = other DNA
acacatggtaataatgacaa

SEQ ID NO: 10903 - DNA, 20 bp, synthetic construct
  misc_feature 1..20: note = chemically synthesized
  source 1..20: mol_type = other DNA
aataatgacaacagcaattc

SEQ ID NO: 10904 - DNA, 20 bp, synthetic construct
  misc_feature 1..20: note = chemically synthesized
  source 1..20: mol_type = other DNA
taatgacaacagcaattctg

SEQ ID NO: 10905 - DNA, 20 bp, synthetic construct
  misc_feature 1..20: note = chemically synthesized
  source 1..20: mol_type = other DNA
aatgacaacagcaattctgg

SEQ ID NO: 10906 - DNA, 20 bp, synthetic construct
  misc_feature 1..20: note = chemically synthesized
  source 1..20: mol_type = other DNA
caacagcaattctggaggtg

SEQ ID NO: 10907 - DNA, 20 bp, synthetic construct
  misc_feature 1..20: note = chemically synthesized
  source 1..20: mol_type = other DNA
aattctggaggtgcagcccc

SEQ ID NO: 10908 - DNA, 20 bp, synthetic construct
  misc_feature 1..20: note = chemically synthesized
  source 1..20: mol_type = other DNA
ttctggaggtgcagcccccg

SEQ ID NO: 10909 - DNA, 20 bp, synthetic construct
  misc_feature 1..20: note = chemically synthesized
  source 1..20: mol_type = other DNA
ggaggtgcagcccccggagc

SEQ ID NO: 10910 - DNA, 20 bp, synthetic construct
  misc_feature 1..20: note = chemically synthesized
  source 1..20: mol_type = other DNA
tccctcatttacttctcaca

SEQ ID NO: 10911 - DNA, 20 bp, synthetic construct
  misc_feature 1..20: note = chemically synthesized
  source 1..20: mol_type = other DNA
acttctcacatggactctat

SEQ ID NO: 10912 - DNA, 20 bp, synthetic construct
  misc_feature 1..20: note = chemically synthesized
  source 1..20: mol_type = other DNA
cttctcacatggactctatg

SEQ ID NO: 10913 - DNA, 20 bp, synthetic construct
  misc_feature 1..20: note = chemically synthesized
  source 1..20: mol_type = other DNA
tcacatggactctatgaggt

SEQ ID NO: 10914 - DNA, 20 bp, synthetic construct
  misc_feature 1..20: note = chemically synthesized
  source 1..20: mol_type = other DNA
cacatggactctatgaggta

SEQ ID NO: 10915 - DNA, 20 bp, synthetic construct
  misc_feature 1..20: note = chemically synthesized
  source 1..20: mol_type = other DNA
acatggactctatgaggtaa

SEQ ID NO: 10916 - DNA, 20 bp, synthetic construct
  misc_feature 1..20: note = chemically synthesized
  source 1..20: mol_type = other DNA
tctatgaggtaagggacctt

SEQ ID NO: 10917 - DNA, 20 bp, synthetic construct
  misc_feature 1..20: note = chemically synthesized
  source 1..20: mol_type = other DNA
cttgagttatctccatttca

SEQ ID NO: 10918 - DNA, 20 bp, synthetic construct
  misc_feature 1..20: note = chemically synthesized
  source 1..20: mol_type = other DNA
tgagttatctccatttcaca

SEQ ID NO: 10919 - DNA, 20 bp, synthetic construct
  misc_feature 1..20: note = chemically synthesized
  source 1..20: mol_type = other DNA
agttatctccatttcacaga

SEQ ID NO: 10920 - DNA, 20 bp, synthetic construct
  misc_feature 1..20: note = chemically synthesized
  source 1..20: mol_type = other DNA
gttatctccatttcacagag

SEQ ID NO: 10921 - DNA, 20 bp, synthetic construct
  misc_feature 1..20: note = chemically synthesized
  source 1..20: mol_type = other DNA
gagaggtgaaatgattccct

SEQ ID NO: 10922 - DNA, 20 bp, synthetic construct
  misc_feature 1..20: note = chemically synthesized
  source 1..20: mol_type = other DNA
ttccctcagactctcccaac

SEQ ID NO: 10923 - DNA, 20 bp, synthetic construct
  misc_feature 1..20: note = chemically synthesized
  source 1..20: mol_type = other DNA
ctcagactctcccaaccagc

SEQ ID NO: 10924 - DNA, 20 bp, synthetic construct
  misc_feature 1..20: note = chemically synthesized
  source 1..20: mol_type = other DNA
agactctcccaaccagctag

SEQ ID NO: 10925 - DNA, 20 bp, synthetic construct
  misc_feature 1..20: note = chemically synthesized
  source 1..20: mol_type = other DNA
ccaaccagctagcagtaaca

SEQ ID NO: 10926 - DNA, 20 bp, synthetic construct
  misc_feature 1..20: note = chemically synthesized
  source 1..20: mol_type = other DNA
gtaacatagaaatctgaacc

SEQ ID NO: 10927 - DNA, 20 bp, synthetic construct
  misc_feature 1..20: note = chemically synthesized
  source 1..20: mol_type = other DNA
aacatagaaatctgaaccca

SEQ ID NO: 10928 - DNA, 20 bp, synthetic construct
  misc_feature 1..20: note = chemically synthesized
  source 1..20: mol_type = other DNA
gagtaactgtgtcacacacc

SEQ ID NO: 10929 - DNA, 20 bp, synthetic construct
  misc_feature 1..20: note = chemically synthesized
  source 1..20: mol_type = other DNA
agtaactgtgtcacacaccc

SEQ ID NO: 10930 - DNA, 20 bp, synthetic construct
  misc_feature 1..20: note = chemically synthesized
  source 1..20: mol_type = other DNA
aactgtgtcacacacccagg

SEQ ID NO: 10931 - DNA, 20 bp, synthetic construct
  misc_feature 1..20: note = chemically synthesized
  source 1..20: mol_type = other DNA
actgtgtcacacacccaggc

SEQ ID NO: 10932 - DNA, 20 bp, synthetic construct
  misc_feature 1..20: note = chemically synthesized
  source 1..20: mol_type = other DNA
tcacacacccaggcaggcac

SEQ ID NO: 10933 - DNA, 20 bp, synthetic construct
  misc_feature 1..20: note = chemically synthesized
  source 1..20: mol_type = other DNA
ggcaggcacaagcctctcgt

SEQ ID NO: 10934 - DNA, 20 bp, synthetic construct
  misc_feature 1..20: note = chemically synthesized
  source 1..20: mol_type = other DNA
gcaggcacaagcctctcgta

SEQ ID NO: 10935 - DNA, 20 bp, synthetic construct
  misc_feature 1..20: note = chemically synthesized
  source 1..20: mol_type = other DNA
cgtaaggcaacacacgtcta

SEQ ID NO: 10936 - DNA, 20 bp, synthetic construct
  misc_feature 1..20: note = chemically synthesized
  source 1..20: mol_type = other DNA
gtaaggcaacacacgtctat

SEQ ID NO: 10937 - DNA, 20 bp, synthetic construct
  misc_feature 1..20: note = chemically synthesized
  source 1..20: mol_type = other DNA
taaggcaacacacgtctatg

SEQ ID NO: 10938 - DNA, 20 bp, synthetic construct
  misc_feature 1..20: note = chemically synthesized
  source 1..20: mol_type = other DNA
aggcaacacacgtctatggg

SEQ ID NO: 10939 - DNA, 20 bp, synthetic construct
  misc_feature 1..20: note = chemically synthesized
  source 1..20: mol_type = other DNA
gcaacacacgtctatgggga

SEQ ID NO: 10940 - DNA, 20 bp, synthetic construct
  misc_feature 1..20: note = chemically synthesized
  source 1..20: mol_type = other DNA
caacacacgtctatggggag

SEQ ID NO: 10941 - DNA, 20 bp, synthetic construct
  misc_feature 1..20: note = chemically synthesized
  source 1..20: mol_type = other DNA
aacacacgtctatggggaga

SEQ ID NO: 10942 - DNA, 20 bp, synthetic construct
  misc_feature 1..20: note = chemically synthesized
  source 1..20: mol_type = other DNA
acacacgtctatggggagag

SEQ ID NO: 10943 - DNA, 20 bp, synthetic construct
  misc_feature 1..20: note = chemically synthesized
  source 1..20: mol_type = other DNA
gagaggggactcccacccac

SEQ ID NO: 10944 - DNA, 20 bp, synthetic construct
  misc_feature 1..20: note = chemically synthesized
  source 1..20: mol_type = other DNA
agaggggactcccacccacg

SEQ ID NO: 10945 - DNA, 20 bp, synthetic construct
  misc_feature 1..20: note = chemically synthesized
  source 1..20: mol_type = other DNA
gaggggactcccacccacga

SEQ ID NO: 10946 - DNA, 20 bp, synthetic construct
  misc_feature 1..20: note = chemically synthesized
  source 1..20: mol_type = other DNA
ggggactcccacccacgagg

SEQ ID NO: 10947 - DNA, 20 bp, synthetic construct
  misc_feature 1..20: note = chemically synthesized
  source 1..20: mol_type = other DNA
acccacgagggagctgccac

SEQ ID NO: 10948 - DNA, 20 bp, synthetic construct
  misc_feature 1..20: note = chemically synthesized
  source 1..20: mol_type = other DNA
gctgccaccagaaacataat

SEQ ID NO: 10949 - DNA, 20 bp, synthetic construct
  misc_feature 1..20: note = chemically synthesized
  source 1..20: mol_type = other DNA
cagaaacataatgagaccct

SEQ ID NO: 10950 - DNA, 20 bp, synthetic construct
  misc_feature 1..20: note = chemically synthesized
  source 1..20: mol_type = other DNA
taatgagaccctgagctctt

SEQ ID NO: 10951 - DNA, 20 bp, synthetic construct
  misc_feature 1..20: note = chemically synthesized
  source 1..20: mol_type = other DNA
ccaacctgctcaccccataa

SEQ ID NO: 10952 - DNA, 20 bp, synthetic construct
  misc_feature 1..20: note = chemically synthesized
  source 1..20: mol_type = other DNA
caacctgctcaccccataat

SEQ ID NO: 10953 - DNA, 20 bp, synthetic construct
  misc_feature 1..20: note = chemically synthesized
  source 1..20: mol_type = other DNA
aacctgctcaccccataatg

SEQ ID NO: 10954 - DNA, 20 bp, synthetic construct
  misc_feature 1..20: note = chemically synthesized
  source 1..20: mol_type = other DNA
acctgctcaccccataatgg

SEQ ID NO: 10955 - DNA, 20 bp, synthetic construct
  misc_feature 1..20: note = chemically synthesized
  source 1..20: mol_type = other DNA
cataatgggggaactacttt

SEQ ID NO: 10956 - DNA, 20 bp, synthetic construct
  misc_feature 1..20: note = chemically synthesized
  source 1..20: mol_type = other DNA
ggggaactactttgagaccc

SEQ ID NO: 10957 - DNA, 20 bp, synthetic construct
  misc_feature 1..20: note = chemically synthesized
  source 1..20: mol_type = other DNA
gggaactactttgagacccc

SEQ ID NO: 10958 - DNA, 20 bp, synthetic construct
  misc_feature 1..20: note = chemically synthesized
  source 1..20: mol_type = other DNA
gaactactttgagaccccag

SEQ ID NO: 10959 - DNA, 20 bp, synthetic construct
  misc_feature 1..20: note = chemically synthesized
  source 1..20: mol_type = other DNA
tttgagaccccaggagcaca

SEQ ID NO: 10960 - DNA, 20 bp, synthetic construct
  misc_feature 1..20: note = chemically synthesized
  source 1..20: mol_type = other DNA
ccccaggagcacacagttcc

SEQ ID NO: 10961 - DNA, 20 bp, synthetic construct
  misc_feature 1..20: note = chemically synthesized
  source 1..20: mol_type = other DNA
agcacacagttccaagccat

SEQ ID NO: 10962 - DNA, 20 bp, synthetic construct
  misc_feature 1..20: note = chemically synthesized
  source 1..20: mol_type = other DNA
gccatgagtcataaccgtaa

SEQ ID NO: 10963 - DNA, 20 bp, synthetic construct
  misc_feature 1..20: note = chemically synthesized
  source 1..20: mol_type = other DNA
gtcataaccgtaatagtaat

SEQ ID NO: 10964 - DNA, 20 bp, synthetic construct
  misc_feature 1..20: note = chemically synthesized
  source 1..20: mol_type = other DNA
gacatgttttaccatgtgcc

SEQ ID NO: 10965 - DNA, 20 bp, synthetic construct
  misc_feature 1..20: note = chemically synthesized
  source 1..20: mol_type = other DNA
tttaccatgtgcccagcact

SEQ ID NO: 10966 - DNA, 20 bp, synthetic construct
  misc_feature 1..20: note = chemically synthesized
  source 1..20: mol_type = other DNA
catgtgcccagcactgagcc

SEQ ID NO: 10967 - DNA, 20 bp, synthetic construct
  misc_feature 1..20: note = chemically synthesized
  source 1..20: mol_type = other DNA
agcgcccccacatgctctca

SEQ ID NO: 10968 - DNA, 20 bp, synthetic construct
  misc_feature 1..20: note = chemically synthesized
  source 1..20: mol_type = other DNA
gcgcccccacatgctctcat

SEQ ID NO: 10969 - DNA, 20 bp, synthetic construct
  misc_feature 1..20: note = chemically synthesized
  source 1..20: mol_type = other DNA
atgctctcataggatgctca

SEQ ID NO: 10970 - DNA, 20 bp, synthetic construct
  misc_feature 1..20: note = chemically synthesized
  source 1..20: mol_type = other DNA
tgctctcataggatgctcaa

SEQ ID NO: 10971 - DNA, 20 bp, synthetic construct
  misc_feature 1..20: note = chemically synthesized
  source 1..20: mol_type = other DNA
aggatgctcaaaggccctat

SEQ ID NO: 10972 - DNA, 20 bp, synthetic construct
  misc_feature 1..20: note = chemically synthesized
  source 1..20: mol_type = other DNA
ggatgctcaaaggccctatg

SEQ ID NO: 10973 - DNA, 20 bp, synthetic construct
  misc_feature 1..20: note = chemically synthesized
  source 1..20: mol_type = other DNA
gctcaaaggccctatgaggc

SEQ ID NO: 10974 - DNA, 20 bp, synthetic construct
  misc_feature 1..20: note = chemically synthesized
  source 1..20: mol_type = other DNA
ccgtgattctccccacttta

SEQ ID NO: 10975 - DNA, 20 bp, synthetic construct
  misc_feature 1..20: note = chemically synthesized
  source 1..20: mol_type = other DNA
ttctccccactttacagatt

SEQ ID NO: 10976 - DNA, 20 bp, synthetic construct
  misc_feature 1..20: note = chemically synthesized
  source 1..20: mol_type = other DNA
tctccccactttacagattg

SEQ ID NO: 10977 - DNA, 20 bp, synthetic construct
  misc_feature 1..20: note = chemically synthesized
  source 1..20: mol_type = other DNA
ccccactttacagattgagg

SEQ ID NO: 10978 - DNA, 20 bp, synthetic construct
  misc_feature 1..20: note = chemically synthesized
  source 1..20: mol_type = other DNA
cactttacagattgaggaag

SEQ ID NO: 10979 - DNA, 20 bp, synthetic construct
  misc_feature 1..20: note = chemically synthesized
  source 1..20: mol_type = other DNA
ctttacagattgaggaagcg

SEQ ID NO: 10980 - DNA, 20 bp, synthetic construct
  misc_feature 1..20: note = chemically synthesized
  source 1..20: mol_type = other DNA
tttacagattgaggaagcgg

SEQ ID NO: 10981 - DNA, 20 bp, synthetic construct
  misc_feature 1..20: note = chemically synthesized
  source 1..20: mol_type = other DNA
agattgaggaagcggaggct

SEQ ID NO: 10982 - DNA, 20 bp, synthetic construct
  misc_feature 1..20: note = chemically synthesized
  source 1..20: mol_type = other DNA
gattgaggaagcggaggctt

SEQ ID NO: 10983 - DNA, 20 bp, synthetic construct
  misc_feature 1..20: note = chemically synthesized
  source 1..20: mol_type = other DNA
attgaggaagcggaggctta

SEQ ID NO: 10984 - DNA, 20 bp, synthetic construct
  misc_feature 1..20: note = chemically synthesized
  source 1..20: mol_type = other DNA
ttagggaatgaaatctgccc

SEQ ID NO: 10985 - DNA, 20 bp, synthetic construct
  misc_feature 1..20: note = chemically synthesized
  source 1..20: mol_type = other DNA
tagggaatgaaatctgccca

SEQ ID NO: 10986 - DNA, 20 bp, synthetic construct
  misc_feature 1..20: note = chemically synthesized
  source 1..20: mol_type = other DNA
tctgcccaaggttgcacaac

SEQ ID NO: 10987 - DNA, 20 bp, synthetic construct
  misc_feature 1..20: note = chemically synthesized
  source 1..20: mol_type = other DNA
caaggttgcacaactagaaa

SEQ ID NO: 10988 - DNA, 20 bp, synthetic construct
  misc_feature 1..20: note = chemically synthesized
  source 1..20: mol_type = other DNA
tggtattacttctttaccct

SEQ ID NO: 10989 - DNA, 20 bp, synthetic construct
  misc_feature 1..20: note = chemically synthesized
  source 1..20: mol_type = other DNA
cattttatttcgtgtaatca

SEQ ID NO: 10990 - DNA, 20 bp, synthetic construct
  misc_feature 1..20: note = chemically synthesized
  source 1..20: mol_type = other DNA
ttttatttcgtgtaatcaaa

SEQ ID NO: 10991 - DNA, 20 bp, synthetic construct
  misc_feature 1..20: note = chemically synthesized
  source 1..20: mol_type = other DNA
tatttcgtgtaatcaaagag

SEQ ID NO: 10992 - DNA, 20 bp, synthetic construct
  misc_feature 1..20: note = chemically synthesized
  source 1..20: mol_type = other DNA
ttcgtgtaatcaaagagaag

SEQ ID NO: 10993 - DNA, 20 bp, synthetic construct
  misc_feature 1..20: note = chemically synthesized
  source 1..20: mol_type = other DNA
gtaatcaaagagaagaagaa

SEQ ID NO: 10994 - DNA, 20 bp, synthetic construct
  misc_feature 1..20: note = chemically synthesized
  source 1..20: mol_type = other DNA
tcaaagagaagaagaaaaga

SEQ ID NO: 10995 - DNA, 20 bp, synthetic construct
  misc_feature 1..20: note = chemically synthesized
  source 1..20: mol_type = other DNA
aagagaagaagaaaagaaag

SEQ ID NO: 10996 - DNA, 20 bp, synthetic construct
  misc_feature 1..20: note = chemically synthesized
  source 1..20: mol_type = other DNA
aagaagatacatcatatgtc

SEQ ID NO: 10997 - DNA, 20 bp, synthetic construct
  misc_feature 1..20: note = chemically synthesized
  source 1..20: mol_type = other DNA
agaagatacatcatatgtca

SEQ ID NO: 10998 - DNA, 20 bp, synthetic construct
  misc_feature 1..20: note = chemically synthesized
  source 1..20: mol_type = other DNA
gaagatacatcatatgtcaa

SEQ ID NO: 10999 - DNA, 20 bp, synthetic construct
  misc_feature 1..20: note = chemically synthesized
  source 1..20: mol_type = other DNA
gtccctcctccctttcttac

SEQ ID NO: 11000 - DNA, 20 bp, synthetic construct
  misc_feature 1..20: note = chemically synthesized
  source 1..20: mol_type = other DNA
tcctccctttcttaccagct

SEQ ID NO: 11001 - DNA, 20 bp, synthetic construct
  misc_feature 1..20: note = chemically synthesized
  source 1..20: mol_type = other DNA
cctccctttcttaccagctc

SEQ ID NO: 11002 - DNA, 20 bp, synthetic construct
  misc_feature 1..20: note = chemically synthesized
  source 1..20: mol_type = other DNA
tcttaccagctcaggttaca

SEQ ID NO: 11003 - DNA, 20 bp, synthetic construct
  misc_feature 1..20: note = chemically synthesized
  source 1..20: mol_type = other DNA
gctcaggttacaaagacatc

SEQ ID NO: 11004 - DNA, 20 bp, synthetic construct
  misc_feature 1..20: note = chemically synthesized
  source 1..20: mol_type = other DNA
ctcaggttacaaagacatct

SEQ ID NO: 11005 - DNA, 20 bp, synthetic construct
  misc_feature 1..20: note = chemically synthesized
  source 1..20: mol_type = other DNA
aggttacaaagacatctagg

SEQ ID NO: 11006 - DNA, 20 bp, synthetic construct
  misc_feature 1..20: note = chemically synthesized
  source 1..20: mol_type = other DNA
ggttacaaagacatctaggt

SEQ ID NO: 11007 - DNA, 20 bp, synthetic construct
  misc_feature 1..20: note = chemically synthesized
  source 1..20: mol_type = other DNA
ttacaaagacatctaggtgg

SEQ ID NO: 11008 - DNA, 20 bp, synthetic construct
  misc_feature 1..20: note = chemically synthesized
  source 1..20: mol_type = other DNA
acaaagacatctaggtggga

SEQ ID NO: 11009 - DNA, 20 bp, synthetic construct
  misc_feature 1..20: note = chemically synthesized
  source 1..20: mol_type = other DNA
aagacatctaggtgggagag

SEQ ID NO: 11010 - DNA, 20 bp, synthetic construct
  misc_feature 1..20: note = chemically synthesized
  source 1..20: mol_type = other DNA
tgggagagaagactgcctct

SEQ ID NO: 11011 - DNA, 20 bp, synthetic construct
  misc_feature 1..20: note = chemically synthesized
  source 1..20: mol_type = other DNA
gggagagaagactgcctcta

SEQ ID NO: 11012 - DNA, 20 bp, synthetic construct
  misc_feature 1..20: note = chemically synthesized
  source 1..20: mol_type = other DNA
ggagagaagactgcctctaa

SEQ ID NO: 11013 - DNA, 20 bp, synthetic construct
  misc_feature 1..20: note = chemically synthesized
  source 1..20: mol_type = other DNA
gaagactgcctctaagggct

SEQ ID NO: 11014 - DNA, 20 bp, synthetic construct
  misc_feature 1..20: note = chemically synthesized
  source 1..20: mol_type = other DNA
ctgcctctaagggcttggct

SEQ ID NO: 11015 - DNA, 20 bp, synthetic construct
  misc_feature 1..20: note = chemically synthesized
  source 1..20: mol_type = other DNA
ctctaagggcttggctgagt

SEQ ID NO: 11016 - DNA, 20 bp, synthetic construct
  misc_feature 1..20: note = chemically synthesized
  source 1..20: mol_type = other DNA
taagggcttggctgagttgg

SEQ ID NO: 11017 - DNA, 20 bp, synthetic construct
  misc_feature 1..20: note = chemically synthesized
  source 1..20: mol_type = other DNA
aagggcttggctgagttggc

SEQ ID NO: 11018 - DNA, 20 bp, synthetic construct
  misc_feature 1..20: note = chemically synthesized
  source 1..20: mol_type = other DNA
ggcttggctgagttggcggg

SEQ ID NO: 11019 - DNA, 20 bp, synthetic construct
  misc_feature 1..20: note = chemically synthesized
  source 1..20: mol_type = other DNA
gcttggctgagttggcgggc

SEQ ID NO: 11020 - DNA, 20 bp, synthetic construct
  misc_feature 1..20: note = chemically synthesized
  source 1..20: mol_type = other DNA
ttggctgagttggcgggcgg

SEQ ID NO: 11021 - DNA, 20 bp, synthetic construct
  misc_feature 1..20: note = chemically synthesized
  source 1..20: mol_type = other DNA
gctgagttggcgggcgggag

SEQ ID NO: 11022 - DNA, 20 bp, synthetic construct
  misc_feature 1..20: note = chemically synthesized
  source 1..20: mol_type = other DNA
ctgagttggcgggcgggagc

SEQ ID NO: 11023 - DNA, 20 bp, synthetic construct
  misc_feature 1..20: note = chemically synthesized
  source 1..20: mol_type = other DNA
tgagttggcgggcgggagcg

SEQ ID NO: 11024 - DNA, 20 bp, synthetic construct
  misc_feature 1..20: note = chemically synthesized
  source 1..20: mol_type = other DNA
gagttggcgggcgggagcgg

SEQ ID NO: 11025 - DNA, 20 bp, synthetic construct
  misc_feature 1..20: note = chemically synthesized
  source 1..20: mol_type = other DNA
ttggcgggcgggagcggggg

SEQ ID NO: 11026 - DNA, 20 bp, synthetic construct
  misc_feature 1..20: note = chemically synthesized
  source 1..20: mol_type = other DNA
tggcgggcgggagcgggggc

SEQ ID NO: 11027 - DNA, 20 bp, synthetic construct
  misc_feature 1..20: note = chemically synthesized
  source 1..20: mol_type = other DNA
ggagcgggggcaggtatcca

SEQ ID NO: 11028 - DNA, 20 bp, synthetic construct
  misc_feature 1..20: note = chemically synthesized
  source 1..20: mol_type = other DNA
gagcgggggcaggtatccat

SEQ ID NO: 11029 - DNA, 20 bp, synthetic construct
  misc_feature 1..20: note = chemically synthesized
  source 1..20: mol_type = other DNA
aggtatccatgggataaacc

SEQ ID NO: 11030 - DNA, 20 bp, synthetic construct
  misc_feature 1..20: note = chemically synthesized
  source 1..20: mol_type = other DNA
gtatccatgggataaaccca

SEQ ID NO: 11031 - DNA, 20 bp, synthetic construct
  misc_feature 1..20: note = chemically synthesized
  source 1..20: mol_type = other DNA
tatccatgggataaacccag

SEQ ID NO: 11032 - DNA, 20 bp, synthetic construct
  misc_feature 1..20: note = chemically synthesized
  source 1..20: mol_type = other DNA
cagaggcccccaaattttcc

SEQ ID NO: 11033 - DNA, 20 bp, synthetic construct
  misc_feature 1..20: note = chemically synthesized
  source 1..20: mol_type = other DNA
tcccagtttttatttgctac

SEQ ID NO: 11034 - DNA, 20 bp, synthetic construct
  misc_feature 1..20: note = chemically synthesized
  source 1..20: mol_type = other DNA
gtttttatttgctactagaa

SEQ ID NO: 11035 - DNA, 20 bp, synthetic construct
  misc_feature 1..20: note = chemically synthesized
  source 1..20: mol_type = other DNA
tttttatttgctactagaaa

SEQ ID NO: 11036 - DNA, 20 bp, synthetic construct
  misc_feature 1..20: note = chemically synthesized
  source 1..20: mol_type = other DNA
tttatttgctactagaaaag

SEQ ID NO: 11037 - DNA, 20 bp, synthetic construct
  misc_feature 1..20: note = chemically synthesized
  source 1..20: mol_type = other DNA
atttgctactagaaaaggag

SEQ ID NO: 11038 - DNA, 20 bp, synthetic construct
  misc_feature 1..20: note = chemically synthesized
  source 1..20: mol_type = other DNA
tttgctactagaaaaggaga

SEQ ID NO: 11039 - DNA, 20 bp, synthetic construct
  misc_feature 1..20: note = chemically synthesized
  source 1..20: mol_type = other DNA
ggaaatcctgcctcccttat

SEQ ID NO: 11040 - DNA, 20 bp, synthetic construct
  misc_feature 1..20: note = chemically synthesized
  source 1..20: mol_type = other DNA
gaaatcctgcctcccttatg

SEQ ID NO: 11041 - DNA, 20 bp, synthetic construct
  misc_feature 1..20: note = chemically synthesized
  source 1..20: mol_type = other DNA
cctgcctcccttatgaggcc

SEQ ID NO: 11042 - DNA, 20 bp, synthetic construct
  misc_feature 1..20: note = chemically synthesized
  source 1..20: mol_type = other DNA
cctcccttatgaggcctagc

SEQ ID NO: 11043 - DNA, 20 bp, synthetic construct
  misc_feature 1..20: note = chemically synthesized
  source 1..20: mol_type = other DNA
ctcccttatgaggcctagcc

SEQ ID NO: 11044 - DNA, 20 bp, synthetic construct
  misc_feature 1..20: note = chemically synthesized
  source 1..20: mol_type = other DNA
tcccttatgaggcctagcca

SEQ ID NO: 11045 - DNA, 20 bp, synthetic construct
  misc_feature 1..20: note = chemically synthesized
  source 1..20: mol_type = other DNA
cccttatgaggcctagccag

SEQ ID NO: 11046 - DNA, 20 bp, synthetic construct
  misc_feature 1..20: note = chemically synthesized
  source 1..20: mol_type = other DNA
ttatgaggcctagccagggg

SEQ ID NO: 11047 - DNA, 20 bp, synthetic construct
  misc_feature 1..20: note = chemically synthesized
  source 1..20: mol_type = other DNA
tgattttatcacattttata

SEQ ID NO: 11048 - DNA, 20 bp, synthetic construct
  misc_feature 1..20: note = chemically synthesized
  source 1..20: mol_type = other DNA
ttttatatagatgtgcacaa

SEQ ID NO: 11049 - DNA, 20 bp, synthetic construct
  misc_feature 1..20: note = chemically synthesized
  source 1..20: mol_type = other DNA
gtgcacaatggtgccttttc

SEQ ID NO: 11050 - DNA, 20 bp, synthetic construct
  misc_feature 1..20: note = chemically synthesized
  source 1..20: mol_type = other DNA
gtgccttttcaagtctatga

SEQ ID NO: 11051 - DNA, 20 bp, synthetic construct
  misc_feature 1..20: note = chemically synthesized
  source 1..20: mol_type = other DNA
tgccttttcaagtctatgat

SEQ ID NO: 11052 - DNA, 20 bp, synthetic construct
  misc_feature 1..20: note = chemically synthesized
  source 1..20: mol_type = other DNA
ttattgtgtgaatatcattt

SEQ ID NO: 11053 - DNA, 20 bp, synthetic construct
  misc_feature 1..20: note = chemically synthesized
  source 1..20: mol_type = other DNA
tgtgtgaatatcatttcaga

SEQ ID NO: 11054 - DNA, 20 bp, synthetic construct
  misc_feature 1..20: note = chemically synthesized
  source 1..20: mol_type = other DNA
gtgtgaatatcatttcagac

SEQ ID NO: 11055 - DNA, 20 bp, synthetic construct
  misc_feature 1..20: note = chemically synthesized
  source 1..20: mol_type = other DNA
caggtccccaaaccacttga

SEQ ID NO: 11056 - DNA, 20 bp, synthetic construct
  misc_feature 1..20: note = chemically synthesized
  source 1..20: mol_type = other DNA
cccaaaccacttgaaagccc

SEQ ID NO: 11057 - DNA, 20 bp, synthetic construct
  misc_feature 1..20: note = chemically synthesized
  source 1..20: mol_type = other DNA
ttgaaagccctggtgtcccc

SEQ ID NO: 11058 - DNA, 20 bp, synthetic construct
  misc_feature 1..20: note = chemically synthesized
  source 1..20: mol_type = other DNA
tgaaagccctggtgtcccct

SEQ ID NO: 11059 - DNA, 20 bp, synthetic construct
  misc_feature 1..20: note = chemically synthesized
  source 1..20: mol_type = other DNA
aagccctggtgtcccctagg

SEQ ID NO: 11060 - DNA, 20 bp, synthetic construct
  misc_feature 1..20: note = chemically synthesized
  source 1..20: mol_type = other DNA
agccctggtgtcccctaggt

SEQ ID NO: 11061 - DNA, 20 bp, synthetic construct
  misc_feature 1..20: note = chemically synthesized
  source 1..20: mol_type = other DNA
taggtgggattctatgaacc

SEQ ID NO: 11062 - DNA, 20 bp, synthetic construct
  misc_feature 1..20: note = chemically synthesized
  source 1..20: mol_type = other DNA
ggattctatgaacccagctt

SEQ ID NO: 11063 - DNA, 20 bp, synthetic construct
  misc_feature 1..20: note = chemically synthesized
  source 1..20: mol_type = other DNA
tatgaacccagctttagccc

SEQ ID NO: 11064 - DNA, 20 bp, synthetic construct
  misc_feature 1..20: note = chemically synthesized
  source 1..20: mol_type = other DNA
gaacccagctttagccccag

SEQ ID NO: 11065 - DNA, 20 bp, synthetic construct
  misc_feature 1..20: note = chemically synthesized
  source 1..20: mol_type = other DNA
tttagccccagcagctcctc

SEQ ID NO: 11066 - DNA, 20 bp, synthetic construct
  misc_feature 1..20: note = chemically synthesized
  source 1..20: mol_type = other DNA
agccccagcagctcctctgg

SEQ ID NO: 11067 - DNA, 20 bp, synthetic construct
  misc_feature 1..20: note = chemically synthesized
  source 1..20: mol_type = other DNA
gccccagcagctcctctggt

SEQ ID NO: 11068 - DNA, 20 bp, synthetic construct
  misc_feature 1..20: note = chemically synthesized
  source 1..20: mol_type = other DNA
gcagctcctctggtgggaac

SEQ ID NO: 11069 - DNA, 20 bp, synthetic construct
  misc_feature 1..20: note = chemically synthesized
  source 1..20: mol_type = other DNA
aactagaacatgcctcctgc

SEQ ID NO: 11070 - DNA, 20 bp, synthetic construct
  misc_feature 1..20: note = chemically synthesized
  source 1..20: mol_type = other DNA
agaacatgcctcctgccagt

SEQ ID NO: 11071 - DNA, 20 bp, synthetic construct
  misc_feature 1..20: note = chemically synthesized
  source 1..20: mol_type = other DNA
tgcctcctgccagttagtaa

SEQ ID NO: 11072 - DNA, 20 bp, synthetic construct
  misc_feature 1..20: note = chemically synthesized
  source 1..20: mol_type = other DNA
gcctcctgccagttagtaac

SEQ ID NO: 11073 - DNA, 20 bp, synthetic construct
  misc_feature 1..20: note = chemically synthesized
  source 1..20: mol_type = other DNA
cctcctgccagttagtaaca

SEQ ID NO: 11074 - DNA, 20 bp, synthetic construct
  misc_feature 1..20: note = chemically synthesized
  source 1..20: mol_type = other DNA
ttcaattacttcgccacttg

SEQ ID NO: 11075 - DNA, 20 bp, synthetic construct
  misc_feature 1..20: note = chemically synthesized
  source 1..20: mol_type = other DNA
aattacttcgccacttgtgg

SEQ ID NO: 11076 - DNA, 20 bp, synthetic construct
  misc_feature 1..20: note = chemically synthesized
  source 1..20: mol_type = other DNA
attacttcgccacttgtggc

SEQ ID NO: 11077 - DNA, 20 bp, synthetic construct
  misc_feature 1..20: note = chemically synthesized
  source 1..20: mol_type = other DNA
tacttcgccacttgtggcag

SEQ ID NO: 11078 - DNA, 20 bp, synthetic construct
  misc_feature 1..20: note = chemically synthesized
  source 1..20: mol_type = other DNA
acttcgccacttgtggcagg

SEQ ID NO: 11079 - DNA, 20 bp, synthetic construct
  misc_feature 1..20: note = chemically synthesized
  source 1..20: mol_type = other DNA
cttcgccacttgtggcagga

SEQ ID NO: 11080 - DNA, 20 bp, synthetic construct
  misc_feature 1..20: note = chemically synthesized
  source 1..20: mol_type = other DNA
ccacttgtggcaggagggca

SEQ ID NO: 11081 - DNA, 20 bp, synthetic construct
  misc_feature 1..20: note = chemically synthesized
  source 1..20: mol_type = other DNA
gggcaaagactgcacattaa

SEQ ID NO: 11082 - DNA, 20 bp, synthetic construct
  misc_feature 1..20: note = chemically synthesized
  source 1..20: mol_type = other DNA
gcaaagactgcacattaaaa

SEQ ID NO: 11083 - DNA, 20 bp, synthetic construct
  misc_feature 1..20: note = chemically synthesized
  source 1..20: mol_type = other DNA
attaaaagagctaaaaatgt

SEQ ID NO: 11084 - DNA, 20 bp, synthetic construct
  misc_feature 1..20: note = chemically synthesized
  source 1..20: mol_type = other DNA
ttaaaagagctaaaaatgtc

SEQ ID NO: 11085 - DNA, 20 bp, synthetic construct
  misc_feature 1..20: note = chemically synthesized
  source 1..20: mol_type = other DNA
aaagagctaaaaatgtcagg

SEQ ID NO: 11086 - DNA, 20 bp, synthetic construct
  misc_feature 1..20: note = chemically synthesized
  source 1..20: mol_type = other DNA
taaaaatgtcaggaagttat

SEQ ID NO: 11087 - DNA, 20 bp, synthetic construct
  misc_feature 1..20: note = chemically synthesized
  source 1..20: mol_type = other DNA
aaaaatgtcaggaagttatt

SEQ ID NO: 11088 - DNA, 20 bp, synthetic construct
  misc_feature 1..20: note = chemically synthesized
  source 1..20: mol_type = other DNA
tcacaataaactaaaaaaca

SEQ ID NO: 11089 - DNA, 20 bp, synthetic construct
  misc_feature 1..20: note = chemically synthesized
  source 1..20: mol_type = other DNA
cacaataaactaaaaaacac

SEQ ID NO: 11090 - DNA, 20 bp, synthetic construct
  misc_feature 1..20: note = chemically synthesized
  source 1..20: mol_type = other DNA
aataaactaaaaaacacagg

SEQ ID NO: 11091 - DNA, 20 bp, synthetic construct
  misc_feature 1..20: note = chemically synthesized
  source 1..20: mol_type = other DNA
taaactaaaaaacacaggaa

SEQ ID NO: 11092 - DNA, 20 bp, synthetic construct
  misc_feature 1..20: note = chemically synthesized
  source 1..20: mol_type = other DNA
aaactaaaaaacacaggaag

SEQ ID NO: 11093 - DNA, 20 bp, synthetic construct
  misc_feature 1..20: note = chemically synthesized
  source 1..20: mol_type = other DNA
aaaaaacacaggaagaggcc

SEQ ID NO: 11094 - DNA, 20 bp, synthetic construct
  misc_feature 1..20: note = chemically synthesized
  source 1..20: mol_type = other DNA
aaacacaggaagaggccaag

SEQ ID NO: 11095 - DNA, 20 bp, synthetic construct
  misc_feature 1..20: note = chemically synthesized
  source 1..20: mol_type = other DNA
caggaagaggccaagaagat

SEQ ID NO: 11096 - DNA, 20 bp, synthetic construct
  misc_feature 1..20: note = chemically synthesized
  source 1..20: mol_type = other DNA
gccaagaagataagaaaatc

SEQ ID NO: 11097 - DNA, 20 bp, synthetic construct
  misc_feature 1..20: note = chemically synthesized
  source 1..20: mol_type = other DNA
aagaaaatcgagaacaaaac

SEQ ID NO: 11098 - DNA, 20 bp, synthetic construct
  misc_feature 1..20: note = chemically synthesized
  source 1..20: mol_type = other DNA
acaaaacaagcccaaacaca

SEQ ID NO: 11099 - DNA, 20 bp, synthetic construct
  misc_feature 1..20: note = chemically synthesized
  source 1..20: mol_type = other DNA
caaaacaagcccaaacacat

SEQ ID NO: 11100 - DNA, 20 bp, synthetic construct
  misc_feature 1..20: note = chemically synthesized
  source 1..20: mol_type = other DNA
caaacacatgggtttgccat

SEQ ID NO: 11101 - DNA, 20 bp, synthetic construct
  misc_feature 1..20: note = chemically synthesized
  source 1..20: mol_type = other DNA
catgggtttgccatcggtcc

SEQ ID NO: 11102 - DNA, 20 bp, synthetic construct
  misc_feature 1..20: note = chemically synthesized
  source 1..20: mol_type = other DNA
atgggtttgccatcggtcct

SEQ ID NO: 11103 - DNA, 20 bp, synthetic construct
  misc_feature 1..20: note = chemically synthesized
  source 1..20: mol_type = other DNA
catcggtcctgggtcctgcc

SEQ ID NO: 11104 - DNA, 20 bp, synthetic construct
  misc_feature 1..20: note = chemically synthesized
  source 1..20: mol_type = other DNA
atcggtcctgggtcctgccc

SEQ ID NO: 11105 - DNA, 20 bp, synthetic construct
  misc_feature 1..20: note = chemically synthesized
  source 1..20: mol_type = other DNA
gtcctgggtcctgcccagga

SEQ ID NO: 11106 - DNA, 20 bp, synthetic construct
  misc_feature 1..20: note = chemically synthesized
  source 1..20: mol_type = other DNA
tcctgggtcctgcccaggaa

SEQ ID NO: 11107 - DNA, 20 bp, synthetic construct
  misc_feature 1..20: note = chemically synthesized
  source 1..20: mol_type = other DNA
ggaaaggctgcgcctctaac

SEQ ID NO: 11108 - DNA, 20 bp, synthetic construct
  misc_feature 1..20: note = chemically synthesized
  source 1..20: mol_type = other DNA
aaaggctgcgcctctaacaa

SEQ ID NO: 11109 - DNA, 20 bp, synthetic construct
  misc_feature 1..20: note = chemically synthesized
  source 1..20: mol_type = other DNA
gagcaccttttccccacccc

SEQ ID NO: 11110 - DNA, 20 bp, synthetic construct
  misc_feature 1..20: note = chemically synthesized
  source 1..20: mol_type = other DNA
ccccacccctggcctttctt

SEQ ID NO: 11111 - DNA, 20 bp, synthetic construct
  misc_feature 1..20: note = chemically synthesized
  source 1..20: mol_type = other DNA
gcctttcttgagccttcctt

SEQ ID NO: 11112 - DNA, 20 bp, synthetic construct
  misc_feature 1..20: note = chemically synthesized
  source 1..20: mol_type = other DNA
tccttgcatattatcgttct

SEQ ID NO: 11113 - DNA, 20 bp, synthetic construct
  misc_feature 1..20: note = chemically synthesized
  source 1..20: mol_type = other DNA
ttatcgttctcagccaccga

SEQ ID NO: 11114 - DNA, 20 bp, synthetic construct
  misc_feature 1..20: note = chemically synthesized
  source 1..20: mol_type = other DNA
gccaccgacagcttaattca

SEQ ID NO: 11115 - DNA, 20 bp, synthetic construct
  misc_feature 1..20: note = chemically synthesized
  source 1..20: mol_type = other DNA
ccaccgacagcttaattcac

SEQ ID NO: 11116 - DNA, 20 bp, synthetic construct
  misc_feature 1..20: note = chemically synthesized
  source 1..20: mol_type = other DNA
aattcacaggcccttccaac

SEQ ID NO: 11117 - DNA, 20 bp, synthetic construct
  misc_feature 1..20: note = chemically synthesized
  source 1..20: mol_type = other DNA
ccttccaacaagttaaactt

SEQ ID NO: 11118 - DNA, 20 bp, synthetic construct
  misc_feature 1..20: note = chemically synthesized
  source 1..20: mol_type = other DNA
atttaaaaaaaaaaaaaaaa

SEQ ID NO: 11119 - DNA, 20 bp, synthetic construct
  misc_feature 1..20: note = chemically synthesized
  source 1..20: mol_type = other DNA
ttaaaaaaaaaaaaaaaaaa

SEQ ID NO: 11120 - DNA, 20 bp, synthetic construct
  misc_feature 1..20: note = chemically synthesized
  source 1..20: mol_type = other DNA
tgatttcttacctgcacacg

SEQ ID NO: 11121 - DNA, 20 bp, synthetic construct
  misc_feature 1..20: note = chemically synthesized
  source 1..20: mol_type = other DNA
gatttcttacctgcacacgc

SEQ ID NO: 11122 - DNA, 20 bp, synthetic construct
  misc_feature 1..20: note = chemically synthesized
  source 1..20: mol_type = other DNA
acctgcacacgcaggcacgc

SEQ ID NO: 11123 - DNA, 20 bp, synthetic construct
  misc_feature 1..20: note = chemically synthesized
  source 1..20: mol_type = other DNA
gccccaccccactgcaccac

SEQ ID NO: 11124 - DNA, 20 bp, synthetic construct
  misc_feature 1..20: note = chemically synthesized
  source 1..20: mol_type = other DNA
gcaccacgagctctcacacc

SEQ ID NO: 11125 - DNA, 20 bp, synthetic construct
  misc_feature 1..20: note = chemically synthesized
  source 1..20: mol_type = other DNA
acaaccaaacccttcccatc

SEQ ID NO: 11126 - DNA, 20 bp, synthetic construct
  misc_feature 1..20: note = chemically synthesized
  source 1..20: mol_type = other DNA
aacccttcccatctggccct

SEQ ID NO: 11127 - DNA, 20 bp, synthetic construct
  misc_feature 1..20: note = chemically synthesized
  source 1..20: mol_type = other DNA
acccttcccatctggccctc

SEQ ID NO: 11128 - DNA, 20 bp, synthetic construct
  misc_feature 1..20: note = chemically synthesized
  source 1..20: mol_type = other DNA
ccatctggccctcgggttac

SEQ ID NO: 11129 - DNA, 20 bp, synthetic construct
  misc_feature 1..20: note = chemically synthesized
  source 1..20: mol_type = other DNA
atcacaactttttttcccaa

SEQ ID NO: 11130 - DNA, 20 bp, synthetic construct
  misc_feature 1..20: note = chemically synthesized
  source 1..20: mol_type = other DNA
caactttttttcccaacggc

SEQ ID NO: 11131 - DNA, 20 bp, synthetic construct
  misc_feature 1..20: note = chemically synthesized
  source 1..20: mol_type = other DNA
tttttttcccaacggcaagc

SEQ ID NO: 11132 - DNA, 20 bp, synthetic construct
  misc_feature 1..20: note = chemically synthesized
  source 1..20: mol_type = other DNA
ttttttcccaacggcaagcc

SEQ ID NO: 11133 - DNA, 20 bp, synthetic construct
  misc_feature 1..20: note = chemically synthesized
  source 1..20: mol_type = other DNA
ttcccaacggcaagccagga

SEQ ID NO: 11134 - DNA, 20 bp, synthetic construct
  misc_feature 1..20: note = chemically synthesized
  source 1..20: mol_type = other DNA
cggcaagccaggaaagatga

SEQ ID NO: 11135 - DNA, 20 bp, synthetic construct
  misc_feature 1..20: note = chemically synthesized
  source 1..20: mol_type = other DNA
gatgatagaacccgcatatg

SEQ ID NO: 11136 - DNA, 20 bp, synthetic construct
  misc_feature 1..20: note = chemically synthesized
  source 1..20: mol_type = other DNA
gaacccgcatatgtagccaa

SEQ ID NO: 11137 - DNA, 20 bp, synthetic construct
  misc_feature 1..20: note = chemically synthesized
  source 1..20: mol_type = other DNA
cgcatatgtagccaaaagac

SEQ ID NO: 11138 - DNA, 20 bp, synthetic construct
  misc_feature 1..20: note = chemically synthesized
  source 1..20: mol_type = other DNA
gccaaaagactggcctcaac

SEQ ID NO: 11139 - DNA, 20 bp, synthetic construct
  misc_feature 1..20: note = chemically synthesized
  source 1..20: mol_type = other DNA
aagactggcctcaactggtt

SEQ ID NO: 11140 - DNA, 20 bp, synthetic construct
  misc_feature 1..20: note = chemically synthesized
  source 1..20: mol_type = other DNA
gactggcctcaactggttca

SEQ ID NO: 11141 - DNA, 20 bp, synthetic construct
  misc_feature 1..20: note = chemically synthesized
  source 1..20: mol_type = other DNA
actggcctcaactggttcag

SEQ ID NO: 11142 - DNA, 20 bp, synthetic construct
  misc_feature 1..20: note = chemically synthesized
  source 1..20: mol_type = other DNA
tggcctcaactggttcagag

SEQ ID NO: 11143 - DNA, 20 bp, synthetic construct
  misc_feature 1..20: note = chemically synthesized
  source 1..20: mol_type = other DNA
ggcctcaactggttcagagg

SEQ ID NO: 11144 - DNA, 20 bp, synthetic construct
  misc_feature 1..20: note = chemically synthesized
  source 1..20: mol_type = other DNA
gcctcaactggttcagagga

SEQ ID NO: 11145 - DNA, 20 bp, synthetic construct
  misc_feature 1..20: note = chemically synthesized
  source 1..20: mol_type = other DNA
ttcagaggagggaaaaaatt

SEQ ID NO: 11146 - DNA, 20 bp, synthetic construct
  misc_feature 1..20: note = chemically synthesized
  source 1..20: mol_type = other DNA
attttttatttttttgcctt

SEQ ID NO: 11147 - DNA, 20 bp, synthetic construct
  misc_feature 1..20: note = chemically synthesized
  source 1..20: mol_type = other DNA
atttttttgcctttagccaa

SEQ ID NO: 11148 - DNA, 20 bp, synthetic construct
  misc_feature 1..20: note = chemically synthesized
  source 1..20: mol_type = other DNA
tttgcctttagccaaaagac

SEQ ID NO: 11149 - DNA, 20 bp, synthetic construct
  misc_feature 1..20: note = chemically synthesized
  source 1..20: mol_type = other DNA
ttgcctttagccaaaagacc

SEQ ID NO: 11150 - DNA, 20 bp, synthetic construct
  misc_feature 1..20: note = chemically synthesized
  source 1..20: mol_type = other DNA
tgcctttagccaaaagacca

SEQ ID NO: 11151 - DNA, 20 bp, synthetic construct
  misc_feature 1..20: note = chemically synthesized
  source 1..20: mol_type = other DNA
cctttagccaaaagaccagg

SEQ ID NO: 11152 - DNA, 20 bp, synthetic construct
  misc_feature 1..20: note = chemically synthesized
  source 1..20: mol_type = other DNA
accagggagcatttgatgta

SEQ ID NO: 11153 - DNA, 20 bp, synthetic construct
  misc_feature 1..20: note = chemically synthesized
  source 1..20: mol_type = other DNA
gggagcatttgatgtacagt

SEQ ID NO: 11154 - DNA, 20 bp, synthetic construct
  misc_feature 1..20: note = chemically synthesized
  source 1..20: mol_type = other DNA
agcatttgatgtacagtcag

SEQ ID NO: 11155 - DNA, 20 bp, synthetic construct
  misc_feature 1..20: note = chemically synthesized
  source 1..20: mol_type = other DNA
gcatttgatgtacagtcagc

SEQ ID NO: 11156 - DNA, 20 bp, synthetic construct
  misc_feature 1..20: note = chemically synthesized
  source 1..20: mol_type = other DNA
cagtcagcaggtatttaaaa

SEQ ID NO: 11157 - DNA, 20 bp, synthetic construct
  misc_feature 1..20: note = chemically synthesized
  source 1..20: mol_type = other DNA
cagcaggtatttaaaaaaga

SEQ ID NO: 11158 - DNA, 20 bp, synthetic construct
  misc_feature 1..20: note = chemically synthesized
  source 1..20: mol_type = other DNA
aggtatttaaaaaagaaaga

SEQ ID NO: 11159 - DNA, 20 bp, synthetic construct
  misc_feature 1..20: note = chemically synthesized
  source 1..20: mol_type = other DNA
ttaaaaaagaaagaaagaaa

SEQ ID NO: 11160 - DNA, 20 bp, synthetic construct
  misc_feature 1..20: note = chemically synthesized
  source 1..20: mol_type = other DNA
taaaaaagaaagaaagaaaa

SEQ ID NO: 11161 - DNA, 20 bp, synthetic construct
  misc_feature 1..20: note = chemically synthesized
  source 1..20: mol_type = other DNA
aggaaaaaaaaaacactgaa

SEQ ID NO: 11162 - DNA, 20 bp, synthetic construct
  misc_feature 1..20: note = chemically synthesized
  source 1..20: mol_type = other DNA
ggaaaaaaaaaacactgaaa

SEQ ID NO: 11163 - DNA, 20 bp, synthetic construct
  misc_feature 1..20: note = chemically synthesized
  source 1..20: mol_type = other DNA
aaaaaaacactgaaaaggct

SEQ ID NO: 11164 - DNA, 20 bp, synthetic construct
  misc_feature 1..20: note = chemically synthesized
  source 1..20: mol_type = other DNA
ctgaaaaggcttggctgcac

SEQ ID NO: 11165 - DNA, 20 bp, synthetic construct
  misc_feature 1..20: note = chemically synthesized
  source 1..20: mol_type = other DNA
tgaaaaggcttggctgcact

SEQ ID NO: 11166 - DNA, 20 bp, synthetic construct
  misc_feature 1..20: note = chemically synthesized
  source 1..20: mol_type = other DNA
gaaaaggcttggctgcactg

SEQ ID NO: 11167 - DNA, 20 bp, synthetic construct
  misc_feature 1..20: note = chemically synthesized
  source 1..20: mol_type = other DNA
ccctgacacgctctcatcta

SEQ ID NO: 11168 - DNA, 20 bp, synthetic construct
  misc_feature 1..20: note = chemically synthesized
  source 1..20: mol_type = other DNA
acacgctctcatctaaagcc

SEQ ID NO: 11169 - DNA, 20 bp, synthetic construct
  misc_feature 1..20: note = chemically synthesized
  source 1..20: mol_type = other DNA
ctcatctaaagcctggccct

SEQ ID NO: 11170 - DNA, 20 bp, synthetic construct
  misc_feature 1..20: note = chemically synthesized
  source 1..20: mol_type = other DNA
ctaaagcctggccctcggcc

SEQ ID NO: 11171 - DNA, 20 bp, synthetic construct
  misc_feature 1..20: note = chemically synthesized
  source 1..20: mol_type = other DNA
cggccaagttcatctgttaa

SEQ ID NO: 11172 - DNA, 20 bp, synthetic construct
  misc_feature 1..20: note = chemically synthesized
  source 1..20: mol_type = other DNA
tgttaatggacaaccacaac

SEQ ID NO: 11173 - DNA, 20 bp, synthetic construct
  misc_feature 1..20: note = chemically synthesized
  source 1..20: mol_type = other DNA
gttaatggacaaccacaacc

SEQ ID NO: 11174 - DNA, 20 bp, synthetic construct
  misc_feature 1..20: note = chemically synthesized
  source 1..20: mol_type = other DNA
ttaatggacaaccacaacca

SEQ ID NO: 11175 - DNA, 20 bp, synthetic construct
  misc_feature 1..20: note = chemically synthesized
  source 1..20: mol_type = other DNA
cacctcccactacccctcct

SEQ ID NO: 11176 - DNA, 20 bp, synthetic construct
  misc_feature 1..20: note = chemically synthesized
  source 1..20: mol_type = other DNA
tctgttctcctacctctttc

SEQ ID NO: 11177 - DNA, 20 bp, synthetic construct
  misc_feature 1..20: note = chemically synthesized
  source 1..20: mol_type = other DNA
tctttcgagctcctaaaaac

SEQ ID NO: 11178 - DNA, 20 bp, synthetic construct
  misc_feature 1..20: note = chemically synthesized
  source 1..20: mol_type = other DNA
gcgcttttccctttctattc

SEQ ID NO: 11179 - DNA, 20 bp, synthetic construct
  misc_feature 1..20: note = chemically synthesized
  source 1..20: mol_type = other DNA
ctttctattcaagataaaca

SEQ ID NO: 11180 - DNA, 20 bp, synthetic construct
  misc_feature 1..20: note = chemically synthesized
  source 1..20: mol_type = other DNA
caagataaacaaagtgcttc

SEQ ID NO: 11181 - DNA, 20 bp, synthetic construct
  misc_feature 1..20: note = chemically synthesized
  source 1..20: mol_type = other DNA
taaacaaagtgcttcaagtt

SEQ ID NO: 11182 - DNA, 20 bp, synthetic construct
  misc_feature 1..20: note = chemically synthesized
  source 1..20: mol_type = other DNA
aaacaaagtgcttcaagttc

SEQ ID NO: 11183 - DNA, 20 bp, synthetic construct
  misc_feature 1..20: note = chemically synthesized
  source 1..20: mol_type = other DNA
aacaaagtgcttcaagttca

SEQ ID NO: 11184 - DNA, 20 bp, synthetic construct
  misc_feature 1..20: note = chemically synthesized
  source 1..20: mol_type = other DNA
ttcaagttcagggcgcaccc

SEQ ID NO: 11185 - DNA, 20 bp, synthetic construct
  misc_feature 1..20: note = chemically synthesized
  source 1..20: mol_type = other DNA
tcaagttcagggcgcaccct

SEQ ID NO: 11186 - DNA, 20 bp, synthetic construct
  misc_feature 1..20: note = chemically synthesized
  source 1..20: mol_type = other DNA
tatcattctgtctgctaaac

SEQ ID NO: 11187 - DNA, 20 bp, synthetic construct
  misc_feature 1..20: note = chemically synthesized
  source 1..20: mol_type = other DNA
ttctgtctgctaaaccagtc

SEQ ID NO: 11188 - DNA, 20 bp, synthetic construct
  misc_feature 1..20: note = chemically synthesized
  source 1..20: mol_type = other DNA
aaaccagtctggctacacca

SEQ ID NO: 11189 - DNA, 20 bp, synthetic construct
  misc_feature 1..20: note = chemically synthesized
  source 1..20: mol_type = other DNA
cagtctggctacaccatggc

SEQ ID NO: 11190 - DNA, 20 bp, synthetic construct
  misc_feature 1..20: note = chemically synthesized
  source 1..20: mol_type = other DNA
agtctggctacaccatggcc

SEQ ID NO: 11191 - DNA, 20 bp, synthetic construct
  misc_feature 1..20: note = chemically synthesized
  source 1..20: mol_type = other DNA
gtctggctacaccatggcca

SEQ ID NO: 11192 - DNA, 20 bp, synthetic construct
  misc_feature 1..20: note = chemically synthesized
  source 1..20: mol_type = other DNA
ctggctacaccatggccagg

SEQ ID NO: 11193 - DNA, 20 bp, synthetic construct
  misc_feature 1..20: note = chemically synthesized
  source 1..20: mol_type = other DNA
ggctacaccatggccaggga

SEQ ID NO: 11194 - DNA, 20 bp, synthetic construct
  misc_feature 1..20: note = chemically synthesized
  source 1..20: mol_type = other DNA
cttttctttaccaccttctc

SEQ ID NO: 11195 - DNA, 20 bp, synthetic construct
  misc_feature 1..20: note = chemically synthesized
  source 1..20: mol_type = other DNA
tttctttaccaccttctccg

SEQ ID NO: 11196 - DNA, 20 bp, synthetic construct
  misc_feature 1..20: note = chemically synthesized
  source 1..20: mol_type = other DNA
ctttaccaccttctccggag

SEQ ID NO: 11197 - DNA, 20 bp, synthetic construct
  misc_feature 1..20: note = chemically synthesized
  source 1..20: mol_type = other DNA
accaccttctccggagcaga

SEQ ID NO: 11198 - DNA, 20 bp, synthetic construct
  misc_feature 1..20: note = chemically synthesized
  source 1..20: mol_type = other DNA
tggacttgaccactttgctt

SEQ ID NO: 11199 - DNA, 20 bp, synthetic construct
  misc_feature 1..20: note = chemically synthesized
  source 1..20: mol_type = other DNA
cactttgcttaagcccctcc

SEQ ID NO: 11200 - DNA, 20 bp, synthetic construct
  misc_feature 1..20: note = chemically synthesized
  source 1..20: mol_type = other DNA
taagcccctcctggcaacct

SEQ ID NO: 11201 - DNA, 20 bp, synthetic construct
  misc_feature 1..20: note = chemically synthesized
  source 1..20: mol_type = other DNA
ctcctggcaacctcagaaat

SEQ ID NO: 11202 - DNA, 20 bp, synthetic construct
  misc_feature 1..20: note = chemically synthesized
  source 1..20: mol_type = other DNA
cctggcaacctcagaaatta

SEQ ID NO: 11203 - DNA, 20 bp, synthetic construct
  misc_feature 1..20: note = chemically synthesized
  source 1..20: mol_type = other DNA
aaattagagaaaaaaaaaaa

SEQ ID NO: 11204 - DNA, 20 bp, synthetic construct
  misc_feature 1..20: note = chemically synthesized
  source 1..20: mol_type = other DNA
attagagaaaaaaaaaaaaa

SEQ ID NO: 11205 - DNA, 20 bp, synthetic construct
  misc_feature 1..20: note = chemically synthesized
  source 1..20: mol_type = other DNA
aaaaaaaaaaaaagagctcc

SEQ ID NO: 11206 - DNA, 20 bp, synthetic construct
  misc_feature 1..20: note = chemically synthesized
  source 1..20: mol_type = other DNA
agctcctggctaccctactc

SEQ ID NO: 11207 - DNA, 20 bp, synthetic construct
  misc_feature 1..20: note = chemically synthesized
  source 1..20: mol_type = other DNA
ctggctaccctactccggtc

SEQ ID NO: 11208 - DNA, 20 bp, synthetic construct
  misc_feature 1..20: note = chemically synthesized
  source 1..20: mol_type = other DNA
tggctaccctactccggtcc

SEQ ID NO: 11209 - DNA, 20 bp, synthetic construct
  misc_feature 1..20: note = chemically synthesized
  source 1..20: mol_type = other DNA
cctccctctgtgttgcccga

SEQ ID NO: 11210 - DNA, 20 bp, synthetic construct
  misc_feature 1..20: note = chemically synthesized
  source 1..20: mol_type = other DNA
gcccgacggtcctgcacaca

SEQ ID NO: 11211 - DNA, 20 bp, synthetic construct
  misc_feature 1..20: note = chemically synthesized
  source 1..20: mol_type = other DNA
cacacagacacaaatcccgt

SEQ ID NO: 11212 - DNA, 20 bp, synthetic construct
  misc_feature 1..20: note = chemically synthesized
  source 1..20: mol_type = other DNA
cacaaatcccgttggaccca

SEQ ID NO: 11213 - DNA, 20 bp, synthetic construct
  misc_feature 1..20: note = chemically synthesized
  source 1..20: mol_type = other DNA
ctctcacactaacactaaac

SEQ ID NO: 11214 - DNA, 20 bp, synthetic construct
  misc_feature 1..20: note = chemically synthesized
  source 1..20: mol_type = other DNA
ccagaaaataaattaaatac

SEQ ID NO: 11215 - DNA, 20 bp, synthetic construct
  misc_feature 1..20: note = chemically synthesized
  source 1..20: mol_type = other DNA
cagaaaataaattaaatact

SEQ ID NO: 11216 - DNA, 20 bp, synthetic construct
  misc_feature 1..20: note = chemically synthesized
  source 1..20: mol_type = other DNA
ccccctcctttgcgttctgc

SEQ ID NO: 11217 - DNA, 20 bp, synthetic construct
  misc_feature 1..20: note = chemically synthesized
  source 1..20: mol_type = other DNA
gcgttctgcaagaatatttt

SEQ ID NO: 11218 - DNA, 20 bp, synthetic construct
  misc_feature 1..20: note = chemically synthesized
  source 1..20: mol_type = other DNA
tctgcaagaatattttaagt

SEQ ID NO: 11219 - DNA, 20 bp, synthetic construct
  misc_feature 1..20: note = chemically synthesized
  source 1..20: mol_type = other DNA
cctgacttgcaattaaatgc

SEQ ID NO: 11220 - DNA, 20 bp, synthetic construct
  misc_feature 1..20: note = chemically synthesized
  source 1..20: mol_type = other DNA
gcaagcacactttttacaac

SEQ ID NO: 11221 - DNA, 20 bp, synthetic construct
  misc_feature 1..20: note = chemically synthesized
  source 1..20: mol_type = other DNA
cacactttttacaaccagta

SEQ ID NO: 11222 - DNA, 20 bp, synthetic construct
  misc_feature 1..20: note = chemically synthesized
  source 1..20: mol_type = other DNA
gcattaattataactacaaa

SEQ ID NO: 11223 - DNA, 20 bp, synthetic construct
  misc_feature 1..20: note = chemically synthesized
  source 1..20: mol_type = other DNA
ataactacaaatggtcaaat

SEQ ID NO: 11224 - DNA, 20 bp, synthetic construct
  misc_feature 1..20: note = chemically synthesized
  source 1..20: mol_type = other DNA
aactacaaatggtcaaatga

SEQ ID NO: 11225 - DNA, 20 bp, synthetic construct
  misc_feature 1..20: note = chemically synthesized
  source 1..20: mol_type = other DNA
acaaatggtcaaatgagagc

SEQ ID NO: 11226 - DNA, 20 bp, synthetic construct
  misc_feature 1..20: note = chemically synthesized
  source 1..20: mol_type = other DNA
caaatggtcaaatgagagca

SEQ ID NO: 11227 - DNA, 20 bp, synthetic construct
  misc_feature 1..20: note = chemically synthesized
  source 1..20: mol_type = other DNA
taatattaatgaaacaaaaa

SEQ ID NO: 11228 - DNA, 20 bp, synthetic construct
  misc_feature 1..20: note = chemically synthesized
  source 1..20: mol_type = other DNA
tgaaacaaaaatagattcat

SEQ ID NO: 11229 - DNA, 20 bp, synthetic construct
  misc_feature 1..20: note = chemically synthesized
  source 1..20: mol_type = other DNA
aaaaatagattcataagcct

SEQ ID NO: 11230 - DNA, 20 bp, synthetic construct
  misc_feature 1..20: note = chemically synthesized
  source 1..20: mol_type = other DNA
atagattcataagccttggc

SEQ ID NO: 11231 - DNA, 20 bp, synthetic construct
  misc_feature 1..20: note = chemically synthesized
  source 1..20: mol_type = other DNA
tagattcataagccttggcc

SEQ ID NO: 11232 - DNA, 20 bp, synthetic construct
  misc_feature 1..20: note = chemically synthesized
  source 1..20: mol_type = other DNA
agattcataagccttggcca

SEQ ID NO: 11233 - DNA, 20 bp, synthetic construct
  misc_feature 1..20: note = chemically synthesized
  source 1..20: mol_type = other DNA
gggcttttattatttcatgc

SEQ ID NO: 11234 - DNA, 20 bp, synthetic construct
  misc_feature 1..20: note = chemically synthesized
  source 1..20: mol_type = other DNA
ggcttttattatttcatgca

SEQ ID NO: 11235 - DNA, 20 bp, synthetic construct
  misc_feature 1..20: note = chemically synthesized
  source 1..20: mol_type = other DNA
gcttttattatttcatgcaa

SEQ ID NO: 11236 - DNA, 20 bp, synthetic construct
  misc_feature 1..20: note = chemically synthesized
  source 1..20: mol_type = other DNA
cttttattatttcatgcaag

SEQ ID NO: 11237 - DNA, 20 bp, synthetic construct
  misc_feature 1..20: note = chemically synthesized
  source 1..20: mol_type = other DNA
tattatttcatgcaagggga

SEQ ID NO: 11238 - DNA, 20 bp, synthetic construct
  misc_feature 1..20: note = chemically synthesized
  source 1..20: mol_type = other DNA
tttcatgcaaggggaaagtc

SEQ ID NO: 11239 - DNA, 20 bp, synthetic construct
  misc_feature 1..20: note = chemically synthesized
  source 1..20: mol_type = other DNA
gaaacttgctccatacactt

SEQ ID NO: 11240 - DNA, 20 bp, synthetic construct
  misc_feature 1..20: note = chemically synthesized
  source 1..20: mol_type = other DNA
acttgctccatacactttgg

SEQ ID NO: 11241 - DNA, 20 bp, synthetic construct
  misc_feature 1..20: note = chemically synthesized
  source 1..20: mol_type = other DNA
cttgctccatacactttggc

SEQ ID NO: 11242 - DNA, 20 bp, synthetic construct
  misc_feature 1..20: note = chemically synthesized
  source 1..20: mol_type = other DNA
ccatacactttggcaggact

SEQ ID NO: 11243 - DNA, 20 bp, synthetic construct
  misc_feature 1..20: note = chemically synthesized
  source 1..20: mol_type = other DNA
caaccactaccattaaactc

SEQ ID NO: 11244 - DNA, 20 bp, synthetic construct
  misc_feature 1..20: note = chemically synthesized
  source 1..20: mol_type = other DNA
accactaccattaaactcaa

SEQ ID NO: 11245 - DNA, 20 bp, synthetic construct
  misc_feature 1..20: note = chemically synthesized
  source 1..20: mol_type = other DNA
ttaaactcaagagcgtgttt

SEQ ID NO: 11246 - DNA, 20 bp, synthetic construct
  misc_feature 1..20: note = chemically synthesized
  source 1..20: mol_type = other DNA
aactcaagagcgtgttttgg

SEQ ID NO: 11247 - DNA, 20 bp, synthetic construct
  misc_feature 1..20: note = chemically synthesized
  source 1..20: mol_type = other DNA
agcgtgttttggcagtgccc

SEQ ID NO: 11248 - DNA, 20 bp, synthetic construct
  misc_feature 1..20: note = chemically synthesized
  source 1..20: mol_type = other DNA
ttttggcagtgccctggcat

SEQ ID NO: 11249 - DNA, 20 bp, synthetic construct
  misc_feature 1..20: note = chemically synthesized
  source 1..20: mol_type = other DNA
tttggcagtgccctggcatt

SEQ ID NO: 11250 - DNA, 20 bp, synthetic construct
  misc_feature 1..20: note = chemically synthesized
  source 1..20: mol_type = other DNA
ttggcagtgccctggcattg

SEQ ID NO: 11251 - DNA, 20 bp, synthetic construct
  misc_feature 1..20: note = chemically synthesized
  source 1..20: mol_type = other DNA
tggcagtgccctggcattgg

SEQ ID NO: 11252 - DNA, 20 bp, synthetic construct
  misc_feature 1..20: note = chemically synthesized
  source 1..20: mol_type = other DNA
ggcagtgccctggcattggg

SEQ ID NO: 11253 - DNA, 20 bp, synthetic construct
  misc_feature 1..20: note = chemically synthesized
  source 1..20: mol_type = other DNA
tggcattggggggccctgtg

SEQ ID NO: 11254 - DNA, 20 bp, synthetic construct
  misc_feature 1..20: note = chemically synthesized
  source 1..20: mol_type = other DNA
gggccctgtgcagacaccac

SEQ ID NO: 11255 - DNA, 20 bp, synthetic construct
  misc_feature 1..20: note = chemically synthesized
  source 1..20: mol_type = other DNA
ggccctgtgcagacaccacc

SEQ ID NO: 11256 - DNA, 20 bp, synthetic construct
  misc_feature 1..20: note = chemically synthesized
  source 1..20: mol_type = other DNA
ccctgtgcagacaccaccag

SEQ ID NO: 11257 - DNA, 20 bp, synthetic construct
  misc_feature 1..20: note = chemically synthesized
  source 1..20: mol_type = other DNA
ccaccaggagacgctgaccc

SEQ ID NO: 11258 - DNA, 20 bp, synthetic construct
  misc_feature 1..20: note = chemically synthesized
  source 1..20: mol_type = other DNA
agacgctgaccccagtaccc

SEQ ID NO: 11259 - DNA, 20 bp, synthetic construct
  misc_feature 1..20: note = chemically synthesized
  source 1..20: mol_type = other DNA
gacgctgaccccagtaccca

SEQ ID NO: 11260 - DNA, 20 bp, synthetic construct
  misc_feature 1..20: note = chemically synthesized
  source 1..20: mol_type = other DNA
gctgaccccagtacccaagg

SEQ ID NO: 11261 - DNA, 20 bp, synthetic construct
  misc_feature 1..20: note = chemically synthesized
  source 1..20: mol_type = other DNA
ctgaccccagtacccaaggc

SEQ ID NO: 11262 - DNA, 20 bp, synthetic construct
  misc_feature 1..20: note = chemically synthesized
  source 1..20: mol_type = other DNA
tgaccccagtacccaaggca

SEQ ID NO: 11263 - DNA, 20 bp, synthetic construct
  misc_feature 1..20: note = chemically synthesized
  source 1..20: mol_type = other DNA
agggtccataacgtcttatt

SEQ ID NO: 11264 - DNA, 20 bp, synthetic construct
  misc_feature 1..20: note = chemically synthesized
  source 1..20: mol_type = other DNA
tcttattcagcctttccatg

SEQ ID NO: 11265 - DNA, 20 bp, synthetic construct
  misc_feature 1..20: note = chemically synthesized
  source 1..20: mol_type = other DNA
attcagcctttccatgtggt

SEQ ID NO: 11266 - DNA, 20 bp, synthetic construct
  misc_feature 1..20: note = chemically synthesized
  source 1..20: mol_type = other DNA
ttcagcctttccatgtggtc

SEQ ID NO: 11267 - DNA, 20 bp, synthetic construct
  misc_feature 1..20: note = chemically synthesized
  source 1..20: mol_type = other DNA
agcctttccatgtggtcggg

SEQ ID NO: 11268 - DNA, 20 bp, synthetic construct
  misc_feature 1..20: note = chemically synthesized
  source 1..20: mol_type = other DNA
tgtggtcgggaagttaccca

SEQ ID NO: 11269 - DNA, 20 bp, synthetic construct
  misc_feature 1..20: note = chemically synthesized
  source 1..20: mol_type = other DNA
gtggtcgggaagttacccac

SEQ ID NO: 11270 - DNA, 20 bp, synthetic construct
  misc_feature 1..20: note = chemically synthesized
  source 1..20: mol_type = other DNA
ttcctaaccaccctctctgc

SEQ ID NO: 11271 - DNA, 20 bp, synthetic construct
  misc_feature 1..20: note = chemically synthesized
  source 1..20: mol_type = other DNA
accaccctctctgccggccg

SEQ ID NO: 11272 - DNA, 20 bp, synthetic construct
  misc_feature 1..20: note = chemically synthesized
  source 1..20: mol_type = other DNA
gccggccgcagctgttctgt

SEQ ID NO: 11273 - DNA, 20 bp, synthetic construct
  misc_feature 1..20: note = chemically synthesized
  source 1..20: mol_type = other DNA
agtgtccaccctgcccctca

SEQ ID NO: 11274 - DNA, 20 bp, synthetic construct
  misc_feature 1..20: note = chemically synthesized
  source 1..20: mol_type = other DNA
gtgtccaccctgcccctcaa

SEQ ID NO: 11275 - DNA, 20 bp, synthetic construct
  misc_feature 1..20: note = chemically synthesized
  source 1..20: mol_type = other DNA
aaaggacaaatgaaatcccc

SEQ ID NO: 11276 - DNA, 20 bp, synthetic construct
  misc_feature 1..20: note = chemically synthesized
  source 1..20: mol_type = other DNA
caaatgaaatcccccagacc

SEQ ID NO: 11277 - DNA, 20 bp, synthetic construct
  misc_feature 1..20: note = chemically synthesized
  source 1..20: mol_type = other DNA
atgaaatcccccagacccag

SEQ ID NO: 11278 - DNA, 20 bp, synthetic construct
  misc_feature 1..20: note = chemically synthesized
  source 1..20: mol_type = other DNA
tgaaatcccccagacccagt

SEQ ID NO: 11279 - DNA, 20 bp, synthetic construct
  misc_feature 1..20: note = chemically synthesized
  source 1..20: mol_type = other DNA
ccccagacccagtgggaaat

SEQ ID NO: 11280 - DNA, 20 bp, synthetic construct
  misc_feature 1..20: note = chemically synthesized
  source 1..20: mol_type = other DNA
gaaataagcccacctaaatg

SEQ ID NO: 11281 - DNA, 20 bp, synthetic construct
  misc_feature 1..20: note = chemically synthesized
  source 1..20: mol_type = other DNA
cccacctaaatgaagaactc

SEQ ID NO: 11282 - DNA, 20 bp, synthetic construct
  misc_feature 1..20: note = chemically synthesized
  source 1..20: mol_type = other DNA
ctaaatgaagaactcaagac

SEQ ID NO: 11283 - DNA, 20 bp, synthetic construct
  misc_feature 1..20: note = chemically synthesized
  source 1..20: mol_type = other DNA
taaatgaagaactcaagact

SEQ ID NO: 11284 - DNA, 20 bp, synthetic construct
  misc_feature 1..20: note = chemically synthesized
  source 1..20: mol_type = other DNA
aaatgaagaactcaagacta

SEQ ID NO: 11285 - DNA, 20 bp, synthetic construct
  misc_feature 1..20: note = chemically synthesized
  source 1..20: mol_type = other DNA
actcaagactagggcaccat

SEQ ID NO: 11286 - DNA, 20 bp, synthetic construct
  misc_feature 1..20: note = chemically synthesized
  source 1..20: mol_type = other DNA
actagggcaccatgagcatc

SEQ ID NO: 11287 - DNA, 20 bp, synthetic construct
  misc_feature 1..20: note = chemically synthesized
  source 1..20: mol_type = other DNA
ctagggcaccatgagcatct

SEQ ID NO: 11288 - DNA, 20 bp, synthetic construct
  misc_feature 1..20: note = chemically synthesized
  source 1..20: mol_type = other DNA
gcaccatgagcatctgggtt

SEQ ID NO: 11289 - DNA, 20 bp, synthetic construct
  misc_feature 1..20: note = chemically synthesized
  source 1..20: mol_type = other DNA
caccatgagcatctgggtta

SEQ ID NO: 11290 - DNA, 20 bp, synthetic construct
  misc_feature 1..20: note = chemically synthesized
  source 1..20: mol_type = other DNA
tgagcatctgggttaaggct

SEQ ID NO: 11291 - DNA, 20 bp, synthetic construct
  misc_feature 1..20: note = chemically synthesized
  source 1..20: mol_type = other DNA
taaggctcggaatcctgcac

SEQ ID NO: 11292 - DNA, 20 bp, synthetic construct
  misc_feature 1..20: note = chemically synthesized
  source 1..20: mol_type = other DNA
tcggaatcctgcaccagcgt

SEQ ID NO: 11293 - DNA, 20 bp, synthetic construct
  misc_feature 1..20: note = chemically synthesized
  source 1..20: mol_type = other DNA
gaatcctgcaccagcgttgg

SEQ ID NO: 11294 - DNA, 20 bp, synthetic construct
  misc_feature 1..20: note = chemically synthesized
  source 1..20: mol_type = other DNA
ctttgttcctgccacaccgc

SEQ ID NO: 11295 - DNA, 20 bp, synthetic construct
  misc_feature 1..20: note = chemically synthesized
  source 1..20: mol_type = other DNA
tttgttcctgccacaccgcc

SEQ ID NO: 11296 - DNA, 20 bp, synthetic construct
  misc_feature 1..20: note = chemically synthesized
  source 1..20: mol_type = other DNA
taacctgtctccacaacact

SEQ ID NO: 11297 - DNA, 20 bp, synthetic construct
  misc_feature 1..20: note = chemically synthesized
  source 1..20: mol_type = other DNA
ctcagcctcacgcctcaccc

SEQ ID NO: 11298 - DNA, 20 bp, synthetic construct
  misc_feature 1..20: note = chemically synthesized
  source 1..20: mol_type = other DNA
ccgcacaatcgaatctaatt

SEQ ID NO: 11299 - DNA, 20 bp, synthetic construct
  misc_feature 1..20: note = chemically synthesized
  source 1..20: mol_type = other DNA
caatcgaatctaattaagat

SEQ ID NO: 11300 - DNA, 20 bp, synthetic construct
  misc_feature 1..20: note = chemically synthesized
  source 1..20: mol_type = other DNA
aatcgaatctaattaagatc

SEQ ID NO: 11301 - DNA, 20 bp, synthetic construct
  misc_feature 1..20: note = chemically synthesized
  source 1..20: mol_type = other DNA
cgaatctaattaagatcagg

SEQ ID NO: 11302 - DNA, 20 bp, synthetic construct
  misc_feature 1..20: note = chemically synthesized
  source 1..20: mol_type = other DNA
ttttcttttcactgtacccc

SEQ ID NO: 11303 - DNA, 20 bp, synthetic construct
  misc_feature 1..20: note = chemically synthesized
  source 1..20: mol_type = other DNA
cactgtacccccagtaatca

SEQ ID NO: 11304 - DNA, 20 bp, synthetic construct
  misc_feature 1..20: note = chemically synthesized
  source 1..20: mol_type = other DNA
tgtacccccagtaatcacag

SEQ ID NO: 11305 - DNA, 20 bp, synthetic construct
  misc_feature 1..20: note = chemically synthesized
  source 1..20: mol_type = other DNA
acagaagttcttcaaatttt

SEQ ID NO: 11306 - DNA, 20 bp, synthetic construct
  misc_feature 1..20: note = chemically synthesized
  source 1..20: mol_type = other DNA
tttccctcattttgcatttc

SEQ ID NO: 11307 - DNA, 20 bp, synthetic construct
  misc_feature 1..20: note = chemically synthesized
  source 1..20: mol_type = other DNA
ttccctcattttgcatttca

SEQ ID NO: 11308 - DNA, 20 bp, synthetic construct
  misc_feature 1..20: note = chemically synthesized
  source 1..20: mol_type = other DNA
attttgcatttcaaggcaca

SEQ ID NO: 11309 - DNA, 20 bp, synthetic construct
  misc_feature 1..20: note = chemically synthesized
  source 1..20: mol_type = other DNA
tgcatttcaaggcacaaaga

SEQ ID NO: 11310 - DNA, 20 bp, synthetic construct
  misc_feature 1..20: note = chemically synthesized
  source 1..20: mol_type = other DNA
acaaagacagtctatctcac

SEQ ID NO: 11311 - DNA, 20 bp, synthetic construct
  misc_feature 1..20: note = chemically synthesized
  source 1..20: mol_type = other DNA
aagacagtctatctcactgg

SEQ ID NO: 11312 - DNA, 20 bp, synthetic construct
  misc_feature 1..20: note = chemically synthesized
  source 1..20: mol_type = other DNA
tctcactggtggtctattaa

SEQ ID NO: 11313 - DNA, 20 bp, synthetic construct
  misc_feature 1..20: note = chemically synthesized
  source 1..20: mol_type = other DNA
ggtggtctattaatagtttg

SEQ ID NO: 11314 - DNA, 20 bp, synthetic construct
  misc_feature 1..20: note = chemically synthesized
  source 1..20: mol_type = other DNA
tattaatagtttgaagtttt

SEQ ID NO: 11315 - DNA, 20 bp, synthetic construct
  misc_feature 1..20: note = chemically synthesized
  source 1..20: mol_type = other DNA
tagtttgaagttttgagcgt

SEQ ID NO: 11316 - DNA, 20 bp, synthetic construct
  misc_feature 1..20: note = chemically synthesized
  source 1..20: mol_type = other DNA
tttgaagttttgagcgtcag

SEQ ID NO: 11317 - DNA, 20 bp, synthetic construct
  misc_feature 1..20: note = chemically synthesized
  source 1..20: mol_type = other DNA
ttgaagttttgagcgtcaga

SEQ ID NO: 11318 - DNA, 20 bp, synthetic construct
  misc_feature 1..20: note = chemically synthesized
  source 1..20: mol_type = other DNA
aagttttgagcgtcagaagg

SEQ ID NO: 11319 - DNA, 20 bp, synthetic construct
  misc_feature 1..20: note = chemically synthesized
  source 1..20: mol_type = other DNA
agaaggtggttgttgctttt

SEQ ID NO: 11320 - DNA, 20 bp, synthetic construct
  misc_feature 1..20: note = chemically synthesized
  source 1..20: mol_type = other DNA
ggttgttgctttttggtttt

SEQ ID NO: 11321 - DNA, 20 bp, synthetic construct
  misc_feature 1..20: note = chemically synthesized
  source 1..20: mol_type = other DNA
gttgttgctttttggttttt

SEQ ID NO: 11322 - DNA, 20 bp, synthetic construct
  misc_feature 1..20: note = chemically synthesized
  source 1..20: mol_type = other DNA
taaaactattctgtcatttc

SEQ ID NO: 11323 - DNA, 20 bp, synthetic construct
  misc_feature 1..20: note = chemically synthesized
  source 1..20: mol_type = other DNA
gtcatttccagttttttaaa

SEQ ID NO: 11324 - DNA, 20 bp, synthetic construct
  misc_feature 1..20: note = chemically synthesized
  source 1..20: mol_type = other DNA
tcatttccagttttttaaaa

SEQ ID NO: 11325 - DNA, 20 bp, synthetic construct
  misc_feature 1..20: note = chemically synthesized
  source 1..20: mol_type = other DNA
tttttttgtttttctttttt

SEQ ID NO: 11326 - DNA, 20 bp, synthetic construct
  misc_feature 1..20: note = chemically synthesized
  source 1..20: mol_type = other DNA
ttttgtttttctttttttgg

SEQ ID NO: 11327 - DNA, 20 bp, synthetic construct
  misc_feature 1..20: note = chemically synthesized
  source 1..20: mol_type = other DNA
tgtttttctttttttggtgg

SEQ ID NO: 11328 - DNA, 20 bp, synthetic construct
  misc_feature 1..20: note = chemically synthesized
  source 1..20: mol_type = other DNA
ttttctttttttggtggtgg

SEQ ID NO: 11329 - DNA, 20 bp, synthetic construct
  misc_feature 1..20: note = chemically synthesized
  source 1..20: mol_type = other DNA
tggtggcgttaatgtttctt

SEQ ID NO: 11330 - DNA, 20 bp, synthetic construct
  misc_feature 1..20: note = chemically synthesized
  source 1..20: mol_type = other DNA
ggcgttaatgtttcttcaga

SEQ ID NO: 11331 - DNA, 20 bp, synthetic construct
  misc_feature 1..20: note = chemically synthesized
  source 1..20: mol_type = other DNA
ttaatgtttcttcagaaaga

SEQ ID NO: 11332 - DNA, 20 bp, synthetic construct
  misc_feature 1..20: note = chemically synthesized
  source 1..20: mol_type = other DNA
ttcttcagaaagacagcttc

SEQ ID NO: 11333 - DNA, 20 bp, synthetic construct
  misc_feature 1..20: note = chemically synthesized
  source 1..20: mol_type = other DNA
tcttcagaaagacagcttct

SEQ ID NO: 11334 - DNA, 20 bp, synthetic construct
  misc_feature 1..20: note = chemically synthesized
  source 1..20: mol_type = other DNA
agacagcttctgggccactc

SEQ ID NO: 11335 - DNA, 20 bp, synthetic construct
  misc_feature 1..20: note = chemically synthesized
  source 1..20: mol_type = other DNA
gacagcttctgggccactct

SEQ ID NO: 11336 - DNA, 20 bp, synthetic construct
  misc_feature 1..20: note = chemically synthesized
  source 1..20: mol_type = other DNA
ccactctgggtattatgatt

SEQ ID NO: 11337 - DNA, 20 bp, synthetic construct
  misc_feature 1..20: note = chemically synthesized
  source 1..20: mol_type = other DNA
atttggtttcccccttacaa

SEQ ID NO: 11338 - DNA, 20 bp, synthetic construct
  misc_feature 1..20: note = chemically synthesized
  source 1..20: mol_type = other DNA
tacaatagttactctctgcc

SEQ ID NO: 11339 - DNA, 20 bp, synthetic construct
  misc_feature 1..20: note = chemically synthesized
  source 1..20: mol_type = other DNA
ctgcctggtttactgattta

SEQ ID NO: 11340 - DNA, 20 bp, synthetic construct
  misc_feature 1..20: note = chemically synthesized
  source 1..20: mol_type = other DNA
tttactgatttacagaacct

SEQ ID NO: 11341 - DNA, 20 bp, synthetic construct
  misc_feature 1..20: note = chemically synthesized
  source 1..20: mol_type = other DNA
acagaaccttggtatgtgaa

SEQ ID NO: 11342 - DNA, 20 bp, synthetic construct
  misc_feature 1..20: note = chemically synthesized
  source 1..20: mol_type = other DNA
ttggtatgtgaatggcgaaa

SEQ ID NO: 11343 - DNA, 20 bp, synthetic construct
  misc_feature 1..20: note = chemically synthesized
  source 1..20: mol_type = other DNA
gaatggcgaaaaagaaaaaa

SEQ ID NO: 11344 - DNA, 20 bp, synthetic construct
  misc_feature 1..20: note = chemically synthesized
  source 1..20: mol_type = other DNA
aatggcgaaaaagaaaaaaa

SEQ ID NO: 11345 - DNA, 20 bp, synthetic construct
  misc_feature 1..20: note = chemically synthesized
  source 1..20: mol_type = other DNA
gcgaaaaagaaaaaaaagga

SEQ ID NO: 11346 - DNA, 20 bp, synthetic construct
  misc_feature 1..20: note = chemically synthesized
  source 1..20: mol_type = other DNA
gaaaaaaaaggaaagaaaaa

SEQ ID NO: 11347 - DNA, 20 bp, synthetic construct
  misc_feature 1..20: note = chemically synthesized
  source 1..20: mol_type = other DNA
aagaaaaaaagaaaattcct

SEQ ID NO: 11348 - DNA, 20 bp, synthetic construct
  misc_feature 1..20: note = chemically synthesized
  source 1..20: mol_type = other DNA
aaaagaaaattccttggcat

SEQ ID NO: 11349 - DNA, 20 bp, synthetic construct
  misc_feature 1..20: note = chemically synthesized
  source 1..20: mol_type = other DNA
aaagaaaattccttggcata

SEQ ID NO: 11350 - DNA, 20 bp, synthetic construct
  misc_feature 1..20: note = chemically synthesized
  source 1..20: mol_type = other DNA
tatgtttgctgatcaaattt

SEQ ID NO: 11351 - DNA, 20 bp, synthetic construct
  misc_feature 1..20: note = chemically synthesized
  source 1..20: mol_type = other DNA
ttatgactttacttgaaaaa

SEQ ID NO: 11352 - DNA, 20 bp, synthetic construct
  misc_feature 1..20: note = chemically synthesized
  source 1..20: mol_type = other DNA
acttgaaaaacagtttgcca

SEQ ID NO: 11353 - DNA, 20 bp, synthetic construct
  misc_feature 1..20: note = chemically synthesized
  source 1..20: mol_type = other DNA
gaaaaacagtttgccacagt

SEQ ID NO: 11354 - DNA, 20 bp, synthetic construct
  misc_feature 1..20: note = chemically synthesized
  source 1..20: mol_type = other DNA
aacagtttgccacagtgaga

SEQ ID NO: 11355 - DNA, 20 bp, synthetic construct
  misc_feature 1..20: note = chemically synthesized
  source 1..20: mol_type = other DNA
tctacccctccactcccttt

SEQ ID NO: 11356 - DNA, 20 bp, synthetic construct
  misc_feature 1..20: note = chemically synthesized
  source 1..20: mol_type = other DNA
cctttaagtacttcgaaaaa

SEQ ID NO: 11357 - DNA, 20 bp, synthetic construct
  misc_feature 1..20: note = chemically synthesized
  source 1..20: mol_type = other DNA
aaaacagtacaattttttta

SEQ ID NO: 11358 - DNA, 20 bp, synthetic construct
  misc_feature 1..20: note = chemically synthesized
  source 1..20: mol_type = other DNA
aaacagtacaatttttttaa

SEQ ID NO: 11359 - DNA, 20 bp, synthetic construct
  misc_feature 1..20: note = chemically synthesized
  source 1..20: mol_type = other DNA
cagtacaatttttttaaagg

SEQ ID NO: 11360 - DNA, 20 bp, synthetic construct
  misc_feature 1..20: note = chemically synthesized
  source 1..20: mol_type = other DNA
tttttttaaaggtagattta

SEQ ID NO: 11361 - DNA, 20 bp, synthetic construct
  misc_feature 1..20: note = chemically synthesized
  source 1..20: mol_type = other DNA
ggtagatttaaagcattaac

SEQ ID NO: 11362 - DNA, 20 bp, synthetic construct
  misc_feature 1..20: note = chemically synthesized
  source 1..20: mol_type = other DNA
atttaaagcattaactggtt

SEQ ID NO: 11363 - DNA, 20 bp, synthetic construct
  misc_feature 1..20: note = chemically synthesized
  source 1..20: mol_type = other DNA
ccctgaaaatacattttcaa

SEQ ID NO: 11364 - DNA, 20 bp, synthetic construct
  misc_feature 1..20: note = chemically synthesized
  source 1..20: mol_type = other DNA
attttcaaaagacttatgca

SEQ ID NO: 11365 - DNA, 20 bp, synthetic construct
  misc_feature 1..20: note = chemically synthesized
  source 1..20: mol_type = other DNA
tgcaaagccacatgattttg

SEQ ID NO: 11366 - DNA, 20 bp, synthetic construct
  misc_feature 1..20: note = chemically synthesized
  source 1..20: mol_type = other DNA
gcaaagccacatgattttga

SEQ ID NO: 11367 - DNA, 20 bp, synthetic construct
  misc_feature 1..20: note = chemically synthesized
  source 1..20: mol_type = other DNA
aaagccacatgattttgaag

SEQ ID NO: 11368 - DNA, 20 bp, synthetic construct
  misc_feature 1..20: note = chemically synthesized
  source 1..20: mol_type = other DNA
atgattttgaaggagctaat

SEQ ID NO: 11369 - DNA, 20 bp, synthetic construct
  misc_feature 1..20: note = chemically synthesized
  source 1..20: mol_type = other DNA
gtcccaccaccaaaatttaa

SEQ ID NO: 11370 - DNA, 20 bp, synthetic construct
  misc_feature 1..20: note = chemically synthesized
  source 1..20: mol_type = other DNA
ccaaaatttaatggtgactt

SEQ ID NO: 11371 - DNA, 20 bp, synthetic construct
  misc_feature 1..20: note = chemically synthesized
  source 1..20: mol_type = other DNA
tactttttatttacttcctg

SEQ ID NO: 11372 - DNA, 20 bp, synthetic construct
  misc_feature 1..20: note = chemically synthesized
  source 1..20: mol_type = other DNA
ttgtgtacttgacatttata

SEQ ID NO: 11373 - DNA, 20 bp, synthetic construct
  misc_feature 1..20: note = chemically synthesized
  source 1..20: mol_type = other DNA
cattatataacaatctaccc

SEQ ID NO: 11374 - DNA, 20 bp, synthetic construct
  misc_feature 1..20: note = chemically synthesized
  source 1..20: mol_type = other DNA
attatataacaatctaccct

SEQ ID NO: 11375 - DNA, 20 bp, synthetic construct
  misc_feature 1..20: note = chemically synthesized
  source 1..20: mol_type = other DNA
acaatctaccctgggtacac

SEQ ID NO: 11376 - DNA, 20 bp, synthetic construct
  misc_feature 1..20: note = chemically synthesized
  source 1..20: mol_type = other DNA
actagattatgccaatctat

SEQ ID NO: 11377 - DNA, 20 bp, synthetic construct
  misc_feature 1..20: note = chemically synthesized
  source 1..20: mol_type = other DNA
atgaaatttgtactccatat

SEQ ID NO: 11378 - DNA, 20 bp, synthetic construct
  misc_feature 1..20: note = chemically synthesized
  source 1..20: mol_type = other DNA
aaatttgtactccatataag

SEQ ID NO: 11379 - DNA, 20 bp, synthetic construct
  misc_feature 1..20: note = chemically synthesized
  source 1..20: mol_type = other DNA
tttgtactccatataagcag

SEQ ID NO: 11380 - DNA, 20 bp, synthetic construct
  misc_feature 1..20: note = chemically synthesized
  source 1..20: mol_type = other DNA
tccatataagcagaagtttc

SEQ ID NO: 11381 - DNA, 20 bp, synthetic construct
  misc_feature 1..20: note = chemically synthesized
  source 1..20: mol_type = other DNA
taccattatgtttcaatgta

SEQ ID NO: 11382 - DNA, 20 bp, synthetic construct
  misc_feature 1..20: note = chemically synthesized
  source 1..20: mol_type = other DNA
ttcaatgtaaagtgttatta

SEQ ID NO: 11383 - DNA, 20 bp, synthetic construct
  misc_feature 1..20: note = chemically synthesized
  source 1..20: mol_type = other DNA
aatgtaaagtgttattatag

SEQ ID NO: 11384 - DNA, 20 bp, synthetic construct
  misc_feature 1..20: note = chemically synthesized
  source 1..20: mol_type = other DNA
tgtaaagtgttattatagca

SEQ ID NO: 11385 - DNA, 20 bp, synthetic construct
  misc_feature 1..20: note = chemically synthesized
  source 1..20: mol_type = other DNA
tgttattatagcagagtata

SEQ ID NO: 11386 - DNA, 20 bp, synthetic construct
  misc_feature 1..20: note = chemically synthesized
  source 1..20: mol_type = other DNA
ttatagcagagtataaagca

SEQ ID NO: 11387 - DNA, 20 bp, synthetic construct
  misc_feature 1..20: note = chemically synthesized
  source 1..20: mol_type = other DNA
gtaatctttcttgctgcttc

SEQ ID NO: 11388 - DNA, 20 bp, synthetic construct
  misc_feature 1..20: note = chemically synthesized
  source 1..20: mol_type = other DNA
taatctttcttgctgcttct

SEQ ID NO: 11389 - DNA, 20 bp, synthetic construct
  misc_feature 1..20: note = chemically synthesized
  source 1..20: mol_type = other DNA
aatctttcttgctgcttcta

SEQ ID NO: 11390 - DNA, 20 bp, synthetic construct
  misc_feature 1..20: note = chemically synthesized
  source 1..20: mol_type = other DNA
tgctgcttctagggctgtgt

SEQ ID NO: 11391 - DNA, 20 bp, synthetic construct
  misc_feature 1..20: note = chemically synthesized
  source 1..20: mol_type = other DNA
tgtgtcagtgtttacattcc

SEQ ID NO: 11392 - DNA, 20 bp, synthetic construct
  misc_feature 1..20: note = chemically synthesized
  source 1..20: mol_type = other DNA
gtcagtgtttacattcctgg

SEQ ID NO: 11393 - DNA, 20 bp, synthetic construct
  misc_feature 1..20: note = chemically synthesized
  source 1..20: mol_type = other DNA
ggaagttaaataaaccgaca

SEQ ID NO: 11394 - DNA, 20 bp, synthetic construct
  misc_feature 1..20: note = chemically synthesized
  source 1..20: mol_type = other DNA
aaccgacatggcaaaactcc

SEQ ID NO: 11395 - DNA, 20 bp, synthetic construct
  misc_feature 1..20: note = chemically synthesized
  source 1..20: mol_type = other DNA
gacatggcaaaactcctgga

SEQ ID NO: 11396 - DNA, 20 bp, synthetic construct
  misc_feature 1..20: note = chemically synthesized
  source 1..20: mol_type = other DNA
tcctggatagactgaataat

SEQ ID NO: 11397 - DNA, 20 bp, synthetic construct
  misc_feature 1..20: note = chemically synthesized
  source 1..20: mol_type = other DNA
cctggatagactgaataata

SEQ ID NO: 11398 - DNA, 20 bp, synthetic construct
  misc_feature 1..20: note = chemically synthesized
  source 1..20: mol_type = other DNA
ttgtttactttttaccttgt

SEQ ID NO: 11399 - DNA, 20 bp, synthetic construct
  misc_feature 1..20: note = chemically synthesized
  source 1..20: mol_type = other DNA
tgtttactttttaccttgtt

SEQ ID NO: 11400 - DNA, 20 bp, synthetic construct
  misc_feature 1..20: note = chemically synthesized
  source 1..20: mol_type = other DNA
gttaggatccctttcttgta

SEQ ID NO: 11401 - DNA, 20 bp, synthetic construct
  misc_feature 1..20: note = chemically synthesized
  source 1..20: mol_type = other DNA
gatccctttcttgtaaagtt

SEQ ID NO: 11402 - DNA, 20 bp, synthetic construct
  misc_feature 1..20: note = chemically synthesized
  source 1..20: mol_type = other DNA
atccctttcttgtaaagttt

SEQ ID NO: 11403 - DNA, 20 bp, synthetic construct
  misc_feature 1..20: note = chemically synthesized
  source 1..20: mol_type = other DNA
tccctttcttgtaaagtttg

SEQ ID NO: 11404 - DNA, 20 bp, synthetic construct
  misc_feature 1..20: note = chemically synthesized
  source 1..20: mol_type = other DNA
ccctttcttgtaaagtttgg

SEQ ID NO: 11405 - DNA, 20 bp, synthetic construct
  misc_feature 1..20: note = chemically synthesized
  source 1..20: mol_type = other DNA
ctttcttgtaaagtttgggg

SEQ ID NO: 11406 - DNA, 20 bp, synthetic construct
  misc_feature 1..20: note = chemically synthesized
  source 1..20: mol_type = other DNA
ttcttgtaaagtttggggga

SEQ ID NO: 11407 - DNA, 20 bp, synthetic construct
  misc_feature 1..20: note = chemically synthesized
  source 1..20: mol_type = other DNA
cttgtaaagtttgggggaga

SEQ ID NO: 11408 - DNA, 20 bp, synthetic construct
  misc_feature 1..20: note = chemically synthesized
  source 1..20: mol_type = other DNA
tgtaaagtttgggggagaga

SEQ ID NO: 11409 - DNA, 20 bp, synthetic construct
  misc_feature 1..20: note = chemically synthesized
  source 1..20: mol_type = other DNA
taaagtttgggggagagaga

SEQ ID NO: 11410 - DNA, 20 bp, synthetic construct
  misc_feature 1..20: note = chemically synthesized
  source 1..20: mol_type = other DNA
aaagtttgggggagagagag

SEQ ID NO: 11411 - DNA, 20 bp, synthetic construct
  misc_feature 1..20: note = chemically synthesized
  source 1..20: mol_type = other DNA
agtttgggggagagagagag

SEQ ID NO: 11412 - DNA, 20 bp, synthetic construct
  misc_feature 1..20: note = chemically synthesized
  source 1..20: mol_type = other DNA
tttgggggagagagagagga

SEQ ID NO: 11413 - DNA, 20 bp, synthetic construct
  misc_feature 1..20: note = chemically synthesized
  source 1..20: mol_type = other DNA
ggggagagagagaggagaga

SEQ ID NO: 11414 - DNA, 20 bp, synthetic construct
  misc_feature 1..20: note = chemically synthesized
  source 1..20: mol_type = other DNA
ggagagagagaggagagaaa

SEQ ID NO: 11415 - DNA, 20 bp, synthetic construct
  misc_feature 1..20: note = chemically synthesized
  source 1..20: mol_type = other DNA
agagagagaggagagaaaga

SEQ ID NO: 11416 - DNA, 20 bp, synthetic construct
  misc_feature 1..20: note = chemically synthesized
  source 1..20: mol_type = other DNA
gagagaggagagaaagagag

SEQ ID NO: 11417 - DNA, 20 bp, synthetic construct
  misc_feature 1..20: note = chemically synthesized
  source 1..20: mol_type = other DNA
agagaggagagaaagagaga

SEQ ID NO: 11418 - DNA, 20 bp, synthetic construct
  misc_feature 1..20: note = chemically synthesized
  source 1..20: mol_type = other DNA
agagaaagagagaaggaatg

SEQ ID NO: 11419 - DNA, 20 bp, synthetic construct
  misc_feature 1..20: note = chemically synthesized
  source 1..20: mol_type = other DNA
gagaaagagagaaggaatga

SEQ ID NO: 11420 - DNA, 20 bp, synthetic construct
  misc_feature 1..20: note = chemically synthesized
  source 1..20: mol_type = other DNA
agaaagagagaaggaatgaa

SEQ ID NO: 11421 - DNA, 20 bp, synthetic construct
  misc_feature 1..20: note = chemically synthesized
  source 1..20: mol_type = other DNA
gaaagagagaaggaatgaag

SEQ ID NO: 11422 - DNA, 20 bp, synthetic construct
  misc_feature 1..20: note = chemically synthesized
  source 1..20: mol_type = other DNA
aaagagagaaggaatgaagg

SEQ ID NO: 11423 - DNA, 20 bp, synthetic construct
  misc_feature 1..20: note = chemically synthesized
  source 1..20: mol_type = other DNA
aggaatgaagggggtgatgc

SEQ ID NO: 11424 - DNA, 20 bp, synthetic construct
  misc_feature 1..20: note = chemically synthesized
  source 1..20: mol_type = other DNA
atgaagggggtgatgcaaga

SEQ ID NO: 11425 - DNA, 20 bp, synthetic construct
  misc_feature 1..20: note = chemically synthesized
  source 1..20: mol_type = other DNA
aagggggtgatgcaagatag

SEQ ID NO: 11426 - DNA, 20 bp, synthetic construct
  misc_feature 1..20: note = chemically synthesized
  source 1..20: mol_type = other DNA
agggggtgatgcaagataga

SEQ ID NO: 11427 - DNA, 20 bp, synthetic construct
  misc_feature 1..20: note = chemically synthesized
  source 1..20: mol_type = other DNA
ggggtgatgcaagatagaag

SEQ ID NO: 11428 - DNA, 20 bp, synthetic construct
  misc_feature 1..20: note = chemically synthesized
  source 1..20: mol_type = other DNA
ggtgatgcaagatagaagga

SEQ ID NO: 11429 - DNA, 20 bp, synthetic construct
  misc_feature 1..20: note = chemically synthesized
  source 1..20: mol_type = other DNA
tgatgcaagatagaaggaga

SEQ ID NO: 11430 - DNA, 20 bp, synthetic construct
  misc_feature 1..20: note = chemically synthesized
  source 1..20: mol_type = other DNA
aaggagagagatttatacac

SEQ ID NO: 11431 - DNA, 20 bp, synthetic construct
  misc_feature 1..20: note = chemically synthesized
  source 1..20: mol_type = other DNA
actggcttccatatgtcaca

SEQ ID NO: 11432 - DNA, 20 bp, synthetic construct
  misc_feature 1..20: note = chemically synthesized
  source 1..20: mol_type = other DNA
cacaaagaccttcctatcca

SEQ ID NO: 11433 - DNA, 20 bp, synthetic construct
  misc_feature 1..20: note = chemically synthesized
  source 1..20: mol_type = other DNA
atccacagccaacgcgactg

SEQ ID NO: 11434 - DNA, 20 bp, synthetic construct
  misc_feature 1..20: note = chemically synthesized
  source 1..20: mol_type = other DNA
cacagccaacgcgactgaag

SEQ ID NO: 11435 - DNA, 20 bp, synthetic construct
  misc_feature 1..20: note = chemically synthesized
  source 1..20: mol_type = other DNA
gcgactgaagcagcatgcat

SEQ ID NO: 11436 - DNA, 20 bp, synthetic construct
  misc_feature 1..20: note = chemically synthesized
  source 1..20: mol_type = other DNA
ctgaagcagcatgcataagt

SEQ ID NO: 11437 - DNA, 20 bp, synthetic construct
  misc_feature 1..20: note = chemically synthesized
  source 1..20: mol_type = other DNA
tgttttgttttcttaaatac

SEQ ID NO: 11438 - DNA, 20 bp, synthetic construct
  misc_feature 1..20: note = chemically synthesized
  source 1..20: mol_type = other DNA
gttttgttttcttaaatacc

SEQ ID NO: 11439 - DNA, 20 bp, synthetic construct
  misc_feature 1..20: note = chemically synthesized
  source 1..20: mol_type = other DNA
tgttttcttaaataccgggt

SEQ ID NO: 11440 - DNA, 20 bp, synthetic construct
  misc_feature 1..20: note = chemically synthesized
  source 1..20: mol_type = other DNA
ccctttctccactgcccact

SEQ ID NO: 11441 - DNA, 20 bp, synthetic construct
  misc_feature 1..20: note = chemically synthesized
  source 1..20: mol_type = other DNA
tgcccactcagccccacata

SEQ ID NO: 11442 - DNA, 20 bp, synthetic construct
  misc_feature 1..20: note = chemically synthesized
  source 1..20: mol_type = other DNA
tcagccccacataaagtatg

SEQ ID NO: 11443 - DNA, 20 bp, synthetic construct
  misc_feature 1..20: note = chemically synthesized
  source 1..20: mol_type = other DNA
tttttttgaccattttcaaa

SEQ ID NO: 11444 - DNA, 20 bp, synthetic construct
  misc_feature 1..20: note = chemically synthesized
  source 1..20: mol_type = other DNA
tcaaatagcaaattatccat

SEQ ID NO: 11445 - DNA, 20 bp, synthetic construct
  misc_feature 1..20: note = chemically synthesized
  source 1..20: mol_type = other DNA
cattagatttcatcatatct

SEQ ID NO: 11446 - DNA, 20 bp, synthetic construct
  misc_feature 1..20: note = chemically synthesized
  source 1..20: mol_type = other DNA
gatttcatcatatcttagta

SEQ ID NO: 11447 - DNA, 20 bp, synthetic construct
  misc_feature 1..20: note = chemically synthesized
  source 1..20: mol_type = other DNA
cttagtaaagcaattacatc

SEQ ID NO: 11448 - DNA, 20 bp, synthetic construct
  misc_feature 1..20: note = chemically synthesized
  source 1..20: mol_type = other DNA
caattacatcaagaaaatga

SEQ ID NO: 11449 - DNA, 20 bp, synthetic construct
  misc_feature 1..20: note = chemically synthesized
  source 1..20: mol_type = other DNA
caagaaaatgatagtgcgtg

SEQ ID NO: 11450 - DNA, 20 bp, synthetic construct
  misc_feature 1..20: note = chemically synthesized
  source 1..20: mol_type = other DNA
tgtggaatcaattatgcatg

SEQ ID NO: 11451 - DNA, 20 bp, synthetic construct
  misc_feature 1..20: note = chemically synthesized
  source 1..20: mol_type = other DNA
gaatcaattatgcatgcagt

SEQ ID NO: 11452 - DNA, 20 bp, synthetic construct
  misc_feature 1..20: note = chemically synthesized
  source 1..20: mol_type = other DNA
caattatgcatgcagttggc

SEQ ID NO: 11453 - DNA, 20 bp, synthetic construct
  misc_feature 1..20: note = chemically synthesized
  source 1..20: mol_type = other DNA
attatgcatgcagttggccg

SEQ ID NO: 11454 - DNA, 20 bp, synthetic construct
  misc_feature 1..20: note = chemically synthesized
  source 1..20: mol_type = other DNA
atgcagttggccggagacca

SEQ ID NO: 11455 - DNA, 20 bp, synthetic construct
  misc_feature 1..20: note = chemically synthesized
  source 1..20: mol_type = other DNA
tgcagttggccggagaccaa

SEQ ID NO: 11456 - DNA, 20 bp, synthetic construct
  misc_feature 1..20: note = chemically synthesized
  source 1..20: mol_type = other DNA
gccggagaccaaaggctgtg

SEQ ID NO: 11457 - DNA, 20 bp, synthetic construct
  misc_feature 1..20: note = chemically synthesized
  source 1..20: mol_type = other DNA
gagaccaaaggctgtgaagt

SEQ ID NO: 11458 - DNA, 20 bp, synthetic construct
  misc_feature 1..20: note = chemically synthesized
  source 1..20: mol_type = other DNA
gaccaaaggctgtgaagtcg

SEQ ID NO: 11459 - DNA, 20 bp, synthetic construct
  misc_feature 1..20: note = chemically synthesized
  source 1..20: mol_type = other DNA
ccaaaggctgtgaagtcgga

SEQ ID NO: 11460 - DNA, 20 bp, synthetic construct
  misc_feature 1..20: note = chemically synthesized
  source 1..20: mol_type = other DNA
caaaggctgtgaagtcggag

SEQ ID NO: 11461 - DNA, 20 bp, synthetic construct
  misc_feature 1..20: note = chemically synthesized
  source 1..20: mol_type = other DNA
aaaggctgtgaagtcggaga

SEQ ID NO: 11462 - DNA, 20 bp, synthetic construct
  misc_feature 1..20: note = chemically synthesized
  source 1..20: mol_type = other DNA
ggctgtgaagtcggagaggg

SEQ ID NO: 11463 - DNA, 20 bp, synthetic construct
  misc_feature 1..20: note = chemically synthesized
  source 1..20: mol_type = other DNA
gctcgacacacacaaataaa

SEQ ID NO: 11464 - DNA, 20 bp, synthetic construct
  misc_feature 1..20: note = chemically synthesized
  source 1..20: mol_type = other DNA
acacacaaataaaaagcccc

SEQ ID NO: 11465 - DNA, 20 bp, synthetic construct
  misc_feature 1..20: note = chemically synthesized
  source 1..20: mol_type = other DNA
taaaaagcccctggatctca

SEQ ID NO: 11466 - DNA, 20 bp, synthetic construct
  misc_feature 1..20: note = chemically synthesized
  source 1..20: mol_type = other DNA
aagcccctggatctcacaga

SEQ ID NO: 11467 - DNA, 20 bp, synthetic construct
  misc_feature 1..20: note = chemically synthesized
  source 1..20: mol_type = other DNA
atctcacagatggaccccat

SEQ ID NO: 11468 - DNA, 20 bp, synthetic construct
  misc_feature 1..20: note = chemically synthesized
  source 1..20: mol_type = other DNA
agttcatcttactgcctaaa

SEQ ID NO: 11469 - DNA, 20 bp, synthetic construct
  misc_feature 1..20: note = chemically synthesized
  source 1..20: mol_type = other DNA
ttaataatttatttgtgttc

SEQ ID NO: 11470 - DNA, 20 bp, synthetic construct
  misc_feature 1..20: note = chemically synthesized
  source 1..20: mol_type = other DNA
gtgttctggatactgtttcc

SEQ ID NO: 11471 - DNA, 20 bp, synthetic construct
  misc_feature 1..20: note = chemically synthesized
  source 1..20: mol_type = other DNA
atattaacaactttaaactg

SEQ ID NO: 11472 - DNA, 20 bp, synthetic construct
  misc_feature 1..20: note = chemically synthesized
  source 1..20: mol_type = other DNA
tttaaactgaagcatgcttt

SEQ ID NO: 11473 - DNA, 20 bp, synthetic construct
  misc_feature 1..20: note = chemically synthesized
  source 1..20: mol_type = other DNA
actgaagcatgcttttagca

SEQ ID NO: 11474 - DNA, 20 bp, synthetic construct
  misc_feature 1..20: note = chemically synthesized
  source 1..20: mol_type = other DNA
agcatgcttttagcatggta

SEQ ID NO: 11475 - DNA, 20 bp, synthetic construct
  misc_feature 1..20: note = chemically synthesized
  source 1..20: mol_type = other DNA
tgcttttagcatggtatgga

SEQ ID NO: 11476 - DNA, 20 bp, synthetic construct
  misc_feature 1..20: note = chemically synthesized
  source 1..20: mol_type = other DNA
ttttagcatggtatggatgg

SEQ ID NO: 11477 - DNA, 20 bp, synthetic construct
  misc_feature 1..20: note = chemically synthesized
  source 1..20: mol_type = other DNA
catggtatggatggaagtca

SEQ ID NO: 11478 - DNA, 20 bp, synthetic construct
  misc_feature 1..20: note = chemically synthesized
  source 1..20: mol_type = other DNA
ggtatggatggaagtcacgg

SEQ ID NO: 11479 - DNA, 20 bp, synthetic construct
  misc_feature 1..20: note = chemically synthesized
  source 1..20: mol_type = other DNA
gtatggatggaagtcacggt

SEQ ID NO: 11480 - DNA, 20 bp, synthetic construct
  misc_feature 1..20: note = chemically synthesized
  source 1..20: mol_type = other DNA
tatggatggaagtcacggta

SEQ ID NO: 11481 - DNA, 20 bp, synthetic construct
  misc_feature 1..20: note = chemically synthesized
  source 1..20: mol_type = other DNA
ggatggaagtcacggtaggg

SEQ ID NO: 11482 - DNA, 20 bp, synthetic construct
  misc_feature 1..20: note = chemically synthesized
  source 1..20: mol_type = other DNA
aagtcacggtagggcagtgc

SEQ ID NO: 11483 - DNA, 20 bp, synthetic construct
  misc_feature 1..20: note = chemically synthesized
  source 1..20: mol_type = other DNA
agtcacggtagggcagtgct

SEQ ID NO: 11484 - DNA, 20 bp, synthetic construct
  misc_feature 1..20: note = chemically synthesized
  source 1..20: mol_type = other DNA
tagggcagtgctaggtccct

SEQ ID NO: 11485 - DNA, 20 bp, synthetic construct
  misc_feature 1..20: note = chemically synthesized
  source 1..20: mol_type = other DNA
gggcagtgctaggtccctcg

SEQ ID NO: 11486 - DNA, 20 bp, synthetic construct
  misc_feature 1..20: note = chemically synthesized
  source 1..20: mol_type = other DNA
ggcagtgctaggtccctcgg

SEQ ID NO: 11487 - DNA, 20 bp, synthetic construct
  misc_feature 1..20: note = chemically synthesized
  source 1..20: mol_type = other DNA
tccctcggaggttaaaatta

SEQ ID NO: 11488 - DNA, 20 bp, synthetic construct
  misc_feature 1..20: note = chemically synthesized
  source 1..20: mol_type = other DNA
cattaaacattcgttttaat

SEQ ID NO: 11489 - DNA, 20 bp, synthetic construct
  misc_feature 1..20: note = chemically synthesized
  source 1..20: mol_type = other DNA
attcgttttaatcagaatat

SEQ ID NO: 11490 - DNA, 20 bp, synthetic construct
  misc_feature 1..20: note = chemically synthesized
  source 1..20: mol_type = other DNA
ttctgattctgcttgttaac

SEQ ID NO: 11491 - DNA, 20 bp, synthetic construct
  misc_feature 1..20: note = chemically synthesized
  source 1..20: mol_type = other DNA
agtgataaactcataaacca

SEQ ID NO: 11492 - DNA, 20 bp, synthetic construct
  misc_feature 1..20: note = chemically synthesized
  source 1..20: mol_type = other DNA
aaagatgaacatcaataata

SEQ ID NO: 11493 - DNA, 20 bp, synthetic construct
  misc_feature 1..20: note = chemically synthesized
  source 1..20: mol_type = other DNA
tgaacatcaataatacagca

SEQ ID NO: 11494 - DNA, 20 bp, synthetic construct
  misc_feature 1..20: note = chemically synthesized
  source 1..20: mol_type = other DNA
gaacatcaataatacagcac

SEQ ID NO: 11495 - DNA, 20 bp, synthetic construct
  misc_feature 1..20: note = chemically synthesized
  source 1..20: mol_type = other DNA
atacagcacaggttattcaa

SEQ ID NO: 11496 - DNA, 20 bp, synthetic construct
  misc_feature 1..20: note = chemically synthesized
  source 1..20: mol_type = other DNA
gcacaggttattcaacagca

SEQ ID NO: 11497 - DNA, 20 bp, synthetic construct
  misc_feature 1..20: note = chemically synthesized
  source 1..20: mol_type = other DNA
cacaggttattcaacagcaa

SEQ ID NO: 11498 - DNA, 20 bp, synthetic construct
  misc_feature 1..20: note = chemically synthesized
  source 1..20: mol_type = other DNA
aaaggcaaacaccaaaatca

SEQ ID NO: 11499 - DNA, 20 bp, synthetic construct
  misc_feature 1..20: note = chemically synthesized
  source 1..20: mol_type = other DNA
aaggcaaacaccaaaatcac

SEQ ID NO: 11500 - DNA, 20 bp, synthetic construct
  misc_feature 1..20: note = chemically synthesized
  source 1..20: mol_type = other DNA
aatcacaggctctcaaaaat

SEQ ID NO: 11501 - DNA, 20 bp, synthetic construct
  misc_feature 1..20: note = chemically synthesized
  source 1..20: mol_type = other DNA
tctcaaaaatcggaaaccgt

SEQ ID NO: 11502 - DNA, 20 bp, synthetic construct
  misc_feature 1..20: note = chemically synthesized
  source 1..20: mol_type = other DNA
aaaaatcggaaaccgttagt

SEQ ID NO: 11503 - DNA, 20 bp, synthetic construct
  misc_feature 1..20: note = chemically synthesized
  source 1..20: mol_type = other DNA
tagcaccttgttttcaccac

SEQ ID NO: 11504 - DNA, 20 bp, synthetic construct
  misc_feature 1..20: note = chemically synthesized
  source 1..20: mol_type = other DNA
agcaccttgttttcaccacc

SEQ ID NO: 11505 - DNA, 20 bp, synthetic construct
  misc_feature 1..20: note = chemically synthesized
  source 1..20: mol_type = other DNA
gcaccttgttttcaccacca

SEQ ID NO: 11506 - DNA, 20 bp, synthetic construct
  misc_feature 1..20: note = chemically synthesized
  source 1..20: mol_type = other DNA
ccagggcactcgtgtacctt

SEQ ID NO: 11507 - DNA, 20 bp, synthetic construct
  misc_feature 1..20: note = chemically synthesized
  source 1..20: mol_type = other DNA
cagggcactcgtgtaccttg

SEQ ID NO: 11508 - DNA, 20 bp, synthetic construct
  misc_feature 1..20: note = chemically synthesized
  source 1..20: mol_type = other DNA
agggcactcgtgtaccttga

SEQ ID NO: 11509 - DNA, 20 bp, synthetic construct
  misc_feature 1..20: note = chemically synthesized
  source 1..20: mol_type = other DNA
ggcactcgtgtaccttgagg

SEQ ID NO: 11510 - DNA, 20 bp, synthetic construct
  misc_feature 1..20: note = chemically synthesized
  source 1..20: mol_type = other DNA
gtgtaccttgagggagacac

SEQ ID NO: 11511 - DNA, 20 bp, synthetic construct
  misc_feature 1..20: note = chemically synthesized
  source 1..20: mol_type = other DNA
tgtaccttgagggagacact

SEQ ID NO: 11512 - DNA, 20 bp, synthetic construct
  misc_feature 1..20: note = chemically synthesized
  source 1..20: mol_type = other DNA
taccttgagggagacactgg

SEQ ID NO: 11513 - DNA, 20 bp, synthetic construct
  misc_feature 1..20: note = chemically synthesized
  source 1..20: mol_type = other DNA
tgagggagacactgggagcc

SEQ ID NO: 11514 - DNA, 20 bp, synthetic construct
  misc_feature 1..20: note = chemically synthesized
  source 1..20: mol_type = other DNA
gagggagacactgggagccc

SEQ ID NO: 11515 - DNA, 20 bp, synthetic construct
  misc_feature 1..20: note = chemically synthesized
  source 1..20: mol_type = other DNA
agggagacactgggagccca

SEQ ID NO: 11516 - DNA, 20 bp, synthetic construct
  misc_feature 1..20: note = chemically synthesized
  source 1..20: mol_type = other DNA
ggagacactgggagcccagg

SEQ ID NO: 11517 - DNA, 20 bp, synthetic construct
  misc_feature 1..20: note = chemically synthesized
  source 1..20: mol_type = other DNA
cactgggagcccagggagcc

SEQ ID NO: 11518 - DNA, 20 bp, synthetic construct
  misc_feature 1..20: note = chemically synthesized
  source 1..20: mol_type = other DNA
ctgggagcccagggagcctg

SEQ ID NO: 11519 - DNA, 20 bp, synthetic construct
  misc_feature 1..20: note = chemically synthesized
  source 1..20: mol_type = other DNA
agcccagggagcctggagac

SEQ ID NO: 11520 - DNA, 20 bp, synthetic construct
  misc_feature 1..20: note = chemically synthesized
  source 1..20: mol_type = other DNA
gcccagggagcctggagacc

SEQ ID NO: 11521 - DNA, 20 bp, synthetic construct
  misc_feature 1..20: note = chemically synthesized
  source 1..20: mol_type = other DNA
ctggagaccaggatatactt

SEQ ID NO: 11522 - DNA, 20 bp, synthetic construct
  misc_feature 1..20: note = chemically synthesized
  source 1..20: mol_type = other DNA
ccaggatatactttggtgat

SEQ ID NO: 11523 - DNA, 20 bp, synthetic construct
  misc_feature 1..20: note = chemically synthesized
  source 1..20: mol_type = other DNA
caggatatactttggtgatg

SEQ ID NO: 11524 - DNA, 20 bp, synthetic construct
  misc_feature 1..20: note = chemically synthesized
  source 1..20: mol_type = other DNA
aggatatactttggtgatga

SEQ ID NO: 11525 - DNA, 20 bp, synthetic construct
  misc_feature 1..20: note = chemically synthesized
  source 1..20: mol_type = other DNA
ggatatactttggtgatgag

SEQ ID NO: 11526 - DNA, 20 bp, synthetic construct
  misc_feature 1..20: note = chemically synthesized
  source 1..20: mol_type = other DNA
atatactttggtgatgaggg

SEQ ID NO: 11527 - DNA, 20 bp, synthetic construct
  misc_feature 1..20: note = chemically synthesized
  source 1..20: mol_type = other DNA
tatactttggtgatgagggg

SEQ ID NO: 11528 - DNA, 20 bp, synthetic construct
  misc_feature 1..20: note = chemically synthesized
  source 1..20: mol_type = other DNA
gatgaggggaggacacattg

SEQ ID NO: 11529 - DNA, 20 bp, synthetic construct
  misc_feature 1..20: note = chemically synthesized
  source 1..20: mol_type = other DNA
ggggaggacacattgtagct

SEQ ID NO: 11530 - DNA, 20 bp, synthetic construct
  misc_feature 1..20: note = chemically synthesized
  source 1..20: mol_type = other DNA
ggaggacacattgtagctca

SEQ ID NO: 11531 - DNA, 20 bp, synthetic construct
  misc_feature 1..20: note = chemically synthesized
  source 1..20: mol_type = other DNA
ggacacattgtagctcagag

SEQ ID NO: 11532 - DNA, 20 bp, synthetic construct
  misc_feature 1..20: note = chemically synthesized
  source 1..20: mol_type = other DNA
cacattgtagctcagagcag

SEQ ID NO: 11533 - DNA, 20 bp, synthetic construct
  misc_feature 1..20: note = chemically synthesized
  source 1..20: mol_type = other DNA
gctcagagcagcagctgaat

SEQ ID NO: 11534 - DNA, 20 bp, synthetic construct
  misc_feature 1..20: note = chemically synthesized
  source 1..20: mol_type = other DNA
agaaaacttacttgatctaa

SEQ ID NO: 11535 - DNA, 20 bp, synthetic construct
  misc_feature 1..20: note = chemically synthesized
  source 1..20: mol_type = other DNA
ttacttgatctaaaagataa

SEQ ID NO: 11536 - DNA, 20 bp, synthetic construct
  misc_feature 1..20: note = chemically synthesized
  source 1..20: mol_type = other DNA
acttgatctaaaagataaaa

SEQ ID NO: 11537 - DNA, 20 bp, synthetic construct
  misc_feature 1..20: note = chemically synthesized
  source 1..20: mol_type = other DNA
gatctaaaagataaaagagt

SEQ ID NO: 11538 - DNA, 20 bp, synthetic construct
  misc_feature 1..20: note = chemically synthesized
  source 1..20: mol_type = other DNA
ataaaagagtcagccaaacc

SEQ ID NO: 11539 - DNA, 20 bp, synthetic construct
  misc_feature 1..20: note = chemically synthesized
  source 1..20: mol_type = other DNA
taaaagagtcagccaaaccc

SEQ ID NO: 11540 - DNA, 20 bp, synthetic construct
  misc_feature 1..20: note = chemically synthesized
  source 1..20: mol_type = other DNA
agtcagccaaacccaggccc

SEQ ID NO: 11541 - DNA, 20 bp, synthetic construct
  misc_feature 1..20: note = chemically synthesized
  source 1..20: mol_type = other DNA
aaacccaggcccaagtcctt

SEQ ID NO: 11542 - DNA, 20 bp, synthetic construct
  misc_feature 1..20: note = chemically synthesized
  source 1..20: mol_type = other DNA
aacccaggcccaagtccttt

SEQ ID NO: 11543 - DNA, 20 bp, synthetic construct
  misc_feature 1..20: note = chemically synthesized
  source 1..20: mol_type = other DNA
ggcccaagtcctttaggtgc

SEQ ID NO: 11544 - DNA, 20 bp, synthetic construct
  misc_feature 1..20: note = chemically synthesized
  source 1..20: mol_type = other DNA
aggtgccagccatctatcta

SEQ ID NO: 11545 - DNA, 20 bp, synthetic construct
  misc_feature 1..20: note = chemically synthesized
  source 1..20: mol_type = other DNA
tgccagccatctatctaaag

SEQ ID NO: 11546 - DNA, 20 bp, synthetic construct
  misc_feature 1..20: note = chemically synthesized
  source 1..20: mol_type = other DNA
ctatctaaagaagaaaccta

SEQ ID NO: 11547 - DNA, 20 bp, synthetic construct
  misc_feature 1..20: note = chemically synthesized
  source 1..20: mol_type = other DNA
gaagaaacctaaagcattgt

SEQ ID NO: 11548 - DNA, 20 bp, synthetic construct
  misc_feature 1..20: note = chemically synthesized
  source 1..20: mol_type = other DNA
aaacctaaagcattgttaga

SEQ ID NO: 11549 - DNA, 20 bp, synthetic construct
  misc_feature 1..20: note = chemically synthesized
  source 1..20: mol_type = other DNA
aacctaaagcattgttagaa

SEQ ID NO: 11550 - DNA, 20 bp, synthetic construct
  misc_feature 1..20: note = chemically synthesized
  source 1..20: mol_type = other DNA
agcattgttagaaaggtttg

SEQ ID NO: 11551 - DNA, 20 bp, synthetic construct
  misc_feature 1..20: note = chemically synthesized
  source 1..20: mol_type = other DNA
tagaaaggtttgtagttctg

SEQ ID NO: 11552 - DNA, 20 bp, synthetic construct
  misc_feature 1..20: note = chemically synthesized
  source 1..20: mol_type = other DNA
ctgtagccttccctcctcca

SEQ ID NO: 11553 - DNA, 20 bp, synthetic construct
  misc_feature 1..20: note = chemically synthesized
  source 1..20: mol_type = other DNA
tgtagccttccctcctccaa

SEQ ID NO: 11554 - DNA, 20 bp, synthetic construct
  misc_feature 1..20: note = chemically synthesized
  source 1..20: mol_type = other DNA
tagccttccctcctccaaag

SEQ ID NO: 11555 - DNA, 20 bp, synthetic construct
  misc_feature 1..20: note = chemically synthesized
  source 1..20: mol_type = other DNA
agccttccctcctccaaagg

SEQ ID NO: 11556 - DNA, 20 bp, synthetic construct
  misc_feature 1..20: note = chemically synthesized
  source 1..20: mol_type = other DNA
gatgtcttaatacactataa

SEQ ID NO: 11557 - DNA, 20 bp, synthetic construct
  misc_feature 1..20: note = chemically synthesized
  source 1..20: mol_type = other DNA
cttaatacactataatagcc

SEQ ID NO: 11558 - DNA, 20 bp, synthetic construct
  misc_feature 1..20: note = chemically synthesized
  source 1..20: mol_type = other DNA
ttaatacactataatagcca

SEQ ID NO: 11559 - DNA, 20 bp, synthetic construct
  misc_feature 1..20: note = chemically synthesized
  source 1..20: mol_type = other DNA
aaactgccctgcaatgttcg

SEQ ID NO: 11560 - DNA, 20 bp, synthetic construct
  misc_feature 1..20: note = chemically synthesized
  source 1..20: mol_type = other DNA
aactgccctgcaatgttcgt

SEQ ID NO: 11561 - DNA, 20 bp, synthetic construct
  misc_feature 1..20: note = chemically synthesized
  source 1..20: mol_type = other DNA
actgccctgcaatgttcgtg

SEQ ID NO: 11562 - DNA, 20 bp, synthetic construct
  misc_feature 1..20: note = chemically synthesized
  source 1..20: mol_type = other DNA
cctgcaatgttcgtggggaa

SEQ ID NO: 11563 - DNA, 20 bp, synthetic construct
  misc_feature 1..20: note = chemically synthesized
  source 1..20: mol_type = other DNA
atgttcgtggggaacagaaa

SEQ ID NO: 11564 - DNA, 20 bp, synthetic construct
  misc_feature 1..20: note = chemically synthesized
  source 1..20: mol_type = other DNA
tgttcgtggggaacagaaac

SEQ ID NO: 11565 - DNA, 20 bp, synthetic construct
  misc_feature 1..20: note = chemically synthesized
  source 1..20: mol_type = other DNA
tacatatttctctatgtatc

SEQ ID NO: 11566 - DNA, 20 bp, synthetic construct
  misc_feature 1..20: note = chemically synthesized
  source 1..20: mol_type = other DNA
atatttctctatgtatctgg

SEQ ID NO: 11567 - DNA, 20 bp, synthetic construct
  misc_feature 1..20: note = chemically synthesized
  source 1..20: mol_type = other DNA
aatcatatacttaaatttta

SEQ ID NO: 11568 - DNA, 20 bp, synthetic construct
  misc_feature 1..20: note = chemically synthesized
  source 1..20: mol_type = other DNA
ttacagtcttctccccaaat

SEQ ID NO: 11569 - DNA, 20 bp, synthetic construct
  misc_feature 1..20: note = chemically synthesized
  source 1..20: mol_type = other DNA
ccccaaatgagaacgatttc

SEQ ID NO: 11570 - DNA, 20 bp, synthetic construct
  misc_feature 1..20: note = chemically synthesized
  source 1..20: mol_type = other DNA
caaactgtacttaacgttaa

SEQ ID NO: 11571 - DNA, 20 bp, synthetic construct
  misc_feature 1..20: note = chemically synthesized
  source 1..20: mol_type = other DNA
tacttaacgttaaaagaaaa

SEQ ID NO: 11572 - DNA, 20 bp, synthetic construct
  misc_feature 1..20: note = chemically synthesized
  source 1..20: mol_type = other DNA
taaaacatatgtaattactc

SEQ ID NO: 11573 - DNA, 20 bp, synthetic construct
  misc_feature 1..20: note = chemically synthesized
  source 1..20: mol_type = other DNA
aaaacatatgtaattactca

SEQ ID NO: 11574 - DNA, 20 bp, synthetic construct
  misc_feature 1..20: note = chemically synthesized
  source 1..20: mol_type = other DNA
catatgtaattactcaaggt

SEQ ID NO: 11575 - DNA, 20 bp, synthetic construct
  misc_feature 1..20: note = chemically synthesized
  source 1..20: mol_type = other DNA
tctaattcctcaattcacta

SEQ ID NO: 11576 - DNA, 20 bp, synthetic construct
  misc_feature 1..20: note = chemically synthesized
  source 1..20: mol_type = other DNA
ctaattcctcaattcactaa

SEQ ID NO: 11577 - DNA, 20 bp, synthetic construct
  misc_feature 1..20: note = chemically synthesized
  source 1..20: mol_type = other DNA
tcaattcactaaaggaaact

SEQ ID NO: 11578 - DNA, 20 bp, synthetic construct
  misc_feature 1..20: note = chemically synthesized
  source 1..20: mol_type = other DNA
ttcactaaaggaaacttggc

SEQ ID NO: 11579 - DNA, 20 bp, synthetic construct
  misc_feature 1..20: note = chemically synthesized
  source 1..20: mol_type = other DNA
actaaaggaaacttggcaag

SEQ ID NO: 11580 - DNA, 20 bp, synthetic construct
  misc_feature 1..20: note = chemically synthesized
  source 1..20: mol_type = other DNA
atcattttgctcctttctac

SEQ ID NO: 11581 - DNA, 20 bp, synthetic construct
  misc_feature 1..20: note = chemically synthesized
  source 1..20: mol_type = other DNA
tcattttgctcctttctact

SEQ ID NO: 11582 - DNA, 20 bp, synthetic construct
  misc_feature 1..20: note = chemically synthesized
  source 1..20: mol_type = other DNA
cattttgctcctttctactg

SEQ ID NO: 11583 - DNA, 20 bp, synthetic construct
  misc_feature 1..20: note = chemically synthesized
  source 1..20: mol_type = other DNA
tcctttctactggggcatct

SEQ ID NO: 11584 - DNA, 20 bp, synthetic construct
  misc_feature 1..20: note = chemically synthesized
  source 1..20: mol_type = other DNA
cctttctactggggcatctg

SEQ ID NO: 11585 - DNA, 20 bp, synthetic construct
  misc_feature 1..20: note = chemically synthesized
  source 1..20: mol_type = other DNA
tttctactggggcatctgag

SEQ ID NO: 11586 - DNA, 20 bp, synthetic construct
  misc_feature 1..20: note = chemically synthesized
  source 1..20: mol_type = other DNA
ttctactggggcatctgagg

SEQ ID NO: 11587 - DNA, 20 bp, synthetic construct
  misc_feature 1..20: note = chemically synthesized
  source 1..20: mol_type = other DNA
ctactggggcatctgaggag

SEQ ID NO: 11588 - DNA, 20 bp, synthetic construct
  misc_feature 1..20: note = chemically synthesized
  source 1..20: mol_type = other DNA
actggggcatctgaggagga

SEQ ID NO: 11589 - DNA, 20 bp, synthetic construct
  misc_feature 1..20: note = chemically synthesized
  source 1..20: mol_type = other DNA
atctgaggaggagagccact

SEQ ID NO: 11590 - DNA, 20 bp, synthetic construct
  misc_feature 1..20: note = chemically synthesized
  source 1..20: mol_type = other DNA
tctgaggaggagagccactg

SEQ ID NO: 11591 - DNA, 20 bp, synthetic construct
  misc_feature 1..20: note = chemically synthesized
  source 1..20: mol_type = other DNA
gaggaggagagccactgagg

SEQ ID NO: 11592 - DNA, 20 bp, synthetic construct
  misc_feature 1..20: note = chemically synthesized
  source 1..20: mol_type = other DNA
aatacacaaaacatgatcaa

SEQ ID NO: 11593 - DNA, 20 bp, synthetic construct
  misc_feature 1..20: note = chemically synthesized
  source 1..20: mol_type = other DNA
tgatcaaaagtgattaacaa

SEQ ID NO: 11594 - DNA, 20 bp, synthetic construct
  misc_feature 1..20: note = chemically synthesized
  source 1..20: mol_type = other DNA
atatgcaaattacattaatg

SEQ ID NO: 11595 - DNA, 20 bp, synthetic construct
  misc_feature 1..20: note = chemically synthesized
  source 1..20: mol_type = other DNA
tatgcaaattacattaatga

SEQ ID NO: 11596 - DNA, 20 bp, synthetic construct
  misc_feature 1..20: note = chemically synthesized
  source 1..20: mol_type = other DNA
tgcaaattacattaatgaag

SEQ ID NO: 11597 - DNA, 20 bp, synthetic construct
  misc_feature 1..20: note = chemically synthesized
  source 1..20: mol_type = other DNA
tacattaatgaaggagtgca

SEQ ID NO: 11598 - DNA, 20 bp, synthetic construct
  misc_feature 1..20: note = chemically synthesized
  source 1..20: mol_type = other DNA
attaaatatgtcaaatctct

SEQ ID NO: 11599 - DNA, 20 bp, synthetic construct
  misc_feature 1..20: note = chemically synthesized
  source 1..20: mol_type = other DNA
cttggtgaacttttaatctt

SEQ ID NO: 11600 - DNA, 20 bp, synthetic construct
  misc_feature 1..20: note = chemically synthesized
  source 1..20: mol_type = other DNA
ggtgaacttttaatcttgag

SEQ ID NO: 11601 - DNA, 20 bp, synthetic construct
  misc_feature 1..20: note = chemically synthesized
  source 1..20: mol_type = other DNA
ttttacatcatcaattttgc

SEQ ID NO: 11602 - DNA, 20 bp, synthetic construct
  misc_feature 1..20: note = chemically synthesized
  source 1..20: mol_type = other DNA
ttttgcaagattgaaaatct

SEQ ID NO: 11603 - DNA, 20 bp, synthetic construct
  misc_feature 1..20: note = chemically synthesized
  source 1..20: mol_type = other DNA
gattgaaaatctaagaatct

SEQ ID NO: 11604 - DNA, 20 bp, synthetic construct
  misc_feature 1..20: note = chemically synthesized
  source 1..20: mol_type = other DNA
ttcaccttttttttctcctt

SEQ ID NO: 11605 - DNA, 20 bp, synthetic construct
  misc_feature 1..20: note = chemically synthesized
  source 1..20: mol_type = other DNA
accttttttttctccttcag

SEQ ID NO: 11606 - DNA, 20 bp, synthetic construct
  misc_feature 1..20: note = chemically synthesized
  source 1..20: mol_type = other DNA
ccttttttttctccttcagc

SEQ ID NO: 11607 - DNA, 20 bp, synthetic construct
  misc_feature 1..20: note = chemically synthesized
  source 1..20: mol_type = other DNA
tttctccttcagcaggctga

SEQ ID NO: 11608 - DNA, 20 bp, synthetic construct
  misc_feature 1..20: note = chemically synthesized
  source 1..20: mol_type = other DNA
ttctccttcagcaggctgac

SEQ ID NO: 11609 - DNA, 20 bp, synthetic construct
  misc_feature 1..20: note = chemically synthesized
  source 1..20: mol_type = other DNA
ccttcagcaggctgacaggc

SEQ ID NO: 11610 - DNA, 20 bp, synthetic construct
  misc_feature 1..20: note = chemically synthesized
  source 1..20: mol_type = other DNA
gcaccgaatgtacatgttaa

SEQ ID NO: 11611 - DNA, 20 bp, synthetic construct
  misc_feature 1..20: note = chemically synthesized
  source 1..20: mol_type = other DNA
caccgaatgtacatgttaat

SEQ ID NO: 11612 - DNA, 20 bp, synthetic construct
  misc_feature 1..20: note = chemically synthesized
  source 1..20: mol_type = other DNA
gcaaaacaattcgcaattac

SEQ ID NO: 11613 - DNA, 20 bp, synthetic construct
  misc_feature 1..20: note = chemically synthesized
  source 1..20: mol_type = other DNA
aaacaattcgcaattactgg

SEQ ID NO: 11614 - DNA, 20 bp, synthetic construct
  misc_feature 1..20: note = chemically synthesized
  source 1..20: mol_type = other DNA
aacaattcgcaattactgga

SEQ ID NO: 11615 - DNA, 20 bp, synthetic construct
  misc_feature 1..20: note = chemically synthesized
  source 1..20: mol_type = other DNA
caattactggaaggacctaa

SEQ ID NO: 11616 - DNA, 20 bp, synthetic construct
  misc_feature 1..20: note = chemically synthesized
  source 1..20: mol_type = other DNA
tggaaggacctaatggtcat

SEQ ID NO: 11617 - DNA, 20 bp, synthetic construct
  misc_feature 1..20: note = chemically synthesized
  source 1..20: mol_type = other DNA
tggtcattagaatttacaac

SEQ ID NO: 11618 - DNA, 20 bp, synthetic construct
  misc_feature 1..20: note = chemically synthesized
  source 1..20: mol_type = other DNA
ggtcattagaatttacaact

SEQ ID NO: 11619 - DNA, 20 bp, synthetic construct
  misc_feature 1..20: note = chemically synthesized
  source 1..20: mol_type = other DNA
tacaactaggtaatgaactg

SEQ ID NO: 11620 - DNA, 20 bp, synthetic construct
  misc_feature 1..20: note = chemically synthesized
  source 1..20: mol_type = other DNA
ccacaccatgcatattcata

SEQ ID NO: 11621 - DNA, 20 bp, synthetic construct
  misc_feature 1..20: note = chemically synthesized
  source 1..20: mol_type = other DNA
tgcatattcataaagcaatt

SEQ ID NO: 11622 - DNA, 20 bp, synthetic construct
  misc_feature 1..20: note = chemically synthesized
  source 1..20: mol_type = other DNA
ataaagcaatttagcctttg

SEQ ID NO: 11623 - DNA, 20 bp, synthetic construct
  misc_feature 1..20: note = chemically synthesized
  source 1..20: mol_type = other DNA
aatttagcctttgaagatta

SEQ ID NO: 11624 - DNA, 20 bp, synthetic construct
  misc_feature 1..20: note = chemically synthesized
  source 1..20: mol_type = other DNA
ttagcctttgaagattaaag

SEQ ID NO: 11625 - DNA, 20 bp, synthetic construct
  misc_feature 1..20: note = chemically synthesized
  source 1..20: mol_type = other DNA
gaagtgcttaaaattcaaat

SEQ ID NO: 11626 - DNA, 20 bp, synthetic construct
  misc_feature 1..20: note = chemically synthesized
  source 1..20: mol_type = other DNA
cttaaaattcaaatgagctt

SEQ ID NO: 11627 - DNA, 20 bp, synthetic construct
  misc_feature 1..20: note = chemically synthesized
  source 1..20: mol_type = other DNA
aatgagctttagcaaattat

SEQ ID NO: 11628 - DNA, 20 bp, synthetic construct
  misc_feature 1..20: note = chemically synthesized
  source 1..20: mol_type = other DNA
agctttagcaaattatcagt

SEQ ID NO: 11629 - DNA, 20 bp, synthetic construct
  misc_feature 1..20: note = chemically synthesized
  source 1..20: mol_type = other DNA
atcagtaagattcatccaaa

SEQ ID NO: 11630 - DNA, 20 bp, synthetic construct
  misc_feature 1..20: note = chemically synthesized
  source 1..20: mol_type = other DNA
taagattcatccaaaaagca

SEQ ID NO: 11631 - DNA, 20 bp, synthetic construct
  misc_feature 1..20: note = chemically synthesized
  source 1..20: mol_type = other DNA
aagattcatccaaaaagcaa

SEQ ID NO: 11632 - DNA, 20 bp, synthetic construct
  misc_feature 1..20: note = chemically synthesized
  source 1..20: mol_type = other DNA
agattcatccaaaaagcaaa

SEQ ID NO: 11633 - DNA, 20 bp, synthetic construct
  misc_feature 1..20: note = chemically synthesized
  source 1..20: mol_type = other DNA
tgcaaaattgtaatatcttc

SEQ ID NO: 11634 - DNA, 20 bp, synthetic construct
  misc_feature 1..20: note = chemically synthesized
  source 1..20: mol_type = other DNA
attgtaatatcttccagact

SEQ ID NO: 11635 - DNA, 20 bp, synthetic construct
  misc_feature 1..20: note = chemically synthesized
  source 1..20: mol_type = other DNA
gactgagcttaaactaaaca

SEQ ID NO: 11636 - DNA, 20 bp, synthetic construct
  misc_feature 1..20: note = chemically synthesized
  source 1..20: mol_type = other DNA
ctgagcttaaactaaacata

SEQ ID NO: 11637 - DNA, 20 bp, synthetic construct
  misc_feature 1..20: note = chemically synthesized
  source 1..20: mol_type = other DNA
taaactaaacatagagcttc

SEQ ID NO: 11638 - DNA, 20 bp, synthetic construct
  misc_feature 1..20: note = chemically synthesized
  source 1..20: mol_type = other DNA
taaacatagagcttctagtc

SEQ ID NO: 11639 - DNA, 20 bp, synthetic construct
  misc_feature 1..20: note = chemically synthesized
  source 1..20: mol_type = other DNA
tagagcttctagtcaagcca

SEQ ID NO: 11640 - DNA, 20 bp, synthetic construct
  misc_feature 1..20: note = chemically synthesized
  source 1..20: mol_type = other DNA
agagcttctagtcaagccaa

SEQ ID NO: 11641 - DNA, 20 bp, synthetic construct
  misc_feature 1..20: note = chemically synthesized
  source 1..20: mol_type = other DNA
gagcttctagtcaagccaaa

SEQ ID NO: 11642 - DNA, 20 bp, synthetic construct
  misc_feature 1..20: note = chemically synthesized
  source 1..20: mol_type = other DNA
agcttctagtcaagccaaag

SEQ ID NO: 11643 - DNA, 20 bp, synthetic construct
  misc_feature 1..20: note = chemically synthesized
  source 1..20: mol_type = other DNA
ctagtcaagccaaaggggct

SEQ ID NO: 11644 - DNA, 20 bp, synthetic construct
  misc_feature 1..20: note = chemically synthesized
  source 1..20: mol_type = other DNA
caaaggggctaagatacaaa

SEQ ID NO: 11645 - DNA, 20 bp, synthetic construct
  misc_feature 1..20: note = chemically synthesized
  source 1..20: mol_type = other DNA
aaggggctaagatacaaaca

SEQ ID NO: 11646 - DNA, 20 bp, synthetic construct
  misc_feature 1..20: note = chemically synthesized
  source 1..20: mol_type = other DNA
aggggctaagatacaaacag

SEQ ID NO: 11647 - DNA, 20 bp, synthetic construct
  misc_feature 1..20: note = chemically synthesized
  source 1..20: mol_type = other DNA
agaggctgcaaacatcgtca

SEQ ID NO: 11648 - DNA, 20 bp, synthetic construct
  misc_feature 1..20: note = chemically synthesized
  source 1..20: mol_type = other DNA
cggactttgttcataaaact

SEQ ID NO: 11649 - DNA, 20 bp, synthetic construct
  misc_feature 1..20: note = chemically synthesized
  source 1..20: mol_type = other DNA
gttcataaaactaagccctt

SEQ ID NO: 11650 - DNA, 20 bp, synthetic construct
  misc_feature 1..20: note = chemically synthesized
  source 1..20: mol_type = other DNA
tcataaaactaagcccttaa

SEQ ID NO: 11651 - DNA, 20 bp, synthetic construct
  misc_feature 1..20: note = chemically synthesized
  source 1..20: mol_type = other DNA
gccaaacctatctctaaaca

SEQ ID NO: 11652 - DNA, 20 bp, synthetic construct
  misc_feature 1..20: note = chemically synthesized
  source 1..20: mol_type = other DNA
acatggtaatttatcaaaaa

SEQ ID NO: 11653 - DNA, 20 bp, synthetic construct
  misc_feature 1..20: note = chemically synthesized
  source 1..20: mol_type = other DNA
gtaatttatcaaaaacagcc

SEQ ID NO: 11654 - DNA, 20 bp, synthetic construct
  misc_feature 1..20: note = chemically synthesized
  source 1..20: mol_type = other DNA
aatttatcaaaaacagccca

SEQ ID NO: 11655 - DNA, 20 bp, synthetic construct
  misc_feature 1..20: note = chemically synthesized
  source 1..20: mol_type = other DNA
aaacagcccagagtcgctca

SEQ ID NO: 11656 - DNA, 20 bp, synthetic construct
  misc_feature 1..20: note = chemically synthesized
  source 1..20: mol_type = other DNA
aacagcccagagtcgctcat

SEQ ID NO: 11657 - DNA, 20 bp, synthetic construct
  misc_feature 1..20: note = chemically synthesized
  source 1..20: mol_type = other DNA
cgctcataggcaatactgca

SEQ ID NO: 11658 - DNA, 20 bp, synthetic construct
  misc_feature 1..20: note = chemically synthesized
  source 1..20: mol_type = other DNA
aatactgcatagtcctccaa

SEQ ID NO: 11659 - DNA, 20 bp, synthetic construct
  misc_feature 1..20: note = chemically synthesized
  source 1..20: mol_type = other DNA
tgcatagtcctccaacagaa

SEQ ID NO: 11660 - DNA, 20 bp, synthetic construct
  misc_feature 1..20: note = chemically synthesized
  source 1..20: mol_type = other DNA
ccaacagaacagattaacac

SEQ ID NO: 11661 - DNA, 20 bp, synthetic construct
  misc_feature 1..20: note = chemically synthesized
  source 1..20: mol_type = other DNA
agtccctccacccttccaaa

SEQ ID NO: 11662 - DNA, 20 bp, synthetic construct
  misc_feature 1..20: note = chemically synthesized
  source 1..20: mol_type = other DNA
caaaaagccttttccccctc

SEQ ID NO: 11663 - DNA, 20 bp, synthetic construct
  misc_feature 1..20: note = chemically synthesized
  source 1..20: mol_type = other DNA
tcctgtgtaaacatccactg

SEQ ID NO: 11664 - DNA, 20 bp, synthetic construct
  misc_feature 1..20: note = chemically synthesized
  source 1..20: mol_type = other DNA
catccactgtggtataaaaa

SEQ ID NO: 11665 - DNA, 20 bp, synthetic construct
  misc_feature 1..20: note = chemically synthesized
  source 1..20: mol_type = other DNA
tataaaaacagctttttcat

SEQ ID NO: 11666 - DNA, 20 bp, synthetic construct
  misc_feature 1..20: note = chemically synthesized
  source 1..20: mol_type = other DNA
aaacagctttttcattggct

SEQ ID NO: 11667 - DNA, 20 bp, synthetic construct
  misc_feature 1..20: note = chemically synthesized
  source 1..20: mol_type = other DNA
acagctttttcattggcttg

SEQ ID NO: 11668 - DNA, 20 bp, synthetic construct
  misc_feature 1..20: note = chemically synthesized
  source 1..20: mol_type = other DNA
gctttttcattggcttggag

SEQ ID NO: 11669 - DNA, 20 bp, synthetic construct
  misc_feature 1..20: note = chemically synthesized
  source 1..20: mol_type = other DNA
gcttggagtggcattaattt

SEQ ID NO: 11670 - DNA, 20 bp, synthetic construct
  misc_feature 1..20: note = chemically synthesized
  source 1..20: mol_type = other DNA
tggagtggcattaattttag

SEQ ID NO: 11671 - DNA, 20 bp, synthetic construct
  misc_feature 1..20: note = chemically synthesized
  source 1..20: mol_type = other DNA
tttagaagtttctgcttcca

SEQ ID NO: 11672 - DNA, 20 bp, synthetic construct
  misc_feature 1..20: note = chemically synthesized
  source 1..20: mol_type = other DNA
ttagaagtttctgcttccaa

SEQ ID NO: 11673 - DNA, 20 bp, synthetic construct
  misc_feature 1..20: note = chemically synthesized
  source 1..20: mol_type = other DNA
tagaagtttctgcttccaaa

SEQ ID NO: 11674 - DNA, 20 bp, synthetic construct
  misc_feature 1..20: note = chemically synthesized
  source 1..20: mol_type = other DNA
ttctgcttccaaagggaaac

SEQ ID NO: 11675 - DNA, 20 bp, synthetic construct
  misc_feature 1..20: note = chemically synthesized
  source 1..20: mol_type = other DNA
gcttccaaagggaaaccagc

SEQ ID NO: 11676 - DNA, 20 bp, synthetic construct
  misc_feature 1..20: note = chemically synthesized
  source 1..20: mol_type = other DNA
ccaaagggaaaccagcaaga

SEQ ID NO: 11677 - DNA, 20 bp, synthetic construct
  misc_feature 1..20: note = chemically synthesized
  source 1..20: mol_type = other DNA
caaagggaaaccagcaagaa

SEQ ID NO: 11678 - DNA, 20 bp, synthetic construct
  misc_feature 1..20: note = chemically synthesized
  source 1..20: mol_type = other DNA
aagggaaaccagcaagaaag

SEQ ID NO: 11679 - DNA, 20 bp, synthetic construct
  misc_feature 1..20: note = chemically synthesized
  source 1..20: mol_type = other DNA
ggaaaccagcaagaaaggag

SEQ ID NO: 11680 - DNA, 20 bp, synthetic construct
  misc_feature 1..20: note = chemically synthesized
  source 1..20: mol_type = other DNA
ccagcaagaaaggagaagca

SEQ ID NO: 11681 - DNA, 20 bp, synthetic construct
  misc_feature 1..20: note = chemically synthesized
  source 1..20: mol_type = other DNA
cagcaagaaaggagaagcac

SEQ ID NO: 11682 - DNA, 20 bp, synthetic construct
  misc_feature 1..20: note = chemically synthesized
  source 1..20: mol_type = other DNA
gcaagaaaggagaagcacag

SEQ ID NO: 11683 - DNA, 20 bp, synthetic construct
  misc_feature 1..20: note = chemically synthesized
  source 1..20: mol_type = other DNA
caagaaaggagaagcacagg

SEQ ID NO: 11684 - DNA, 20 bp, synthetic construct
  misc_feature 1..20: note = chemically synthesized
  source 1..20: mol_type = other DNA
aagaaaggagaagcacagga

SEQ ID NO: 11685 - DNA, 20 bp, synthetic construct
  misc_feature 1..20: note = chemically synthesized
  source 1..20: mol_type = other DNA
gaaaggagaagcacaggagg

SEQ ID NO: 11686 - DNA, 20 bp, synthetic construct
  misc_feature 1..20: note = chemically synthesized
  source 1..20: mol_type = other DNA
aaggagaagcacaggaggga

SEQ ID NO: 11687 - DNA, 20 bp, synthetic construct
  misc_feature 1..20: note = chemically synthesized
  source 1..20: mol_type = other DNA
aggagaagcacaggagggag

SEQ ID NO: 11688 - DNA, 20 bp, synthetic construct
  misc_feature 1..20: note = chemically synthesized
  source 1..20: mol_type = other DNA
gagaagcacaggagggagag

SEQ ID NO: 11689 - DNA, 20 bp, synthetic construct
  misc_feature 1..20: note = chemically synthesized
  source 1..20: mol_type = other DNA
agcacaggagggagaggagc

SEQ ID NO: 11690 - DNA, 20 bp, synthetic construct
  misc_feature 1..20: note = chemically synthesized
  source 1..20: mol_type = other DNA
gcacaggagggagaggagca

SEQ ID NO: 11691 - DNA, 20 bp, synthetic construct
  misc_feature 1..20: note = chemically synthesized
  source 1..20: mol_type = other DNA
ggagggagaggagcaaggtc

SEQ ID NO: 11692 - DNA, 20 bp, synthetic construct
  misc_feature 1..20: note = chemically synthesized
  source 1..20: mol_type = other DNA
gcaaggtctggtttacttct

SEQ ID NO: 11693 - DNA, 20 bp, synthetic construct
  misc_feature 1..20: note = chemically synthesized
  source 1..20: mol_type = other DNA
caaggtctggtttacttctg

SEQ ID NO: 11694 - DNA, 20 bp, synthetic construct
  misc_feature 1..20: note = chemically synthesized
  source 1..20: mol_type = other DNA
aggtctggtttacttctgag

SEQ ID NO: 11695 - DNA, 20 bp, synthetic construct
  misc_feature 1..20: note = chemically synthesized
  source 1..20: mol_type = other DNA
gagtgcaaatcctgttgctt

SEQ ID NO: 11696 - DNA, 20 bp, synthetic construct
  misc_feature 1..20: note = chemically synthesized
  source 1..20: mol_type = other DNA
cctttctgatttcctccatt

SEQ ID NO: 11697 - DNA, 20 bp, synthetic construct
  misc_feature 1..20: note = chemically synthesized
  source 1..20: mol_type = other DNA
tgatttcctccattcggcac

SEQ ID NO: 11698 - DNA, 20 bp, synthetic construct
  misc_feature 1..20: note = chemically synthesized
  source 1..20: mol_type = other DNA
caccagccgcatttaatcca

SEQ ID NO: 11699 - DNA, 20 bp, synthetic construct
  misc_feature 1..20: note = chemically synthesized
  source 1..20: mol_type = other DNA
cgcatttaatccatggtgaa

SEQ ID NO: 11700 - DNA, 20 bp, synthetic construct
  misc_feature 1..20: note = chemically synthesized
  source 1..20: mol_type = other DNA
gcatttaatccatggtgaac

SEQ ID NO: 11701 - DNA, 20 bp, synthetic construct
  misc_feature 1..20: note = chemically synthesized
  source 1..20: mol_type = other DNA
tccatggtgaacgggtcatg

SEQ ID NO: 11702 - DNA, 20 bp, synthetic construct
  misc_feature 1..20: note = chemically synthesized
  source 1..20: mol_type = other DNA
tgaacgggtcatgcagacat

SEQ ID NO: 11703 - DNA, 20 bp, synthetic construct
  misc_feature 1..20: note = chemically synthesized
  source 1..20: mol_type = other DNA
tgcagacatcagctgacatt

SEQ ID NO: 11704 - DNA, 20 bp, synthetic construct
  misc_feature 1..20: note = chemically synthesized
  source 1..20: mol_type = other DNA
gacatcagctgacattcaga

SEQ ID NO: 11705 - DNA, 20 bp, synthetic construct
  misc_feature 1..20: note = chemically synthesized
  source 1..20: mol_type = other DNA
agctgacattcagaaagttg

SEQ ID NO: 11706 - DNA, 20 bp, synthetic construct
  misc_feature 1..20: note = chemically synthesized
  source 1..20: mol_type = other DNA
ccaccaccaccatcccaccc

SEQ ID NO: 11707 - DNA, 20 bp, synthetic construct
  misc_feature 1..20: note = chemically synthesized
  source 1..20: mol_type = other DNA
caccatcccaccccagttat

SEQ ID NO: 11708 - DNA, 20 bp, synthetic construct
  misc_feature 1..20: note = chemically synthesized
  source 1..20: mol_type = other DNA
ccatcccaccccagttatta

SEQ ID NO: 11709 - DNA, 20 bp, synthetic construct
  misc_feature 1..20: note = chemically synthesized
  source 1..20: mol_type = other DNA
atcccaccccagttattaga

SEQ ID NO: 11710 - DNA, 20 bp, synthetic construct
  misc_feature 1..20: note = chemically synthesized
  source 1..20: mol_type = other DNA
ccagttattagagagtatcg

SEQ ID NO: 11711 - DNA, 20 bp, synthetic construct
  misc_feature 1..20: note = chemically synthesized
  source 1..20: mol_type = other DNA
cagttattagagagtatcgt

SEQ ID NO: 11712 - DNA, 20 bp, synthetic construct
  misc_feature 1..20: note = chemically synthesized
  source 1..20: mol_type = other DNA
tagagagtatcgtgggaacc

SEQ ID NO: 11713 - DNA, 20 bp, synthetic construct
  misc_feature 1..20: note = chemically synthesized
  source 1..20: mol_type = other DNA
atcgtgggaacctggatttg

SEQ ID NO: 11714 - DNA, 20 bp, synthetic construct
  misc_feature 1..20: note = chemically synthesized
  source 1..20: mol_type = other DNA
tcgtgggaacctggatttgc

SEQ ID NO: 11715 - DNA, 20 bp, synthetic construct
  misc_feature 1..20: note = chemically synthesized
  source 1..20: mol_type = other DNA
tttgcaggctttccaattac

SEQ ID NO: 11716 - DNA, 20 bp, synthetic construct
  misc_feature 1..20: note = chemically synthesized
  source 1..20: mol_type = other DNA
aggctttccaattactagtc

SEQ ID NO: 11717 - DNA, 20 bp, synthetic construct
  misc_feature 1..20: note = chemically synthesized
  source 1..20: mol_type = other DNA
gctttccaattactagtctg

SEQ ID NO: 11718 - DNA, 20 bp, synthetic construct
  misc_feature 1..20: note = chemically synthesized
  source 1..20: mol_type = other DNA
ttccaattactagtctggag

SEQ ID NO: 11719 - DNA, 20 bp, synthetic construct
  misc_feature 1..20: note = chemically synthesized
  source 1..20: mol_type = other DNA
tcctgacatttaaaaaattc

SEQ ID NO: 11720 - DNA, 20 bp, synthetic construct
  misc_feature 1..20: note = chemically synthesized
  source 1..20: mol_type = other DNA
catttaaaaaattctagtga

SEQ ID NO: 11721 - DNA, 20 bp, synthetic construct
  misc_feature 1..20: note = chemically synthesized
  source 1..20: mol_type = other DNA
caaccccaacctctccaacc

SEQ ID NO: 11722 - DNA, 20 bp, synthetic construct
  misc_feature 1..20: note = chemically synthesized
  source 1..20: mol_type = other DNA
aaccccaacctctccaaccc

SEQ ID NO: 11723 - DNA, 20 bp, synthetic construct
  misc_feature 1..20: note = chemically synthesized
  source 1..20: mol_type = other DNA
aacctctccaacccaggtga

SEQ ID NO: 11724 - DNA, 20 bp, synthetic construct
  misc_feature 1..20: note = chemically synthesized
  source 1..20: mol_type = other DNA
tctccaacccaggtgaaagc

SEQ ID NO: 11725 - DNA, 20 bp, synthetic construct
  misc_feature 1..20: note = chemically synthesized
  source 1..20: mol_type = other DNA
caacccaggtgaaagcaaga

SEQ ID NO: 11726 - DNA, 20 bp, synthetic construct
  misc_feature 1..20: note = chemically synthesized
  source 1..20: mol_type = other DNA
aaagcaagaaagtatatgtt

SEQ ID NO: 11727 - DNA, 20 bp, synthetic construct
  misc_feature 1..20: note = chemically synthesized
  source 1..20: mol_type = other DNA
gtatatgttaagtcctatct

SEQ ID NO: 11728 - DNA, 20 bp, synthetic construct
  misc_feature 1..20: note = chemically synthesized
  source 1..20: mol_type = other DNA
atgttaagtcctatctcagc

SEQ ID NO: 11729 - DNA, 20 bp, synthetic construct
  misc_feature 1..20: note = chemically synthesized
  source 1..20: mol_type = other DNA
tcctatctcagctggtgtgc

SEQ ID NO: 11730 - DNA, 20 bp, synthetic construct
  misc_feature 1..20: note = chemically synthesized
  source 1..20: mol_type = other DNA
atctcagctggtgtgcaagt

SEQ ID NO: 11731 - DNA, 20 bp, synthetic construct
  misc_feature 1..20: note = chemically synthesized
  source 1..20: mol_type = other DNA
gctggtgtgcaagtcagact

SEQ ID NO: 11732 - DNA, 20 bp, synthetic construct
  misc_feature 1..20: note = chemically synthesized
  source 1..20: mol_type = other DNA
gcaagtcagactgagaataa

SEQ ID NO: 11733 - DNA, 20 bp, synthetic construct
  misc_feature 1..20: note = chemically synthesized
  source 1..20: mol_type = other DNA
actgagaataacagcttcga

SEQ ID NO: 11734 - DNA, 20 bp, synthetic construct
  misc_feature 1..20: note = chemically synthesized
  source 1..20: mol_type = other DNA
ctgagaataacagcttcgaa

SEQ ID NO: 11735 - DNA, 20 bp, synthetic construct
  misc_feature 1..20: note = chemically synthesized
  source 1..20: mol_type = other DNA
cttcgaaaggccacgtgtcc

SEQ ID NO: 11736 - DNA, 20 bp, synthetic construct
  misc_feature 1..20: note = chemically synthesized
  source 1..20: mol_type = other DNA
ccagcttaccgctccactgc

SEQ ID NO: 11737 - DNA, 20 bp, synthetic construct
  misc_feature 1..20: note = chemically synthesized
  source 1..20: mol_type = other DNA
cgctccactgctagacccaa

SEQ ID NO: 11738 - DNA, 20 bp, synthetic construct
  misc_feature 1..20: note = chemically synthesized
  source 1..20: mol_type = other DNA
gacccaaaagctctctgctg

SEQ ID NO: 11739 - DNA, 20 bp, synthetic construct
  misc_feature 1..20: note = chemically synthesized
  source 1..20: mol_type = other DNA
acccaaaagctctctgctgt

SEQ ID NO: 11740 - DNA, 20 bp, synthetic construct
  misc_feature 1..20: note = chemically synthesized
  source 1..20: mol_type = other DNA
cccaaaagctctctgctgtg

SEQ ID NO: 11741 - DNA, 20 bp, synthetic construct
  misc_feature 1..20: note = chemically synthesized
  source 1..20: mol_type = other DNA
tttcatttgaactgctatcg

SEQ ID NO: 11742 - DNA, 20 bp, synthetic construct
  misc_feature 1..20: note = chemically synthesized
  source 1..20: mol_type = other DNA
ctgctatcgaagaatattcc

SEQ ID NO: 11743 - DNA, 20 bp, synthetic construct
  misc_feature 1..20: note = chemically synthesized
  source 1..20: mol_type = other DNA
ccttctccccctctctcccc

SEQ ID NO: 11744 - DNA, 20 bp, synthetic construct
  misc_feature 1..20: note = chemically synthesized
  source 1..20: mol_type = other DNA
ccccctctctcccccagcct

SEQ ID NO: 11745 - DNA, 20 bp, synthetic construct
  misc_feature 1..20: note = chemically synthesized
  source 1..20: mol_type = other DNA
cccagcctcagactttctcc

SEQ ID NO: 11746 - DNA, 20 bp, synthetic construct
  misc_feature 1..20: note = chemically synthesized
  source 1..20: mol_type = other DNA
cagcctcagactttctccta

SEQ ID NO: 11747 - DNA, 20 bp, synthetic construct
  misc_feature 1..20: note = chemically synthesized
  source 1..20: mol_type = other DNA
tctcctagagttgatcttac

SEQ ID NO: 11748 - DNA, 20 bp, synthetic construct
  misc_feature 1..20: note = chemically synthesized
  source 1..20: mol_type = other DNA
agttgatcttaccggaaatg

SEQ ID NO: 11749 - DNA, 20 bp, synthetic construct
  misc_feature 1..20: note = chemically synthesized
  source 1..20: mol_type = other DNA
ccggaaatgtggatgttatc

SEQ ID NO: 11750 - DNA, 20 bp, synthetic construct
  misc_feature 1..20: note = chemically synthesized
  source 1..20: mol_type = other DNA
cggaaatgtggatgttatca

SEQ ID NO: 11751 - DNA, 20 bp, synthetic construct
  misc_feature 1..20: note = chemically synthesized
  source 1..20: mol_type = other DNA
gtggatgttatcaaggaaat

SEQ ID NO: 11752 - DNA, 20 bp, synthetic construct
  misc_feature 1..20: note = chemically synthesized
  source 1..20: mol_type = other DNA
atgttatcaaggaaatcgga

SEQ ID NO: 11753 - DNA, 20 bp, synthetic construct
  misc_feature 1..20: note = chemically synthesized
  source 1..20: mol_type = other DNA
gttatcaaggaaatcggaaa

SEQ ID NO: 11754 - DNA, 20 bp, synthetic construct
  misc_feature 1..20: note = chemically synthesized
  source 1..20: mol_type = other DNA
atcaaggaaatcggaaagag

SEQ ID NO: 11755 - DNA, 20 bp, synthetic construct
  misc_feature 1..20: note = chemically synthesized
  source 1..20: mol_type = other DNA
tcaaggaaatcggaaagaga

SEQ ID NO: 11756 - DNA, 20 bp, synthetic construct
  misc_feature 1..20: note = chemically synthesized
  source 1..20: mol_type = other DNA
caaggaaatcggaaagagaa

SEQ ID NO: 11757 - DNA, 20 bp, synthetic construct
  misc_feature 1..20: note = chemically synthesized
  source 1..20: mol_type = other DNA
aggaaatcggaaagagaagg

SEQ ID NO: 11758 - DNA, 20 bp, synthetic construct
  misc_feature 1..20: note = chemically synthesized
  source 1..20: mol_type = other DNA
aagagaagggagaaaaatct

SEQ ID NO: 11759 - DNA, 20 bp, synthetic construct
  misc_feature 1..20: note = chemically synthesized
  source 1..20: mol_type = other DNA
agagaagggagaaaaatctc

SEQ ID NO: 11760 - DNA, 20 bp, synthetic construct
  misc_feature 1..20: note = chemically synthesized
  source 1..20: mol_type = other DNA
tttcttaactctcttatcct

SEQ ID NO: 11761 - DNA, 20 bp, synthetic construct
  misc_feature 1..20: note = chemically synthesized
  source 1..20: mol_type = other DNA
ttcttaactctcttatcctt

SEQ ID NO: 11762 - DNA, 20 bp, synthetic construct
  misc_feature 1..20: note = chemically synthesized
  source 1..20: mol_type = other DNA
tcttatccttgggccctgct

SEQ ID NO: 11763 - DNA, 20 bp, synthetic construct
  misc_feature 1..20: note = chemically synthesized
  source 1..20: mol_type = other DNA
tgccacattttaacatttat

SEQ ID NO: 11764 - DNA, 20 bp, synthetic construct
  misc_feature 1..20: note = chemically synthesized
  source 1..20: mol_type = other DNA
acattttaacatttattaga

SEQ ID NO: 11765 - DNA, 20 bp, synthetic construct
  misc_feature 1..20: note = chemically synthesized
  source 1..20: mol_type = other DNA
cattttaacatttattagaa

SEQ ID NO: 11766 - DNA, 20 bp, synthetic construct
  misc_feature 1..20: note = chemically synthesized
  source 1..20: mol_type = other DNA
ttaacatttattagaaagga

SEQ ID NO: 11767 - DNA, 20 bp, synthetic construct
  misc_feature 1..20: note = chemically synthesized
  source 1..20: mol_type = other DNA
taacatttattagaaaggat

SEQ ID NO: 11768 - DNA, 20 bp, synthetic construct
  misc_feature 1..20: note = chemically synthesized
  source 1..20: mol_type = other DNA
ttattagaaaggataggatg

SEQ ID NO: 11769 - DNA, 20 bp, synthetic construct
  misc_feature 1..20: note = chemically synthesized
  source 1..20: mol_type = other DNA
attagaaaggataggatgca

SEQ ID NO: 11770 - DNA, 20 bp, synthetic construct
  misc_feature 1..20: note = chemically synthesized
  source 1..20: mol_type = other DNA
ggataggatgcagagctgca

SEQ ID NO: 11771 - DNA, 20 bp, synthetic construct
  misc_feature 1..20: note = chemically synthesized
  source 1..20: mol_type = other DNA
acatccacaaccatctgtat

SEQ ID NO: 11772 - DNA, 20 bp, synthetic construct
  misc_feature 1..20: note = chemically synthesized
  source 1..20: mol_type = other DNA
acaaccatctgtatgagcca

SEQ ID NO: 11773 - DNA, 20 bp, synthetic construct
  misc_feature 1..20: note = chemically synthesized
  source 1..20: mol_type = other DNA
caaccatctgtatgagccac

SEQ ID NO: 11774 - DNA, 20 bp, synthetic construct
  misc_feature 1..20: note = chemically synthesized
  source 1..20: mol_type = other DNA
ctgtatgagccacaggtcca

SEQ ID NO: 11775 - DNA, 20 bp, synthetic construct
  misc_feature 1..20: note = chemically synthesized
  source 1..20: mol_type = other DNA
acactaatgttactctacat

SEQ ID NO: 11776 - DNA, 20 bp, synthetic construct
  misc_feature 1..20: note = chemically synthesized
  source 1..20: mol_type = other DNA
ctaatgttactctacatgag

SEQ ID NO: 11777 - DNA, 20 bp, synthetic construct
  misc_feature 1..20: note = chemically synthesized
  source 1..20: mol_type = other DNA
aatgttactctacatgagta

SEQ ID NO: 11778 - DNA, 20 bp, synthetic construct
  misc_feature 1..20: note = chemically synthesized
  source 1..20: mol_type = other DNA
ctacatgagtagagttcaat

SEQ ID NO: 11779 - DNA, 20 bp, synthetic construct
  misc_feature 1..20: note = chemically synthesized
  source 1..20: mol_type = other DNA
tacatgagtagagttcaatg

SEQ ID NO: 11780 - DNA, 20 bp, synthetic construct
  misc_feature 1..20: note = chemically synthesized
  source 1..20: mol_type = other DNA
acatgagtagagttcaatga

SEQ ID NO: 11781 - DNA, 20 bp, synthetic construct
  misc_feature 1..20: note = chemically synthesized
  source 1..20: mol_type = other DNA
gagttcaatgagggttgata

SEQ ID NO: 11782 - DNA, 20 bp, synthetic construct
  misc_feature 1..20: note = chemically synthesized
  source 1..20: mol_type = other DNA
agttcaatgagggttgatat

SEQ ID NO: 11783 - DNA, 20 bp, synthetic construct
  misc_feature 1..20: note = chemically synthesized
  source 1..20: mol_type = other DNA
agggttgatatgggatgtga

SEQ ID NO: 11784 - DNA, 20 bp, synthetic construct
  misc_feature 1..20: note = chemically synthesized
  source 1..20: mol_type = other DNA
gggttgatatgggatgtgac

SEQ ID NO: 11785 - DNA, 20 bp, synthetic construct
  misc_feature 1..20: note = chemically synthesized
  source 1..20: mol_type = other DNA
ggttgatatgggatgtgaca

SEQ ID NO: 11786 - DNA, 20 bp, synthetic construct
  misc_feature 1..20: note = chemically synthesized
  source 1..20: mol_type = other DNA
tgggatgtgacagggcaaat

SEQ ID NO: 11787 - DNA, 20 bp, synthetic construct
  misc_feature 1..20: note = chemically synthesized
  source 1..20: mol_type = other DNA
gtgacagggcaaatcagaat

SEQ ID NO: 11788 - DNA, 20 bp, synthetic construct
  misc_feature 1..20: note = chemically synthesized
  source 1..20: mol_type = other DNA
cagaattagattaaaaacaa

SEQ ID NO: 11789 - DNA, 20 bp, synthetic construct
  misc_feature 1..20: note = chemically synthesized
  source 1..20: mol_type = other DNA
ttagattaaaaacaaaagtt

SEQ ID NO: 11790 - DNA, 20 bp, synthetic construct
  misc_feature 1..20: note = chemically synthesized
  source 1..20: mol_type = other DNA
tagaaaccaatgctacacta

SEQ ID NO: 11791 - DNA, 20 bp, synthetic construct
  misc_feature 1..20: note = chemically synthesized
  source 1..20: mol_type = other DNA
gaaaccaatgctacactaca

SEQ ID NO: 11792 - DNA, 20 bp, synthetic construct
  misc_feature 1..20: note = chemically synthesized
  source 1..20: mol_type = other DNA
atgctacactacagagcaaa

SEQ ID NO: 11793 - DNA, 20 bp, synthetic construct
  misc_feature 1..20: note = chemically synthesized
  source 1..20: mol_type = other DNA
tgctacactacagagcaaat

SEQ ID NO: 11794 - DNA, 20 bp, synthetic construct
  misc_feature 1..20: note = chemically synthesized
  source 1..20: mol_type = other DNA
tacagagcaaatgggacttg

SEQ ID NO: 11795 - DNA, 20 bp, synthetic construct
  misc_feature 1..20: note = chemically synthesized
  source 1..20: mol_type = other DNA
acagagcaaatgggacttga

SEQ ID NO: 11796 - DNA, 20 bp, synthetic construct
  misc_feature 1..20: note = chemically synthesized
  source 1..20: mol_type = other DNA
aatttcccctaactgccttc

SEQ ID NO: 11797 - DNA, 20 bp, synthetic construct
  misc_feature 1..20: note = chemically synthesized
  source 1..20: mol_type = other DNA
cttcaagtgattttccctat

SEQ ID NO: 11798 - DNA, 20 bp, synthetic construct
  misc_feature 1..20: note = chemically synthesized
  source 1..20: mol_type = other DNA
tcaagtgattttccctatta

SEQ ID NO: 11799 - DNA, 20 bp, synthetic construct
  misc_feature 1..20: note = chemically synthesized
  source 1..20: mol_type = other DNA
tttgcctgccacccccctgc

SEQ ID NO: 11800 - DNA, 20 bp, synthetic construct
  misc_feature 1..20: note = chemically synthesized
  source 1..20: mol_type = other DNA
tggcaacaccgcaatcacat

SEQ ID NO: 11801 - DNA, 20 bp, synthetic construct
  misc_feature 1..20: note = chemically synthesized
  source 1..20: mol_type = other DNA
aacaccgcaatcacatcaga

SEQ ID NO: 11802 - DNA, 20 bp, synthetic construct
  misc_feature 1..20: note = chemically synthesized
  source 1..20: mol_type = other DNA
cgcaatcacatcagaaagta

SEQ ID NO: 11803 - DNA, 20 bp, synthetic construct
  misc_feature 1..20: note = chemically synthesized
  source 1..20: mol_type = other DNA
aatcacatcagaaagtaaag

SEQ ID NO: 11804 - DNA, 20 bp, synthetic construct
  misc_feature 1..20: note = chemically synthesized
  source 1..20: mol_type = other DNA
aaagtaaagtggaatgcata

SEQ ID NO: 11805 - DNA, 20 bp, synthetic construct
  misc_feature 1..20: note = chemically synthesized
  source 1..20: mol_type = other DNA
aagtaaagtggaatgcatat

SEQ ID NO: 11806 - DNA, 20 bp, synthetic construct
  misc_feature 1..20: note = chemically synthesized
  source 1..20: mol_type = other DNA
taaagtggaatgcatatagg

SEQ ID NO: 11807 - DNA, 20 bp, synthetic construct
  misc_feature 1..20: note = chemically synthesized
  source 1..20: mol_type = other DNA
gaatgcatataggaagcctt

SEQ ID NO: 11808 - DNA, 20 bp, synthetic construct
  misc_feature 1..20: note = chemically synthesized
  source 1..20: mol_type = other DNA
atacctatatacttaatata

SEQ ID NO: 11809 - DNA, 20 bp, synthetic construct
  misc_feature 1..20: note = chemically synthesized
  source 1..20: mol_type = other DNA
aatatatagcaattaacttc

SEQ ID NO: 11810 - DNA, 20 bp, synthetic construct
  misc_feature 1..20: note = chemically synthesized
  source 1..20: mol_type = other DNA
tatagcaattaacttctggt

SEQ ID NO: 11811 - DNA, 20 bp, synthetic construct
  misc_feature 1..20: note = chemically synthesized
  source 1..20: mol_type = other DNA
agcaattaacttctggtcag

SEQ ID NO: 11812 - DNA, 20 bp, synthetic construct
  misc_feature 1..20: note = chemically synthesized
  source 1..20: mol_type = other DNA
aacttctggtcagcagtgtg

SEQ ID NO: 11813 - DNA, 20 bp, synthetic construct
  misc_feature 1..20: note = chemically synthesized
  source 1..20: mol_type = other DNA
acttctggtcagcagtgtgc

SEQ ID NO: 11814 - DNA, 20 bp, synthetic construct
  misc_feature 1..20: note = chemically synthesized
  source 1..20: mol_type = other DNA
tctggtcagcagtgtgcagg

SEQ ID NO: 11815 - DNA, 20 bp, synthetic construct
  misc_feature 1..20: note = chemically synthesized
  source 1..20: mol_type = other DNA
ggtcagcagtgtgcaggcag

SEQ ID NO: 11816 - DNA, 20 bp, synthetic construct
  misc_feature 1..20: note = chemically synthesized
  source 1..20: mol_type = other DNA
gtcagcagtgtgcaggcagc

SEQ ID NO: 11817 - DNA, 20 bp, synthetic construct
  misc_feature 1..20: note = chemically synthesized
  source 1..20: mol_type = other DNA
tgcaggcagcaggctgcccc

SEQ ID NO: 11818 - DNA, 20 bp, synthetic construct
  misc_feature 1..20: note = chemically synthesized
  source 1..20: mol_type = other DNA
aggcagcaggctgccccaag

SEQ ID NO: 11819 - DNA, 20 bp, synthetic construct
  misc_feature 1..20: note = chemically synthesized
  source 1..20: mol_type = other DNA
agcaggctgccccaagcaga

SEQ ID NO: 11820 - DNA, 20 bp, synthetic construct
  misc_feature 1..20: note = chemically synthesized
  source 1..20: mol_type = other DNA
gcaggctgccccaagcagat

SEQ ID NO: 11821 - DNA, 20 bp, synthetic construct
  misc_feature 1..20: note = chemically synthesized
  source 1..20: mol_type = other DNA
aggctgccccaagcagatag

SEQ ID NO: 11822 - DNA, 20 bp, synthetic construct
  misc_feature 1..20: note = chemically synthesized
  source 1..20: mol_type = other DNA
ggctgccccaagcagatagg

SEQ ID NO: 11823 - DNA, 20 bp, synthetic construct
  misc_feature 1..20: note = chemically synthesized
  source 1..20: mol_type = other DNA
gctgccccaagcagatagga

SEQ ID NO: 11824 - DNA, 20 bp, synthetic construct
  misc_feature 1..20: note = chemically synthesized
  source 1..20: mol_type = other DNA
ctgccccaagcagataggag

SEQ ID NO: 11825 - DNA, 20 bp, synthetic construct
  misc_feature 1..20: note = chemically synthesized
  source 1..20: mol_type = other DNA
gccccaagcagataggaggg

SEQ ID NO: 11826 - DNA, 20 bp, synthetic construct
  misc_feature 1..20: note = chemically synthesized
  source 1..20: mol_type = other DNA
ccccaagcagataggagggg

SEQ ID NO: 11827 - DNA, 20 bp, synthetic construct
  misc_feature 1..20: note = chemically synthesized
  source 1..20: mol_type = other DNA
cccaagcagataggagggga

SEQ ID NO: 11828 - DNA, 20 bp, synthetic construct
  misc_feature 1..20: note = chemically synthesized
  source 1..20: mol_type = other DNA
ccaagcagataggaggggag

SEQ ID NO: 11829 - DNA, 20 bp, synthetic construct
  misc_feature 1..20: note = chemically synthesized
  source 1..20: mol_type = other DNA
caagcagataggaggggagg

SEQ ID NO: 11830 - DNA, 20 bp, synthetic construct
  misc_feature 1..20: note = chemically synthesized
  source 1..20: mol_type = other DNA
gataggaggggagggggacc

SEQ ID NO: 11831 - DNA, 20 bp, synthetic construct
  misc_feature 1..20: note = chemically synthesized
  source 1..20: mol_type = other DNA
taggaggggagggggaccca

SEQ ID NO: 11832 - DNA, 20 bp, synthetic construct
  misc_feature 1..20: note = chemically synthesized
  source 1..20: mol_type = other DNA
aggggagggggacccagagc

SEQ ID NO: 11833 - DNA, 20 bp, synthetic construct
  misc_feature 1..20: note = chemically synthesized
  source 1..20: mol_type = other DNA
ggggagggggacccagagct

SEQ ID NO: 11834 - DNA, 20 bp, synthetic construct
  misc_feature 1..20: note = chemically synthesized
  source 1..20: mol_type = other DNA
gggggacccagagctgggac

SEQ ID NO: 11835 - DNA, 20 bp, synthetic construct
  misc_feature 1..20: note = chemically synthesized
  source 1..20: mol_type = other DNA
cagagctgggacaagcacaa

SEQ ID NO: 11836 - DNA, 20 bp, synthetic construct
  misc_feature 1..20: note = chemically synthesized
  source 1..20: mol_type = other DNA
gctgggacaagcacaaaaga

SEQ ID NO: 11837 - DNA, 20 bp, synthetic construct
  misc_feature 1..20: note = chemically synthesized
  source 1..20: mol_type = other DNA
ctgggacaagcacaaaagac

SEQ ID NO: 11838 - DNA, 20 bp, synthetic construct
  misc_feature 1..20: note = chemically synthesized
  source 1..20: mol_type = other DNA
ccaacaacaatgcctgctgt

SEQ ID NO: 11839 - DNA, 20 bp, synthetic construct
  misc_feature 1..20: note = chemically synthesized
  source 1..20: mol_type = other DNA
acaacaatgcctgctgtcag

SEQ ID NO: 11840 - DNA, 20 bp, synthetic construct
  misc_feature 1..20: note = chemically synthesized
  source 1..20: mol_type = other DNA
gcagctgaattatttttata

SEQ ID NO: 11841 - DNA, 20 bp, synthetic construct
  misc_feature 1..20: note = chemically synthesized
  source 1..20: mol_type = other DNA
cagctgaattatttttatac

SEQ ID NO: 11842 - DNA, 20 bp, synthetic construct
  misc_feature 1..20: note = chemically synthesized
  source 1..20: mol_type = other DNA
tttatctctattgtacaaac

SEQ ID NO: 11843 - DNA, 20 bp, synthetic construct
  misc_feature 1..20: note = chemically synthesized
  source 1..20: mol_type = other DNA
cgtgtctgtgctgacttgtt

SEQ ID NO: 11844 - DNA, 20 bp, synthetic construct
  misc_feature 1..20: note = chemically synthesized
  source 1..20: mol_type = other DNA
ttaagcaatccacttgtatg

SEQ ID NO: 11845 - DNA, 20 bp, synthetic construct
  misc_feature 1..20: note = chemically synthesized
  source 1..20: mol_type = other DNA
aatccacttgtatgtagaat

SEQ ID NO: 11846 - DNA, 20 bp, synthetic construct
  misc_feature 1..20: note = chemically synthesized
  source 1..20: mol_type = other DNA
ttttttttctttcttgctac

SEQ ID NO: 11847 - DNA, 20 bp, synthetic construct
  misc_feature 1..20: note = chemically synthesized
  source 1..20: mol_type = other DNA
ctttcttgctaccagtcaca

SEQ ID NO: 11848 - DNA, 20 bp, synthetic construct
  misc_feature 1..20: note = chemically synthesized
  source 1..20: mol_type = other DNA
gctaccagtcacacagctcc

SEQ ID NO: 11849 - DNA, 20 bp, synthetic construct
  misc_feature 1..20: note = chemically synthesized
  source 1..20: mol_type = other DNA
cagtcacacagctccaagat

SEQ ID NO: 11850 - DNA, 20 bp, synthetic construct
  misc_feature 1..20: note = chemically synthesized
  source 1..20: mol_type = other DNA
tcacacagctccaagatcag

SEQ ID NO: 11851 - DNA, 20 bp, synthetic construct
  misc_feature 1..20: note = chemically synthesized
  source 1..20: mol_type = other DNA
ccaagatcagaagaaataca

SEQ ID NO: 11852 - DNA, 20 bp, synthetic construct
  misc_feature 1..20: note = chemically synthesized
  source 1..20: mol_type = other DNA
gaagaaatacatagtctttg

SEQ ID NO: 11853 - DNA, 20 bp, synthetic construct
  misc_feature 1..20: note = chemically synthesized
  source 1..20: mol_type = other DNA
ttgaagctgctcaaatgttt

SEQ ID NO: 11854 - DNA, 20 bp, synthetic construct
  misc_feature 1..20: note = chemically synthesized
  source 1..20: mol_type = other DNA
tgctcaaatgttttagttaa

SEQ ID NO: 11855 - DNA, 20 bp, synthetic construct
  misc_feature 1..20: note = chemically synthesized
  source 1..20: mol_type = other DNA
gctcaaatgttttagttaaa

SEQ ID NO: 11856 - DNA, 20 bp, synthetic construct
  misc_feature 1..20: note = chemically synthesized
  source 1..20: mol_type = other DNA
aaatgttttagttaaaagga

SEQ ID NO: 11857 - DNA, 20 bp, synthetic construct
  misc_feature 1..20: note = chemically synthesized
  source 1..20: mol_type = other DNA
tgttttagttaaaaggacag

SEQ ID NO: 11858 - DNA, 20 bp, synthetic construct
  misc_feature 1..20: note = chemically synthesized
  source 1..20: mol_type = other DNA
aaggacagcagttgttttca

SEQ ID NO: 11859 - DNA, 20 bp, synthetic construct
  misc_feature 1..20: note = chemically synthesized
  source 1..20: mol_type = other DNA
gcagttgttttcaaagatcc

SEQ ID NO: 11860 - DNA, 20 bp, synthetic construct
  misc_feature 1..20: note = chemically synthesized
  source 1..20: mol_type = other DNA
agttgttttcaaagatccaa

SEQ ID NO: 11861 - DNA, 20 bp, synthetic construct
  misc_feature 1..20: note = chemically synthesized
  source 1..20: mol_type = other DNA
agatccaagagtatctttat

SEQ ID NO: 11862 - DNA, 20 bp, synthetic construct
  misc_feature 1..20: note = chemically synthesized
  source 1..20: mol_type = other DNA
acataacaaaaacataacat

SEQ ID NO: 11863 - DNA, 20 bp, synthetic construct
  misc_feature 1..20: note = chemically synthesized
  source 1..20: mol_type = other DNA
taacaaaaacataacatgag

SEQ ID NO: 11864 - DNA, 20 bp, synthetic construct
  misc_feature 1..20: note = chemically synthesized
  source 1..20: mol_type = other DNA
aacaaaaacataacatgaga

SEQ ID NO: 11865 - DNA, 20 bp, synthetic construct
  misc_feature 1..20: note = chemically synthesized
  source 1..20: mol_type = other DNA
tttattattaaaattttttt

SEQ ID NO: 11866 - DNA, 20 bp, synthetic construct
  misc_feature 1..20: note = chemically synthesized
  source 1..20: mol_type = other DNA
tcagcctttaaatcattctt

SEQ ID NO: 11867 - DNA, 20 bp, synthetic construct
  misc_feature 1..20: note = chemically synthesized
  source 1..20: mol_type = other DNA
gcctttaaatcattcttcag

SEQ ID NO: 11868 - DNA, 20 bp, synthetic construct
  misc_feature 1..20: note = chemically synthesized
  source 1..20: mol_type = other DNA
attcttcagtagccaatgtt

SEQ ID NO: 11869 - DNA, 20 bp, synthetic construct
  misc_feature 1..20: note = chemically synthesized
  source 1..20: mol_type = other DNA
aatgttcagttttaaatgta

SEQ ID NO: 11870 - DNA, 20 bp, synthetic construct
  misc_feature 1..20: note = chemically synthesized
  source 1..20: mol_type = other DNA
atgttcagttttaaatgtaa

SEQ ID NO: 11871 - DNA, 20 bp, synthetic construct
  misc_feature 1..20: note = chemically synthesized
  source 1..20: mol_type = other DNA
gaataatttttttaaaatat

SEQ ID NO: 11872 - DNA, 20 bp, synthetic construct
  misc_feature 1..20: note = chemically synthesized
  source 1..20: mol_type = other DNA
aataatttttttaaaatatt

SEQ ID NO: 11873 - DNA, 20 bp, synthetic construct
  misc_feature 1..20: note = chemically synthesized
  source 1..20: mol_type = other DNA
ataatttttttaaaatatta

SEQ ID NO: 11874 - DNA, 20 bp, synthetic construct
  misc_feature 1..20: note = chemically synthesized
  source 1..20: mol_type = other DNA
tttaaaatattagggtgtga

SEQ ID NO: 11875 - DNA, 20 bp, synthetic construct
  misc_feature 1..20: note = chemically synthesized
  source 1..20: mol_type = other DNA
taaaatattagggtgtgatg

SEQ ID NO: 11876 - DNA, 20 bp, synthetic construct
  misc_feature 1..20: note = chemically synthesized
  source 1..20: mol_type = other DNA
aaatattagggtgtgatgga

SEQ ID NO: 11877 - DNA, 20 bp, synthetic construct
  misc_feature 1..20: note = chemically synthesized
  source 1..20: mol_type = other DNA
tgtgatggagagaaactcac

SEQ ID NO: 11878 - DNA, 20 bp, synthetic construct
  misc_feature 1..20: note = chemically synthesized
  source 1..20: mol_type = other DNA
gagagaaactcacgagattt

SEQ ID NO: 11879 - DNA, 20 bp, synthetic construct
  misc_feature 1..20: note = chemically synthesized
  source 1..20: mol_type = other DNA
cgagatttaagatttaacat

SEQ ID NO: 11880 - DNA, 20 bp, synthetic construct
  misc_feature 1..20: note = chemically synthesized
  source 1..20: mol_type = other DNA
ggttaatgcattgttttaac

SEQ ID NO: 11881 - DNA, 20 bp, synthetic construct
  misc_feature 1..20: note = chemically synthesized
  source 1..20: mol_type = other DNA
ttgttttaactggaaactga

SEQ ID NO: 11882 - DNA, 20 bp, synthetic construct
  misc_feature 1..20: note = chemically synthesized
  source 1..20: mol_type = other DNA
tgttttaactggaaactgaa

SEQ ID NO: 11883 - DNA, 20 bp, synthetic construct
  misc_feature 1..20: note = chemically synthesized
  source 1..20: mol_type = other DNA
taactggaaactgaaaggat

SEQ ID NO: 11884 - DNA, 20 bp, synthetic construct
  misc_feature 1..20: note = chemically synthesized
  source 1..20: mol_type = other DNA
aactggaaactgaaaggatc

SEQ ID NO: 11885 - DNA, 20 bp, synthetic construct
  misc_feature 1..20: note = chemically synthesized
  source 1..20: mol_type = other DNA
actggaaactgaaaggatcg

SEQ ID NO: 11886 - DNA, 20 bp, synthetic construct
  misc_feature 1..20: note = chemically synthesized
  source 1..20: mol_type = other DNA
ggaaactgaaaggatcgggg

SEQ ID NO: 11887 - DNA, 20 bp, synthetic construct
  misc_feature 1..20: note = chemically synthesized
  source 1..20: mol_type = other DNA
gaaactgaaaggatcggggc

SEQ ID NO: 11888 - DNA, 20 bp, synthetic construct
  misc_feature 1..20: note = chemically synthesized
  source 1..20: mol_type = other DNA
aaactgaaaggatcggggca

SEQ ID NO: 11889 - DNA, 20 bp, synthetic construct
  misc_feature 1..20: note = chemically synthesized
  source 1..20: mol_type = other DNA
aactgaaaggatcggggcag

SEQ ID NO: 11890 - DNA, 20 bp, synthetic construct
  misc_feature 1..20: note = chemically synthesized
  source 1..20: mol_type = other DNA
ctgaaaggatcggggcaggg

SEQ ID NO: 11891 - DNA, 20 bp, synthetic construct
  misc_feature 1..20: note = chemically synthesized
  source 1..20: mol_type = other DNA
tcggggcaggggagttaaaa

SEQ ID NO: 11892 - DNA, 20 bp, synthetic construct
  misc_feature 1..20: note = chemically synthesized
  source 1..20: mol_type = other DNA
cggggcaggggagttaaaat

SEQ ID NO: 11893 - DNA, 20 bp, synthetic construct
  misc_feature 1..20: note = chemically synthesized
  source 1..20: mol_type = other DNA
ggggcaggggagttaaaatg

SEQ ID NO: 11894 - DNA, 20 bp, synthetic construct
  misc_feature 1..20: note = chemically synthesized
  source 1..20: mol_type = other DNA
ggcaggggagttaaaatggg

SEQ ID NO: 11895 - DNA, 20 bp, synthetic construct
  misc_feature 1..20: note = chemically synthesized
  source 1..20: mol_type = other DNA
gagttaaaatggggagtaaa

SEQ ID NO: 11896 - DNA, 20 bp, synthetic construct
  misc_feature 1..20: note = chemically synthesized
  source 1..20: mol_type = other DNA
tggggagtaaatggttcact

SEQ ID NO: 11897 - DNA, 20 bp, synthetic construct
  misc_feature 1..20: note = chemically synthesized
  source 1..20: mol_type = other DNA
ggggagtaaatggttcactg

SEQ ID NO: 11898 - DNA, 20 bp, synthetic construct
  misc_feature 1..20: note = chemically synthesized
  source 1..20: mol_type = other DNA
gggagtaaatggttcactga

SEQ ID NO: 11899 - DNA, 20 bp, synthetic construct
  misc_feature 1..20: note = chemically synthesized
  source 1..20: mol_type = other DNA
ggagtaaatggttcactgag

SEQ ID NO: 11900 - DNA, 20 bp, synthetic construct
  misc_feature 1..20: note = chemically synthesized
  source 1..20: mol_type = other DNA
gtaaataaatcataaaatca

SEQ ID NO: 11901 - DNA, 20 bp, synthetic construct
  misc_feature 1..20: note = chemically synthesized
  source 1..20: mol_type = other DNA
ataaaatcatggtatacctt

SEQ ID NO: 11902 - DNA, 20 bp, synthetic construct
  misc_feature 1..20: note = chemically synthesized
  source 1..20: mol_type = other DNA
aatcatggtataccttgagt

SEQ ID NO: 11903 - DNA, 20 bp, synthetic construct
  misc_feature 1..20: note = chemically synthesized
  source 1..20: mol_type = other DNA
tggtataccttgagttggtg

SEQ ID NO: 11904 - DNA, 20 bp, synthetic construct
  misc_feature 1..20: note = chemically synthesized
  source 1..20: mol_type = other DNA
ggtataccttgagttggtga

SEQ ID NO: 11905 - DNA, 20 bp, synthetic construct
  misc_feature 1..20: note = chemically synthesized
  source 1..20: mol_type = other DNA
tataccttgagttggtgaag

SEQ ID NO: 11906 - DNA, 20 bp, synthetic construct
  misc_feature 1..20: note = chemically synthesized
  source 1..20: mol_type = other DNA
gttggtgaaggagaatactt

SEQ ID NO: 11907 - DNA, 20 bp, synthetic construct
  misc_feature 1..20: note = chemically synthesized
  source 1..20: mol_type = other DNA
ttggtgaaggagaatacttc

SEQ ID NO: 11908 - DNA, 20 bp, synthetic construct
  misc_feature 1..20: note = chemically synthesized
  source 1..20: mol_type = other DNA
gaaggagaatacttcaggtt

SEQ ID NO: 11909 - DNA, 20 bp, synthetic construct
  misc_feature 1..20: note = chemically synthesized
  source 1..20: mol_type = other DNA
tacttcaggtttggttctct

SEQ ID NO: 11910 - DNA, 20 bp, synthetic construct
  misc_feature 1..20: note = chemically synthesized
  source 1..20: mol_type = other DNA
tttggttctcttagtttttt

SEQ ID NO: 11911 - DNA, 20 bp, synthetic construct
  misc_feature 1..20: note = chemically synthesized
  source 1..20: mol_type = other DNA
ttggttctcttagttttttg

SEQ ID NO: 11912 - DNA, 20 bp, synthetic construct
  misc_feature 1..20: note = chemically synthesized
  source 1..20: mol_type = other DNA
tttgaggtttgtttttgttt

SEQ ID NO: 11913 - DNA, 20 bp, synthetic construct
  misc_feature 1..20: note = chemically synthesized
  source 1..20: mol_type = other DNA
ttgaggtttgtttttgtttg

SEQ ID NO: 11914 - DNA, 20 bp, synthetic construct
  misc_feature 1..20: note = chemically synthesized
  source 1..20: mol_type = other DNA
gaggtttgtttttgtttgag

SEQ ID NO: 11915 - DNA, 20 bp, synthetic construct
  misc_feature 1..20: note = chemically synthesized
  source 1..20: mol_type = other DNA
aggtttgtttttgtttgagg

SEQ ID NO: 11916 - DNA, 20 bp, synthetic construct
  misc_feature 1..20: note = chemically synthesized
  source 1..20: mol_type = other DNA
tgtttttgtttgaggaggtg

SEQ ID NO: 11917 - DNA, 20 bp, synthetic construct
  misc_feature 1..20: note = chemically synthesized
  source 1..20: mol_type = other DNA
gtttttgtttgaggaggtgc

SEQ ID NO: 11918 - DNA, 20 bp, synthetic construct
  misc_feature 1..20: note = chemically synthesized
  source 1..20: mol_type = other DNA
tttttgtttgaggaggtgca

SEQ ID NO: 11919 - DNA, 20 bp, synthetic construct
  misc_feature 1..20: note = chemically synthesized
  source 1..20: mol_type = other DNA
gtttgaggaggtgcagggat

SEQ ID NO: 11920 - DNA, 20 bp, synthetic construct
  misc_feature 1..20: note = chemically synthesized
  source 1..20: mol_type = other DNA
aactctatatttaaaatgta

SEQ ID NO: 11921 - DNA, 20 bp, synthetic construct
  misc_feature 1..20: note = chemically synthesized
  source 1..20: mol_type = other DNA
actctatatttaaaatgtac

SEQ ID NO: 11922 - DNA, 20 bp, synthetic construct
  misc_feature 1..20: note = chemically synthesized
  source 1..20: mol_type = other DNA
atatttaaaatgtacaggaa

SEQ ID NO: 11923 - DNA, 20 bp, synthetic construct
  misc_feature 1..20: note = chemically synthesized
  source 1..20: mol_type = other DNA
aaaatgtacaggaacagact

SEQ ID NO: 11924 - DNA, 20 bp, synthetic construct
  misc_feature 1..20: note = chemically synthesized
  source 1..20: mol_type = other DNA
acaggaacagacttggcaca

SEQ ID NO: 11925 - DNA, 20 bp, synthetic construct
  misc_feature 1..20: note = chemically synthesized
  source 1..20: mol_type = other DNA
agtgctttgtgctccaacat

SEQ ID NO: 11926 - DNA, 20 bp, synthetic construct
  misc_feature 1..20: note = chemically synthesized
  source 1..20: mol_type = other DNA
gtgctccaacataagaatcc

SEQ ID NO: 11927 - DNA, 20 bp, synthetic construct
  misc_feature 1..20: note = chemically synthesized
  source 1..20: mol_type = other DNA
tttatttccctaaaaattaa

SEQ ID NO: 11928 - DNA, 20 bp, synthetic construct
  misc_feature 1..20: note = chemically synthesized
  source 1..20: mol_type = other DNA
taacagatgtgatttccttg

SEQ ID NO: 11929 - DNA, 20 bp, synthetic construct
  misc_feature 1..20: note = chemically synthesized
  source 1..20: mol_type = other DNA
tttatgcatcattacatatt

SEQ ID NO: 11930 - DNA, 20 bp, synthetic construct
  misc_feature 1..20: note = chemically synthesized
  source 1..20: mol_type = other DNA
aatttaaatgccctgatgct

SEQ ID NO: 11931 - DNA, 20 bp, synthetic construct
  misc_feature 1..20: note = chemically synthesized
  source 1..20: mol_type = other DNA
atgccctgatgcttagcaaa

SEQ ID NO: 11932 - DNA, 20 bp, synthetic construct
  misc_feature 1..20: note = chemically synthesized
  source 1..20: mol_type = other DNA
aaaagcttccttgtgttttt

SEQ ID NO: 11933 - DNA, 20 bp, synthetic construct
  misc_feature 1..20: note = chemically synthesized
  source 1..20: mol_type = other DNA
gcttccttgtgttttttaga

SEQ ID NO: 11934 - DNA, 20 bp, synthetic construct
  misc_feature 1..20: note = chemically synthesized
  source 1..20: mol_type = other DNA
tgttttttagaaagttcaaa

SEQ ID NO: 11935 - DNA, 20 bp, synthetic construct
  misc_feature 1..20: note = chemically synthesized
  source 1..20: mol_type = other DNA
tagaaagttcaaaaagcaaa

SEQ ID NO: 11936 - DNA, 20 bp, synthetic construct
  misc_feature 1..20: note = chemically synthesized
  source 1..20: mol_type = other DNA
aagttcaaaaagcaaataga

SEQ ID NO: 11937 - DNA, 20 bp, synthetic construct
  misc_feature 1..20: note = chemically synthesized
  source 1..20: mol_type = other DNA
agttcaaaaagcaaatagaa

SEQ ID NO: 11938 - DNA, 20 bp, synthetic construct
  misc_feature 1..20: note = chemically synthesized
  source 1..20: mol_type = other DNA
caaaaagcaaatagaaaggc

SEQ ID NO: 11939 - DNA, 20 bp, synthetic construct
  misc_feature 1..20: note = chemically synthesized
  source 1..20: mol_type = other DNA
aaaaagcaaatagaaaggcg

SEQ ID NO: 11940 - DNA, 20 bp, synthetic construct
  misc_feature 1..20: note = chemically synthesized
  source 1..20: mol_type = other DNA
aagcaaatagaaaggcgagg

SEQ ID NO: 11941 - DNA, 20 bp, synthetic construct
  misc_feature 1..20: note = chemically synthesized
  source 1..20: mol_type = other DNA
agcaaatagaaaggcgaggt

SEQ ID NO: 11942 - DNA, 20 bp, synthetic construct
  misc_feature 1..20: note = chemically synthesized
  source 1..20: mol_type = other DNA
aaggcgaggtaggtatacaa

SEQ ID NO: 11943 - DNA, 20 bp, synthetic construct
  misc_feature 1..20: note = chemically synthesized
  source 1..20: mol_type = other DNA
aggtaggtatacaacagcac

SEQ ID NO: 11944 - DNA, 20 bp, synthetic construct
  misc_feature 1..20: note = chemically synthesized
  source 1..20: mol_type = other DNA
cagcactggttttctttttg

SEQ ID NO: 11945 - DNA, 20 bp, synthetic construct
  misc_feature 1..20: note = chemically synthesized
  source 1..20: mol_type = other DNA
agcactggttttctttttga

SEQ ID NO: 11946 - DNA, 20 bp, synthetic construct
  misc_feature 1..20: note = chemically synthesized
  source 1..20: mol_type = other DNA
tctttttgaaggcacccttg

SEQ ID NO: 11947 - DNA, 20 bp, synthetic construct
  misc_feature 1..20: note = chemically synthesized
  source 1..20: mol_type = other DNA
ctttttgaaggcacccttgc

SEQ ID NO: 11948 - DNA, 20 bp, synthetic construct
  misc_feature 1..20: note = chemically synthesized
  source 1..20: mol_type = other DNA
aattccattctttattttaa

SEQ ID NO: 11949 - DNA, 20 bp, synthetic construct
  misc_feature 1..20: note = chemically synthesized
  source 1..20: mol_type = other DNA
attccattctttattttaat

SEQ ID NO: 11950 - DNA, 20 bp, synthetic construct
  misc_feature 1..20: note = chemically synthesized
  source 1..20: mol_type = other DNA
tccattctttattttaatgg

SEQ ID NO: 11951 - DNA, 20 bp, synthetic construct
  misc_feature 1..20: note = chemically synthesized
  source 1..20: mol_type = other DNA
ttttaatgggagtttttaat

SEQ ID NO: 11952 - DNA, 20 bp, synthetic construct
  misc_feature 1..20: note = chemically synthesized
  source 1..20: mol_type = other DNA
taatgggagtttttaatcag

SEQ ID NO: 11953 - DNA, 20 bp, synthetic construct
  misc_feature 1..20: note = chemically synthesized
  source 1..20: mol_type = other DNA
ctaaaactaaaatcaaattg

SEQ ID NO: 11954 - DNA, 20 bp, synthetic construct
  misc_feature 1..20: note = chemically synthesized
  source 1..20: mol_type = other DNA
taaaactaaaatcaaattgt

SEQ ID NO: 11955 - DNA, 20 bp, synthetic construct
  misc_feature 1..20: note = chemically synthesized
  source 1..20: mol_type = other DNA
ttgtaggtgcaattgttcat

SEQ ID NO: 11956 - DNA, 20 bp, synthetic construct
  misc_feature 1..20: note = chemically synthesized
  source 1..20: mol_type = other DNA
ttcattggcaatgctaacaa

SEQ ID NO: 11957 - DNA, 20 bp, synthetic construct
  misc_feature 1..20: note = chemically synthesized
  source 1..20: mol_type = other DNA
ttggcaatgctaacaacagt

SEQ ID NO: 11958 - DNA, 20 bp, synthetic construct
  misc_feature 1..20: note = chemically synthesized
  source 1..20: mol_type = other DNA
tacaaacaaaaactcattgt

SEQ ID NO: 11959 - DNA, 20 bp, synthetic construct
  misc_feature 1..20: note = chemically synthesized
  source 1..20: mol_type = other DNA
aaactcattgtgagtgacca

SEQ ID NO: 11960 - DNA, 20 bp, synthetic construct
  misc_feature 1..20: note = chemically synthesized
  source 1..20: mol_type = other DNA
aactcattgtgagtgaccaa

SEQ ID NO: 11961 - DNA, 20 bp, synthetic construct
  misc_feature 1..20: note = chemically synthesized
  source 1..20: mol_type = other DNA
tgtgagtgaccaaaggtccc

SEQ ID NO: 11962 - DNA, 20 bp, synthetic construct
  misc_feature 1..20: note = chemically synthesized
  source 1..20: mol_type = other DNA
gtgagtgaccaaaggtcccc

SEQ ID NO: 11963 - DNA, 20 bp, synthetic construct
  misc_feature 1..20: note = chemically synthesized
  source 1..20: mol_type = other DNA
cttcatcaacatacctgctc

SEQ ID NO: 11964 - DNA, 20 bp, synthetic construct
  misc_feature 1..20: note = chemically synthesized
  source 1..20: mol_type = other DNA
ttcatcaacatacctgctcc

SEQ ID NO: 11965 - DNA, 20 bp, synthetic construct
  misc_feature 1..20: note = chemically synthesized
  source 1..20: mol_type = other DNA
tacctgctccaggttcccac

SEQ ID NO: 11966 - DNA, 20 bp, synthetic construct
  misc_feature 1..20: note = chemically synthesized
  source 1..20: mol_type = other DNA
acctgctccaggttcccact

SEQ ID NO: 11967 - DNA, 20 bp, synthetic construct
  misc_feature 1..20: note = chemically synthesized
  source 1..20: mol_type = other DNA
ggttcccactgggaattctc

SEQ ID NO: 11968 - DNA, 20 bp, synthetic construct
  misc_feature 1..20: note = chemically synthesized
  source 1..20: mol_type = other DNA
tcccactgggaattctctgg

SEQ ID NO: 11969 - DNA, 20 bp, synthetic construct
  misc_feature 1..20: note = chemically synthesized
  source 1..20: mol_type = other DNA
ccactgggaattctctggca

SEQ ID NO: 11970 - DNA, 20 bp, synthetic construct
  misc_feature 1..20: note = chemically synthesized
  source 1..20: mol_type = other DNA
ttctctggcagagactgatt

SEQ ID NO: 11971 - DNA, 20 bp, synthetic construct
  misc_feature 1..20: note = chemically synthesized
  source 1..20: mol_type = other DNA
agttctgaataacatgctgc

SEQ ID NO: 11972 - DNA, 20 bp, synthetic construct
  misc_feature 1..20: note = chemically synthesized
  source 1..20: mol_type = other DNA
aacatgctgccagccctatc

SEQ ID NO: 11973 - DNA, 20 bp, synthetic construct
  misc_feature 1..20: note = chemically synthesized
  source 1..20: mol_type = other DNA
gctgccagccctatctggaa

SEQ ID NO: 11974 - DNA, 20 bp, synthetic construct
  misc_feature 1..20: note = chemically synthesized
  source 1..20: mol_type = other DNA
ctgccagccctatctggaaa

SEQ ID NO: 11975 - DNA, 20 bp, synthetic construct
  misc_feature 1..20: note = chemically synthesized
  source 1..20: mol_type = other DNA
tgccagccctatctggaaaa

SEQ ID NO: 11976 - DNA, 20 bp, synthetic construct
  misc_feature 1..20: note = chemically synthesized
  source 1..20: mol_type = other DNA
ctatctggaaaagggtgtgc

SEQ ID NO: 11977 - DNA, 20 bp, synthetic construct
  misc_feature 1..20: note = chemically synthesized
  source 1..20: mol_type = other DNA
tatctggaaaagggtgtgca

SEQ ID NO: 11978 - DNA, 20 bp, synthetic construct
  misc_feature 1..20: note = chemically synthesized
  source 1..20: mol_type = other DNA
gcgccttctcgcctctttta

SEQ ID NO: 11979 - DNA, 20 bp, synthetic construct
  misc_feature 1..20: note = chemically synthesized
  source 1..20: mol_type = other DNA
cgccttctcgcctcttttac

SEQ ID NO: 11980 - DNA, 20 bp, synthetic construct
  misc_feature 1..20: note = chemically synthesized
  source 1..20: mol_type = other DNA
cttctcgcctcttttacagg

SEQ ID NO: 11981 - DNA, 20 bp, synthetic construct
  misc_feature 1..20: note = chemically synthesized
  source 1..20: mol_type = other DNA
aaacctgatcatctcacctt

SEQ ID NO: 11982 - DNA, 20 bp, synthetic construct
  misc_feature 1..20: note = chemically synthesized
  source 1..20: mol_type = other DNA
aacctgatcatctcaccttt

SEQ ID NO: 11983 - DNA, 20 bp, synthetic construct
  misc_feature 1..20: note = chemically synthesized
  source 1..20: mol_type = other DNA
ggtatatataatttgttgtt

SEQ ID NO: 11984 - DNA, 20 bp, synthetic construct
  misc_feature 1..20: note = chemically synthesized
  source 1..20: mol_type = other DNA
aatttgttgtttagcactct

SEQ ID NO: 11985 - DNA, 20 bp, synthetic construct
  misc_feature 1..20: note = chemically synthesized
  source 1..20: mol_type = other DNA
tgtttagcactctgagaact

SEQ ID NO: 11986 - DNA, 20 bp, synthetic construct
  misc_feature 1..20: note = chemically synthesized
  source 1..20: mol_type = other DNA
cttggtattttatctatcta

SEQ ID NO: 11987 - DNA, 20 bp, synthetic construct
  misc_feature 1..20: note = chemically synthesized
  source 1..20: mol_type = other DNA
tggtattttatctatctaaa

SEQ ID NO: 11988 - DNA, 20 bp, synthetic construct
  misc_feature 1..20: note = chemically synthesized
  source 1..20: mol_type = other DNA
atctatctaaagagatcaaa

SEQ ID NO: 11989 - DNA, 20 bp, synthetic construct
  misc_feature 1..20: note = chemically synthesized
  source 1..20: mol_type = other DNA
tctatctaaagagatcaaaa

SEQ ID NO: 11990 - DNA, 20 bp, synthetic construct
  misc_feature 1..20: note = chemically synthesized
  source 1..20: mol_type = other DNA
ctatctaaagagatcaaaaa

SEQ ID NO: 11991 - DNA, 20 bp, synthetic construct
  misc_feature 1..20: note = chemically synthesized
  source 1..20: mol_type = other DNA
aaagagatcaaaaagggcaa

SEQ ID NO: 11992 - DNA, 20 bp, synthetic construct
  misc_feature 1..20: note = chemically synthesized
  source 1..20: mol_type = other DNA
agatcaaaaagggcaaaaga

SEQ ID NO: 11993 - DNA, 20 bp, synthetic construct
  misc_feature 1..20: note = chemically synthesized
  source 1..20: mol_type = other DNA
atcaaaaagggcaaaagatg

SEQ ID NO: 11994 - DNA, 20 bp, synthetic construct
  misc_feature 1..20: note = chemically synthesized
  source 1..20: mol_type = other DNA
aaaagggcaaaagatggagc

SEQ ID NO: 11995 - DNA, 20 bp, synthetic construct
  misc_feature 1..20: note = chemically synthesized
  source 1..20: mol_type = other DNA
ggcaaaagatggagcgagct

SEQ ID NO: 11996 - DNA, 20 bp, synthetic construct
  misc_feature 1..20: note = chemically synthesized
  source 1..20: mol_type = other DNA
gcaaaagatggagcgagctg

SEQ ID NO: 11997 - DNA, 20 bp, synthetic construct
  misc_feature 1..20: note = chemically synthesized
  source 1..20: mol_type = other DNA
agatggagcgagctgaggcc

SEQ ID NO: 11998 - DNA, 20 bp, synthetic construct
  misc_feature 1..20: note = chemically synthesized
  source 1..20: mol_type = other DNA
gagcgagctgaggcccagcc

SEQ ID NO: 11999 - DNA, 20 bp, synthetic construct
  misc_feature 1..20: note = chemically synthesized
  source 1..20: mol_type = other DNA
gctgaggcccagcctagctc

SEQ ID NO: 12000 - DNA, 20 bp, synthetic construct
  misc_feature 1..20: note = chemically synthesized
  source 1..20: mol_type = other DNA
tcgtgcactgcgcgttgcct

SEQ ID NO: 12001 - DNA, 20 bp, synthetic construct
  misc_feature 1..20: note = chemically synthesized
  source 1..20: mol_type = other DNA
gtgcactgcgcgttgcctta

SEQ ID NO: 12002 - DNA, 20 bp, synthetic construct
  misc_feature 1..20: note = chemically synthesized
  source 1..20: mol_type = other DNA
tgcactgcgcgttgccttag

SEQ ID NO: 12003 - DNA, 20 bp, synthetic construct
  misc_feature 1..20: note = chemically synthesized
  source 1..20: mol_type = other DNA
cactgcgcgttgccttagag

SEQ ID NO: 12004 - DNA, 20 bp, synthetic construct
  misc_feature 1..20: note = chemically synthesized
  source 1..20: mol_type = other DNA
ccttagaggagcaacctgtg

SEQ ID NO: 12005 - DNA, 20 bp, synthetic construct
  misc_feature 1..20: note = chemically synthesized
  source 1..20: mol_type = other DNA
cttagaggagcaacctgtgc

SEQ ID NO: 12006 - DNA, 20 bp, synthetic construct
  misc_feature 1..20: note = chemically synthesized
  source 1..20: mol_type = other DNA
acctgtgcaggtaaatcttc

SEQ ID NO: 12007 - DNA, 20 bp, synthetic construct
  misc_feature 1..20: note = chemically synthesized
  source 1..20: mol_type = other DNA
tgtgcaggtaaatcttccag

SEQ ID NO: 12008 - DNA, 20 bp, synthetic construct
  misc_feature 1..20: note = chemically synthesized
  source 1..20: mol_type = other DNA
atcttccagcagcattgcat

SEQ ID NO: 12009 - DNA, 20 bp, synthetic construct
  misc_feature 1..20: note = chemically synthesized
  source 1..20: mol_type = other DNA
tgcatcagatccactcacat

SEQ ID NO: 12010 - DNA, 20 bp, synthetic construct
  misc_feature 1..20: note = chemically synthesized
  source 1..20: mol_type = other DNA
gatccactcacatcagtctc

SEQ ID NO: 12011 - DNA, 20 bp, synthetic construct
  misc_feature 1..20: note = chemically synthesized
  source 1..20: mol_type = other DNA
atccactcacatcagtctcc

SEQ ID NO: 12012 - DNA, 20 bp, synthetic construct
  misc_feature 1..20: note = chemically synthesized
  source 1..20: mol_type = other DNA
tccactcacatcagtctcca

SEQ ID NO: 12013 - DNA, 20 bp, synthetic construct
  misc_feature 1..20: note = chemically synthesized
  source 1..20: mol_type = other DNA
atcagtctccagggtgaacc

SEQ ID NO: 12014 - DNA, 20 bp, synthetic construct
  misc_feature 1..20: note = chemically synthesized
  source 1..20: mol_type = other DNA
cagtctccagggtgaaccaa

SEQ ID NO: 12015 - DNA, 20 bp, synthetic construct
  misc_feature 1..20: note = chemically synthesized
  source 1..20: mol_type = other DNA
tgaaccaagagatgacactt

SEQ ID NO: 12016 - DNA, 20 bp, synthetic construct
  misc_feature 1..20: note = chemically synthesized
  source 1..20: mol_type = other DNA
tctgcaaacttctaattcgc

SEQ ID NO: 12017 - DNA, 20 bp, synthetic construct
  misc_feature 1..20: note = chemically synthesized
  source 1..20: mol_type = other DNA
acttctaattcgccagttct

SEQ ID NO: 12018 - DNA, 20 bp, synthetic construct
  misc_feature 1..20: note = chemically synthesized
  source 1..20: mol_type = other DNA
tctaattcgccagttcttag

SEQ ID NO: 12019 - DNA, 20 bp, synthetic construct
  misc_feature 1..20: note = chemically synthesized
  source 1..20: mol_type = other DNA
tcttagcagcttatttttcc

SEQ ID NO: 12020 - DNA, 20 bp, synthetic construct
  misc_feature 1..20: note = chemically synthesized
  source 1..20: mol_type = other DNA
tttttccaagtgttttgttt

SEQ ID NO: 12021 - DNA, 20 bp, synthetic construct
  misc_feature 1..20: note = chemically synthesized
  source 1..20: mol_type = other DNA
ttttccaagtgttttgtttc

SEQ ID NO: 12022 - DNA, 20 bp, synthetic construct
  misc_feature 1..20: note = chemically synthesized
  source 1..20: mol_type = other DNA
atttttctttatacgttttg

SEQ ID NO: 12023 - DNA, 20 bp, synthetic construct
  misc_feature 1..20: note = chemically synthesized
  source 1..20: mol_type = other DNA
tctaccacaactgcttctga

SEQ ID NO: 12024 - DNA, 20 bp, synthetic construct
  misc_feature 1..20: note = chemically synthesized
  source 1..20: mol_type = other DNA
gacagctgttgattctgtta

SEQ ID NO: 12025 - DNA, 20 bp, synthetic construct
  misc_feature 1..20: note = chemically synthesized
  source 1..20: mol_type = other DNA
acagctgttgattctgttaa

SEQ ID NO: 12026 - DNA, 20 bp, synthetic construct
  misc_feature 1..20: note = chemically synthesized
  source 1..20: mol_type = other DNA
aaaatcttctttaaaacctc

SEQ ID NO: 12027 - DNA, 20 bp, synthetic construct
  misc_feature 1..20: note = chemically synthesized
  source 1..20: mol_type = other DNA
ctttaaaacctcaagcaatg

SEQ ID NO: 12028 - DNA, 20 bp, synthetic construct
  misc_feature 1..20: note = chemically synthesized
  source 1..20: mol_type = other DNA
atgtggactcaaaaatataa

SEQ ID NO: 12029 - DNA, 20 bp, synthetic construct
  misc_feature 1..20: note = chemically synthesized
  source 1..20: mol_type = other DNA
ataatggtgaaatattttaa

SEQ ID NO: 12030 - DNA, 20 bp, synthetic construct
  misc_feature 1..20: note = chemically synthesized
  source 1..20: mol_type = other DNA
gaaatattttaatggaattc

SEQ ID NO: 12031 - DNA, 20 bp, synthetic construct
  misc_feature 1..20: note = chemically synthesized
  source 1..20: mol_type = other DNA
tttaatggaattccagttga

SEQ ID NO: 12032 - DNA, 20 bp, synthetic construct
  misc_feature 1..20: note = chemically synthesized
  source 1..20: mol_type = other DNA
tgaaagttgttttttaaaaa

SEQ ID NO: 12033 - DNA, 20 bp, synthetic construct
  misc_feature 1..20: note = chemically synthesized
  source 1..20: mol_type = other DNA
ttttaaaaaaagtacaaatg

SEQ ID NO: 12034 - DNA, 20 bp, synthetic construct
  misc_feature 1..20: note = chemically synthesized
  source 1..20: mol_type = other DNA
tttaaaaaaagtacaaatga

SEQ ID NO: 12035 - DNA, 20 bp, synthetic construct
  misc_feature 1..20: note = chemically synthesized
  source 1..20: mol_type = other DNA
aaaaagtacaaatgaaggta

SEQ ID NO: 12036 - DNA, 20 bp, synthetic construct
  misc_feature 1..20: note = chemically synthesized
  source 1..20: mol_type = other DNA
aagtacaaatgaaggtacag

SEQ ID NO: 12037 - DNA, 20 bp, synthetic construct
  misc_feature 1..20: note = chemically synthesized
  source 1..20: mol_type = other DNA
atgaaggtacagaagtcctt

SEQ ID NO: 12038 - DNA, 20 bp, synthetic construct
  misc_feature 1..20: note = chemically synthesized
  source 1..20: mol_type = other DNA
ggtacagaagtcctttagat

SEQ ID NO: 12039 - DNA, 20 bp, synthetic construct
  misc_feature 1..20: note = chemically synthesized
  source 1..20: mol_type = other DNA
gaagtcctttagatcagtac

SEQ ID NO: 12040 - DNA, 20 bp, synthetic construct
  misc_feature 1..20: note = chemically synthesized
  source 1..20: mol_type = other DNA
gtgtgtgtgtgtgtgtgtaa

SEQ ID NO: 12041 - DNA, 20 bp, synthetic construct
  misc_feature 1..20: note = chemically synthesized
  source 1..20: mol_type = other DNA
tgtgtgtgtgtgtgtgtaat

SEQ ID NO: 12042 - DNA, 20 bp, synthetic construct
  misc_feature 1..20: note = chemically synthesized
  source 1..20: mol_type = other DNA
gtgtgtgtgtgtgtgtaatg

SEQ ID NO: 12043 - DNA, 20 bp, synthetic construct
  misc_feature 1..20: note = chemically synthesized
  source 1..20: mol_type = other DNA
gtgtgtgtgtgtaatgggga

SEQ ID NO: 12044 - DNA, 20 bp, synthetic construct
  misc_feature 1..20: note = chemically synthesized
  source 1..20: mol_type = other DNA
gtgtgtgtgtaatggggaaa

SEQ ID NO: 12045 - DNA, 20 bp, synthetic construct
  misc_feature 1..20: note = chemically synthesized
  source 1..20: mol_type = other DNA
tgtgtgtgtaatggggaaag

SEQ ID NO: 12046 - DNA, 20 bp, synthetic construct
  misc_feature 1..20: note = chemically synthesized
  source 1..20: mol_type = other DNA
gtgtgtgtaatggggaaaga

SEQ ID NO: 12047 - DNA, 20 bp, synthetic construct
  misc_feature 1..20: note = chemically synthesized
  source 1..20: mol_type = other DNA
tgtgtgtaatggggaaagag

SEQ ID NO: 12048 - DNA, 20 bp, synthetic construct
  misc_feature 1..20: note = chemically synthesized
  source 1..20: mol_type = other DNA
ttcaaatcacatacttttaa

SEQ ID NO: 12049 - DNA, 20 bp, synthetic construct
  misc_feature 1..20: note = chemically synthesized
  source 1..20: mol_type = other DNA
tcaaatcacatacttttaac

SEQ ID NO: 12050 - DNA, 20 bp, synthetic construct
  misc_feature 1..20: note = chemically synthesized
  source 1..20: mol_type = other DNA
tcacatacttttaacgggaa

SEQ ID NO: 12051 - DNA, 20 bp, synthetic construct
  misc_feature 1..20: note = chemically synthesized
  source 1..20: mol_type = other DNA
atacttttaacgggaaaagc

SEQ ID NO: 12052 - DNA, 20 bp, synthetic construct
  misc_feature 1..20: note = chemically synthesized
  source 1..20: mol_type = other DNA
aacgggaaaagctggaactg

SEQ ID NO: 12053 - DNA, 20 bp, synthetic construct
  misc_feature 1..20: note = chemically synthesized
  source 1..20: mol_type = other DNA
tatgttgcatttctccatac

SEQ ID NO: 12054 - DNA, 20 bp, synthetic construct
  misc_feature 1..20: note = chemically synthesized
  source 1..20: mol_type = other DNA
cagcacatgcaaaaaaattc

SEQ ID NO: 12055 - DNA, 20 bp, synthetic construct
  misc_feature 1..20: note = chemically synthesized
  source 1..20: mol_type = other DNA
cacatgcaaaaaaattctgg

SEQ ID NO: 12056 - DNA, 20 bp, synthetic construct
  misc_feature 1..20: note = chemically synthesized
  source 1..20: mol_type = other DNA
aaaaaattctggtggtgaat

SEQ ID NO: 12057 - DNA, 20 bp, synthetic construct
  misc_feature 1..20: note = chemically synthesized
  source 1..20: mol_type = other DNA
aaaaattctggtggtgaatt

SEQ ID NO: 12058 - DNA, 20 bp, synthetic construct
  misc_feature 1..20: note = chemically synthesized
  source 1..20: mol_type = other DNA
aaattctggtggtgaattgg

SEQ ID NO: 12059 - DNA, 20 bp, synthetic construct
  misc_feature 1..20: note = chemically synthesized
  source 1..20: mol_type = other DNA
aattctggtggtgaattggg

SEQ ID NO: 12060 - DNA, 20 bp, synthetic construct
  misc_feature 1..20: note = chemically synthesized
  source 1..20: mol_type = other DNA
tctggtggtgaattgggagg

SEQ ID NO: 12061 - DNA, 20 bp, synthetic construct
  misc_feature 1..20: note = chemically synthesized
  source 1..20: mol_type = other DNA
ggtggtgaattgggaggtgg

SEQ ID NO: 12062 - DNA, 20 bp, synthetic construct
  misc_feature 1..20: note = chemically synthesized
  source 1..20: mol_type = other DNA
tggtgaattgggaggtggca

SEQ ID NO: 12063 - DNA, 20 bp, synthetic construct
  misc_feature 1..20: note = chemically synthesized
  source 1..20: mol_type = other DNA
gaattgggaggtggcagagt

SEQ ID NO: 12064 - DNA, 20 bp, synthetic construct
  misc_feature 1..20: note = chemically synthesized
  source 1..20: mol_type = other DNA
aattgggaggtggcagagtt

SEQ ID NO: 12065 - DNA, 20 bp, synthetic construct
  misc_feature 1..20: note = chemically synthesized
  source 1..20: mol_type = other DNA
attgggaggtggcagagttg

SEQ ID NO: 12066 - DNA, 20 bp, synthetic construct
  misc_feature 1..20: note = chemically synthesized
  source 1..20: mol_type = other DNA
tgggaggtggcagagttggg

SEQ ID NO: 12067 - DNA, 20 bp, synthetic construct
  misc_feature 1..20: note = chemically synthesized
  source 1..20: mol_type = other DNA
agagttggggagacaactcc

SEQ ID NO: 12068 - DNA, 20 bp, synthetic construct
  misc_feature 1..20: note = chemically synthesized
  source 1..20: mol_type = other DNA
agttggggagacaactccaa

SEQ ID NO: 12069 - DNA, 20 bp, synthetic construct
  misc_feature 1..20: note = chemically synthesized
  source 1..20: mol_type = other DNA
tggggagacaactccaagag

SEQ ID NO: 12070 - DNA, 20 bp, synthetic construct
  misc_feature 1..20: note = chemically synthesized
  source 1..20: mol_type = other DNA
agacaactccaagagaagaa

SEQ ID NO: 12071 - DNA, 20 bp, synthetic construct
  misc_feature 1..20: note = chemically synthesized
  source 1..20: mol_type = other DNA
gacaactccaagagaagaaa

SEQ ID NO: 12072 - DNA, 20 bp, synthetic construct
  misc_feature 1..20: note = chemically synthesized
  source 1..20: mol_type = other DNA
atgatgttttcatttcgcta

SEQ ID NO: 12073 - DNA, 20 bp, synthetic construct
  misc_feature 1..20: note = chemically synthesized
  source 1..20: mol_type = other DNA
tttcatttcgctatagatca

SEQ ID NO: 12074 - DNA, 20 bp, synthetic construct
  misc_feature 1..20: note = chemically synthesized
  source 1..20: mol_type = other DNA
ttcatttcgctatagatcaa

SEQ ID NO: 12075 - DNA, 20 bp, synthetic construct
  misc_feature 1..20: note = chemically synthesized
  source 1..20: mol_type = other DNA
catttcgctatagatcaaag

SEQ ID NO: 12076 - DNA, 20 bp, synthetic construct
  misc_feature 1..20: note = chemically synthesized
  source 1..20: mol_type = other DNA
gctatagatcaaaggagaac

SEQ ID NO: 12077 - DNA, 20 bp, synthetic construct
  misc_feature 1..20: note = chemically synthesized
  source 1..20: mol_type = other DNA
agatcaaaggagaacaagaa

SEQ ID NO: 12078 - DNA, 20 bp, synthetic construct
  misc_feature 1..20: note = chemically synthesized
  source 1..20: mol_type = other DNA
gagaacaagaatggaaactg

SEQ ID NO: 12079 - DNA, 20 bp, synthetic construct
  misc_feature 1..20: note = chemically synthesized
  source 1..20: mol_type = other DNA
aatggaaactgtggcatatc

SEQ ID NO: 12080 - DNA, 20 bp, synthetic construct
  misc_feature 1..20: note = chemically synthesized
  source 1..20: mol_type = other DNA
tccattgctgtctttcacac

SEQ ID NO: 12081 - DNA, 20 bp, synthetic construct
  misc_feature 1..20: note = chemically synthesized
  source 1..20: mol_type = other DNA
ccattgctgtctttcacact

SEQ ID NO: 12082 - DNA, 20 bp, synthetic construct
  misc_feature 1..20: note = chemically synthesized
  source 1..20: mol_type = other DNA
tctttcacactgggctatct

SEQ ID NO: 12083 - DNA, 20 bp, synthetic construct
  misc_feature 1..20: note = chemically synthesized
  source 1..20: mol_type = other DNA
tctaagtttatacaattccc

SEQ ID NO: 12084 - DNA, 20 bp, synthetic construct
  misc_feature 1..20: note = chemically synthesized
  source 1..20: mol_type = other DNA
gtttatacaattccccagac

SEQ ID NO: 12085 - DNA, 20 bp, synthetic construct
  misc_feature 1..20: note = chemically synthesized
  source 1..20: mol_type = other DNA
ccccagactagctgcatatt

SEQ ID NO: 12086 - DNA, 20 bp, synthetic construct
  misc_feature 1..20: note = chemically synthesized
  source 1..20: mol_type = other DNA
catattaagcttgctgtgta

SEQ ID NO: 12087 - DNA, 20 bp, synthetic construct
  misc_feature 1..20: note = chemically synthesized
  source 1..20: mol_type = other DNA
tgctgtgtacagctttatta

SEQ ID NO: 12088 - DNA, 20 bp, synthetic construct
  misc_feature 1..20: note = chemically synthesized
  source 1..20: mol_type = other DNA
tgtacagctttattatggtg

SEQ ID NO: 12089 - DNA, 20 bp, synthetic construct
  misc_feature 1..20: note = chemically synthesized
  source 1..20: mol_type = other DNA
acagctttattatggtgtgg

SEQ ID NO: 12090 - DNA, 20 bp, synthetic construct
  misc_feature 1..20: note = chemically synthesized
  source 1..20: mol_type = other DNA
gctttattatggtgtggtgg

SEQ ID NO: 12091 - DNA, 20 bp, synthetic construct
  misc_feature 1..20: note = chemically synthesized
  source 1..20: mol_type = other DNA
ttattatggtgtggtggtgg

SEQ ID NO: 12092 - DNA, 20 bp, synthetic construct
  misc_feature 1..20: note = chemically synthesized
  source 1..20: mol_type = other DNA
ttatggtgtggtggtggaag

SEQ ID NO: 12093 - DNA, 20 bp, synthetic construct
  misc_feature 1..20: note = chemically synthesized
  source 1..20: mol_type = other DNA
tggaagaagcattaatattc

SEQ ID NO: 12094 - DNA, 20 bp, synthetic construct
  misc_feature 1..20: note = chemically synthesized
  source 1..20: mol_type = other DNA
tattccagctccgcatctga

SEQ ID NO: 12095 - DNA, 20 bp, synthetic construct
  misc_feature 1..20: note = chemically synthesized
  source 1..20: mol_type = other DNA
attccagctccgcatctgac

SEQ ID NO: 12096 - DNA, 20 bp, synthetic construct
  misc_feature 1..20: note = chemically synthesized
  source 1..20: mol_type = other DNA
ttccagctccgcatctgaca

SEQ ID NO: 12097 - DNA, 20 bp, synthetic construct
  misc_feature 1..20: note = chemically synthesized
  source 1..20: mol_type = other DNA
gcatttacatgcgcccatct

SEQ ID NO: 12098 - DNA, 20 bp, synthetic construct
  misc_feature 1..20: note = chemically synthesized
  source 1..20: mol_type = other DNA
tttacatgcgcccatctgag

SEQ ID NO: 12099 - DNA, 20 bp, synthetic construct
  misc_feature 1..20: note = chemically synthesized
  source 1..20: mol_type = other DNA
cgcccatctgagcggcacct

SEQ ID NO: 12100 - DNA, 20 bp, synthetic construct
  misc_feature 1..20: note = chemically synthesized
  source 1..20: mol_type = other DNA
cccatctgagcggcacctga

SEQ ID NO: 12101 - DNA, 20 bp, synthetic construct
  misc_feature 1..20: note = chemically synthesized
  source 1..20: mol_type = other DNA
cggcacctgagagctcctcc

SEQ ID NO: 12102 - DNA, 20 bp, synthetic construct
  misc_feature 1..20: note = chemically synthesized
  source 1..20: mol_type = other DNA
ggcacctgagagctcctcca

SEQ ID NO: 12103 - DNA, 20 bp, synthetic construct
  misc_feature 1..20: note = chemically synthesized
  source 1..20: mol_type = other DNA
ctgagagctcctccaaggtg

SEQ ID NO: 12104 - DNA, 20 bp, synthetic construct
  misc_feature 1..20: note = chemically synthesized
  source 1..20: mol_type = other DNA
gtaactgtgcgcctattgta

SEQ ID NO: 12105 - DNA, 20 bp, synthetic construct
  misc_feature 1..20: note = chemically synthesized
  source 1..20: mol_type = other DNA
taactgtgcgcctattgtaa

SEQ ID NO: 12106 - DNA, 20 bp, synthetic construct
  misc_feature 1..20: note = chemically synthesized
  source 1..20: mol_type = other DNA
gcctattgtaaaggcaaatg

SEQ ID NO: 12107 - DNA, 20 bp, synthetic construct
  misc_feature 1..20: note = chemically synthesized
  source 1..20: mol_type = other DNA
gaagctcacctattccctgc

SEQ ID NO: 12108 - DNA, 20 bp, synthetic construct
  misc_feature 1..20: note = chemically synthesized
  source 1..20: mol_type = other DNA
aagctcacctattccctgct

SEQ ID NO: 12109 - DNA, 20 bp, synthetic construct
  misc_feature 1..20: note = chemically synthesized
  source 1..20: mol_type = other DNA
cacctattccctgctgggat

SEQ ID NO: 12110 - DNA, 20 bp, synthetic construct
  misc_feature 1..20: note = chemically synthesized
  source 1..20: mol_type = other DNA
ctattccctgctgggatcag

SEQ ID NO: 12111 - DNA, 20 bp, synthetic construct
  misc_feature 1..20: note = chemically synthesized
  source 1..20: mol_type = other DNA
aacctaactcaatgccattg

SEQ ID NO: 12112 - DNA, 20 bp, synthetic construct
  misc_feature 1..20: note = chemically synthesized
  source 1..20: mol_type = other DNA
gccattgcagaatgacgaat

SEQ ID NO: 12113 - DNA, 20 bp, synthetic construct
  misc_feature 1..20: note = chemically synthesized
  source 1..20: mol_type = other DNA
tgcagaatgacgaatgagct

SEQ ID NO: 12114 - DNA, 20 bp, synthetic construct
  misc_feature 1..20: note = chemically synthesized
  source 1..20: mol_type = other DNA
atgacgaatgagctcagaaa

SEQ ID NO: 12115 - DNA, 20 bp, synthetic construct
  misc_feature 1..20: note = chemically synthesized
  source 1..20: mol_type = other DNA
tgagctcagaaatagacccc

SEQ ID NO: 12116 - DNA, 20 bp, synthetic construct
  misc_feature 1..20: note = chemically synthesized
  source 1..20: mol_type = other DNA
cccaagttactaaccctgct

SEQ ID NO: 12117 - DNA, 20 bp, synthetic construct
  misc_feature 1..20: note = chemically synthesized
  source 1..20: mol_type = other DNA
gttactaaccctgctaagaa

SEQ ID NO: 12118 - DNA, 20 bp, synthetic construct
  misc_feature 1..20: note = chemically synthesized
  source 1..20: mol_type = other DNA
aaccctgctaagaacagcaa

SEQ ID NO: 12119 - DNA, 20 bp, synthetic construct
  misc_feature 1..20: note = chemically synthesized
  source 1..20: mol_type = other DNA
tgaaatgttttaaaaatgca

SEQ ID NO: 12120 - DNA, 20 bp, synthetic construct
  misc_feature 1..20: note = chemically synthesized
  source 1..20: mol_type = other DNA
gaaatgttttaaaaatgcat

SEQ ID NO: 12121 - DNA, 20 bp, synthetic construct
  misc_feature 1..20: note = chemically synthesized
  source 1..20: mol_type = other DNA
aaatgttttaaaaatgcata

SEQ ID NO: 12122 - DNA, 20 bp, synthetic construct
  misc_feature 1..20: note = chemically synthesized
  source 1..20: mol_type = other DNA
atgttttaaaaatgcatagg

SEQ ID NO: 12123 - DNA, 20 bp, synthetic construct
  misc_feature 1..20: note = chemically synthesized
  source 1..20: mol_type = other DNA
ttaaaaatgcatagggagtg

SEQ ID NO: 12124 - DNA, 20 bp, synthetic construct
  misc_feature 1..20: note = chemically synthesized
  source 1..20: mol_type = other DNA
aaatgcatagggagtgcagc

SEQ ID NO: 12125 - DNA, 20 bp, synthetic construct
  misc_feature 1..20: note = chemically synthesized
  source 1..20: mol_type = other DNA
gcatagggagtgcagctggc

SEQ ID NO: 12126 - DNA, 20 bp, synthetic construct
  misc_feature 1..20: note = chemically synthesized
  source 1..20: mol_type = other DNA
gagtgcagctggccagtaaa

SEQ ID NO: 12127 - DNA, 20 bp, synthetic construct
  misc_feature 1..20: note = chemically synthesized
  source 1..20: mol_type = other DNA
tgcagctggccagtaaaaag

SEQ ID NO: 12128 - DNA, 20 bp, synthetic construct
  misc_feature 1..20: note = chemically synthesized
  source 1..20: mol_type = other DNA
gcagctggccagtaaaaagc

SEQ ID NO: 12129 - DNA, 20 bp, synthetic construct
  misc_feature 1..20: note = chemically synthesized
  source 1..20: mol_type = other DNA
cagctggccagtaaaaagca

SEQ ID NO: 12130 - DNA, 20 bp, synthetic construct
  misc_feature 1..20: note = chemically synthesized
  source 1..20: mol_type = other DNA
gctggccagtaaaaagcagg

SEQ ID NO: 12131 - DNA, 20 bp, synthetic construct
  misc_feature 1..20: note = chemically synthesized
  source 1..20: mol_type = other DNA
aaattccaatgaacccaata

SEQ ID NO: 12132 - DNA, 20 bp, synthetic construct
  misc_feature 1..20: note = chemically synthesized
  source 1..20: mol_type = other DNA
caatgaacccaatatggaat

SEQ ID NO: 12133 - DNA, 20 bp, synthetic construct
  misc_feature 1..20: note = chemically synthesized
  source 1..20: mol_type = other DNA
agttacattttaaaactgat

SEQ ID NO: 12134 - DNA, 20 bp, synthetic construct
  misc_feature 1..20: note = chemically synthesized
  source 1..20: mol_type = other DNA
tttaaaactgattagaaata

SEQ ID NO: 12135 - DNA, 20 bp, synthetic construct
  misc_feature 1..20: note = chemically synthesized
  source 1..20: mol_type = other DNA
aaatacagtctgatgtttac

SEQ ID NO: 12136 - DNA, 20 bp, synthetic construct
  misc_feature 1..20: note = chemically synthesized
  source 1..20: mol_type = other DNA
atgtttactggcttcaaatt

SEQ ID NO: 12137 - DNA, 20 bp, synthetic construct
  misc_feature 1..20: note = chemically synthesized
  source 1..20: mol_type = other DNA
tactggcttcaaattgagtt

SEQ ID NO: 12138 - DNA, 20 bp, synthetic construct
  misc_feature 1..20: note = chemically synthesized
  source 1..20: mol_type = other DNA
ttcaaattgagtttggcatc

SEQ ID NO: 12139 - DNA, 20 bp, synthetic construct
  misc_feature 1..20: note = chemically synthesized
  source 1..20: mol_type = other DNA
gagtttggcatcaagtatac

SEQ ID NO: 12140 - DNA, 20 bp, synthetic construct
  misc_feature 1..20: note = chemically synthesized
  source 1..20: mol_type = other DNA
tatactggctttaataatgc

SEQ ID NO: 12141 - DNA, 20 bp, synthetic construct
  misc_feature 1..20: note = chemically synthesized
  source 1..20: mol_type = other DNA
tattattttaaatctgcctt

SEQ ID NO: 12142 - DNA, 20 bp, synthetic construct
  misc_feature 1..20: note = chemically synthesized
  source 1..20: mol_type = other DNA
ttaaatctgcctttggtctc

SEQ ID NO: 12143 - DNA, 20 bp, synthetic construct
  misc_feature 1..20: note = chemically synthesized
  source 1..20: mol_type = other DNA
taaatctgcctttggtctct

SEQ ID NO: 12144 - DNA, 20 bp, synthetic construct
  misc_feature 1..20: note = chemically synthesized
  source 1..20: mol_type = other DNA
aatctgcctttggtctctag

SEQ ID NO: 12145 - DNA, 20 bp, synthetic construct
  misc_feature 1..20: note = chemically synthesized
  source 1..20: mol_type = other DNA
ttggtctctaggagcacatg

SEQ ID NO: 12146 - DNA, 20 bp, synthetic construct
  misc_feature 1..20: note = chemically synthesized
  source 1..20: mol_type = other DNA
ggtctctaggagcacatgta

SEQ ID NO: 12147 - DNA, 20 bp, synthetic construct
  misc_feature 1..20: note = chemically synthesized
  source 1..20: mol_type = other DNA
tctctaggagcacatgtaga

SEQ ID NO: 12148 - DNA, 20 bp, synthetic construct
  misc_feature 1..20: note = chemically synthesized
  source 1..20: mol_type = other DNA
ggagcacatgtagagagcta

SEQ ID NO: 12149 - DNA, 20 bp, synthetic construct
  misc_feature 1..20: note = chemically synthesized
  source 1..20: mol_type = other DNA
gctaaagaattcttatttgt

SEQ ID NO: 12150 - DNA, 20 bp, synthetic construct
  misc_feature 1..20: note = chemically synthesized
  source 1..20: mol_type = other DNA
ctaaagaattcttatttgtc

SEQ ID NO: 12151 - DNA, 20 bp, synthetic construct
  misc_feature 1..20: note = chemically synthesized
  source 1..20: mol_type = other DNA
atttgtcaggttacatttcc

SEQ ID NO: 12152 - DNA, 20 bp, synthetic construct
  misc_feature 1..20: note = chemically synthesized
  source 1..20: mol_type = other DNA
ggttacatttcctggaaatt

SEQ ID NO: 12153 - DNA, 20 bp, synthetic construct
  misc_feature 1..20: note = chemically synthesized
  source 1..20: mol_type = other DNA
cctggaaattaagtttgtga

SEQ ID NO: 12154 - DNA, 20 bp, synthetic construct
  misc_feature 1..20: note = chemically synthesized
  source 1..20: mol_type = other DNA
tttgtgacagaaaatgactc

SEQ ID NO: 12155 - DNA, 20 bp, synthetic construct
  misc_feature 1..20: note = chemically synthesized
  source 1..20: mol_type = other DNA
gtgacagaaaatgactccag

SEQ ID NO: 12156 - DNA, 20 bp, synthetic construct
  misc_feature 1..20: note = chemically synthesized
  source 1..20: mol_type = other DNA
tgactccagtagcaataata

SEQ ID NO: 12157 - DNA, 20 bp, synthetic construct
  misc_feature 1..20: note = chemically synthesized
  source 1..20: mol_type = other DNA
tggttcgtgctcaaattaat

SEQ ID NO: 12158 - DNA, 20 bp, synthetic construct
  misc_feature 1..20: note = chemically synthesized
  source 1..20: mol_type = other DNA
ggttcgtgctcaaattaatt

SEQ ID NO: 12159 - DNA, 20 bp, synthetic construct
  misc_feature 1..20: note = chemically synthesized
  source 1..20: mol_type = other DNA
gtcatgttgtaaaaactacg

SEQ ID NO: 12160 - DNA, 20 bp, synthetic construct
  misc_feature 1..20: note = chemically synthesized
  source 1..20: mol_type = other DNA
aaactacgtggcaaattaca

SEQ ID NO: 12161 - DNA, 20 bp, synthetic construct
  misc_feature 1..20: note = chemically synthesized
  source 1..20: mol_type = other DNA
aactacgtggcaaattacaa

SEQ ID NO: 12162 - DNA, 20 bp, synthetic construct
  misc_feature 1..20: note = chemically synthesized
  source 1..20: mol_type = other DNA
aaaggtaaatttactgatat

SEQ ID NO: 12163 - DNA, 20 bp, synthetic construct
  misc_feature 1..20: note = chemically synthesized
  source 1..20: mol_type = other DNA
gtaaatttactgatattggc

SEQ ID NO: 12164 - DNA, 20 bp, synthetic construct
  misc_feature 1..20: note = chemically synthesized
  source 1..20: mol_type = other DNA
ttggccagtgctctataccc

SEQ ID NO: 12165 - DNA, 20 bp, synthetic construct
  misc_feature 1..20: note = chemically synthesized
  source 1..20: mol_type = other DNA
tgctctataccctggtcgta

SEQ ID NO: 12166 - DNA, 20 bp, synthetic construct
  misc_feature 1..20: note = chemically synthesized
  source 1..20: mol_type = other DNA
gctctataccctggtcgtaa

SEQ ID NO: 12167 - DNA, 20 bp, synthetic construct
  misc_feature 1..20: note = chemically synthesized
  source 1..20: mol_type = other DNA
ctctataccctggtcgtaaa

SEQ ID NO: 12168 - DNA, 20 bp, synthetic construct
  misc_feature 1..20: note = chemically synthesized
  source 1..20: mol_type = other DNA
tctataccctggtcgtaaag

SEQ ID NO: 12169 - DNA, 20 bp, synthetic construct
  misc_feature 1..20: note = chemically synthesized
  source 1..20: mol_type = other DNA
tataccctggtcgtaaaggg

SEQ ID NO: 12170 - DNA, 20 bp, synthetic construct
  misc_feature 1..20: note = chemically synthesized
  source 1..20: mol_type = other DNA
accctggtcgtaaaggggag

SEQ ID NO: 12171 - DNA, 20 bp, synthetic construct
  misc_feature 1..20: note = chemically synthesized
  source 1..20: mol_type = other DNA
gtaaaggggagaagctgttt

SEQ ID NO: 12172 - DNA, 20 bp, synthetic construct
  misc_feature 1..20: note = chemically synthesized
  source 1..20: mol_type = other DNA
taaaggggagaagctgttta

SEQ ID NO: 12173 - DNA, 20 bp, synthetic construct
  misc_feature 1..20: note = chemically synthesized
  source 1..20: mol_type = other DNA
tttaaggatgcccatttacc

SEQ ID NO: 12174 - DNA, 20 bp, synthetic construct
  misc_feature 1..20: note = chemically synthesized
  source 1..20: mol_type = other DNA
ttaaggatgcccatttacct

SEQ ID NO: 12175 - DNA, 20 bp, synthetic construct
  misc_feature 1..20: note = chemically synthesized
  source 1..20: mol_type = other DNA
aggatgcccatttacctagg

SEQ ID NO: 12176 - DNA, 20 bp, synthetic construct
  misc_feature 1..20: note = chemically synthesized
  source 1..20: mol_type = other DNA
ggatgcccatttacctaggt

SEQ ID NO: 12177 - DNA, 20 bp, synthetic construct
  misc_feature 1..20: note = chemically synthesized
  source 1..20: mol_type = other DNA
atgcccatttacctaggtag

SEQ ID NO: 12178 - DNA, 20 bp, synthetic construct
  misc_feature 1..20: note = chemically synthesized
  source 1..20: mol_type = other DNA
catttacctaggtaggagaa

SEQ ID NO: 12179 - DNA, 20 bp, synthetic construct
  misc_feature 1..20: note = chemically synthesized
  source 1..20: mol_type = other DNA
ctaggtaggagaaaagaacc

SEQ ID NO: 12180 - DNA, 20 bp, synthetic construct
  misc_feature 1..20: note = chemically synthesized
  source 1..20: mol_type = other DNA
taggtaggagaaaagaacca

SEQ ID NO: 12181 - DNA, 20 bp, synthetic construct
  misc_feature 1..20: note = chemically synthesized
  source 1..20: mol_type = other DNA
ggtaggagaaaagaaccaag

SEQ ID NO: 12182 - DNA, 20 bp, synthetic construct
  misc_feature 1..20: note = chemically synthesized
  source 1..20: mol_type = other DNA
gtaggagaaaagaaccaagg

SEQ ID NO: 12183 - DNA, 20 bp, synthetic construct
  misc_feature 1..20: note = chemically synthesized
  source 1..20: mol_type = other DNA
taggagaaaagaaccaagga

SEQ ID NO: 12184 - DNA, 20 bp, synthetic construct
  misc_feature 1..20: note = chemically synthesized
  source 1..20: mol_type = other DNA
ggagaaaagaaccaaggagg

SEQ ID NO: 12185 - DNA, 20 bp, synthetic construct
  misc_feature 1..20: note = chemically synthesized
  source 1..20: mol_type = other DNA
gagaaaagaaccaaggaggg

SEQ ID NO: 12186 - DNA, 20 bp, synthetic construct
  misc_feature 1..20: note = chemically synthesized
  source 1..20: mol_type = other DNA
agaaaagaaccaaggaggga

SEQ ID NO: 12187 - DNA, 20 bp, synthetic construct
  misc_feature 1..20: note = chemically synthesized
  source 1..20: mol_type = other DNA
aaaagaaccaaggagggagg

SEQ ID NO: 12188 - DNA, 20 bp, synthetic construct
  misc_feature 1..20: note = chemically synthesized
  source 1..20: mol_type = other DNA
ccaaggagggagggagacaa

SEQ ID NO: 12189 - DNA, 20 bp, synthetic construct
  misc_feature 1..20: note = chemically synthesized
  source 1..20: mol_type = other DNA
atttgtattacaaataaaaa

SEQ ID NO: 12190 - DNA, 20 bp, synthetic construct
  misc_feature 1..20: note = chemically synthesized
  source 1..20: mol_type = other DNA
tgtattacaaataaaaatag

SEQ ID NO: 12191 - DNA, 20 bp, synthetic construct
  misc_feature 1..20: note = chemically synthesized
  source 1..20: mol_type = other DNA
tcattatccattaaattata

SEQ ID NO: 12192 - DNA, 20 bp, synthetic construct
  misc_feature 1..20: note = chemically synthesized
  source 1..20: mol_type = other DNA
ttgatttgaaataatgttaa

SEQ ID NO: 12193 - DNA, 20 bp, synthetic construct
  misc_feature 1..20: note = chemically synthesized
  source 1..20: mol_type = other DNA
atttgaaataatgttaaaag

SEQ ID NO: 12194 - DNA, 20 bp, synthetic construct
  misc_feature 1..20: note = chemically synthesized
  source 1..20: mol_type = other DNA
tttgaaataatgttaaaagt

SEQ ID NO: 12195 - DNA, 20 bp, synthetic construct
  misc_feature 1..20: note = chemically synthesized
  source 1..20: mol_type = other DNA
taatgttaaaagtgggctct

SEQ ID NO: 12196 - DNA, 20 bp, synthetic construct
  misc_feature 1..20: note = chemically synthesized
  source 1..20: mol_type = other DNA
gttaaaagtgggctctaagt

SEQ ID NO: 12197 - DNA, 20 bp, synthetic construct
  misc_feature 1..20: note = chemically synthesized
  source 1..20: mol_type = other DNA
aaataacaacactgctgaca

SEQ ID NO: 12198 - DNA, 20 bp, synthetic construct
  misc_feature 1..20: note = chemically synthesized
  source 1..20: mol_type = other DNA
gacccaaatgaaatctgaac

SEQ ID NO: 12199 - DNA, 20 bp, synthetic construct
  misc_feature 1..20: note = chemically synthesized
  source 1..20: mol_type = other DNA
ccaaatgaaatctgaacaag

SEQ ID NO: 12200 - DNA, 20 bp, synthetic construct
  misc_feature 1..20: note = chemically synthesized
  source 1..20: mol_type = other DNA
atgaaatctgaacaagcaga

SEQ ID NO: 12201 - DNA, 20 bp, synthetic construct
  misc_feature 1..20: note = chemically synthesized
  source 1..20: mol_type = other DNA
tgaaatctgaacaagcagaa

SEQ ID NO: 12202 - DNA, 20 bp, synthetic construct
  misc_feature 1..20: note = chemically synthesized
  source 1..20: mol_type = other DNA
gaacaagcagaaaggtacta

SEQ ID NO: 12203 - DNA, 20 bp, synthetic construct
  misc_feature 1..20: note = chemically synthesized
  source 1..20: mol_type = other DNA
agaaaggtactaaagatgct

SEQ ID NO: 12204 - DNA, 20 bp, synthetic construct
  misc_feature 1..20: note = chemically synthesized
  source 1..20: mol_type = other DNA
gattaaatctcatgctaaaa

SEQ ID NO: 12205 - DNA, 20 bp, synthetic construct
  misc_feature 1..20: note = chemically synthesized
  source 1..20: mol_type = other DNA
taaatctcatgctaaaaaag

SEQ ID NO: 12206 - DNA, 20 bp, synthetic construct
  misc_feature 1..20: note = chemically synthesized
  source 1..20: mol_type = other DNA
tctcatgctaaaaaagtggc

SEQ ID NO: 12207 - DNA, 20 bp, synthetic construct
  misc_feature 1..20: note = chemically synthesized
  source 1..20: mol_type = other DNA
ctcatgctaaaaaagtggca

SEQ ID NO: 12208 - DNA, 20 bp, synthetic construct
  misc_feature 1..20: note = chemically synthesized
  source 1..20: mol_type = other DNA
ctaaaaaagtggcaaggtgc

SEQ ID NO: 12209 - DNA, 20 bp, synthetic construct
  misc_feature 1..20: note = chemically synthesized
  source 1..20: mol_type = other DNA
taaaaaagtggcaaggtgcc

SEQ ID NO: 12210 - DNA, 20 bp, synthetic construct
  misc_feature 1..20: note = chemically synthesized
  source 1..20: mol_type = other DNA
aaagtggcaaggtgccaggc

SEQ ID NO: 12211 - DNA, 20 bp, synthetic construct
  misc_feature 1..20: note = chemically synthesized
  source 1..20: mol_type = other DNA
aagtggcaaggtgccaggct

SEQ ID NO: 12212 - DNA, 20 bp, synthetic construct
  misc_feature 1..20: note = chemically synthesized
  source 1..20: mol_type = other DNA
gcaaggtgccaggctgggtc

SEQ ID NO: 12213 - DNA, 20 bp, synthetic construct
  misc_feature 1..20: note = chemically synthesized
  source 1..20: mol_type = other DNA
gctgggtccagcttgatgct

SEQ ID NO: 12214 - DNA, 20 bp, synthetic construct
  misc_feature 1..20: note = chemically synthesized
  source 1..20: mol_type = other DNA
taagtgctttttattgcaca

SEQ ID NO: 12215 - DNA, 20 bp, synthetic construct
  misc_feature 1..20: note = chemically synthesized
  source 1..20: mol_type = other DNA
tgctttttattgcacaaagc

SEQ ID NO: 12216 - DNA, 20 bp, synthetic construct
  misc_feature 1..20: note = chemically synthesized
  source 1..20: mol_type = other DNA
ggtactactgtatgtaaaaa

SEQ ID NO: 12217 - DNA, 20 bp, synthetic construct
  misc_feature 1..20: note = chemically synthesized
  source 1..20: mol_type = other DNA
actgtatgtaaaaacagact

SEQ ID NO: 12218 - DNA, 20 bp, synthetic construct
  misc_feature 1..20: note = chemically synthesized
  source 1..20: mol_type = other DNA
ctgtatgtaaaaacagactt

SEQ ID NO: 12219 - DNA, 20 bp, synthetic construct
  misc_feature 1..20: note = chemically synthesized
  source 1..20: mol_type = other DNA
tgtaaaaacagacttgggct

SEQ ID NO: 12220 - DNA, 20 bp, synthetic construct
  misc_feature 1..20: note = chemically synthesized
  source 1..20: mol_type = other DNA
gtaaaaacagacttgggctt

SEQ ID NO: 12221 - DNA, 20 bp, synthetic construct
  misc_feature 1..20: note = chemically synthesized
  source 1..20: mol_type = other DNA
taaaaacagacttgggcttg

SEQ ID NO: 12222 - DNA, 20 bp, synthetic construct
  misc_feature 1..20: note = chemically synthesized
  source 1..20: mol_type = other DNA
aatgacttctttgtgcaata

SEQ ID NO: 12223 - DNA, 20 bp, synthetic construct
  misc_feature 1..20: note = chemically synthesized
  source 1..20: mol_type = other DNA
atgacttctttgtgcaataa

SEQ ID NO: 12224 - DNA, 20 bp, synthetic construct
  misc_feature 1..20: note = chemically synthesized
  source 1..20: mol_type = other DNA
tgacttctttgtgcaataaa

SEQ ID NO: 12225 - DNA, 20 bp, synthetic construct
  misc_feature 1..20: note = chemically synthesized
  source 1..20: mol_type = other DNA
tgtgcaataaagggtgtgaa

SEQ ID NO: 12226 - DNA, 20 bp, synthetic construct
  misc_feature 1..20: note = chemically synthesized
  source 1..20: mol_type = other DNA
gggtgtgaacagaccaacca

SEQ ID NO: 12227 - DNA, 20 bp, synthetic construct
  misc_feature 1..20: note = chemically synthesized
  source 1..20: mol_type = other DNA
tgtgaacagaccaaccaaag

SEQ ID NO: 12228 - DNA, 20 bp, synthetic construct
  misc_feature 1..20: note = chemically synthesized
  source 1..20: mol_type = other DNA
aagtagattaaattaacatc

SEQ ID NO: 12229 - DNA, 20 bp, synthetic construct
  misc_feature 1..20: note = chemically synthesized
  source 1..20: mol_type = other DNA
aacatccagtgacgcaatct

SEQ ID NO: 12230 - DNA, 20 bp, synthetic construct
  misc_feature 1..20: note = chemically synthesized
  source 1..20: mol_type = other DNA
gcaatcttggtgcatctccc

SEQ ID NO: 12231 - DNA, 20 bp, synthetic construct
  misc_feature 1..20: note = chemically synthesized
  source 1..20: mol_type = other DNA
cctagctgtgctttctactt

SEQ ID NO: 12232 - DNA, 20 bp, synthetic construct
  misc_feature 1..20: note = chemically synthesized
  source 1..20: mol_type = other DNA
aaatttaatatttcccccca

SEQ ID NO: 12233 - DNA, 20 bp, synthetic construct
  misc_feature 1..20: note = chemically synthesized
  source 1..20: mol_type = other DNA
aatttaatatttccccccaa

SEQ ID NO: 12234 - DNA, 20 bp, synthetic construct
  misc_feature 1..20: note = chemically synthesized
  source 1..20: mol_type = other DNA
taatatttccccccaaagga

SEQ ID NO: 12235 - DNA, 20 bp, synthetic construct
  misc_feature 1..20: note = chemically synthesized
  source 1..20: mol_type = other DNA
ttgtttcctttcttactgac

SEQ ID NO: 12236 - DNA, 20 bp, synthetic construct
  misc_feature 1..20: note = chemically synthesized
  source 1..20: mol_type = other DNA
ttcttactgaccagcacgca

SEQ ID NO: 12237 - DNA, 20 bp, synthetic construct
  misc_feature 1..20: note = chemically synthesized
  source 1..20: mol_type = other DNA
ctttattaaacattttcatt

SEQ ID NO: 12238 - DNA, 20 bp, synthetic construct
  misc_feature 1..20: note = chemically synthesized
  source 1..20: mol_type = other DNA
aaatctaaaaaatgtttccc

SEQ ID NO: 12239 - DNA, 20 bp, synthetic construct
  misc_feature 1..20: note = chemically synthesized
  source 1..20: mol_type = other DNA
aatctaaaaaatgtttccct

SEQ ID NO: 12240 - DNA, 20 bp, synthetic construct
  misc_feature 1..20: note = chemically synthesized
  source 1..20: mol_type = other DNA
gttttttatgtaccccaatt

SEQ ID NO: 12241 - DNA, 20 bp, synthetic construct
  misc_feature 1..20: note = chemically synthesized
  source 1..20: mol_type = other DNA
ccaatttagtactcccacat

SEQ ID NO: 12242 - DNA, 20 bp, synthetic construct
  misc_feature 1..20: note = chemically synthesized
  source 1..20: mol_type = other DNA
cccacattagccaaactaca

SEQ ID NO: 12243 - DNA, 20 bp, synthetic construct
  misc_feature 1..20: note = chemically synthesized
  source 1..20: mol_type = other DNA
acattagccaaactacatgg

SEQ ID NO: 12244 - DNA, 20 bp, synthetic construct
  misc_feature 1..20: note = chemically synthesized
  source 1..20: mol_type = other DNA
gccaaactacatggaagctg

SEQ ID NO: 12245 - DNA, 20 bp, synthetic construct
  misc_feature 1..20: note = chemically synthesized
  source 1..20: mol_type = other DNA
gtgtgaaattaatgattttc

SEQ ID NO: 12246 - DNA, 20 bp, synthetic construct
  misc_feature 1..20: note = chemically synthesized
  source 1..20: mol_type = other DNA
tgtgaaattaatgattttcc

SEQ ID NO: 12247 - DNA, 20 bp, synthetic construct
  misc_feature 1..20: note = chemically synthesized
  source 1..20: mol_type = other DNA
atgattttccaggactctaa

SEQ ID NO: 12248 - DNA, 20 bp, synthetic construct
  misc_feature 1..20: note = chemically synthesized
  source 1..20: mol_type = other DNA
ctctaaaagatgccattaat

SEQ ID NO: 12249 - DNA, 20 bp, synthetic construct
  misc_feature 1..20: note = chemically synthesized
  source 1..20: mol_type = other DNA
atccaactcgcctcctccct

SEQ ID NO: 12250 - DNA, 20 bp, synthetic construct
  misc_feature 1..20: note = chemically synthesized
  source 1..20: mol_type = other DNA
ctcgcctcctccctgagctg

SEQ ID NO: 12251 - DNA, 20 bp, synthetic construct
  misc_feature 1..20: note = chemically synthesized
  source 1..20: mol_type = other DNA
tcgcctcctccctgagctga

SEQ ID NO: 12252 - DNA, 20 bp, synthetic construct
  misc_feature 1..20: note = chemically synthesized
  source 1..20: mol_type = other DNA
tgcctgcacgtttctacacc

SEQ ID NO: 12253 - DNA, 20 bp, synthetic construct
  misc_feature 1..20: note = chemically synthesized
  source 1..20: mol_type = other DNA
ctacacccagttgcattttc

SEQ ID NO: 12254 - DNA, 20 bp, synthetic construct
  misc_feature 1..20: note = chemically synthesized
  source 1..20: mol_type = other DNA
tgcattttccagcccatgtg

SEQ ID NO: 12255 - DNA, 20 bp, synthetic construct
  misc_feature 1..20: note = chemically synthesized
  source 1..20: mol_type = other DNA
aattatatgccacattcact

SEQ ID NO: 12256 - DNA, 20 bp, synthetic construct
  misc_feature 1..20: note = chemically synthesized
  source 1..20: mol_type = other DNA
ttatatgccacattcactaa

SEQ ID NO: 12257 - DNA, 20 bp, synthetic construct
  misc_feature 1..20: note = chemically synthesized
  source 1..20: mol_type = other DNA
atgccacattcactaagaga

SEQ ID NO: 12258 - DNA, 20 bp, synthetic construct
  misc_feature 1..20: note = chemically synthesized
  source 1..20: mol_type = other DNA
tgccacattcactaagagaa

SEQ ID NO: 12259 - DNA, 20 bp, synthetic construct
  misc_feature 1..20: note = chemically synthesized
  source 1..20: mol_type = other DNA
aaggtgtgcaaaacatattt

SEQ ID NO: 12260 - DNA, 20 bp, synthetic construct
  misc_feature 1..20: note = chemically synthesized
  source 1..20: mol_type = other DNA
aacatatttcagatccttta

SEQ ID NO: 12261 - DNA, 20 bp, synthetic construct
  misc_feature 1..20: note = chemically synthesized
  source 1..20: mol_type = other DNA
atttcagatcctttatagta

SEQ ID NO: 12262 - DNA, 20 bp, synthetic construct
  misc_feature 1..20: note = chemically synthesized
  source 1..20: mol_type = other DNA
tttcagatcctttatagtaa

SEQ ID NO: 12263 - DNA, 20 bp, synthetic construct
  misc_feature 1..20: note = chemically synthesized
  source 1..20: mol_type = other DNA
ggcacaacttgcaacacaac

SEQ ID NO: 12264 - DNA, 20 bp, synthetic construct
  misc_feature 1..20: note = chemically synthesized
  source 1..20: mol_type = other DNA
gcacaacttgcaacacaaca

SEQ ID NO: 12265 - DNA, 20 bp, synthetic construct
  misc_feature 1..20: note = chemically synthesized
  source 1..20: mol_type = other DNA
acttgcaacacaacaaggaa

SEQ ID NO: 12266 - DNA, 20 bp, synthetic construct
  misc_feature 1..20: note = chemically synthesized
  source 1..20: mol_type = other DNA
cttgcaacacaacaaggaat

SEQ ID NO: 12267 - DNA, 20 bp, synthetic construct
  misc_feature 1..20: note = chemically synthesized
  source 1..20: mol_type = other DNA
ttgcaacacaacaaggaatg

SEQ ID NO: 12268 - DNA, 20 bp, synthetic construct
  misc_feature 1..20: note = chemically synthesized
  source 1..20: mol_type = other DNA
aacaaggaatggggtgattt

SEQ ID NO: 12269 - DNA, 20 bp, synthetic construct
  misc_feature 1..20: note = chemically synthesized
  source 1..20: mol_type = other DNA
tggggtgatttaagaaatta

SEQ ID NO: 12270 - DNA, 20 bp, synthetic construct
  misc_feature 1..20: note = chemically synthesized
  source 1..20: mol_type = other DNA
gatttaagaaattacagcac

SEQ ID NO: 12271 - DNA, 20 bp, synthetic construct
  misc_feature 1..20: note = chemically synthesized
  source 1..20: mol_type = other DNA
tgtgtgtgtgtgtgtgtgtg

SEQ ID NO: 12272 - DNA, 20 bp, synthetic construct
  misc_feature 1..20: note = chemically synthesized
  source 1..20: mol_type = other DNA
ttttgtttttttgttttttt

SEQ ID NO: 12273 - DNA, 20 bp, synthetic construct
  misc_feature 1..20: note = chemically synthesized
  source 1..20: mol_type = other DNA
tttgtttttttaagctttca

SEQ ID NO: 12274 - DNA, 20 bp, synthetic construct
  misc_feature 1..20: note = chemically synthesized
  source 1..20: mol_type = other DNA
aagctttcacagaataaaca

SEQ ID NO: 12275 - DNA, 20 bp, synthetic construct
  misc_feature 1..20: note = chemically synthesized
  source 1..20: mol_type = other DNA
gctttcacagaataaacaca

SEQ ID NO: 12276 - DNA, 20 bp, synthetic construct
  misc_feature 1..20: note = chemically synthesized
  source 1..20: mol_type = other DNA
cacagaataaacacagagaa

SEQ ID NO: 12277 - DNA, 20 bp, synthetic construct
  misc_feature 1..20: note = chemically synthesized
  source 1..20: mol_type = other DNA
acagaataaacacagagaac

SEQ ID NO: 12278 - DNA, 20 bp, synthetic construct
  misc_feature 1..20: note = chemically synthesized
  source 1..20: mol_type = other DNA
agaataaacacagagaacgg

SEQ ID NO: 12279 - DNA, 20 bp, synthetic construct
  misc_feature 1..20: note = chemically synthesized
  source 1..20: mol_type = other DNA
gaataaacacagagaacggg

SEQ ID NO: 12280 - DNA, 20 bp, synthetic construct
  misc_feature 1..20: note = chemically synthesized
  source 1..20: mol_type = other DNA
aataaacacagagaacggga

SEQ ID NO: 12281 - DNA, 20 bp, synthetic construct
  misc_feature 1..20: note = chemically synthesized
  source 1..20: mol_type = other DNA
cccctctgctcctgttcttg

SEQ ID NO: 12282 - DNA, 20 bp, synthetic construct
  misc_feature 1..20: note = chemically synthesized
  source 1..20: mol_type = other DNA
catatttgtgtttccaataa

SEQ ID NO: 12283 - DNA, 20 bp, synthetic construct
  misc_feature 1..20: note = chemically synthesized
  source 1..20: mol_type = other DNA
atatttgtgtttccaataaa

SEQ ID NO: 12284 - DNA, 20 bp, synthetic construct
  misc_feature 1..20: note = chemically synthesized
  source 1..20: mol_type = other DNA
tttacattaactgtctgtaa

SEQ ID NO: 12285 - DNA, 20 bp, synthetic construct
  misc_feature 1..20: note = chemically synthesized
  source 1..20: mol_type = other DNA
acattaactgtctgtaacag

SEQ ID NO: 12286 - DNA, 20 bp, synthetic construct
  misc_feature 1..20: note = chemically synthesized
  source 1..20: mol_type = other DNA
cattaactgtctgtaacagc

SEQ ID NO: 12287 - DNA, 20 bp, synthetic construct
  misc_feature 1..20: note = chemically synthesized
  source 1..20: mol_type = other DNA
ttaactgtctgtaacagcag

SEQ ID NO: 12288 - DNA, 20 bp, synthetic construct
  misc_feature 1..20: note = chemically synthesized
  source 1..20: mol_type = other DNA
ctgtctgtaacagcaggaga

SEQ ID NO: 12289 - DNA, 20 bp, synthetic construct
  misc_feature 1..20: note = chemically synthesized
  source 1..20: mol_type = other DNA
cacaatctccacatcacaca

SEQ ID NO: 12290 - DNA, 20 bp, synthetic construct
  misc_feature 1..20: note = chemically synthesized
  source 1..20: mol_type = other DNA
acaatctccacatcacacac

SEQ ID NO: 12291 - DNA, 20 bp, synthetic construct
  misc_feature 1..20: note = chemically synthesized
  source 1..20: mol_type = other DNA
aggatgatcttcatatcacg

SEQ ID NO: 12292 - DNA, 20 bp, synthetic construct
  misc_feature 1..20: note = chemically synthesized
  source 1..20: mol_type = other DNA
tctcaaaacattatttataa

SEQ ID NO: 12293 - DNA, 20 bp, synthetic construct
  misc_feature 1..20: note = chemically synthesized
  source 1..20: mol_type = other DNA
cattatttataaaagatgac

SEQ ID NO: 12294 - DNA, 20 bp, synthetic construct
  misc_feature 1..20: note = chemically synthesized
  source 1..20: mol_type = other DNA
attatttataaaagatgact

SEQ ID NO: 12295 - DNA, 20 bp, synthetic construct
  misc_feature 1..20: note = chemically synthesized
  source 1..20: mol_type = other DNA
catcttttctgtgtcaccac

SEQ ID NO: 12296 - DNA, 20 bp, synthetic construct
  misc_feature 1..20: note = chemically synthesized
  source 1..20: mol_type = other DNA
atcttttctgtgtcaccaca

SEQ ID NO: 12297 - DNA, 20 bp, synthetic construct
  misc_feature 1..20: note = chemically synthesized
  source 1..20: mol_type = other DNA
tcttttctgtgtcaccacaa

SEQ ID NO: 12298 - DNA, 20 bp, synthetic construct
  misc_feature 1..20: note = chemically synthesized
  source 1..20: mol_type = other DNA
caccacaagggtaatgtctg

SEQ ID NO: 12299 - DNA, 20 bp, synthetic construct
  misc_feature 1..20: note = chemically synthesized
  source 1..20: mol_type = other DNA
cacaagggtaatgtctgaag

SEQ ID NO: 12300 - DNA, 20 bp, synthetic construct
  misc_feature 1..20: note = chemically synthesized
  source 1..20: mol_type = other DNA
gggtaatgtctgaagaagtt

SEQ ID NO: 12301 - DNA, 20 bp, synthetic construct
  misc_feature 1..20: note = chemically synthesized
  source 1..20: mol_type = other DNA
ggtaatgtctgaagaagttt

SEQ ID NO: 12302 - DNA, 20 bp, synthetic construct
  misc_feature 1..20: note = chemically synthesized
  source 1..20: mol_type = other DNA
ctgaagaagtttgggatctt

SEQ ID NO: 12303 - DNA, 20 bp, synthetic construct
  misc_feature 1..20: note = chemically synthesized
  source 1..20: mol_type = other DNA
tgaagaagtttgggatcttt

SEQ ID NO: 12304 - DNA, 20 bp, synthetic construct
  misc_feature 1..20: note = chemically synthesized
  source 1..20: mol_type = other DNA
ctttaggatcttctacattt

SEQ ID NO: 12305 - DNA, 20 bp, synthetic construct
  misc_feature 1..20: note = chemically synthesized
  source 1..20: mol_type = other DNA
atatattttttttttccttt

SEQ ID NO: 12306 - DNA, 20 bp, synthetic construct
  misc_feature 1..20: note = chemically synthesized
  source 1..20: mol_type = other DNA
tttttccttttggctttcct

SEQ ID NO: 12307 - DNA, 20 bp, synthetic construct
  misc_feature 1..20: note = chemically synthesized
  source 1..20: mol_type = other DNA
tccttttggctttccttagt

SEQ ID NO: 12308 - DNA, 20 bp, synthetic construct
  misc_feature 1..20: note = chemically synthesized
  source 1..20: mol_type = other DNA
ttggctttccttagtaagtt

SEQ ID NO: 12309 - DNA, 20 bp, synthetic construct
  misc_feature 1..20: note = chemically synthesized
  source 1..20: mol_type = other DNA
gctttccttagtaagtttag

SEQ ID NO: 12310 - DNA, 20 bp, synthetic construct
  misc_feature 1..20: note = chemically synthesized
  source 1..20: mol_type = other DNA
tagtaagtttagcagccatg

SEQ ID NO: 12311 - DNA, 20 bp, synthetic construct
  misc_feature 1..20: note = chemically synthesized
  source 1..20: mol_type = other DNA
agtaagtttagcagccatgc

SEQ ID NO: 12312 - DNA, 20 bp, synthetic construct
  misc_feature 1..20: note = chemically synthesized
  source 1..20: mol_type = other DNA
gcgggccactgtgtttaatt

SEQ ID NO: 12313 - DNA, 20 bp, synthetic construct
  misc_feature 1..20: note = chemically synthesized
  source 1..20: mol_type = other DNA
gtgtttaattaagctttcaa

SEQ ID NO: 12314 - DNA, 20 bp, synthetic construct
  misc_feature 1..20: note = chemically synthesized
  source 1..20: mol_type = other DNA
cctgacaatgccaacaattg

SEQ ID NO: 12315 - DNA, 20 bp, synthetic construct
  misc_feature 1..20: note = chemically synthesized
  source 1..20: mol_type = other DNA
ctgacaatgccaacaattgt

SEQ ID NO: 12316 - DNA, 20 bp, synthetic construct
  misc_feature 1..20: note = chemically synthesized
  source 1..20: mol_type = other DNA
acaattgtaggacacttctg

SEQ ID NO: 12317 - DNA, 20 bp, synthetic construct
  misc_feature 1..20: note = chemically synthesized
  source 1..20: mol_type = other DNA
caatcatgcaatcactgtga

SEQ ID NO: 12318 - DNA, 20 bp, synthetic construct
  misc_feature 1..20: note = chemically synthesized
  source 1..20: mol_type = other DNA
gttctatttacaatttgtct

SEQ ID NO: 12319 - DNA, 20 bp, synthetic construct
  misc_feature 1..20: note = chemically synthesized
  source 1..20: mol_type = other DNA
tatttacaatttgtcttaga

SEQ ID NO: 12320 - DNA, 20 bp, synthetic construct
  misc_feature 1..20: note = chemically synthesized
  source 1..20: mol_type = other DNA
tttacaatttgtcttagaaa

SEQ ID NO: 12321 - DNA, 20 bp, synthetic construct
  misc_feature 1..20: note = chemically synthesized
  source 1..20: mol_type = other DNA
tgtactttgacaaaacatcc

SEQ ID NO: 12322 - DNA, 20 bp, synthetic construct
  misc_feature 1..20: note = chemically synthesized
  source 1..20: mol_type = other DNA
tgacaaaacatccaagctgc

SEQ ID NO: 12323 - DNA, 20 bp, synthetic construct
  misc_feature 1..20: note = chemically synthesized
  source 1..20: mol_type = other DNA
ctctgtcttatttacaaata

SEQ ID NO: 12324 - DNA, 20 bp, synthetic construct
  misc_feature 1..20: note = chemically synthesized
  source 1..20: mol_type = other DNA
ttacaaatacagcttgtata

SEQ ID NO: 12325 - DNA, 20 bp, synthetic construct
  misc_feature 1..20: note = chemically synthesized
  source 1..20: mol_type = other DNA
tacaaatacagcttgtatat

SEQ ID NO: 12326 - DNA, 20 bp, synthetic construct
  misc_feature 1..20: note = chemically synthesized
  source 1..20: mol_type = other DNA
cagcttgtatataggactcc

SEQ ID NO: 12327 - DNA, 20 bp, synthetic construct
  misc_feature 1..20: note = chemically synthesized
  source 1..20: mol_type = other DNA
actcccagtttcatgaacat

SEQ ID NO: 12328 - DNA, 20 bp, synthetic construct
  misc_feature 1..20: note = chemically synthesized
  source 1..20: mol_type = other DNA
gtttcatgaacattagtctt

SEQ ID NO: 12329 - DNA, 20 bp, synthetic construct
  misc_feature 1..20: note = chemically synthesized
  source 1..20: mol_type = other DNA
catgaacattagtctttgga

SEQ ID NO: 12330 - DNA, 20 bp, synthetic construct
  misc_feature 1..20: note = chemically synthesized
  source 1..20: mol_type = other DNA
gaacattagtctttggatag

SEQ ID NO: 12331 - DNA, 20 bp, synthetic construct
  misc_feature 1..20: note = chemically synthesized
  source 1..20: mol_type = other DNA
ggatagtggcctcacaaaca

SEQ ID NO: 12332 - DNA, 20 bp, synthetic construct
  misc_feature 1..20: note = chemically synthesized
  source 1..20: mol_type = other DNA
gatagtggcctcacaaacat

SEQ ID NO: 12333 - DNA, 20 bp, synthetic construct
  misc_feature 1..20: note = chemically synthesized
  source 1..20: mol_type = other DNA
taggctccctatgaaaatcc

SEQ ID NO: 12334 - DNA, 20 bp, synthetic construct
  misc_feature 1..20: note = chemically synthesized
  source 1..20: mol_type = other DNA
aggctccctatgaaaatcct

SEQ ID NO: 12335 - DNA, 20 bp, synthetic construct
  misc_feature 1..20: note = chemically synthesized
  source 1..20: mol_type = other DNA
tgaaaatcctaggtacttat

SEQ ID NO: 12336 - DNA, 20 bp, synthetic construct
  misc_feature 1..20: note = chemically synthesized
  source 1..20: mol_type = other DNA
aaacaatattctctactctc

SEQ ID NO: 12337 - DNA, 20 bp, synthetic construct
  misc_feature 1..20: note = chemically synthesized
  source 1..20: mol_type = other DNA
tctctactctctggattttg

SEQ ID NO: 12338 - DNA, 20 bp, synthetic construct
  misc_feature 1..20: note = chemically synthesized
  source 1..20: mol_type = other DNA
ctctactctctggattttga

SEQ ID NO: 12339 - DNA, 20 bp, synthetic construct
  misc_feature 1..20: note = chemically synthesized
  source 1..20: mol_type = other DNA
actctctggattttgaaggt

SEQ ID NO: 12340 - DNA, 20 bp, synthetic construct
  misc_feature 1..20: note = chemically synthesized
  source 1..20: mol_type = other DNA
aaggtaagtaaaatgttcac

SEQ ID NO: 12341 - DNA, 20 bp, synthetic construct
  misc_feature 1..20: note = chemically synthesized
  source 1..20: mol_type = other DNA
caccagtatattgttttttg

SEQ ID NO: 12342 - DNA, 20 bp, synthetic construct
  misc_feature 1..20: note = chemically synthesized
  source 1..20: mol_type = other DNA
cagtatattgttttttgtgg

SEQ ID NO: 12343 - DNA, 20 bp, synthetic construct
  misc_feature 1..20: note = chemically synthesized
  source 1..20: mol_type = other DNA
tatattgttttttgtggtag

SEQ ID NO: 12344 - DNA, 20 bp, synthetic construct
  misc_feature 1..20: note = chemically synthesized
  source 1..20: mol_type = other DNA
gccatgctgaaaattcactt

SEQ ID NO: 12345 - DNA, 20 bp, synthetic construct
  misc_feature 1..20: note = chemically synthesized
  source 1..20: mol_type = other DNA
atgctgaaaattcacttcag

SEQ ID NO: 12346 - DNA, 20 bp, synthetic construct
  misc_feature 1..20: note = chemically synthesized
  source 1..20: mol_type = other DNA
tgaaaattcacttcagaagt

SEQ ID NO: 12347 - DNA, 20 bp, synthetic construct
  misc_feature 1..20: note = chemically synthesized
  source 1..20: mol_type = other DNA
agaagtcagtcgtttttatt

SEQ ID NO: 12348 - DNA, 20 bp, synthetic construct
  misc_feature 1..20: note = chemically synthesized
  source 1..20: mol_type = other DNA
tattcagaatcacataaata

SEQ ID NO: 12349 - DNA, 20 bp, synthetic construct
  misc_feature 1..20: note = chemically synthesized
  source 1..20: mol_type = other DNA
ttcagaatcacataaataaa

SEQ ID NO: 12350 - DNA, 20 bp, synthetic construct
  misc_feature 1..20: note = chemically synthesized
  source 1..20: mol_type = other DNA
aatcacataaataaagagaa

SEQ ID NO: 12351 - DNA, 20 bp, synthetic construct
  misc_feature 1..20: note = chemically synthesized
  source 1..20: mol_type = other DNA
aataaagagaaaagaaaaat

SEQ ID NO: 12352 - DNA, 20 bp, synthetic construct
  misc_feature 1..20: note = chemically synthesized
  source 1..20: mol_type = other DNA
aaagagaaaagaaaaataag

SEQ ID NO: 12353 - DNA, 20 bp, synthetic construct
  misc_feature 1..20: note = chemically synthesized
  source 1..20: mol_type = other DNA
agaaaaataagtagtcataa

SEQ ID NO: 12354 - DNA, 20 bp, synthetic construct
  misc_feature 1..20: note = chemically synthesized
  source 1..20: mol_type = other DNA
taatagcatactataattta

SEQ ID NO: 12355 - DNA, 20 bp, synthetic construct
  misc_feature 1..20: note = chemically synthesized
  source 1..20: mol_type = other DNA
ctcatttacaattacaccat

SEQ ID NO: 12356 - DNA, 20 bp, synthetic construct
  misc_feature 1..20: note = chemically synthesized
  source 1..20: mol_type = other DNA
tcatttacaattacaccata

SEQ ID NO: 12357 - DNA, 20 bp, synthetic construct
  misc_feature 1..20: note = chemically synthesized
  source 1..20: mol_type = other DNA
aggtacacaaatacatcctc

SEQ ID NO: 12358 - DNA, 20 bp, synthetic construct
  misc_feature 1..20: note = chemically synthesized
  source 1..20: mol_type = other DNA
cacaaatacatcctccagtt

SEQ ID NO: 12359 - DNA, 20 bp, synthetic construct
  misc_feature 1..20: note = chemically synthesized
  source 1..20: mol_type = other DNA
tacatcctccagttcagtct

SEQ ID NO: 12360 - DNA, 20 bp, synthetic construct
  misc_feature 1..20: note = chemically synthesized
  source 1..20: mol_type = other DNA
tcctccagttcagtctgagc

SEQ ID NO: 12361 - DNA, 20 bp, synthetic construct
  misc_feature 1..20: note = chemically synthesized
  source 1..20: mol_type = other DNA
cctccagttcagtctgagct

SEQ ID NO: 12362 - DNA, 20 bp, synthetic construct
  misc_feature 1..20: note = chemically synthesized
  source 1..20: mol_type = other DNA
tccagttcagtctgagctag

SEQ ID NO: 12363 - DNA, 20 bp, synthetic construct
  misc_feature 1..20: note = chemically synthesized
  source 1..20: mol_type = other DNA
cagttcagtctgagctagga

SEQ ID NO: 12364 - DNA, 20 bp, synthetic construct
  misc_feature 1..20: note = chemically synthesized
  source 1..20: mol_type = other DNA
agtctgagctaggagagaat

SEQ ID NO: 12365 - DNA, 20 bp, synthetic construct
  misc_feature 1..20: note = chemically synthesized
  source 1..20: mol_type = other DNA
gagctaggagagaatcagaa

SEQ ID NO: 12366 - DNA, 20 bp, synthetic construct
  misc_feature 1..20: note = chemically synthesized
  source 1..20: mol_type = other DNA
agaatcagaatggatacaaa

SEQ ID NO: 12367 - DNA, 20 bp, synthetic construct
  misc_feature 1..20: note = chemically synthesized
  source 1..20: mol_type = other DNA
cagaatggatacaaaaagaa

SEQ ID NO: 12368 - DNA, 20 bp, synthetic construct
  misc_feature 1..20: note = chemically synthesized
  source 1..20: mol_type = other DNA
agaatggatacaaaaagaaa

SEQ ID NO: 12369 - DNA, 20 bp, synthetic construct
  misc_feature 1..20: note = chemically synthesized
  source 1..20: mol_type = other DNA
tggatacaaaaagaaaaggt

SEQ ID NO: 12370 - DNA, 20 bp, synthetic construct
  misc_feature 1..20: note = chemically synthesized
  source 1..20: mol_type = other DNA
ttcattttctaaattctgaa

SEQ ID NO: 12371 - DNA, 20 bp, synthetic construct
  misc_feature 1..20: note = chemically synthesized
  source 1..20: mol_type = other DNA
attgtatttgatttactttt

SEQ ID NO: 12372 - DNA, 20 bp, synthetic construct
  misc_feature 1..20: note = chemically synthesized
  source 1..20: mol_type = other DNA
tgtatttgatttacttttaa

SEQ ID NO: 12373 - DNA, 20 bp, synthetic construct
  misc_feature 1..20: note = chemically synthesized
  source 1..20: mol_type = other DNA
attactatatctcccttctt

SEQ ID NO: 12374 - DNA, 20 bp, synthetic construct
  misc_feature 1..20: note = chemically synthesized
  source 1..20: mol_type = other DNA
tactatatctcccttcttta

SEQ ID NO: 12375 - DNA, 20 bp, synthetic construct
  misc_feature 1..20: note = chemically synthesized
  source 1..20: mol_type = other DNA
atatatcattatctaaatac

SEQ ID NO: 12376 - DNA, 20 bp, synthetic construct
  misc_feature 1..20: note = chemically synthesized
  source 1..20: mol_type = other DNA
taaataccagctatactgtc

SEQ ID NO: 12377 - DNA, 20 bp, synthetic construct
  misc_feature 1..20: note = chemically synthesized
  source 1..20: mol_type = other DNA
aaataccagctatactgtct

SEQ ID NO: 12378 - DNA, 20 bp, synthetic construct
  misc_feature 1..20: note = chemically synthesized
  source 1..20: mol_type = other DNA
tgtctatgttcatgatttta

SEQ ID NO: 12379 - DNA, 20 bp, synthetic construct
  misc_feature 1..20: note = chemically synthesized
  source 1..20: mol_type = other DNA
tctatgttcatgattttaaa

SEQ ID NO: 12380 - DNA, 20 bp, synthetic construct
  misc_feature 1..20: note = chemically synthesized
  source 1..20: mol_type = other DNA
gaaaaaatgttatatatcaa

SEQ ID NO: 12381 - DNA, 20 bp, synthetic construct
  misc_feature 1..20: note = chemically synthesized
  source 1..20: mol_type = other DNA
aaaaaatgttatatatcaac

SEQ ID NO: 12382 - DNA, 20 bp, synthetic construct
  misc_feature 1..20: note = chemically synthesized
  source 1..20: mol_type = other DNA
aaaatgttatatatcaacag

SEQ ID NO: 12383 - DNA, 20 bp, synthetic construct
  misc_feature 1..20: note = chemically synthesized
  source 1..20: mol_type = other DNA
atgttatatatcaacaggag

SEQ ID NO: 12384 - DNA, 20 bp, synthetic construct
  misc_feature 1..20: note = chemically synthesized
  source 1..20: mol_type = other DNA
gcagactttactacatttta

SEQ ID NO: 12385 - DNA, 20 bp, synthetic construct
  misc_feature 1..20: note = chemically synthesized
  source 1..20: mol_type = other DNA
cagactttactacattttat

SEQ ID NO: 12386 - DNA, 20 bp, synthetic construct
  misc_feature 1..20: note = chemically synthesized
  source 1..20: mol_type = other DNA
gacttgtcatattttttctc

SEQ ID NO: 12387 - DNA, 20 bp, synthetic construct
  misc_feature 1..20: note = chemically synthesized
  source 1..20: mol_type = other DNA
tttttctctagtctctcaaa

SEQ ID NO: 12388 - DNA, 20 bp, synthetic construct
  misc_feature 1..20: note = chemically synthesized
  source 1..20: mol_type = other DNA
tcaaaaagctaactttatga

SEQ ID NO: 12389 - DNA, 20 bp, synthetic construct
  misc_feature 1..20: note = chemically synthesized
  source 1..20: mol_type = other DNA
gacagcccaaacctaattta

SEQ ID NO: 12390 - DNA, 20 bp, synthetic construct
  misc_feature 1..20: note = chemically synthesized
  source 1..20: mol_type = other DNA
taaagattcctatgtgcaat

SEQ ID NO: 12391 - DNA, 20 bp, synthetic construct
  misc_feature 1..20: note = chemically synthesized
  source 1..20: mol_type = other DNA
aaacctcaaatctgacatga

SEQ ID NO: 12392 - DNA, 20 bp, synthetic construct
  misc_feature 1..20: note = chemically synthesized
  source 1..20: mol_type = other DNA
aacctcaaatctgacatgat

SEQ ID NO: 12393 - DNA, 20 bp, synthetic construct
  misc_feature 1..20: note = chemically synthesized
  source 1..20: mol_type = other DNA
tgacatgatgggataatgtt

SEQ ID NO: 12394 - DNA, 20 bp, synthetic construct
  misc_feature 1..20: note = chemically synthesized
  source 1..20: mol_type = other DNA
gacatgatgggataatgttt

SEQ ID NO: 12395 - DNA, 20 bp, synthetic construct
  misc_feature 1..20: note = chemically synthesized
  source 1..20: mol_type = other DNA
aatgtttgggtcttttctat

SEQ ID NO: 12396 - DNA, 20 bp, synthetic construct
  misc_feature 1..20: note = chemically synthesized
  source 1..20: mol_type = other DNA
atgtttgggtcttttctata

SEQ ID NO: 12397 - DNA, 20 bp, synthetic construct
  misc_feature 1..20: note = chemically synthesized
  source 1..20: mol_type = other DNA
tgtttgggtcttttctataa

SEQ ID NO: 12398 - DNA, 20 bp, synthetic construct
  misc_feature 1..20: note = chemically synthesized
  source 1..20: mol_type = other DNA
gggtcttttctataagggaa

SEQ ID NO: 12399 - DNA, 20 bp, synthetic construct
  misc_feature 1..20: note = chemically synthesized
  source 1..20: mol_type = other DNA
tcttttctataagggaacag

SEQ ID NO: 12400 - DNA, 20 bp, synthetic construct
  misc_feature 1..20: note = chemically synthesized
  source 1..20: mol_type = other DNA
gggaacagcagtttcacatt

SEQ ID NO: 12401 - DNA, 20 bp, synthetic construct
  misc_feature 1..20: note = chemically synthesized
  source 1..20: mol_type = other DNA
ttccccccatcataaaatat

SEQ ID NO: 12402 - DNA, 20 bp, synthetic construct
  misc_feature 1..20: note = chemically synthesized
  source 1..20: mol_type = other DNA
aaaatatgagactaaaaaaa

SEQ ID NO: 12403 - DNA, 20 bp, synthetic construct
  misc_feature 1..20: note = chemically synthesized
  source 1..20: mol_type = other DNA
caaaacaaaacccctattga

SEQ ID NO: 12404 - DNA, 20 bp, synthetic construct
  misc_feature 1..20: note = chemically synthesized
  source 1..20: mol_type = other DNA
ctattgaaagctctgactgc

SEQ ID NO: 12405 - DNA, 20 bp, synthetic construct
  misc_feature 1..20: note = chemically synthesized
  source 1..20: mol_type = other DNA
aaagctctgactgcaagtca

SEQ ID NO: 12406 - DNA, 20 bp, synthetic construct
  misc_feature 1..20: note = chemically synthesized
  source 1..20: mol_type = other DNA
aagctctgactgcaagtcaa

SEQ ID NO: 12407 - DNA, 20 bp, synthetic construct
  misc_feature 1..20: note = chemically synthesized
  source 1..20: mol_type = other DNA
gtcaaaggctgctgatatct

SEQ ID NO: 12408 - DNA, 20 bp, synthetic construct
  misc_feature 1..20: note = chemically synthesized
  source 1..20: mol_type = other DNA
tcaaaggctgctgatatctg

SEQ ID NO: 12409 - DNA, 20 bp, synthetic construct
  misc_feature 1..20: note = chemically synthesized
  source 1..20: mol_type = other DNA
caaaggctgctgatatctga

SEQ ID NO: 12410 - DNA, 20 bp, synthetic construct
  misc_feature 1..20: note = chemically synthesized
  source 1..20: mol_type = other DNA
aggctgctgatatctgaggg

SEQ ID NO: 12411 - DNA, 20 bp, synthetic construct
  misc_feature 1..20: note = chemically synthesized
  source 1..20: mol_type = other DNA
tgacacacatattgatgaac

SEQ ID NO: 12412 - DNA, 20 bp, synthetic construct
  misc_feature 1..20: note = chemically synthesized
  source 1..20: mol_type = other DNA
gacacacatattgatgaact

SEQ ID NO: 12413 - DNA, 20 bp, synthetic construct
  misc_feature 1..20: note = chemically synthesized
  source 1..20: mol_type = other DNA
gaactgggcccacacaacat

SEQ ID NO: 12414 - DNA, 20 bp, synthetic construct
  misc_feature 1..20: note = chemically synthesized
  source 1..20: mol_type = other DNA
caacataagctgctaattcc

SEQ ID NO: 12415 - DNA, 20 bp, synthetic construct
  misc_feature 1..20: note = chemically synthesized
  source 1..20: mol_type = other DNA
tactacttcaatgatctcaa

SEQ ID NO: 12416 - DNA, 20 bp, synthetic construct
  misc_feature 1..20: note = chemically synthesized
  source 1..20: mol_type = other DNA
atatttaaataaaatgaaaa

SEQ ID NO: 12417 - DNA, 20 bp, synthetic construct
  misc_feature 1..20: note = chemically synthesized
  source 1..20: mol_type = other DNA
ctgattaacatctatgtgta

SEQ ID NO: 12418 - DNA, 20 bp, synthetic construct
  misc_feature 1..20: note = chemically synthesized
  source 1..20: mol_type = other DNA
gtacagctcatatgtgtacg

SEQ ID NO: 12419 - DNA, 20 bp, synthetic construct
  misc_feature 1..20: note = chemically synthesized
  source 1..20: mol_type = other DNA
ctcatatgtgtacgtggatg

SEQ ID NO: 12420 - DNA, 20 bp, synthetic construct
  misc_feature 1..20: note = chemically synthesized
  source 1..20: mol_type = other DNA
atatgtgtacgtggatgaag

SEQ ID NO: 12421 - DNA, 20 bp, synthetic construct
  misc_feature 1..20: note = chemically synthesized
  source 1..20: mol_type = other DNA
tatgtgtacgtggatgaagt

SEQ ID NO: 12422 - DNA, 20 bp, synthetic construct
  misc_feature 1..20: note = chemically synthesized
  source 1..20: mol_type = other DNA
atgtgtacgtggatgaagtg

SEQ ID NO: 12423 - DNA, 20 bp, synthetic construct
  misc_feature 1..20: note = chemically synthesized
  source 1..20: mol_type = other DNA
tgtgtacgtggatgaagtgg

SEQ ID NO: 12424 - DNA, 20 bp, synthetic construct
  misc_feature 1..20: note = chemically synthesized
  source 1..20: mol_type = other DNA
tgtacgtggatgaagtgggg

SEQ ID NO: 12425 - DNA, 20 bp, synthetic construct
  misc_feature 1..20: note = chemically synthesized
  source 1..20: mol_type = other DNA
gcacatacccatctattcac

SEQ ID NO: 12426 - DNA, 20 bp, synthetic construct
  misc_feature 1..20: note = chemically synthesized
  source 1..20: mol_type = other DNA
cacatacccatctattcacc

SEQ ID NO: 12427 - DNA, 20 bp, synthetic construct
  misc_feature 1..20: note = chemically synthesized
  source 1..20: mol_type = other DNA
ccatctattcaccaggtaaa

SEQ ID NO: 12428 - DNA, 20 bp, synthetic construct
  misc_feature 1..20: note = chemically synthesized
  source 1..20: mol_type = other DNA
agaatcctctaaaaaatact

SEQ ID NO: 12429 - DNA, 20 bp, synthetic construct
  misc_feature 1..20: note = chemically synthesized
  source 1..20: mol_type = other DNA
cctctaaaaaatactcagtt

SEQ ID NO: 12430 - DNA, 20 bp, synthetic construct
  misc_feature 1..20: note = chemically synthesized
  source 1..20: mol_type = other DNA
ctctaaaaaatactcagttt

SEQ ID NO: 12431 - DNA, 20 bp, synthetic construct
  misc_feature 1..20: note = chemically synthesized
  source 1..20: mol_type = other DNA
aaaaaatactcagtttgggc

SEQ ID NO: 12432 - DNA, 20 bp, synthetic construct
  misc_feature 1..20: note = chemically synthesized
  source 1..20: mol_type = other DNA
aaaaatactcagtttgggcc

SEQ ID NO: 12433 - DNA, 20 bp, synthetic construct
  misc_feature 1..20: note = chemically synthesized
  source 1..20: mol_type = other DNA
tactcagtttgggccaggtg

SEQ ID NO: 12434 - DNA, 20 bp, synthetic construct
  misc_feature 1..20: note = chemically synthesized
  source 1..20: mol_type = other DNA
tgggccaggtgcggtcgctc

SEQ ID NO: 12435 - DNA, 20 bp, synthetic construct
  misc_feature 1..20: note = chemically synthesized
  source 1..20: mol_type = other DNA
gtcgctcaagcctgtaatcc

SEQ ID NO: 12436 - DNA, 20 bp, synthetic construct
  misc_feature 1..20: note = chemically synthesized
  source 1..20: mol_type = other DNA
agcctgtaatcccagcactt

SEQ ID NO: 12437 - DNA, 20 bp, synthetic construct
  misc_feature 1..20: note = chemically synthesized
  source 1..20: mol_type = other DNA
gcctgtaatcccagcacttt

SEQ ID NO: 12438 - DNA, 20 bp, synthetic construct
  misc_feature 1..20: note = chemically synthesized
  source 1..20: mol_type = other DNA
ctgtaatcccagcactttgg

SEQ ID NO: 12439 - DNA, 20 bp, synthetic construct
  misc_feature 1..20: note = chemically synthesized
  source 1..20: mol_type = other DNA
tgtaatcccagcactttggg

SEQ ID NO: 12440 - DNA, 20 bp, synthetic construct
  misc_feature 1..20: note = chemically synthesized
  source 1..20: mol_type = other DNA
tcccagcactttgggaggcc

SEQ ID NO: 12441 - DNA, 20 bp, synthetic construct
  misc_feature 1..20: note = chemically synthesized
  source 1..20: mol_type = other DNA
agcactttgggaggccaagc

SEQ ID NO: 12442 - DNA, 20 bp, synthetic construct
  misc_feature 1..20: note = chemically synthesized
  source 1..20: mol_type = other DNA
gcactttgggaggccaagcc

SEQ ID NO: 12443 - DNA, 20 bp, synthetic construct
  misc_feature 1..20: note = chemically synthesized
  source 1..20: mol_type = other DNA
ctttgggaggccaagccagg

SEQ ID NO: 12444 - DNA, 20 bp, synthetic construct
  misc_feature 1..20: note = chemically synthesized
  source 1..20: mol_type = other DNA
ccaagccaggtggatcacct

SEQ ID NO: 12445 - DNA, 20 bp, synthetic construct
  misc_feature 1..20: note = chemically synthesized
  source 1..20: mol_type = other DNA
caagccaggtggatcacctg

SEQ ID NO: 12446 - DNA, 20 bp, synthetic construct
  misc_feature 1..20: note = chemically synthesized
  source 1..20: mol_type = other DNA
ccaggtggatcacctgaggt

SEQ ID NO: 12447 - DNA, 20 bp, synthetic construct
  misc_feature 1..20: note = chemically synthesized
  source 1..20: mol_type = other DNA
caggtggatcacctgaggtc

SEQ ID NO: 12448 - DNA, 20 bp, synthetic construct
  misc_feature 1..20: note = chemically synthesized
  source 1..20: mol_type = other DNA
ggtggatcacctgaggtcag

SEQ ID NO: 12449 - DNA, 20 bp, synthetic construct
  misc_feature 1..20: note = chemically synthesized
  source 1..20: mol_type = other DNA
tcacctgaggtcaggagttc

SEQ ID NO: 12450 - DNA, 20 bp, synthetic construct
  misc_feature 1..20: note = chemically synthesized
  source 1..20: mol_type = other DNA
tgaggtcaggagttcaagac

SEQ ID NO: 12451 - DNA, 20 bp, synthetic construct
  misc_feature 1..20: note = chemically synthesized
  source 1..20: mol_type = other DNA
tcaggagttcaagaccagcc

SEQ ID NO: 12452 - DNA, 20 bp, synthetic construct
  misc_feature 1..20: note = chemically synthesized
  source 1..20: mol_type = other DNA
caagaccagcctggccaaca

SEQ ID NO: 12453 - DNA, 20 bp, synthetic construct
  misc_feature 1..20: note = chemically synthesized
  source 1..20: mol_type = other DNA
ctactgaaaatacaaaaaac

SEQ ID NO: 12454 - DNA, 20 bp, synthetic construct
  misc_feature 1..20: note = chemically synthesized
  source 1..20: mol_type = other DNA
tgaaaatacaaaaaactagc

SEQ ID NO: 12455 - DNA, 20 bp, synthetic construct
  misc_feature 1..20: note = chemically synthesized
  source 1..20: mol_type = other DNA
gaaaatacaaaaaactagct

SEQ ID NO: 12456 - DNA, 20 bp, synthetic construct
  misc_feature 1..20: note = chemically synthesized
  source 1..20: mol_type = other DNA
tacaaaaaactagctgggcg

SEQ ID NO: 12457 - DNA, 20 bp, synthetic construct
  misc_feature 1..20: note = chemically synthesized
  source 1..20: mol_type = other DNA
aaaaaactagctgggcgtag

SEQ ID NO: 12458 - DNA, 20 bp, synthetic construct
  misc_feature 1..20: note = chemically synthesized
  source 1..20: mol_type = other DNA
gtggcacacgcctgtaatcc

SEQ ID NO: 12459 - DNA, 20 bp, synthetic construct
  misc_feature 1..20: note = chemically synthesized
  source 1..20: mol_type = other DNA
cgcctgtaatcccagctact

SEQ ID NO: 12460 - DNA, 20 bp, synthetic construct
  misc_feature 1..20: note = chemically synthesized
  source 1..20: mol_type = other DNA
gcctgtaatcccagctactt

SEQ ID NO: 12461 - DNA, 20 bp, synthetic construct
  misc_feature 1..20: note = chemically synthesized
  source 1..20: mol_type = other DNA
ctgtaatcccagctacttgg

SEQ ID NO: 12462 - DNA, 20 bp, synthetic construct
  misc_feature 1..20: note = chemically synthesized
  source 1..20: mol_type = other DNA
tgtaatcccagctacttggg

SEQ ID NO: 12463 - DNA, 20 bp, synthetic construct
  misc_feature 1..20: note = chemically synthesized
  source 1..20: mol_type = other DNA
tcccagctacttgggaggct

SEQ ID NO: 12464 - DNA, 20 bp, synthetic construct
  misc_feature 1..20: note = chemically synthesized
  source 1..20: mol_type = other DNA
cccagctacttgggaggctg

SEQ ID NO: 12465 - DNA, 20 bp, synthetic construct
  misc_feature 1..20: note = chemically synthesized
  source 1..20: mol_type = other DNA
agctacttgggaggctgagg

SEQ ID NO: 12466 - DNA, 20 bp, synthetic construct
  misc_feature 1..20: note = chemically synthesized
  source 1..20: mol_type = other DNA
gctacttgggaggctgaggc

SEQ ID NO: 12467 - DNA, 20 bp, synthetic construct
  misc_feature 1..20: note = chemically synthesized
  source 1..20: mol_type = other DNA
tacttgggaggctgaggcag

SEQ ID NO: 12468 - DNA, 20 bp, synthetic construct
  misc_feature 1..20: note = chemically synthesized
  source 1..20: mol_type = other DNA
gcaggagaatcgcttgaacc

SEQ ID NO: 12469 - DNA, 20 bp, synthetic construct
  misc_feature 1..20: note = chemically synthesized
  source 1..20: mol_type = other DNA
caggagaatcgcttgaacct

SEQ ID NO: 12470 - DNA, 20 bp, synthetic construct
  misc_feature 1..20: note = chemically synthesized
  source 1..20: mol_type = other DNA
ggagaatcgcttgaacctag

SEQ ID NO: 12471 - DNA, 20 bp, synthetic construct
  misc_feature 1..20: note = chemically synthesized
  source 1..20: mol_type = other DNA
gagaatcgcttgaacctagg

SEQ ID NO: 12472 - DNA, 20 bp, synthetic construct
  misc_feature 1..20: note = chemically synthesized
  source 1..20: mol_type = other DNA
aatcgcttgaacctaggagg

SEQ ID NO: 12473 - DNA, 20 bp, synthetic construct
  misc_feature 1..20: note = chemically synthesized
  source 1..20: mol_type = other DNA
tcgcttgaacctaggaggca

SEQ ID NO: 12474 - DNA, 20 bp, synthetic construct
  misc_feature 1..20: note = chemically synthesized
  source 1..20: mol_type = other DNA
cgcttgaacctaggaggcag

SEQ ID NO: 12475 - DNA, 20 bp, synthetic construct
  misc_feature 1..20: note = chemically synthesized
  source 1..20: mol_type = other DNA
aacctaggaggcagaggttg

SEQ ID NO: 12476 - DNA, 20 bp, synthetic construct
  misc_feature 1..20: note = chemically synthesized
  source 1..20: mol_type = other DNA
taggaggcagaggttgcagt

SEQ ID NO: 12477 - DNA, 20 bp, synthetic construct
  misc_feature 1..20: note = chemically synthesized
  source 1..20: mol_type = other DNA
aaaatcatgccactgcactc

SEQ ID NO: 12478 - DNA, 20 bp, synthetic construct
  misc_feature 1..20: note = chemically synthesized
  source 1..20: mol_type = other DNA
catgccactgcactccagcc

SEQ ID NO: 12479 - DNA, 20 bp, synthetic construct
  misc_feature 1..20: note = chemically synthesized
  source 1..20: mol_type = other DNA
atgccactgcactccagcct

SEQ ID NO: 12480 - DNA, 20 bp, synthetic construct
  misc_feature 1..20: note = chemically synthesized
  source 1..20: mol_type = other DNA
tgcactccagcctgggcaac

SEQ ID NO: 12481 - DNA, 20 bp, synthetic construct
  misc_feature 1..20: note = chemically synthesized
  source 1..20: mol_type = other DNA
cactccagcctgggcaacaa

SEQ ID NO: 12482 - DNA, 20 bp, synthetic construct
  misc_feature 1..20: note = chemically synthesized
  source 1..20: mol_type = other DNA
aaaaaaaaaaaaaaaaaact

SEQ ID NO: 12483 - DNA, 20 bp, synthetic construct
  misc_feature 1..20: note = chemically synthesized
  source 1..20: mol_type = other DNA
aaaaaaaaaaaaactcagct

SEQ ID NO: 12484 - DNA, 20 bp, synthetic construct
  misc_feature 1..20: note = chemically synthesized
  source 1..20: mol_type = other DNA
aaaaaaaaaaactcagcttg

SEQ ID NO: 12485 - DNA, 20 bp, synthetic construct
  misc_feature 1..20: note = chemically synthesized
  source 1..20: mol_type = other DNA
aaaaaaaaactcagcttgga

SEQ ID NO: 12486 - DNA, 20 bp, synthetic construct
  misc_feature 1..20: note = chemically synthesized
  source 1..20: mol_type = other DNA
aaaaaaaactcagcttggag

SEQ ID NO: 12487 - DNA, 20 bp, synthetic construct
  misc_feature 1..20: note = chemically synthesized
  source 1..20: mol_type = other DNA
aactcagcttggagaggcct

SEQ ID NO: 12488 - DNA, 20 bp, synthetic construct
  misc_feature 1..20: note = chemically synthesized
  source 1..20: mol_type = other DNA
agcttggagaggcctgagta

SEQ ID NO: 12489 - DNA, 20 bp, synthetic construct
  misc_feature 1..20: note = chemically synthesized
  source 1..20: mol_type = other DNA
aaatgcataccattttactc

SEQ ID NO: 12490 - DNA, 20 bp, synthetic construct
  misc_feature 1..20: note = chemically synthesized
  source 1..20: mol_type = other DNA
accattttactcaagattta

SEQ ID NO: 12491 - DNA, 20 bp, synthetic construct
  misc_feature 1..20: note = chemically synthesized
  source 1..20: mol_type = other DNA
tgccttattctcctatctga

SEQ ID NO: 12492 - DNA, 20 bp, synthetic construct
  misc_feature 1..20: note = chemically synthesized
  source 1..20: mol_type = other DNA
atctgaaagtcccgaattct

SEQ ID NO: 12493 - DNA, 20 bp, synthetic construct
  misc_feature 1..20: note = chemically synthesized
  source 1..20: mol_type = other DNA
attctaagctttatttatct

SEQ ID NO: 12494 - DNA, 20 bp, synthetic construct
  misc_feature 1..20: note = chemically synthesized
  source 1..20: mol_type = other DNA
ttctaagctttatttatctt

SEQ ID NO: 12495 - DNA, 20 bp, synthetic construct
  misc_feature 1..20: note = chemically synthesized
  source 1..20: mol_type = other DNA
taagctttatttatcttagg

SEQ ID NO: 12496 - DNA, 20 bp, synthetic construct
  misc_feature 1..20: note = chemically synthesized
  source 1..20: mol_type = other DNA
gctttatttatcttaggaag

SEQ ID NO: 12497 - DNA, 20 bp, synthetic construct
  misc_feature 1..20: note = chemically synthesized
  source 1..20: mol_type = other DNA
cttgcttcctgcctataaaa

SEQ ID NO: 12498 - DNA, 20 bp, synthetic construct
  misc_feature 1..20: note = chemically synthesized
  source 1..20: mol_type = other DNA
ttcctgcctataaaatagta

SEQ ID NO: 12499 - DNA, 20 bp, synthetic construct
  misc_feature 1..20: note = chemically synthesized
  source 1..20: mol_type = other DNA
tcctgcctataaaatagtac

SEQ ID NO: 12500 - DNA, 20 bp, synthetic construct
  misc_feature 1..20: note = chemically synthesized
  source 1..20: mol_type = other DNA
tataaaatagtacaggctca

SEQ ID NO: 12501 - DNA, 20 bp, synthetic construct
  misc_feature 1..20: note = chemically synthesized
  source 1..20: mol_type = other DNA
caacttacatcactttaata

SEQ ID NO: 12502 - DNA, 20 bp, synthetic construct
  misc_feature 1..20: note = chemically synthesized
  source 1..20: mol_type = other DNA
ttaataaagcctttcctacc

SEQ ID NO: 12503 - DNA, 20 bp, synthetic construct
  misc_feature 1..20: note = chemically synthesized
  source 1..20: mol_type = other DNA
ttaaatgactaccttttatg

SEQ ID NO: 12504 - DNA, 20 bp, synthetic construct
  misc_feature 1..20: note = chemically synthesized
  source 1..20: mol_type = other DNA
ggttgccaaacacattcttc

SEQ ID NO: 12505 - DNA, 20 bp, synthetic construct
  misc_feature 1..20: note = chemically synthesized
  source 1..20: mol_type = other DNA
ttgccaaacacattcttcta

SEQ ID NO: 12506 - DNA, 20 bp, synthetic construct
  misc_feature 1..20: note = chemically synthesized
  source 1..20: mol_type = other DNA
tatatctctttccttaatac

SEQ ID NO: 12507 - DNA, 20 bp, synthetic construct
  misc_feature 1..20: note = chemically synthesized
  source 1..20: mol_type = other DNA
atatctctttccttaataca

SEQ ID NO: 12508 - DNA, 20 bp, synthetic construct
  misc_feature 1..20: note = chemically synthesized
  source 1..20: mol_type = other DNA
gtttccttcctcatcataaa

SEQ ID NO: 12509 - DNA, 20 bp, synthetic construct
  misc_feature 1..20: note = chemically synthesized
  source 1..20: mol_type = other DNA
cttcctcatcataaaaagaa

SEQ ID NO: 12510 - DNA, 20 bp, synthetic construct
  misc_feature 1..20: note = chemically synthesized
  source 1..20: mol_type = other DNA
cctcatcataaaaagaaaag

SEQ ID NO: 12511 - DNA, 20 bp, synthetic construct
  misc_feature 1..20: note = chemically synthesized
  source 1..20: mol_type = other DNA
cataaaaagaaaagcagact

SEQ ID NO: 12512 - DNA, 20 bp, synthetic construct
  misc_feature 1..20: note = chemically synthesized
  source 1..20: mol_type = other DNA
aaagcagacttggaattgtg

SEQ ID NO: 12513 - DNA, 20 bp, synthetic construct
  misc_feature 1..20: note = chemically synthesized
  source 1..20: mol_type = other DNA
ggaattgtgcagacgtgctt

SEQ ID NO: 12514 - DNA, 20 bp, synthetic construct
  misc_feature 1..20: note = chemically synthesized
  source 1..20: mol_type = other DNA
aattgtgcagacgtgcttta

SEQ ID NO: 12515 - DNA, 20 bp, synthetic construct
  misc_feature 1..20: note = chemically synthesized
  source 1..20: mol_type = other DNA
gcagacgtgctttagagaaa

SEQ ID NO: 12516 - DNA, 20 bp, synthetic construct
  misc_feature 1..20: note = chemically synthesized
  source 1..20: mol_type = other DNA
cagacgtgctttagagaaat

SEQ ID NO: 12517 - DNA, 20 bp, synthetic construct
  misc_feature 1..20: note = chemically synthesized
  source 1..20: mol_type = other DNA
cgtgctttagagaaatgggc

SEQ ID NO: 12518 - DNA, 20 bp, synthetic construct
  misc_feature 1..20: note = chemically synthesized
  source 1..20: mol_type = other DNA
gtgctttagagaaatgggct

SEQ ID NO: 12519 - DNA, 20 bp, synthetic construct
  misc_feature 1..20: note = chemically synthesized
  source 1..20: mol_type = other DNA
tgctttagagaaatgggctg

SEQ ID NO: 12520 - DNA, 20 bp, synthetic construct
  misc_feature 1..20: note = chemically synthesized
  source 1..20: mol_type = other DNA
gctttagagaaatgggctgg

SEQ ID NO: 12521 - DNA, 20 bp, synthetic construct
  misc_feature 1..20: note = chemically synthesized
  source 1..20: mol_type = other DNA
atgggctgggggtacacaca

SEQ ID NO: 12522 - DNA, 20 bp, synthetic construct
  misc_feature 1..20: note = chemically synthesized
  source 1..20: mol_type = other DNA
gtacacacacagccgtcttc

SEQ ID NO: 12523 - DNA, 20 bp, synthetic construct
  misc_feature 1..20: note = chemically synthesized
  source 1..20: mol_type = other DNA
cgtcttccagaacttcgctt

SEQ ID NO: 12524 - DNA, 20 bp, synthetic construct
  misc_feature 1..20: note = chemically synthesized
  source 1..20: mol_type = other DNA
gtcttccagaacttcgcttc

SEQ ID NO: 12525 - DNA, 20 bp, synthetic construct
  misc_feature 1..20: note = chemically synthesized
  source 1..20: mol_type = other DNA
tcttccagaacttcgcttca

SEQ ID NO: 12526 - DNA, 20 bp, synthetic construct
  misc_feature 1..20: note = chemically synthesized
  source 1..20: mol_type = other DNA
cttccagaacttcgcttcag

SEQ ID NO: 12527 - DNA, 20 bp, synthetic construct
  misc_feature 1..20: note = chemically synthesized
  source 1..20: mol_type = other DNA
acttcgcttcaggggcacct

SEQ ID NO: 12528 - DNA, 20 bp, synthetic construct
  misc_feature 1..20: note = chemically synthesized
  source 1..20: mol_type = other DNA
cttcgcttcaggggcacctg

SEQ ID NO: 12529 - DNA, 20 bp, synthetic construct
  misc_feature 1..20: note = chemically synthesized
  source 1..20: mol_type = other DNA
ttcgcttcaggggcacctga

SEQ ID NO: 12530 - DNA, 20 bp, synthetic construct
  misc_feature 1..20: note = chemically synthesized
  source 1..20: mol_type = other DNA
cttcaggggcacctgagggc

SEQ ID NO: 12531 - DNA, 20 bp, synthetic construct
  misc_feature 1..20: note = chemically synthesized
  source 1..20: mol_type = other DNA
tcaggggcacctgagggcca

SEQ ID NO: 12532 - DNA, 20 bp, synthetic construct
  misc_feature 1..20: note = chemically synthesized
  source 1..20: mol_type = other DNA
gcacctgagggccagagcgt

SEQ ID NO: 12533 - DNA, 20 bp, synthetic construct
  misc_feature 1..20: note = chemically synthesized
  source 1..20: mol_type = other DNA
gcgtcggaatttatgtgcaa

SEQ ID NO: 12534 - DNA, 20 bp, synthetic construct
  misc_feature 1..20: note = chemically synthesized
  source 1..20: mol_type = other DNA
tcggaatttatgtgcaatgg

SEQ ID NO: 12535 - DNA, 20 bp, synthetic construct
  misc_feature 1..20: note = chemically synthesized
  source 1..20: mol_type = other DNA
gtagaatgttaacttcacca

SEQ ID NO: 12536 - DNA, 20 bp, synthetic construct
  misc_feature 1..20: note = chemically synthesized
  source 1..20: mol_type = other DNA
tagaatgttaacttcaccat

SEQ ID NO: 12537 - DNA, 20 bp, synthetic construct
  misc_feature 1..20: note = chemically synthesized
  source 1..20: mol_type = other DNA
aattcattactgtgaattat

SEQ ID NO: 12538 - DNA, 20 bp, synthetic construct
  misc_feature 1..20: note = chemically synthesized
  source 1..20: mol_type = other DNA
tcattactgtgaattatgag

SEQ ID NO: 12539 - DNA, 20 bp, synthetic construct
  misc_feature 1..20: note = chemically synthesized
  source 1..20: mol_type = other DNA
attatgagaagtcgtgattc

SEQ ID NO: 12540 - DNA, 20 bp, synthetic construct
  misc_feature 1..20: note = chemically synthesized
  source 1..20: mol_type = other DNA
agttactgacatctcacttt

SEQ ID NO: 12541 - DNA, 20 bp, synthetic construct
  misc_feature 1..20: note = chemically synthesized
  source 1..20: mol_type = other DNA
gtgaccacactatttatgtt

SEQ ID NO: 12542 - DNA, 20 bp, synthetic construct
  misc_feature 1..20: note = chemically synthesized
  source 1..20: mol_type = other DNA
ccacactatttatgttcagc

SEQ ID NO: 12543 - DNA, 20 bp, synthetic construct
  misc_feature 1..20: note = chemically synthesized
  source 1..20: mol_type = other DNA
tatttatgttcagccagttc

SEQ ID NO: 12544 - DNA, 20 bp, synthetic construct
  misc_feature 1..20: note = chemically synthesized
  source 1..20: mol_type = other DNA
atttatgttcagccagttcc

SEQ ID NO: 12545 - DNA, 20 bp, synthetic construct
  misc_feature 1..20: note = chemically synthesized
  source 1..20: mol_type = other DNA
tttatgttcagccagttcca

SEQ ID NO: 12546 - DNA, 20 bp, synthetic construct
  misc_feature 1..20: note = chemically synthesized
  source 1..20: mol_type = other DNA
atgttcagccagttccaggg

SEQ ID NO: 12547 - DNA, 20 bp, synthetic construct
  misc_feature 1..20: note = chemically synthesized
  source 1..20: mol_type = other DNA
tgttcagccagttccagggt

SEQ ID NO: 12548 - DNA, 20 bp, synthetic construct
  misc_feature 1..20: note = chemically synthesized
  source 1..20: mol_type = other DNA
agccagttccagggtgggaa

SEQ ID NO: 12549 - DNA, 20 bp, synthetic construct
  misc_feature 1..20: note = chemically synthesized
  source 1..20: mol_type = other DNA
gccagttccagggtgggaac

SEQ ID NO: 12550 - DNA, 20 bp, synthetic construct
  misc_feature 1..20: note = chemically synthesized
  source 1..20: mol_type = other DNA
caggtgattaaacacaatga

SEQ ID NO: 12551 - DNA, 20 bp, synthetic construct
  misc_feature 1..20: note = chemically synthesized
  source 1..20: mol_type = other DNA
taaacacaatgaaagaaatc

SEQ ID NO: 12552 - DNA, 20 bp, synthetic construct
  misc_feature 1..20: note = chemically synthesized
  source 1..20: mol_type = other DNA
ttgtaattattcatgcacga

SEQ ID NO: 12553 - DNA, 20 bp, synthetic construct
  misc_feature 1..20: note = chemically synthesized
  source 1..20: mol_type = other DNA
tgtaattattcatgcacgaa

SEQ ID NO: 12554 - DNA, 20 bp, synthetic construct
  misc_feature 1..20: note = chemically synthesized
  source 1..20: mol_type = other DNA
cacgaaaggtttacctcacc

SEQ ID NO: 12555 - DNA, 20 bp, synthetic construct
  misc_feature 1..20: note = chemically synthesized
  source 1..20: mol_type = other DNA
acgaaaggtttacctcacct

SEQ ID NO: 12556 - DNA, 20 bp, synthetic construct
  misc_feature 1..20: note = chemically synthesized
  source 1..20: mol_type = other DNA
ggtttacctcacctgggtca

SEQ ID NO: 12557 - DNA, 20 bp, synthetic construct
  misc_feature 1..20: note = chemically synthesized
  source 1..20: mol_type = other DNA
tgtgcgcccattgaatatct

SEQ ID NO: 12558 - DNA, 20 bp, synthetic construct
  misc_feature 1..20: note = chemically synthesized
  source 1..20: mol_type = other DNA
attgaatatcttagacatct

SEQ ID NO: 12559 - DNA, 20 bp, synthetic construct
  misc_feature 1..20: note = chemically synthesized
  source 1..20: mol_type = other DNA
tgaatatcttagacatctta

SEQ ID NO: 12560 - DNA, 20 bp, synthetic construct
  misc_feature 1..20: note = chemically synthesized
  source 1..20: mol_type = other DNA
aatatcttagacatcttaga

SEQ ID NO: 12561 - DNA, 20 bp, synthetic construct
  misc_feature 1..20: note = chemically synthesized
  source 1..20: mol_type = other DNA
tcttagagagcttttcgtct

SEQ ID NO: 12562 - DNA, 20 bp, synthetic construct
  misc_feature 1..20: note = chemically synthesized
  source 1..20: mol_type = other DNA
tcagttaaatgattgattat

SEQ ID NO: 12563 - DNA, 20 bp, synthetic construct
  misc_feature 1..20: note = chemically synthesized
  source 1..20: mol_type = other DNA
atatattttaaatttgcttt

SEQ ID NO: 12564 - DNA, 20 bp, synthetic construct
  misc_feature 1..20: note = chemically synthesized
  source 1..20: mol_type = other DNA
tttaaatttgcttttggttt

SEQ ID NO: 12565 - DNA, 20 bp, synthetic construct
  misc_feature 1..20: note = chemically synthesized
  source 1..20: mol_type = other DNA
gcttttggttttggcttctc

SEQ ID NO: 12566 - DNA, 20 bp, synthetic construct
  misc_feature 1..20: note = chemically synthesized
  source 1..20: mol_type = other DNA
cttttggttttggcttctct

SEQ ID NO: 12567 - DNA, 20 bp, synthetic construct
  misc_feature 1..20: note = chemically synthesized
  source 1..20: mol_type = other DNA
gttctttaaaaaaataataa

SEQ ID NO: 12568 - DNA, 20 bp, synthetic construct
  misc_feature 1..20: note = chemically synthesized
  source 1..20: mol_type = other DNA
aaaaataataacagaacctt

SEQ ID NO: 12569 - DNA, 20 bp, synthetic construct
  misc_feature 1..20: note = chemically synthesized
  source 1..20: mol_type = other DNA
taacagaacctttagacaac

SEQ ID NO: 12570 - DNA, 20 bp, synthetic construct
  misc_feature 1..20: note = chemically synthesized
  source 1..20: mol_type = other DNA
aacagaacctttagacaacc

SEQ ID NO: 12571 - DNA, 20 bp, synthetic construct
  misc_feature 1..20: note = chemically synthesized
  source 1..20: mol_type = other DNA
acagaacctttagacaacca

SEQ ID NO: 12572 - DNA, 20 bp, synthetic construct
  misc_feature 1..20: note = chemically synthesized
  source 1..20: mol_type = other DNA
agaacctttagacaaccagg

SEQ ID NO: 12573 - DNA, 20 bp, synthetic construct
  misc_feature 1..20: note = chemically synthesized
  source 1..20: mol_type = other DNA
tttagacaaccagggagttc

SEQ ID NO: 12574 - DNA, 20 bp, synthetic construct
  misc_feature 1..20: note = chemically synthesized
  source 1..20: mol_type = other DNA
atatctcttatttccctaca

SEQ ID NO: 12575 - DNA, 20 bp, synthetic construct
  misc_feature 1..20: note = chemically synthesized
  source 1..20: mol_type = other DNA
cctacatagattcacaacta

SEQ ID NO: 12576 - DNA, 20 bp, synthetic construct
  misc_feature 1..20: note = chemically synthesized
  source 1..20: mol_type = other DNA
acatagattcacaactatag

SEQ ID NO: 12577 - DNA, 20 bp, synthetic construct
  misc_feature 1..20: note = chemically synthesized
  source 1..20: mol_type = other DNA
attcacaactatagcagtaa

SEQ ID NO: 12578 - DNA, 20 bp, synthetic construct
  misc_feature 1..20: note = chemically synthesized
  source 1..20: mol_type = other DNA
taaaagtcttaactatatgt

SEQ ID NO: 12579 - DNA, 20 bp, synthetic construct
  misc_feature 1..20: note = chemically synthesized
  source 1..20: mol_type = other DNA
aaaagtcttaactatatgta

SEQ ID NO: 12580 - DNA, 20 bp, synthetic construct
  misc_feature 1..20: note = chemically synthesized
  source 1..20: mol_type = other DNA
tatatgtaaggccttccccc

SEQ ID NO: 12581 - DNA, 20 bp, synthetic construct
  misc_feature 1..20: note = chemically synthesized
  source 1..20: mol_type = other DNA
aaggccttccccccagcatt

SEQ ID NO: 12582 - DNA, 20 bp, synthetic construct
  misc_feature 1..20: note = chemically synthesized
  source 1..20: mol_type = other DNA
ttagattcctcctctaaata

SEQ ID NO: 12583 - DNA, 20 bp, synthetic construct
  misc_feature 1..20: note = chemically synthesized
  source 1..20: mol_type = other DNA
agattcctcctctaaataca

SEQ ID NO: 12584 - DNA, 20 bp, synthetic construct
  misc_feature 1..20: note = chemically synthesized
  source 1..20: mol_type = other DNA
gattcctcctctaaatacag

SEQ ID NO: 12585 - DNA, 20 bp, synthetic construct
  misc_feature 1..20: note = chemically synthesized
  source 1..20: mol_type = other DNA
ctcctctaaatacagaggca

SEQ ID NO: 12586 - DNA, 20 bp, synthetic construct
  misc_feature 1..20: note = chemically synthesized
  source 1..20: mol_type = other DNA
tacagaggcacagaattttt

SEQ ID NO: 12587 - DNA, 20 bp, synthetic construct
  misc_feature 1..20: note = chemically synthesized
  source 1..20: mol_type = other DNA
gaggcacagaatttttgagc

SEQ ID NO: 12588 - DNA, 20 bp, synthetic construct
  misc_feature 1..20: note = chemically synthesized
  source 1..20: mol_type = other DNA
atttttgagctggttaatct

SEQ ID NO: 12589 - DNA, 20 bp, synthetic construct
  misc_feature 1..20: note = chemically synthesized
  source 1..20: mol_type = other DNA
ctaagactgaataacctatt

SEQ ID NO: 12590 - DNA, 20 bp, synthetic construct
  misc_feature 1..20: note = chemically synthesized
  source 1..20: mol_type = other DNA
taagactgaataacctattt

SEQ ID NO: 12591 - DNA, 20 bp, synthetic construct
  misc_feature 1..20: note = chemically synthesized
  source 1..20: mol_type = other DNA
gaataacctatttgggacct

SEQ ID NO: 12592 - DNA, 20 bp, synthetic construct
  misc_feature 1..20: note = chemically synthesized
  source 1..20: mol_type = other DNA
aacctatttgggacctcagt

SEQ ID NO: 12593 - DNA, 20 bp, synthetic construct
  misc_feature 1..20: note = chemically synthesized
  source 1..20: mol_type = other DNA
ctatttgggacctcagtaag

SEQ ID NO: 12594 - DNA, 20 bp, synthetic construct
  misc_feature 1..20: note = chemically synthesized
  source 1..20: mol_type = other DNA
tgggacctcagtaagaagtg

SEQ ID NO: 12595 - DNA, 20 bp, synthetic construct
  misc_feature 1..20: note = chemically synthesized
  source 1..20: mol_type = other DNA
tggttttaattcttgcttga

SEQ ID NO: 12596 - DNA, 20 bp, synthetic construct
  misc_feature 1..20: note = chemically synthesized
  source 1..20: mol_type = other DNA
ctgtgttttgtcttttaaac

SEQ ID NO: 12597 - DNA, 20 bp, synthetic construct
  misc_feature 1..20: note = chemically synthesized
  source 1..20: mol_type = other DNA
tgttttgtcttttaaacgag

SEQ ID NO: 12598 - DNA, 20 bp, synthetic construct
  misc_feature 1..20: note = chemically synthesized
  source 1..20: mol_type = other DNA
aatacgatgttacatcacgc

SEQ ID NO: 12599 - DNA, 20 bp, synthetic construct
  misc_feature 1..20: note = chemically synthesized
  source 1..20: mol_type = other DNA
cgcaagtgttactccatatt

SEQ ID NO: 12600 - DNA, 20 bp, synthetic construct
  misc_feature 1..20: note = chemically synthesized
  source 1..20: mol_type = other DNA
ttactccatatttggtgatt

SEQ ID NO: 12601 - DNA, 20 bp, synthetic construct
  misc_feature 1..20: note = chemically synthesized
  source 1..20: mol_type = other DNA
tccatatttggtgatttagc

SEQ ID NO: 12602 - DNA, 20 bp, synthetic construct
  misc_feature 1..20: note = chemically synthesized
  source 1..20: mol_type = other DNA
ccatatttggtgatttagca

SEQ ID NO: 12603 - DNA, 20 bp, synthetic construct
  misc_feature 1..20: note = chemically synthesized
  source 1..20: mol_type = other DNA
ttggtgatttagcaaggctt

SEQ ID NO: 12604 - DNA, 20 bp, synthetic construct
  misc_feature 1..20: note = chemically synthesized
  source 1..20: mol_type = other DNA
agcaaggctttggatctccg

SEQ ID NO: 12605 - DNA, 20 bp, synthetic construct
  misc_feature 1..20: note = chemically synthesized
  source 1..20: mol_type = other DNA
acttctgttcattttccttc

SEQ ID NO: 12606 - DNA, 20 bp, synthetic construct
  misc_feature 1..20: note = chemically synthesized
  source 1..20: mol_type = other DNA
ttcattttccttccagtcac

SEQ ID NO: 12607 - DNA, 20 bp, synthetic construct
  misc_feature 1..20: note = chemically synthesized
  source 1..20: mol_type = other DNA
tccagtcacaagacaacaca

SEQ ID NO: 12608 - DNA, 20 bp, synthetic construct
  misc_feature 1..20: note = chemically synthesized
  source 1..20: mol_type = other DNA
cacaagacaacacatggaaa

SEQ ID NO: 12609 - DNA, 20 bp, synthetic construct
  misc_feature 1..20: note = chemically synthesized
  source 1..20: mol_type = other DNA
tggtcattcccacatcctgc

SEQ ID NO: 12610 - DNA, 20 bp, synthetic construct
  misc_feature 1..20: note = chemically synthesized
  source 1..20: mol_type = other DNA
ggtcattcccacatcctgct

SEQ ID NO: 12611 - DNA, 20 bp, synthetic construct
  misc_feature 1..20: note = chemically synthesized
  source 1..20: mol_type = other DNA
gtcattcccacatcctgctg

SEQ ID NO: 12612 - DNA, 20 bp, synthetic construct
  misc_feature 1..20: note = chemically synthesized
  source 1..20: mol_type = other DNA
tcattcccacatcctgctgg

SEQ ID NO: 12613 - DNA, 20 bp, synthetic construct
  misc_feature 1..20: note = chemically synthesized
  source 1..20: mol_type = other DNA
cattcccacatcctgctggg

SEQ ID NO: 12614 - DNA, 20 bp, synthetic construct
  misc_feature 1..20: note = chemically synthesized
  source 1..20: mol_type = other DNA
tcccacatcctgctgggggg

SEQ ID NO: 12615 - DNA, 20 bp, synthetic construct
  misc_feature 1..20: note = chemically synthesized
  source 1..20: mol_type = other DNA
cccacatcctgctggggggt

SEQ ID NO: 12616 - DNA, 20 bp, synthetic construct
  misc_feature 1..20: note = chemically synthesized
  source 1..20: mol_type = other DNA
ccacatcctgctggggggta

SEQ ID NO: 12617 - DNA, 20 bp, synthetic construct
  misc_feature 1..20: note = chemically synthesized
  source 1..20: mol_type = other DNA
cacatcctgctggggggtag

SEQ ID NO: 12618 - DNA, 20 bp, synthetic construct
  misc_feature 1..20: note = chemically synthesized
  source 1..20: mol_type = other DNA
catcctgctggggggtaggg

SEQ ID NO: 12619 - DNA, 20 bp, synthetic construct
  misc_feature 1..20: note = chemically synthesized
  source 1..20: mol_type = other DNA
tcttcacctacatgtcacat

SEQ ID NO: 12620 - DNA, 20 bp, synthetic construct
  misc_feature 1..20: note = chemically synthesized
  source 1..20: mol_type = other DNA
cttcacctacatgtcacata

SEQ ID NO: 12621 - DNA, 20 bp, synthetic construct
  misc_feature 1..20: note = chemically synthesized
  source 1..20: mol_type = other DNA
catgtcacataaggtaaatg

SEQ ID NO: 12622 - DNA, 20 bp, synthetic construct
  misc_feature 1..20: note = chemically synthesized
  source 1..20: mol_type = other DNA
gtcacataaggtaaatgtgg

SEQ ID NO: 12623 - DNA, 20 bp, synthetic construct
  misc_feature 1..20: note = chemically synthesized
  source 1..20: mol_type = other DNA
aaggtaaatgtggtggattc

SEQ ID NO: 12624 - DNA, 20 bp, synthetic construct
  misc_feature 1..20: note = chemically synthesized
  source 1..20: mol_type = other DNA
agaaatacactccacaaatg

SEQ ID NO: 12625 - DNA, 20 bp, synthetic construct
  misc_feature 1..20: note = chemically synthesized
  source 1..20: mol_type = other DNA
ctccacaaatgcagcttccc

SEQ ID NO: 12626 - DNA, 20 bp, synthetic construct
  misc_feature 1..20: note = chemically synthesized
  source 1..20: mol_type = other DNA
cacaaatgcagcttccctag

SEQ ID NO: 12627 - DNA, 20 bp, synthetic construct
  misc_feature 1..20: note = chemically synthesized
  source 1..20: mol_type = other DNA
aaatgcagcttccctagcag

SEQ ID NO: 12628 - DNA, 20 bp, synthetic construct
  misc_feature 1..20: note = chemically synthesized
  source 1..20: mol_type = other DNA
gcagatttcccatttcacta

SEQ ID NO: 12629 - DNA, 20 bp, synthetic construct
  misc_feature 1..20: note = chemically synthesized
  source 1..20: mol_type = other DNA
cagatttcccatttcactaa

SEQ ID NO: 12630 - DNA, 20 bp, synthetic construct
  misc_feature 1..20: note = chemically synthesized
  source 1..20: mol_type = other DNA
agatttcccatttcactaaa

SEQ ID NO: 12631 - DNA, 20 bp, synthetic construct
  misc_feature 1..20: note = chemically synthesized
  source 1..20: mol_type = other DNA
ttcccatttcactaaaggga

SEQ ID NO: 12632 - DNA, 20 bp, synthetic construct
  misc_feature 1..20: note = chemically synthesized
  source 1..20: mol_type = other DNA
tcactaaagggaaagtatct

SEQ ID NO: 12633 - DNA, 20 bp, synthetic construct
  misc_feature 1..20: note = chemically synthesized
  source 1..20: mol_type = other DNA
aaagtatctgagtgctatca

SEQ ID NO: 12634 - DNA, 20 bp, synthetic construct
  misc_feature 1..20: note = chemically synthesized
  source 1..20: mol_type = other DNA
tatctgagtgctatcacaga

SEQ ID NO: 12635 - DNA, 20 bp, synthetic construct
  misc_feature 1..20: note = chemically synthesized
  source 1..20: mol_type = other DNA
atcacagaaagcactaaaaa

SEQ ID NO: 12636 - DNA, 20 bp, synthetic construct
  misc_feature 1..20: note = chemically synthesized
  source 1..20: mol_type = other DNA
cagaaagcactaaaaaaaga

SEQ ID NO: 12637 - DNA, 20 bp, synthetic construct
  misc_feature 1..20: note = chemically synthesized
  source 1..20: mol_type = other DNA
aagaaagaaaatgccatgtt

SEQ ID NO: 12638 - DNA, 20 bp, synthetic construct
  misc_feature 1..20: note = chemically synthesized
  source 1..20: mol_type = other DNA
tggttttaatgatcaaattc

SEQ ID NO: 12639 - DNA, 20 bp, synthetic construct
  misc_feature 1..20: note = chemically synthesized
  source 1..20: mol_type = other DNA
gttttaatgatcaaattcta

SEQ ID NO: 12640 - DNA, 20 bp, synthetic construct
  misc_feature 1..20: note = chemically synthesized
  source 1..20: mol_type = other DNA
ttttaatgatcaaattctag

SEQ ID NO: 12641 - DNA, 20 bp, synthetic construct
  misc_feature 1..20: note = chemically synthesized
  source 1..20: mol_type = other DNA
tttaatgatcaaattctaga

SEQ ID NO: 12642 - DNA, 20 bp, synthetic construct
  misc_feature 1..20: note = chemically synthesized
  source 1..20: mol_type = other DNA
ttaatgatcaaattctagag

SEQ ID NO: 12643 - DNA, 20 bp, synthetic construct
  misc_feature 1..20: note = chemically synthesized
  source 1..20: mol_type = other DNA
taatgatcaaattctagagg

SEQ ID NO: 12644 - DNA, 20 bp, synthetic construct
  misc_feature 1..20: note = chemically synthesized
  source 1..20: mol_type = other DNA
atgatcaaattctagagggg

SEQ ID NO: 12645 - DNA, 20 bp, synthetic construct
  misc_feature 1..20: note = chemically synthesized
  source 1..20: mol_type = other DNA
gatcaaattctagaggggga

SEQ ID NO: 12646 - DNA, 20 bp, synthetic construct
  misc_feature 1..20: note = chemically synthesized
  source 1..20: mol_type = other DNA
atcaaattctagagggggag

SEQ ID NO: 12647 - DNA, 20 bp, synthetic construct
  misc_feature 1..20: note = chemically synthesized
  source 1..20: mol_type = other DNA
caaattctagagggggagag

SEQ ID NO: 12648 - DNA, 20 bp, synthetic construct
  misc_feature 1..20: note = chemically synthesized
  source 1..20: mol_type = other DNA
atatgacatttaatcccctc

SEQ ID NO: 12649 - DNA, 20 bp, synthetic construct
  misc_feature 1..20: note = chemically synthesized
  source 1..20: mol_type = other DNA
tctagaccactgacctatta

SEQ ID NO: 12650 - DNA, 20 bp, synthetic construct
  misc_feature 1..20: note = chemically synthesized
  source 1..20: mol_type = other DNA
cctattatggttcaactttg

SEQ ID NO: 12651 - DNA, 20 bp, synthetic construct
  misc_feature 1..20: note = chemically synthesized
  source 1..20: mol_type = other DNA
gttcaactttgtggtcaaac

SEQ ID NO: 12652 - DNA, 20 bp, synthetic construct
  misc_feature 1..20: note = chemically synthesized
  source 1..20: mol_type = other DNA
ttcaactttgtggtcaaact

SEQ ID NO: 12653 - DNA, 20 bp, synthetic construct
  misc_feature 1..20: note = chemically synthesized
  source 1..20: mol_type = other DNA
actttgtggtcaaactaggt

SEQ ID NO: 12654 - DNA, 20 bp, synthetic construct
  misc_feature 1..20: note = chemically synthesized
  source 1..20: mol_type = other DNA
tttgtggtcaaactaggtcg

SEQ ID NO: 12655 - DNA, 20 bp, synthetic construct
  misc_feature 1..20: note = chemically synthesized
  source 1..20: mol_type = other DNA
tgtggtcaaactaggtcgga

SEQ ID NO: 12656 - DNA, 20 bp, synthetic construct
  misc_feature 1..20: note = chemically synthesized
  source 1..20: mol_type = other DNA
tcaaactaggtcggagagac

SEQ ID NO: 12657 - DNA, 20 bp, synthetic construct
  misc_feature 1..20: note = chemically synthesized
  source 1..20: mol_type = other DNA
taggtcggagagacaagttc

SEQ ID NO: 12658 - DNA, 20 bp, synthetic construct
  misc_feature 1..20: note = chemically synthesized
  source 1..20: mol_type = other DNA
tgaacaaacctcttgccttt

SEQ ID NO: 12659 - DNA, 20 bp, synthetic construct
  misc_feature 1..20: note = chemically synthesized
  source 1..20: mol_type = other DNA
gaacaaacctcttgcctttc

SEQ ID NO: 12660 - DNA, 20 bp, synthetic construct
  misc_feature 1..20: note = chemically synthesized
  source 1..20: mol_type = other DNA
acaaacctcttgcctttcgg

SEQ ID NO: 12661 - DNA, 20 bp, synthetic construct
  misc_feature 1..20: note = chemically synthesized
  source 1..20: mol_type = other DNA
acctcttgcctttcgggagc

SEQ ID NO: 12662 - DNA, 20 bp, synthetic construct
  misc_feature 1..20: note = chemically synthesized
  source 1..20: mol_type = other DNA
cctcttgcctttcgggagct

SEQ ID NO: 12663 - DNA, 20 bp, synthetic construct
  misc_feature 1..20: note = chemically synthesized
  source 1..20: mol_type = other DNA
cttgcctttcgggagctggg

SEQ ID NO: 12664 - DNA, 20 bp, synthetic construct
  misc_feature 1..20: note = chemically synthesized
  source 1..20: mol_type = other DNA
gcctttcgggagctgggtgg

SEQ ID NO: 12665 - DNA, 20 bp, synthetic construct
  misc_feature 1..20: note = chemically synthesized
  source 1..20: mol_type = other DNA
cctttcgggagctgggtggt

SEQ ID NO: 12666 - DNA, 20 bp, synthetic construct
  misc_feature 1..20: note = chemically synthesized
  source 1..20: mol_type = other DNA
ttcgggagctgggtggtagg

SEQ ID NO: 12667 - DNA, 20 bp, synthetic construct
  misc_feature 1..20: note = chemically synthesized
  source 1..20: mol_type = other DNA
ggagctgggtggtaggtaga

SEQ ID NO: 12668 - DNA, 20 bp, synthetic construct
  misc_feature 1..20: note = chemically synthesized
  source 1..20: mol_type = other DNA
gctgggtggtaggtagatgg

SEQ ID NO: 12669 - DNA, 20 bp, synthetic construct
  misc_feature 1..20: note = chemically synthesized
  source 1..20: mol_type = other DNA
ggtggtaggtagatggaaga

SEQ ID NO: 12670 - DNA, 20 bp, synthetic construct
  misc_feature 1..20: note = chemically synthesized
  source 1..20: mol_type = other DNA
ggaagaaagcgatccaccaa

SEQ ID NO: 12671 - DNA, 20 bp, synthetic construct
  misc_feature 1..20: note = chemically synthesized
  source 1..20: mol_type = other DNA
gaagaaagcgatccaccaac

SEQ ID NO: 12672 - DNA, 20 bp, synthetic construct
  misc_feature 1..20: note = chemically synthesized
  source 1..20: mol_type = other DNA
aagcgatccaccaacaggca

SEQ ID NO: 12673 - DNA, 20 bp, synthetic construct
  misc_feature 1..20: note = chemically synthesized
  source 1..20: mol_type = other DNA
gcatggcatgtctgtcatca

SEQ ID NO: 12674 - DNA, 20 bp, synthetic construct
  misc_feature 1..20: note = chemically synthesized
  source 1..20: mol_type = other DNA
gacttttgtctaacatgctc

SEQ ID NO: 12675 - DNA, 20 bp, synthetic construct
  misc_feature 1..20: note = chemically synthesized
  source 1..20: mol_type = other DNA
gctcaagcaaaaaatgtttt

SEQ ID NO: 12676 - DNA, 20 bp, synthetic construct
  misc_feature 1..20: note = chemically synthesized
  source 1..20: mol_type = other DNA
ctcaagcaaaaaatgttttg

SEQ ID NO: 12677 - DNA, 20 bp, synthetic construct
  misc_feature 1..20: note = chemically synthesized
  source 1..20: mol_type = other DNA
tcaagcaaaaaatgttttga

SEQ ID NO: 12678 - DNA, 20 bp, synthetic construct
  misc_feature 1..20: note = chemically synthesized
  source 1..20: mol_type = other DNA
atgttttgagggtcactata

SEQ ID NO: 12679 - DNA, 20 bp, synthetic construct
  misc_feature 1..20: note = chemically synthesized
  source 1..20: mol_type = other DNA
tagtgttactgtttatcact

SEQ ID NO: 12680 - DNA, 20 bp, synthetic construct
  misc_feature 1..20: note = chemically synthesized
  source 1..20: mol_type = other DNA
gtgttactgtttatcactta

SEQ ID NO: 12681 - DNA, 20 bp, synthetic construct
  misc_feature 1..20: note = chemically synthesized
  source 1..20: mol_type = other DNA
ttactgtttatcacttagag

SEQ ID NO: 12682 - DNA, 20 bp, synthetic construct
  misc_feature 1..20: note = chemically synthesized
  source 1..20: mol_type = other DNA
tactgtttatcacttagaga

SEQ ID NO: 12683 - DNA, 20 bp, synthetic construct
  misc_feature 1..20: note = chemically synthesized
  source 1..20: mol_type = other DNA
actgtttatcacttagagaa

SEQ ID NO: 12684 - DNA, 20 bp, synthetic construct
  misc_feature 1..20: note = chemically synthesized
  source 1..20: mol_type = other DNA
tcacttagagaagggaattt

SEQ ID NO: 12685 - DNA, 20 bp, synthetic construct
  misc_feature 1..20: note = chemically synthesized
  source 1..20: mol_type = other DNA
gggaatttaagtcccactgc

SEQ ID NO: 12686 - DNA, 20 bp, synthetic construct
  misc_feature 1..20: note = chemically synthesized
  source 1..20: mol_type = other DNA
cctttaattccttttccctt

SEQ ID NO: 12687 - DNA, 20 bp, synthetic construct
  misc_feature 1..20: note = chemically synthesized
  source 1..20: mol_type = other DNA
tccttttcccttgagctgcc

SEQ ID NO: 12688 - DNA, 20 bp, synthetic construct
  misc_feature 1..20: note = chemically synthesized
  source 1..20: mol_type = other DNA
tgccgagaaacccacacacc

SEQ ID NO: 12689 - DNA, 20 bp, synthetic construct
  misc_feature 1..20: note = chemically synthesized
  source 1..20: mol_type = other DNA
ctccctgctaaaattaacca

SEQ ID NO: 12690 - DNA, 20 bp, synthetic construct
  misc_feature 1..20: note = chemically synthesized
  source 1..20: mol_type = other DNA
tccctgctaaaattaaccaa

SEQ ID NO: 12691 - DNA, 20 bp, synthetic construct
  misc_feature 1..20: note = chemically synthesized
  source 1..20: mol_type = other DNA
cctgctaaaattaaccaaag

SEQ ID NO: 12692 - DNA, 20 bp, synthetic construct
  misc_feature 1..20: note = chemically synthesized
  source 1..20: mol_type = other DNA
ctgctaaaattaaccaaagg

SEQ ID NO: 12693 - DNA, 20 bp, synthetic construct
  misc_feature 1..20: note = chemically synthesized
  source 1..20: mol_type = other DNA
tgctaaaattaaccaaagga

SEQ ID NO: 12694 - DNA, 20 bp, synthetic construct
  misc_feature 1..20: note = chemically synthesized
  source 1..20: mol_type = other DNA
ctaaaattaaccaaaggagg

SEQ ID NO: 12695 - DNA, 20 bp, synthetic construct
  misc_feature 1..20: note = chemically synthesized
  source 1..20: mol_type = other DNA
taaaattaaccaaaggaggg

SEQ ID NO: 12696 - DNA, 20 bp, synthetic construct
  misc_feature 1..20: note = chemically synthesized
  source 1..20: mol_type = other DNA
aaaattaaccaaaggaggga

SEQ ID NO: 12697 - DNA, 20 bp, synthetic construct
  misc_feature 1..20: note = chemically synthesized
  source 1..20: mol_type = other DNA
atacgtgtgtgtatttttcc

SEQ ID NO: 12698 - DNA, 20 bp, synthetic construct
  misc_feature 1..20: note = chemically synthesized
  source 1..20: mol_type = other DNA
aaaatttttacattgtgtta

SEQ ID NO: 12699 - DNA, 20 bp, synthetic construct
  misc_feature 1..20: note = chemically synthesized
  source 1..20: mol_type = other DNA
atttttacattgtgttatag

SEQ ID NO: 12700 - DNA, 20 bp, synthetic construct
  misc_feature 1..20: note = chemically synthesized
  source 1..20: mol_type = other DNA
acattgtgttatagcagaaa

SEQ ID NO: 12701 - DNA, 20 bp, synthetic construct
  misc_feature 1..20: note = chemically synthesized
  source 1..20: mol_type = other DNA
ttgtgttatagcagaaacag

SEQ ID NO: 12702 - DNA, 20 bp, synthetic construct
  misc_feature 1..20: note = chemically synthesized
  source 1..20: mol_type = other DNA
gtgttatagcagaaacagtg

SEQ ID NO: 12703 - DNA, 20 bp, synthetic construct
  misc_feature 1..20: note = chemically synthesized
  source 1..20: mol_type = other DNA
atagcagaaacagtggagtc

SEQ ID NO: 12704 - DNA, 20 bp, synthetic construct
  misc_feature 1..20: note = chemically synthesized
  source 1..20: mol_type = other DNA
agaaacagtggagtctggac

SEQ ID NO: 12705 - DNA, 20 bp, synthetic construct
  misc_feature 1..20: note = chemically synthesized
  source 1..20: mol_type = other DNA
agtctggactggacatttgt

SEQ ID NO: 12706 - DNA, 20 bp, synthetic construct
  misc_feature 1..20: note = chemically synthesized
  source 1..20: mol_type = other DNA
gtctggactggacatttgta

SEQ ID NO: 12707 - DNA, 20 bp, synthetic construct
  misc_feature 1..20: note = chemically synthesized
  source 1..20: mol_type = other DNA
tctggactggacatttgtaa

SEQ ID NO: 12708 - DNA, 20 bp, synthetic construct
  misc_feature 1..20: note = chemically synthesized
  source 1..20: mol_type = other DNA
acatttgtaagggtgacatg

SEQ ID NO: 12709 - DNA, 20 bp, synthetic construct
  misc_feature 1..20: note = chemically synthesized
  source 1..20: mol_type = other DNA
tgtaaaccacaaacaaaatc

SEQ ID NO: 12710 - DNA, 20 bp, synthetic construct
  misc_feature 1..20: note = chemically synthesized
  source 1..20: mol_type = other DNA
tacatctgtcaaaaccacat

SEQ ID NO: 12711 - DNA, 20 bp, synthetic construct
  misc_feature 1..20: note = chemically synthesized
  source 1..20: mol_type = other DNA
catctgtcaaaaccacatca

SEQ ID NO: 12712 - DNA, 20 bp, synthetic construct
  misc_feature 1..20: note = chemically synthesized
  source 1..20: mol_type = other DNA
gtcaaaaccacatcagagac

SEQ ID NO: 12713 - DNA, 20 bp, synthetic construct
  misc_feature 1..20: note = chemically synthesized
  source 1..20: mol_type = other DNA
caaaaccacatcagagacaa

SEQ ID NO: 12714 - DNA, 20 bp, synthetic construct
  misc_feature 1..20: note = chemically synthesized
  source 1..20: mol_type = other DNA
aaaccacatcagagacaaga

SEQ ID NO: 12715 - DNA, 20 bp, synthetic construct
  misc_feature 1..20: note = chemically synthesized
  source 1..20: mol_type = other DNA
accacatcagagacaagaga

SEQ ID NO: 12716 - DNA, 20 bp, synthetic construct
  misc_feature 1..20: note = chemically synthesized
  source 1..20: mol_type = other DNA
atcagagacaagagagagca

SEQ ID NO: 12717 - DNA, 20 bp, synthetic construct
  misc_feature 1..20: note = chemically synthesized
  source 1..20: mol_type = other DNA
cagagacaagagagagcaca

SEQ ID NO: 12718 - DNA, 20 bp, synthetic construct
  misc_feature 1..20: note = chemically synthesized
  source 1..20: mol_type = other DNA
agacaagagagagcacagag

SEQ ID NO: 12719 - DNA, 20 bp, synthetic construct
  misc_feature 1..20: note = chemically synthesized
  source 1..20: mol_type = other DNA
acagagaagcatttatcatt

SEQ ID NO: 12720 - DNA, 20 bp, synthetic construct
  misc_feature 1..20: note = chemically synthesized
  source 1..20: mol_type = other DNA
gaagcatttatcatttagct

SEQ ID NO: 12721 - DNA, 20 bp, synthetic construct
  misc_feature 1..20: note = chemically synthesized
  source 1..20: mol_type = other DNA
aagcatttatcatttagctg

SEQ ID NO: 12722 - DNA, 20 bp, synthetic construct
  misc_feature 1..20: note = chemically synthesized
  source 1..20: mol_type = other DNA
gcatttatcatttagctgag

SEQ ID NO: 12723 - DNA, 20 bp, synthetic construct
  misc_feature 1..20: note = chemically synthesized
  source 1..20: mol_type = other DNA
catttatcatttagctgagg

SEQ ID NO: 12724 - DNA, 20 bp, synthetic construct
  misc_feature 1..20: note = chemically synthesized
  source 1..20: mol_type = other DNA
ttatcatttagctgaggagg

SEQ ID NO: 12725 - DNA, 20 bp, synthetic construct
  misc_feature 1..20: note = chemically synthesized
  source 1..20: mol_type = other DNA
tatcatttagctgaggaggc

SEQ ID NO: 12726 - DNA, 20 bp, synthetic construct
  misc_feature 1..20: note = chemically synthesized
  source 1..20: mol_type = other DNA
ttagctgaggaggcaggctg

SEQ ID NO: 12727 - DNA, 20 bp, synthetic construct
  misc_feature 1..20: note = chemically synthesized
  source 1..20: mol_type = other DNA
tagctgaggaggcaggctgc

SEQ ID NO: 12728 - DNA, 20 bp, synthetic construct
  misc_feature 1..20: note = chemically synthesized
  source 1..20: mol_type = other DNA
agctgaggaggcaggctgca

SEQ ID NO: 12729 - DNA, 20 bp, synthetic construct
  misc_feature 1..20: note = chemically synthesized
  source 1..20: mol_type = other DNA
ctgaggaggcaggctgcagg

SEQ ID NO: 12730 - DNA, 20 bp, synthetic construct
  misc_feature 1..20: note = chemically synthesized
  source 1..20: mol_type = other DNA
aggaggcaggctgcagggag

SEQ ID NO: 12731 - DNA, 20 bp, synthetic construct
  misc_feature 1..20: note = chemically synthesized
  source 1..20: mol_type = other DNA
aacatgcccttaaacttttc

SEQ ID NO: 12732 - DNA, 20 bp, synthetic construct
  misc_feature 1..20: note = chemically synthesized
  source 1..20: mol_type = other DNA
tgcccttaaacttttcgagt

SEQ ID NO: 12733 - DNA, 20 bp, synthetic construct
  misc_feature 1..20: note = chemically synthesized
  source 1..20: mol_type = other DNA
gtaagcatgtctgtgcgctt

SEQ ID NO: 12734 - DNA, 20 bp, synthetic construct
  misc_feature 1..20: note = chemically synthesized
  source 1..20: mol_type = other DNA
agcaactgccctctctactc

SEQ ID NO: 12735 - DNA, 20 bp, synthetic construct
  misc_feature 1..20: note = chemically synthesized
  source 1..20: mol_type = other DNA
ctgccctctctactctggcc

SEQ ID NO: 12736 - DNA, 20 bp, synthetic construct
  misc_feature 1..20: note = chemically synthesized
  source 1..20: mol_type = other DNA
cctctctactctggcctggc

SEQ ID NO: 12737 - DNA, 20 bp, synthetic construct
  misc_feature 1..20: note = chemically synthesized
  source 1..20: mol_type = other DNA
ctggcctggccagtcgaaaa

SEQ ID NO: 12738 - DNA, 20 bp, synthetic construct
  misc_feature 1..20: note = chemically synthesized
  source 1..20: mol_type = other DNA
cagtcgaaaatggcatctta

SEQ ID NO: 12739 - DNA, 20 bp, synthetic construct
  misc_feature 1..20: note = chemically synthesized
  source 1..20: mol_type = other DNA
gaaaatggcatcttaaagtc

SEQ ID NO: 12740 - DNA, 20 bp, synthetic construct
  misc_feature 1..20: note = chemically synthesized
  source 1..20: mol_type = other DNA
aaaatggcatcttaaagtca

SEQ ID NO: 12741 - DNA, 20 bp, synthetic construct
  misc_feature 1..20: note = chemically synthesized
  source 1..20: mol_type = other DNA
gcatcttaaagtcaaggtca

SEQ ID NO: 12742 - DNA, 20 bp, synthetic construct
  misc_feature 1..20: note = chemically synthesized
  source 1..20: mol_type = other DNA
gtcatggtgtcatcccacca

SEQ ID NO: 12743 - DNA, 20 bp, synthetic construct
  misc_feature 1..20: note = chemically synthesized
  source 1..20: mol_type = other DNA
tcatggtgtcatcccaccac

SEQ ID NO: 12744 - DNA, 20 bp, synthetic construct
  misc_feature 1..20: note = chemically synthesized
  source 1..20: mol_type = other DNA
catggtgtcatcccaccacg

SEQ ID NO: 12745 - DNA, 20 bp, synthetic construct
  misc_feature 1..20: note = chemically synthesized
  source 1..20: mol_type = other DNA
cacggggctgtgtttaatta

SEQ ID NO: 12746 - DNA, 20 bp, synthetic construct
  misc_feature 1..20: note = chemically synthesized
  source 1..20: mol_type = other DNA
tgtttaattacagccccatc

SEQ ID NO: 12747 - DNA, 20 bp, synthetic construct
  misc_feature 1..20: note = chemically synthesized
  source 1..20: mol_type = other DNA
gtttaattacagccccatcc

SEQ ID NO: 12748 - DNA, 20 bp, synthetic construct
  misc_feature 1..20: note = chemically synthesized
  source 1..20: mol_type = other DNA
tacagccccatccgggctga

SEQ ID NO: 12749 - DNA, 20 bp, synthetic construct
  misc_feature 1..20: note = chemically synthesized
  source 1..20: mol_type = other DNA
atccgggctgacagccaata

SEQ ID NO: 12750 - DNA, 20 bp, synthetic construct
  misc_feature 1..20: note = chemically synthesized
  source 1..20: mol_type = other DNA
ctgacagccaatatggatcc

SEQ ID NO: 12751 - DNA, 20 bp, synthetic construct
  misc_feature 1..20: note = chemically synthesized
  source 1..20: mol_type = other DNA
tgacagccaatatggatcca

SEQ ID NO: 12752 - DNA, 20 bp, synthetic construct
  misc_feature 1..20: note = chemically synthesized
  source 1..20: mol_type = other DNA
agccaatatggatccaaggc

SEQ ID NO: 12753 - DNA, 20 bp, synthetic construct
  misc_feature 1..20: note = chemically synthesized
  source 1..20: mol_type = other DNA
tggatccaaggctagccctg

SEQ ID NO: 12754 - DNA, 20 bp, synthetic construct
  misc_feature 1..20: note = chemically synthesized
  source 1..20: mol_type = other DNA
ccaaggctagccctgaagct

SEQ ID NO: 12755 - DNA, 20 bp, synthetic construct
  misc_feature 1..20: note = chemically synthesized
  source 1..20: mol_type = other DNA
accacctccaactaccctgc

SEQ ID NO: 12756 - DNA, 20 bp, synthetic construct
  misc_feature 1..20: note = chemically synthesized
  source 1..20: mol_type = other DNA
cctgccagcccactctactt

SEQ ID NO: 12757 - DNA, 20 bp, synthetic construct
  misc_feature 1..20: note = chemically synthesized
  source 1..20: mol_type = other DNA
ctgccagcccactctacttc

SEQ ID NO: 12758 - DNA, 20 bp, synthetic construct
  misc_feature 1..20: note = chemically synthesized
  source 1..20: mol_type = other DNA
tgccagcccactctacttca

SEQ ID NO: 12759 - DNA, 20 bp, synthetic construct
  misc_feature 1..20: note = chemically synthesized
  source 1..20: mol_type = other DNA
cagcccactctacttcaggg

SEQ ID NO: 12760 - DNA, 20 bp, synthetic construct
  misc_feature 1..20: note = chemically synthesized
  source 1..20: mol_type = other DNA
ctctacttcagggaagcctt

SEQ ID NO: 12761 - DNA, 20 bp, synthetic construct
  misc_feature 1..20: note = chemically synthesized
  source 1..20: mol_type = other DNA
ttcagggaagccttgagaac

SEQ ID NO: 12762 - DNA, 20 bp, synthetic construct
  misc_feature 1..20: note = chemically synthesized
  source 1..20: mol_type = other DNA
tgagaacgagctgaacccct

SEQ ID NO: 12763 - DNA, 20 bp, synthetic construct
  misc_feature 1..20: note = chemically synthesized
  source 1..20: mol_type = other DNA
gagaacgagctgaaccccta

SEQ ID NO: 12764 - DNA, 20 bp, synthetic construct
  misc_feature 1..20: note = chemically synthesized
  source 1..20: mol_type = other DNA
gaacgagctgaacccctaag

SEQ ID NO: 12765 - DNA, 20 bp, synthetic construct
  misc_feature 1..20: note = chemically synthesized
  source 1..20: mol_type = other DNA
aacgagctgaacccctaagg

SEQ ID NO: 12766 - DNA, 20 bp, synthetic construct
  misc_feature 1..20: note = chemically synthesized
  source 1..20: mol_type = other DNA
gctgaacccctaaggaggcc

SEQ ID NO: 12767 - DNA, 20 bp, synthetic construct
  misc_feature 1..20: note = chemically synthesized
  source 1..20: mol_type = other DNA
aacccctaaggaggcctggc

SEQ ID NO: 12768 - DNA, 20 bp, synthetic construct
  misc_feature 1..20: note = chemically synthesized
  source 1..20: mol_type = other DNA
gaggcctggccagatgttct

SEQ ID NO: 12769 - DNA, 20 bp, synthetic construct
  misc_feature 1..20: note = chemically synthesized
  source 1..20: mol_type = other DNA
ccagatgttctgagtcaaac

SEQ ID NO: 12770 - DNA, 20 bp, synthetic construct
  misc_feature 1..20: note = chemically synthesized
  source 1..20: mol_type = other DNA
ttctgagtcaaacaagtcat

SEQ ID NO: 12771 - DNA, 20 bp, synthetic construct
  misc_feature 1..20: note = chemically synthesized
  source 1..20: mol_type = other DNA
ctgaactgcaaatgcctata

SEQ ID NO: 12772 - DNA, 20 bp, synthetic construct
  misc_feature 1..20: note = chemically synthesized
  source 1..20: mol_type = other DNA
tttgcctctgacacgtcacc

SEQ ID NO: 12773 - DNA, 20 bp, synthetic construct
  misc_feature 1..20: note = chemically synthesized
  source 1..20: mol_type = other DNA
ttgcctctgacacgtcacca

SEQ ID NO: 12774 - DNA, 20 bp, synthetic construct
  misc_feature 1..20: note = chemically synthesized
  source 1..20: mol_type = other DNA
ctctgacacgtcaccaaggc

SEQ ID NO: 12775 - DNA, 20 bp, synthetic construct
  misc_feature 1..20: note = chemically synthesized
  source 1..20: mol_type = other DNA
cacgtcaccaaggctggaaa

SEQ ID NO: 12776 - DNA, 20 bp, synthetic construct
  misc_feature 1..20: note = chemically synthesized
  source 1..20: mol_type = other DNA
ccaaggctggaaatggacaa

SEQ ID NO: 12777 - DNA, 20 bp, synthetic construct
  misc_feature 1..20: note = chemically synthesized
  source 1..20: mol_type = other DNA
aggctggaaatggacaatgg

SEQ ID NO: 12778 - DNA, 20 bp, synthetic construct
  misc_feature 1..20: note = chemically synthesized
  source 1..20: mol_type = other DNA
tggaaatggacaatggaagc

SEQ ID NO: 12779 - DNA, 20 bp, synthetic construct
  misc_feature 1..20: note = chemically synthesized
  source 1..20: mol_type = other DNA
atggacaatggaagctggac

SEQ ID NO: 12780 - DNA, 20 bp, synthetic construct
  misc_feature 1..20: note = chemically synthesized
  source 1..20: mol_type = other DNA
tggacaatggaagctggact

SEQ ID NO: 12781 - DNA, 20 bp, synthetic construct
  misc_feature 1..20: note = chemically synthesized
  source 1..20: mol_type = other DNA
aatggaagctggactaggtg

SEQ ID NO: 12782 - DNA, 20 bp, synthetic construct
  misc_feature 1..20: note = chemically synthesized
  source 1..20: mol_type = other DNA
aagctggactaggtgtagta

SEQ ID NO: 12783 - DNA, 20 bp, synthetic construct
  misc_feature 1..20: note = chemically synthesized
  source 1..20: mol_type = other DNA
aaagctcaatacttcaaaat

SEQ ID NO: 12784 - DNA, 20 bp, synthetic construct
  misc_feature 1..20: note = chemically synthesized
  source 1..20: mol_type = other DNA
gctcaatacttcaaaatgag

SEQ ID NO: 12785 - DNA, 20 bp, synthetic construct
  misc_feature 1..20: note = chemically synthesized
  source 1..20: mol_type = other DNA
ctcaatacttcaaaatgaga

SEQ ID NO: 12786 - DNA, 20 bp, synthetic construct
  misc_feature 1..20: note = chemically synthesized
  source 1..20: mol_type = other DNA
aatacttcaaaatgagaagg

SEQ ID NO: 12787 - DNA, 20 bp, synthetic construct
  misc_feature 1..20: note = chemically synthesized
  source 1..20: mol_type = other DNA
atacttcaaaatgagaaggt

SEQ ID NO: 12788 - DNA, 20 bp, synthetic construct
  misc_feature 1..20: note = chemically synthesized
  source 1..20: mol_type = other DNA
tacttcaaaatgagaaggtg

SEQ ID NO: 12789 - DNA, 20 bp, synthetic construct
  misc_feature 1..20: note = chemically synthesized
  source 1..20: mol_type = other DNA
tcaaaatgagaaggtgggga

SEQ ID NO: 12790 - DNA, 20 bp, synthetic construct
  misc_feature 1..20: note = chemically synthesized
  source 1..20: mol_type = other DNA
caaaatgagaaggtggggat

SEQ ID NO: 12791 - DNA, 20 bp, synthetic construct
  misc_feature 1..20: note = chemically synthesized
  source 1..20: mol_type = other DNA
aaaatgagaaggtggggatg

SEQ ID NO: 12792 - DNA, 20 bp, synthetic construct
  misc_feature 1..20: note = chemically synthesized
  source 1..20: mol_type = other DNA
atgagaaggtggggatgggg

SEQ ID NO: 12793 - DNA, 20 bp, synthetic construct
  misc_feature 1..20: note = chemically synthesized
  source 1..20: mol_type = other DNA
aaggtggggatggggaagaa

SEQ ID NO: 12794 - DNA, 20 bp, synthetic construct
  misc_feature 1..20: note = chemically synthesized
  source 1..20: mol_type = other DNA
gaaaagaaatccaaaatcga

SEQ ID NO: 12795 - DNA, 20 bp, synthetic construct
  misc_feature 1..20: note = chemically synthesized
  source 1..20: mol_type = other DNA
aaatccaaaatcgacagatc

SEQ ID NO: 12796 - DNA, 20 bp, synthetic construct
  misc_feature 1..20: note = chemically synthesized
  source 1..20: mol_type = other DNA
atccaaaatcgacagatcca

SEQ ID NO: 12797 - DNA, 20 bp, synthetic construct
  misc_feature 1..20: note = chemically synthesized
  source 1..20: mol_type = other DNA
ccaaaatcgacagatccaga

SEQ ID NO: 12798 - DNA, 20 bp, synthetic construct
  misc_feature 1..20: note = chemically synthesized
  source 1..20: mol_type = other DNA
aaatcgacagatccagagag

SEQ ID NO: 12799 - DNA, 20 bp, synthetic construct
  misc_feature 1..20: note = chemically synthesized
  source 1..20: mol_type = other DNA
aatcgacagatccagagaga

SEQ ID NO: 12800 - DNA, 20 bp, synthetic construct
  misc_feature 1..20: note = chemically synthesized
  source 1..20: mol_type = other DNA
tatcctgcctacatctgatt

SEQ ID NO: 12801 - DNA, 20 bp, synthetic construct
  misc_feature 1..20: note = chemically synthesized
  source 1..20: mol_type = other DNA
ctgcctacatctgattcagt

SEQ ID NO: 12802 - DNA, 20 bp, synthetic construct
  misc_feature 1..20: note = chemically synthesized
  source 1..20: mol_type = other DNA
tgcctacatctgattcagtg

SEQ ID NO: 12803 - DNA, 20 bp, synthetic construct
  misc_feature 1..20: note = chemically synthesized
  source 1..20: mol_type = other DNA
ctacatctgattcagtgagg

SEQ ID NO: 12804 - DNA, 20 bp, synthetic construct
  misc_feature 1..20: note = chemically synthesized
  source 1..20: mol_type = other DNA
atatttatttttctgtgttc

SEQ ID NO: 12805 - DNA, 20 bp, synthetic construct
  misc_feature 1..20: note = chemically synthesized
  source 1..20: mol_type = other DNA
tttttctgtgttctggacgt

SEQ ID NO: 12806 - DNA, 20 bp, synthetic construct
  misc_feature 1..20: note = chemically synthesized
  source 1..20: mol_type = other DNA
tgtgttctggacgtaagcaa

SEQ ID NO: 12807 - DNA, 20 bp, synthetic construct
  misc_feature 1..20: note = chemically synthesized
  source 1..20: mol_type = other DNA
aaatgattattttaacatta

SEQ ID NO: 12808 - DNA, 20 bp, synthetic construct
  misc_feature 1..20: note = chemically synthesized
  source 1..20: mol_type = other DNA
aatgattattttaacattac

SEQ ID NO: 12809 - DNA, 20 bp, synthetic construct
  misc_feature 1..20: note = chemically synthesized
  source 1..20: mol_type = other DNA
atgattattttaacattaca

SEQ ID NO: 12810 - DNA, 20 bp, synthetic construct
  misc_feature 1..20: note = chemically synthesized
  source 1..20: mol_type = other DNA
ttaacattacagggctgtca

SEQ ID NO: 12811 - DNA, 20 bp, synthetic construct
  misc_feature 1..20: note = chemically synthesized
  source 1..20: mol_type = other DNA
cattacagggctgtcatgga

SEQ ID NO: 12812 - DNA, 20 bp, synthetic construct
  misc_feature 1..20: note = chemically synthesized
  source 1..20: mol_type = other DNA
ggctgtcatggacagtcaca

SEQ ID NO: 12813 - DNA, 20 bp, synthetic construct
  misc_feature 1..20: note = chemically synthesized
  source 1..20: mol_type = other DNA
ctgtcatggacagtcacata

SEQ ID NO: 12814 - DNA, 20 bp, synthetic construct
  misc_feature 1..20: note = chemically synthesized
  source 1..20: mol_type = other DNA
tggacagtcacatagagtaa

SEQ ID NO: 12815 - DNA, 20 bp, synthetic construct
  misc_feature 1..20: note = chemically synthesized
  source 1..20: mol_type = other DNA
gacagtcacatagagtaata

SEQ ID NO: 12816 - DNA, 20 bp, synthetic construct
  misc_feature 1..20: note = chemically synthesized
  source 1..20: mol_type = other DNA
gtcacatagagtaatagaga

SEQ ID NO: 12817 - DNA, 20 bp, synthetic construct
  misc_feature 1..20: note = chemically synthesized
  source 1..20: mol_type = other DNA
cttcacaactccttactgct

SEQ ID NO: 12818 - DNA, 20 bp, synthetic construct
  misc_feature 1..20: note = chemically synthesized
  source 1..20: mol_type = other DNA
aactccttactgcttggcta

SEQ ID NO: 12819 - DNA, 20 bp, synthetic construct
  misc_feature 1..20: note = chemically synthesized
  source 1..20: mol_type = other DNA
acagcacctctgaaaatgaa

SEQ ID NO: 12820 - DNA, 20 bp, synthetic construct
  misc_feature 1..20: note = chemically synthesized
  source 1..20: mol_type = other DNA
atgaaaagaaaacatgcaaa

SEQ ID NO: 12821 - DNA, 20 bp, synthetic construct
  misc_feature 1..20: note = chemically synthesized
  source 1..20: mol_type = other DNA
acctgctatgtgttcctgtt

SEQ ID NO: 12822 - DNA, 20 bp, synthetic construct
  misc_feature 1..20: note = chemically synthesized
  source 1..20: mol_type = other DNA
cctgctatgtgttcctgttt

SEQ ID NO: 12823 - DNA, 20 bp, synthetic construct
  misc_feature 1..20: note = chemically synthesized
  source 1..20: mol_type = other DNA
ctgctatgtgttcctgtttg

SEQ ID NO: 12824 - DNA, 20 bp, synthetic construct
  misc_feature 1..20: note = chemically synthesized
  source 1..20: mol_type = other DNA
ctgtttggggcaaattcctc

SEQ ID NO: 12825 - DNA, 20 bp, synthetic construct
  misc_feature 1..20: note = chemically synthesized
  source 1..20: mol_type = other DNA
gataaacaatcgtcatcctc

SEQ ID NO: 12826 - DNA, 20 bp, synthetic construct
  misc_feature 1..20: note = chemically synthesized
  source 1..20: mol_type = other DNA
cgtcatcctctggcgtgacc

SEQ ID NO: 12827 - DNA, 20 bp, synthetic construct
  misc_feature 1..20: note = chemically synthesized
  source 1..20: mol_type = other DNA
gacctggatgccaacctcca

SEQ ID NO: 12828 - DNA, 20 bp, synthetic construct
  misc_feature 1..20: note = chemically synthesized
  source 1..20: mol_type = other DNA
acctggatgccaacctccac

SEQ ID NO: 12829 - DNA, 20 bp, synthetic construct
  misc_feature 1..20: note = chemically synthesized
  source 1..20: mol_type = other DNA
gatgccaacctccacgggat

SEQ ID NO: 12830 - DNA, 20 bp, synthetic construct
  misc_feature 1..20: note = chemically synthesized
  source 1..20: mol_type = other DNA
gatgcttttttcatctcgat

SEQ ID NO: 12831 - DNA, 20 bp, synthetic construct
  misc_feature 1..20: note = chemically synthesized
  source 1..20: mol_type = other DNA
ttttttcatctcgattggtg

SEQ ID NO: 12832 - DNA, 20 bp, synthetic construct
  misc_feature 1..20: note = chemically synthesized
  source 1..20: mol_type = other DNA
tttttcatctcgattggtga

SEQ ID NO: 12833 - DNA, 20 bp, synthetic construct
  misc_feature 1..20: note = chemically synthesized
  source 1..20: mol_type = other DNA
ttttcatctcgattggtgaa

SEQ ID NO: 12834 - DNA, 20 bp, synthetic construct
  misc_feature 1..20: note = chemically synthesized
  source 1..20: mol_type = other DNA
tttcatctcgattggtgaag

SEQ ID NO: 12835 - DNA, 20 bp, synthetic construct
  misc_feature 1..20: note = chemically synthesized
  source 1..20: mol_type = other DNA
catctcgattggtgaagggg

SEQ ID NO: 12836 - DNA, 20 bp, synthetic construct
  misc_feature 1..20: note = chemically synthesized
  source 1..20: mol_type = other DNA
atctcgattggtgaagggga

SEQ ID NO: 12837 - DNA, 20 bp, synthetic construct
  misc_feature 1..20: note = chemically synthesized
  source 1..20: mol_type = other DNA
tcgattggtgaaggggaagg

SEQ ID NO: 12838 - DNA, 20 bp, synthetic construct
  misc_feature 1..20: note = chemically synthesized
  source 1..20: mol_type = other DNA
aggggaaggtggcttatcca

SEQ ID NO: 12839 - DNA, 20 bp, synthetic construct
  misc_feature 1..20: note = chemically synthesized
  source 1..20: mol_type = other DNA
gcttatccacagctttttct

SEQ ID NO: 12840 - DNA, 20 bp, synthetic construct
  misc_feature 1..20: note = chemically synthesized
  source 1..20: mol_type = other DNA
tatccacagctttttctaag

SEQ ID NO: 12841 - DNA, 20 bp, synthetic construct
  misc_feature 1..20: note = chemically synthesized
  source 1..20: mol_type = other DNA
tccacagctttttctaagca

SEQ ID NO: 12842 - DNA, 20 bp, synthetic construct
  misc_feature 1..20: note = chemically synthesized
  source 1..20: mol_type = other DNA
ccacagctttttctaagcag

SEQ ID NO: 12843 - DNA, 20 bp, synthetic construct
  misc_feature 1..20: note = chemically synthesized
  source 1..20: mol_type = other DNA
cgtttgtgctcgataaaaat

SEQ ID NO: 12844 - DNA, 20 bp, synthetic construct
  misc_feature 1..20: note = chemically synthesized
  source 1..20: mol_type = other DNA
aaaataagaatgtcccccaa

SEQ ID NO: 12845 - DNA, 20 bp, synthetic construct
  misc_feature 1..20: note = chemically synthesized
  source 1..20: mol_type = other DNA
aaataagaatgtcccccaat

SEQ ID NO: 12846 - DNA, 20 bp, synthetic construct
  misc_feature 1..20: note = chemically synthesized
  source 1..20: mol_type = other DNA
taagaatgtcccccaatggg

SEQ ID NO: 12847 - DNA, 20 bp, synthetic construct
  misc_feature 1..20: note = chemically synthesized
  source 1..20: mol_type = other DNA
cccccaatgggaagttcatc

SEQ ID NO: 12848 - DNA, 20 bp, synthetic construct
  misc_feature 1..20: note = chemically synthesized
  source 1..20: mol_type = other DNA
agttcatctggcactgccca

SEQ ID NO: 12849 - DNA, 20 bp, synthetic construct
  misc_feature 1..20: note = chemically synthesized
  source 1..20: mol_type = other DNA
gttcatctggcactgcccac

SEQ ID NO: 12850 - DNA, 20 bp, synthetic construct
  misc_feature 1..20: note = chemically synthesized
  source 1..20: mol_type = other DNA
atctggcactgcccacaggt

SEQ ID NO: 12851 - DNA, 20 bp, synthetic construct
  misc_feature 1..20: note = chemically synthesized
  source 1..20: mol_type = other DNA
tctggcactgcccacaggtg

SEQ ID NO: 12852 - DNA, 20 bp, synthetic construct
  misc_feature 1..20: note = chemically synthesized
  source 1..20: mol_type = other DNA
tggcactgcccacaggtgag

SEQ ID NO: 12853 - DNA, 20 bp, synthetic construct
  misc_feature 1..20: note = chemically synthesized
  source 1..20: mol_type = other DNA
ggcactgcccacaggtgagg

SEQ ID NO: 12854 - DNA, 20 bp, synthetic construct
  misc_feature 1..20: note = chemically synthesized
  source 1..20: mol_type = other DNA
aggaggtcatgatccccttc

SEQ ID NO: 12855 - DNA, 20 bp, synthetic construct
  misc_feature 1..20: note = chemically synthesized
  source 1..20: mol_type = other DNA
gaggtcatgatccccttctg

SEQ ID NO: 12856 - DNA, 20 bp, synthetic construct
  misc_feature 1..20: note = chemically synthesized
  source 1..20: mol_type = other DNA
tccccttctggagctcccaa

SEQ ID NO: 12857 - DNA, 20 bp, synthetic construct
  misc_feature 1..20: note = chemically synthesized
  source 1..20: mol_type = other DNA
ccccttctggagctcccaac

SEQ ID NO: 12858 - DNA, 20 bp, synthetic construct
  misc_feature 1..20: note = chemically synthesized
  source 1..20: mol_type = other DNA
ctggagctcccaacgggccg

SEQ ID NO: 12859 - DNA, 20 bp, synthetic construct
  misc_feature 1..20: note = chemically synthesized
  source 1..20: mol_type = other DNA
gctcccaacgggccgtggtc

SEQ ID NO: 12860 - DNA, 20 bp, synthetic construct
  misc_feature 1..20: note = chemically synthesized
  source 1..20: mol_type = other DNA
tggtctggttcatcatctgt

SEQ ID NO: 12861 - DNA, 20 bp, synthetic construct
  misc_feature 1..20: note = chemically synthesized
  source 1..20: mol_type = other DNA
tggttcatcatctgtaagaa

SEQ ID NO: 12862 - DNA, 20 bp, synthetic construct
  misc_feature 1..20: note = chemically synthesized
  source 1..20: mol_type = other DNA
tcatctgtaagaatggcttc

SEQ ID NO: 12863 - DNA, 20 bp, synthetic construct
  misc_feature 1..20: note = chemically synthesized
  source 1..20: mol_type = other DNA
atctgtaagaatggcttcaa

SEQ ID NO: 12864 - DNA, 20 bp, synthetic construct
  misc_feature 1..20: note = chemically synthesized
  source 1..20: mol_type = other DNA
tctgtaagaatggcttcaag

SEQ ID NO: 12865 - DNA, 20 bp, synthetic construct
  misc_feature 1..20: note = chemically synthesized
  source 1..20: mol_type = other DNA
aagaatggcttcaagaggct

SEQ ID NO: 12866 - DNA, 20 bp, synthetic construct
  misc_feature 1..20: note = chemically synthesized
  source 1..20: mol_type = other DNA
ggcttcaagaggctcggctg

SEQ ID NO: 12867 - DNA, 20 bp, synthetic construct
  misc_feature 1..20: note = chemically synthesized
  source 1..20: mol_type = other DNA
tcaagaggctcggctgtggt

SEQ ID NO: 12868 - DNA, 20 bp, synthetic construct
  misc_feature 1..20: note = chemically synthesized
  source 1..20: mol_type = other DNA
aagaggctcggctgtggttg

SEQ ID NO: 12869 - DNA, 20 bp, synthetic construct
  misc_feature 1..20: note = chemically synthesized
  source 1..20: mol_type = other DNA
ggctgtggttggagaaacaa

SEQ ID NO: 12870 - DNA, 20 bp, synthetic construct
  misc_feature 1..20: note = chemically synthesized
  source 1..20: mol_type = other DNA
agaaacaaaagcacaattat

SEQ ID NO: 12871 - DNA, 20 bp, synthetic construct
  misc_feature 1..20: note = chemically synthesized
  source 1..20: mol_type = other DNA
aaacaaaagcacaattatta

SEQ ID NO: 12872 - DNA, 20 bp, synthetic construct
  misc_feature 1..20: note = chemically synthesized
  source 1..20: mol_type = other DNA
aagcacaattattagagtgc

SEQ ID NO: 12873 - DNA, 20 bp, synthetic construct
  misc_feature 1..20: note = chemically synthesized
  source 1..20: mol_type = other DNA
gcacaattattagagtgcca

SEQ ID NO: 12874 - DNA, 20 bp, synthetic construct
  misc_feature 1..20: note = chemically synthesized
  source 1..20: mol_type = other DNA
acaattattagagtgccaga

SEQ ID NO: 12875 - DNA, 20 bp, synthetic construct
  misc_feature 1..20: note = chemically synthesized
  source 1..20: mol_type = other DNA
caattattagagtgccagag

SEQ ID NO: 12876 - DNA, 20 bp, synthetic construct
  misc_feature 1..20: note = chemically synthesized
  source 1..20: mol_type = other DNA
tattagagtgccagagagga

SEQ ID NO: 12877 - DNA, 20 bp, synthetic construct
  misc_feature 1..20: note = chemically synthesized
  source 1..20: mol_type = other DNA
agagtgccagagaggacaga

SEQ ID NO: 12878 - DNA, 20 bp, synthetic construct
  misc_feature 1..20: note = chemically synthesized
  source 1..20: mol_type = other DNA
gagtgccagagaggacagaa

SEQ ID NO: 12879 - DNA, 20 bp, synthetic construct
  misc_feature 1..20: note = chemically synthesized
  source 1..20: mol_type = other DNA
agtgccagagaggacagaaa

SEQ ID NO: 12880 - DNA, 20 bp, synthetic construct
  misc_feature 1..20: note = chemically synthesized
  source 1..20: mol_type = other DNA
gtgccagagaggacagaaag

SEQ ID NO: 12881 - DNA, 20 bp, synthetic construct
  misc_feature 1..20: note = chemically synthesized
  source 1..20: mol_type = other DNA
gccagagaggacagaaaggg

SEQ ID NO: 12882 - DNA, 20 bp, synthetic construct
  misc_feature 1..20: note = chemically synthesized
  source 1..20: mol_type = other DNA
agagaggacagaaaggggag

SEQ ID NO: 12883 - DNA, 20 bp, synthetic construct
  misc_feature 1..20: note = chemically synthesized
  source 1..20: mol_type = other DNA
ccatcccaccacatcatgta

SEQ ID NO: 12884 - DNA, 20 bp, synthetic construct
  misc_feature 1..20: note = chemically synthesized
  source 1..20: mol_type = other DNA
cacatcatgtaaagtgtttc

SEQ ID NO: 12885 - DNA, 20 bp, synthetic construct
  misc_feature 1..20: note = chemically synthesized
  source 1..20: mol_type = other DNA
acatcatgtaaagtgtttct

SEQ ID NO: 12886 - DNA, 20 bp, synthetic construct
  misc_feature 1..20: note = chemically synthesized
  source 1..20: mol_type = other DNA
aggcttctctatataatacc

SEQ ID NO: 12887 - DNA, 20 bp, synthetic construct
  misc_feature 1..20: note = chemically synthesized
  source 1..20: mol_type = other DNA
atataatacccagaaaatgt

SEQ ID NO: 12888 - DNA, 20 bp, synthetic construct
  misc_feature 1..20: note = chemically synthesized
  source 1..20: mol_type = other DNA
agaaaatgtgagcatacaaa

SEQ ID NO: 12889 - DNA, 20 bp, synthetic construct
  misc_feature 1..20: note = chemically synthesized
  source 1..20: mol_type = other DNA
tgtgagcatacaaaaagtac

SEQ ID NO: 12890 - DNA, 20 bp, synthetic construct
  misc_feature 1..20: note = chemically synthesized
  source 1..20: mol_type = other DNA
gtgagcatacaaaaagtaca

SEQ ID NO: 12891 - DNA, 20 bp, synthetic construct
  misc_feature 1..20: note = chemically synthesized
  source 1..20: mol_type = other DNA
acaaaaagtacaaggatgtg

SEQ ID NO: 12892 - DNA, 20 bp, synthetic construct
  misc_feature 1..20: note = chemically synthesized
  source 1..20: mol_type = other DNA
caaaaagtacaaggatgtga

SEQ ID NO: 12893 - DNA, 20 bp, synthetic construct
  misc_feature 1..20: note = chemically synthesized
  source 1..20: mol_type = other DNA
aggatgtgaaggttatcaac

SEQ ID NO: 12894 - DNA, 20 bp, synthetic construct
  misc_feature 1..20: note = chemically synthesized
  source 1..20: mol_type = other DNA
gatgtgaaggttatcaacca

SEQ ID NO: 12895 - DNA, 20 bp, synthetic construct
  misc_feature 1..20: note = chemically synthesized
  source 1..20: mol_type = other DNA
tgtgaaggttatcaaccaga

SEQ ID NO: 12896 - DNA, 20 bp, synthetic construct
  misc_feature 1..20: note = chemically synthesized
  source 1..20: mol_type = other DNA
cagagagcaaatttgtcaat

SEQ ID NO: 12897 - DNA, 20 bp, synthetic construct
  misc_feature 1..20: note = chemically synthesized
  source 1..20: mol_type = other DNA
agagagcaaatttgtcaatg

SEQ ID NO: 12898 - DNA, 20 bp, synthetic construct
  misc_feature 1..20: note = chemically synthesized
  source 1..20: mol_type = other DNA
ggcaaatcatcacatatgta

SEQ ID NO: 12899 - DNA, 20 bp, synthetic construct
  misc_feature 1..20: note = chemically synthesized
  source 1..20: mol_type = other DNA
catcacatatgtaaagaaaa

SEQ ID NO: 12900 - DNA, 20 bp, synthetic construct
  misc_feature 1..20: note = chemically synthesized
  source 1..20: mol_type = other DNA
cagtcttccttgcataactc

SEQ ID NO: 12901 - DNA, 20 bp, synthetic construct
  misc_feature 1..20: note = chemically synthesized
  source 1..20: mol_type = other DNA
gtcttccttgcataactcca

SEQ ID NO: 12902 - DNA, 20 bp, synthetic construct
  misc_feature 1..20: note = chemically synthesized
  source 1..20: mol_type = other DNA
tatacccatgcacacaccca

SEQ ID NO: 12903 - DNA, 20 bp, synthetic construct
  misc_feature 1..20: note = chemically synthesized
  source 1..20: mol_type = other DNA
cccacagcaacaaatgtgtc

SEQ ID NO: 12904 - DNA, 20 bp, synthetic construct
  misc_feature 1..20: note = chemically synthesized
  source 1..20: mol_type = other DNA
aacaaatgtgtctggtttgt

SEQ ID NO: 12905 - DNA, 20 bp, synthetic construct
  misc_feature 1..20: note = chemically synthesized
  source 1..20: mol_type = other DNA
atgtgtctggtttgtaagtt

SEQ ID NO: 12906 - DNA, 20 bp, synthetic construct
  misc_feature 1..20: note = chemically synthesized
  source 1..20: mol_type = other DNA
gtctggtttgtaagtttaga

SEQ ID NO: 12907 - DNA, 20 bp, synthetic construct
  misc_feature 1..20: note = chemically synthesized
  source 1..20: mol_type = other DNA
tagaaagaatgctacttaaa

SEQ ID NO: 12908 - DNA, 20 bp, synthetic construct
  misc_feature 1..20: note = chemically synthesized
  source 1..20: mol_type = other DNA
tgctacttaaatagttaaca

SEQ ID NO: 12909 - DNA, 20 bp, synthetic construct
  misc_feature 1..20: note = chemically synthesized
  source 1..20: mol_type = other DNA
gctacttaaatagttaacac

SEQ ID NO: 12910 - DNA, 20 bp, synthetic construct
  misc_feature 1..20: note = chemically synthesized
  source 1..20: mol_type = other DNA
ctacttaaatagttaacaca

SEQ ID NO: 12911 - DNA, 20 bp, synthetic construct
  misc_feature 1..20: note = chemically synthesized
  source 1..20: mol_type = other DNA
tagttaacacagggaacata

SEQ ID NO: 12912 - DNA, 20 bp, synthetic construct
  misc_feature 1..20: note = chemically synthesized
  source 1..20: mol_type = other DNA
taacacagggaacataaaga

SEQ ID NO: 12913 - DNA, 20 bp, synthetic construct
  misc_feature 1..20: note = chemically synthesized
  source 1..20: mol_type = other DNA
aaagcttaaataataactac

SEQ ID NO: 12914 - DNA, 20 bp, synthetic construct
  misc_feature 1..20: note = chemically synthesized
  source 1..20: mol_type = other DNA
ataataactacaagaaaaac

SEQ ID NO: 12915 - DNA, 20 bp, synthetic construct
  misc_feature 1..20: note = chemically synthesized
  source 1..20: mol_type = other DNA
gaaaaactggttaaaaaaaa

SEQ ID NO: 12916 - DNA, 20 bp, synthetic construct
  misc_feature 1..20: note = chemically synthesized
  source 1..20: mol_type = other DNA
aaactggttaaaaaaaaaag

SEQ ID NO: 12917 - DNA, 20 bp, synthetic construct
  misc_feature 1..20: note = chemically synthesized
  source 1..20: mol_type = other DNA
tggttaaaaaaaaaagtgga

SEQ ID NO: 12918 - DNA, 20 bp, synthetic construct
  misc_feature 1..20: note = chemically synthesized
  source 1..20: mol_type = other DNA
tttcttttttcctatacacc

SEQ ID NO: 12919 - DNA, 20 bp, synthetic construct
  misc_feature 1..20: note = chemically synthesized
  source 1..20: mol_type = other DNA
ccaagttgtccattgtgcca

SEQ ID NO: 12920 - DNA, 20 bp, synthetic construct
  misc_feature 1..20: note = chemically synthesized
  source 1..20: mol_type = other DNA
tccattgtgccaaagaatga

SEQ ID NO: 12921 - DNA, 20 bp, synthetic construct
  misc_feature 1..20: note = chemically synthesized
  source 1..20: mol_type = other DNA
ccattgtgccaaagaatgaa

SEQ ID NO: 12922 - DNA, 20 bp, synthetic construct
  misc_feature 1..20: note = chemically synthesized
  source 1..20: mol_type = other DNA
attgtgccaaagaatgaaag

SEQ ID NO: 12923 - DNA, 20 bp, synthetic construct
  misc_feature 1..20: note = chemically synthesized
  source 1..20: mol_type = other DNA
tgtgccaaagaatgaaagga

SEQ ID NO: 12924 - DNA, 20 bp, synthetic construct
  misc_feature 1..20: note = chemically synthesized
  source 1..20: mol_type = other DNA
gtgccaaagaatgaaaggag

SEQ ID NO: 12925 - DNA, 20 bp, synthetic construct
  misc_feature 1..20: note = chemically synthesized
  source 1..20: mol_type = other DNA
gtgtgaatgtatatactcct

SEQ ID NO: 12926 - DNA, 20 bp, synthetic construct
  misc_feature 1..20: note = chemically synthesized
  source 1..20: mol_type = other DNA
tgtatatactcctaagtaaa

SEQ ID NO: 12927 - DNA, 20 bp, synthetic construct
  misc_feature 1..20: note = chemically synthesized
  source 1..20: mol_type = other DNA
tactcctaagtaaacagaca

SEQ ID NO: 12928 - DNA, 20 bp, synthetic construct
  misc_feature 1..20: note = chemically synthesized
  source 1..20: mol_type = other DNA
acagacatggcttcataaat

SEQ ID NO: 12929 - DNA, 20 bp, synthetic construct
  misc_feature 1..20: note = chemically synthesized
  source 1..20: mol_type = other DNA
acatggcttcataaattaga

SEQ ID NO: 12930 - DNA, 20 bp, synthetic construct
  misc_feature 1..20: note = chemically synthesized
  source 1..20: mol_type = other DNA
cacatttacactgctgtaat

SEQ ID NO: 12931 - DNA, 20 bp, synthetic construct
  misc_feature 1..20: note = chemically synthesized
  source 1..20: mol_type = other DNA
gactgcatgcacctatgaaa

SEQ ID NO: 12932 - DNA, 20 bp, synthetic construct
  misc_feature 1..20: note = chemically synthesized
  source 1..20: mol_type = other DNA
tctaaataataatcatgtcg

SEQ ID NO: 12933 - DNA, 20 bp, synthetic construct
  misc_feature 1..20: note = chemically synthesized
  source 1..20: mol_type = other DNA
aacctttctgctctcactct

SEQ ID NO: 12934 - DNA, 20 bp, synthetic construct
  misc_feature 1..20: note = chemically synthesized
  source 1..20: mol_type = other DNA
ctttctgctctcactctcag

SEQ ID NO: 12935 - DNA, 20 bp, synthetic construct
  misc_feature 1..20: note = chemically synthesized
  source 1..20: mol_type = other DNA
tcagcagtgccacaaaatca

SEQ ID NO: 12936 - DNA, 20 bp, synthetic construct
  misc_feature 1..20: note = chemically synthesized
  source 1..20: mol_type = other DNA
tcaaagaaataccaaatgca

SEQ ID NO: 12937 - DNA, 20 bp, synthetic construct
  misc_feature 1..20: note = chemically synthesized
  source 1..20: mol_type = other DNA
caaagaaataccaaatgcac

SEQ ID NO: 12938 - DNA, 20 bp, synthetic construct
  misc_feature 1..20: note = chemically synthesized
  source 1..20: mol_type = other DNA
agaaataccaaatgcacggg

SEQ ID NO: 12939 - DNA, 20 bp, synthetic construct
  misc_feature 1..20: note = chemically synthesized
  source 1..20: mol_type = other DNA
aatgcacgggcagtatttct

SEQ ID NO: 12940 - DNA, 20 bp, synthetic construct
  misc_feature 1..20: note = chemically synthesized
  source 1..20: mol_type = other DNA
gcagtatttctcagacacat

SEQ ID NO: 12941 - DNA, 20 bp, synthetic construct
  misc_feature 1..20: note = chemically synthesized
  source 1..20: mol_type = other DNA
tctcagacacattagctaaa

SEQ ID NO: 12942 - DNA, 20 bp, synthetic construct
  misc_feature 1..20: note = chemically synthesized
  source 1..20: mol_type = other DNA
ctcagacacattagctaaat

SEQ ID NO: 12943 - DNA, 20 bp, synthetic construct
  misc_feature 1..20: note = chemically synthesized
  source 1..20: mol_type = other DNA
tagctaaatgggatactttt

SEQ ID NO: 12944 - DNA, 20 bp, synthetic construct
  misc_feature 1..20: note = chemically synthesized
  source 1..20: mol_type = other DNA
tgggatacttttgagtactt

SEQ ID NO: 12945 - DNA, 20 bp, synthetic construct
  misc_feature 1..20: note = chemically synthesized
  source 1..20: mol_type = other DNA
ttttgagtacttaagaaaat

SEQ ID NO: 12946 - DNA, 20 bp, synthetic construct
  misc_feature 1..20: note = chemically synthesized
  source 1..20: mol_type = other DNA
acttaagaaaataagccaat

SEQ ID NO: 12947 - DNA, 20 bp, synthetic construct
  misc_feature 1..20: note = chemically synthesized
  source 1..20: mol_type = other DNA
agtcattttttttttattct

SEQ ID NO: 12948 - DNA, 20 bp, synthetic construct
  misc_feature 1..20: note = chemically synthesized
  source 1..20: mol_type = other DNA
tttttttttattctgagaaa

SEQ ID NO: 12949 - DNA, 20 bp, synthetic construct
  misc_feature 1..20: note = chemically synthesized
  source 1..20: mol_type = other DNA
attctaaacatgtttgcact

SEQ ID NO: 12950 - DNA, 20 bp, synthetic construct
  misc_feature 1..20: note = chemically synthesized
  source 1..20: mol_type = other DNA
ctaaacatgtttgcacttgg

SEQ ID NO: 12951 - DNA, 20 bp, synthetic construct
  misc_feature 1..20: note = chemically synthesized
  source 1..20: mol_type = other DNA
ggcatctatgatataaaaat

SEQ ID NO: 12952 - DNA, 20 bp, synthetic construct
  misc_feature 1..20: note = chemically synthesized
  source 1..20: mol_type = other DNA
ctatgatataaaaatcagaa

SEQ ID NO: 12953 - DNA, 20 bp, synthetic construct
  misc_feature 1..20: note = chemically synthesized
  source 1..20: mol_type = other DNA
atataaaaatcagaatggtc

SEQ ID NO: 12954 - DNA, 20 bp, synthetic construct
  misc_feature 1..20: note = chemically synthesized
  source 1..20: mol_type = other DNA
gtcaagcaaacaccacattt

SEQ ID NO: 12955 - DNA, 20 bp, synthetic construct
  misc_feature 1..20: note = chemically synthesized
  source 1..20: mol_type = other DNA
caagcaaacaccacatttca

SEQ ID NO: 12956 - DNA, 20 bp, synthetic construct
  misc_feature 1..20: note = chemically synthesized
  source 1..20: mol_type = other DNA
caaacaccacatttcagagc

SEQ ID NO: 12957 - DNA, 20 bp, synthetic construct
  misc_feature 1..20: note = chemically synthesized
  source 1..20: mol_type = other DNA
aaacaccacatttcagagca

SEQ ID NO: 12958 - DNA, 20 bp, synthetic construct
  misc_feature 1..20: note = chemically synthesized
  source 1..20: mol_type = other DNA
ccacatttcagagcaaggct

SEQ ID NO: 12959 - DNA, 20 bp, synthetic construct
  misc_feature 1..20: note = chemically synthesized
  source 1..20: mol_type = other DNA
catttcagagcaaggctgag

SEQ ID NO: 12960 - DNA, 20 bp, synthetic construct
  misc_feature 1..20: note = chemically synthesized
  source 1..20: mol_type = other DNA
aggctgagaagtcctttctt

SEQ ID NO: 12961 - DNA, 20 bp, synthetic construct
  misc_feature 1..20: note = chemically synthesized
  source 1..20: mol_type = other DNA
tacttcgcctaatgttgtca

SEQ ID NO: 12962 - DNA, 20 bp, synthetic construct
  misc_feature 1..20: note = chemically synthesized
  source 1..20: mol_type = other DNA
ttcgcctaatgttgtcaaag

SEQ ID NO: 12963 - DNA, 20 bp, synthetic construct
  misc_feature 1..20: note = chemically synthesized
  source 1..20: mol_type = other DNA
agtggactaattttctgaat

SEQ ID NO: 12964 - DNA, 20 bp, synthetic construct
  misc_feature 1..20: note = chemically synthesized
  source 1..20: mol_type = other DNA
gctccaaaatgcttcattat

SEQ ID NO: 12965 - DNA, 20 bp, synthetic construct
  misc_feature 1..20: note = chemically synthesized
  source 1..20: mol_type = other DNA
atttctgcacacataatcac

SEQ ID NO: 12966 - DNA, 20 bp, synthetic construct
  misc_feature 1..20: note = chemically synthesized
  source 1..20: mol_type = other DNA
tctgcacacataatcaccag

SEQ ID NO: 12967 - DNA, 20 bp, synthetic construct
  misc_feature 1..20: note = chemically synthesized
  source 1..20: mol_type = other DNA
cacacataatcaccagcgga

SEQ ID NO: 12968 - DNA, 20 bp, synthetic construct
  misc_feature 1..20: note = chemically synthesized
  source 1..20: mol_type = other DNA
tcaccagcggatggtataac

SEQ ID NO: 12969 - DNA, 20 bp, synthetic construct
  misc_feature 1..20: note = chemically synthesized
  source 1..20: mol_type = other DNA
caccagcggatggtataaca

SEQ ID NO: 12970 - DNA, 20 bp, synthetic construct
  misc_feature 1..20: note = chemically synthesized
  source 1..20: mol_type = other DNA
cagcggatggtataacaagg

SEQ ID NO: 12971 - DNA, 20 bp, synthetic construct
  misc_feature 1..20: note = chemically synthesized
  source 1..20: mol_type = other DNA
aactttgtactaaaatactc

SEQ ID NO: 12972 - DNA, 20 bp, synthetic construct
  misc_feature 1..20: note = chemically synthesized
  source 1..20: mol_type = other DNA
tactccagcatctactttac

SEQ ID NO: 12973 - DNA, 20 bp, synthetic construct
  misc_feature 1..20: note = chemically synthesized
  source 1..20: mol_type = other DNA
accagcttctatcatttttt

SEQ ID NO: 12974 - DNA, 20 bp, synthetic construct
  misc_feature 1..20: note = chemically synthesized
  source 1..20: mol_type = other DNA
tatcattttttaagcttcca

SEQ ID NO: 12975 - DNA, 20 bp, synthetic construct
  misc_feature 1..20: note = chemically synthesized
  source 1..20: mol_type = other DNA
atcattttttaagcttccaa

SEQ ID NO: 12976 - DNA, 20 bp, synthetic construct
  misc_feature 1..20: note = chemically synthesized
  source 1..20: mol_type = other DNA
tcattttttaagcttccaaa

SEQ ID NO: 12977 - DNA, 20 bp, synthetic construct
  misc_feature 1..20: note = chemically synthesized
  source 1..20: mol_type = other DNA
cattttttaagcttccaaag

SEQ ID NO: 12978 - DNA, 20 bp, synthetic construct
  misc_feature 1..20: note = chemically synthesized
  source 1..20: mol_type = other DNA
tttaagcttccaaaggggaa

SEQ ID NO: 12979 - DNA, 20 bp, synthetic construct
  misc_feature 1..20: note = chemically synthesized
  source 1..20: mol_type = other DNA
taagcttccaaaggggaaaa

SEQ ID NO: 12980 - DNA, 20 bp, synthetic construct
  misc_feature 1..20: note = chemically synthesized
  source 1..20: mol_type = other DNA
agcttccaaaggggaaaaga

SEQ ID NO: 12981 - DNA, 20 bp, synthetic construct
  misc_feature 1..20: note = chemically synthesized
  source 1..20: mol_type = other DNA
tccaaaggggaaaagagagt

SEQ ID NO: 12982 - DNA, 20 bp, synthetic construct
  misc_feature 1..20: note = chemically synthesized
  source 1..20: mol_type = other DNA
aaggggaaaagagagttggt

SEQ ID NO: 12983 - DNA, 20 bp, synthetic construct
  misc_feature 1..20: note = chemically synthesized
  source 1..20: mol_type = other DNA
atcacaaaatacaaaacatc

SEQ ID NO: 12984 - DNA, 20 bp, synthetic construct
  misc_feature 1..20: note = chemically synthesized
  source 1..20: mol_type = other DNA
tcacaaaatacaaaacatcc

SEQ ID NO: 12985 - DNA, 20 bp, synthetic construct
  misc_feature 1..20: note = chemically synthesized
  source 1..20: mol_type = other DNA
caaaacatccaggatgctgc

SEQ ID NO: 12986 - DNA, 20 bp, synthetic construct
  misc_feature 1..20: note = chemically synthesized
  source 1..20: mol_type = other DNA
gctgccagttaataaaactg

SEQ ID NO: 12987 - DNA, 20 bp, synthetic construct
  misc_feature 1..20: note = chemically synthesized
  source 1..20: mol_type = other DNA
gccagttaataaaactgaag

SEQ ID NO: 12988 - DNA, 20 bp, synthetic construct
  misc_feature 1..20: note = chemically synthesized
  source 1..20: mol_type = other DNA
aactgaagcagaaaatgtac

SEQ ID NO: 12989 - DNA, 20 bp, synthetic construct
  misc_feature 1..20: note = chemically synthesized
  source 1..20: mol_type = other DNA
gaaaatgtacaagtcttaaa

SEQ ID NO: 12990 - DNA, 20 bp, synthetic construct
  misc_feature 1..20: note = chemically synthesized
  source 1..20: mol_type = other DNA
acaagtcttaaacagttaat

SEQ ID NO: 12991 - DNA, 20 bp, synthetic construct
  misc_feature 1..20: note = chemically synthesized
  source 1..20: mol_type = other DNA
ttaatcagtctgaccttctt

SEQ ID NO: 12992 - DNA, 20 bp, synthetic construct
  misc_feature 1..20: note = chemically synthesized
  source 1..20: mol_type = other DNA
tcagtctgaccttctttagc

SEQ ID NO: 12993 - DNA, 20 bp, synthetic construct
  misc_feature 1..20: note = chemically synthesized
  source 1..20: mol_type = other DNA
ttttacatttaatgaactta

SEQ ID NO: 12994 - DNA, 20 bp, synthetic construct
  misc_feature 1..20: note = chemically synthesized
  source 1..20: mol_type = other DNA
atttaatgaacttaaagcca

SEQ ID NO: 12995 - DNA, 20 bp, synthetic construct
  misc_feature 1..20: note = chemically synthesized
  source 1..20: mol_type = other DNA
ttaatgaacttaaagccaca

SEQ ID NO: 12996 - DNA, 20 bp, synthetic construct
  misc_feature 1..20: note = chemically synthesized
  source 1..20: mol_type = other DNA
agccacagagaatcaaaaaa

SEQ ID NO: 12997 - DNA, 20 bp, synthetic construct
  misc_feature 1..20: note = chemically synthesized
  source 1..20: mol_type = other DNA
caaaaaatagattttaattt

SEQ ID NO: 12998 - DNA, 20 bp, synthetic construct
  misc_feature 1..20: note = chemically synthesized
  source 1..20: mol_type = other DNA
aatagattttaatttgagtg

SEQ ID NO: 12999 - DNA, 20 bp, synthetic construct
  misc_feature 1..20: note = chemically synthesized
  source 1..20: mol_type = other DNA
ttaatttgagtgtagaatat

SEQ ID NO: 13000 - DNA, 20 bp, synthetic construct
  misc_feature 1..20: note = chemically synthesized
  source 1..20: mol_type = other DNA
ttgagtgtagaatattggaa

SEQ ID NO: 13001 - DNA, 20 bp, synthetic construct
  misc_feature 1..20: note = chemically synthesized
  source 1..20: mol_type = other DNA
tattggaacagattttgata

SEQ ID NO: 13002 - DNA, 20 bp, synthetic construct
  misc_feature 1..20: note = chemically synthesized
  source 1..20: mol_type = other DNA
tttgataaagtgcaaaaatc

SEQ ID NO: 13003 - DNA, 20 bp, synthetic construct
  misc_feature 1..20: note = chemically synthesized
  source 1..20: mol_type = other DNA
gtgcaaaaatccagtgaact

SEQ ID NO: 13004 - DNA, 20 bp, synthetic construct
  misc_feature 1..20: note = chemically synthesized
  source 1..20: mol_type = other DNA
tgcaaaaatccagtgaactc

SEQ ID NO: 13005 - DNA, 20 bp, synthetic construct
  misc_feature 1..20: note = chemically synthesized
  source 1..20: mol_type = other DNA
aaatttatttcaaccctacc

SEQ ID NO: 13006 - DNA, 20 bp, synthetic construct
  misc_feature 1..20: note = chemically synthesized
  source 1..20: mol_type = other DNA
aatttatttcaaccctaccc

SEQ ID NO: 13007 - DNA, 20 bp, synthetic construct
  misc_feature 1..20: note = chemically synthesized
  source 1..20: mol_type = other DNA
ccctacccaggctgaatatt

SEQ ID NO: 13008 - DNA, 20 bp, synthetic construct
  misc_feature 1..20: note = chemically synthesized
  source 1..20: mol_type = other DNA
cctacccaggctgaatattg

SEQ ID NO: 13009 - DNA, 20 bp, synthetic construct
  misc_feature 1..20: note = chemically synthesized
  source 1..20: mol_type = other DNA
ctacccaggctgaatattga

SEQ ID NO: 13010 - DNA, 20 bp, synthetic construct
  misc_feature 1..20: note = chemically synthesized
  source 1..20: mol_type = other DNA
tacccaggctgaatattgag

SEQ ID NO: 13011 - DNA, 20 bp, synthetic construct
  misc_feature 1..20: note = chemically synthesized
  source 1..20: mol_type = other DNA
acccaggctgaatattgagg

SEQ ID NO: 13012 - DNA, 20 bp, synthetic construct
  misc_feature 1..20: note = chemically synthesized
  source 1..20: mol_type = other DNA
caggctgaatattgaggggg

SEQ ID NO: 13013 - DNA, 20 bp, synthetic construct
  misc_feature 1..20: note = chemically synthesized
  source 1..20: mol_type = other DNA
gaatattgagggggaagatc

SEQ ID NO: 13014 - DNA, 20 bp, synthetic construct
  misc_feature 1..20: note = chemically synthesized
  source 1..20: mol_type = other DNA
atattgagggggaagatctg

SEQ ID NO: 13015 - DNA, 20 bp, synthetic construct
  misc_feature 1..20: note = chemically synthesized
  source 1..20: mol_type = other DNA
ggaagatctggagtaactcc

SEQ ID NO: 13016 - DNA, 20 bp, synthetic construct
  misc_feature 1..20: note = chemically synthesized
  source 1..20: mol_type = other DNA
ggagtaactcccagatgtgc

SEQ ID NO: 13017 - DNA, 20 bp, synthetic construct
  misc_feature 1..20: note = chemically synthesized
  source 1..20: mol_type = other DNA
gagtaactcccagatgtgct

SEQ ID NO: 13018 - DNA, 20 bp, synthetic construct
  misc_feature 1..20: note = chemically synthesized
  source 1..20: mol_type = other DNA
gtgctaggtgaaataatatt

SEQ ID NO: 13019 - DNA, 20 bp, synthetic construct
  misc_feature 1..20: note = chemically synthesized
  source 1..20: mol_type = other DNA
gctaggtgaaataatattga

SEQ ID NO: 13020 - DNA, 20 bp, synthetic construct
  misc_feature 1..20: note = chemically synthesized
  source 1..20: mol_type = other DNA
taggtgaaataatattgaga

SEQ ID NO: 13021 - DNA, 20 bp, synthetic construct
  misc_feature 1..20: note = chemically synthesized
  source 1..20: mol_type = other DNA
aatattgagagagccctgcc

SEQ ID NO: 13022 - DNA, 20 bp, synthetic construct
  misc_feature 1..20: note = chemically synthesized
  source 1..20: mol_type = other DNA
gcctagctgcacctgtgctc

SEQ ID NO: 13023 - DNA, 20 bp, synthetic construct
  misc_feature 1..20: note = chemically synthesized
  source 1..20: mol_type = other DNA
tagctgcacctgtgctcaag

SEQ ID NO: 13024 - DNA, 20 bp, synthetic construct
  misc_feature 1..20: note = chemically synthesized
  source 1..20: mol_type = other DNA
agctgcacctgtgctcaagt

SEQ ID NO: 13025 - DNA, 20 bp, synthetic construct
  misc_feature 1..20: note = chemically synthesized
  source 1..20: mol_type = other DNA
gtaggacatctcataatttc

SEQ ID NO: 13026 - DNA, 20 bp, synthetic construct
  misc_feature 1..20: note = chemically synthesized
  source 1..20: mol_type = other DNA
atctcataatttctagcctc

SEQ ID NO: 13027 - DNA, 20 bp, synthetic construct
  misc_feature 1..20: note = chemically synthesized
  source 1..20: mol_type = other DNA
tactcctcctaatttaacat

SEQ ID NO: 13028 - DNA, 20 bp, synthetic construct
  misc_feature 1..20: note = chemically synthesized
  source 1..20: mol_type = other DNA
actcctcctaatttaacata

SEQ ID NO: 13029 - DNA, 20 bp, synthetic construct
  misc_feature 1..20: note = chemically synthesized
  source 1..20: mol_type = other DNA
aatttaacataaggtcacca

SEQ ID NO: 13030 - DNA, 20 bp, synthetic construct
  misc_feature 1..20: note = chemically synthesized
  source 1..20: mol_type = other DNA
atttaacataaggtcaccac

SEQ ID NO: 13031 - DNA, 20 bp, synthetic construct
  misc_feature 1..20: note = chemically synthesized
  source 1..20: mol_type = other DNA
aaggtcaccacaggaatatg

SEQ ID NO: 13032 - DNA, 20 bp, synthetic construct
  misc_feature 1..20: note = chemically synthesized
  source 1..20: mol_type = other DNA
aggtcaccacaggaatatga

SEQ ID NO: 13033 - DNA, 20 bp, synthetic construct
  misc_feature 1..20: note = chemically synthesized
  source 1..20: mol_type = other DNA
aggttatattcctactaata

SEQ ID NO: 13034 - DNA, 20 bp, synthetic construct
  misc_feature 1..20: note = chemically synthesized
  source 1..20: mol_type = other DNA
tatattcctactaataaaga

SEQ ID NO: 13035 - DNA, 20 bp, synthetic construct
  misc_feature 1..20: note = chemically synthesized
  source 1..20: mol_type = other DNA
tcctactaataaagacagta

SEQ ID NO: 13036 - DNA, 20 bp, synthetic construct
  misc_feature 1..20: note = chemically synthesized
  source 1..20: mol_type = other DNA
actaataaagacagtaaagt

SEQ ID NO: 13037 - DNA, 20 bp, synthetic construct
  misc_feature 1..20: note = chemically synthesized
  source 1..20: mol_type = other DNA
tgtttctttgcccaacatac

SEQ ID NO: 13038 - DNA, 20 bp, synthetic construct
  misc_feature 1..20: note = chemically synthesized
  source 1..20: mol_type = other DNA
ttgcccaacatactggccaa

SEQ ID NO: 13039 - DNA, 20 bp, synthetic construct
  misc_feature 1..20: note = chemically synthesized
  source 1..20: mol_type = other DNA
tactggccaaaagataaata

SEQ ID NO: 13040 - DNA, 20 bp, synthetic construct
  misc_feature 1..20: note = chemically synthesized
  source 1..20: mol_type = other DNA
tatgcatacttttcaaataa

SEQ ID NO: 13041 - DNA, 20 bp, synthetic construct
  misc_feature 1..20: note = chemically synthesized
  source 1..20: mol_type = other DNA
gcatacttttcaaataaaag

SEQ ID NO: 13042 - DNA, 20 bp, synthetic construct
  misc_feature 1..20: note = chemically synthesized
  source 1..20: mol_type = other DNA
ttcaaataaaagaagacaaa

SEQ ID NO: 13043 - DNA, 20 bp, synthetic construct
  misc_feature 1..20: note = chemically synthesized
  source 1..20: mol_type = other DNA
aaataaaagaagacaaacag

SEQ ID NO: 13044 - DNA, 20 bp, synthetic construct
  misc_feature 1..20: note = chemically synthesized
  source 1..20: mol_type = other DNA
catttgcttccattttgacc

SEQ ID NO: 13045 - DNA, 20 bp, synthetic construct
  misc_feature 1..20: note = chemically synthesized
  source 1..20: mol_type = other DNA
tgcttccattttgaccaagt

SEQ ID NO: 13046 - DNA, 20 bp, synthetic construct
  misc_feature 1..20: note = chemically synthesized
  source 1..20: mol_type = other DNA
gcttccattttgaccaagtg

SEQ ID NO: 13047 - DNA, 20 bp, synthetic construct
  misc_feature 1..20: note = chemically synthesized
  source 1..20: mol_type = other DNA
cattttgaccaagtgaggaa

SEQ ID NO: 13048 - DNA, 20 bp, synthetic construct
  misc_feature 1..20: note = chemically synthesized
  source 1..20: mol_type = other DNA
attttgaccaagtgaggaat

SEQ ID NO: 13049 - DNA, 20 bp, synthetic construct
  misc_feature 1..20: note = chemically synthesized
  source 1..20: mol_type = other DNA
ttttgaccaagtgaggaata

SEQ ID NO: 13050 - DNA, 20 bp, synthetic construct
  misc_feature 1..20: note = chemically synthesized
  source 1..20: mol_type = other DNA
atattcctgttgtctgaatt

SEQ ID NO: 13051 - DNA, 20 bp, synthetic construct
  misc_feature 1..20: note = chemically synthesized
  source 1..20: mol_type = other DNA
tattcctgttgtctgaatta

SEQ ID NO: 13052 - DNA, 20 bp, synthetic construct
  misc_feature 1..20: note = chemically synthesized
  source 1..20: mol_type = other DNA
ttgtctgaattaaggatttt

SEQ ID NO: 13053 - DNA, 20 bp, synthetic construct
  misc_feature 1..20: note = chemically synthesized
  source 1..20: mol_type = other DNA
taagtacacattgataaatg

SEQ ID NO: 13054 - DNA, 20 bp, synthetic construct
  misc_feature 1..20: note = chemically synthesized
  source 1..20: mol_type = other DNA
ataaatgtggcttttttgtt

SEQ ID NO: 13055 - DNA, 20 bp, synthetic construct
  misc_feature 1..20: note = chemically synthesized
  source 1..20: mol_type = other DNA
gtggcttttttgtttagcat

SEQ ID NO: 13056 - DNA, 20 bp, synthetic construct
  misc_feature 1..20: note = chemically synthesized
  source 1..20: mol_type = other DNA
ttttgtttagcattagctac

SEQ ID NO: 13057 - DNA, 20 bp, synthetic construct
  misc_feature 1..20: note = chemically synthesized
  source 1..20: mol_type = other DNA
tagcattagctacaagttct

SEQ ID NO: 13058 - DNA, 20 bp, synthetic construct
  misc_feature 1..20: note = chemically synthesized
  source 1..20: mol_type = other DNA
agcattagctacaagttctg

SEQ ID NO: 13059 - DNA, 20 bp, synthetic construct
  misc_feature 1..20: note = chemically synthesized
  source 1..20: mol_type = other DNA
gctacaagttctgaggttta

SEQ ID NO: 13060 - DNA, 20 bp, synthetic construct
  misc_feature 1..20: note = chemically synthesized
  source 1..20: mol_type = other DNA
gttctgaggtttacagactg

SEQ ID NO: 13061 - DNA, 20 bp, synthetic construct
  misc_feature 1..20: note = chemically synthesized
  source 1..20: mol_type = other DNA
ttctgaggtttacagactga

SEQ ID NO: 13062 - DNA, 20 bp, synthetic construct
  misc_feature 1..20: note = chemically synthesized
  source 1..20: mol_type = other DNA
tgaggtttacagactgaagg

SEQ ID NO: 13063 - DNA, 20 bp, synthetic construct
  misc_feature 1..20: note = chemically synthesized
  source 1..20: mol_type = other DNA
ttacagactgaaggaagact

SEQ ID NO: 13064 - DNA, 20 bp, synthetic construct
  misc_feature 1..20: note = chemically synthesized
  source 1..20: mol_type = other DNA
tacagactgaaggaagactt

SEQ ID NO: 13065 - DNA, 20 bp, synthetic construct
  misc_feature 1..20: note = chemically synthesized
  source 1..20: mol_type = other DNA
aaatattttatcaaacttac

SEQ ID NO: 13066 - DNA, 20 bp, synthetic construct
  misc_feature 1..20: note = chemically synthesized
  source 1..20: mol_type = other DNA
ttatcaaacttactagtaca

SEQ ID NO: 13067 - DNA, 20 bp, synthetic construct
  misc_feature 1..20: note = chemically synthesized
  source 1..20: mol_type = other DNA
aattttttatttccaccgtt

SEQ ID NO: 13068 - DNA, 20 bp, synthetic construct
  misc_feature 1..20: note = chemically synthesized
  source 1..20: mol_type = other DNA
ttttttttttttttgttccc

SEQ ID NO: 13069 - DNA, 20 bp, synthetic construct
  misc_feature 1..20: note = chemically synthesized
  source 1..20: mol_type = other DNA
tttttttttttttgttccca

SEQ ID NO: 13070 - DNA, 20 bp, synthetic construct
  misc_feature 1..20: note = chemically synthesized
  source 1..20: mol_type = other DNA
aaggtctgacacatttctaa

SEQ ID NO: 13071 - DNA, 20 bp, synthetic construct
  misc_feature 1..20: note = chemically synthesized
  source 1..20: mol_type = other DNA
gtctgacacatttctaaaag

SEQ ID NO: 13072 - DNA, 20 bp, synthetic construct
  misc_feature 1..20: note = chemically synthesized
  source 1..20: mol_type = other DNA
tctgacacatttctaaaagt

SEQ ID NO: 13073 - DNA, 20 bp, synthetic construct
  misc_feature 1..20: note = chemically synthesized
  source 1..20: mol_type = other DNA
ctaaaagtgggaatattatt

SEQ ID NO: 13074 - DNA, 20 bp, synthetic construct
  misc_feature 1..20: note = chemically synthesized
  source 1..20: mol_type = other DNA
taaaagtgggaatattattt

SEQ ID NO: 13075 - DNA, 20 bp, synthetic construct
  misc_feature 1..20: note = chemically synthesized
  source 1..20: mol_type = other DNA
ggaatattatttaggtgcaa

SEQ ID NO: 13076 - DNA, 20 bp, synthetic construct
  misc_feature 1..20: note = chemically synthesized
  source 1..20: mol_type = other DNA
gaatattatttaggtgcaaa

SEQ ID NO: 13077 - DNA, 20 bp, synthetic construct
  misc_feature 1..20: note = chemically synthesized
  source 1..20: mol_type = other DNA
tgcaaaaggaaatattctcc

SEQ ID NO: 13078 - DNA, 20 bp, synthetic construct
  misc_feature 1..20: note = chemically synthesized
  source 1..20: mol_type = other DNA
gcaaaaggaaatattctcct

SEQ ID NO: 13079 - DNA, 20 bp, synthetic construct
  misc_feature 1..20: note = chemically synthesized
  source 1..20: mol_type = other DNA
atattctcctaggtatcaaa

SEQ ID NO: 13080 - DNA, 20 bp, synthetic construct
  misc_feature 1..20: note = chemically synthesized
  source 1..20: mol_type = other DNA
tcctaggtatcaaatagtta

SEQ ID NO: 13081 - DNA, 20 bp, synthetic construct
  misc_feature 1..20: note = chemically synthesized
  source 1..20: mol_type = other DNA
cctaggtatcaaatagttaa

SEQ ID NO: 13082 - DNA, 20 bp, synthetic construct
  misc_feature 1..20: note = chemically synthesized
  source 1..20: mol_type = other DNA
tcaaatagttaaaggtaatg

SEQ ID NO: 13083 - DNA, 20 bp, synthetic construct
  misc_feature 1..20: note = chemically synthesized
  source 1..20: mol_type = other DNA
aaaggtaatgtggttcaaaa

SEQ ID NO: 13084 - DNA, 20 bp, synthetic construct
  misc_feature 1..20: note = chemically synthesized
  source 1..20: mol_type = other DNA
aatgtggttcaaaacagact

SEQ ID NO: 13085 - DNA, 20 bp, synthetic construct
  misc_feature 1..20: note = chemically synthesized
  source 1..20: mol_type = other DNA
gttcaaaacagacttggtta

SEQ ID NO: 13086 - DNA, 20 bp, synthetic construct
  misc_feature 1..20: note = chemically synthesized
  source 1..20: mol_type = other DNA
tggttaaagtcttctaaatg

SEQ ID NO: 13087 - DNA, 20 bp, synthetic construct
  misc_feature 1..20: note = chemically synthesized
  source 1..20: mol_type = other DNA
aactgatttacaatcaaaac

SEQ ID NO: 13088 - DNA, 20 bp, synthetic construct
  misc_feature 1..20: note = chemically synthesized
  source 1..20: mol_type = other DNA
actgatttacaatcaaaacc

SEQ ID NO: 13089 - DNA, 20 bp, synthetic construct
  misc_feature 1..20: note = chemically synthesized
  source 1..20: mol_type = other DNA
acaatcaaaaccgggaaatg

SEQ ID NO: 13090 - DNA, 20 bp, synthetic construct
  misc_feature 1..20: note = chemically synthesized
  source 1..20: mol_type = other DNA
atcaaaaccgggaaatgaag

SEQ ID NO: 13091 - DNA, 20 bp, synthetic construct
  misc_feature 1..20: note = chemically synthesized
  source 1..20: mol_type = other DNA
cgggaaatgaagtggtaatt

SEQ ID NO: 13092 - DNA, 20 bp, synthetic construct
  misc_feature 1..20: note = chemically synthesized
  source 1..20: mol_type = other DNA
ggaaatgaagtggtaattca

SEQ ID NO: 13093 - DNA, 20 bp, synthetic construct
  misc_feature 1..20: note = chemically synthesized
  source 1..20: mol_type = other DNA
gaaatgaagtggtaattcag

SEQ ID NO: 13094 - DNA, 20 bp, synthetic construct
  misc_feature 1..20: note = chemically synthesized
  source 1..20: mol_type = other DNA
atttcacctaattaatttta

SEQ ID NO: 13095 - DNA, 20 bp, synthetic construct
  misc_feature 1..20: note = chemically synthesized
  source 1..20: mol_type = other DNA
tttcacctaattaattttat

SEQ ID NO: 13096 - DNA, 20 bp, synthetic construct
  misc_feature 1..20: note = chemically synthesized
  source 1..20: mol_type = other DNA
tcacctaattaattttatag

SEQ ID NO: 13097 - DNA, 20 bp, synthetic construct
  misc_feature 1..20: note = chemically synthesized
  source 1..20: mol_type = other DNA
cacctaattaattttatagg

SEQ ID NO: 13098 - DNA, 20 bp, synthetic construct
  misc_feature 1..20: note = chemically synthesized
  source 1..20: mol_type = other DNA
aattaattttataggaggca

SEQ ID NO: 13099 - DNA, 20 bp, synthetic construct
  misc_feature 1..20: note = chemically synthesized
  source 1..20: mol_type = other DNA
gcaaagttcttgaaaataac

SEQ ID NO: 13100 - DNA, 20 bp, synthetic construct
  misc_feature 1..20: note = chemically synthesized
  source 1..20: mol_type = other DNA
taacaagatgatcaaatgta

SEQ ID NO: 13101 - DNA, 20 bp, synthetic construct
  misc_feature 1..20: note = chemically synthesized
  source 1..20: mol_type = other DNA
gtaaattattgctaattaac

SEQ ID NO: 13102 - DNA, 20 bp, synthetic construct
  misc_feature 1..20: note = chemically synthesized
  source 1..20: mol_type = other DNA
gtatgaaatacgtttaacat

SEQ ID NO: 13103 - DNA, 20 bp, synthetic construct
  misc_feature 1..20: note = chemically synthesized
  source 1..20: mol_type = other DNA
cggtctccttgcaaaacatt

SEQ ID NO: 13104 - DNA, 20 bp, synthetic construct
  misc_feature 1..20: note = chemically synthesized
  source 1..20: mol_type = other DNA
ctccttgcaaaacatttggc

SEQ ID NO: 13105 - DNA, 20 bp, synthetic construct
  misc_feature 1..20: note = chemically synthesized
  source 1..20: mol_type = other DNA
cttgcaaaacatttggctag

SEQ ID NO: 13106 - DNA, 20 bp, synthetic construct
  misc_feature 1..20: note = chemically synthesized
  source 1..20: mol_type = other DNA
aacatttggctagtggtgtt

SEQ ID NO: 13107 - DNA, 20 bp, synthetic construct
  misc_feature 1..20: note = chemically synthesized
  source 1..20: mol_type = other DNA
catttggctagtggtgttca

SEQ ID NO: 13108 - DNA, 20 bp, synthetic construct
  misc_feature 1..20: note = chemically synthesized
  source 1..20: mol_type = other DNA
aaacgtgtttttatcattgc

SEQ ID NO: 13109 - DNA, 20 bp, synthetic construct
  misc_feature 1..20: note = chemically synthesized
  source 1..20: mol_type = other DNA
gctggtatattattaaaaat

SEQ ID NO: 13110 - DNA, 20 bp, synthetic construct
  misc_feature 1..20: note = chemically synthesized
  source 1..20: mol_type = other DNA
atattattaaaaatcagaca

SEQ ID NO: 13111 - DNA, 20 bp, synthetic construct
  misc_feature 1..20: note = chemically synthesized
  source 1..20: mol_type = other DNA
ttattaaaaatcagacaaag

SEQ ID NO: 13112 - DNA, 20 bp, synthetic construct
  misc_feature 1..20: note = chemically synthesized
  source 1..20: mol_type = other DNA
tattaaaaatcagacaaagt

SEQ ID NO: 13113 - DNA, 20 bp, synthetic construct
  misc_feature 1..20: note = chemically synthesized
  source 1..20: mol_type = other DNA
atcagacaaagtgggacaca

SEQ ID NO: 13114 - DNA, 20 bp, synthetic construct
  misc_feature 1..20: note = chemically synthesized
  source 1..20: mol_type = other DNA
atatgaaaatacaattctca

SEQ ID NO: 13115 - DNA, 20 bp, synthetic construct
  misc_feature 1..20: note = chemically synthesized
  source 1..20: mol_type = other DNA
aaaatacaattctcatggtg

SEQ ID NO: 13116 - DNA, 20 bp, synthetic construct
  misc_feature 1..20: note = chemically synthesized
  source 1..20: mol_type = other DNA
tttgcattgacatcttttct

SEQ ID NO: 13117 - DNA, 20 bp, synthetic construct
  misc_feature 1..20: note = chemically synthesized
  source 1..20: mol_type = other DNA
gcattgacatcttttctcag

SEQ ID NO: 13118 - DNA, 20 bp, synthetic construct
  misc_feature 1..20: note = chemically synthesized
  source 1..20: mol_type = other DNA
ggcaatcaacatttcctttc

SEQ ID NO: 13119 - DNA, 20 bp, synthetic construct
  misc_feature 1..20: note = chemically synthesized
  source 1..20: mol_type = other DNA
gcaatcaacatttcctttct

SEQ ID NO: 13120 - DNA, 20 bp, synthetic construct
  misc_feature 1..20: note = chemically synthesized
  source 1..20: mol_type = other DNA
ctaaaaaccttcctaaccct

SEQ ID NO: 13121 - DNA, 20 bp, synthetic construct
  misc_feature 1..20: note = chemically synthesized
  source 1..20: mol_type = other DNA
ccaacaataccaacatttct

SEQ ID NO: 13122 - DNA, 20 bp, synthetic construct
  misc_feature 1..20: note = chemically synthesized
  source 1..20: mol_type = other DNA
ataccaacatttctaagctc

SEQ ID NO: 13123 - DNA, 20 bp, synthetic construct
  misc_feature 1..20: note = chemically synthesized
  source 1..20: mol_type = other DNA
ctaagctccggcctaaactc

SEQ ID NO: 13124 - DNA, 20 bp, synthetic construct
  misc_feature 1..20: note = chemically synthesized
  source 1..20: mol_type = other DNA
cggcctaaactccggctaca

SEQ ID NO: 13125 - DNA, 20 bp, synthetic construct
  misc_feature 1..20: note = chemically synthesized
  source 1..20: mol_type = other DNA
cctaaactccggctacaaag

SEQ ID NO: 13126 - DNA, 20 bp, synthetic construct
  misc_feature 1..20: note = chemically synthesized
  source 1..20: mol_type = other DNA
ctaaactccggctacaaagc

SEQ ID NO: 13127 - DNA, 20 bp, synthetic construct
  misc_feature 1..20: note = chemically synthesized
  source 1..20: mol_type = other DNA
taaactccggctacaaagca

SEQ ID NO: 13128 - DNA, 20 bp, synthetic construct
  misc_feature 1..20: note = chemically synthesized
  source 1..20: mol_type = other DNA
aactccggctacaaagcagg

SEQ ID NO: 13129 - DNA, 20 bp, synthetic construct
  misc_feature 1..20: note = chemically synthesized
  source 1..20: mol_type = other DNA
aagcagggagtcctcgattg

SEQ ID NO: 13130 - DNA, 20 bp, synthetic construct
  misc_feature 1..20: note = chemically synthesized
  source 1..20: mol_type = other DNA
cagggagtcctcgattgaag

SEQ ID NO: 13131 - DNA, 20 bp, synthetic construct
  misc_feature 1..20: note = chemically synthesized
  source 1..20: mol_type = other DNA
ggagtcctcgattgaagtgg

SEQ ID NO: 13132 - DNA, 20 bp, synthetic construct
  misc_feature 1..20: note = chemically synthesized
  source 1..20: mol_type = other DNA
gagtcctcgattgaagtgga

SEQ ID NO: 13133 - DNA, 20 bp, synthetic construct
  misc_feature 1..20: note = chemically synthesized
  source 1..20: mol_type = other DNA
agtcctcgattgaagtggaa

SEQ ID NO: 13134 - DNA, 20 bp, synthetic construct
  misc_feature 1..20: note = chemically synthesized
  source 1..20: mol_type = other DNA
tcctcgattgaagtggaagg

SEQ ID NO: 13135 - DNA, 20 bp, synthetic construct
  misc_feature 1..20: note = chemically synthesized
  source 1..20: mol_type = other DNA
tcgattgaagtggaagggag

SEQ ID NO: 13136 - DNA, 20 bp, synthetic construct
  misc_feature 1..20: note = chemically synthesized
  source 1..20: mol_type = other DNA
cgattgaagtggaagggagt

SEQ ID NO: 13137 - DNA, 20 bp, synthetic construct
  misc_feature 1..20: note = chemically synthesized
  source 1..20: mol_type = other DNA
gggcaaataatcataataat

SEQ ID NO: 13138 - DNA, 20 bp, synthetic construct
  misc_feature 1..20: note = chemically synthesized
  source 1..20: mol_type = other DNA
tagccgcgaattctctctac

SEQ ID NO: 13139 - DNA, 20 bp, synthetic construct
  misc_feature 1..20: note = chemically synthesized
  source 1..20: mol_type = other DNA
agccgcgaattctctctacg

SEQ ID NO: 13140 - DNA, 20 bp, synthetic construct
  misc_feature 1..20: note = chemically synthesized
  source 1..20: mol_type = other DNA
gccgcgaattctctctacga

SEQ ID NO: 13141 - DNA, 20 bp, synthetic construct
  misc_feature 1..20: note = chemically synthesized
  source 1..20: mol_type = other DNA
ccgcgaattctctctacgag

SEQ ID NO: 13142 - DNA, 20 bp, synthetic construct
  misc_feature 1..20: note = chemically synthesized
  source 1..20: mol_type = other DNA
gcgaattctctctacgaggg

SEQ ID NO: 13143 - DNA, 20 bp, synthetic construct
  misc_feature 1..20: note = chemically synthesized
  source 1..20: mol_type = other DNA
cgaattctctctacgagggg

SEQ ID NO: 13144 - DNA, 20 bp, synthetic construct
  misc_feature 1..20: note = chemically synthesized
  source 1..20: mol_type = other DNA
attctctctacgaggggagg

SEQ ID NO: 13145 - DNA, 20 bp, synthetic construct
  misc_feature 1..20: note = chemically synthesized
  source 1..20: mol_type = other DNA
tctacgaggggaggaagaaa

SEQ ID NO: 13146 - DNA, 20 bp, synthetic construct
  misc_feature 1..20: note = chemically synthesized
  source 1..20: mol_type = other DNA
aaaatgcttctacgttcaaa

SEQ ID NO: 13147 - DNA, 20 bp, synthetic construct
  misc_feature 1..20: note = chemically synthesized
  source 1..20: mol_type = other DNA
tgcttctacgttcaaacagc

SEQ ID NO: 13148 - DNA, 20 bp, synthetic construct
  misc_feature 1..20: note = chemically synthesized
  source 1..20: mol_type = other DNA
tctacgttcaaacagcaaga

SEQ ID NO: 13149 - DNA, 20 bp, synthetic construct
  misc_feature 1..20: note = chemically synthesized
  source 1..20: mol_type = other DNA
gttcaaacagcaagacagcc

SEQ ID NO: 13150 - DNA, 20 bp, synthetic construct
  misc_feature 1..20: note = chemically synthesized
  source 1..20: mol_type = other DNA
cctggaacgtctcaatgtct

SEQ ID NO: 13151 - DNA, 20 bp, synthetic construct
  misc_feature 1..20: note = chemically synthesized
  source 1..20: mol_type = other DNA
acgtctcaatgtctcagtga

SEQ ID NO: 13152 - DNA, 20 bp, synthetic construct
  misc_feature 1..20: note = chemically synthesized
  source 1..20: mol_type = other DNA
caatgtctcagtgacagact

SEQ ID NO: 13153 - DNA, 20 bp, synthetic construct
  misc_feature 1..20: note = chemically synthesized
  source 1..20: mol_type = other DNA
agatctctttcctctctgtg

SEQ ID NO: 13154 - DNA, 20 bp, synthetic construct
  misc_feature 1..20: note = chemically synthesized
  source 1..20: mol_type = other DNA
tcctctctgtgtagttgcaa

SEQ ID NO: 13155 - DNA, 20 bp, synthetic construct
  misc_feature 1..20: note = chemically synthesized
  source 1..20: mol_type = other DNA
agttgcaaaagaataaattt

SEQ ID NO: 13156 - DNA, 20 bp, synthetic construct
  misc_feature 1..20: note = chemically synthesized
  source 1..20: mol_type = other DNA
gttgcaaaagaataaattta

SEQ ID NO: 13157 - DNA, 20 bp, synthetic construct
  misc_feature 1..20: note = chemically synthesized
  source 1..20: mol_type = other DNA
ttgcaaaagaataaatttaa

SEQ ID NO: 13158 - DNA, 20 bp, synthetic construct
  misc_feature 1..20: note = chemically synthesized
  source 1..20: mol_type = other DNA
agggaaaaaaataatcctta

SEQ ID NO: 13159 - DNA, 20 bp, synthetic construct
  misc_feature 1..20: note = chemically synthesized
  source 1..20: mol_type = other DNA
gggaaaaaaataatccttat

SEQ ID NO: 13160 - DNA, 20 bp, synthetic construct
  misc_feature 1..20: note = chemically synthesized
  source 1..20: mol_type = other DNA
ataatccttataggaaatgt

SEQ ID NO: 13161 - DNA, 20 bp, synthetic construct
  misc_feature 1..20: note = chemically synthesized
  source 1..20: mol_type = other DNA
tccttataggaaatgttggt

SEQ ID NO: 13162 - DNA, 20 bp, synthetic construct
  misc_feature 1..20: note = chemically synthesized
  source 1..20: mol_type = other DNA
ccttataggaaatgttggta

SEQ ID NO: 13163 - DNA, 20 bp, synthetic construct
  misc_feature 1..20: note = chemically synthesized
  source 1..20: mol_type = other DNA
ttataggaaatgttggtaag

SEQ ID NO: 13164 - DNA, 20 bp, synthetic construct
  misc_feature 1..20: note = chemically synthesized
  source 1..20: mol_type = other DNA
aggaaatgttggtaaggagc

SEQ ID NO: 13165 - DNA, 20 bp, synthetic construct
  misc_feature 1..20: note = chemically synthesized
  source 1..20: mol_type = other DNA
tggtaaggagcgagcaaaac

SEQ ID NO: 13166 - DNA, 20 bp, synthetic construct
  misc_feature 1..20: note = chemically synthesized
  source 1..20: mol_type = other DNA
gtaaggagcgagcaaaacga

SEQ ID NO: 13167 - DNA, 20 bp, synthetic construct
  misc_feature 1..20: note = chemically synthesized
  source 1..20: mol_type = other DNA
gcgagcaaaacgagagctgc

SEQ ID NO: 13168 - DNA, 20 bp, synthetic construct
  misc_feature 1..20: note = chemically synthesized
  source 1..20: mol_type = other DNA
cgagcaaaacgagagctgcc

SEQ ID NO: 13169 - DNA, 20 bp, synthetic construct
  misc_feature 1..20: note = chemically synthesized
  source 1..20: mol_type = other DNA
gagcaaaacgagagctgccg

SEQ ID NO: 13170 - DNA, 20 bp, synthetic construct
  misc_feature 1..20: note = chemically synthesized
  source 1..20: mol_type = other DNA
gcaaaacgagagctgccggg

SEQ ID NO: 13171 - DNA, 20 bp, synthetic construct
  misc_feature 1..20: note = chemically synthesized
  source 1..20: mol_type = other DNA
aaacgagagctgccggggag

SEQ ID NO: 13172 - DNA, 20 bp, synthetic construct
  misc_feature 1..20: note = chemically synthesized
  source 1..20: mol_type = other DNA
acgagagctgccggggagcg

SEQ ID NO: 13173 - DNA, 20 bp, synthetic construct
  misc_feature 1..20: note = chemically synthesized
  source 1..20: mol_type = other DNA
cgagagctgccggggagcgg

SEQ ID NO: 13174 - DNA, 20 bp, synthetic construct
  misc_feature 1..20: note = chemically synthesized
  source 1..20: mol_type = other DNA
gagagctgccggggagcgga

SEQ ID NO: 13175 - DNA, 20 bp, synthetic construct
  misc_feature 1..20: note = chemically synthesized
  source 1..20: mol_type = other DNA
agagctgccggggagcggag

SEQ ID NO: 13176 - DNA, 20 bp, synthetic construct
  misc_feature 1..20: note = chemically synthesized
  source 1..20: mol_type = other DNA
gagctgccggggagcggagg

SEQ ID NO: 13177 - DNA, 20 bp, synthetic construct
  misc_feature 1..20: note = chemically synthesized
  source 1..20: mol_type = other DNA
gctgccggggagcggagggg

SEQ ID NO: 13178 - DNA, 20 bp, synthetic construct
  misc_feature 1..20: note = chemically synthesized
  source 1..20: mol_type = other DNA
ctgccggggagcggaggggg

SEQ ID NO: 13179 - DNA, 20 bp, synthetic construct
  misc_feature 1..20: note = chemically synthesized
  source 1..20: mol_type = other DNA
tgccggggagcggaggggga

SEQ ID NO: 13180 - DNA, 20 bp, synthetic construct
  misc_feature 1..20: note = chemically synthesized
  source 1..20: mol_type = other DNA
gccggggagcggagggggag

SEQ ID NO: 13181 - DNA, 20 bp, synthetic construct
  misc_feature 1..20: note = chemically synthesized
  source 1..20: mol_type = other DNA
ccggggagcggagggggagg

SEQ ID NO: 13182 - DNA, 20 bp, synthetic construct
  misc_feature 1..20: note = chemically synthesized
  source 1..20: mol_type = other DNA
ggagcggagggggaggggga

SEQ ID NO: 13183 - DNA, 20 bp, synthetic construct
  misc_feature 1..20: note = chemically synthesized
  source 1..20: mol_type = other DNA
gagcggagggggagggggaa

SEQ ID NO: 13184 - DNA, 20 bp, synthetic construct
  misc_feature 1..20: note = chemically synthesized
  source 1..20: mol_type = other DNA
agcggagggggagggggaaa

SEQ ID NO: 13185 - DNA, 20 bp, synthetic construct
  misc_feature 1..20: note = chemically synthesized
  source 1..20: mol_type = other DNA
cggagggggagggggaaagg

SEQ ID NO: 13186 - DNA, 20 bp, synthetic construct
  misc_feature 1..20: note = chemically synthesized
  source 1..20: mol_type = other DNA
ggaaagggagatgtgtcttc

SEQ ID NO: 13187 - DNA, 20 bp, synthetic construct
  misc_feature 1..20: note = chemically synthesized
  source 1..20: mol_type = other DNA
tgtcttcaagtttgctttcc

SEQ ID NO: 13188 - DNA, 20 bp, synthetic construct
  misc_feature 1..20: note = chemically synthesized
  source 1..20: mol_type = other DNA
cttctccttgattgtcttaa

SEQ ID NO: 13189 - DNA, 20 bp, synthetic construct
  misc_feature 1..20: note = chemically synthesized
  source 1..20: mol_type = other DNA
ttctccttgattgtcttaac

SEQ ID NO: 13190 - DNA, 20 bp, synthetic construct
  misc_feature 1..20: note = chemically synthesized
  source 1..20: mol_type = other DNA
tctccttgattgtcttaaca

SEQ ID NO: 13191 - DNA, 20 bp, synthetic construct
  misc_feature 1..20: note = chemically synthesized
  source 1..20: mol_type = other DNA
ttgattgtcttaacagggta

SEQ ID NO: 13192 - DNA, 20 bp, synthetic construct
  misc_feature 1..20: note = chemically synthesized
  source 1..20: mol_type = other DNA
attgtcttaacagggtaaag

SEQ ID NO: 13193 - DNA, 20 bp, synthetic construct
  misc_feature 1..20: note = chemically synthesized
  source 1..20: mol_type = other DNA
taacagggtaaagaagcaaa

SEQ ID NO: 13194 - DNA, 20 bp, synthetic construct
  misc_feature 1..20: note = chemically synthesized
  source 1..20: mol_type = other DNA
acagggtaaagaagcaaacg

SEQ ID NO: 13195 - DNA, 20 bp, synthetic construct
  misc_feature 1..20: note = chemically synthesized
  source 1..20: mol_type = other DNA
cagggtaaagaagcaaacgg

SEQ ID NO: 13196 - DNA, 20 bp, synthetic construct
  misc_feature 1..20: note = chemically synthesized
  source 1..20: mol_type = other DNA
agcaaacggaggctgaaatt

SEQ ID NO: 13197 - DNA, 20 bp, synthetic construct
  misc_feature 1..20: note = chemically synthesized
  source 1..20: mol_type = other DNA
caaacggaggctgaaattca

SEQ ID NO: 13198 - DNA, 20 bp, synthetic construct
  misc_feature 1..20: note = chemically synthesized
  source 1..20: mol_type = other DNA
aacggaggctgaaattcaga

SEQ ID NO: 13199 - DNA, 20 bp, synthetic construct
  misc_feature 1..20: note = chemically synthesized
  source 1..20: mol_type = other DNA
acggaggctgaaattcagag

SEQ ID NO: 13200 - DNA, 20 bp, synthetic construct
  misc_feature 1..20: note = chemically synthesized
  source 1..20: mol_type = other DNA
ggctgaaattcagagaggaa

SEQ ID NO: 13201 - DNA, 20 bp, synthetic construct
  misc_feature 1..20: note = chemically synthesized
  source 1..20: mol_type = other DNA
aaattcagagaggaaaagca

SEQ ID NO: 13202 - DNA, 20 bp, synthetic construct
  misc_feature 1..20: note = chemically synthesized
  source 1..20: mol_type = other DNA
gaggaaaagcaaagaaacaa

SEQ ID NO: 13203 - DNA, 20 bp, synthetic construct
  misc_feature 1..20: note = chemically synthesized
  source 1..20: mol_type = other DNA
aaagcaaagaaacaaaagca

SEQ ID NO: 13204 - DNA, 20 bp, synthetic construct
  misc_feature 1..20: note = chemically synthesized
  source 1..20: mol_type = other DNA
caaagaaacaaaagcaaagc

SEQ ID NO: 13205 - DNA, 20 bp, synthetic construct
  misc_feature 1..20: note = chemically synthesized
  source 1..20: mol_type = other DNA
aaagaaacaaaagcaaagcc

SEQ ID NO: 13206 - DNA, 20 bp, synthetic construct
  misc_feature 1..20: note = chemically synthesized
  source 1..20: mol_type = other DNA
aagaaacaaaagcaaagccg

SEQ ID NO: 13207 - DNA, 20 bp, synthetic construct
  misc_feature 1..20: note = chemically synthesized
  source 1..20: mol_type = other DNA
agaaacaaaagcaaagccgg

SEQ ID NO: 13208 - DNA, 20 bp, synthetic construct
  misc_feature 1..20: note = chemically synthesized
  source 1..20: mol_type = other DNA
aaaagcaaagccgggggcta

SEQ ID NO: 13209 - DNA, 20 bp, synthetic construct
  misc_feature 1..20: note = chemically synthesized
  source 1..20: mol_type = other DNA
aaagcaaagccgggggctac

SEQ ID NO: 13210 - DNA, 20 bp, synthetic construct
  misc_feature 1..20: note = chemically synthesized
  source 1..20: mol_type = other DNA
aaagccgggggctacaggcc

SEQ ID NO: 13211 - DNA, 20 bp, synthetic construct
  misc_feature 1..20: note = chemically synthesized
  source 1..20: mol_type = other DNA
aagccgggggctacaggccc

SEQ ID NO: 13212 - DNA, 20 bp, synthetic construct
  misc_feature 1..20: note = chemically synthesized
  source 1..20: mol_type = other DNA
agccgggggctacaggcccg

SEQ ID NO: 13213 - DNA, 20 bp, synthetic construct
  misc_feature 1..20: note = chemically synthesized
  source 1..20: mol_type = other DNA
cgggggctacaggcccgggg

SEQ ID NO: 13214 - DNA, 20 bp, synthetic construct
  misc_feature 1..20: note = chemically synthesized
  source 1..20: mol_type = other DNA
gggggctacaggcccggggc

SEQ ID NO: 13215 - DNA, 20 bp, synthetic construct
  misc_feature 1..20: note = chemically synthesized
  source 1..20: mol_type = other DNA
ggggctacaggcccggggca

SEQ ID NO: 13216 - DNA, 20 bp, synthetic construct
  misc_feature 1..20: note = chemically synthesized
  source 1..20: mol_type = other DNA
gggctacaggcccggggcag

SEQ ID NO: 13217 - DNA, 20 bp, synthetic construct
  misc_feature 1..20: note = chemically synthesized
  source 1..20: mol_type = other DNA
caggcccggggcaggggccc

SEQ ID NO: 13218 - DNA, 20 bp, synthetic construct
  misc_feature 1..20: note = chemically synthesized
  source 1..20: mol_type = other DNA
cccggggcaggggccccggc

SEQ ID NO: 13219 - DNA, 20 bp, synthetic construct
  misc_feature 1..20: note = chemically synthesized
  source 1..20: mol_type = other DNA
ccggggcaggggccccggca

SEQ ID NO: 13220 - DNA, 20 bp, synthetic construct
  misc_feature 1..20: note = chemically synthesized
  source 1..20: mol_type = other DNA
cggggcaggggccccggcaa

SEQ ID NO: 13221 - DNA, 20 bp, synthetic construct
  misc_feature 1..20: note = chemically synthesized
  source 1..20: mol_type = other DNA
ggcaggggccccggcaaggg

SEQ ID NO: 13222 - DNA, 20 bp, synthetic construct
  misc_feature 1..20: note = chemically synthesized
  source 1..20: mol_type = other DNA
cccggcaagggtggaccgtg

SEQ ID NO: 13223 - DNA, 20 bp, synthetic construct
  misc_feature 1..20: note = chemically synthesized
  source 1..20: mol_type = other DNA
gcaagggtggaccgtgcaga

SEQ ID NO: 13224 - DNA, 20 bp, synthetic construct
  misc_feature 1..20: note = chemically synthesized
  source 1..20: mol_type = other DNA
ggtggaccgtgcagaaagtg

SEQ ID NO: 13225 - DNA, 20 bp, synthetic construct
  misc_feature 1..20: note = chemically synthesized
  source 1..20: mol_type = other DNA
gaccgtgcagaaagtgaagt

SEQ ID NO: 13226 - DNA, 20 bp, synthetic construct
  misc_feature 1..20: note = chemically synthesized
  source 1..20: mol_type = other DNA
accgtgcagaaagtgaagtt

SEQ ID NO: 13227 - DNA, 20 bp, synthetic construct
  misc_feature 1..20: note = chemically synthesized
  source 1..20: mol_type = other DNA
gcagaaagtgaagttgggcg

SEQ ID NO: 13228 - DNA, 20 bp, synthetic construct
  misc_feature 1..20: note = chemically synthesized
  source 1..20: mol_type = other DNA
cagaaagtgaagttgggcgc

SEQ ID NO: 13229 - DNA, 20 bp, synthetic construct
  misc_feature 1..20: note = chemically synthesized
  source 1..20: mol_type = other DNA
agaaagtgaagttgggcgcg

SEQ ID NO: 13230 - DNA, 20 bp, synthetic construct
  misc_feature 1..20: note = chemically synthesized
  source 1..20: mol_type = other DNA
aagttgggcgcggggactct

SEQ ID NO: 13231 - DNA, 20 bp, synthetic construct
  misc_feature 1..20: note = chemically synthesized
  source 1..20: mol_type = other DNA
agttgggcgcggggactctg

SEQ ID NO: 13232 - DNA, 20 bp, synthetic construct
  misc_feature 1..20: note = chemically synthesized
  source 1..20: mol_type = other DNA
cgcggggactctgaggcaca

SEQ ID NO: 13233 - DNA, 20 bp, synthetic construct
  misc_feature 1..20: note = chemically synthesized
  source 1..20: mol_type = other DNA
gggactctgaggcacaaagc

SEQ ID NO: 13234 - DNA, 20 bp, synthetic construct
  misc_feature 1..20: note = chemically synthesized
  source 1..20: mol_type = other DNA
actctgaggcacaaagcgag

SEQ ID NO: 13235 - DNA, 20 bp, synthetic construct
  misc_feature 1..20: note = chemically synthesized
  source 1..20: mol_type = other DNA
gcacaaagcgagcagcgtgc

SEQ ID NO: 13236 - DNA, 20 bp, synthetic construct
  misc_feature 1..20: note = chemically synthesized
  source 1..20: mol_type = other DNA
agcgagcagcgtgctggctg

SEQ ID NO: 13237 - DNA, 20 bp, synthetic construct
  misc_feature 1..20: note = chemically synthesized
  source 1..20: mol_type = other DNA
gcgagcagcgtgctggctgc

SEQ ID NO: 13238 - DNA, 20 bp, synthetic construct
  misc_feature 1..20: note = chemically synthesized
  source 1..20: mol_type = other DNA
gcgcttgctgcgaacacgtg

SEQ ID NO: 13239 - DNA, 20 bp, synthetic construct
  misc_feature 1..20: note = chemically synthesized
  source 1..20: mol_type = other DNA
cttgctgcgaacacgtgcag

SEQ ID NO: 13240 - DNA, 20 bp, synthetic construct
  misc_feature 1..20: note = chemically synthesized
  source 1..20: mol_type = other DNA
gctgcgaacacgtgcagcag

SEQ ID NO: 13241 - DNA, 20 bp, synthetic construct
  misc_feature 1..20: note = chemically synthesized
  source 1..20: mol_type = other DNA
aacacgtgcagcagcggccg

SEQ ID NO: 13242 - DNA, 20 bp, synthetic construct
  misc_feature 1..20: note = chemically synthesized
  source 1..20: mol_type = other DNA
acacgtgcagcagcggccgc

SEQ ID NO: 13243 - DNA, 20 bp, synthetic construct
  misc_feature 1..20: note = chemically synthesized
  source 1..20: mol_type = other DNA
cacgtgcagcagcggccgcg

SEQ ID NO: 13244 - DNA, 20 bp, synthetic construct
  misc_feature 1..20: note = chemically synthesized
  source 1..20: mol_type = other DNA
cagcagcggccgcggggcct

SEQ ID NO: 13245 - DNA, 20 bp, synthetic construct
  misc_feature 1..20: note = chemically synthesized
  source 1..20: mol_type = other DNA
agcagcggccgcggggcctt

SEQ ID NO: 13246 - DNA, 20 bp, synthetic construct
  misc_feature 1..20: note = chemically synthesized
  source 1..20: mol_type = other DNA
gcagcggccgcggggccttg

SEQ ID NO: 13247 - DNA, 20 bp, synthetic construct
  misc_feature 1..20: note = chemically synthesized
  source 1..20: mol_type = other DNA
ggccgcggggccttggggcc

SEQ ID NO: 13248 - DNA, 20 bp, synthetic construct
  misc_feature 1..20: note = chemically synthesized
  source 1..20: mol_type = other DNA
gccgcggggccttggggccc

SEQ ID NO: 13249 - DNA, 20 bp, synthetic construct
  misc_feature 1..20: note = chemically synthesized
  source 1..20: mol_type = other DNA
ccgcggggccttggggcccg

SEQ ID NO: 13250 - DNA, 20 bp, synthetic construct
  misc_feature 1..20: note = chemically synthesized
  source 1..20: mol_type = other DNA
cgcggggccttggggcccgg

SEQ ID NO: 13251 - DNA, 20 bp, synthetic construct
  misc_feature 1..20: note = chemically synthesized
  source 1..20: mol_type = other DNA
ggccttggggcccgggggcc

SEQ ID NO: 13252 - DNA, 20 bp, synthetic construct
  misc_feature 1..20: note = chemically synthesized
  source 1..20: mol_type = other DNA
ccttggggcccgggggcccg

SEQ ID NO: 13253 - DNA, 20 bp, synthetic construct
  misc_feature 1..20: note = chemically synthesized
  source 1..20: mol_type = other DNA
ggggcccgggggcccggaga

SEQ ID NO: 13254 - DNA, 20 bp, synthetic construct
  misc_feature 1..20: note = chemically synthesized
  source 1..20: mol_type = other DNA
ggcccgggggcccggagacg

SEQ ID NO: 13255 - DNA, 20 bp, synthetic construct
  misc_feature 1..20: note = chemically synthesized
  source 1..20: mol_type = other DNA
gcccgggggcccggagacgg

SEQ ID NO: 13256 - DNA, 20 bp, synthetic construct
  misc_feature 1..20: note = chemically synthesized
  source 1..20: mol_type = other DNA
cccgggggcccggagacgga

SEQ ID NO: 13257 - DNA, 20 bp, synthetic construct
  misc_feature 1..20: note = chemically synthesized
  source 1..20: mol_type = other DNA
gggggcccggagacggaggg

SEQ ID NO: 13258 - DNA, 20 bp, synthetic construct
  misc_feature 1..20: note = chemically synthesized
  source 1..20: mol_type = other DNA
gcccggagacggagggcagc

SEQ ID NO: 13259 - DNA, 20 bp, synthetic construct
  misc_feature 1..20: note = chemically synthesized
  source 1..20: mol_type = other DNA
cccggagacggagggcagcc

SEQ ID NO: 13260 - DNA, 20 bp, synthetic construct
  misc_feature 1..20: note = chemically synthesized
  source 1..20: mol_type = other DNA
ccggagacggagggcagcca

SEQ ID NO: 13261 - DNA, 20 bp, synthetic construct
  misc_feature 1..20: note = chemically synthesized
  source 1..20: mol_type = other DNA
cggagacggagggcagccag

SEQ ID NO: 13262 - DNA, 20 bp, synthetic construct
  misc_feature 1..20: note = chemically synthesized
  source 1..20: mol_type = other DNA
ctgctgcctccatgcccgtc

SEQ ID NO: 13263 - DNA, 20 bp, synthetic construct
  misc_feature 1..20: note = chemically synthesized
  source 1..20: mol_type = other DNA
gcctccatgcccgtccagct

SEQ ID NO: 13264 - DNA, 20 bp, synthetic construct
  misc_feature 1..20: note = chemically synthesized
  source 1..20: mol_type = other DNA
ccatgcccgtccagctcggc

SEQ ID NO: 13265 - DNA, 20 bp, synthetic construct
  misc_feature 1..20: note = chemically synthesized
  source 1..20: mol_type = other DNA
cccgtccagctcggccagct

SEQ ID NO: 13266 - DNA, 20 bp, synthetic construct
  misc_feature 1..20: note = chemically synthesized
  source 1..20: mol_type = other DNA
cagctcggccagctcggccg

SEQ ID NO: 13267 - DNA, 20 bp, synthetic construct
  misc_feature 1..20: note = chemically synthesized
  source 1..20: mol_type = other DNA
agctcggccagctcggccgc

SEQ ID NO: 13268 - DNA, 20 bp, synthetic construct
  misc_feature 1..20: note = chemically synthesized
  source 1..20: mol_type = other DNA
gctcggccagctcggccgcg

SEQ ID NO: 13269 - DNA, 20 bp, synthetic construct
  misc_feature 1..20: note = chemically synthesized
  source 1..20: mol_type = other DNA
ccagctcggccgcggggtga

SEQ ID NO: 13270 - DNA, 20 bp, synthetic construct
  misc_feature 1..20: note = chemically synthesized
  source 1..20: mol_type = other DNA
gccgcggggtgacggttccc

SEQ ID NO: 13271 - DNA, 20 bp, synthetic construct
  misc_feature 1..20: note = chemically synthesized
  source 1..20: mol_type = other DNA
ccgcggggtgacggttccct

SEQ ID NO: 13272 - DNA, 20 bp, synthetic construct
  misc_feature 1..20: note = chemically synthesized
  source 1..20: mol_type = other DNA
tgacggttccctgggcctgc

SEQ ID NO: 13273 - DNA, 20 bp, synthetic construct
  misc_feature 1..20: note = chemically synthesized
  source 1..20: mol_type = other DNA
ggttccctgggcctgccagt

SEQ ID NO: 13274 - DNA, 20 bp, synthetic construct
  misc_feature 1..20: note = chemically synthesized
  source 1..20: mol_type = other DNA
gggcctgccagttggtgaaa

SEQ ID NO: 13275 - DNA, 20 bp, synthetic construct
  misc_feature 1..20: note = chemically synthesized
  source 1..20: mol_type = other DNA
ggcctgccagttggtgaaaa

SEQ ID NO: 13276 - DNA, 20 bp, synthetic construct
  misc_feature 1..20: note = chemically synthesized
  source 1..20: mol_type = other DNA
ctgccagttggtgaaaaagg

SEQ ID NO: 13277 - DNA, 20 bp, synthetic construct
  misc_feature 1..20: note = chemically synthesized
  source 1..20: mol_type = other DNA
cagttggtgaaaaaggaagt

SEQ ID NO: 13278 - DNA, 20 bp, synthetic construct
  misc_feature 1..20: note = chemically synthesized
  source 1..20: mol_type = other DNA
agttggtgaaaaaggaagtg

SEQ ID NO: 13279 - DNA, 20 bp, synthetic construct
  misc_feature 1..20: note = chemically synthesized
  source 1..20: mol_type = other DNA
gtgaaaaaggaagtgaggtt

SEQ ID NO: 13280 - DNA, 20 bp, synthetic construct
  misc_feature 1..20: note = chemically synthesized
  source 1..20: mol_type = other DNA
gaagtgaggtttggaaaacc

SEQ ID NO: 13281 - DNA, 20 bp, synthetic construct
  misc_feature 1..20: note = chemically synthesized
  source 1..20: mol_type = other DNA
tgaggtttggaaaacccggc

SEQ ID NO: 13282 - DNA, 20 bp, synthetic construct
  misc_feature 1..20: note = chemically synthesized
  source 1..20: mol_type = other DNA
gaaaacccggctggttaacc

SEQ ID NO: 13283 - DNA, 20 bp, synthetic construct
  misc_feature 1..20: note = chemically synthesized
  source 1..20: mol_type = other DNA
cccggctggttaacctggtg

SEQ ID NO: 13284 - DNA, 20 bp, synthetic construct
  misc_feature 1..20: note = chemically synthesized
  source 1..20: mol_type = other DNA
tggttaacctggtgcagtct

SEQ ID NO: 13285 - DNA, 20 bp, synthetic construct
  misc_feature 1..20: note = chemically synthesized
  source 1..20: mol_type = other DNA
agtatctccgcacacacctc

SEQ ID NO: 13286 - DNA, 20 bp, synthetic construct
  misc_feature 1..20: note = chemically synthesized
  source 1..20: mol_type = other DNA
ctccgcacacacctcaagcg

SEQ ID NO: 13287 - DNA, 20 bp, synthetic construct
  misc_feature 1..20: note = chemically synthesized
  source 1..20: mol_type = other DNA
tccgcacacacctcaagcgc

SEQ ID NO: 13288 - DNA, 20 bp, synthetic construct
  misc_feature 1..20: note = chemically synthesized
  source 1..20: mol_type = other DNA
acacctcaagcgcgggtcct

SEQ ID NO: 13289 - DNA, 20 bp, synthetic construct
  misc_feature 1..20: note = chemically synthesized
  source 1..20: mol_type = other DNA
gagattcattctgtgtccac

SEQ ID NO: 13290 - DNA, 20 bp, synthetic construct
  misc_feature 1..20: note = chemically synthesized
  source 1..20: mol_type = other DNA
caagcttacactttttactt

SEQ ID NO: 13291 - DNA, 20 bp, synthetic construct
  misc_feature 1..20: note = chemically synthesized
  source 1..20: mol_type = other DNA
aagcttacactttttacttt

SEQ ID NO: 13292 - DNA, 20 bp, synthetic construct
  misc_feature 1..20: note = chemically synthesized
  source 1..20: mol_type = other DNA
agcttacactttttactttg

SEQ ID NO: 13293 - DNA, 20 bp, synthetic construct
  misc_feature 1..20: note = chemically synthesized
  source 1..20: mol_type = other DNA
gcttacactttttactttgg

SEQ ID NO: 13294 - DNA, 20 bp, synthetic construct
  misc_feature 1..20: note = chemically synthesized
  source 1..20: mol_type = other DNA
atgcatttcccccgcaattc

SEQ ID NO: 13295 - DNA, 20 bp, synthetic construct
  misc_feature 1..20: note = chemically synthesized
  source 1..20: mol_type = other DNA
tgcatttcccccgcaattct

SEQ ID NO: 13296 - DNA, 20 bp, synthetic construct
  misc_feature 1..20: note = chemically synthesized
  source 1..20: mol_type = other DNA
tcccccgcaattctgggcac

SEQ ID NO: 13297 - DNA, 20 bp, synthetic construct
  misc_feature 1..20: note = chemically synthesized
  source 1..20: mol_type = other DNA
cccccgcaattctgggcact

SEQ ID NO: 13298 - DNA, 20 bp, synthetic construct
  misc_feature 1..20: note = chemically synthesized
  source 1..20: mol_type = other DNA
ttctgggcactgggtgtgcg

SEQ ID NO: 13299 - DNA, 20 bp, synthetic construct
  misc_feature 1..20: note = chemically synthesized
  source 1..20: mol_type = other DNA
tgggcactgggtgtgcgcgg

SEQ ID NO: 13300 - DNA, 20 bp, synthetic construct
  misc_feature 1..20: note = chemically synthesized
  source 1..20: mol_type = other DNA
gcactgggtgtgcgcggcgg

SEQ ID NO: 13301 - DNA, 20 bp, synthetic construct
  misc_feature 1..20: note = chemically synthesized
  source 1..20: mol_type = other DNA
ggtgtgcgcggcggcggctg

SEQ ID NO: 13302 - DNA, 20 bp, synthetic construct
  misc_feature 1..20: note = chemically synthesized
  source 1..20: mol_type = other DNA
attactattgttgtgattcc

SEQ ID NO: 13303 - DNA, 20 bp, synthetic construct
  misc_feature 1..20: note = chemically synthesized
  source 1..20: mol_type = other DNA
ttgttgtgattccgagctcc

SEQ ID NO: 13304 - DNA, 20 bp, synthetic construct
  misc_feature 1..20: note = chemically synthesized
  source 1..20: mol_type = other DNA
tgttgtgattccgagctccg

SEQ ID NO: 13305 - DNA, 20 bp, synthetic construct
  misc_feature 1..20: note = chemically synthesized
  source 1..20: mol_type = other DNA
gtgattccgagctccgaggc

SEQ ID NO: 13306 - DNA, 20 bp, synthetic construct
  misc_feature 1..20: note = chemically synthesized
  source 1..20: mol_type = other DNA
gattccgagctccgaggcga

SEQ ID NO: 13307 - DNA, 20 bp, synthetic construct
  misc_feature 1..20: note = chemically synthesized
  source 1..20: mol_type = other DNA
attccgagctccgaggcgag

SEQ ID NO: 13308 - DNA, 20 bp, synthetic construct
  misc_feature 1..20: note = chemically synthesized
  source 1..20: mol_type = other DNA
ttccgagctccgaggcgaga

SEQ ID NO: 13309 - DNA, 20 bp, synthetic construct
  misc_feature 1..20: note = chemically synthesized
  source 1..20: mol_type = other DNA
tccgagctccgaggcgagag

SEQ ID NO: 13310 - DNA, 20 bp, synthetic construct
  misc_feature 1..20: note = chemically synthesized
  source 1..20: mol_type = other DNA
ccgagctccgaggcgagagg

SEQ ID NO: 13311 - DNA, 20 bp, synthetic construct
  misc_feature 1..20: note = chemically synthesized
  source 1..20: mol_type = other DNA
cgagctccgaggcgagaggg

SEQ ID NO: 13312 - DNA, 20 bp, synthetic construct
  misc_feature 1..20: note = chemically synthesized
  source 1..20: mol_type = other DNA
gagctccgaggcgagagggg

SEQ ID NO: 13313 - DNA, 20 bp, synthetic construct
  misc_feature 1..20: note = chemically synthesized
  source 1..20: mol_type = other DNA
cgaggcgagagggggggtgt

SEQ ID NO: 13314 - DNA, 20 bp, synthetic construct
  misc_feature 1..20: note = chemically synthesized
  source 1..20: mol_type = other DNA
gaggcgagagggggggtgtc

SEQ ID NO: 13315 - DNA, 20 bp, synthetic construct
  misc_feature 1..20: note = chemically synthesized
  source 1..20: mol_type = other DNA
agagggggggtgtcgggctg

SEQ ID NO: 13316 - DNA, 20 bp, synthetic construct
  misc_feature 1..20: note = chemically synthesized
  source 1..20: mol_type = other DNA
agggggggtgtcgggctgca

SEQ ID NO: 13317 - DNA, 20 bp, synthetic construct
  misc_feature 1..20: note = chemically synthesized
  source 1..20: mol_type = other DNA
tgtcgggctgcagagccgcc

SEQ ID NO: 13318 - DNA, 20 bp, synthetic construct
  misc_feature 1..20: note = chemically synthesized
  source 1..20: mol_type = other DNA
gggctgcagagccgcccagc

SEQ ID NO: 13319 - DNA, 20 bp, synthetic construct
  misc_feature 1..20: note = chemically synthesized
  source 1..20: mol_type = other DNA
tgcagagccgcccagcaagc

SEQ ID NO: 13320 - DNA, 20 bp, synthetic construct
  misc_feature 1..20: note = chemically synthesized
  source 1..20: mol_type = other DNA
agccgcccagcaagccagcc

SEQ ID NO: 13321 - DNA, 20 bp, synthetic construct
  misc_feature 1..20: note = chemically synthesized
  source 1..20: mol_type = other DNA
gccgcccagcaagccagccg

SEQ ID NO: 13322 - DNA, 20 bp, synthetic construct
  misc_feature 1..20: note = chemically synthesized
  source 1..20: mol_type = other DNA
gcaagccagccgaggccacc

SEQ ID NO: 13323 - DNA, 20 bp, synthetic construct
  misc_feature 1..20: note = chemically synthesized
  source 1..20: mol_type = other DNA
caagccagccgaggccaccg

SEQ ID NO: 13324 - DNA, 20 bp, synthetic construct
  misc_feature 1..20: note = chemically synthesized
  source 1..20: mol_type = other DNA
accgaggtctgtgctttgca

SEQ ID NO: 13325 - DNA, 20 bp, synthetic construct
  misc_feature 1..20: note = chemically synthesized
  source 1..20: mol_type = other DNA
ccgaggtctgtgctttgcat

SEQ ID NO: 13326 - DNA, 20 bp, synthetic construct
  misc_feature 1..20: note = chemically synthesized
  source 1..20: mol_type = other DNA
cgaggtctgtgctttgcatg

SEQ ID NO: 13327 - DNA, 20 bp, synthetic construct
  misc_feature 1..20: note = chemically synthesized
  source 1..20: mol_type = other DNA
gaggtctgtgctttgcatgg

SEQ ID NO: 13328 - DNA, 20 bp, synthetic construct
  misc_feature 1..20: note = chemically synthesized
  source 1..20: mol_type = other DNA
tctgtgctttgcatgggggt

SEQ ID NO: 13329 - DNA, 20 bp, synthetic construct
  misc_feature 1..20: note = chemically synthesized
  source 1..20: mol_type = other DNA
ctgtgctttgcatgggggtg

SEQ ID NO: 13330 - DNA, 20 bp, synthetic construct
  misc_feature 1..20: note = chemically synthesized
  source 1..20: mol_type = other DNA
tgtgctttgcatgggggtga

SEQ ID NO: 13331 - DNA, 20 bp, synthetic construct
  misc_feature 1..20: note = chemically synthesized
  source 1..20: mol_type = other DNA
gtgctttgcatgggggtgag

SEQ ID NO: 13332 - DNA, 20 bp, synthetic construct
  misc_feature 1..20: note = chemically synthesized
  source 1..20: mol_type = other DNA
tgctttgcatgggggtgagg

SEQ ID NO: 13333 - DNA, 20 bp, synthetic construct
  misc_feature 1..20: note = chemically synthesized
  source 1..20: mol_type = other DNA
tttgcatgggggtgaggggg

SEQ ID NO: 13334 - DNA, 20 bp, synthetic construct
  misc_feature 1..20: note = chemically synthesized
  source 1..20: mol_type = other DNA
gcatgggggtgagggggtgg

SEQ ID NO: 13335 - DNA, 20 bp, synthetic construct
  misc_feature 1..20: note = chemically synthesized
  source 1..20: mol_type = other DNA
tgggggtgagggggtggaag

SEQ ID NO: 13336 - DNA, 20 bp, synthetic construct
  misc_feature 1..20: note = chemically synthesized
  source 1..20: mol_type = other DNA
ggtgagggggtggaagaagt

SEQ ID NO: 13337 - DNA, 20 bp, synthetic construct
  misc_feature 1..20: note = chemically synthesized
  source 1..20: mol_type = other DNA
gtgagggggtggaagaagtg

SEQ ID NO: 13338 - DNA, 20 bp, synthetic construct
  misc_feature 1..20: note = chemically synthesized
  source 1..20: mol_type = other DNA
gggggtggaagaagtgaggc

SEQ ID NO: 13339 - DNA, 20 bp, synthetic construct
  misc_feature 1..20: note = chemically synthesized
  source 1..20: mol_type = other DNA
gggtggaagaagtgaggctg

SEQ ID NO: 13340 - DNA, 20 bp, synthetic construct
  misc_feature 1..20: note = chemically synthesized
  source 1..20: mol_type = other DNA
aagaagtgaggctggagacc

SEQ ID NO: 13341 - DNA, 20 bp, synthetic construct
  misc_feature 1..20: note = chemically synthesized
  source 1..20: mol_type = other DNA
acttgccatatccccctctt

SEQ ID NO: 13342 - DNA, 20 bp, synthetic construct
  misc_feature 1..20: note = chemically synthesized
  source 1..20: mol_type = other DNA
ccctcttcggccatgccccg

SEQ ID NO: 13343 - DNA, 20 bp, synthetic construct
  misc_feature 1..20: note = chemically synthesized
  source 1..20: mol_type = other DNA
tcggccatgccccgaagccc

SEQ ID NO: 13344 - DNA, 20 bp, synthetic construct
  misc_feature 1..20: note = chemically synthesized
  source 1..20: mol_type = other DNA
ggccatgccccgaagcccta

SEQ ID NO: 13345 - DNA, 20 bp, synthetic construct
  misc_feature 1..20: note = chemically synthesized
  source 1..20: mol_type = other DNA
agccctagagcgcgcactcc

SEQ ID NO: 13346 - DNA, 20 bp, synthetic construct
  misc_feature 1..20: note = chemically synthesized
  source 1..20: mol_type = other DNA
ttcctccctaccaaaaatgc

SEQ ID NO: 13347 - DNA, 20 bp, synthetic construct
  misc_feature 1..20: note = chemically synthesized
  source 1..20: mol_type = other DNA
accaaaaatgccggccccga

SEQ ID NO: 13348 - DNA, 20 bp, synthetic construct
  misc_feature 1..20: note = chemically synthesized
  source 1..20: mol_type = other DNA
aaaatgccggccccgaaaga

SEQ ID NO: 13349 - DNA, 20 bp, synthetic construct
  misc_feature 1..20: note = chemically synthesized
  source 1..20: mol_type = other DNA
cgaaaactgcaccgtgctcc

SEQ ID NO: 13350 - DNA, 20 bp, synthetic construct
  misc_feature 1..20: note = chemically synthesized
  source 1..20: mol_type = other DNA
actgcaccgtgctccgagcc

SEQ ID NO: 13351 - DNA, 20 bp, synthetic construct
  misc_feature 1..20: note = chemically synthesized
  source 1..20: mol_type = other DNA
gctccgagcccggcgcgcgc

SEQ ID NO: 13352 - DNA, 20 bp, synthetic construct
  misc_feature 1..20: note = chemically synthesized
  source 1..20: mol_type = other DNA
agcccggcgcgcgctggtct

SEQ ID NO: 13353 - DNA, 20 bp, synthetic construct
  misc_feature 1..20: note = chemically synthesized
  source 1..20: mol_type = other DNA
cgctggtctcagctcgcgca

SEQ ID NO: 13354 - DNA, 20 bp, synthetic construct
  misc_feature 1..20: note = chemically synthesized
  source 1..20: mol_type = other DNA
gctggtctcagctcgcgcac

SEQ ID NO: 13355 - DNA, 20 bp, synthetic construct
  misc_feature 1..20: note = chemically synthesized
  source 1..20: mol_type = other DNA
ctggtctcagctcgcgcacg

SEQ ID NO: 13356 - DNA, 20 bp, synthetic construct
  misc_feature 1..20: note = chemically synthesized
  source 1..20: mol_type = other DNA
tggtctcagctcgcgcacgg

SEQ ID NO: 13357 - DNA, 20 bp, synthetic construct
  misc_feature 1..20: note = chemically synthesized
  source 1..20: mol_type = other DNA
cagctcgcgcacgggggtgt

SEQ ID NO: 13358 - DNA, 20 bp, synthetic construct
  misc_feature 1..20: note = chemically synthesized
  source 1..20: mol_type = other DNA
gggggtgtcggccgcgcgcc

SEQ ID NO: 13359 - DNA, 20 bp, synthetic construct
  misc_feature 1..20: note = chemically synthesized
  source 1..20: mol_type = other DNA
cgcgcccggtcgcttctccg

SEQ ID NO: 13360 - DNA, 20 bp, synthetic construct
  misc_feature 1..20: note = chemically synthesized
  source 1..20: mol_type = other DNA
cggtcgcttctccgcggccc

SEQ ID NO: 13361 - DNA, 20 bp, synthetic construct
  misc_feature 1..20: note = chemically synthesized
  source 1..20: mol_type = other DNA
cgcttctccgcggccccggc

SEQ ID NO: 13362 - DNA, 20 bp, synthetic construct
  misc_feature 1..20: note = chemically synthesized
  source 1..20: mol_type = other DNA
ttctccgcggccccggccag

SEQ ID NO: 13363 - DNA, 20 bp, synthetic construct
  misc_feature 1..20: note = chemically synthesized
  source 1..20: mol_type = other DNA
cccggccagaagcattttta

SEQ ID NO: 13364 - DNA, 20 bp, synthetic construct
  misc_feature 1..20: note = chemically synthesized
  source 1..20: mol_type = other DNA
gcatttttaaagtcaaaatg

SEQ ID NO: 13365 - DNA, 20 bp, synthetic construct
  misc_feature 1..20: note = chemically synthesized
  source 1..20: mol_type = other DNA
taaagtcaaaatgaagaaca

SEQ ID NO: 13366 - DNA, 20 bp, synthetic construct
  misc_feature 1..20: note = chemically synthesized
  source 1..20: mol_type = other DNA
aaatgaagaacaaagacata

SEQ ID NO: 13367 - DNA, 20 bp, synthetic construct
  misc_feature 1..20: note = chemically synthesized
  source 1..20: mol_type = other DNA
aatgaagaacaaagacatac

SEQ ID NO: 13368 - DNA, 20 bp, synthetic construct
  misc_feature 1..20: note = chemically synthesized
  source 1..20: mol_type = other DNA
atgaagaacaaagacatacg

SEQ ID NO: 13369 - DNA, 20 bp, synthetic construct
  misc_feature 1..20: note = chemically synthesized
  source 1..20: mol_type = other DNA
aacaaagacatacggggtga

SEQ ID NO: 13370 - DNA, 20 bp, synthetic construct
  misc_feature 1..20: note = chemically synthesized
  source 1..20: mol_type = other DNA
acaaagacatacggggtgat

SEQ ID NO: 13371 - DNA, 20 bp, synthetic construct
  misc_feature 1..20: note = chemically synthesized
  source 1..20: mol_type = other DNA
caaagacatacggggtgatg

SEQ ID NO: 13372 - DNA, 20 bp, synthetic construct
  misc_feature 1..20: note = chemically synthesized
  source 1..20: mol_type = other DNA
aaagacatacggggtgatgg

SEQ ID NO: 13373 - DNA, 20 bp, synthetic construct
  misc_feature 1..20: note = chemically synthesized
  source 1..20: mol_type = other DNA
agacatacggggtgatgggg

SEQ ID NO: 13374 - DNA, 20 bp, synthetic construct
  misc_feature 1..20: note = chemically synthesized
  source 1..20: mol_type = other DNA
acatacggggtgatggggga

SEQ ID NO: 13375 - DNA, 20 bp, synthetic construct
  misc_feature 1..20: note = chemically synthesized
  source 1..20: mol_type = other DNA
acggggtgatgggggagaga

SEQ ID NO: 13376 - DNA, 20 bp, synthetic construct
  misc_feature 1..20: note = chemically synthesized
  source 1..20: mol_type = other DNA
cggggtgatgggggagagaa

SEQ ID NO: 13377 - DNA, 20 bp, synthetic construct
  misc_feature 1..20: note = chemically synthesized
  source 1..20: mol_type = other DNA
ggggtgatgggggagagaaa

SEQ ID NO: 13378 - DNA, 20 bp, synthetic construct
  misc_feature 1..20: note = chemically synthesized
  source 1..20: mol_type = other DNA
cccccacccccaccctcgca

SEQ ID NO: 13379 - DNA, 20 bp, synthetic construct
  misc_feature 1..20: note = chemically synthesized
  source 1..20: mol_type = other DNA
tcgcaaagctcgttcctccc

SEQ ID NO: 13380 - DNA, 20 bp, synthetic construct
  misc_feature 1..20: note = chemically synthesized
  source 1..20: mol_type = other DNA
aagctcgttcctccccggac

SEQ ID NO: 13381 - DNA, 20 bp, synthetic construct
  misc_feature 1..20: note = chemically synthesized
  source 1..20: mol_type = other DNA
cctccccggacgagaatcgc

SEQ ID NO: 13382 - DNA, 20 bp, synthetic construct
  misc_feature 1..20: note = chemically synthesized
  source 1..20: mol_type = other DNA
ctccccggacgagaatcgcc

SEQ ID NO: 13383 - DNA, 20 bp, synthetic construct
  misc_feature 1..20: note = chemically synthesized
  source 1..20: mol_type = other DNA
cccggacgagaatcgccggg

SEQ ID NO: 13384 - DNA, 20 bp, synthetic construct
  misc_feature 1..20: note = chemically synthesized
  source 1..20: mol_type = other DNA
ccggacgagaatcgccgggc

SEQ ID NO: 13385 - DNA, 20 bp, synthetic construct
  misc_feature 1..20: note = chemically synthesized
  source 1..20: mol_type = other DNA
ggacgagaatcgccgggcag

SEQ ID NO: 13386 - DNA, 20 bp, synthetic construct
  misc_feature 1..20: note = chemically synthesized
  source 1..20: mol_type = other DNA
gacgagaatcgccgggcagg

SEQ ID NO: 13387 - DNA, 20 bp, synthetic construct
  misc_feature 1..20: note = chemically synthesized
  source 1..20: mol_type = other DNA
gagaatcgccgggcaggagg

SEQ ID NO: 13388 - DNA, 20 bp, synthetic construct
  misc_feature 1..20: note = chemically synthesized
  source 1..20: mol_type = other DNA
agaatcgccgggcaggaggt

SEQ ID NO: 13389 - DNA, 20 bp, synthetic construct
  misc_feature 1..20: note = chemically synthesized
  source 1..20: mol_type = other DNA
gaatcgccgggcaggaggtg

SEQ ID NO: 13390 - DNA, 20 bp, synthetic construct
  misc_feature 1..20: note = chemically synthesized
  source 1..20: mol_type = other DNA
aatcgccgggcaggaggtgg

SEQ ID NO: 13391 - DNA, 20 bp, synthetic construct
  misc_feature 1..20: note = chemically synthesized
  source 1..20: mol_type = other DNA
tcgccgggcaggaggtgggg

SEQ ID NO: 13392 - DNA, 20 bp, synthetic construct
  misc_feature 1..20: note = chemically synthesized
  source 1..20: mol_type = other DNA
cgccgggcaggaggtggggg

SEQ ID NO: 13393 - DNA, 20 bp, synthetic construct
  misc_feature 1..20: note = chemically synthesized
  source 1..20: mol_type = other DNA
gcaggaggtgggggaggctc

SEQ ID NO: 13394 - DNA, 20 bp, synthetic construct
  misc_feature 1..20: note = chemically synthesized
  source 1..20: mol_type = other DNA
aggtgggggaggctctggta

SEQ ID NO: 13395 - DNA, 20 bp, synthetic construct
  misc_feature 1..20: note = chemically synthesized
  source 1..20: mol_type = other DNA
ggtgggggaggctctggtac

SEQ ID NO: 13396 - DNA, 20 bp, synthetic construct
  misc_feature 1..20: note = chemically synthesized
  source 1..20: mol_type = other DNA
ggaggctctggtacaggttc

SEQ ID NO: 13397 - DNA, 20 bp, synthetic construct
  misc_feature 1..20: note = chemically synthesized
  source 1..20: mol_type = other DNA
ggtacaggttcaagttcgct

SEQ ID NO: 13398 - DNA, 20 bp, synthetic construct
  misc_feature 1..20: note = chemically synthesized
  source 1..20: mol_type = other DNA
cttgatcttgttctgcctcc

SEQ ID NO: 13399 - DNA, 20 bp, synthetic construct
  misc_feature 1..20: note = chemically synthesized
  source 1..20: mol_type = other DNA
tctgcctcctagcgaccgaa

SEQ ID NO: 13400 - DNA, 20 bp, synthetic construct
  misc_feature 1..20: note = chemically synthesized
  source 1..20: mol_type = other DNA
tagcgaccgaatggctcatt

SEQ ID NO: 13401 - DNA, 20 bp, synthetic construct
  misc_feature 1..20: note = chemically synthesized
  source 1..20: mol_type = other DNA
aatggctcattcagcccaca

SEQ ID NO: 13402 - DNA, 20 bp, synthetic construct
  misc_feature 1..20: note = chemically synthesized
  source 1..20: mol_type = other DNA
ggctcattcagcccacatag

SEQ ID NO: 13403 - DNA, 20 bp, synthetic construct
  misc_feature 1..20: note = chemically synthesized
  source 1..20: mol_type = other DNA
ctcattcagcccacatagca

SEQ ID NO: 13404 - DNA, 20 bp, synthetic construct
  misc_feature 1..20: note = chemically synthesized
  source 1..20: mol_type = other DNA
tcattcagcccacatagcag

SEQ ID NO: 13405 - DNA, 20 bp, synthetic construct
  misc_feature 1..20: note = chemically synthesized
  source 1..20: mol_type = other DNA
ttcagcccacatagcagagg

SEQ ID NO: 13406 - DNA, 20 bp, synthetic construct
  misc_feature 1..20: note = chemically synthesized
  source 1..20: mol_type = other DNA
tcagcccacatagcagaggc

SEQ ID NO: 13407 - DNA, 20 bp, synthetic construct
  misc_feature 1..20: note = chemically synthesized
  source 1..20: mol_type = other DNA
cagcccacatagcagaggcg

SEQ ID NO: 13408 - DNA, 20 bp, synthetic construct
  misc_feature 1..20: note = chemically synthesized
  source 1..20: mol_type = other DNA
agcccacatagcagaggcgg

SEQ ID NO: 13409 - DNA, 20 bp, synthetic construct
  misc_feature 1..20: note = chemically synthesized
  source 1..20: mol_type = other DNA
gcccacatagcagaggcggg

SEQ ID NO: 13410 - DNA, 20 bp, synthetic construct
  misc_feature 1..20: note = chemically synthesized
  source 1..20: mol_type = other DNA
cacatagcagaggcgggggg

SEQ ID NO: 13411 - DNA, 20 bp, synthetic construct
  misc_feature 1..20: note = chemically synthesized
  source 1..20: mol_type = other DNA
acatagcagaggcggggggc

SEQ ID NO: 13412 - DNA, 20 bp, synthetic construct
  misc_feature 1..20: note = chemically synthesized
  source 1..20: mol_type = other DNA
catagcagaggcggggggcg

SEQ ID NO: 13413 - DNA, 20 bp, synthetic construct
  misc_feature 1..20: note = chemically synthesized
  source 1..20: mol_type = other DNA
atagcagaggcggggggcgg

SEQ ID NO: 13414 - DNA, 20 bp, synthetic construct
  misc_feature 1..20: note = chemically synthesized
  source 1..20: mol_type = other DNA
tagcagaggcggggggcggg

SEQ ID NO: 13415 - DNA, 20 bp, synthetic construct
  misc_feature 1..20: note = chemically synthesized
  source 1..20: mol_type = other DNA
agcagaggcggggggcgggg

SEQ ID NO: 13416 - DNA, 20 bp, synthetic construct
  misc_feature 1..20: note = chemically synthesized
  source 1..20: mol_type = other DNA
agaggcggggggcggggggg

SEQ ID NO: 13417 - DNA, 20 bp, synthetic construct
  misc_feature 1..20: note = chemically synthesized
  source 1..20: mol_type = other DNA
gggggcgggggggtggtact

SEQ ID NO: 13418 - DNA, 20 bp, synthetic construct
  misc_feature 1..20: note = chemically synthesized
  source 1..20: mol_type = other DNA
ggggcgggggggtggtactg

SEQ ID NO: 13419 - DNA, 20 bp, synthetic construct
  misc_feature 1..20: note = chemically synthesized
  source 1..20: mol_type = other DNA
gggggggtggtactgaggac

SEQ ID NO: 13420 - DNA, 20 bp, synthetic construct
  misc_feature 1..20: note = chemically synthesized
  source 1..20: mol_type = other DNA
ggggggtggtactgaggacc

SEQ ID NO: 13421 - DNA, 20 bp, synthetic construct
  misc_feature 1..20: note = chemically synthesized
  source 1..20: mol_type = other DNA
ggtggtactgaggaccggga

SEQ ID NO: 13422 - DNA, 20 bp, synthetic construct
  misc_feature 1..20: note = chemically synthesized
  source 1..20: mol_type = other DNA
ggatggctcctgccccctct

SEQ ID NO: 13423 - DNA, 20 bp, synthetic construct
  misc_feature 1..20: note = chemically synthesized
  source 1..20: mol_type = other DNA
tcctgccccctctgagcacc

SEQ ID NO: 13424 - DNA, 20 bp, synthetic construct
  misc_feature 1..20: note = chemically synthesized
  source 1..20: mol_type = other DNA
cctctgagcacccagaaaat

SEQ ID NO: 13425 - DNA, 20 bp, synthetic construct
  misc_feature 1..20: note = chemically synthesized
  source 1..20: mol_type = other DNA
ctctgagcacccagaaaatg

SEQ ID NO: 13426 - DNA, 20 bp, synthetic construct
  misc_feature 1..20: note = chemically synthesized
  source 1..20: mol_type = other DNA
gagcacccagaaaatgagga

SEQ ID NO: 13427 - DNA, 20 bp, synthetic construct
  misc_feature 1..20: note = chemically synthesized
  source 1..20: mol_type = other DNA
acccagaaaatgaggacaga

SEQ ID NO: 13428 - DNA, 20 bp, synthetic construct
  misc_feature 1..20: note = chemically synthesized
  source 1..20: mol_type = other DNA
cagaaaatgaggacagaaag

SEQ ID NO: 13429 - DNA, 20 bp, synthetic construct
  misc_feature 1..20: note = chemically synthesized
  source 1..20: mol_type = other DNA
aaaatgaggacagaaagaag

SEQ ID NO: 13430 - DNA, 20 bp, synthetic construct
  misc_feature 1..20: note = chemically synthesized
  source 1..20: mol_type = other DNA
cccctcaccccctcccaaac

SEQ ID NO: 13431 - DNA, 20 bp, synthetic construct
  misc_feature 1..20: note = chemically synthesized
  source 1..20: mol_type = other DNA
ccaaactggccctttaaccc

SEQ ID NO: 13432 - DNA, 20 bp, synthetic construct
  misc_feature 1..20: note = chemically synthesized
  source 1..20: mol_type = other DNA
caaactggccctttaacccc

SEQ ID NO: 13433 - DNA, 20 bp, synthetic construct
  misc_feature 1..20: note = chemically synthesized
  source 1..20: mol_type = other DNA
ctggccctttaaccccggga

SEQ ID NO: 13434 - DNA, 20 bp, synthetic construct
  misc_feature 1..20: note = chemically synthesized
  source 1..20: mol_type = other DNA
tggccctttaaccccgggac

SEQ ID NO: 13435 - DNA, 20 bp, synthetic construct
  misc_feature 1..20: note = chemically synthesized
  source 1..20: mol_type = other DNA
gccctttaaccccgggacag

SEQ ID NO: 13436 - DNA, 20 bp, synthetic construct
  misc_feature 1..20: note = chemically synthesized
  source 1..20: mol_type = other DNA
ccctttaaccccgggacagg

SEQ ID NO: 13437 - DNA, 20 bp, synthetic construct
  misc_feature 1..20: note = chemically synthesized
  source 1..20: mol_type = other DNA
ctttaaccccgggacaggag

SEQ ID NO: 13438 - DNA, 20 bp, synthetic construct
  misc_feature 1..20: note = chemically synthesized
  source 1..20: mol_type = other DNA
tttaaccccgggacaggagg

SEQ ID NO: 13439 - DNA, 20 bp, synthetic construct
  misc_feature 1..20: note = chemically synthesized
  source 1..20: mol_type = other DNA
ttaaccccgggacaggagga

SEQ ID NO: 13440 - DNA, 20 bp, synthetic construct
  misc_feature 1..20: note = chemically synthesized
  source 1..20: mol_type = other DNA
taaccccgggacaggaggag

SEQ ID NO: 13441 - DNA, 20 bp, synthetic construct
  misc_feature 1..20: note = chemically synthesized
  source 1..20: mol_type = other DNA
aaccccgggacaggaggagg

SEQ ID NO: 13442 - DNA, 20 bp, synthetic construct
  misc_feature 1..20: note = chemically synthesized
  source 1..20: mol_type = other DNA
ggagggggtactaaccctcc

SEQ ID NO: 13443 - DNA, 20 bp, synthetic construct
  misc_feature 1..20: note = chemically synthesized
  source 1..20: mol_type = other DNA
gggtactaaccctcccagcc

SEQ ID NO: 13444 - DNA, 20 bp, synthetic construct
  misc_feature 1..20: note = chemically synthesized
  source 1..20: mol_type = other DNA
gtactaaccctcccagccta

SEQ ID NO: 13445 - DNA, 20 bp, synthetic construct
  misc_feature 1..20: note = chemically synthesized
  source 1..20: mol_type = other DNA
ctcccagcctagagtgtccc

SEQ ID NO: 13446 - DNA, 20 bp, synthetic construct
  misc_feature 1..20: note = chemically synthesized
  source 1..20: mol_type = other DNA
cagcctagagtgtcccaaga

SEQ ID NO: 13447 - DNA, 20 bp, synthetic construct
  misc_feature 1..20: note = chemically synthesized
  source 1..20: mol_type = other DNA
agagtgtcccaagatggacc

SEQ ID NO: 13448 - DNA, 20 bp, synthetic construct
  misc_feature 1..20: note = chemically synthesized
  source 1..20: mol_type = other DNA
gagtgtcccaagatggaccc

SEQ ID NO: 13449 - DNA, 20 bp, synthetic construct
  misc_feature 1..20: note = chemically synthesized
  source 1..20: mol_type = other DNA
gtgtcccaagatggacccag

SEQ ID NO: 13450 - DNA, 20 bp, synthetic construct
  misc_feature 1..20: note = chemically synthesized
  source 1..20: mol_type = other DNA
tgtcccaagatggacccagg

SEQ ID NO: 13451 - DNA, 20 bp, synthetic construct
  misc_feature 1..20: note = chemically synthesized
  source 1..20: mol_type = other DNA
gtcccaagatggacccagga

SEQ ID NO: 13452 - DNA, 20 bp, synthetic construct
  misc_feature 1..20: note = chemically synthesized
  source 1..20: mol_type = other DNA
cccaagatggacccaggagg

SEQ ID NO: 13453 - DNA, 20 bp, synthetic construct
  misc_feature 1..20: note = chemically synthesized
  source 1..20: mol_type = other DNA
caagatggacccaggaggga

SEQ ID NO: 13454 - DNA, 20 bp, synthetic construct
  misc_feature 1..20: note = chemically synthesized
  source 1..20: mol_type = other DNA
aagatggacccaggagggag

SEQ ID NO: 13455 - DNA, 20 bp, synthetic construct
  misc_feature 1..20: note = chemically synthesized
  source 1..20: mol_type = other DNA
agatggacccaggagggaga

SEQ ID NO: 13456 - DNA, 20 bp, synthetic construct
  misc_feature 1..20: note = chemically synthesized
  source 1..20: mol_type = other DNA
gatggacccaggagggagag

SEQ ID NO: 13457 - DNA, 20 bp, synthetic construct
  misc_feature 1..20: note = chemically synthesized
  source 1..20: mol_type = other DNA
cccaggagggagaggggtac

SEQ ID NO: 13458 - DNA, 20 bp, synthetic construct
  misc_feature 1..20: note = chemically synthesized
  source 1..20: mol_type = other DNA
ccaggagggagaggggtacg

SEQ ID NO: 13459 - DNA, 20 bp, synthetic construct
  misc_feature 1..20: note = chemically synthesized
  source 1..20: mol_type = other DNA
caggagggagaggggtacga

SEQ ID NO: 13460 - DNA, 20 bp, synthetic construct
  misc_feature 1..20: note = chemically synthesized
  source 1..20: mol_type = other DNA
ggagggagaggggtacgagg

SEQ ID NO: 13461 - DNA, 20 bp, synthetic construct
  misc_feature 1..20: note = chemically synthesized
  source 1..20: mol_type = other DNA
gggagaggggtacgagggag

SEQ ID NO: 13462 - DNA, 20 bp, synthetic construct
  misc_feature 1..20: note = chemically synthesized
  source 1..20: mol_type = other DNA
aggggtacgagggagcagcc

SEQ ID NO: 13463 - DNA, 20 bp, synthetic construct
  misc_feature 1..20: note = chemically synthesized
  source 1..20: mol_type = other DNA
gcagcctggactgcgcgccc

SEQ ID NO: 13464 - DNA, 20 bp, synthetic construct
  misc_feature 1..20: note = chemically synthesized
  source 1..20: mol_type = other DNA
cgcgccccggtctgtccttt

SEQ ID NO: 13465 - DNA, 20 bp, synthetic construct
  misc_feature 1..20: note = chemically synthesized
  source 1..20: mol_type = other DNA
gcccccactgcatccttccg

SEQ ID NO: 13466 - DNA, 20 bp, synthetic construct
  misc_feature 1..20: note = chemically synthesized
  source 1..20: mol_type = other DNA
cccactgcatccttccgaag

SEQ ID NO: 13467 - DNA, 20 bp, synthetic construct
  misc_feature 1..20: note = chemically synthesized
  source 1..20: mol_type = other DNA
ccactgcatccttccgaaga

SEQ ID NO: 13468 - DNA, 20 bp, synthetic construct
  misc_feature 1..20: note = chemically synthesized
  source 1..20: mol_type = other DNA
cactgcatccttccgaagaa

SEQ ID NO: 13469 - DNA, 20 bp, synthetic construct
  misc_feature 1..20: note = chemically synthesized
  source 1..20: mol_type = other DNA
aagaagggcctgactttccc

SEQ ID NO: 13470 - DNA, 20 bp, synthetic construct
  misc_feature 1..20: note = chemically synthesized
  source 1..20: mol_type = other DNA
acactgcccttccttcccgc

SEQ ID NO: 13471 - DNA, 20 bp, synthetic construct
  misc_feature 1..20: note = chemically synthesized
  source 1..20: mol_type = other DNA
ccttccttcccgccggtacc

SEQ ID NO: 13472 - DNA, 20 bp, synthetic construct
  misc_feature 1..20: note = chemically synthesized
  source 1..20: mol_type = other DNA
ccttcccgccggtacctggc

SEQ ID NO: 13473 - DNA, 20 bp, synthetic construct
  misc_feature 1..20: note = chemically synthesized
  source 1..20: mol_type = other DNA
cttcccgccggtacctggcc

SEQ ID NO: 13474 - DNA, 20 bp, synthetic construct
  misc_feature 1..20: note = chemically synthesized
  source 1..20: mol_type = other DNA
cgccgcgtctgatccgcatc

SEQ ID NO: 13475 - DNA, 20 bp, synthetic construct
  misc_feature 1..20: note = chemically synthesized
  source 1..20: mol_type = other DNA
cgtctgatccgcatccggcg

SEQ ID NO: 13476 - DNA, 20 bp, synthetic construct
  misc_feature 1..20: note = chemically synthesized
  source 1..20: mol_type = other DNA
tgatccgcatccggcgcggc

SEQ ID NO: 13477 - DNA, 20 bp, synthetic construct
  misc_feature 1..20: note = chemically synthesized
  source 1..20: mol_type = other DNA
gatccgcatccggcgcggcc

SEQ ID NO: 13478 - DNA, 20 bp, synthetic construct
  misc_feature 1..20: note = chemically synthesized
  source 1..20: mol_type = other DNA
atccgcatccggcgcggccg

SEQ ID NO: 13479 - DNA, 20 bp, synthetic construct
  misc_feature 1..20: note = chemically synthesized
  source 1..20: mol_type = other DNA
tccgcatccggcgcggccgg

SEQ ID NO: 13480 - DNA, 20 bp, synthetic construct
  misc_feature 1..20: note = chemically synthesized
  source 1..20: mol_type = other DNA
cgcatccggcgcggccgggg

SEQ ID NO: 13481 - DNA, 20 bp, synthetic construct
  misc_feature 1..20: note = chemically synthesized
  source 1..20: mol_type = other DNA
tccggcgcggccgggggagt

SEQ ID NO: 13482 - DNA, 20 bp, synthetic construct
  misc_feature 1..20: note = chemically synthesized
  source 1..20: mol_type = other DNA
ccggcgcggccgggggagtt

SEQ ID NO: 13483 - DNA, 20 bp, synthetic construct
  misc_feature 1..20: note = chemically synthesized
  source 1..20: mol_type = other DNA
cggcgcggccgggggagttg

SEQ ID NO: 13484 - DNA, 20 bp, synthetic construct
  misc_feature 1..20: note = chemically synthesized
  source 1..20: mol_type = other DNA
ggcgcggccgggggagttgg

SEQ ID NO: 13485 - DNA, 20 bp, synthetic construct
  misc_feature 1..20: note = chemically synthesized
  source 1..20: mol_type = other DNA
gcggccgggggagttggggg

SEQ ID NO: 13486 - DNA, 20 bp, synthetic construct
  misc_feature 1..20: note = chemically synthesized
  source 1..20: mol_type = other DNA
cggccgggggagttgggggc

SEQ ID NO: 13487 - DNA, 20 bp, synthetic construct
  misc_feature 1..20: note = chemically synthesized
  source 1..20: mol_type = other DNA
ggccgggggagttgggggcg

SEQ ID NO: 13488 - DNA, 20 bp, synthetic construct
  misc_feature 1..20: note = chemically synthesized
  source 1..20: mol_type = other DNA
gccgggggagttgggggcgg

SEQ ID NO: 13489 - DNA, 20 bp, synthetic construct
  misc_feature 1..20: note = chemically synthesized
  source 1..20: mol_type = other DNA
cgggggagttgggggcgggg

SEQ ID NO: 13490 - DNA, 20 bp, synthetic construct
  misc_feature 1..20: note = chemically synthesized
  source 1..20: mol_type = other DNA
ggggagttgggggcggggga

SEQ ID NO: 13491 - DNA, 20 bp, synthetic construct
  misc_feature 1..20: note = chemically synthesized
  source 1..20: mol_type = other DNA
gagttgggggcgggggagag

SEQ ID NO: 13492 - DNA, 20 bp, synthetic construct
  misc_feature 1..20: note = chemically synthesized
  source 1..20: mol_type = other DNA
tgggggcgggggagagcggc

SEQ ID NO: 13493 - DNA, 20 bp, synthetic construct
  misc_feature 1..20: note = chemically synthesized
  source 1..20: mol_type = other DNA
gggggcgggggagagcggcg

SEQ ID NO: 13494 - DNA, 20 bp, synthetic construct
  misc_feature 1..20: note = chemically synthesized
  source 1..20: mol_type = other DNA
ggggcgggggagagcggcga

SEQ ID NO: 13495 - DNA, 20 bp, synthetic construct
  misc_feature 1..20: note = chemically synthesized
  source 1..20: mol_type = other DNA
ggcgggggagagcggcgagg

SEQ ID NO: 13496 - DNA, 20 bp, synthetic construct
  misc_feature 1..20: note = chemically synthesized
  source 1..20: mol_type = other DNA
gcgggggagagcggcgaggg

SEQ ID NO: 13497 - DNA, 20 bp, synthetic construct
  misc_feature 1..20: note = chemically synthesized
  source 1..20: mol_type = other DNA
cgggggagagcggcgaggga

SEQ ID NO: 13498 - DNA, 20 bp, synthetic construct
  misc_feature 1..20: note = chemically synthesized
  source 1..20: mol_type = other DNA
gagcggcgagggagggatgc

SEQ ID NO: 13499 - DNA, 20 bp, synthetic construct
  misc_feature 1..20: note = chemically synthesized
  source 1..20: mol_type = other DNA
agcggcgagggagggatgcg

SEQ ID NO: 13500 - DNA, 20 bp, synthetic construct
  misc_feature 1..20: note = chemically synthesized
  source 1..20: mol_type = other DNA
gcggcgagggagggatgcga

SEQ ID NO: 13501 - DNA, 20 bp, synthetic construct
  misc_feature 1..20: note = chemically synthesized
  source 1..20: mol_type = other DNA
cggcgagggagggatgcgag

SEQ ID NO: 13502 - DNA, 20 bp, synthetic construct
  misc_feature 1..20: note = chemically synthesized
  source 1..20: mol_type = other DNA
ggcgagggagggatgcgagg

SEQ ID NO: 13503 - DNA, 20 bp, synthetic construct
  misc_feature 1..20: note = chemically synthesized
  source 1..20: mol_type = other DNA
gagggagggatgcgaggggg

SEQ ID NO: 13504 - DNA, 20 bp, synthetic construct
  misc_feature 1..20: note = chemically synthesized
  source 1..20: mol_type = other DNA
agggagggatgcgagggggt

SEQ ID NO: 13505 - DNA, 20 bp, synthetic construct
  misc_feature 1..20: note = chemically synthesized
  source 1..20: mol_type = other DNA
gggagggatgcgagggggtg

SEQ ID NO: 13506 - DNA, 20 bp, synthetic construct
  misc_feature 1..20: note = chemically synthesized
  source 1..20: mol_type = other DNA
gagggatgcgagggggtggg

SEQ ID NO: 13507 - DNA, 20 bp, synthetic construct
  misc_feature 1..20: note = chemically synthesized
  source 1..20: mol_type = other DNA
gggatgcgagggggtgggga

SEQ ID NO: 13508 - DNA, 20 bp, synthetic construct
  misc_feature 1..20: note = chemically synthesized
  source 1..20: mol_type = other DNA
ggatgcgagggggtggggag

SEQ ID NO: 13509 - DNA, 20 bp, synthetic construct
  misc_feature 1..20: note = chemically synthesized
  source 1..20: mol_type = other DNA
gatgcgagggggtggggaga

SEQ ID NO: 13510 - DNA, 20 bp, synthetic construct
  misc_feature 1..20: note = chemically synthesized
  source 1..20: mol_type = other DNA
tgcgagggggtggggagagg

SEQ ID NO: 13511 - DNA, 20 bp, synthetic construct
  misc_feature 1..20: note = chemically synthesized
  source 1..20: mol_type = other DNA
gcgagggggtggggagaggg

SEQ ID NO: 13512 - DNA, 20 bp, synthetic construct
  misc_feature 1..20: note = chemically synthesized
  source 1..20: mol_type = other DNA
cgagggggtggggagaggga

SEQ ID NO: 13513 - DNA, 20 bp, synthetic construct
  misc_feature 1..20: note = chemically synthesized
  source 1..20: mol_type = other DNA
gggagggccgcgcaacgtgc

SEQ ID NO: 13514 - DNA, 20 bp, synthetic construct
  misc_feature 1..20: note = chemically synthesized
  source 1..20: mol_type = other DNA
ggagggccgcgcaacgtgcc

SEQ ID NO: 13515 - DNA, 20 bp, synthetic construct
  misc_feature 1..20: note = chemically synthesized
  source 1..20: mol_type = other DNA
gagggccgcgcaacgtgccg

SEQ ID NO: 13516 - DNA, 20 bp, synthetic construct
  misc_feature 1..20: note = chemically synthesized
  source 1..20: mol_type = other DNA
ggccgcgcaacgtgccgggg

SEQ ID NO: 13517 - DNA, 20 bp, synthetic construct
  misc_feature 1..20: note = chemically synthesized
  source 1..20: mol_type = other DNA
gccgcgcaacgtgccggggt

SEQ ID NO: 13518 - DNA, 20 bp, synthetic construct
  misc_feature 1..20: note = chemically synthesized
  source 1..20: mol_type = other DNA
ccgcgcaacgtgccggggtg

SEQ ID NO: 13519 - DNA, 20 bp, synthetic construct
  misc_feature 1..20: note = chemically synthesized
  source 1..20: mol_type = other DNA
cgcgcaacgtgccggggtgg

SEQ ID NO: 13520 - DNA, 20 bp, synthetic construct
  misc_feature 1..20: note = chemically synthesized
  source 1..20: mol_type = other DNA
cgcaacgtgccggggtgggg

SEQ ID NO: 13521 - DNA, 20 bp, synthetic construct
  misc_feature 1..20: note = chemically synthesized
  source 1..20: mol_type = other DNA
ccggggtgggggagcttccg

SEQ ID NO: 13522 - DNA, 20 bp, synthetic construct
  misc_feature 1..20: note = chemically synthesized
  source 1..20: mol_type = other DNA
gagcttccgaagtgtgtgac

SEQ ID NO: 13523 - DNA, 20 bp, synthetic construct
  misc_feature 1..20: note = chemically synthesized
  source 1..20: mol_type = other DNA
ccgaagtgtgtgacaagttc

SEQ ID NO: 13524 - DNA, 20 bp, synthetic construct
  misc_feature 1..20: note = chemically synthesized
  source 1..20: mol_type = other DNA
cgaagtgtgtgacaagttcc

SEQ ID NO: 13525 - DNA, 20 bp, synthetic construct
  misc_feature 1..20: note = chemically synthesized
  source 1..20: mol_type = other DNA
gaagtgtgtgacaagttcca

SEQ ID NO: 13526 - DNA, 20 bp, synthetic construct
  misc_feature 1..20: note = chemically synthesized
  source 1..20: mol_type = other DNA
gtgtgacaagttccagggcc

SEQ ID NO: 13527 - DNA, 20 bp, synthetic construct
  misc_feature 1..20: note = chemically synthesized
  source 1..20: mol_type = other DNA
accacccctttaaaaaaaca

SEQ ID NO: 13528 - DNA, 20 bp, synthetic construct
  misc_feature 1..20: note = chemically synthesized
  source 1..20: mol_type = other DNA
ctttaaaaaaacacagaacc

SEQ ID NO: 13529 - DNA, 20 bp, synthetic construct
  misc_feature 1..20: note = chemically synthesized
  source 1..20: mol_type = other DNA
aaaaaacacagaaccaagta

SEQ ID NO: 13530 - DNA, 20 bp, synthetic construct
  misc_feature 1..20: note = chemically synthesized
  source 1..20: mol_type = other DNA
aaaaacacagaaccaagtat

SEQ ID NO: 13531 - DNA, 20 bp, synthetic construct
  misc_feature 1..20: note = chemically synthesized
  source 1..20: mol_type = other DNA
aacacagaaccaagtatagg

SEQ ID NO: 13532 - DNA, 20 bp, synthetic construct
  misc_feature 1..20: note = chemically synthesized
  source 1..20: mol_type = other DNA
aaaactgcatcaaaaattta

SEQ ID NO: 13533 - DNA, 20 bp, synthetic construct
  misc_feature 1..20: note = chemically synthesized
  source 1..20: mol_type = other DNA
ctgcatcaaaaatttaaagt

SEQ ID NO: 13534 - DNA, 20 bp, synthetic construct
  misc_feature 1..20: note = chemically synthesized
  source 1..20: mol_type = other DNA
taaagtaagaatcataaatt

SEQ ID NO: 13535 - DNA, 20 bp, synthetic construct
  misc_feature 1..20: note = chemically synthesized
  source 1..20: mol_type = other DNA
agtaagaatcataaattgag

SEQ ID NO: 13536 - DNA, 20 bp, synthetic construct
  misc_feature 1..20: note = chemically synthesized
  source 1..20: mol_type = other DNA
gtaagaatcataaattgagt

SEQ ID NO: 13537 - DNA, 20 bp, synthetic construct
  misc_feature 1..20: note = chemically synthesized
  source 1..20: mol_type = other DNA
taagaatcataaattgagta

SEQ ID NO: 13538 - DNA, 20 bp, synthetic construct
  misc_feature 1..20: note = chemically synthesized
  source 1..20: mol_type = other DNA
aagaatcataaattgagtag

SEQ ID NO: 13539 - DNA, 20 bp, synthetic construct
  misc_feature 1..20: note = chemically synthesized
  source 1..20: mol_type = other DNA
agaatcataaattgagtagg

SEQ ID NO: 13540 - DNA, 20 bp, synthetic construct
  misc_feature 1..20: note = chemically synthesized
  source 1..20: mol_type = other DNA
gaatcataaattgagtaggg

SEQ ID NO: 13541 - DNA, 20 bp, synthetic construct
  misc_feature 1..20: note = chemically synthesized
  source 1..20: mol_type = other DNA
aatcataaattgagtagggg

SEQ ID NO: 13542 - DNA, 20 bp, synthetic construct
  misc_feature 1..20: note = chemically synthesized
  source 1..20: mol_type = other DNA
aattgagtagggggggaatg

SEQ ID NO: 13543 - DNA, 20 bp, synthetic construct
  misc_feature 1..20: note = chemically synthesized
  source 1..20: mol_type = other DNA
attgagtagggggggaatgt

SEQ ID NO: 13544 - DNA, 20 bp, synthetic construct
  misc_feature 1..20: note = chemically synthesized
  source 1..20: mol_type = other DNA
ccttgctgccaaactttcct

SEQ ID NO: 13545 - DNA, 20 bp, synthetic construct
  misc_feature 1..20: note = chemically synthesized
  source 1..20: mol_type = other DNA
gtgcccaccgcccgcctttc

SEQ ID NO: 13546 - DNA, 20 bp, synthetic construct
  misc_feature 1..20: note = chemically synthesized
  source 1..20: mol_type = other DNA
tgcccaccgcccgcctttcc

SEQ ID NO: 13547 - DNA, 20 bp, synthetic construct
  misc_feature 1..20: note = chemically synthesized
  source 1..20: mol_type = other DNA
accgcccgcctttccaggcg

SEQ ID NO: 13548 - DNA, 20 bp, synthetic construct
  misc_feature 1..20: note = chemically synthesized
  source 1..20: mol_type = other DNA
cccgcctttccaggcgcagt

SEQ ID NO: 13549 - DNA, 20 bp, synthetic construct
  misc_feature 1..20: note = chemically synthesized
  source 1..20: mol_type = other DNA
gcctttccaggcgcagtcag

SEQ ID NO: 13550 - DNA, 20 bp, synthetic construct
  misc_feature 1..20: note = chemically synthesized
  source 1..20: mol_type = other DNA
cctttccaggcgcagtcagc

SEQ ID NO: 13551 - DNA, 20 bp, synthetic construct
  misc_feature 1..20: note = chemically synthesized
  source 1..20: mol_type = other DNA
tttccaggcgcagtcagcgg

SEQ ID NO: 13552 - DNA, 20 bp, synthetic construct
  misc_feature 1..20: note = chemically synthesized
  source 1..20: mol_type = other DNA
caggcgcagtcagcgggaga

SEQ ID NO: 13553 - DNA, 20 bp, synthetic construct
  misc_feature 1..20: note = chemically synthesized
  source 1..20: mol_type = other DNA
cgggagacagccaccaccac

SEQ ID NO: 13554 - DNA, 20 bp, synthetic construct
  misc_feature 1..20: note = chemically synthesized
  source 1..20: mol_type = other DNA
caccaccaccagctcttata

SEQ ID NO: 13555 - DNA, 20 bp, synthetic construct
  misc_feature 1..20: note = chemically synthesized
  source 1..20: mol_type = other DNA
cagctcttatacagactcac

SEQ ID NO: 13556 - DNA, 20 bp, synthetic construct
  misc_feature 1..20: note = chemically synthesized
  source 1..20: mol_type = other DNA
atacagactcacaagaacct

SEQ ID NO: 13557 - DNA, 20 bp, synthetic construct
  misc_feature 1..20: note = chemically synthesized
  source 1..20: mol_type = other DNA
actcacaagaacctcagacc

SEQ ID NO: 13558 - DNA, 20 bp, synthetic construct
  misc_feature 1..20: note = chemically synthesized
  source 1..20: mol_type = other DNA
acaagaacctcagaccaagc

SEQ ID NO: 13559 - DNA, 20 bp, synthetic construct
  misc_feature 1..20: note = chemically synthesized
  source 1..20: mol_type = other DNA
caagaacctcagaccaagcc

SEQ ID NO: 13560 - DNA, 20 bp, synthetic construct
  misc_feature 1..20: note = chemically synthesized
  source 1..20: mol_type = other DNA
acctcagaccaagccaggcc

SEQ ID NO: 13561 - DNA, 20 bp, synthetic construct
  misc_feature 1..20: note = chemically synthesized
  source 1..20: mol_type = other DNA
cctcagaccaagccaggcct

SEQ ID NO: 13562 - DNA, 20 bp, synthetic construct
  misc_feature 1..20: note = chemically synthesized
  source 1..20: mol_type = other DNA
ctcagaccaagccaggcctg

SEQ ID NO: 13563 - DNA, 20 bp, synthetic construct
  misc_feature 1..20: note = chemically synthesized
  source 1..20: mol_type = other DNA
agaccaagccaggcctgggg

SEQ ID NO: 13564 - DNA, 20 bp, synthetic construct
  misc_feature 1..20: note = chemically synthesized
  source 1..20: mol_type = other DNA
accaagccaggcctggggaa

SEQ ID NO: 13565 - DNA, 20 bp, synthetic construct
  misc_feature 1..20: note = chemically synthesized
  source 1..20: mol_type = other DNA
ccaagccaggcctggggaag

SEQ ID NO: 13566 - DNA, 20 bp, synthetic construct
  misc_feature 1..20: note = chemically synthesized
  source 1..20: mol_type = other DNA
caagccaggcctggggaaga

SEQ ID NO: 13567 - DNA, 20 bp, synthetic construct
  misc_feature 1..20: note = chemically synthesized
  source 1..20: mol_type = other DNA
ccaggcctggggaagagggc

SEQ ID NO: 13568 - DNA, 20 bp, synthetic construct
  misc_feature 1..20: note = chemically synthesized
  source 1..20: mol_type = other DNA
ggggaagagggcaagaccca

SEQ ID NO: 13569 - DNA, 20 bp, synthetic construct
  misc_feature 1..20: note = chemically synthesized
  source 1..20: mol_type = other DNA
gggaagagggcaagacccaa

SEQ ID NO: 13570 - DNA, 20 bp, synthetic construct
  misc_feature 1..20: note = chemically synthesized
  source 1..20: mol_type = other DNA
ggaagagggcaagacccaaa

SEQ ID NO: 13571 - DNA, 20 bp, synthetic construct
  misc_feature 1..20: note = chemically synthesized
  source 1..20: mol_type = other DNA
agggcaagacccaaagggtg

SEQ ID NO: 13572 - DNA, 20 bp, synthetic construct
  misc_feature 1..20: note = chemically synthesized
  source 1..20: mol_type = other DNA
gacccaaagggtgaagtgct

SEQ ID NO: 13573 - DNA, 20 bp, synthetic construct
  misc_feature 1..20: note = chemically synthesized
  source 1..20: mol_type = other DNA
acccaaagggtgaagtgctc

SEQ ID NO: 13574 - DNA, 20 bp, synthetic construct
  misc_feature 1..20: note = chemically synthesized
  source 1..20: mol_type = other DNA
cccaaagggtgaagtgctcg

SEQ ID NO: 13575 - DNA, 20 bp, synthetic construct
  misc_feature 1..20: note = chemically synthesized
  source 1..20: mol_type = other DNA
gggtgaagtgctcggggtcc

SEQ ID NO: 13576 - DNA, 20 bp, synthetic construct
  misc_feature 1..20: note = chemically synthesized
  source 1..20: mol_type = other DNA
ggtgaagtgctcggggtccc

SEQ ID NO: 13577 - DNA, 20 bp, synthetic construct
  misc_feature 1..20: note = chemically synthesized
  source 1..20: mol_type = other DNA
gtgctcggggtcccaggatc

SEQ ID NO: 13578 - DNA, 20 bp, synthetic construct
  misc_feature 1..20: note = chemically synthesized
  source 1..20: mol_type = other DNA
acttctcccctgcccttccc

SEQ ID NO: 13579 - DNA, 20 bp, synthetic construct
  misc_feature 1..20: note = chemically synthesized
  source 1..20: mol_type = other DNA
tccccggcaaccccgccacc

SEQ ID NO: 13580 - DNA, 20 bp, synthetic construct
  misc_feature 1..20: note = chemically synthesized
  source 1..20: mol_type = other DNA
ggcaaccccgccacctggcc

SEQ ID NO: 13581 - DNA, 20 bp, synthetic construct
  misc_feature 1..20: note = chemically synthesized
  source 1..20: mol_type = other DNA
ccacctggcctagtcgtgct

SEQ ID NO: 13582 - DNA, 20 bp, synthetic construct
  misc_feature 1..20: note = chemically synthesized
  source 1..20: mol_type = other DNA
cacctggcctagtcgtgctc

SEQ ID NO: 13583 - DNA, 20 bp, synthetic construct
  misc_feature 1..20: note = chemically synthesized
  source 1..20: mol_type = other DNA
acctggcctagtcgtgctcg

SEQ ID NO: 13584 - DNA, 20 bp, synthetic construct
  misc_feature 1..20: note = chemically synthesized
  source 1..20: mol_type = other DNA
gcctagtcgtgctcggggcg

SEQ ID NO: 13585 - DNA, 20 bp, synthetic construct
  misc_feature 1..20: note = chemically synthesized
  source 1..20: mol_type = other DNA
cctagtcgtgctcggggcgc

SEQ ID NO: 13586 - DNA, 20 bp, synthetic construct
  misc_feature 1..20: note = chemically synthesized
  source 1..20: mol_type = other DNA
ctagtcgtgctcggggcgca

SEQ ID NO: 13587 - DNA, 20 bp, synthetic construct
  misc_feature 1..20: note = chemically synthesized
  source 1..20: mol_type = other DNA
tagtcgtgctcggggcgcag

SEQ ID NO: 13588 - DNA, 20 bp, synthetic construct
  misc_feature 1..20: note = chemically synthesized
  source 1..20: mol_type = other DNA
agtcgtgctcggggcgcagg

SEQ ID NO: 13589 - DNA, 20 bp, synthetic construct
  misc_feature 1..20: note = chemically synthesized
  source 1..20: mol_type = other DNA
tgctcggggcgcagggggac

SEQ ID NO: 13590 - DNA, 20 bp, synthetic construct
  misc_feature 1..20: note = chemically synthesized
  source 1..20: mol_type = other DNA
ggcgcagggggactggtgac

SEQ ID NO: 13591 - DNA, 20 bp, synthetic construct
  misc_feature 1..20: note = chemically synthesized
  source 1..20: mol_type = other DNA
agggggactggtgaccagac

SEQ ID NO: 13592 - DNA, 20 bp, synthetic construct
  misc_feature 1..20: note = chemically synthesized
  source 1..20: mol_type = other DNA
gggggactggtgaccagacc

SEQ ID NO: 13593 - DNA, 20 bp, synthetic construct
  misc_feature 1..20: note = chemically synthesized
  source 1..20: mol_type = other DNA
ggactggtgaccagaccggg

SEQ ID NO: 13594 - DNA, 20 bp, synthetic construct
  misc_feature 1..20: note = chemically synthesized
  source 1..20: mol_type = other DNA
gactggtgaccagaccgggc

SEQ ID NO: 13595 - DNA, 20 bp, synthetic construct
  misc_feature 1..20: note = chemically synthesized
  source 1..20: mol_type = other DNA
actggtgaccagaccgggcg

SEQ ID NO: 13596 - DNA, 20 bp, synthetic construct
  misc_feature 1..20: note = chemically synthesized
  source 1..20: mol_type = other DNA
ggtgaccagaccgggcgggg

SEQ ID NO: 13597 - DNA, 20 bp, synthetic construct
  misc_feature 1..20: note = chemically synthesized
  source 1..20: mol_type = other DNA
gtgaccagaccgggcggggt

SEQ ID NO: 13598 - DNA, 20 bp, synthetic construct
  misc_feature 1..20: note = chemically synthesized
  source 1..20: mol_type = other DNA
tgaccagaccgggcggggtg

SEQ ID NO: 13599 - DNA, 20 bp, synthetic construct
  misc_feature 1..20: note = chemically synthesized
  source 1..20: mol_type = other DNA
gaccagaccgggcggggtgg

SEQ ID NO: 13600 - DNA, 20 bp, synthetic construct
  misc_feature 1..20: note = chemically synthesized
  source 1..20: mol_type = other DNA
accagaccgggcggggtggg

SEQ ID NO: 13601 - DNA, 20 bp, synthetic construct
  misc_feature 1..20: note = chemically synthesized
  source 1..20: mol_type = other DNA
agaccgggcggggtgggggg

SEQ ID NO: 13602 - DNA, 20 bp, synthetic construct
  misc_feature 1..20: note = chemically synthesized
  source 1..20: mol_type = other DNA
gaccgggcggggtggggggt

SEQ ID NO: 13603 - DNA, 20 bp, synthetic construct
  misc_feature 1..20: note = chemically synthesized
  source 1..20: mol_type = other DNA
cgggcggggtggggggtggg

SEQ ID NO: 13604 - DNA, 20 bp, synthetic construct
  misc_feature 1..20: note = chemically synthesized
  source 1..20: mol_type = other DNA
gggcggggtggggggtgggc

SEQ ID NO: 13605 - DNA, 20 bp, synthetic construct
  misc_feature 1..20: note = chemically synthesized
  source 1..20: mol_type = other DNA
ggcggggtggggggtgggca

SEQ ID NO: 13606 - DNA, 20 bp, synthetic construct
  misc_feature 1..20: note = chemically synthesized
  source 1..20: mol_type = other DNA
gggtggggggtgggcaggga

SEQ ID NO: 13607 - DNA, 20 bp, synthetic construct
  misc_feature 1..20: note = chemically synthesized
  source 1..20: mol_type = other DNA
gggtgggcagggaaagcacg

SEQ ID NO: 13608 - DNA, 20 bp, synthetic construct
  misc_feature 1..20: note = chemically synthesized
  source 1..20: mol_type = other DNA
agcacgtggtgacctcctcg

SEQ ID NO: 13609 - DNA, 20 bp, synthetic construct
  misc_feature 1..20: note = chemically synthesized
  source 1..20: mol_type = other DNA
ggtgacctcctcgcggtccc

SEQ ID NO: 13610 - DNA, 20 bp, synthetic construct
  misc_feature 1..20: note = chemically synthesized
  source 1..20: mol_type = other DNA
ctcctcgcggtcccgagctg

SEQ ID NO: 13611 - DNA, 20 bp, synthetic construct
  misc_feature 1..20: note = chemically synthesized
  source 1..20: mol_type = other DNA
cgcggtcccgagctgtggac

SEQ ID NO: 13612 - DNA, 20 bp, synthetic construct
  misc_feature 1..20: note = chemically synthesized
  source 1..20: mol_type = other DNA
cggtcccgagctgtggacaa

SEQ ID NO: 13613 - DNA, 20 bp, synthetic construct
  misc_feature 1..20: note = chemically synthesized
  source 1..20: mol_type = other DNA
gctgtggacaagagacgtct

SEQ ID NO: 13614 - DNA, 20 bp, synthetic construct
  misc_feature 1..20: note = chemically synthesized
  source 1..20: mol_type = other DNA
tggacaagagacgtctgaga

SEQ ID NO: 13615 - DNA, 20 bp, synthetic construct
  misc_feature 1..20: note = chemically synthesized
  source 1..20: mol_type = other DNA
gagacgtctgagaaagtacc

SEQ ID NO: 13616 - DNA, 20 bp, synthetic construct
  misc_feature 1..20: note = chemically synthesized
  source 1..20: mol_type = other DNA
agacgtctgagaaagtaccc

SEQ ID NO: 13617 - DNA, 20 bp, synthetic construct
  misc_feature 1..20: note = chemically synthesized
  source 1..20: mol_type = other DNA
gacgtctgagaaagtaccca

SEQ ID NO: 13618 - DNA, 20 bp, synthetic construct
  misc_feature 1..20: note = chemically synthesized
  source 1..20: mol_type = other DNA
gtctgagaaagtacccaggg

SEQ ID NO: 13619 - DNA, 20 bp, synthetic construct
  misc_feature 1..20: note = chemically synthesized
  source 1..20: mol_type = other DNA
ctgagaaagtacccagggcg

SEQ ID NO: 13620 - DNA, 20 bp, synthetic construct
  misc_feature 1..20: note = chemically synthesized
  source 1..20: mol_type = other DNA
tgagaaagtacccagggcgg

SEQ ID NO: 13621 - DNA, 20 bp, synthetic construct
  misc_feature 1..20: note = chemically synthesized
  source 1..20: mol_type = other DNA
gagaaagtacccagggcgga

SEQ ID NO: 13622 - DNA, 20 bp, synthetic construct
  misc_feature 1..20: note = chemically synthesized
  source 1..20: mol_type = other DNA
agaaagtacccagggcggag

SEQ ID NO: 13623 - DNA, 20 bp, synthetic construct
  misc_feature 1..20: note = chemically synthesized
  source 1..20: mol_type = other DNA
aaagtacccagggcggaggg

SEQ ID NO: 13624 - DNA, 20 bp, synthetic construct
  misc_feature 1..20: note = chemically synthesized
  source 1..20: mol_type = other DNA
aagtacccagggcggagggg

SEQ ID NO: 13625 - DNA, 20 bp, synthetic construct
  misc_feature 1..20: note = chemically synthesized
  source 1..20: mol_type = other DNA
agtacccagggcggagggga

SEQ ID NO: 13626 - DNA, 20 bp, synthetic construct
  misc_feature 1..20: note = chemically synthesized
  source 1..20: mol_type = other DNA
gtacccagggcggaggggag

SEQ ID NO: 13627 - DNA, 20 bp, synthetic construct
  misc_feature 1..20: note = chemically synthesized
  source 1..20: mol_type = other DNA
acccagggcggaggggaggg

SEQ ID NO: 13628 - DNA, 20 bp, synthetic construct
  misc_feature 1..20: note = chemically synthesized
  source 1..20: mol_type = other DNA
cccagggcggaggggagggg

SEQ ID NO: 13629 - DNA, 20 bp, synthetic construct
  misc_feature 1..20: note = chemically synthesized
  source 1..20: mol_type = other DNA
ggcggaggggaggggaggcg

SEQ ID NO: 13630 - DNA, 20 bp, synthetic construct
  misc_feature 1..20: note = chemically synthesized
  source 1..20: mol_type = other DNA
aggcgcagaacgcgctttta

SEQ ID NO: 13631 - DNA, 20 bp, synthetic construct
  misc_feature 1..20: note = chemically synthesized
  source 1..20: mol_type = other DNA
caaaataaaaatgctttgca

SEQ ID NO: 13632 - DNA, 20 bp, synthetic construct
  misc_feature 1..20: note = chemically synthesized
  source 1..20: mol_type = other DNA
taaaaatgctttgcaaagcc

SEQ ID NO: 13633 - DNA, 20 bp, synthetic construct
  misc_feature 1..20: note = chemically synthesized
  source 1..20: mol_type = other DNA
ttgcaaagccgagtttcacc

SEQ ID NO: 13634 - DNA, 20 bp, synthetic construct
  misc_feature 1..20: note = chemically synthesized
  source 1..20: mol_type = other DNA
gtttcacccagccgatttcg

SEQ ID NO: 13635 - DNA, 20 bp, synthetic construct
  misc_feature 1..20: note = chemically synthesized
  source 1..20: mol_type = other DNA
acccagccgatttcgcagtc

SEQ ID NO: 13636 - DNA, 20 bp, synthetic construct
  misc_feature 1..20: note = chemically synthesized
  source 1..20: mol_type = other DNA
cccagccgatttcgcagtct

SEQ ID NO: 13637 - DNA, 20 bp, synthetic construct
  misc_feature 1..20: note = chemically synthesized
  source 1..20: mol_type = other DNA
cagccgatttcgcagtctgg

SEQ ID NO: 13638 - DNA, 20 bp, synthetic construct
  misc_feature 1..20: note = chemically synthesized
  source 1..20: mol_type = other DNA
agccgatttcgcagtctggg

SEQ ID NO: 13639 - DNA, 20 bp, synthetic construct
  misc_feature 1..20: note = chemically synthesized
  source 1..20: mol_type = other DNA
atttcgcagtctgggaggtc

SEQ ID NO: 13640 - DNA, 20 bp, synthetic construct
  misc_feature 1..20: note = chemically synthesized
  source 1..20: mol_type = other DNA
tcgcagtctgggaggtcgag

SEQ ID NO: 13641 - DNA, 20 bp, synthetic construct
  misc_feature 1..20: note = chemically synthesized
  source 1..20: mol_type = other DNA
gcagtctgggaggtcgagaa

SEQ ID NO: 13642 - DNA, 20 bp, synthetic construct
  misc_feature 1..20: note = chemically synthesized
  source 1..20: mol_type = other DNA
cagtctgggaggtcgagaag

SEQ ID NO: 13643 - DNA, 20 bp, synthetic construct
  misc_feature 1..20: note = chemically synthesized
  source 1..20: mol_type = other DNA
gggaggtcgagaagaggtct

SEQ ID NO: 13644 - DNA, 20 bp, synthetic construct
  misc_feature 1..20: note = chemically synthesized
  source 1..20: mol_type = other DNA
aagaggtctcggcattgtgc

SEQ ID NO: 13645 - DNA, 20 bp, synthetic construct
  misc_feature 1..20: note = chemically synthesized
  source 1..20: mol_type = other DNA
agaggtctcggcattgtgct

SEQ ID NO: 13646 - DNA, 20 bp, synthetic construct
  misc_feature 1..20: note = chemically synthesized
  source 1..20: mol_type = other DNA
gaggtctcggcattgtgctg

SEQ ID NO: 13647 - DNA, 20 bp, synthetic construct
  misc_feature 1..20: note = chemically synthesized
  source 1..20: mol_type = other DNA
aggtctcggcattgtgctgg

SEQ ID NO: 13648 - DNA, 20 bp, synthetic construct
  misc_feature 1..20: note = chemically synthesized
  source 1..20: mol_type = other DNA
tctcggcattgtgctggggg

SEQ ID NO: 13649 - DNA, 20 bp, synthetic construct
  misc_feature 1..20: note = chemically synthesized
  source 1..20: mol_type = other DNA
gcattgtgctgggggcggac

SEQ ID NO: 13650 - DNA, 20 bp, synthetic construct
  misc_feature 1..20: note = chemically synthesized
  source 1..20: mol_type = other DNA
cattgtgctgggggcggacc

SEQ ID NO: 13651 - DNA, 20 bp, synthetic construct
  misc_feature 1..20: note = chemically synthesized
  source 1..20: mol_type = other DNA
ctgggggcggaccaggacca

SEQ ID NO: 13652 - DNA, 20 bp, synthetic construct
  misc_feature 1..20: note = chemically synthesized
  source 1..20: mol_type = other DNA
tgggggcggaccaggaccac

SEQ ID NO: 13653 - DNA, 20 bp, synthetic construct
  misc_feature 1..20: note = chemically synthesized
  source 1..20: mol_type = other DNA
ggcggaccaggaccacgggc

SEQ ID NO: 13654 - DNA, 20 bp, synthetic construct
  misc_feature 1..20: note = chemically synthesized
  source 1..20: mol_type = other DNA
gcggaccaggaccacgggcc

SEQ ID NO: 13655 - DNA, 20 bp, synthetic construct
  misc_feature 1..20: note = chemically synthesized
  source 1..20: mol_type = other DNA
accaggaccacgggccaggc

SEQ ID NO: 13656 - DNA, 20 bp, synthetic construct
  misc_feature 1..20: note = chemically synthesized
  source 1..20: mol_type = other DNA
gaccacgggccaggctggcg

SEQ ID NO: 13657 - DNA, 20 bp, synthetic construct
  misc_feature 1..20: note = chemically synthesized
  source 1..20: mol_type = other DNA
ccacgggccaggctggcgcg

SEQ ID NO: 13658 - DNA, 20 bp, synthetic construct
  misc_feature 1..20: note = chemically synthesized
  source 1..20: mol_type = other DNA
gctggcgcggagacactgcg

SEQ ID NO: 13659 - DNA, 20 bp, synthetic construct
  misc_feature 1..20: note = chemically synthesized
  source 1..20: mol_type = other DNA
gcgtggcctgccgccgtgcc

SEQ ID NO: 13660 - DNA, 20 bp, synthetic construct
  misc_feature 1..20: note = chemically synthesized
  source 1..20: mol_type = other DNA
tggcctgccgccgtgcctgg

SEQ ID NO: 13661 - DNA, 20 bp, synthetic construct
  misc_feature 1..20: note = chemically synthesized
  source 1..20: mol_type = other DNA
ggcctgccgccgtgcctggc

SEQ ID NO: 13662 - DNA, 20 bp, synthetic construct
  misc_feature 1..20: note = chemically synthesized
  source 1..20: mol_type = other DNA
ctgccgccgtgcctggcggg

SEQ ID NO: 13663 - DNA, 20 bp, synthetic construct
  misc_feature 1..20: note = chemically synthesized
  source 1..20: mol_type = other DNA
tgccgccgtgcctggcgggt

SEQ ID NO: 13664 - DNA, 20 bp, synthetic construct
  misc_feature 1..20: note = chemically synthesized
  source 1..20: mol_type = other DNA
cgtgcctggcgggtgggcgc

SEQ ID NO: 13665 - DNA, 20 bp, synthetic construct
  misc_feature 1..20: note = chemically synthesized
  source 1..20: mol_type = other DNA
gtgcctggcgggtgggcgcc

SEQ ID NO: 13666 - DNA, 20 bp, synthetic construct
  misc_feature 1..20: note = chemically synthesized
  source 1..20: mol_type = other DNA
ggcgggtgggcgccgggcgc

SEQ ID NO: 13667 - DNA, 20 bp, synthetic construct
  misc_feature 1..20: note = chemically synthesized
  source 1..20: mol_type = other DNA
gcgggtgggcgccgggcgcc

SEQ ID NO: 13668 - DNA, 20 bp, synthetic construct
  misc_feature 1..20: note = chemically synthesized
  source 1..20: mol_type = other DNA
ggtgggcgccgggcgccggg

SEQ ID NO: 13669 - DNA, 20 bp, synthetic construct
  misc_feature 1..20: note = chemically synthesized
  source 1..20: mol_type = other DNA
gtgggcgccgggcgccgggt

SEQ ID NO: 13670 - DNA, 20 bp, synthetic construct
  misc_feature 1..20: note = chemically synthesized
  source 1..20: mol_type = other DNA
cgggcgccgggtgggcgatc

SEQ ID NO: 13671 - DNA, 20 bp, synthetic construct
  misc_feature 1..20: note = chemically synthesized
  source 1..20: mol_type = other DNA
gggcgccgggtgggcgatcc

SEQ ID NO: 13672 - DNA, 20 bp, synthetic construct
  misc_feature 1..20: note = chemically synthesized
  source 1..20: mol_type = other DNA
ggcgccgggtgggcgatccg

SEQ ID NO: 13673 - DNA, 20 bp, synthetic construct
  misc_feature 1..20: note = chemically synthesized
  source 1..20: mol_type = other DNA
ccgggtgggcgatccggggc

SEQ ID NO: 13674 - DNA, 20 bp, synthetic construct
  misc_feature 1..20: note = chemically synthesized
  source 1..20: mol_type = other DNA
cgggtgggcgatccggggct

SEQ ID NO: 13675 - DNA, 20 bp, synthetic construct
  misc_feature 1..20: note = chemically synthesized
  source 1..20: mol_type = other DNA
tgggcgatccggggctgggc

SEQ ID NO: 13676 - DNA, 20 bp, synthetic construct
  misc_feature 1..20: note = chemically synthesized
  source 1..20: mol_type = other DNA
gggcgatccggggctgggct

SEQ ID NO: 13677 - DNA, 20 bp, synthetic construct
  misc_feature 1..20: note = chemically synthesized
  source 1..20: mol_type = other DNA
ggcgatccggggctgggctg

SEQ ID NO: 13678 - DNA, 20 bp, synthetic construct
  misc_feature 1..20: note = chemically synthesized
  source 1..20: mol_type = other DNA
tccggggctgggctggggcg

SEQ ID NO: 13679 - DNA, 20 bp, synthetic construct
  misc_feature 1..20: note = chemically synthesized
  source 1..20: mol_type = other DNA
gggctgggctggggcgcggc

SEQ ID NO: 13680 - DNA, 20 bp, synthetic construct
  misc_feature 1..20: note = chemically synthesized
  source 1..20: mol_type = other DNA
ggctgggctggggcgcggcg

SEQ ID NO: 13681 - DNA, 20 bp, synthetic construct
  misc_feature 1..20: note = chemically synthesized
  source 1..20: mol_type = other DNA
gggctggggcgcggcgaggt

SEQ ID NO: 13682 - DNA, 20 bp, synthetic construct
  misc_feature 1..20: note = chemically synthesized
  source 1..20: mol_type = other DNA
ggctggggcgcggcgaggtc

SEQ ID NO: 13683 - DNA, 20 bp, synthetic construct
  misc_feature 1..20: note = chemically synthesized
  source 1..20: mol_type = other DNA
ggggcgcggcgaggtcgggc

SEQ ID NO: 13684 - DNA, 20 bp, synthetic construct
  misc_feature 1..20: note = chemically synthesized
  source 1..20: mol_type = other DNA
gggcgcggcgaggtcgggca

SEQ ID NO: 13685 - DNA, 20 bp, synthetic construct
  misc_feature 1..20: note = chemically synthesized
  source 1..20: mol_type = other DNA
cggcgaggtcgggcaaggcc

SEQ ID NO: 13686 - DNA, 20 bp, synthetic construct
  misc_feature 1..20: note = chemically synthesized
  source 1..20: mol_type = other DNA
ggcgaggtcgggcaaggccc

SEQ ID NO: 13687 - DNA, 20 bp, synthetic construct
  misc_feature 1..20: note = chemically synthesized
  source 1..20: mol_type = other DNA
aggtcgggcaaggcccgggc

SEQ ID NO: 13688 - DNA, 20 bp, synthetic construct
  misc_feature 1..20: note = chemically synthesized
  source 1..20: mol_type = other DNA
ggtcgggcaaggcccgggcg

SEQ ID NO: 13689 - DNA, 20 bp, synthetic construct
  misc_feature 1..20: note = chemically synthesized
  source 1..20: mol_type = other DNA
gggcaaggcccgggcgaggc

SEQ ID NO: 13690 - DNA, 20 bp, synthetic construct
  misc_feature 1..20: note = chemically synthesized
  source 1..20: mol_type = other DNA
ggcaaggcccgggcgaggcc

SEQ ID NO: 13691 - DNA, 20 bp, synthetic construct
  misc_feature 1..20: note = chemically synthesized
  source 1..20: mol_type = other DNA
gccgccgccgccgcctgctc

SEQ ID NO: 13692 - DNA, 20 bp, synthetic construct
  misc_feature 1..20: note = chemically synthesized
  source 1..20: mol_type = other DNA
ccgccgccgccgcctgctcc

SEQ ID NO: 13693 - DNA, 20 bp, synthetic construct
  misc_feature 1..20: note = chemically synthesized
  source 1..20: mol_type = other DNA
cgccgccgccgcctgctccg

SEQ ID NO: 13694 - DNA, 20 bp, synthetic construct
  misc_feature 1..20: note = chemically synthesized
  source 1..20: mol_type = other DNA
cggggctgccgcgccgcgct

SEQ ID NO: 13695 - DNA, 20 bp, synthetic construct
  misc_feature 1..20: note = chemically synthesized
  source 1..20: mol_type = other DNA
tcggtcctctgtctgtttgt

SEQ ID NO: 13696 - DNA, 20 bp, synthetic construct
  misc_feature 1..20: note = chemically synthesized
  source 1..20: mol_type = other DNA
gtcctctgtctgtttgttgg

SEQ ID NO: 13697 - DNA, 20 bp, synthetic construct
  misc_feature 1..20: note = chemically synthesized
  source 1..20: mol_type = other DNA
tcctctgtctgtttgttggc

SEQ ID NO: 13698 - DNA, 20 bp, synthetic construct
  misc_feature 1..20: note = chemically synthesized
  source 1..20: mol_type = other DNA
ctctgtctgtttgttggcag

SEQ ID NO: 13699 - DNA, 20 bp, synthetic construct
  misc_feature 1..20: note = chemically synthesized
  source 1..20: mol_type = other DNA
tctgtctgtttgttggcagg

SEQ ID NO: 13700 - DNA, 20 bp, synthetic construct
  misc_feature 1..20: note = chemically synthesized
  source 1..20: mol_type = other DNA
gcaggaggctcccgcacacg

SEQ ID NO: 13701 - DNA, 20 bp, synthetic construct
  misc_feature 1..20: note = chemically synthesized
  source 1..20: mol_type = other DNA
acgcggtgcttgtaaacatt

SEQ ID NO: 13702 - DNA, 20 bp, synthetic construct
  misc_feature 1..20: note = chemically synthesized
  source 1..20: mol_type = other DNA
gcttgtaaacattcagacac

SEQ ID NO: 13703 - DNA, 20 bp, synthetic construct
  misc_feature 1..20: note = chemically synthesized
  source 1..20: mol_type = other DNA
tttgaaaatcttccaaaaaa

SEQ ID NO: 13704 - DNA, 20 bp, synthetic construct
  misc_feature 1..20: note = chemically synthesized
  source 1..20: mol_type = other DNA
aaaatcttccaaaaaatagt

SEQ ID NO: 13705 - DNA, 20 bp, synthetic construct
  misc_feature 1..20: note = chemically synthesized
  source 1..20: mol_type = other DNA
aatcttccaaaaaatagtaa

SEQ ID NO: 13706 - DNA, 20 bp, synthetic construct
  misc_feature 1..20: note = chemically synthesized
  source 1..20: mol_type = other DNA
atcttccaaaaaatagtaag

SEQ ID NO: 13707 - DNA, 20 bp, synthetic construct
  misc_feature 1..20: note = chemically synthesized
  source 1..20: mol_type = other DNA
cttccaaaaaatagtaagag

SEQ ID NO: 13708 - DNA, 20 bp, synthetic construct
  misc_feature 1..20: note = chemically synthesized
  source 1..20: mol_type = other DNA
ttccaaaaaatagtaagagg

SEQ ID NO: 13709 - DNA, 20 bp, synthetic construct
  misc_feature 1..20: note = chemically synthesized
  source 1..20: mol_type = other DNA
tccaaaaaatagtaagagga

SEQ ID NO: 13710 - DNA, 20 bp, synthetic construct
  misc_feature 1..20: note = chemically synthesized
  source 1..20: mol_type = other DNA
caaaaaatagtaagaggagg

SEQ ID NO: 13711 - DNA, 20 bp, synthetic construct
  misc_feature 1..20: note = chemically synthesized
  source 1..20: mol_type = other DNA
tctctccctctccgtgccgt

SEQ ID NO: 13712 - DNA, 20 bp, synthetic construct
  misc_feature 1..20: note = chemically synthesized
  source 1..20: mol_type = other DNA
ctccgtgccgtcggcgccct

SEQ ID NO: 13713 - DNA, 20 bp, synthetic construct
  misc_feature 1..20: note = chemically synthesized
  source 1..20: mol_type = other DNA
gcgccctaagtttgcaactg

SEQ ID NO: 13714 - DNA, 20 bp, synthetic construct
  misc_feature 1..20: note = chemically synthesized
  source 1..20: mol_type = other DNA
cgccctaagtttgcaactga

SEQ ID NO: 13715 - DNA, 20 bp, synthetic construct
  misc_feature 1..20: note = chemically synthesized
  source 1..20: mol_type = other DNA
gccctaagtttgcaactgaa

SEQ ID NO: 13716 - DNA, 20 bp, synthetic construct
  misc_feature 1..20: note = chemically synthesized
  source 1..20: mol_type = other DNA
ccctaagtttgcaactgaag

SEQ ID NO: 13717 - DNA, 20 bp, synthetic construct
  misc_feature 1..20: note = chemically synthesized
  source 1..20: mol_type = other DNA
agtttgcaactgaaggggtt

SEQ ID NO: 13718 - DNA, 20 bp, synthetic construct
  misc_feature 1..20: note = chemically synthesized
  source 1..20: mol_type = other DNA
gtttgcaactgaaggggttt

SEQ ID NO: 13719 - DNA, 20 bp, synthetic construct
  misc_feature 1..20: note = chemically synthesized
  source 1..20: mol_type = other DNA
tttgcaactgaaggggtttg

SEQ ID NO: 13720 - DNA, 20 bp, synthetic construct
  misc_feature 1..20: note = chemically synthesized
  source 1..20: mol_type = other DNA
ttgcaactgaaggggtttgg

SEQ ID NO: 13721 - DNA, 20 bp, synthetic construct
  misc_feature 1..20: note = chemically synthesized
  source 1..20: mol_type = other DNA
caactgaaggggtttggggg

SEQ ID NO: 13722 - DNA, 20 bp, synthetic construct
  misc_feature 1..20: note = chemically synthesized
  source 1..20: mol_type = other DNA
actgaaggggtttgggggaa

SEQ ID NO: 13723 - DNA, 20 bp, synthetic construct
  misc_feature 1..20: note = chemically synthesized
  source 1..20: mol_type = other DNA
ctgaaggggtttgggggaag

SEQ ID NO: 13724 - DNA, 20 bp, synthetic construct
  misc_feature 1..20: note = chemically synthesized
  source 1..20: mol_type = other DNA
tgaaggggtttgggggaaga

SEQ ID NO: 13725 - DNA, 20 bp, synthetic construct
  misc_feature 1..20: note = chemically synthesized
  source 1..20: mol_type = other DNA
ggtgattgtaaatttttttc

SEQ ID NO: 13726 - DNA, 20 bp, synthetic construct
  misc_feature 1..20: note = chemically synthesized
  source 1..20: mol_type = other DNA
ttgtaaatttttttctagat

SEQ ID NO: 13727 - DNA, 20 bp, synthetic construct
  misc_feature 1..20: note = chemically synthesized
  source 1..20: mol_type = other DNA
gtaaatttttttctagatga

SEQ ID NO: 13728 - DNA, 20 bp, synthetic construct
  misc_feature 1..20: note = chemically synthesized
  source 1..20: mol_type = other DNA
ttttctagatgagagattgt

SEQ ID NO: 13729 - DNA, 20 bp, synthetic construct
  misc_feature 1..20: note = chemically synthesized
  source 1..20: mol_type = other DNA
gagagattgtgagatttttg

SEQ ID NO: 13730 - DNA, 20 bp, synthetic construct
  misc_feature 1..20: note = chemically synthesized
  source 1..20: mol_type = other DNA
agagattgtgagatttttgc

SEQ ID NO: 13731 - DNA, 20 bp, synthetic construct
  misc_feature 1..20: note = chemically synthesized
  source 1..20: mol_type = other DNA
gagattgtgagatttttgca

SEQ ID NO: 13732 - DNA, 20 bp, synthetic construct
  misc_feature 1..20: note = chemically synthesized
  source 1..20: mol_type = other DNA
agattgtgagatttttgcag

SEQ ID NO: 13733 - DNA, 20 bp, synthetic construct
  misc_feature 1..20: note = chemically synthesized
  source 1..20: mol_type = other DNA
gattgtgagatttttgcagg

SEQ ID NO: 13734 - DNA, 20 bp, synthetic construct
  misc_feature 1..20: note = chemically synthesized
  source 1..20: mol_type = other DNA
attgtgagatttttgcaggg

SEQ ID NO: 13735 - DNA, 20 bp, synthetic construct
  misc_feature 1..20: note = chemically synthesized
  source 1..20: mol_type = other DNA
tgagatttttgcaggggggc

SEQ ID NO: 13736 - DNA, 20 bp, synthetic construct
  misc_feature 1..20: note = chemically synthesized
  source 1..20: mol_type = other DNA
gatttttgcaggggggctgg

SEQ ID NO: 13737 - DNA, 20 bp, synthetic construct
  misc_feature 1..20: note = chemically synthesized
  source 1..20: mol_type = other DNA
atttttgcaggggggctggt

SEQ ID NO: 13738 - DNA, 20 bp, synthetic construct
  misc_feature 1..20: note = chemically synthesized
  source 1..20: mol_type = other DNA
tttttgcaggggggctggtg

SEQ ID NO: 13739 - DNA, 20 bp, synthetic construct
  misc_feature 1..20: note = chemically synthesized
  source 1..20: mol_type = other DNA
ttttgcaggggggctggtgg

SEQ ID NO: 13740 - DNA, 20 bp, synthetic construct
  misc_feature 1..20: note = chemically synthesized
  source 1..20: mol_type = other DNA
ttgcaggggggctggtgggg

SEQ ID NO: 13741 - DNA, 20 bp, synthetic construct
  misc_feature 1..20: note = chemically synthesized
  source 1..20: mol_type = other DNA
gggggctggtgggggagtca

SEQ ID NO: 13742 - DNA, 20 bp, synthetic construct
  misc_feature 1..20: note = chemically synthesized
  source 1..20: mol_type = other DNA
gggctggtgggggagtcaaa

SEQ ID NO: 13743 - DNA, 20 bp, synthetic construct
  misc_feature 1..20: note = chemically synthesized
  source 1..20: mol_type = other DNA
ctggtgggggagtcaaagag

SEQ ID NO: 13744 - DNA, 20 bp, synthetic construct
  misc_feature 1..20: note = chemically synthesized
  source 1..20: mol_type = other DNA
tggtgggggagtcaaagaga

SEQ ID NO: 13745 - DNA, 20 bp, synthetic construct
  misc_feature 1..20: note = chemically synthesized
  source 1..20: mol_type = other DNA
agtcaaagagaaggccgtca

SEQ ID NO: 13746 - DNA, 20 bp, synthetic construct
  misc_feature 1..20: note = chemically synthesized
  source 1..20: mol_type = other DNA
aagagaaggccgtcacagaa

SEQ ID NO: 13747 - DNA, 20 bp, synthetic construct
  misc_feature 1..20: note = chemically synthesized
  source 1..20: mol_type = other DNA
agagaaggccgtcacagaaa

SEQ ID NO: 13748 - DNA, 20 bp, synthetic construct
  misc_feature 1..20: note = chemically synthesized
  source 1..20: mol_type = other DNA
gagaaggccgtcacagaaaa

SEQ ID NO: 13749 - DNA, 20 bp, synthetic construct
  misc_feature 1..20: note = chemically synthesized
  source 1..20: mol_type = other DNA
aggccgtcacagaaaagggt

SEQ ID NO: 13750 - DNA, 20 bp, synthetic construct
  misc_feature 1..20: note = chemically synthesized
  source 1..20: mol_type = other DNA
ccgtcacagaaaagggttgg

SEQ ID NO: 13751 - DNA, 20 bp, synthetic construct
  misc_feature 1..20: note = chemically synthesized
  source 1..20: mol_type = other DNA
gtcacagaaaagggttggca

SEQ ID NO: 13752 - DNA, 20 bp, synthetic construct
  misc_feature 1..20: note = chemically synthesized
  source 1..20: mol_type = other DNA
aaaagggttggcagagcgtt

SEQ ID NO: 13753 - DNA, 20 bp, synthetic construct
  misc_feature 1..20: note = chemically synthesized
  source 1..20: mol_type = other DNA
gttggcagagcgtttggctt

SEQ ID NO: 13754 - DNA, 20 bp, synthetic construct
  misc_feature 1..20: note = chemically synthesized
  source 1..20: mol_type = other DNA
cagagcgtttggcttcggtt

SEQ ID NO: 13755 - DNA, 20 bp, synthetic construct
  misc_feature 1..20: note = chemically synthesized
  source 1..20: mol_type = other DNA
agagcgtttggcttcggttt

SEQ ID NO: 13756 - DNA, 20 bp, synthetic construct
  misc_feature 1..20: note = chemically synthesized
  source 1..20: mol_type = other DNA
gagcgtttggcttcggtttg

SEQ ID NO: 13757 - DNA, 20 bp, synthetic construct
  misc_feature 1..20: note = chemically synthesized
  source 1..20: mol_type = other DNA
agcgtttggcttcggtttgg

SEQ ID NO: 13758 - DNA, 20 bp, synthetic construct
  misc_feature 1..20: note = chemically synthesized
  source 1..20: mol_type = other DNA
tttggcttcggtttgggggc

SEQ ID NO: 13759 - DNA, 20 bp, synthetic construct
  misc_feature 1..20: note = chemically synthesized
  source 1..20: mol_type = other DNA
gtatttatttatttatgtgc

SEQ ID NO: 13760 - DNA, 20 bp, synthetic construct
  misc_feature 1..20: note = chemically synthesized
  source 1..20: mol_type = other DNA
gtcttctccttgctgcctct

SEQ ID NO: 13761 - DNA, 20 bp, synthetic construct
  misc_feature 1..20: note = chemically synthesized
  source 1..20: mol_type = other DNA
tcttctccttgctgcctctg

SEQ ID NO: 13762 - DNA, 20 bp, synthetic construct
  misc_feature 1..20: note = chemically synthesized
  source 1..20: mol_type = other DNA
tccttgctgcctctgaggtt

SEQ ID NO: 13763 - DNA, 20 bp, synthetic construct
  misc_feature 1..20: note = chemically synthesized
  source 1..20: mol_type = other DNA
tgctgcctctgaggttcggt

SEQ ID NO: 13764 - DNA, 20 bp, synthetic construct
  misc_feature 1..20: note = chemically synthesized
  source 1..20: mol_type = other DNA
gctgcctctgaggttcggtc

SEQ ID NO: 13765 - DNA, 20 bp, synthetic construct
  misc_feature 1..20: note = chemically synthesized
  source 1..20: mol_type = other DNA
tgcctctgaggttcggtcgg

SEQ ID NO: 13766 - DNA, 20 bp, synthetic construct
  misc_feature 1..20: note = chemically synthesized
  source 1..20: mol_type = other DNA
gcctctgaggttcggtcggg

SEQ ID NO: 13767 - DNA, 20 bp, synthetic construct
  misc_feature 1..20: note = chemically synthesized
  source 1..20: mol_type = other DNA
cctctgaggttcggtcggga

SEQ ID NO: 13768 - DNA, 20 bp, synthetic construct
  misc_feature 1..20: note = chemically synthesized
  source 1..20: mol_type = other DNA
ctctgaggttcggtcgggag

SEQ ID NO: 13769 - DNA, 20 bp, synthetic construct
  misc_feature 1..20: note = chemically synthesized
  source 1..20: mol_type = other DNA
ctgaggttcggtcgggaggg

SEQ ID NO: 13770 - DNA, 20 bp, synthetic construct
  misc_feature 1..20: note = chemically synthesized
  source 1..20: mol_type = other DNA
tgaggttcggtcgggagggg

SEQ ID NO: 13771 - DNA, 20 bp, synthetic construct
  misc_feature 1..20: note = chemically synthesized
  source 1..20: mol_type = other DNA
gaggttcggtcgggagggga

SEQ ID NO: 13772 - DNA, 20 bp, synthetic construct
  misc_feature 1..20: note = chemically synthesized
  source 1..20: mol_type = other DNA
gttcggtcgggaggggaggg

SEQ ID NO: 13773 - DNA, 20 bp, synthetic construct
  misc_feature 1..20: note = chemically synthesized
  source 1..20: mol_type = other DNA
cggtcgggaggggagggcag

SEQ ID NO: 13774 - DNA, 20 bp, synthetic construct
  misc_feature 1..20: note = chemically synthesized
  source 1..20: mol_type = other DNA
aggggagggcagcggcaacc

SEQ ID NO: 13775 - DNA, 20 bp, synthetic construct
  misc_feature 1..20: note = chemically synthesized
  source 1..20: mol_type = other DNA
ggggagggcagcggcaaccc

SEQ ID NO: 13776 - DNA, 20 bp, synthetic construct
  misc_feature 1..20: note = chemically synthesized
  source 1..20: mol_type = other DNA
ggagggcagcggcaacccag

SEQ ID NO: 13777 - DNA, 20 bp, synthetic construct
  misc_feature 1..20: note = chemically synthesized
  source 1..20: mol_type = other DNA
gagggcagcggcaacccagg

SEQ ID NO: 13778 - DNA, 20 bp, synthetic construct
  misc_feature 1..20: note = chemically synthesized
  source 1..20: mol_type = other DNA
ggcagcggcaacccaggagg

SEQ ID NO: 13779 - DNA, 20 bp, synthetic construct
  misc_feature 1..20: note = chemically synthesized
  source 1..20: mol_type = other DNA
agcggcaacccaggaggcag

SEQ ID NO: 13780 - DNA, 20 bp, synthetic construct
  misc_feature 1..20: note = chemically synthesized
  source 1..20: mol_type = other DNA
caacccaggaggcagcagtc

SEQ ID NO: 13781 - DNA, 20 bp, synthetic construct
  misc_feature 1..20: note = chemically synthesized
  source 1..20: mol_type = other DNA
aacccaggaggcagcagtcc

SEQ ID NO: 13782 - DNA, 20 bp, synthetic construct
  misc_feature 1..20: note = chemically synthesized
  source 1..20: mol_type = other DNA
ctccctctcccgcgtgcccc

SEQ ID NO: 13783 - DNA, 20 bp, synthetic construct
  misc_feature 1..20: note = chemically synthesized
  source 1..20: mol_type = other DNA
cccccggccgcctcctcccc

SEQ ID NO: 13784 - DNA, 20 bp, synthetic construct
  misc_feature 1..20: note = chemically synthesized
  source 1..20: mol_type = other DNA
gccgcctcctcccccggccc

SEQ ID NO: 13785 - DNA, 20 bp, synthetic construct
  misc_feature 1..20: note = chemically synthesized
  source 1..20: mol_type = other DNA
cggccctagctcctgccctt

SEQ ID NO: 13786 - DNA, 20 bp, synthetic construct
  misc_feature 1..20: note = chemically synthesized
  source 1..20: mol_type = other DNA
ccctagctcctgcccttcgg

SEQ ID NO: 13787 - DNA, 20 bp, synthetic construct
  misc_feature 1..20: note = chemically synthesized
  source 1..20: mol_type = other DNA
tagctcctgcccttcggcgg

SEQ ID NO: 13788 - DNA, 20 bp, synthetic construct
  misc_feature 1..20: note = chemically synthesized
  source 1..20: mol_type = other DNA
ctcctgcccttcggcggcgg

SEQ ID NO: 13789 - DNA, 20 bp, synthetic construct
  misc_feature 1..20: note = chemically synthesized
  source 1..20: mol_type = other DNA
ctgcccttcggcggcggcgg

SEQ ID NO: 13790 - DNA, 20 bp, synthetic construct
  misc_feature 1..20: note = chemically synthesized
  source 1..20: mol_type = other DNA
cccttcggcggcggcggcgg

SEQ ID NO: 13791 - DNA, 20 bp, synthetic construct
  misc_feature 1..20: note = chemically synthesized
  source 1..20: mol_type = other DNA
ttcggcggcggcggcggcgg

SEQ ID NO: 13792 - DNA, 20 bp, synthetic construct
  misc_feature 1..20: note = chemically synthesized
  source 1..20: mol_type = other DNA
cggcggcggcggcggcggcg

SEQ ID NO: 13793 - DNA, 20 bp, synthetic construct
  misc_feature 1..20: note = chemically synthesized
  source 1..20: mol_type = other DNA
ggcggcggcggcggcggcgc

SEQ ID NO: 13794 - DNA, 20 bp, synthetic construct
  misc_feature 1..20: note = chemically synthesized
  source 1..20: mol_type = other DNA
cggcggcggcggcggcgcgg

SEQ ID NO: 13795 - DNA, 20 bp, synthetic construct
  misc_feature 1..20: note = chemically synthesized
  source 1..20: mol_type = other DNA
ggcggcggcggcggcgcggg

SEQ ID NO: 13796 - DNA, 20 bp, synthetic construct
  misc_feature 1..20: note = chemically synthesized
  source 1..20: mol_type = other DNA
gcggcggcggcggcgcggga

SEQ ID NO: 13797 - DNA, 20 bp, synthetic construct
  misc_feature 1..20: note = chemically synthesized
  source 1..20: mol_type = other DNA
cggcggcggcgcgggagggc

SEQ ID NO: 13798 - DNA, 20 bp, synthetic construct
  misc_feature 1..20: note = chemically synthesized
  source 1..20: mol_type = other DNA
cggcgcgggagggcaagcgc

SEQ ID NO: 13799 - DNA, 20 bp, synthetic construct
  misc_feature 1..20: note = chemically synthesized
  source 1..20: mol_type = other DNA
ggcgcgggagggcaagcgcg

SEQ ID NO: 13800 - DNA, 20 bp, synthetic construct
  misc_feature 1..20: note = chemically synthesized
  source 1..20: mol_type = other DNA
cgcgggagggcaagcgcgag

SEQ ID NO: 13801 - DNA, 20 bp, synthetic construct
  misc_feature 1..20: note = chemically synthesized
  source 1..20: mol_type = other DNA
ggagggcaagcgcgaggagc

SEQ ID NO: 13802 - DNA, 20 bp, synthetic construct
  misc_feature 1..20: note = chemically synthesized
  source 1..20: mol_type = other DNA
agcgcgaggagccggcacaa

SEQ ID NO: 13803 - DNA, 20 bp, synthetic construct
  misc_feature 1..20: note = chemically synthesized
  source 1..20: mol_type = other DNA
gcgcgaggagccggcacaaa

SEQ ID NO: 13804 - DNA, 20 bp, synthetic construct
  misc_feature 1..20: note = chemically synthesized
  source 1..20: mol_type = other DNA
cgaggagccggcacaaaagg

SEQ ID NO: 13805 - DNA, 20 bp, synthetic construct
  misc_feature 1..20: note = chemically synthesized
  source 1..20: mol_type = other DNA
ggagccggcacaaaaggcag

SEQ ID NO: 13806 - DNA, 20 bp, synthetic construct
  misc_feature 1..20: note = chemically synthesized
  source 1..20: mol_type = other DNA
gagccggcacaaaaggcagc

SEQ ID NO: 13807 - DNA, 20 bp, synthetic construct
  misc_feature 1..20: note = chemically synthesized
  source 1..20: mol_type = other DNA
gcgggacaaacacccacctc

SEQ ID NO: 13808 - DNA, 20 bp, synthetic construct
  misc_feature 1..20: note = chemically synthesized
  source 1..20: mol_type = other DNA
gacaaacacccacctctggc

SEQ ID NO: 13809 - DNA, 20 bp, synthetic construct
  misc_feature 1..20: note = chemically synthesized
  source 1..20: mol_type = other DNA
cccacctctggccggaacaa

SEQ ID NO: 13810 - DNA, 20 bp, synthetic construct
  misc_feature 1..20: note = chemically synthesized
  source 1..20: mol_type = other DNA
ccacctctggccggaacaaa

SEQ ID NO: 13811 - DNA, 20 bp, synthetic construct
  misc_feature 1..20: note = chemically synthesized
  source 1..20: mol_type = other DNA
cctctggccggaacaaaagg

SEQ ID NO: 13812 - DNA, 20 bp, synthetic construct
  misc_feature 1..20: note = chemically synthesized
  source 1..20: mol_type = other DNA
ctggccggaacaaaaggcgg

SEQ ID NO: 13813 - DNA, 20 bp, synthetic construct
  misc_feature 1..20: note = chemically synthesized
  source 1..20: mol_type = other DNA
ggaacaaaaggcggcagtgc

SEQ ID NO: 13814 - DNA, 20 bp, synthetic construct
  misc_feature 1..20: note = chemically synthesized
  source 1..20: mol_type = other DNA
gccgcgtctcccgtccttcc

SEQ ID NO: 13815 - DNA, 20 bp, synthetic construct
  misc_feature 1..20: note = chemically synthesized
  source 1..20: mol_type = other DNA
tcccgtccttcccggtccca

SEQ ID NO: 13816 - DNA, 20 bp, synthetic construct
  misc_feature 1..20: note = chemically synthesized
  source 1..20: mol_type = other DNA
cacggctctccccgtcgccg

SEQ ID NO: 13817 - DNA, 20 bp, synthetic construct
  misc_feature 1..20: note = chemically synthesized
  source 1..20: mol_type = other DNA
cggcccctctcccgactccg

SEQ ID NO: 13818 - DNA, 20 bp, synthetic construct
  misc_feature 1..20: note = chemically synthesized
  source 1..20: mol_type = other DNA
ctctcccgactccgcggact

SEQ ID NO: 13819 - DNA, 20 bp, synthetic construct
  misc_feature 1..20: note = chemically synthesized
  source 1..20: mol_type = other DNA
tctcccgactccgcggactc

SEQ ID NO: 13820 - DNA, 20 bp, synthetic construct
  misc_feature 1..20: note = chemically synthesized
  source 1..20: mol_type = other DNA
tcccgactccgcggactcag

SEQ ID NO: 13821 - DNA, 20 bp, synthetic construct
  misc_feature 1..20: note = chemically synthesized
  source 1..20: mol_type = other DNA
ctccgcggactcaggagcgc

SEQ ID NO: 13822 - DNA, 20 bp, synthetic construct
  misc_feature 1..20: note = chemically synthesized
  source 1..20: mol_type = other DNA
tccgcggactcaggagcgcc

SEQ ID NO: 13823 - DNA, 20 bp, synthetic construct
  misc_feature 1..20: note = chemically synthesized
  source 1..20: mol_type = other DNA
ccgcggactcaggagcgccg

SEQ ID NO: 13824 - DNA, 20 bp, synthetic construct
  misc_feature 1..20: note = chemically synthesized
  source 1..20: mol_type = other DNA
cgcggactcaggagcgccgg

SEQ ID NO: 13825 - DNA, 20 bp, synthetic construct
  misc_feature 1..20: note = chemically synthesized
  source 1..20: mol_type = other DNA
gcgccgggggcccctttcca

SEQ ID NO: 13826 - DNA, 20 bp, synthetic construct
  misc_feature 1..20: note = chemically synthesized
  source 1..20: mol_type = other DNA
gtgccactttctcactattg

SEQ ID NO: 13827 - DNA, 20 bp, synthetic construct
  misc_feature 1..20: note = chemically synthesized
  source 1..20: mol_type = other DNA
tgccactttctcactattgt

SEQ ID NO: 13828 - DNA, 20 bp, synthetic construct
  misc_feature 1..20: note = chemically synthesized
  source 1..20: mol_type = other DNA
gccactttctcactattgtg

SEQ ID NO: 13829 - DNA, 20 bp, synthetic construct
  misc_feature 1..20: note = chemically synthesized
  source 1..20: mol_type = other DNA
cccgctgcacacttgaccgt

SEQ ID NO: 13830 - DNA, 20 bp, synthetic construct
  misc_feature 1..20: note = chemically synthesized
  source 1..20: mol_type = other DNA
acacttgaccgtgagcgcgc

SEQ ID NO: 13831 - DNA, 20 bp, synthetic construct
  misc_feature 1..20: note = chemically synthesized
  source 1..20: mol_type = other DNA
gtgagcgcgctggtgtccaa

SEQ ID NO: 13832 - DNA, 20 bp, synthetic construct
  misc_feature 1..20: note = chemically synthesized
  source 1..20: mol_type = other DNA
gcgcgctggtgtccaaaagc

SEQ ID NO: 13833 - DNA, 20 bp, synthetic construct
  misc_feature 1..20: note = chemically synthesized
  source 1..20: mol_type = other DNA
agtctcacctcttttctccc

SEQ ID NO: 13834 - DNA, 20 bp, synthetic construct
  misc_feature 1..20: note = chemically synthesized
  source 1..20: mol_type = other DNA
gtctcacctcttttctcccc

SEQ ID NO: 13835 - DNA, 20 bp, synthetic construct
  misc_feature 1..20: note = chemically synthesized
  source 1..20: mol_type = other DNA
tctccccgggaatcgttttt

SEQ ID NO: 13836 - DNA, 20 bp, synthetic construct
  misc_feature 1..20: note = chemically synthesized
  source 1..20: mol_type = other DNA
cctacccccccattttctta

SEQ ID NO: 13837 - DNA, 20 bp, synthetic construct
  misc_feature 1..20: note = chemically synthesized
  source 1..20: mol_type = other DNA
cccccccattttcttacggt

SEQ ID NO: 13838 - DNA, 20 bp, synthetic construct
  misc_feature 1..20: note = chemically synthesized
  source 1..20: mol_type = other DNA
ccccattttcttacggtgag

SEQ ID NO: 13839 - DNA, 20 bp, synthetic construct
  misc_feature 1..20: note = chemically synthesized
  source 1..20: mol_type = other DNA
cccattttcttacggtgagt

SEQ ID NO: 13840 - DNA, 20 bp, synthetic construct
  misc_feature 1..20: note = chemically synthesized
  source 1..20: mol_type = other DNA
attttcttacggtgagtggg

SEQ ID NO: 13841 - DNA, 20 bp, synthetic construct
  misc_feature 1..20: note = chemically synthesized
  source 1..20: mol_type = other DNA
agcaacctccctttccccac

SEQ ID NO: 13842 - DNA, 20 bp, synthetic construct
  misc_feature 1..20: note = chemically synthesized
  source 1..20: mol_type = other DNA
tccccaccagctcccacccc

SEQ ID NO: 13843 - DNA, 20 bp, synthetic construct
  misc_feature 1..20: note = chemically synthesized
  source 1..20: mol_type = other DNA
ccccaccagctcccaccccc

SEQ ID NO: 13844 - DNA, 20 bp, synthetic construct
  misc_feature 1..20: note = chemically synthesized
  source 1..20: mol_type = other DNA
ccacccccaggtttgcatgt

SEQ ID NO: 13845 - DNA, 20 bp, synthetic construct
  misc_feature 1..20: note = chemically synthesized
  source 1..20: mol_type = other DNA
atgtgagttgttcgcaacct

SEQ ID NO: 13846 - DNA, 20 bp, synthetic construct
  misc_feature 1..20: note = chemically synthesized
  source 1..20: mol_type = other DNA
tgttcattattttgcaaaac

SEQ ID NO: 13847 - DNA, 20 bp, synthetic construct
  misc_feature 1..20: note = chemically synthesized
  source 1..20: mol_type = other DNA
tcattattttgcaaaactgg

SEQ ID NO: 13848 - DNA, 20 bp, synthetic construct
  misc_feature 1..20: note = chemically synthesized
  source 1..20: mol_type = other DNA
cattattttgcaaaactggc

SEQ ID NO: 13849 - DNA, 20 bp, synthetic construct
  misc_feature 1..20: note = chemically synthesized
  source 1..20: mol_type = other DNA
attattttgcaaaactggcg

SEQ ID NO: 13850 - DNA, 20 bp, synthetic construct
  misc_feature 1..20: note = chemically synthesized
  source 1..20: mol_type = other DNA
attttgcaaaactggcgggg

SEQ ID NO: 13851 - DNA, 20 bp, synthetic construct
  misc_feature 1..20: note = chemically synthesized
  source 1..20: mol_type = other DNA
ttttgcaaaactggcggggc

SEQ ID NO: 13852 - DNA, 20 bp, synthetic construct
  misc_feature 1..20: note = chemically synthesized
  source 1..20: mol_type = other DNA
tttgcaaaactggcggggcg

SEQ ID NO: 13853 - DNA, 20 bp, synthetic construct
  misc_feature 1..20: note = chemically synthesized
  source 1..20: mol_type = other DNA
ttgcaaaactggcggggcgg

SEQ ID NO: 13854 - DNA, 20 bp, synthetic construct
  misc_feature 1..20: note = chemically synthesized
  source 1..20: mol_type = other DNA
tgcaaaactggcggggcggg

SEQ ID NO: 13855 - DNA, 20 bp, synthetic construct
  misc_feature 1..20: note = chemically synthesized
  source 1..20: mol_type = other DNA
gcaaaactggcggggcgggg

SEQ ID NO: 13856 - DNA, 20 bp, synthetic construct
  misc_feature 1..20: note = chemically synthesized
  source 1..20: mol_type = other DNA
caaaactggcggggcggggg

SEQ ID NO: 13857 - DNA, 20 bp, synthetic construct
  misc_feature 1..20: note = chemically synthesized
  source 1..20: mol_type = other DNA
aaactggcggggcggggggg

SEQ ID NO: 13858 - DNA, 20 bp, synthetic construct
  misc_feature 1..20: note = chemically synthesized
  source 1..20: mol_type = other DNA
ctggcggggcggggggggag

SEQ ID NO: 13859 - DNA, 20 bp, synthetic construct
  misc_feature 1..20: note = chemically synthesized
  source 1..20: mol_type = other DNA
tcattgcattccttttcgaa

SEQ ID NO: 13860 - DNA, 20 bp, synthetic construct
  misc_feature 1..20: note = chemically synthesized
  source 1..20: mol_type = other DNA
attgcattccttttcgaaaa

SEQ ID NO: 13861 - DNA, 20 bp, synthetic construct
  misc_feature 1..20: note = chemically synthesized
  source 1..20: mol_type = other DNA
ccttttcgaaaagagaaata

SEQ ID NO: 13862 - DNA, 20 bp, synthetic construct
  misc_feature 1..20: note = chemically synthesized
  source 1..20: mol_type = other DNA
tttcgaaaagagaaataaag

SEQ ID NO: 13863 - DNA, 20 bp, synthetic construct
  misc_feature 1..20: note = chemically synthesized
  source 1..20: mol_type = other DNA
cgaaaagagaaataaagcgg

SEQ ID NO: 13864 - DNA, 20 bp, synthetic construct
  misc_feature 1..20: note = chemically synthesized
  source 1..20: mol_type = other DNA
aagagaaataaagcggcgga

SEQ ID NO: 13865 - DNA, 20 bp, synthetic construct
  misc_feature 1..20: note = chemically synthesized
  source 1..20: mol_type = other DNA
agagaaataaagcggcggaa

SEQ ID NO: 13866 - DNA, 20 bp, synthetic construct
  misc_feature 1..20: note = chemically synthesized
  source 1..20: mol_type = other DNA
agaaataaagcggcggaaag

SEQ ID NO: 13867 - DNA, 20 bp, synthetic construct
  misc_feature 1..20: note = chemically synthesized
  source 1..20: mol_type = other DNA
gaaataaagcggcggaaagg

SEQ ID NO: 13868 - DNA, 20 bp, synthetic construct
  misc_feature 1..20: note = chemically synthesized
  source 1..20: mol_type = other DNA
taaagcggcggaaaggagga

SEQ ID NO: 13869 - DNA, 20 bp, synthetic construct
  misc_feature 1..20: note = chemically synthesized
  source 1..20: mol_type = other DNA
aagcggcggaaaggaggaaa

SEQ ID NO: 13870 - DNA, 20 bp, synthetic construct
  misc_feature 1..20: note = chemically synthesized
  source 1..20: mol_type = other DNA
agcggcggaaaggaggaaag

SEQ ID NO: 13871 - DNA, 20 bp, synthetic construct
  misc_feature 1..20: note = chemically synthesized
  source 1..20: mol_type = other DNA
cggcggaaaggaggaaagag

SEQ ID NO: 13872 - DNA, 20 bp, synthetic construct
  misc_feature 1..20: note = chemically synthesized
  source 1..20: mol_type = other DNA
ggcggaaaggaggaaagagg

SEQ ID NO: 13873 - DNA, 20 bp, synthetic construct
  misc_feature 1..20: note = chemically synthesized
  source 1..20: mol_type = other DNA
cggaaaggaggaaagaggag

SEQ ID NO: 13874 - DNA, 20 bp, synthetic construct
  misc_feature 1..20: note = chemically synthesized
  source 1..20: mol_type = other DNA
gtaaaattaaataaaattaa

SEQ ID NO: 13875 - DNA, 20 bp, synthetic construct
  misc_feature 1..20: note = chemically synthesized
  source 1..20: mol_type = other DNA
taaaattaaataaaattaaa

SEQ ID NO: 13876 - DNA, 20 bp, synthetic construct
  misc_feature 1..20: note = chemically synthesized
  source 1..20: mol_type = other DNA
aaaggtgcgtgctgtctcaa

SEQ ID NO: 13877 - DNA, 20 bp, synthetic construct
  misc_feature 1..20: note = chemically synthesized
  source 1..20: mol_type = other DNA
ctgtctcaaaagtgcataca

SEQ ID NO: 13878 - DNA, 20 bp, synthetic construct
  misc_feature 1..20: note = chemically synthesized
  source 1..20: mol_type = other DNA
caaaagtgcatacacggcaa

SEQ ID NO: 13879 - DNA, 20 bp, synthetic construct
  misc_feature 1..20: note = chemically synthesized
  source 1..20: mol_type = other DNA
tgcatacacggcaatggttc

SEQ ID NO: 13880 - DNA, 20 bp, synthetic construct
  misc_feature 1..20: note = chemically synthesized
  source 1..20: mol_type = other DNA
tacacggcaatggttccaga

SEQ ID NO: 13881 - DNA, 20 bp, synthetic construct
  misc_feature 1..20: note = chemically synthesized
  source 1..20: mol_type = other DNA
acacggcaatggttccagat

SEQ ID NO: 13882 - DNA, 20 bp, synthetic construct
  misc_feature 1..20: note = chemically synthesized
  source 1..20: mol_type = other DNA
gcaatggttccagatgggat

SEQ ID NO: 13883 - DNA, 20 bp, synthetic construct
  misc_feature 1..20: note = chemically synthesized
  source 1..20: mol_type = other DNA
caatggttccagatgggatg

SEQ ID NO: 13884 - DNA, 20 bp, synthetic construct
  misc_feature 1..20: note = chemically synthesized
  source 1..20: mol_type = other DNA
aatggttccagatgggatga

SEQ ID NO: 13885 - DNA, 20 bp, synthetic construct
  misc_feature 1..20: note = chemically synthesized
  source 1..20: mol_type = other DNA
atctcttttacctcgactct

SEQ ID NO: 13886 - DNA, 20 bp, synthetic construct
  misc_feature 1..20: note = chemically synthesized
  source 1..20: mol_type = other DNA
ctcttttacctcgactctcg

SEQ ID NO: 13887 - DNA, 20 bp, synthetic construct
  misc_feature 1..20: note = chemically synthesized
  source 1..20: mol_type = other DNA
tcttttacctcgactctcgg

SEQ ID NO: 13888 - DNA, 20 bp, synthetic construct
  misc_feature 1..20: note = chemically synthesized
  source 1..20: mol_type = other DNA
ctccccctcgcttttgcttc

SEQ ID NO: 13889 - DNA, 20 bp, synthetic construct
  misc_feature 1..20: note = chemically synthesized
  source 1..20: mol_type = other DNA
ataattattattactattat

SEQ ID NO: 13890 - DNA, 20 bp, synthetic construct
  misc_feature 1..20: note = chemically synthesized
  source 1..20: mol_type = other DNA
taattattattactattatt

SEQ ID NO: 13891 - DNA, 20 bp, synthetic construct
  misc_feature 1..20: note = chemically synthesized
  source 1..20: mol_type = other DNA
tattattgggttacttacgc

SEQ ID NO: 13892 - DNA, 20 bp, synthetic construct
  misc_feature 1..20: note = chemically synthesized
  source 1..20: mol_type = other DNA
gcgagaattcccgtttgctt

SEQ ID NO: 13893 - DNA, 20 bp, synthetic construct
  misc_feature 1..20: note = chemically synthesized
  source 1..20: mol_type = other DNA
attcccgtttgcttaagtgc

SEQ ID NO: 13894 - DNA, 20 bp, synthetic construct
  misc_feature 1..20: note = chemically synthesized
  source 1..20: mol_type = other DNA
ttcccgtttgcttaagtgct

SEQ ID NO: 13895 - DNA, 20 bp, synthetic construct
  misc_feature 1..20: note = chemically synthesized
  source 1..20: mol_type = other DNA
tcccgtttgcttaagtgctg

SEQ ID NO: 13896 - DNA, 20 bp, synthetic construct
  misc_feature 1..20: note = chemically synthesized
  source 1..20: mol_type = other DNA
gctggggtttgccttgcttg

SEQ ID NO: 13897 - DNA, 20 bp, synthetic construct
  misc_feature 1..20: note = chemically synthesized
  source 1..20: mol_type = other DNA
gggtttgccttgcttgcggc

SEQ ID NO: 13898 - DNA, 20 bp, synthetic construct
  misc_feature 1..20: note = chemically synthesized
  source 1..20: mol_type = other DNA
gccttgcttgcggcgagaca

SEQ ID NO: 13899 - DNA, 20 bp, synthetic construct
  misc_feature 1..20: note = chemically synthesized
  source 1..20: mol_type = other DNA
ttgcttgcggcgagacatgg

SEQ ID NO: 13900 - DNA, 20 bp, synthetic construct
  misc_feature 1..20: note = chemically synthesized
  source 1..20: mol_type = other DNA
tgcttgcggcgagacatggt

SEQ ID NO: 13901 - DNA, 20 bp, synthetic construct
  misc_feature 1..20: note = chemically synthesized
  source 1..20: mol_type = other DNA
cggcgagacatggtgggctg

SEQ ID NO: 13902 - DNA, 20 bp, synthetic construct
  misc_feature 1..20: note = chemically synthesized
  source 1..20: mol_type = other DNA
ggcgagacatggtgggctgc

SEQ ID NO: 13903 - DNA, 20 bp, synthetic construct
  misc_feature 1..20: note = chemically synthesized
  source 1..20: mol_type = other DNA
gcgagacatggtgggctgcg

SEQ ID NO: 13904 - DNA, 20 bp, synthetic construct
  misc_feature 1..20: note = chemically synthesized
  source 1..20: mol_type = other DNA
agacatggtgggctgcgggg

SEQ ID NO: 13905 - DNA, 20 bp, synthetic construct
  misc_feature 1..20: note = chemically synthesized
  source 1..20: mol_type = other DNA
gacatggtgggctgcggggc

SEQ ID NO: 13906 - DNA, 20 bp, synthetic construct
  misc_feature 1..20: note = chemically synthesized
  source 1..20: mol_type = other DNA
atggtgggctgcggggcggg

SEQ ID NO: 13907 - DNA, 20 bp, synthetic construct
  misc_feature 1..20: note = chemically synthesized
  source 1..20: mol_type = other DNA
gtgggctgcggggcgggcgg

SEQ ID NO: 13908 - DNA, 20 bp, synthetic construct
  misc_feature 1..20: note = chemically synthesized
  source 1..20: mol_type = other DNA
ggctgcggggcgggcggcgg

SEQ ID NO: 13909 - DNA, 20 bp, synthetic construct
  misc_feature 1..20: note = chemically synthesized
  source 1..20: mol_type = other DNA
tgcggggcgggcggcggcgg

SEQ ID NO: 13910 - DNA, 20 bp, synthetic construct
  misc_feature 1..20: note = chemically synthesized
  source 1..20: mol_type = other DNA
ggggcgggcggcggcggcgg

SEQ ID NO: 13911 - DNA, 20 bp, synthetic construct
  misc_feature 1..20: note = chemically synthesized
  source 1..20: mol_type = other DNA
gcgggcggcggcggcggcgg

SEQ ID NO: 13912 - DNA, 20 bp, synthetic construct
  misc_feature 1..20: note = chemically synthesized
  source 1..20: mol_type = other DNA
ggcggcggcggcggcggcgg

SEQ ID NO: 13913 - DNA, 20 bp, synthetic construct
  misc_feature 1..20: note = chemically synthesized
  source 1..20: mol_type = other DNA
ggcggcggcggcggcggcgg

SEQ ID NO: 13914 - DNA, 20 bp, synthetic construct
  misc_feature 1..20: note = chemically synthesized
  source 1..20: mol_type = other DNA
ggcggcggcggcggcggcgg

SEQ ID NO: 13915 - DNA, 20 bp, synthetic construct
  misc_feature 1..20: note = chemically synthesized
  source 1..20: mol_type = other DNA
gcggcggcggcggcggcggc

SEQ ID NO: 13916 - DNA, 20 bp, synthetic construct
  misc_feature 1..20: note = chemically synthesized
  source 1..20: mol_type = other DNA
gcggcggcggcggcggcggg

SEQ ID NO: 13917 - DNA, 20 bp, synthetic construct
  misc_feature 1..20: note = chemically synthesized
  source 1..20: mol_type = other DNA
cggcggcggcgggcggacga

SEQ ID NO: 13918 - DNA, 20 bp, synthetic construct
  misc_feature 1..20: note = chemically synthesized
  source 1..20: mol_type = other DNA
gcggcgggcggacgacggct

SEQ ID NO: 13919 - DNA, 20 bp, synthetic construct
  misc_feature 1..20: note = chemically synthesized
  source 1..20: mol_type = other DNA
gacgacggctcggttcacat

SEQ ID NO: 13920 - DNA, 20 bp, synthetic construct
  misc_feature 1..20: note = chemically synthesized
  source 1..20: mol_type = other DNA
acgacggctcggttcacatc

SEQ ID NO: 13921 - DNA, 20 bp, synthetic construct
  misc_feature 1..20: note = chemically synthesized
  source 1..20: mol_type = other DNA
gacggctcggttcacatcgg

SEQ ID NO: 13922 - DNA, 20 bp, synthetic construct
  misc_feature 1..20: note = chemically synthesized
  source 1..20: mol_type = other DNA
cggctcggttcacatcggga

SEQ ID NO: 13923 - DNA, 20 bp, synthetic construct
  misc_feature 1..20: note = chemically synthesized
  source 1..20: mol_type = other DNA
tcggttcacatcgggagagc

SEQ ID NO: 13924 - DNA, 20 bp, synthetic construct
  misc_feature 1..20: note = chemically synthesized
  source 1..20: mol_type = other DNA
cggttcacatcgggagagcc

SEQ ID NO: 13925 - DNA, 20 bp, synthetic construct
  misc_feature 1..20: note = chemically synthesized
  source 1..20: mol_type = other DNA
tcacatcgggagagccgggt

SEQ ID NO: 13926 - DNA, 20 bp, synthetic construct
  misc_feature 1..20: note = chemically synthesized
  source 1..20: mol_type = other DNA
atcgggagagccgggttaga

SEQ ID NO: 13927 - DNA, 20 bp, synthetic construct
  misc_feature 1..20: note = chemically synthesized
  source 1..20: mol_type = other DNA
gggagagccgggttagaaag

SEQ ID NO: 13928 - DNA, 20 bp, synthetic construct
  misc_feature 1..20: note = chemically synthesized
  source 1..20: mol_type = other DNA
ggagagccgggttagaaaga

SEQ ID NO: 13929 - DNA, 20 bp, synthetic construct
  misc_feature 1..20: note = chemically synthesized
  source 1..20: mol_type = other DNA
agagccgggttagaaagaag

SEQ ID NO: 13930 - DNA, 20 bp, synthetic construct
  misc_feature 1..20: note = chemically synthesized
  source 1..20: mol_type = other DNA
ggttagaaagaaggagactc

SEQ ID NO: 13931 - DNA, 20 bp, synthetic construct
  misc_feature 1..20: note = chemically synthesized
  source 1..20: mol_type = other DNA
ttagaaagaaggagactcca

SEQ ID NO: 13932 - DNA, 20 bp, synthetic construct
  misc_feature 1..20: note = chemically synthesized
  source 1..20: mol_type = other DNA
tccagagaaaatatcttcat

SEQ ID NO: 13933 - DNA, 20 bp, synthetic construct
  misc_feature 1..20: note = chemically synthesized
  source 1..20: mol_type = other DNA
ttttgacatccaaaataaat

SEQ ID NO: 13934 - DNA, 20 bp, synthetic construct
  misc_feature 1..20: note = chemically synthesized
  source 1..20: mol_type = other DNA
aataaattagaaataataca

SEQ ID NO: 13935 - DNA, 20 bp, synthetic construct
  misc_feature 1..20: note = chemically synthesized
  source 1..20: mol_type = other DNA
aattagaaataatacaaaga

SEQ ID NO: 13936 - DNA, 20 bp, synthetic construct
  misc_feature 1..20: note = chemically synthesized
  source 1..20: mol_type = other DNA
gaaataatacaaagatggcg

SEQ ID NO: 13937 - DNA, 20 bp, synthetic construct
  misc_feature 1..20: note = chemically synthesized
  source 1..20: mol_type = other DNA
aaataatacaaagatggcgc

SEQ ID NO: 13938 - DNA, 20 bp, synthetic construct
  misc_feature 1..20: note = chemically synthesized
  source 1..20: mol_type = other DNA
aataatacaaagatggcgca

SEQ ID NO: 13939 - DNA, 20 bp, synthetic construct
  misc_feature 1..20: note = chemically synthesized
  source 1..20: mol_type = other DNA
aatacaaagatggcgcaggg

SEQ ID NO: 13940 - DNA, 20 bp, synthetic construct
  misc_feature 1..20: note = chemically synthesized
  source 1..20: mol_type = other DNA
ggcgcagggaagatgaattg

SEQ ID NO: 13941 - DNA, 20 bp, synthetic construct
  misc_feature 1..20: note = chemically synthesized
  source 1..20: mol_type = other DNA
gcgcagggaagatgaattgt

SEQ ID NO: 13942 - DNA, 20 bp, synthetic construct
  misc_feature 1..20: note = chemically synthesized
  source 1..20: mol_type = other DNA
gcagggaagatgaattgtgg

SEQ ID NO: 13943 - DNA, 20 bp, synthetic construct
  misc_feature 1..20: note = chemically synthesized
  source 1..20: mol_type = other DNA
agggaagatgaattgtggga

SEQ ID NO: 13944 - DNA, 20 bp, synthetic construct
  misc_feature 1..20: note = chemically synthesized
  source 1..20: mol_type = other DNA
gaattgtgggagagccgtca

SEQ ID NO: 13945 - DNA, 20 bp, synthetic construct
  misc_feature 1..20: note = chemically synthesized
  source 1..20: mol_type = other DNA
agccgtcatggctttttttt

SEQ ID NO: 13946 - DNA, 20 bp, synthetic construct
  misc_feature 1..20: note = chemically synthesized
  source 1..20: mol_type = other DNA
aaaaaaaaaaaaaaaaaaaa

SEQ ID NO: 13947 - DNA, 20 bp, synthetic construct
  misc_feature 1..20: note = chemically synthesized
  source 1..20: mol_type = other DNA
aaaaaaaaaaaaaaaaaaaa

SEQ ID NO: 13948 - DNA, 20 bp, synthetic construct
  misc_feature 1..20: note = chemically synthesized
  source 1..20: mol_type = other DNA
aaaaaaaaaaaaaaaaaaag

SEQ ID NO: 13949 - DNA, 20 bp, synthetic construct
  misc_feature 1..20: note = chemically synthesized
  source 1..20: mol_type = other DNA
aaaaaaaaaaaaaaaaaaga

SEQ ID NO: 13950 - DNA, 20 bp, synthetic construct
  misc_feature 1..20: note = chemically synthesized
  source 1..20: mol_type = other DNA
aaaaaaaaaaaaaaaagagg

SEQ ID NO: 13951 - DNA, 20 bp, synthetic construct
  misc_feature 1..20: note = chemically synthesized
  source 1..20: mol_type = other DNA
aaaaaaaaaaaaaagaggga

SEQ ID NO: 13952 - DNA, 20 bp, synthetic construct
  misc_feature 1..20: note = chemically synthesized
  source 1..20: mol_type = other DNA
aaaaaaaaaaaagagggaga

SEQ ID NO: 13953 - DNA, 20 bp, synthetic construct
  misc_feature 1..20: note = chemically synthesized
  source 1..20: mol_type = other DNA
aaaaaaaaaagagggagaga

SEQ ID NO: 13954 - DNA, 20 bp, synthetic construct
  misc_feature 1..20: note = chemically synthesized
  source 1..20: mol_type = other DNA
aaaaaaaagagggagagaga

SEQ ID NO: 13955 - DNA, 20 bp, synthetic construct
  misc_feature 1..20: note = chemically synthesized
  source 1..20: mol_type = other DNA
aaaaagagggagagagagag

SEQ ID NO: 13956 - DNA, 20 bp, synthetic construct
  misc_feature 1..20: note = chemically synthesized
  source 1..20: mol_type = other DNA
aaagagggagagagagagaa

SEQ ID NO: 13957 - DNA, 20 bp, synthetic construct
  misc_feature 1..20: note = chemically synthesized
  source 1..20: mol_type = other DNA
agagggagagagagagaaga

SEQ ID NO: 13958 - DNA, 20 bp, synthetic construct
  misc_feature 1..20: note = chemically synthesized
  source 1..20: mol_type = other DNA
ggagagagagagaagagaga

SEQ ID NO: 13959 - DNA, 20 bp, synthetic construct
  misc_feature 1..20: note = chemically synthesized
  source 1..20: mol_type = other DNA
agagagagagaagagagata

SEQ ID NO: 13960 - DNA, 20 bp, synthetic construct
  misc_feature 1..20: note = chemically synthesized
  source 1..20: mol_type = other DNA
gagagagagaagagagatag

SEQ ID NO: 13961 - DNA, 20 bp, synthetic construct
  misc_feature 1..20: note = chemically synthesized
  source 1..20: mol_type = other DNA
agagagagaagagagataga

SEQ ID NO: 13962 - DNA, 20 bp, synthetic construct
  misc_feature 1..20: note = chemically synthesized
  source 1..20: mol_type = other DNA
agagagaagagagatagagg

SEQ ID NO: 13963 - DNA, 20 bp, synthetic construct
  misc_feature 1..20: note = chemically synthesized
  source 1..20: mol_type = other DNA
agagaagagagatagaggga

SEQ ID NO: 13964 - DNA, 20 bp, synthetic construct
  misc_feature 1..20: note = chemically synthesized
  source 1..20: mol_type = other DNA
agaagagagatagagggaga

SEQ ID NO: 13965 - DNA, 20 bp, synthetic construct
  misc_feature 1..20: note = chemically synthesized
  source 1..20: mol_type = other DNA
aagagagatagagggagaga

SEQ ID NO: 13966 - DNA, 20 bp, synthetic construct
  misc_feature 1..20: note = chemically synthesized
  source 1..20: mol_type = other DNA
gagagatagagggagagaga

SEQ ID NO: 13967 - DNA, 20 bp, synthetic construct
  misc_feature 1..20: note = chemically synthesized
  source 1..20: mol_type = other DNA
gagatagagggagagagaga

SEQ ID NO: 13968 - DNA, 20 bp, synthetic construct
  misc_feature 1..20: note = chemically synthesized
  source 1..20: mol_type = other DNA
gatagagggagagagagaga

SEQ ID NO: 13969 - DNA, 20 bp, synthetic construct
  misc_feature 1..20: note = chemically synthesized
  source 1..20: mol_type = other DNA
tagagggagagagagagaga

SEQ ID NO: 13970 - DNA, 20 bp, synthetic construct
  misc_feature 1..20: note = chemically synthesized
  source 1..20: mol_type = other DNA
agagagagagatgaaaaaaa

SEQ ID NO: 13971 - DNA, 20 bp, synthetic construct
  misc_feature 1..20: note = chemically synthesized
  source 1..20: mol_type = other DNA
agagatgaaaaaaatggcaa

SEQ ID NO: 13972 - DNA, 20 bp, synthetic construct
  misc_feature 1..20: note = chemically synthesized
  source 1..20: mol_type = other DNA
aaaatggcaaaagcccccct

SEQ ID NO: 13973 - DNA, 20 bp, synthetic construct
  misc_feature 1..20: note = chemically synthesized
  source 1..20: mol_type = other DNA
caaaagcccccctgagctgc

SEQ ID NO: 13974 - DNA, 20 bp, synthetic construct
  misc_feature 1..20: note = chemically synthesized
  source 1..20: mol_type = other DNA
cccccctgagctgcaagttc

SEQ ID NO: 13975 - DNA, 20 bp, synthetic construct
  misc_feature 1..20: note = chemically synthesized
  source 1..20: mol_type = other DNA
ctgagctgcaagttcaagtg

SEQ ID NO: 13976 - DNA, 20 bp, synthetic construct
  misc_feature 1..20: note = chemically synthesized
  source 1..20: mol_type = other DNA
gtccctgcgaacttgaacgt

SEQ ID NO: 13977 - DNA, 20 bp, synthetic construct
  misc_feature 1..20: note = chemically synthesized
  source 1..20: mol_type = other DNA
tccctgcgaacttgaacgtc

SEQ ID NO: 13978 - DNA, 20 bp, synthetic construct
  misc_feature 1..20: note = chemically synthesized
  source 1..20: mol_type = other DNA
cctgcgaacttgaacgtcag

SEQ ID NO: 13979 - DNA, 20 bp, synthetic construct
  misc_feature 1..20: note = chemically synthesized
  source 1..20: mol_type = other DNA
gaacttgaacgtcaggagtc

SEQ ID NO: 13980 - DNA, 20 bp, synthetic construct
  misc_feature 1..20: note = chemically synthesized
  source 1..20: mol_type = other DNA
ttgaacgtcaggagtctgga

SEQ ID NO: 13981 - DNA, 20 bp, synthetic construct
  misc_feature 1..20: note = chemically synthesized
  source 1..20: mol_type = other DNA
acgtcaggagtctggatgga

SEQ ID NO: 13982 - DNA, 20 bp, synthetic construct
  misc_feature 1..20: note = chemically synthesized
  source 1..20: mol_type = other DNA
gtcaggagtctggatggaca

SEQ ID NO: 13983 - DNA, 20 bp, synthetic construct
  misc_feature 1..20: note = chemically synthesized
  source 1..20: mol_type = other DNA
ggacagagacacacaaaaca

SEQ ID NO: 13984 - DNA, 20 bp, synthetic construct
  misc_feature 1..20: note = chemically synthesized
  source 1..20: mol_type = other DNA
gacagagacacacaaaacat

SEQ ID NO: 13985 - DNA, 20 bp, synthetic construct
  misc_feature 1..20: note = chemically synthesized
  source 1..20: mol_type = other DNA
agagacacacaaaacatggg

SEQ ID NO: 13986 - DNA, 20 bp, synthetic construct
  misc_feature 1..20: note = chemically synthesized
  source 1..20: mol_type = other DNA
gagacacacaaaacatgggc

SEQ ID NO: 13987 - DNA, 20 bp, synthetic construct
  misc_feature 1..20: note = chemically synthesized
  source 1..20: mol_type = other DNA
agacacacaaaacatgggca

SEQ ID NO: 13988 - DNA, 20 bp, synthetic construct
  misc_feature 1..20: note = chemically synthesized
  source 1..20: mol_type = other DNA
acacaaaacatgggcagggc

SEQ ID NO: 13989 - DNA, 20 bp, synthetic construct
  misc_feature 1..20: note = chemically synthesized
  source 1..20: mol_type = other DNA
caaaacatgggcagggcgag

SEQ ID NO: 13990 - DNA, 20 bp, synthetic construct
  misc_feature 1..20: note = chemically synthesized
  source 1..20: mol_type = other DNA
aaaacatgggcagggcgagc

SEQ ID NO: 13991 - DNA, 20 bp, synthetic construct
  misc_feature 1..20: note = chemically synthesized
  source 1..20: mol_type = other DNA
aacatgggcagggcgagcag

SEQ ID NO: 13992 - DNA, 20 bp, synthetic construct
  misc_feature 1..20: note = chemically synthesized
  source 1..20: mol_type = other DNA
catgggcagggcgagcagga

SEQ ID NO: 13993 - DNA, 20 bp, synthetic construct
  misc_feature 1..20: note = chemically synthesized
  source 1..20: mol_type = other DNA
gggcagggcgagcaggagag

SEQ ID NO: 13994 - DNA, 20 bp, synthetic construct
  misc_feature 1..20: note = chemically synthesized
  source 1..20: mol_type = other DNA
ggcagggcgagcaggagaga

SEQ ID NO: 13995 - DNA, 20 bp, synthetic construct
  misc_feature 1..20: note = chemically synthesized
  source 1..20: mol_type = other DNA
gcagggcgagcaggagagaa

SEQ ID NO: 13996 - DNA, 20 bp, synthetic construct
  misc_feature 1..20: note = chemically synthesized
  source 1..20: mol_type = other DNA
cagggcgagcaggagagaag

SEQ ID NO: 13997 - DNA, 20 bp, synthetic construct
  misc_feature 1..20: note = chemically synthesized
  source 1..20: mol_type = other DNA
gggcgagcaggagagaaggg

SEQ ID NO: 13998 - DNA, 20 bp, synthetic construct
  misc_feature 1..20: note = chemically synthesized
  source 1..20: mol_type = other DNA
ggcgagcaggagagaagggg

SEQ ID NO: 13999 - DNA, 20 bp, synthetic construct
  misc_feature 1..20: note = chemically synthesized
  source 1..20: mol_type = other DNA
cgagcaggagagaaggggag

SEQ ID NO: 14000 - DNA, 20 bp, synthetic construct
  misc_feature 1..20: note = chemically synthesized
  source 1..20: mol_type = other DNA
gagcaggagagaaggggagg

SEQ ID NO: 14001 - DNA, 20 bp, synthetic construct
  misc_feature 1..20: note = chemically synthesized
  source 1..20: mol_type = other DNA
agcaggagagaaggggagga

SEQ ID NO: 14002 - DNA, 20 bp, synthetic construct
  misc_feature 1..20: note = chemically synthesized
  source 1..20: mol_type = other DNA
aggagagaaggggaggaggg

SEQ ID NO: 14003 - DNA, 20 bp, synthetic construct
  misc_feature 1..20: note = chemically synthesized
  source 1..20: mol_type = other DNA
ggagagaaggggaggaggga

SEQ ID NO: 14004 - DNA, 20 bp, synthetic construct
  misc_feature 1..20: note = chemically synthesized
  source 1..20: mol_type = other DNA
gagagaaggggaggagggaa

SEQ ID NO: 14005 - DNA, 20 bp, synthetic construct
  misc_feature 1..20: note = chemically synthesized
  source 1..20: mol_type = other DNA
agagaaggggaggagggaag

SEQ ID NO: 14006 - DNA, 20 bp, synthetic construct
  misc_feature 1..20: note = chemically synthesized
  source 1..20: mol_type = other DNA
gaaggggaggagggaagggg

SEQ ID NO: 14007 - DNA, 20 bp, synthetic construct
  misc_feature 1..20: note = chemically synthesized
  source 1..20: mol_type = other DNA
gaaggggaagctcacaccaa

SEQ ID NO: 14008 - DNA, 20 bp, synthetic construct
  misc_feature 1..20: note = chemically synthesized
  source 1..20: mol_type = other DNA
tcacaccaatggacacacat

SEQ ID NO: 14009 - DNA, 20 bp, synthetic construct
  misc_feature 1..20: note = chemically synthesized
  source 1..20: mol_type = other DNA
cacaccaatggacacacatc

SEQ ID NO: 14010 - DNA, 20 bp, synthetic construct
  misc_feature 1..20: note = chemically synthesized
  source 1..20: mol_type = other DNA
acaccaatggacacacatca

SEQ ID NO: 14011 - DNA, 20 bp, synthetic construct
  misc_feature 1..20: note = chemically synthesized
  source 1..20: mol_type = other DNA
caccaatggacacacatcag

SEQ ID NO: 14012 - DNA, 20 bp, synthetic construct
  misc_feature 1..20: note = chemically synthesized
  source 1..20: mol_type = other DNA
aatggacacacatcaggggc

SEQ ID NO: 14013 - DNA, 20 bp, synthetic construct
  misc_feature 1..20: note = chemically synthesized
  source 1..20: mol_type = other DNA
atcaggggctggacatgaaa

SEQ ID NO: 14014 - DNA, 20 bp, synthetic construct
  misc_feature 1..20: note = chemically synthesized
  source 1..20: mol_type = other DNA
caggggctggacatgaaaaa

SEQ ID NO: 14015 - DNA, 20 bp, synthetic construct
  misc_feature 1..20: note = chemically synthesized
  source 1..20: mol_type = other DNA
gctggacatgaaaaagagac

SEQ ID NO: 14016 - DNA, 20 bp, synthetic construct
  misc_feature 1..20: note = chemically synthesized
  source 1..20: mol_type = other DNA
ctggacatgaaaaagagacc

SEQ ID NO: 14017 - DNA, 20 bp, synthetic construct
  misc_feature 1..20: note = chemically synthesized
  source 1..20: mol_type = other DNA
catgaaaaagagaccaggac

SEQ ID NO: 14018 - DNA, 20 bp, synthetic construct
  misc_feature 1..20: note = chemically synthesized
  source 1..20: mol_type = other DNA
aagagaccaggacaagccaa

SEQ ID NO: 14019 - DNA, 20 bp, synthetic construct
  misc_feature 1..20: note = chemically synthesized
  source 1..20: mol_type = other DNA
gaccaggacaagccaatggc

SEQ ID NO: 14020 - DNA, 20 bp, synthetic construct
  misc_feature 1..20: note = chemically synthesized
  source 1..20: mol_type = other DNA
ggacaagccaatggccagtg

SEQ ID NO: 14021 - DNA, 20 bp, synthetic construct
  misc_feature 1..20: note = chemically synthesized
  source 1..20: mol_type = other DNA
gacaagccaatggccagtgc

SEQ ID NO: 14022 - DNA, 20 bp, synthetic construct
  misc_feature 1..20: note = chemically synthesized
  source 1..20: mol_type = other DNA
acaagccaatggccagtgcg

SEQ ID NO: 14023 - DNA, 20 bp, synthetic construct
  misc_feature 1..20: note = chemically synthesized
  source 1..20: mol_type = other DNA
aagccaatggccagtgcggg

SEQ ID NO: 14024 - DNA, 20 bp, synthetic construct
  misc_feature 1..20: note = chemically synthesized
  source 1..20: mol_type = other DNA
agccaatggccagtgcgggg

SEQ ID NO: 14025 - DNA, 20 bp, synthetic construct
  misc_feature 1..20: note = chemically synthesized
  source 1..20: mol_type = other DNA
gccaatggccagtgcgggga

SEQ ID NO: 14026 - DNA, 20 bp, synthetic construct
  misc_feature 1..20: note = chemically synthesized
  source 1..20: mol_type = other DNA
ccaatggccagtgcggggag

SEQ ID NO: 14027 - DNA, 20 bp, synthetic construct
  misc_feature 1..20: note = chemically synthesized
  source 1..20: mol_type = other DNA
caatggccagtgcggggagg

SEQ ID NO: 14028 - DNA, 20 bp, synthetic construct
  misc_feature 1..20: note = chemically synthesized
  source 1..20: mol_type = other DNA
atggccagtgcggggagggg

SEQ ID NO: 14029 - DNA, 20 bp, synthetic construct
  misc_feature 1..20: note = chemically synthesized
  source 1..20: mol_type = other DNA
tggccagtgcggggaggggg

SEQ ID NO: 14030 - DNA, 20 bp, synthetic construct
  misc_feature 1..20: note = chemically synthesized
  source 1..20: mol_type = other DNA
agtgcggggagggggaggtg

SEQ ID NO: 14031 - DNA, 20 bp, synthetic construct
  misc_feature 1..20: note = chemically synthesized
  source 1..20: mol_type = other DNA
gtgcggggagggggaggtgc

SEQ ID NO: 14032 - DNA, 20 bp, synthetic construct
  misc_feature 1..20: note = chemically synthesized
  source 1..20: mol_type = other DNA
tgcggggagggggaggtgcg

SEQ ID NO: 14033 - DNA, 20 bp, synthetic construct
  misc_feature 1..20: note = chemically synthesized
  source 1..20: mol_type = other DNA
ggggagggggaggtgcgggg

SEQ ID NO: 14034 - DNA, 20 bp, synthetic construct
  misc_feature 1..20: note = chemically synthesized
  source 1..20: mol_type = other DNA
gggagggggaggtgcggggc

SEQ ID NO: 14035 - DNA, 20 bp, synthetic construct
  misc_feature 1..20: note = chemically synthesized
  source 1..20: mol_type = other DNA
ggagggggaggtgcggggcg

SEQ ID NO: 14036 - DNA, 20 bp, synthetic construct
  misc_feature 1..20: note = chemically synthesized
  source 1..20: mol_type = other DNA
gagggggaggtgcggggcgg

SEQ ID NO: 14037 - DNA, 20 bp, synthetic construct
  misc_feature 1..20: note = chemically synthesized
  source 1..20: mol_type = other DNA
agggggaggtgcggggcggg

SEQ ID NO: 14038 - DNA, 20 bp, synthetic construct
  misc_feature 1..20: note = chemically synthesized
  source 1..20: mol_type = other DNA
gtgcggggcggggggctccg

SEQ ID NO: 14039 - DNA, 20 bp, synthetic construct
  misc_feature 1..20: note = chemically synthesized
  source 1..20: mol_type = other DNA
gcggggggctccgcggacgc

SEQ ID NO: 14040 - DNA, 20 bp, synthetic construct
  misc_feature 1..20: note = chemically synthesized
  source 1..20: mol_type = other DNA
ggctccgcggacgccagacg

SEQ ID NO: 14041 - DNA, 20 bp, synthetic construct
  misc_feature 1..20: note = chemically synthesized
  source 1..20: mol_type = other DNA
cggacgccagacgcggcccc

SEQ ID NO: 14042 - DNA, 20 bp, synthetic construct
  misc_feature 1..20: note = chemically synthesized
  source 1..20: mol_type = other DNA
ggacgccagacgcggccccc

SEQ ID NO: 14043 - DNA, 20 bp, synthetic construct
  misc_feature 1..20: note = chemically synthesized
  source 1..20: mol_type = other DNA
gacgccagacgcggcccccg

SEQ ID NO: 14044 - DNA, 20 bp, synthetic construct
  misc_feature 1..20: note = chemically synthesized
  source 1..20: mol_type = other DNA
acgccagacgcggcccccgg

SEQ ID NO: 14045 - DNA, 20 bp, synthetic construct
  misc_feature 1..20: note = chemically synthesized
  source 1..20: mol_type = other DNA
gccagacgcggcccccgggg

SEQ ID NO: 14046 - DNA, 20 bp, synthetic construct
  misc_feature 1..20: note = chemically synthesized
  source 1..20: mol_type = other DNA
ccagacgcggcccccggggg

SEQ ID NO: 14047 - DNA, 20 bp, synthetic construct
  misc_feature 1..20: note = chemically synthesized
  source 1..20: mol_type = other DNA
cagacgcggcccccggggga

SEQ ID NO: 14048 - DNA, 20 bp, synthetic construct
  misc_feature 1..20: note = chemically synthesized
  source 1..20: mol_type = other DNA
agacgcggcccccgggggag

SEQ ID NO: 14049 - DNA, 20 bp, synthetic construct
  misc_feature 1..20: note = chemically synthesized
  source 1..20: mol_type = other DNA
cgcggcccccgggggagggg

SEQ ID NO: 14050 - DNA, 20 bp, synthetic construct
  misc_feature 1..20: note = chemically synthesized
  source 1..20: mol_type = other DNA
gcggcccccgggggaggggc

SEQ ID NO: 14051 - DNA, 20 bp, synthetic construct
  misc_feature 1..20: note = chemically synthesized
  source 1..20: mol_type = other DNA
ccccgggggaggggcgggcc

SEQ ID NO: 14052 - DNA, 20 bp, synthetic construct
  misc_feature 1..20: note = chemically synthesized
  source 1..20: mol_type = other DNA
cccgggggaggggcgggccg

SEQ ID NO: 14053 - DNA, 20 bp, synthetic construct
  misc_feature 1..20: note = chemically synthesized
  source 1..20: mol_type = other DNA
ccgggggaggggcgggccga

SEQ ID NO: 14054 - DNA, 20 bp, synthetic construct
  misc_feature 1..20: note = chemically synthesized
  source 1..20: mol_type = other DNA
cgggggaggggcgggccgag

SEQ ID NO: 14055 - DNA, 20 bp, synthetic construct
  misc_feature 1..20: note = chemically synthesized
  source 1..20: mol_type = other DNA
ggggaggggcgggccgaggg

SEQ ID NO: 14056 - DNA, 20 bp, synthetic construct
  misc_feature 1..20: note = chemically synthesized
  source 1..20: mol_type = other DNA
gggaggggcgggccgagggg

SEQ ID NO: 14057 - DNA, 20 bp, synthetic construct
  misc_feature 1..20: note = chemically synthesized
  source 1..20: mol_type = other DNA
ggaggggcgggccgagggga

SEQ ID NO: 14058 - DNA, 20 bp, synthetic construct
  misc_feature 1..20: note = chemically synthesized
  source 1..20: mol_type = other DNA
gaggggcgggccgaggggag

SEQ ID NO: 14059 - DNA, 20 bp, synthetic construct
  misc_feature 1..20: note = chemically synthesized
  source 1..20: mol_type = other DNA
aggggcgggccgaggggagg

SEQ ID NO: 14060 - DNA, 20 bp, synthetic construct
  misc_feature 1..20: note = chemically synthesized
  source 1..20: mol_type = other DNA
gggccgaggggagggggcgc

SEQ ID NO: 14061 - DNA, 20 bp, synthetic construct
  misc_feature 1..20: note = chemically synthesized
  source 1..20: mol_type = other DNA
ggccgaggggagggggcgct

SEQ ID NO: 14062 - DNA, 20 bp, synthetic construct
  misc_feature 1..20: note = chemically synthesized
  source 1..20: mol_type = other DNA
gccgaggggagggggcgctg

SEQ ID NO: 14063 - DNA, 20 bp, synthetic construct
  misc_feature 1..20: note = chemically synthesized
  source 1..20: mol_type = other DNA
gggagggggcgctggggccg

SEQ ID NO: 14064 - DNA, 20 bp, synthetic construct
  misc_feature 1..20: note = chemically synthesized
  source 1..20: mol_type = other DNA
ggagggggcgctggggccgc

SEQ ID NO: 14065 - DNA, 20 bp, synthetic construct
  misc_feature 1..20: note = chemically synthesized
  source 1..20: mol_type = other DNA
cgctggggccgcgggctcac

SEQ ID NO: 14066 - DNA, 20 bp, synthetic construct
  misc_feature 1..20: note = chemically synthesized
  source 1..20: mol_type = other DNA
tggggccgcgggctcaccag

SEQ ID NO: 14067 - DNA, 20 bp, synthetic construct
  misc_feature 1..20: note = chemically synthesized
  source 1..20: mol_type = other DNA
cgcgggctcaccagtggccg

SEQ ID NO: 14068 - DNA, 20 bp, synthetic construct
  misc_feature 1..20: note = chemically synthesized
  source 1..20: mol_type = other DNA
ggctcaccagtggccgcagc

SEQ ID NO: 14069 - DNA, 20 bp, synthetic construct
  misc_feature 1..20: note = chemically synthesized
  source 1..20: mol_type = other DNA
agtggccgcagcgagcgccg

SEQ ID NO: 14070 - DNA, 20 bp, synthetic construct
  misc_feature 1..20: note = chemically synthesized
  source 1..20: mol_type = other DNA
ggccgcagcgagcgccgcgg

SEQ ID NO: 14071 - DNA, 20 bp, synthetic construct
  misc_feature 1..20: note = chemically synthesized
  source 1..20: mol_type = other DNA
cgcagcgagcgccgcggcgg

SEQ ID NO: 14072 - DNA, 20 bp, synthetic construct
  misc_feature 1..20: note = chemically synthesized
  source 1..20: mol_type = other DNA
cgagcgccgcggcggtggcg

SEQ ID NO: 14073 - DNA, 20 bp, synthetic construct
  misc_feature 1..20: note = chemically synthesized
  source 1..20: mol_type = other DNA
cgccgcggcggtggcgtggc

SEQ ID NO: 14074 - DNA, 20 bp, synthetic construct
  misc_feature 1..20: note = chemically synthesized
  source 1..20: mol_type = other DNA
gccgcggcggtggcgtggcc

SEQ ID NO: 14075 - DNA, 20 bp, synthetic construct
  misc_feature 1..20: note = chemically synthesized
  source 1..20: mol_type = other DNA
cgcggcggtggcgtggccgg

SEQ ID NO: 14076 - DNA, 20 bp, synthetic construct
  misc_feature 1..20: note = chemically synthesized
  source 1..20: mol_type = other DNA
cggcggtggcgtggccggga

SEQ ID NO: 14077 - DNA, 20 bp, synthetic construct
  misc_feature 1..20: note = chemically synthesized
  source 1..20: mol_type = other DNA
cggtggcgtggccgggagag

SEQ ID NO: 14078 - DNA, 20 bp, synthetic construct
  misc_feature 1..20: note = chemically synthesized
  source 1..20: mol_type = other DNA
ggcgtggccgggagagaaga

SEQ ID NO: 14079 - DNA, 20 bp, synthetic construct
  misc_feature 1..20: note = chemically synthesized
  source 1..20: mol_type = other DNA
gcgtggccgggagagaagaa

SEQ ID NO: 14080 - DNA, 20 bp, synthetic construct
  misc_feature 1..20: note = chemically synthesized
  source 1..20: mol_type = other DNA
cgtggccgggagagaagaaa

SEQ ID NO: 14081 - DNA, 20 bp, synthetic construct
  misc_feature 1..20: note = chemically synthesized
  source 1..20: mol_type = other DNA
gtggccgggagagaagaaag

SEQ ID NO: 14082 - DNA, 20 bp, synthetic construct
  misc_feature 1..20: note = chemically synthesized
  source 1..20: mol_type = other DNA
gccgggagagaagaaagggg

SEQ ID NO: 14083 - DNA, 20 bp, synthetic construct
  misc_feature 1..20: note = chemically synthesized
  source 1..20: mol_type = other DNA
gggagagaagaaaggggtgg

SEQ ID NO: 14084 - DNA, 20 bp, synthetic construct
  misc_feature 1..20: note = chemically synthesized
  source 1..20: mol_type = other DNA
ggagagaagaaaggggtggc

SEQ ID NO: 14085 - DNA, 20 bp, synthetic construct
  misc_feature 1..20: note = chemically synthesized
  source 1..20: mol_type = other DNA
gagagaagaaaggggtggca

SEQ ID NO: 14086 - DNA, 20 bp, synthetic construct
  misc_feature 1..20: note = chemically synthesized
  source 1..20: mol_type = other DNA
agagaagaaaggggtggcag

SEQ ID NO: 14087 - DNA, 20 bp, synthetic construct
  misc_feature 1..20: note = chemically synthesized
  source 1..20: mol_type = other DNA
gaagaaaggggtggcagggg

SEQ ID NO: 14088 - DNA, 20 bp, synthetic construct
  misc_feature 1..20: note = chemically synthesized
  source 1..20: mol_type = other DNA
aagaaaggggtggcaggggt

SEQ ID NO: 14089 - DNA, 20 bp, synthetic construct
  misc_feature 1..20: note = chemically synthesized
  source 1..20: mol_type = other DNA
gaaaggggtggcaggggtgg

SEQ ID NO: 14090 - DNA, 20 bp, synthetic construct
  misc_feature 1..20: note = chemically synthesized
  source 1..20: mol_type = other DNA
aaaggggtggcaggggtggg

SEQ ID NO: 14091 - DNA, 20 bp, synthetic construct
  misc_feature 1..20: note = chemically synthesized
  source 1..20: mol_type = other DNA
gggtggcaggggtgggagga

SEQ ID NO: 14092 - DNA, 20 bp, synthetic construct
  misc_feature 1..20: note = chemically synthesized
  source 1..20: mol_type = other DNA
ggtggcaggggtgggaggaa

SEQ ID NO: 14093 - DNA, 20 bp, synthetic construct
  misc_feature 1..20: note = chemically synthesized
  source 1..20: mol_type = other DNA
gtggcaggggtgggaggaaa

SEQ ID NO: 14094 - DNA, 20 bp, synthetic construct
  misc_feature 1..20: note = chemically synthesized
  source 1..20: mol_type = other DNA
gcaggggtgggaggaaaggg

SEQ ID NO: 14095 - DNA, 20 bp, synthetic construct
  misc_feature 1..20: note = chemically synthesized
  source 1..20: mol_type = other DNA
caggggtgggaggaaagggt

SEQ ID NO: 14096 - DNA, 20 bp, synthetic construct
  misc_feature 1..20: note = chemically synthesized
  source 1..20: mol_type = other DNA
aggggtgggaggaaagggtg

SEQ ID NO: 14097 - DNA, 20 bp, synthetic construct
  misc_feature 1..20: note = chemically synthesized
  source 1..20: mol_type = other DNA
ggggtgggaggaaagggtgg

SEQ ID NO: 14098 - DNA, 20 bp, synthetic construct
  misc_feature 1..20: note = chemically synthesized
  source 1..20: mol_type = other DNA
gggtgggaggaaagggtggg

SEQ ID NO: 14099 - DNA, 20 bp, synthetic construct
  misc_feature 1..20: note = chemically synthesized
  source 1..20: mol_type = other DNA
ggtgggaggaaagggtgggg

SEQ ID NO: 14100 - DNA, 20 bp, synthetic construct
  misc_feature 1..20: note = chemically synthesized
  source 1..20: mol_type = other DNA
tgggaggaaagggtgggggg

SEQ ID NO: 14101 - DNA, 20 bp, synthetic construct
  misc_feature 1..20: note = chemically synthesized
  source 1..20: mol_type = other DNA
aggaaagggtgggggggagc

SEQ ID NO: 14102 - DNA, 20 bp, synthetic construct
  misc_feature 1..20: note = chemically synthesized
  source 1..20: mol_type = other DNA
cctgctcccccccacacacg

SEQ ID NO: 14103 - DNA, 20 bp, synthetic construct
  misc_feature 1..20: note = chemically synthesized
  source 1..20: mol_type = other DNA
acacgcggactctaaaatga

SEQ ID NO: 14104 - DNA, 20 bp, synthetic construct
  misc_feature 1..20: note = chemically synthesized
  source 1..20: mol_type = other DNA
aaatgaaagattattcaaaa

SEQ ID NO: 14105 - DNA, 20 bp, synthetic construct
  misc_feature 1..20: note = chemically synthesized
  source 1..20: mol_type = other DNA
ttattcaaaaaagaaaaaaa

SEQ ID NO: 14106 - DNA, 20 bp, synthetic construct
  misc_feature 1..20: note = chemically synthesized
  source 1..20: mol_type = other DNA
attcaaaaaagaaaaaaata

SEQ ID NO: 14107 - DNA, 20 bp, synthetic construct
  misc_feature 1..20: note = chemically synthesized
  source 1..20: mol_type = other DNA
aaaaaagaaaaaaatagagc

SEQ ID NO: 14108 - DNA, 20 bp, synthetic construct
  misc_feature 1..20: note = chemically synthesized
  source 1..20: mol_type = other DNA
aaaagaaaaaaatagagcga

SEQ ID NO: 14109 - DNA, 20 bp, synthetic construct
  misc_feature 1..20: note = chemically synthesized
  source 1..20: mol_type = other DNA
aaaatagagcgagagtgcac

SEQ ID NO: 14110 - DNA, 20 bp, synthetic construct
  misc_feature 1..20: note = chemically synthesized
  source 1..20: mol_type = other DNA
aaatagagcgagagtgcacc

SEQ ID NO: 14111 - DNA, 20 bp, synthetic construct
  misc_feature 1..20: note = chemically synthesized
  source 1..20: mol_type = other DNA
atagagcgagagtgcaccgg

SEQ ID NO: 14112 - DNA, 20 bp, synthetic construct
  misc_feature 1..20: note = chemically synthesized
  source 1..20: mol_type = other DNA
tagagcgagagtgcaccggg

SEQ ID NO: 14113 - DNA, 20 bp, synthetic construct
  misc_feature 1..20: note = chemically synthesized
  source 1..20: mol_type = other DNA
gagagtgcaccgggaggctg

SEQ ID NO: 14114 - DNA, 20 bp, synthetic construct
  misc_feature 1..20: note = chemically synthesized
  source 1..20: mol_type = other DNA
gcaccgggaggctgcagccc

SEQ ID NO: 14115 - DNA, 20 bp, synthetic construct
  misc_feature 1..20: note = chemically synthesized
  source 1..20: mol_type = other DNA
caccgggaggctgcagcccc

SEQ ID NO: 14116 - DNA, 20 bp, synthetic construct
  misc_feature 1..20: note = chemically synthesized
  source 1..20: mol_type = other DNA
gggaggctgcagccccgggc

SEQ ID NO: 14117 - DNA, 20 bp, synthetic construct
  misc_feature 1..20: note = chemically synthesized
  source 1..20: mol_type = other DNA
ggaggctgcagccccgggct

SEQ ID NO: 14118 - DNA, 20 bp, synthetic construct
  misc_feature 1..20: note = chemically synthesized
  source 1..20: mol_type = other DNA
gaggctgcagccccgggctg

SEQ ID NO: 14119 - DNA, 20 bp, synthetic construct
  misc_feature 1..20: note = chemically synthesized
  source 1..20: mol_type = other DNA
gctgcagccccgggctgggg

SEQ ID NO: 14120 - DNA, 20 bp, synthetic construct
  misc_feature 1..20: note = chemically synthesized
  source 1..20: mol_type = other DNA
agccccgggctggggaagcg

SEQ ID NO: 14121 - DNA, 20 bp, synthetic construct
  misc_feature 1..20: note = chemically synthesized
  source 1..20: mol_type = other DNA
gccccgggctggggaagcgc

SEQ ID NO: 14122 - DNA, 20 bp, synthetic construct
  misc_feature 1..20: note = chemically synthesized
  source 1..20: mol_type = other DNA
ccgggctggggaagcgcggg

SEQ ID NO: 14123 - DNA, 20 bp, synthetic construct
  misc_feature 1..20: note = chemically synthesized
  source 1..20: mol_type = other DNA
gggctggggaagcgcgggcg

SEQ ID NO: 14124 - DNA, 20 bp, synthetic construct
  misc_feature 1..20: note = chemically synthesized
  source 1..20: mol_type = other DNA
ggctggggaagcgcgggcgg

SEQ ID NO: 14125 - DNA, 20 bp, synthetic construct
  misc_feature 1..20: note = chemically synthesized
  source 1..20: mol_type = other DNA
gctggggaagcgcgggcgga

SEQ ID NO: 14126 - DNA, 20 bp, synthetic construct
  misc_feature 1..20: note = chemically synthesized
  source 1..20: mol_type = other DNA
ggggaagcgcgggcggaggg

SEQ ID NO: 14127 - DNA, 20 bp, synthetic construct
  misc_feature 1..20: note = chemically synthesized
  source 1..20: mol_type = other DNA
aagcgcgggcggagggaagc

SEQ ID NO: 14128 - DNA, 20 bp, synthetic construct
  misc_feature 1..20: note = chemically synthesized
  source 1..20: mol_type = other DNA
agcgcgggcggagggaagcc

SEQ ID NO: 14129 - DNA, 20 bp, synthetic construct
  misc_feature 1..20: note = chemically synthesized
  source 1..20: mol_type = other DNA
gcgggcggagggaagccagg

SEQ ID NO: 14130 - DNA, 20 bp, synthetic construct
  misc_feature 1..20: note = chemically synthesized
  source 1..20: mol_type = other DNA
gggcggagggaagccaggta

SEQ ID NO: 14131 - DNA, 20 bp, synthetic construct
  misc_feature 1..20: note = chemically synthesized
  source 1..20: mol_type = other DNA
aagccaggtagagttgctcc

SEQ ID NO: 14132 - DNA, 20 bp, synthetic construct
  misc_feature 1..20: note = chemically synthesized
  source 1..20: mol_type = other DNA
ccgcgctcgctccccgcgtg

SEQ ID NO: 14133 - DNA, 20 bp, synthetic construct
  misc_feature 1..20: note = chemically synthesized
  source 1..20: mol_type = other DNA
cgctccccgcgtgtggacgc

SEQ ID NO: 14134 - DNA, 20 bp, synthetic construct
  misc_feature 1..20: note = chemically synthesized
  source 1..20: mol_type = other DNA
gctccccgcgtgtggacgcc

SEQ ID NO: 14135 - DNA, 20 bp, synthetic construct
  misc_feature 1..20: note = chemically synthesized
  source 1..20: mol_type = other DNA
ctccccgcgtgtggacgcca

SEQ ID NO: 14136 - DNA, 20 bp, synthetic construct
  misc_feature 1..20: note = chemically synthesized
  source 1..20: mol_type = other DNA
tccccgcgtgtggacgccag

SEQ ID NO: 14137 - DNA, 20 bp, synthetic construct
  misc_feature 1..20: note = chemically synthesized
  source 1..20: mol_type = other DNA
cgtgtggacgccaggggccg

SEQ ID NO: 14138 - DNA, 20 bp, synthetic construct
  misc_feature 1..20: note = chemically synthesized
  source 1..20: mol_type = other DNA
gacgccaggggccgaagtaa

SEQ ID NO: 14139 - DNA, 20 bp, synthetic construct
  misc_feature 1..20: note = chemically synthesized
  source 1..20: mol_type = other DNA
ggggccgaagtaaaagcccc

SEQ ID NO: 14140 - DNA, 20 bp, synthetic construct
  misc_feature 1..20: note = chemically synthesized
  source 1..20: mol_type = other DNA
aagtaaaagccccgagcccg

SEQ ID NO: 14141 - DNA, 20 bp, synthetic construct
  misc_feature 1..20: note = chemically synthesized
  source 1..20: mol_type = other DNA
cccgagcccgcggctgcgct

SEQ ID NO: 14142 - DNA, 20 bp, synthetic construct
  misc_feature 1..20: note = chemically synthesized
  source 1..20: mol_type = other DNA
ccgagcccgcggctgcgctc

SEQ ID NO: 14143 - DNA, 20 bp, synthetic construct
  misc_feature 1..20: note = chemically synthesized
  source 1..20: mol_type = other DNA
gcgctcgggaaactttgccc

SEQ ID NO: 14144 - DNA, 20 bp, synthetic construct
  misc_feature 1..20: note = chemically synthesized
  source 1..20: mol_type = other DNA
cgctcgggaaactttgcccg

SEQ ID NO: 14145 - DNA, 20 bp, synthetic construct
  misc_feature 1..20: note = chemically synthesized
  source 1..20: mol_type = other DNA
ctcgggaaactttgcccgag

SEQ ID NO: 14146 - DNA, 20 bp, synthetic construct
  misc_feature 1..20: note = chemically synthesized
  source 1..20: mol_type = other DNA
cgggaaactttgcccgagga

SEQ ID NO: 14147 - DNA, 20 bp, synthetic construct
  misc_feature 1..20: note = chemically synthesized
  source 1..20: mol_type = other DNA
gggaaactttgcccgaggag

SEQ ID NO: 14148 - DNA, 20 bp, synthetic construct
  misc_feature 1..20: note = chemically synthesized
  source 1..20: mol_type = other DNA
aactttgcccgaggagagga

SEQ ID NO: 14149 - DNA, 20 bp, synthetic construct
  misc_feature 1..20: note = chemically synthesized
  source 1..20: mol_type = other DNA
tgcccgaggagaggacagca

SEQ ID NO: 14150 - DNA, 20 bp, synthetic construct
  misc_feature 1..20: note = chemically synthesized
  source 1..20: mol_type = other DNA
cagcaaagaaaaatcacccg

SEQ ID NO: 14151 - DNA, 20 bp, synthetic construct
  misc_feature 1..20: note = chemically synthesized
  source 1..20: mol_type = other DNA
aagaaaaatcacccgaagtt

SEQ ID NO: 14152 - DNA, 20 bp, synthetic construct
  misc_feature 1..20: note = chemically synthesized
  source 1..20: mol_type = other DNA
gaaaaatcacccgaagttga

SEQ ID NO: 14153 - DNA, 20 bp, synthetic construct
  misc_feature 1..20: note = chemically synthesized
  source 1..20: mol_type = other DNA
atcacccgaagttgagagct

SEQ ID NO: 14154 - DNA, 20 bp, synthetic construct
  misc_feature 1..20: note = chemically synthesized
  source 1..20: mol_type = other DNA
aagttgagagctgagcctcc

SEQ ID NO: 14155 - DNA, 20 bp, synthetic construct
  misc_feature 1..20: note = chemically synthesized
  source 1..20: mol_type = other DNA
agagctgagcctccaagtta

SEQ ID NO: 14156 - DNA, 20 bp, synthetic construct
  misc_feature 1..20: note = chemically synthesized
  source 1..20: mol_type = other DNA
gcctccaagttacagctccg

SEQ ID NO: 14157 - DNA, 20 bp, synthetic construct
  misc_feature 1..20: note = chemically synthesized
  source 1..20: mol_type = other DNA
tccaagttacagctccgcag

SEQ ID NO: 14158 - DNA, 20 bp, synthetic construct
  misc_feature 1..20: note = chemically synthesized
  source 1..20: mol_type = other DNA
ccaagttacagctccgcagc

SEQ ID NO: 14159 - DNA, 20 bp, synthetic construct
  misc_feature 1..20: note = chemically synthesized
  source 1..20: mol_type = other DNA
gttacagctccgcagcgggc

SEQ ID NO: 14160 - DNA, 20 bp, synthetic construct
  misc_feature 1..20: note = chemically synthesized
  source 1..20: mol_type = other DNA
ttacagctccgcagcgggcg

SEQ ID NO: 14161 - DNA, 20 bp, synthetic construct
  misc_feature 1..20: note = chemically synthesized
  source 1..20: mol_type = other DNA
tacagctccgcagcgggcga

SEQ ID NO: 14162 - DNA, 20 bp, synthetic construct
  misc_feature 1..20: note = chemically synthesized
  source 1..20: mol_type = other DNA
acagctccgcagcgggcgag

SEQ ID NO: 14163 - DNA, 20 bp, synthetic construct
  misc_feature 1..20: note = chemically synthesized
  source 1..20: mol_type = other DNA
agctccgcagcgggcgaggg

SEQ ID NO: 14164 - DNA, 20 bp, synthetic construct
  misc_feature 1..20: note = chemically synthesized
  source 1..20: mol_type = other DNA
gctccgcagcgggcgagggg

SEQ ID NO: 14165 - DNA, 20 bp, synthetic construct
  misc_feature 1..20: note = chemically synthesized
  source 1..20: mol_type = other DNA
ccgcagcgggcgaggggagg

SEQ ID NO: 14166 - DNA, 20 bp, synthetic construct
  misc_feature 1..20: note = chemically synthesized
  source 1..20: mol_type = other DNA
cgcagcgggcgaggggaggt

SEQ ID NO: 14167 - DNA, 20 bp, synthetic construct
  misc_feature 1..20: note = chemically synthesized
  source 1..20: mol_type = other DNA
cagcgggcgaggggaggtgg

SEQ ID NO: 14168 - DNA, 20 bp, synthetic construct
  misc_feature 1..20: note = chemically synthesized
  source 1..20: mol_type = other DNA
agcgggcgaggggaggtggg

SEQ ID NO: 14169 - DNA, 20 bp, synthetic construct
  misc_feature 1..20: note = chemically synthesized
  source 1..20: mol_type = other DNA
gcgggcgaggggaggtggga

SEQ ID NO: 14170 - DNA, 20 bp, synthetic construct
  misc_feature 1..20: note = chemically synthesized
  source 1..20: mol_type = other DNA
gggcgaggggaggtgggagg

SEQ ID NO: 14171 - DNA, 20 bp, synthetic construct
  misc_feature 1..20: note = chemically synthesized
  source 1..20: mol_type = other DNA
gggaggtgggagggagcgca

SEQ ID NO: 14172 - DNA, 20 bp, synthetic construct
  misc_feature 1..20: note = chemically synthesized
  source 1..20: mol_type = other DNA
ggagggagcgcacggcaacg

SEQ ID NO: 14173 - DNA, 20 bp, synthetic construct
  misc_feature 1..20: note = chemically synthesized
  source 1..20: mol_type = other DNA
gcgcacggcaacgcggaatc

SEQ ID NO: 14174 - DNA, 20 bp, synthetic construct
  misc_feature 1..20: note = chemically synthesized
  source 1..20: mol_type = other DNA
ggcaacgcggaatccagcct

SEQ ID NO: 14175 - DNA, 20 bp, synthetic construct
  misc_feature 1..20: note = chemically synthesized
  source 1..20: mol_type = other DNA
cgcggaatccagcctaagtt

SEQ ID NO: 14176 - DNA, 20 bp, synthetic construct
  misc_feature 1..20: note = chemically synthesized
  source 1..20: mol_type = other DNA
cggaatccagcctaagtttg

SEQ ID NO: 14177 - DNA, 20 bp, synthetic construct
  misc_feature 1..20: note = chemically synthesized
  source 1..20: mol_type = other DNA
ggaatccagcctaagtttgg

SEQ ID NO: 14178 - DNA, 20 bp, synthetic construct
  misc_feature 1..20: note = chemically synthesized
  source 1..20: mol_type = other DNA
gaatccagcctaagtttgga

SEQ ID NO: 14179 - DNA, 20 bp, synthetic construct
  misc_feature 1..20: note = chemically synthesized
  source 1..20: mol_type = other DNA
agcctaagtttggagggctg

SEQ ID NO: 14180 - DNA, 20 bp, synthetic construct
  misc_feature 1..20: note = chemically synthesized
  source 1..20: mol_type = other DNA
gcctaagtttggagggctgc

SEQ ID NO: 14181 - DNA, 20 bp, synthetic construct
  misc_feature 1..20: note = chemically synthesized
  source 1..20: mol_type = other DNA
agtttggagggctgcgggtc

SEQ ID NO: 14182 - DNA, 20 bp, synthetic construct
  misc_feature 1..20: note = chemically synthesized
  source 1..20: mol_type = other DNA
ttggagggctgcgggtccgg

SEQ ID NO: 14183 - DNA, 20 bp, synthetic construct
  misc_feature 1..20: note = chemically synthesized
  source 1..20: mol_type = other DNA
tggagggctgcgggtccgga

SEQ ID NO: 14184 - DNA, 20 bp, synthetic construct
  misc_feature 1..20: note = chemically synthesized
  source 1..20: mol_type = other DNA
ggagggctgcgggtccggaa

SEQ ID NO: 14185 - DNA, 20 bp, synthetic construct
  misc_feature 1..20: note = chemically synthesized
  source 1..20: mol_type = other DNA
gggctgcgggtccggaaggg

SEQ ID NO: 14186 - DNA, 20 bp, synthetic construct
  misc_feature 1..20: note = chemically synthesized
  source 1..20: mol_type = other DNA
ggtccggaagggcagcgccc

SEQ ID NO: 14187 - DNA, 20 bp, synthetic construct
  misc_feature 1..20: note = chemically synthesized
  source 1..20: mol_type = other DNA
aagggcagcgcccaagtctc

SEQ ID NO: 14188 - DNA, 20 bp, synthetic construct
  misc_feature 1..20: note = chemically synthesized
  source 1..20: mol_type = other DNA
agggcagcgcccaagtctcc

SEQ ID NO: 14189 - DNA, 20 bp, synthetic construct
  misc_feature 1..20: note = chemically synthesized
  source 1..20: mol_type = other DNA
ggcagcgcccaagtctccag

SEQ ID NO: 14190 - DNA, 20 bp, synthetic construct
  misc_feature 1..20: note = chemically synthesized
  source 1..20: mol_type = other DNA
caagtctccaggagcccgcg

SEQ ID NO: 14191 - DNA, 20 bp, synthetic construct
  misc_feature 1..20: note = chemically synthesized
  source 1..20: mol_type = other DNA
ctccaggagcccgcgcggcc

SEQ ID NO: 14192 - DNA, 20 bp, synthetic construct
  misc_feature 1..20: note = chemically synthesized
  source 1..20: mol_type = other DNA
aggagcccgcgcggcctgga

SEQ ID NO: 14193 - DNA, 20 bp, synthetic construct
  misc_feature 1..20: note = chemically synthesized
  source 1..20: mol_type = other DNA
gagcccgcgcggcctggaaa

SEQ ID NO: 14194 - DNA, 20 bp, synthetic construct
  misc_feature 1..20: note = chemically synthesized
  source 1..20: mol_type = other DNA
agcccgcgcggcctggaaag

SEQ ID NO: 14195 - DNA, 20 bp, synthetic construct
  misc_feature 1..20: note = chemically synthesized
  source 1..20: mol_type = other DNA
gcccgcgcggcctggaaaga

SEQ ID NO: 14196 - DNA, 20 bp, synthetic construct
  misc_feature 1..20: note = chemically synthesized
  source 1..20: mol_type = other DNA
cccgcgcggcctggaaagag

SEQ ID NO: 14197 - DNA, 20 bp, synthetic construct
  misc_feature 1..20: note = chemically synthesized
  source 1..20: mol_type = other DNA
gcggcctggaaagaggggac

SEQ ID NO: 14198 - DNA, 20 bp, synthetic construct
  misc_feature 1..20: note = chemically synthesized
  source 1..20: mol_type = other DNA
cggcctggaaagaggggacc

SEQ ID NO: 14199 - DNA, 20 bp, synthetic construct
  misc_feature 1..20: note = chemically synthesized
  source 1..20: mol_type = other DNA
ggcctggaaagaggggaccg

SEQ ID NO: 14200 - DNA, 20 bp, synthetic construct
  misc_feature 1..20: note = chemically synthesized
  source 1..20: mol_type = other DNA
cctggaaagaggggaccggg

SEQ ID NO: 14201 - DNA, 20 bp, synthetic construct
  misc_feature 1..20: note = chemically synthesized
  source 1..20: mol_type = other DNA
tggaaagaggggaccgggga

SEQ ID NO: 14202 - DNA, 20 bp, synthetic construct
  misc_feature 1..20: note = chemically synthesized
  source 1..20: mol_type = other DNA
ggaaagaggggaccggggag

SEQ ID NO: 14203 - DNA, 20 bp, synthetic construct
  misc_feature 1..20: note = chemically synthesized
  source 1..20: mol_type = other DNA
aagaggggaccggggagagg

SEQ ID NO: 14204 - DNA, 20 bp, synthetic construct
  misc_feature 1..20: note = chemically synthesized
  source 1..20: mol_type = other DNA
agaggggaccggggagaggc

SEQ ID NO: 14205 - DNA, 20 bp, synthetic construct
  misc_feature 1..20: note = chemically synthesized
  source 1..20: mol_type = other DNA
ggggaccggggagaggcagg

SEQ ID NO: 14206 - DNA, 20 bp, synthetic construct
  misc_feature 1..20: note = chemically synthesized
  source 1..20: mol_type = other DNA
ccggggagaggcaggcggcg

SEQ ID NO: 14207 - DNA, 20 bp, synthetic construct
  misc_feature 1..20: note = chemically synthesized
  source 1..20: mol_type = other DNA
cggggagaggcaggcggcgc

SEQ ID NO: 14208 - DNA, 20 bp, synthetic construct
  misc_feature 1..20: note = chemically synthesized
  source 1..20: mol_type = other DNA
gagaggcaggcggcgcaggc

SEQ ID NO: 14209 - DNA, 20 bp, synthetic construct
  misc_feature 1..20: note = chemically synthesized
  source 1..20: mol_type = other DNA
agaggcaggcggcgcaggcc

SEQ ID NO: 14210 - DNA, 20 bp, synthetic construct
  misc_feature 1..20: note = chemically synthesized
  source 1..20: mol_type = other DNA
gaggcaggcggcgcaggccg

SEQ ID NO: 14211 - DNA, 20 bp, synthetic construct
  misc_feature 1..20: note = chemically synthesized
  source 1..20: mol_type = other DNA
ggcggcgcaggccggggccc

SEQ ID NO: 14212 - DNA, 20 bp, synthetic construct
  misc_feature 1..20: note = chemically synthesized
  source 1..20: mol_type = other DNA
gcggcgcaggccggggcccg

SEQ ID NO: 14213 - DNA, 20 bp, synthetic construct
  misc_feature 1..20: note = chemically synthesized
  source 1..20: mol_type = other DNA
cggcgcaggccggggcccga

SEQ ID NO: 14214 - DNA, 20 bp, synthetic construct
  misc_feature 1..20: note = chemically synthesized
  source 1..20: mol_type = other DNA
cggggcccgagggcgccccc

SEQ ID NO: 14215 - DNA, 20 bp, synthetic construct
  misc_feature 1..20: note = chemically synthesized
  source 1..20: mol_type = other DNA
ggggcccgagggcgccccca

SEQ ID NO: 14216 - DNA, 20 bp, synthetic construct
  misc_feature 1..20: note = chemically synthesized
  source 1..20: mol_type = other DNA
ccgagggcgcccccaaggcc

SEQ ID NO: 14217 - DNA, 20 bp, synthetic construct
  misc_feature 1..20: note = chemically synthesized
  source 1..20: mol_type = other DNA
gggcgcccccaaggccgagc

SEQ ID NO: 14218 - DNA, 20 bp, synthetic construct
  misc_feature 1..20: note = chemically synthesized
  source 1..20: mol_type = other DNA
ggcgcccccaaggccgagcc

SEQ ID NO: 14219 - DNA, 20 bp, synthetic construct
  misc_feature 1..20: note = chemically synthesized
  source 1..20: mol_type = other DNA
gcgcccccaaggccgagcca

SEQ ID NO: 14220 - DNA, 20 bp, synthetic construct
  misc_feature 1..20: note = chemically synthesized
  source 1..20: mol_type = other DNA
cccaaggccgagccagggac

SEQ ID NO: 14221 - DNA, 20 bp, synthetic construct
  misc_feature 1..20: note = chemically synthesized
  source 1..20: mol_type = other DNA
ccaaggccgagccagggacc

SEQ ID NO: 14222 - DNA, 20 bp, synthetic construct
  misc_feature 1..20: note = chemically synthesized
  source 1..20: mol_type = other DNA
gagccagggaccgggaatct

SEQ ID NO: 14223 - DNA, 20 bp, synthetic construct
  misc_feature 1..20: note = chemically synthesized
  source 1..20: mol_type = other DNA
gggaatctgagcgccccgcc

SEQ ID NO: 14224 - DNA, 20 bp, synthetic construct
  misc_feature 1..20: note = chemically synthesized
  source 1..20: mol_type = other DNA
tgagcgccccgccaagcgac

SEQ ID NO: 14225 - DNA, 20 bp, synthetic construct
  misc_feature 1..20: note = chemically synthesized
  source 1..20: mol_type = other DNA
gagcgccccgccaagcgact

SEQ ID NO: 14226 - DNA, 20 bp, synthetic construct
  misc_feature 1..20: note = chemically synthesized
  source 1..20: mol_type = other DNA
ctgggtctgaatgcaactga

SEQ ID NO: 14227 - DNA, 20 bp, synthetic construct
  misc_feature 1..20: note = chemically synthesized
  source 1..20: mol_type = other DNA
tgaatgcaactgaaagcgcc

SEQ ID NO: 14228 - DNA, 20 bp, synthetic construct
  misc_feature 1..20: note = chemically synthesized
  source 1..20: mol_type = other DNA
aactgaaagcgccgagtccc

SEQ ID NO: 14229 - DNA, 20 bp, synthetic construct
  misc_feature 1..20: note = chemically synthesized
  source 1..20: mol_type = other DNA
gcgccgagtccccggctcct

SEQ ID NO: 14230 - DNA, 20 bp, synthetic construct
  misc_feature 1..20: note = chemically synthesized
  source 1..20: mol_type = other DNA
cgccgagtccccggctccta

SEQ ID NO: 14231 - DNA, 20 bp, synthetic construct
  misc_feature 1..20: note = chemically synthesized
  source 1..20: mol_type = other DNA
gccgagtccccggctcctaa

SEQ ID NO: 14232 - DNA, 20 bp, synthetic construct
  misc_feature 1..20: note = chemically synthesized
  source 1..20: mol_type = other DNA
tccccggctcctaagggtcg

SEQ ID NO: 14233 - DNA, 20 bp, synthetic construct
  misc_feature 1..20: note = chemically synthesized
  source 1..20: mol_type = other DNA
cggctcctaagggtcgcaga

SEQ ID NO: 14234 - DNA, 20 bp, synthetic construct
  misc_feature 1..20: note = chemically synthesized
  source 1..20: mol_type = other DNA
gctcctaagggtcgcagaaa

SEQ ID NO: 14235 - DNA, 20 bp, synthetic construct
  misc_feature 1..20: note = chemically synthesized
  source 1..20: mol_type = other DNA
tcctaagggtcgcagaaaga

SEQ ID NO: 14236 - DNA, 20 bp, synthetic construct
  misc_feature 1..20: note = chemically synthesized
  source 1..20: mol_type = other DNA
gggtcgcagaaagagagccc

SEQ ID NO: 14237 - DNA, 20 bp, synthetic construct
  misc_feature 1..20: note = chemically synthesized
  source 1..20: mol_type = other DNA
ggtcgcagaaagagagcccg

SEQ ID NO: 14238 - DNA, 20 bp, synthetic construct
  misc_feature 1..20: note = chemically synthesized
  source 1..20: mol_type = other DNA
gaaagagagcccgaggaata

SEQ ID NO: 14239 - DNA, 20 bp, synthetic construct
  misc_feature 1..20: note = chemically synthesized
  source 1..20: mol_type = other DNA
gagcccgaggaataaagaac

SEQ ID NO: 14240 - DNA, 20 bp, synthetic construct
  misc_feature 1..20: note = chemically synthesized
  source 1..20: mol_type = other DNA
agcccgaggaataaagaacg

SEQ ID NO: 14241 - DNA, 20 bp, synthetic construct
  misc_feature 1..20: note = chemically synthesized
  source 1..20: mol_type = other DNA
cccgaggaataaagaacgag

SEQ ID NO: 14242 - DNA, 20 bp, synthetic construct
  misc_feature 1..20: note = chemically synthesized
  source 1..20: mol_type = other DNA
aggaataaagaacgaggagc

SEQ ID NO: 14243 - DNA, 20 bp, synthetic construct
  misc_feature 1..20: note = chemically synthesized
  source 1..20: mol_type = other DNA
gaataaagaacgaggagcca

SEQ ID NO: 14244 - DNA, 20 bp, synthetic construct
  misc_feature 1..20: note = chemically synthesized
  source 1..20: mol_type = other DNA
aagaacgaggagccagagtc

SEQ ID NO: 14245 - DNA, 20 bp, synthetic construct
  misc_feature 1..20: note = chemically synthesized
  source 1..20: mol_type = other DNA
aggagccagagtctggcccc

SEQ ID NO: 14246 - DNA, 20 bp, synthetic construct
  misc_feature 1..20: note = chemically synthesized
  source 1..20: mol_type = other DNA
gagccagagtctggcccccg

SEQ ID NO: 14247 - DNA, 20 bp, synthetic construct
  misc_feature 1..20: note = chemically synthesized
  source 1..20: mol_type = other DNA
agccagagtctggcccccgg

SEQ ID NO: 14248 - DNA, 20 bp, synthetic construct
  misc_feature 1..20: note = chemically synthesized
  source 1..20: mol_type = other DNA
gccagagtctggcccccgga

SEQ ID NO: 14249 - DNA, 20 bp, synthetic construct
  misc_feature 1..20: note = chemically synthesized
  source 1..20: mol_type = other DNA
ccagagtctggcccccggag

SEQ ID NO: 14250 - DNA, 20 bp, synthetic construct
  misc_feature 1..20: note = chemically synthesized
  source 1..20: mol_type = other DNA
agagtctggcccccggaggg

SEQ ID NO: 14251 - DNA, 20 bp, synthetic construct
  misc_feature 1..20: note = chemically synthesized
  source 1..20: mol_type = other DNA
tggcccccggaggggagcgc

SEQ ID NO: 14252 - DNA, 20 bp, synthetic construct
  misc_feature 1..20: note = chemically synthesized
  source 1..20: mol_type = other DNA
ggcccccggaggggagcgcc

SEQ ID NO: 14253 - DNA, 20 bp, synthetic construct
  misc_feature 1..20: note = chemically synthesized
  source 1..20: mol_type = other DNA
gcccccggaggggagcgccg

SEQ ID NO: 14254 - DNA, 20 bp, synthetic construct
  misc_feature 1..20: note = chemically synthesized
  source 1..20: mol_type = other DNA
cccccggaggggagcgccgg

SEQ ID NO: 14255 - DNA, 20 bp, synthetic construct
  misc_feature 1..20: note = chemically synthesized
  source 1..20: mol_type = other DNA
ggaggggagcgccgggggcc

SEQ ID NO: 14256 - DNA, 20 bp, synthetic construct
  misc_feature 1..20: note = chemically synthesized
  source 1..20: mol_type = other DNA
gaggggagcgccgggggcct

SEQ ID NO: 14257 - DNA, 20 bp, synthetic construct
  misc_feature 1..20: note = chemically synthesized
  source 1..20: mol_type = other DNA
ggagcgccgggggcctgggc

SEQ ID NO: 14258 - DNA, 20 bp, synthetic construct
  misc_feature 1..20: note = chemically synthesized
  source 1..20: mol_type = other DNA
agcgccgggggcctgggcaa

SEQ ID NO: 14259 - DNA, 20 bp, synthetic construct
  misc_feature 1..20: note = chemically synthesized
  source 1..20: mol_type = other DNA
cgccgggggcctgggcaaga

SEQ ID NO: 14260 - DNA, 20 bp, synthetic construct
  misc_feature 1..20: note = chemically synthesized
  source 1..20: mol_type = other DNA
gccgggggcctgggcaagag

SEQ ID NO: 14261 - DNA, 20 bp, synthetic construct
  misc_feature 1..20: note = chemically synthesized
  source 1..20: mol_type = other DNA
gcctgggcaagagaggcacc

SEQ ID NO: 14262 - DNA, 20 bp, synthetic construct
  misc_feature 1..20: note = chemically synthesized
  source 1..20: mol_type = other DNA
cctgggcaagagaggcaccg

SEQ ID NO: 14263 - DNA, 20 bp, synthetic construct
  misc_feature 1..20: note = chemically synthesized
  source 1..20: mol_type = other DNA
accgaggcgtccacctctct

SEQ ID NO: 14264 - DNA, 20 bp, synthetic construct
  misc_feature 1..20: note = chemically synthesized
  source 1..20: mol_type = other DNA
cgaggcgtccacctctctga

SEQ ID NO: 14265 - DNA, 20 bp, synthetic construct
  misc_feature 1..20: note = chemically synthesized
  source 1..20: mol_type = other DNA
gaggcgtccacctctctgag

SEQ ID NO: 14266 - DNA, 20 bp, synthetic construct
  misc_feature 1..20: note = chemically synthesized
  source 1..20: mol_type = other DNA
gtccacctctctgagaggcc

SEQ ID NO: 14267 - DNA, 20 bp, synthetic construct
  misc_feature 1..20: note = chemically synthesized
  source 1..20: mol_type = other DNA
tccacctctctgagaggccg

SEQ ID NO: 14268 - DNA, 20 bp, synthetic construct
  misc_feature 1..20: note = chemically synthesized
  source 1..20: mol_type = other DNA
tctctgagaggccgaggaca

SEQ ID NO: 14269 - DNA, 20 bp, synthetic construct
  misc_feature 1..20: note = chemically synthesized
  source 1..20: mol_type = other DNA
gagaggccgaggacaaagcg

SEQ ID NO: 14270 - DNA, 20 bp, synthetic construct
  misc_feature 1..20: note = chemically synthesized
  source 1..20: mol_type = other DNA
agaggccgaggacaaagcgc

SEQ ID NO: 14271 - DNA, 20 bp, synthetic construct
  misc_feature 1..20: note = chemically synthesized
  source 1..20: mol_type = other DNA
ggccgaggacaaagcgcggg

SEQ ID NO: 14272 - DNA, 20 bp, synthetic construct
  misc_feature 1..20: note = chemically synthesized
  source 1..20: mol_type = other DNA
ggacaaagcgcgggcagtcc

SEQ ID NO: 14273 - DNA, 20 bp, synthetic construct
  misc_feature 1..20: note = chemically synthesized
  source 1..20: mol_type = other DNA
gacaaagcgcgggcagtccc

SEQ ID NO: 14274 - DNA, 20 bp, synthetic construct
  misc_feature 1..20: note = chemically synthesized
  source 1..20: mol_type = other DNA
caaagcgcgggcagtcccgg

SEQ ID NO: 14275 - DNA, 20 bp, synthetic construct
  misc_feature 1..20: note = chemically synthesized
  source 1..20: mol_type = other DNA
gcgggcagtcccgggagtcc

SEQ ID NO: 14276 - DNA, 20 bp, synthetic construct
  misc_feature 1..20: note = chemically synthesized
  source 1..20: mol_type = other DNA
gtcccgggagtcccagtccc

SEQ ID NO: 14277 - DNA, 20 bp, synthetic construct
  misc_feature 1..20: note = chemically synthesized
  source 1..20: mol_type = other DNA
tcccgggagtcccagtccct

SEQ ID NO: 14278 - DNA, 20 bp, synthetic construct
  misc_feature 1..20: note = chemically synthesized
  source 1..20: mol_type = other DNA
agtccctgggaatgtgctca

SEQ ID NO: 14279 - DNA, 20 bp, synthetic construct
  misc_feature 1..20: note = chemically synthesized
  source 1..20: mol_type = other DNA
ggaatgtgctcacggcgccg

SEQ ID NO: 14280 - DNA, 20 bp, synthetic construct
  misc_feature 1..20: note = chemically synthesized
  source 1..20: mol_type = other DNA
gaatgtgctcacggcgccgc

SEQ ID NO: 14281 - DNA, 20 bp, synthetic construct
  misc_feature 1..20: note = chemically synthesized
  source 1..20: mol_type = other DNA
atgtgctcacggcgccgcgg

SEQ ID NO: 14282 - DNA, 20 bp, synthetic construct
  misc_feature 1..20: note = chemically synthesized
  source 1..20: mol_type = other DNA
tgtgctcacggcgccgcggg

SEQ ID NO: 14283 - DNA, 20 bp, synthetic construct
  misc_feature 1..20: note = chemically synthesized
  source 1..20: mol_type = other DNA
cggcgccgcgggaggtcccc

SEQ ID NO: 14284 - DNA, 20 bp, synthetic construct
  misc_feature 1..20: note = chemically synthesized
  source 1..20: mol_type = other DNA
gccgcgggaggtccccgagc

SEQ ID NO: 14285 - DNA, 20 bp, synthetic construct
  misc_feature 1..20: note = chemically synthesized
  source 1..20: mol_type = other DNA
ccgcgggaggtccccgagcc

SEQ ID NO: 14286 - DNA, 20 bp, synthetic construct
  misc_feature 1..20: note = chemically synthesized
  source 1..20: mol_type = other DNA
aggtccccgagccgggtccc

SEQ ID NO: 14287 - DNA, 20 bp, synthetic construct
  misc_feature 1..20: note = chemically synthesized
  source 1..20: mol_type = other DNA
ggtccccgagccgggtccct

SEQ ID NO: 14288 - DNA, 20 bp, synthetic construct
  misc_feature 1..20: note = chemically synthesized
  source 1..20: mol_type = other DNA
tccccgagccgggtccctgg

SEQ ID NO: 14289 - DNA, 20 bp, synthetic construct
  misc_feature 1..20: note = chemically synthesized
  source 1..20: mol_type = other DNA
ccccgagccgggtccctggg

SEQ ID NO: 14290 - DNA, 20 bp, synthetic construct
  misc_feature 1..20: note = chemically synthesized
  source 1..20: mol_type = other DNA
cccgagccgggtccctggga

SEQ ID NO: 14291 - DNA, 20 bp, synthetic construct
  misc_feature 1..20: note = chemically synthesized
  source 1..20: mol_type = other DNA
ggacacaccccctcccactc

SEQ ID NO: 14292 - DNA, 20 bp, synthetic construct
  misc_feature 1..20: note = chemically synthesized
  source 1..20: mol_type = other DNA
acacaccccctcccactcca

SEQ ID NO: 14293 - DNA, 20 bp, synthetic construct
  misc_feature 1..20: note = chemically synthesized
  source 1..20: mol_type = other DNA
ccactccagagcaactgcaa

SEQ ID NO: 14294 - DNA, 20 bp, synthetic construct
  misc_feature 1..20: note = chemically synthesized
  source 1..20: mol_type = other DNA
ccagagcaactgcaaaagca

SEQ ID NO: 14295 - DNA, 20 bp, synthetic construct
  misc_feature 1..20: note = chemically synthesized
  source 1..20: mol_type = other DNA
agagcaactgcaaaagcaca

SEQ ID NO: 14296 - DNA, 20 bp, synthetic construct
  misc_feature 1..20: note = chemically synthesized
  source 1..20: mol_type = other DNA
gagcaactgcaaaagcacag

SEQ ID NO: 14297 - DNA, 20 bp, synthetic construct
  misc_feature 1..20: note = chemically synthesized
  source 1..20: mol_type = other DNA
agcaactgcaaaagcacaga

SEQ ID NO: 14298 - DNA, 20 bp, synthetic construct
  misc_feature 1..20: note = chemically synthesized
  source 1..20: mol_type = other DNA
actgcaaaagcacagaggga

SEQ ID NO: 14299 - DNA, 20 bp, synthetic construct
  misc_feature 1..20: note = chemically synthesized
  source 1..20: mol_type = other DNA
ctgcaaaagcacagagggat

SEQ ID NO: 14300 - DNA, 20 bp, synthetic construct
  misc_feature 1..20: note = chemically synthesized
  source 1..20: mol_type = other DNA
caaaagcacagagggatggg

SEQ ID NO: 14301 - DNA, 20 bp, synthetic construct
  misc_feature 1..20: note = chemically synthesized
  source 1..20: mol_type = other DNA
tgggaagaaaatgtttctta

SEQ ID NO: 14302 - DNA, 20 bp, synthetic construct
  misc_feature 1..20: note = chemically synthesized
  source 1..20: mol_type = other DNA
gggaagaaaatgtttcttac

SEQ ID NO: 14303 - DNA, 20 bp, synthetic construct
  misc_feature 1..20: note = chemically synthesized
  source 1..20: mol_type = other DNA
aagaaaatgtttcttacggg

SEQ ID NO: 14304 - DNA, 20 bp, synthetic construct
  misc_feature 1..20: note = chemically synthesized
  source 1..20: mol_type = other DNA
gaaaatgtttcttacgggca

SEQ ID NO: 14305 - DNA, 20 bp, synthetic construct
  misc_feature 1..20: note = chemically synthesized
  source 1..20: mol_type = other DNA
actgttcctgtgctgttacc

SEQ ID NO: 14306 - DNA, 20 bp, synthetic construct
  misc_feature 1..20: note = chemically synthesized
  source 1..20: mol_type = other DNA
ctgttcctgtgctgttaccc

SEQ ID NO: 14307 - DNA, 20 bp, synthetic construct
  misc_feature 1..20: note = chemically synthesized
  source 1..20: mol_type = other DNA
tgttcctgtgctgttaccca

SEQ ID NO: 14308 - DNA, 20 bp, synthetic construct
  misc_feature 1..20: note = chemically synthesized
  source 1..20: mol_type = other DNA
cctgtgctgttacccaggga

SEQ ID NO: 14309 - DNA, 20 bp, synthetic construct
  misc_feature 1..20: note = chemically synthesized
  source 1..20: mol_type = other DNA
tgtgctgttacccagggaaa

SEQ ID NO: 14310 - DNA, 20 bp, synthetic construct
  misc_feature 1..20: note = chemically synthesized
  source 1..20: mol_type = other DNA
ttacccagggaaagagaaaa

SEQ ID NO: 14311 - DNA, 20 bp, synthetic construct
  misc_feature 1..20: note = chemically synthesized
  source 1..20: mol_type = other DNA
tacccagggaaagagaaaat

SEQ ID NO: 14312 - DNA, 20 bp, synthetic construct
  misc_feature 1..20: note = chemically synthesized
  source 1..20: mol_type = other DNA
agggaaagagaaaatgggaa

SEQ ID NO: 14313 - DNA, 20 bp, synthetic construct
  misc_feature 1..20: note = chemically synthesized
  source 1..20: mol_type = other DNA
ggaaagagaaaatgggaatg

SEQ ID NO: 14314 - DNA, 20 bp, synthetic construct
  misc_feature 1..20: note = chemically synthesized
  source 1..20: mol_type = other DNA
aaagagaaaatgggaatgga

SEQ ID NO: 14315 - DNA, 20 bp, synthetic construct
  misc_feature 1..20: note = chemically synthesized
  source 1..20: mol_type = other DNA
agagaaaatgggaatggaga

SEQ ID NO: 14316 - DNA, 20 bp, synthetic construct
  misc_feature 1..20: note = chemically synthesized
  source 1..20: mol_type = other DNA
agaaaatgggaatggagaga

SEQ ID NO: 14317 - DNA, 20 bp, synthetic construct
  misc_feature 1..20: note = chemically synthesized
  source 1..20: mol_type = other DNA
tgggaatggagagagagcga

SEQ ID NO: 14318 - DNA, 20 bp, synthetic construct
  misc_feature 1..20: note = chemically synthesized
  source 1..20: mol_type = other DNA
gggaatggagagagagcgac

SEQ ID NO: 14319 - DNA, 20 bp, synthetic construct
  misc_feature 1..20: note = chemically synthesized
  source 1..20: mol_type = other DNA
gagagagagcgacaggctcg

SEQ ID NO: 14320 - DNA, 20 bp, synthetic construct
  misc_feature 1..20: note = chemically synthesized
  source 1..20: mol_type = other DNA
agagagagcgacaggctcgc

SEQ ID NO: 14321 - DNA, 20 bp, synthetic construct
  misc_feature 1..20: note = chemically synthesized
  source 1..20: mol_type = other DNA
agagagcgacaggctcgcag

SEQ ID NO: 14322 - DNA, 20 bp, synthetic construct
  misc_feature 1..20: note = chemically synthesized
  source 1..20: mol_type = other DNA
gagcgacaggctcgcaggag

SEQ ID NO: 14323 - DNA, 20 bp, synthetic construct
  misc_feature 1..20: note = chemically synthesized
  source 1..20: mol_type = other DNA
cgacaggctcgcaggagcag

SEQ ID NO: 14324 - DNA, 20 bp, synthetic construct
  misc_feature 1..20: note = chemically synthesized
  source 1..20: mol_type = other DNA
gacaggctcgcaggagcagc

SEQ ID NO: 14325 - DNA, 20 bp, synthetic construct
  misc_feature 1..20: note = chemically synthesized
  source 1..20: mol_type = other DNA
acaggctcgcaggagcagcg

SEQ ID NO: 14326 - DNA, 20 bp, synthetic construct
  misc_feature 1..20: note = chemically synthesized
  source 1..20: mol_type = other DNA
aggctcgcaggagcagcggg

SEQ ID NO: 14327 - DNA, 20 bp, synthetic construct
  misc_feature 1..20: note = chemically synthesized
  source 1..20: mol_type = other DNA
caggagcagcggggagacca

SEQ ID NO: 14328 - DNA, 20 bp, synthetic construct
  misc_feature 1..20: note = chemically synthesized
  source 1..20: mol_type = other DNA
gagcagcggggagaccacgg

SEQ ID NO: 14329 - DNA, 20 bp, synthetic construct
  misc_feature 1..20: note = chemically synthesized
  source 1..20: mol_type = other DNA
agcggggagaccacggtggt

SEQ ID NO: 14330 - DNA, 20 bp, synthetic construct
  misc_feature 1..20: note = chemically synthesized
  source 1..20: mol_type = other DNA
cggtggtgagatgaccgcct

SEQ ID NO: 14331 - DNA, 20 bp, synthetic construct
  misc_feature 1..20: note = chemically synthesized
  source 1..20: mol_type = other DNA
ggtggtgagatgaccgcctc

SEQ ID NO: 14332 - DNA, 20 bp, synthetic construct
  misc_feature 1..20: note = chemically synthesized
  source 1..20: mol_type = other DNA
cgggtcaccgccgcgctccc

SEQ ID NO: 14333 - DNA, 20 bp, synthetic construct
  misc_feature 1..20: note = chemically synthesized
  source 1..20: mol_type = other DNA
gggtcaccgccgcgctcccc

SEQ ID NO: 14334 - DNA, 20 bp, synthetic construct
  misc_feature 1..20: note = chemically synthesized
  source 1..20: mol_type = other DNA
ccgcgctccccaggcgccgc

SEQ ID NO: 14335 - DNA, 20 bp, synthetic construct
  misc_feature 1..20: note = chemically synthesized
  source 1..20: mol_type = other DNA
ctccccaggcgccgccggcc

SEQ ID NO: 14336 - DNA, 20 bp, synthetic construct
  misc_feature 1..20: note = chemically synthesized
  source 1..20: mol_type = other DNA
tccccaggcgccgccggcca

SEQ ID NO: 14337 - DNA, 20 bp, synthetic construct
  misc_feature 1..20: note = chemically synthesized
  source 1..20: mol_type = other DNA
cgccggccaaggcgcacacc

SEQ ID NO: 14338 - DNA, 20 bp, synthetic construct
  misc_feature 1..20: note = chemically synthesized
  source 1..20: mol_type = other DNA
gccggccaaggcgcacaccc

SEQ ID NO: 14339 - DNA, 20 bp, synthetic construct
  misc_feature 1..20: note = chemically synthesized
  source 1..20: mol_type = other DNA
cggccaaggcgcacacccag

SEQ ID NO: 14340 - DNA, 20 bp, synthetic construct
  misc_feature 1..20: note = chemically synthesized
  source 1..20: mol_type = other DNA
caaggcgcacacccaggagc

SEQ ID NO: 14341 - DNA, 20 bp, synthetic construct
  misc_feature 1..20: note = chemically synthesized
  source 1..20: mol_type = other DNA
ggcgcacacccaggagccag

SEQ ID NO: 14342 - DNA, 20 bp, synthetic construct
  misc_feature 1..20: note = chemically synthesized
  source 1..20: mol_type = other DNA
agccccctctcgcctttctg

SEQ ID NO: 14343 - DNA, 20 bp, synthetic construct
  misc_feature 1..20: note = chemically synthesized
  source 1..20: mol_type = other DNA
gcctttctgcagacgttccc

SEQ ID NO: 14344 - DNA, 20 bp, synthetic construct
  misc_feature 1..20: note = chemically synthesized
  source 1..20: mol_type = other DNA
tgcagacgttccctggaaat

SEQ ID NO: 14345 - DNA, 20 bp, synthetic construct
  misc_feature 1..20: note = chemically synthesized
  source 1..20: mol_type = other DNA
gcagacgttccctggaaatt

SEQ ID NO: 14346 - DNA, 20 bp, synthetic construct
  misc_feature 1..20: note = chemically synthesized
  source 1..20: mol_type = other DNA
cagacgttccctggaaatta

SEQ ID NO: 14347 - DNA, 20 bp, synthetic construct
  misc_feature 1..20: note = chemically synthesized
  source 1..20: mol_type = other DNA
acgttccctggaaattaggg

SEQ ID NO: 14348 - DNA, 20 bp, synthetic construct
  misc_feature 1..20: note = chemically synthesized
  source 1..20: mol_type = other DNA
ggaaattagggaagacctgt

SEQ ID NO: 14349 - DNA, 20 bp, synthetic construct
  misc_feature 1..20: note = chemically synthesized
  source 1..20: mol_type = other DNA
cgcgtgctgccgctgtcaaa

SEQ ID NO: 14350 - DNA, 20 bp, synthetic construct
  misc_feature 1..20: note = chemically synthesized
  source 1..20: mol_type = other DNA
gtgctgccgctgtcaaaaag

SEQ ID NO: 14351 - DNA, 20 bp, synthetic construct
  misc_feature 1..20: note = chemically synthesized
  source 1..20: mol_type = other DNA
tgctgccgctgtcaaaaagc

SEQ ID NO: 14352 - DNA, 20 bp, synthetic construct
  misc_feature 1..20: note = chemically synthesized
  source 1..20: mol_type = other DNA
tcaaaaagcgggcttcactc

SEQ ID NO: 14353 - DNA, 20 bp, synthetic construct
  misc_feature 1..20: note = chemically synthesized
  source 1..20: mol_type = other DNA
aagcgggcttcactctggcg

SEQ ID NO: 14354 - DNA, 20 bp, synthetic construct
  misc_feature 1..20: note = chemically synthesized
  source 1..20: mol_type = other DNA
agcgggcttcactctggcgt

SEQ ID NO: 14355 - DNA, 20 bp, synthetic construct
  misc_feature 1..20: note = chemically synthesized
  source 1..20: mol_type = other DNA
actctggcgtgggatacttt

SEQ ID NO: 14356 - DNA, 20 bp, synthetic construct
  misc_feature 1..20: note = chemically synthesized
  source 1..20: mol_type = other DNA
tcagttttacgtaaaatgta

SEQ ID NO: 14357 - DNA, 20 bp, synthetic construct
  misc_feature 1..20: note = chemically synthesized
  source 1..20: mol_type = other DNA
ttacgtaaaatgtacagcaa

SEQ ID NO: 14358 - DNA, 20 bp, synthetic construct
  misc_feature 1..20: note = chemically synthesized
  source 1..20: mol_type = other DNA
gcaacagcaccccctgcgat

SEQ ID NO: 14359 - DNA, 20 bp, synthetic construct
  misc_feature 1..20: note = chemically synthesized
  source 1..20: mol_type = other DNA
cagcaccccctgcgattgga

SEQ ID NO: 14360 - DNA, 20 bp, synthetic construct
  misc_feature 1..20: note = chemically synthesized
  source 1..20: mol_type = other DNA
ctgcgattggaaagtttatt

SEQ ID NO: 14361 - DNA, 20 bp, synthetic construct
  misc_feature 1..20: note = chemically synthesized
  source 1..20: mol_type = other DNA
tattcagaaacgtgcctgta

SEQ ID NO: 14362 - DNA, 20 bp, synthetic construct
  misc_feature 1..20: note = chemically synthesized
  source 1..20: mol_type = other DNA
aacgtgcctgtaaagtcccc

SEQ ID NO: 14363 - DNA, 20 bp, synthetic construct
  misc_feature 1..20: note = chemically synthesized
  source 1..20: mol_type = other DNA
ccctggcgcctcccgcctcc

SEQ ID NO: 14364 - DNA, 20 bp, synthetic construct
  misc_feature 1..20: note = chemically synthesized
  source 1..20: mol_type = other DNA
ctcccagcctccctgcctgc

SEQ ID NO: 14365 - DNA, 20 bp, synthetic construct
  misc_feature 1..20: note = chemically synthesized
  source 1..20: mol_type = other DNA
tgcctgccagcaccactctg

SEQ ID NO: 14366 - DNA, 20 bp, synthetic construct
  misc_feature 1..20: note = chemically synthesized
  source 1..20: mol_type = other DNA
gcagccgccgccgccgccgc

SEQ ID NO: 14367 - DNA, 20 bp, synthetic construct
  misc_feature 1..20: note = chemically synthesized
  source 1..20: mol_type = other DNA
cagccgccgccgccgccgcc

SEQ ID NO: 14368 - DNA, 20 bp, synthetic construct
  misc_feature 1..20: note = chemically synthesized
  source 1..20: mol_type = other DNA
agccgccgccgccgccgccg

SEQ ID NO: 14369 - DNA, 20 bp, synthetic construct
  misc_feature 1..20: note = chemically synthesized
  source 1..20: mol_type = other DNA
ccgccgccgccgccgccggg

SEQ ID NO: 14370 - DNA, 20 bp, synthetic construct
  misc_feature 1..20: note = chemically synthesized
  source 1..20: mol_type = other DNA
cgccgccgccggggagatcg

SEQ ID NO: 14371 - DNA, 20 bp, synthetic construct
  misc_feature 1..20: note = chemically synthesized
  source 1..20: mol_type = other DNA
tcgcagtccgattccaaatc

SEQ ID NO: 14372 - DNA, 20 bp, synthetic construct
  misc_feature 1..20: note = chemically synthesized
  source 1..20: mol_type = other DNA
cagtccgattccaaatctgg

SEQ ID NO: 14373 - DNA, 20 bp, synthetic construct
  misc_feature 1..20: note = chemically synthesized
  source 1..20: mol_type = other DNA
agtccgattccaaatctgga

SEQ ID NO: 14374 - DNA, 20 bp, synthetic construct
  misc_feature 1..20: note = chemically synthesized
  source 1..20: mol_type = other DNA
tccgattccaaatctggaag

SEQ ID NO: 14375 - DNA, 20 bp, synthetic construct
  misc_feature 1..20: note = chemically synthesized
  source 1..20: mol_type = other DNA
attccaaatctggaaggagt

SEQ ID NO: 14376 - DNA, 20 bp, synthetic construct
  misc_feature 1..20: note = chemically synthesized
  source 1..20: mol_type = other DNA
ttccaaatctggaaggagtt

SEQ ID NO: 14377 - DNA, 20 bp, synthetic construct
  misc_feature 1..20: note = chemically synthesized
  source 1..20: mol_type = other DNA
tccaaatctggaaggagttg

SEQ ID NO: 14378 - DNA, 20 bp, synthetic construct
  misc_feature 1..20: note = chemically synthesized
  source 1..20: mol_type = other DNA
ccaaatctggaaggagttgg

SEQ ID NO: 14379 - DNA, 20 bp, synthetic construct
  misc_feature 1..20: note = chemically synthesized
  source 1..20: mol_type = other DNA
caaatctggaaggagttggg

SEQ ID NO: 14380 - DNA, 20 bp, synthetic construct
  misc_feature 1..20: note = chemically synthesized
  source 1..20: mol_type = other DNA
aatctggaaggagttggggg

SEQ ID NO: 14381 - DNA, 20 bp, synthetic construct
  misc_feature 1..20: note = chemically synthesized
  source 1..20: mol_type = other DNA
tctggaaggagttgggggga

SEQ ID NO: 14382 - DNA, 20 bp, synthetic construct
  misc_feature 1..20: note = chemically synthesized
  source 1..20: mol_type = other DNA
ctggaaggagttggggggag

SEQ ID NO: 14383 - DNA, 20 bp, synthetic construct
  misc_feature 1..20: note = chemically synthesized
  source 1..20: mol_type = other DNA
ggaaggagttggggggagag

SEQ ID NO: 14384 - DNA, 20 bp, synthetic construct
  misc_feature 1..20: note = chemically synthesized
  source 1..20: mol_type = other DNA
gagttggggggagaggagaa

SEQ ID NO: 14385 - DNA, 20 bp, synthetic construct
  misc_feature 1..20: note = chemically synthesized
  source 1..20: mol_type = other DNA
gggggagaggagaatggact

SEQ ID NO: 14386 - DNA, 20 bp, synthetic construct
  misc_feature 1..20: note = chemically synthesized
  source 1..20: mol_type = other DNA
ggggagaggagaatggactc

SEQ ID NO: 14387 - DNA, 20 bp, synthetic construct
  misc_feature 1..20: note = chemically synthesized
  source 1..20: mol_type = other DNA
aggagaatggactcaggtcc

SEQ ID NO: 14388 - DNA, 20 bp, synthetic construct
  misc_feature 1..20: note = chemically synthesized
  source 1..20: mol_type = other DNA
ggagaatggactcaggtcca

SEQ ID NO: 14389 - DNA, 20 bp, synthetic construct
  misc_feature 1..20: note = chemically synthesized
  source 1..20: mol_type = other DNA
gagaatggactcaggtccaa

SEQ ID NO: 14390 - DNA, 20 bp, synthetic construct
  misc_feature 1..20: note = chemically synthesized
  source 1..20: mol_type = other DNA
gaatggactcaggtccaagg

SEQ ID NO: 14391 - DNA, 20 bp, synthetic construct
  misc_feature 1..20: note = chemically synthesized
  source 1..20: mol_type = other DNA
aatggactcaggtccaaggg

SEQ ID NO: 14392 - DNA, 20 bp, synthetic construct
  misc_feature 1..20: note = chemically synthesized
  source 1..20: mol_type = other DNA
actcaggtccaagggaggtg

SEQ ID NO: 14393 - DNA, 20 bp, synthetic construct
  misc_feature 1..20: note = chemically synthesized
  source 1..20: mol_type = other DNA
tcaggtccaagggaggtgcg

SEQ ID NO: 14394 - DNA, 20 bp, synthetic construct
  misc_feature 1..20: note = chemically synthesized
  source 1..20: mol_type = other DNA
caggtccaagggaggtgcgg

SEQ ID NO: 14395 - DNA, 20 bp, synthetic construct
  misc_feature 1..20: note = chemically synthesized
  source 1..20: mol_type = other DNA
aggtccaagggaggtgcgga

SEQ ID NO: 14396 - DNA, 20 bp, synthetic construct
  misc_feature 1..20: note = chemically synthesized
  source 1..20: mol_type = other DNA
caagggaggtgcggagggtg

SEQ ID NO: 14397 - DNA, 20 bp, synthetic construct
  misc_feature 1..20: note = chemically synthesized
  source 1..20: mol_type = other DNA
aagggaggtgcggagggtgc

SEQ ID NO: 14398 - DNA, 20 bp, synthetic construct
  misc_feature 1..20: note = chemically synthesized
  source 1..20: mol_type = other DNA
agggaggtgcggagggtgca

SEQ ID NO: 14399 - DNA, 20 bp, synthetic construct
  misc_feature 1..20: note = chemically synthesized
  source 1..20: mol_type = other DNA
gaggtgcggagggtgcaggg

SEQ ID NO: 14400 - DNA, 20 bp, synthetic construct
  misc_feature 1..20: note = chemically synthesized
  source 1..20: mol_type = other DNA
ggtgcggagggtgcagggtg

SEQ ID NO: 14401 - DNA, 20 bp, synthetic construct
  misc_feature 1..20: note = chemically synthesized
  source 1..20: mol_type = other DNA
cggagggtgcagggtggaga

SEQ ID NO: 14402 - DNA, 20 bp, synthetic construct
  misc_feature 1..20: note = chemically synthesized
  source 1..20: mol_type = other DNA
ggagggtgcagggtggagac

SEQ ID NO: 14403 - DNA, 20 bp, synthetic construct
  misc_feature 1..20: note = chemically synthesized
  source 1..20: mol_type = other DNA
agggtggagacgggtcgcca

SEQ ID NO: 14404 - DNA, 20 bp, synthetic construct
  misc_feature 1..20: note = chemically synthesized
  source 1..20: mol_type = other DNA
gacgggtcgccatggcccgc

SEQ ID NO: 14405 - DNA, 20 bp, synthetic construct
  misc_feature 1..20: note = chemically synthesized
  source 1..20: mol_type = other DNA
gccatggcccgcgagaccct

SEQ ID NO: 14406 - DNA, 20 bp, synthetic construct
  misc_feature 1..20: note = chemically synthesized
  source 1..20: mol_type = other DNA
gcccgcgagaccctgagctg

SEQ ID NO: 14407 - DNA, 20 bp, synthetic construct
  misc_feature 1..20: note = chemically synthesized
  source 1..20: mol_type = other DNA
cccgcgagaccctgagctgc

SEQ ID NO: 14408 - DNA, 20 bp, synthetic construct
  misc_feature 1..20: note = chemically synthesized
  source 1..20: mol_type = other DNA
gcgagaccctgagctgcagg

SEQ ID NO: 14409 - DNA, 20 bp, synthetic construct
  misc_feature 1..20: note = chemically synthesized
  source 1..20: mol_type = other DNA
agctgcaggtggatatgtgt

SEQ ID NO: 14410 - DNA, 20 bp, synthetic construct
  misc_feature 1..20: note = chemically synthesized
  source 1..20: mol_type = other DNA
gatatgtgtgagtgtgtctg

SEQ ID NO: 14411 - DNA, 20 bp, synthetic construct
  misc_feature 1..20: note = chemically synthesized
  source 1..20: mol_type = other DNA
tatgtgtgagtgtgtctgca

SEQ ID NO: 14412 - DNA, 20 bp, synthetic construct
  misc_feature 1..20: note = chemically synthesized
  source 1..20: mol_type = other DNA
tgtgagtgtgtctgcagagc

SEQ ID NO: 14413 - DNA, 20 bp, synthetic construct
  misc_feature 1..20: note = chemically synthesized
  source 1..20: mol_type = other DNA
gtgagtgtgtctgcagagcg

SEQ ID NO: 14414 - DNA, 20 bp, synthetic construct
  misc_feature 1..20: note = chemically synthesized
  source 1..20: mol_type = other DNA
gagtgtgtctgcagagcgag

SEQ ID NO: 14415 - DNA, 20 bp, synthetic construct
  misc_feature 1..20: note = chemically synthesized
  source 1..20: mol_type = other DNA
gagccctccttccctctcct

SEQ ID NO: 14416 - DNA, 20 bp, synthetic construct
  misc_feature 1..20: note = chemically synthesized
  source 1..20: mol_type = other DNA
gccctccttccctctcctcg

SEQ ID NO: 14417 - DNA, 20 bp, synthetic construct
  misc_feature 1..20: note = chemically synthesized
  source 1..20: mol_type = other DNA
ctccttccctctcctcggag

SEQ ID NO: 14418 - DNA, 20 bp, synthetic construct
  misc_feature 1..20: note = chemically synthesized
  source 1..20: mol_type = other DNA
cgtcttctcatccccctctt

SEQ ID NO: 14419 - DNA, 20 bp, synthetic construct
  misc_feature 1..20: note = chemically synthesized
  source 1..20: mol_type = other DNA
tcatccccctcttcagtcta

SEQ ID NO: 14420 - DNA, 20 bp, synthetic construct
  misc_feature 1..20: note = chemically synthesized
  source 1..20: mol_type = other DNA
catccccctcttcagtctaa

SEQ ID NO: 14421 - DNA, 20 bp, synthetic construct
  misc_feature 1..20: note = chemically synthesized
  source 1..20: mol_type = other DNA
atccccctcttcagtctaaa

SEQ ID NO: 14422 - DNA, 20 bp, synthetic construct
  misc_feature 1..20: note = chemically synthesized
  source 1..20: mol_type = other DNA
cttccgtaaactcacccacc

SEQ ID NO: 14423 - DNA, 20 bp, synthetic construct
  misc_feature 1..20: note = chemically synthesized
  source 1..20: mol_type = other DNA
ccgtaaactcacccacccgg

SEQ ID NO: 14424 - DNA, 20 bp, synthetic construct
  misc_feature 1..20: note = chemically synthesized
  source 1..20: mol_type = other DNA
cgtaaactcacccacccggt

SEQ ID NO: 14425 - DNA, 20 bp, synthetic construct
  misc_feature 1..20: note = chemically synthesized
  source 1..20: mol_type = other DNA
gtaaactcacccacccggtg

SEQ ID NO: 14426 - DNA, 20 bp, synthetic construct
  misc_feature 1..20: note = chemically synthesized
  source 1..20: mol_type = other DNA
taaactcacccacccggtgg

SEQ ID NO: 14427 - DNA, 20 bp, synthetic construct
  misc_feature 1..20: note = chemically synthesized
  source 1..20: mol_type = other DNA
aaactcacccacccggtggg

SEQ ID NO: 14428 - DNA, 20 bp, synthetic construct
  misc_feature 1..20: note = chemically synthesized
  source 1..20: mol_type = other DNA
aactcacccacccggtgggg

SEQ ID NO: 14429 - DNA, 20 bp, synthetic construct
  misc_feature 1..20: note = chemically synthesized
  source 1..20: mol_type = other DNA
tgggggggctttattgtttt

SEQ ID NO: 14430 - DNA, 20 bp, synthetic construct
  misc_feature 1..20: note = chemically synthesized
  source 1..20: mol_type = other DNA
ggggctttattgttttaagc

SEQ ID NO: 14431 - DNA, 20 bp, synthetic construct
  misc_feature 1..20: note = chemically synthesized
  source 1..20: mol_type = other DNA
gggctttattgttttaagcg

SEQ ID NO: 14432 - DNA, 20 bp, synthetic construct
  misc_feature 1..20: note = chemically synthesized
  source 1..20: mol_type = other DNA
ggctttattgttttaagcga

SEQ ID NO: 14433 - DNA, 20 bp, synthetic construct
  misc_feature 1..20: note = chemically synthesized
  source 1..20: mol_type = other DNA
attgttttaagcgagggccc

SEQ ID NO: 14434 - DNA, 20 bp, synthetic construct
  misc_feature 1..20: note = chemically synthesized
  source 1..20: mol_type = other DNA
ttgttttaagcgagggcccc

SEQ ID NO: 14435 - DNA, 20 bp, synthetic construct
  misc_feature 1..20: note = chemically synthesized
  source 1..20: mol_type = other DNA
gcacgcgctcacccatcccg

SEQ ID NO: 14436 - DNA, 20 bp, synthetic construct
  misc_feature 1..20: note = chemically synthesized
  source 1..20: mol_type = other DNA
cacccatcccgcagccctgc

SEQ ID NO: 14437 - DNA, 20 bp, synthetic construct
  misc_feature 1..20: note = chemically synthesized
  source 1..20: mol_type = other DNA
catcccgcagccctgccggc

SEQ ID NO: 14438 - DNA, 20 bp, synthetic construct
  misc_feature 1..20: note = chemically synthesized
  source 1..20: mol_type = other DNA
cccgcagccctgccggcaag

SEQ ID NO: 14439 - DNA, 20 bp, synthetic construct
  misc_feature 1..20: note = chemically synthesized
  source 1..20: mol_type = other DNA
tgtttattcctgtttcgtct

SEQ ID NO: 14440 - DNA, 20 bp, synthetic construct
  misc_feature 1..20: note = chemically synthesized
  source 1..20: mol_type = other DNA
attcctgtttcgtcttagta

SEQ ID NO: 14441 - DNA, 20 bp, synthetic construct
  misc_feature 1..20: note = chemically synthesized
  source 1..20: mol_type = other DNA
tttcgtcttagtaaagtttc

SEQ ID NO: 14442 - DNA, 20 bp, synthetic construct
  misc_feature 1..20: note = chemically synthesized
  source 1..20: mol_type = other DNA
aagtttcaagtctactgtgt

SEQ ID NO: 14443 - DNA, 20 bp, synthetic construct
  misc_feature 1..20: note = chemically synthesized
  source 1..20: mol_type = other DNA
ctactgtgttagaaaatgac

SEQ ID NO: 14444 - DNA, 20 bp, synthetic construct
  misc_feature 1..20: note = chemically synthesized
  source 1..20: mol_type = other DNA
tagaaaatgactggcttgcc

SEQ ID NO: 14445 - DNA, 20 bp, synthetic construct
  misc_feature 1..20: note = chemically synthesized
  source 1..20: mol_type = other DNA
aatgactggcttgcctagct

SEQ ID NO: 14446 - DNA, 20 bp, synthetic construct
  misc_feature 1..20: note = chemically synthesized
  source 1..20: mol_type = other DNA
gactggcttgcctagctcgg

SEQ ID NO: 14447 - DNA, 20 bp, synthetic construct
  misc_feature 1..20: note = chemically synthesized
  source 1..20: mol_type = other DNA
ctggcttgcctagctcggcg

SEQ ID NO: 14448 - DNA, 20 bp, synthetic construct
  misc_feature 1..20: note = chemically synthesized
  source 1..20: mol_type = other DNA
tgcctagctcggcggagctt

SEQ ID NO: 14449 - DNA, 20 bp, synthetic construct
  misc_feature 1..20: note = chemically synthesized
  source 1..20: mol_type = other DNA
gcggagcttcggacccctct

SEQ ID NO: 14450 - DNA, 20 bp, synthetic construct
  misc_feature 1..20: note = chemically synthesized
  source 1..20: mol_type = other DNA
cggagcttcggacccctcta

SEQ ID NO: 14451 - DNA, 20 bp, synthetic construct
  misc_feature 1..20: note = chemically synthesized
  source 1..20: mol_type = other DNA
agcttcggacccctctaagg

SEQ ID NO: 14452 - DNA, 20 bp, synthetic construct
  misc_feature 1..20: note = chemically synthesized
  source 1..20: mol_type = other DNA
cggacccctctaaggaagaa

SEQ ID NO: 14453 - DNA, 20 bp, synthetic construct
  misc_feature 1..20: note = chemically synthesized
  source 1..20: mol_type = other DNA
ggacccctctaaggaagaaa

SEQ ID NO: 14454 - DNA, 20 bp, synthetic construct
  misc_feature 1..20: note = chemically synthesized
  source 1..20: mol_type = other DNA
acccctctaaggaagaaaag

SEQ ID NO: 14455 - DNA, 20 bp, synthetic construct
  misc_feature 1..20: note = chemically synthesized
  source 1..20: mol_type = other DNA
cccctctaaggaagaaaagg

SEQ ID NO: 14456 - DNA, 20 bp, synthetic construct
  misc_feature 1..20: note = chemically synthesized
  source 1..20: mol_type = other DNA
aggttttgatgctcaacatt

SEQ ID NO: 14457 - DNA, 20 bp, synthetic construct
  misc_feature 1..20: note = chemically synthesized
  source 1..20: mol_type = other DNA
gttttgatgctcaacattga

SEQ ID NO: 14458 - DNA, 20 bp, synthetic construct
  misc_feature 1..20: note = chemically synthesized
  source 1..20: mol_type = other DNA
tttgatgctcaacattgaga

SEQ ID NO: 14459 - DNA, 20 bp, synthetic construct
  misc_feature 1..20: note = chemically synthesized
  source 1..20: mol_type = other DNA
gctcaacattgagagagatg

SEQ ID NO: 14460 - DNA, 20 bp, synthetic construct
  misc_feature 1..20: note = chemically synthesized
  source 1..20: mol_type = other DNA
ctcaacattgagagagatgt

SEQ ID NO: 14461 - DNA, 20 bp, synthetic construct
  misc_feature 1..20: note = chemically synthesized
  source 1..20: mol_type = other DNA
gagagagatgtgggctgtac

SEQ ID NO: 14462 - DNA, 20 bp, synthetic construct
  misc_feature 1..20: note = chemically synthesized
  source 1..20: mol_type = other DNA
agagagatgtgggctgtact

SEQ ID NO: 14463 - DNA, 20 bp, synthetic construct
  misc_feature 1..20: note = chemically synthesized
  source 1..20: mol_type = other DNA
gtactgggattgtgtcaatg

SEQ ID NO: 14464 - DNA, 20 bp, synthetic construct
  misc_feature 1..20: note = chemically synthesized
  source 1..20: mol_type = other DNA
tgtttgttgttgtttccctc

SEQ ID NO: 14465 - DNA, 20 bp, synthetic construct
  misc_feature 1..20: note = chemically synthesized
  source 1..20: mol_type = other DNA
tgttgtttccctccagtttg

SEQ ID NO: 14466 - DNA, 20 bp, synthetic construct
  misc_feature 1..20: note = chemically synthesized
  source 1..20: mol_type = other DNA
gttgtttccctccagtttgt

SEQ ID NO: 14467 - DNA, 20 bp, synthetic construct
  misc_feature 1..20: note = chemically synthesized
  source 1..20: mol_type = other DNA
tgtttccctccagtttgtgg

SEQ ID NO: 14468 - DNA, 20 bp, synthetic construct
  misc_feature 1..20: note = chemically synthesized
  source 1..20: mol_type = other DNA
gtttccctccagtttgtggg

SEQ ID NO: 14469 - DNA, 20 bp, synthetic construct
  misc_feature 1..20: note = chemically synthesized
  source 1..20: mol_type = other DNA
tttccctccagtttgtggga

SEQ ID NO: 14470 - DNA, 20 bp, synthetic construct
  misc_feature 1..20: note = chemically synthesized
  source 1..20: mol_type = other DNA
tccctccagtttgtgggagg

SEQ ID NO: 14471 - DNA, 20 bp, synthetic construct
  misc_feature 1..20: note = chemically synthesized
  source 1..20: mol_type = other DNA
ggagacctcaaattctgttt

SEQ ID NO: 14472 - DNA, 20 bp, synthetic construct
  misc_feature 1..20: note = chemically synthesized
  source 1..20: mol_type = other DNA
gacctcaaattctgtttaag

SEQ ID NO: 14473 - DNA, 20 bp, synthetic construct
  misc_feature 1..20: note = chemically synthesized
  source 1..20: mol_type = other DNA
ctcaaattctgtttaagaag

SEQ ID NO: 14474 - DNA, 20 bp, synthetic construct
  misc_feature 1..20: note = chemically synthesized
  source 1..20: mol_type = other DNA
tcaaattctgtttaagaagc

SEQ ID NO: 14475 - DNA, 20 bp, synthetic construct
  misc_feature 1..20: note = chemically synthesized
  source 1..20: mol_type = other DNA
aaattctgtttaagaagcgg

SEQ ID NO: 14476 - DNA, 20 bp, synthetic construct
  misc_feature 1..20: note = chemically synthesized
  source 1..20: mol_type = other DNA
aattctgtttaagaagcggg

SEQ ID NO: 14477 - DNA, 20 bp, synthetic construct
  misc_feature 1..20: note = chemically synthesized
  source 1..20: mol_type = other DNA
taagaagcgggaggattcac

SEQ ID NO: 14478 - DNA, 20 bp, synthetic construct
  misc_feature 1..20: note = chemically synthesized
  source 1..20: mol_type = other DNA
gaagcgggaggattcactag

SEQ ID NO: 14479 - DNA, 20 bp, synthetic construct
  misc_feature 1..20: note = chemically synthesized
  source 1..20: mol_type = other DNA
gggaggattcactagaagtt

SEQ ID NO: 14480 - DNA, 20 bp, synthetic construct
  misc_feature 1..20: note = chemically synthesized
  source 1..20: mol_type = other DNA
tcactagaagttaagctctg

SEQ ID NO: 14481 - DNA, 20 bp, synthetic construct
  misc_feature 1..20: note = chemically synthesized
  source 1..20: mol_type = other DNA
caccatttccccttttcact

SEQ ID NO: 14482 - DNA, 20 bp, synthetic construct
  misc_feature 1..20: note = chemically synthesized
  source 1..20: mol_type = other DNA
ccccttttcactgagttctt

SEQ ID NO: 14483 - DNA, 20 bp, synthetic construct
  misc_feature 1..20: note = chemically synthesized
  source 1..20: mol_type = other DNA
ccttttcactgagttcttca

SEQ ID NO: 14484 - DNA, 20 bp, synthetic construct
  misc_feature 1..20: note = chemically synthesized
  source 1..20: mol_type = other DNA
tttcactgagttcttcagag

SEQ ID NO: 14485 - DNA, 20 bp, synthetic construct
  misc_feature 1..20: note = chemically synthesized
  source 1..20: mol_type = other DNA
ttcactgagttcttcagagc

SEQ ID NO: 14486 - DNA, 20 bp, synthetic construct
  misc_feature 1..20: note = chemically synthesized
  source 1..20: mol_type = other DNA
ctgagttcttcagagcaggt

SEQ ID NO: 14487 - DNA, 20 bp, synthetic construct
  misc_feature 1..20: note = chemically synthesized
  source 1..20: mol_type = other DNA
tcagcatctctattccacca

SEQ ID NO: 14488 - DNA, 20 bp, synthetic construct
  misc_feature 1..20: note = chemically synthesized
  source 1..20: mol_type = other DNA
tgctttttgtcttgttaaac

SEQ ID NO: 14489 - DNA, 20 bp, synthetic construct
  misc_feature 1..20: note = chemically synthesized
  source 1..20: mol_type = other DNA
ttgtcttgttaaaccagcct

SEQ ID NO: 14490 - DNA, 20 bp, synthetic construct
  misc_feature 1..20: note = chemically synthesized
  source 1..20: mol_type = other DNA
gtcttgttaaaccagccttg

SEQ ID NO: 14491 - DNA, 20 bp, synthetic construct
  misc_feature 1..20: note = chemically synthesized
  source 1..20: mol_type = other DNA
accagccttggagtcaccaa

SEQ ID NO: 14492 - DNA, 20 bp, synthetic construct
  misc_feature 1..20: note = chemically synthesized
  source 1..20: mol_type = other DNA
tcaccaaaagaatgtcttct

SEQ ID NO: 14493 - DNA, 20 bp, synthetic construct
  misc_feature 1..20: note = chemically synthesized
  source 1..20: mol_type = other DNA
caccaaaagaatgtcttctt

SEQ ID NO: 14494 - DNA, 20 bp, synthetic construct
  misc_feature 1..20: note = chemically synthesized
  source 1..20: mol_type = other DNA
accaaaagaatgtcttcttg

SEQ ID NO: 14495 - DNA, 20 bp, synthetic construct
  misc_feature 1..20: note = chemically synthesized
  source 1..20: mol_type = other DNA
ccaaaagaatgtcttcttgg

SEQ ID NO: 14496 - DNA, 20 bp, synthetic construct
  misc_feature 1..20: note = chemically synthesized
  source 1..20: mol_type = other DNA
caaaagaatgtcttcttggg

SEQ ID NO: 14497 - DNA, 20 bp, synthetic construct
  misc_feature 1..20: note = chemically synthesized
  source 1..20: mol_type = other DNA
aagaatgtcttcttgggggg

SEQ ID NO: 14498 - DNA, 20 bp, synthetic construct
  misc_feature 1..20: note = chemically synthesized
  source 1..20: mol_type = other DNA
aatgtcttcttggggggtgg

SEQ ID NO: 14499 - DNA, 20 bp, synthetic construct
  misc_feature 1..20: note = chemically synthesized
  source 1..20: mol_type = other DNA
atgtcttcttggggggtggc

SEQ ID NO: 14500 - DNA, 20 bp, synthetic construct
  misc_feature 1..20: note = chemically synthesized
  source 1..20: mol_type = other DNA
tgtcttcttggggggtggcg

SEQ ID NO: 14501 - DNA, 20 bp, synthetic construct
  misc_feature 1..20: note = chemically synthesized
  source 1..20: mol_type = other DNA
gtcttcttggggggtggcgg

SEQ ID NO: 14502 - DNA, 20 bp, synthetic construct
  misc_feature 1..20: note = chemically synthesized
  source 1..20: mol_type = other DNA
cttcttggggggtggcgggg

SEQ ID NO: 14503 - DNA, 20 bp, synthetic construct
  misc_feature 1..20: note = chemically synthesized
  source 1..20: mol_type = other DNA
ttcttggggggtggcggggg

SEQ ID NO: 14504 - DNA, 20 bp, synthetic construct
  misc_feature 1..20: note = chemically synthesized
  source 1..20: mol_type = other DNA
ggtggcgggggaggacgacg

SEQ ID NO: 14505 - DNA, 20 bp, synthetic construct
  misc_feature 1..20: note = chemically synthesized
  source 1..20: mol_type = other DNA
gtggcgggggaggacgacgt

SEQ ID NO: 14506 - DNA, 20 bp, synthetic construct
  misc_feature 1..20: note = chemically synthesized
  source 1..20: mol_type = other DNA
tggcgggggaggacgacgtg

SEQ ID NO: 14507 - DNA, 20 bp, synthetic construct
  misc_feature 1..20: note = chemically synthesized
  source 1..20: mol_type = other DNA
ggcgggggaggacgacgtgg

SEQ ID NO: 14508 - DNA, 20 bp, synthetic construct
  misc_feature 1..20: note = chemically synthesized
  source 1..20: mol_type = other DNA
ggggaggacgacgtggggga

SEQ ID NO: 14509 - DNA, 20 bp, synthetic construct
  misc_feature 1..20: note = chemically synthesized
  source 1..20: mol_type = other DNA
aggacgacgtgggggacggt

SEQ ID NO: 14510 - DNA, 20 bp, synthetic construct
  misc_feature 1..20: note = chemically synthesized
  source 1..20: mol_type = other DNA
gacgacgtgggggacggttg

SEQ ID NO: 14511 - DNA, 20 bp, synthetic construct
  misc_feature 1..20: note = chemically synthesized
  source 1..20: mol_type = other DNA
acgacgtgggggacggttgg

SEQ ID NO: 14512 - DNA, 20 bp, synthetic construct
  misc_feature 1..20: note = chemically synthesized
  source 1..20: mol_type = other DNA
cgacgtgggggacggttgga

SEQ ID NO: 14513 - DNA, 20 bp, synthetic construct
  misc_feature 1..20: note = chemically synthesized
  source 1..20: mol_type = other DNA
cgtgggggacggttggaggg

SEQ ID NO: 14514 - DNA, 20 bp, synthetic construct
  misc_feature 1..20: note = chemically synthesized
  source 1..20: mol_type = other DNA
gtgggggacggttggaggga

SEQ ID NO: 14515 - DNA, 20 bp, synthetic construct
  misc_feature 1..20: note = chemically synthesized
  source 1..20: mol_type = other DNA
ggacggttggagggaaggtg

SEQ ID NO: 14516 - DNA, 20 bp, synthetic construct
  misc_feature 1..20: note = chemically synthesized
  source 1..20: mol_type = other DNA
acggttggagggaaggtgaa

SEQ ID NO: 14517 - DNA, 20 bp, synthetic construct
  misc_feature 1..20: note = chemically synthesized
  source 1..20: mol_type = other DNA
ggttggagggaaggtgaaga

SEQ ID NO: 14518 - DNA, 20 bp, synthetic construct
  misc_feature 1..20: note = chemically synthesized
  source 1..20: mol_type = other DNA
gttggagggaaggtgaagag

SEQ ID NO: 14519 - DNA, 20 bp, synthetic construct
  misc_feature 1..20: note = chemically synthesized
  source 1..20: mol_type = other DNA
ttggagggaaggtgaagaga

SEQ ID NO: 14520 - DNA, 20 bp, synthetic construct
  misc_feature 1..20: note = chemically synthesized
  source 1..20: mol_type = other DNA
gagggaaggtgaagagaggg

SEQ ID NO: 14521 - DNA, 20 bp, synthetic construct
  misc_feature 1..20: note = chemically synthesized
  source 1..20: mol_type = other DNA
ggaaggtgaagagagggaag

SEQ ID NO: 14522 - DNA, 20 bp, synthetic construct
  misc_feature 1..20: note = chemically synthesized
  source 1..20: mol_type = other DNA
ggtgaagagagggaagaaga

SEQ ID NO: 14523 - DNA, 20 bp, synthetic construct
  misc_feature 1..20: note = chemically synthesized
  source 1..20: mol_type = other DNA
agggaagaagaaagtgcaac

SEQ ID NO: 14524 - DNA, 20 bp, synthetic construct
  misc_feature 1..20: note = chemically synthesized
  source 1..20: mol_type = other DNA
gggaagaagaaagtgcaact

SEQ ID NO: 14525 - DNA, 20 bp, synthetic construct
  misc_feature 1..20: note = chemically synthesized
  source 1..20: mol_type = other DNA
gaagaagaaagtgcaactgg

SEQ ID NO: 14526 - DNA, 20 bp, synthetic construct
  misc_feature 1..20: note = chemically synthesized
  source 1..20: mol_type = other DNA
aagaagaaagtgcaactggg

SEQ ID NO: 14527 - DNA, 20 bp, synthetic construct
  misc_feature 1..20: note = chemically synthesized
  source 1..20: mol_type = other DNA
tttgaaaaataaataaataa

SEQ ID NO: 14528 - DNA, 20 bp, synthetic construct
  misc_feature 1..20: note = chemically synthesized
  source 1..20: mol_type = other DNA
aaaataaataaataaaagaa

SEQ ID NO: 14529 - DNA, 20 bp, synthetic construct
  misc_feature 1..20: note = chemically synthesized
  source 1..20: mol_type = other DNA
aaataaaagaaaagcccctt

SEQ ID NO: 14530 - DNA, 20 bp, synthetic construct
  misc_feature 1..20: note = chemically synthesized
  source 1..20: mol_type = other DNA
aataaaagaaaagccccttc

SEQ ID NO: 14531 - DNA, 20 bp, synthetic construct
  misc_feature 1..20: note = chemically synthesized
  source 1..20: mol_type = other DNA
aaagccccttcaggtaacaa

SEQ ID NO: 14532 - DNA, 20 bp, synthetic construct
  misc_feature 1..20: note = chemically synthesized
  source 1..20: mol_type = other DNA
ccccttcaggtaacaatagt

SEQ ID NO: 14533 - DNA, 20 bp, synthetic construct
  misc_feature 1..20: note = chemically synthesized
  source 1..20: mol_type = other DNA
ttcaggtaacaatagtgagc

SEQ ID NO: 14534 - DNA, 20 bp, synthetic construct
  misc_feature 1..20: note = chemically synthesized
  source 1..20: mol_type = other DNA
aatagtgagccagattcttt

SEQ ID NO: 14535 - DNA, 20 bp, synthetic construct
  misc_feature 1..20: note = chemically synthesized
  source 1..20: mol_type = other DNA
agccagattctttcagaacc

SEQ ID NO: 14536 - DNA, 20 bp, synthetic construct
  misc_feature 1..20: note = chemically synthesized
  source 1..20: mol_type = other DNA
tctttcagaaccaagctttt

SEQ ID NO: 14537 - DNA, 20 bp, synthetic construct
  misc_feature 1..20: note = chemically synthesized
  source 1..20: mol_type = other DNA
ttgttcccacccgtccataa

SEQ ID NO: 14538 - DNA, 20 bp, synthetic construct
  misc_feature 1..20: note = chemically synthesized
  source 1..20: mol_type = other DNA
cgtccataaaagtccatcta

SEQ ID NO: 14539 - DNA, 20 bp, synthetic construct
  misc_feature 1..20: note = chemically synthesized
  source 1..20: mol_type = other DNA
tccataaaagtccatctata

SEQ ID NO: 14540 - DNA, 20 bp, synthetic construct
  misc_feature 1..20: note = chemically synthesized
  source 1..20: mol_type = other DNA
ataaaagtccatctatagag

SEQ ID NO: 14541 - DNA, 20 bp, synthetic construct
  misc_feature 1..20: note = chemically synthesized
  source 1..20: mol_type = other DNA
tatagagaagatatataaat

SEQ ID NO: 14542 - DNA, 20 bp, synthetic construct
  misc_feature 1..20: note = chemically synthesized
  source 1..20: mol_type = other DNA
gagaagatatataaatgagc

SEQ ID NO: 14543 - DNA, 20 bp, synthetic construct
  misc_feature 1..20: note = chemically synthesized
  source 1..20: mol_type = other DNA
agatatataaatgagcgagt

SEQ ID NO: 14544 - DNA, 20 bp, synthetic construct
  misc_feature 1..20: note = chemically synthesized
  source 1..20: mol_type = other DNA
aaatgagcgagtgagtgttg

SEQ ID NO: 14545 - DNA, 20 bp, synthetic construct
  misc_feature 1..20: note = chemically synthesized
  source 1..20: mol_type = other DNA
tatgtatgatttatatataa

SEQ ID NO: 14546 - DNA, 20 bp, synthetic construct
  misc_feature 1..20: note = chemically synthesized
  source 1..20: mol_type = other DNA
tatatataatggtgtgtata

SEQ ID NO: 14547 - DNA, 20 bp, synthetic construct
  misc_feature 1..20: note = chemically synthesized
  source 1..20: mol_type = other DNA
atggtgtgtataaagctttt

SEQ ID NO: 14548 - DNA, 20 bp, synthetic construct
  misc_feature 1..20: note = chemically synthesized
  source 1..20: mol_type = other DNA
tggtgtgtataaagcttttc

SEQ ID NO: 14549 - DNA, 20 bp, synthetic construct
  misc_feature 1..20: note = chemically synthesized
  source 1..20: mol_type = other DNA
ggtgtgtataaagcttttcg

SEQ ID NO: 14550 - DNA, 20 bp, synthetic construct
  misc_feature 1..20: note = chemically synthesized
  source 1..20: mol_type = other DNA
tgtataaagcttttcggggt

SEQ ID NO: 14551 - DNA, 20 bp, synthetic construct
  misc_feature 1..20: note = chemically synthesized
  source 1..20: mol_type = other DNA
aagcttttcggggttggctg

SEQ ID NO: 14552 - DNA, 20 bp, synthetic construct
  misc_feature 1..20: note = chemically synthesized
  source 1..20: mol_type = other DNA
ggggttggctgtagtgtaaa

SEQ ID NO: 14553 - DNA, 20 bp, synthetic construct
  misc_feature 1..20: note = chemically synthesized
  source 1..20: mol_type = other DNA
aatgactttattacctctga

SEQ ID NO: 14554 - DNA, 20 bp, synthetic construct
  misc_feature 1..20: note = chemically synthesized
  source 1..20: mol_type = other DNA
atgactttattacctctgaa

SEQ ID NO: 14555 - DNA, 20 bp, synthetic construct
  misc_feature 1..20: note = chemically synthesized
  source 1..20: mol_type = other DNA
attacctctgaaaggttctg

SEQ ID NO: 14556 - DNA, 20 bp, synthetic construct
  misc_feature 1..20: note = chemically synthesized
  source 1..20: mol_type = other DNA
gttctgtggttcacatttaa

SEQ ID NO: 14557 - DNA, 20 bp, synthetic construct
  misc_feature 1..20: note = chemically synthesized
  source 1..20: mol_type = other DNA
aattgtgtgcgctctgacga

SEQ ID NO: 14558 - DNA, 20 bp, synthetic construct
  misc_feature 1..20: note = chemically synthesized
  source 1..20: mol_type = other DNA
ctctgacgatggcaccctat

SEQ ID NO: 14559 - DNA, 20 bp, synthetic construct
  misc_feature 1..20: note = chemically synthesized
  source 1..20: mol_type = other DNA
tctgacgatggcaccctatc

SEQ ID NO: 14560 - DNA, 20 bp, synthetic construct
  misc_feature 1..20: note = chemically synthesized
  source 1..20: mol_type = other DNA
ctgacgatggcaccctatca

SEQ ID NO: 14561 - DNA, 20 bp, synthetic construct
  misc_feature 1..20: note = chemically synthesized
  source 1..20: mol_type = other DNA
cctatcagggctgctatctg

SEQ ID NO: 14562 - DNA, 20 bp, synthetic construct
  misc_feature 1..20: note = chemically synthesized
  source 1..20: mol_type = other DNA
ggctatttccaataaataac

SEQ ID NO: 14563 - DNA, 20 bp, synthetic construct
  misc_feature 1..20: note = chemically synthesized
  source 1..20: mol_type = other DNA
ttcctttttaaaaaaaaaca

SEQ ID NO: 14564 - DNA, 20 bp, synthetic construct
  misc_feature 1..20: note = chemically synthesized
  source 1..20: mol_type = other DNA
tcctttttaaaaaaaaacat

SEQ ID NO: 14565 - DNA, 20 bp, synthetic construct
  misc_feature 1..20: note = chemically synthesized
  source 1..20: mol_type = other DNA
aaaaaaaaacataggaaatt

SEQ ID NO: 14566 - DNA, 20 bp, synthetic construct
  misc_feature 1..20: note = chemically synthesized
  source 1..20: mol_type = other DNA
aacataggaaattaagcact

SEQ ID NO: 14567 - DNA, 20 bp, synthetic construct
  misc_feature 1..20: note = chemically synthesized
  source 1..20: mol_type = other DNA
gaaattaagcacttagttac

SEQ ID NO: 14568 - DNA, 20 bp, synthetic construct
  misc_feature 1..20: note = chemically synthesized
  source 1..20: mol_type = other DNA
attaagcacttagttacaag

SEQ ID NO: 14569 - DNA, 20 bp, synthetic construct
  misc_feature 1..20: note = chemically synthesized
  source 1..20: mol_type = other DNA
ttaagcacttagttacaagt

SEQ ID NO: 14570 - DNA, 20 bp, synthetic construct
  misc_feature 1..20: note = chemically synthesized
  source 1..20: mol_type = other DNA
tagcagacctacttgtaact

SEQ ID NO: 14571 - DNA, 20 bp, synthetic construct
  misc_feature 1..20: note = chemically synthesized
  source 1..20: mol_type = other DNA
ttcctatgtttttttttaaa

SEQ ID NO: 14572 - DNA, 20 bp, synthetic construct
  misc_feature 1..20: note = chemically synthesized
  source 1..20: mol_type = other DNA
tcctatgtttttttttaaaa

SEQ ID NO: 14573 - DNA, 20 bp, synthetic construct
  misc_feature 1..20: note = chemically synthesized
  source 1..20: mol_type = other DNA
gaaaatcaataaaatgttgc

SEQ ID NO: 14574 - DNA, 20 bp, synthetic construct
  misc_feature 1..20: note = chemically synthesized
  source 1..20: mol_type = other DNA
aaatgttgccagttatttat

SEQ ID NO: 14575 - DNA, 20 bp, synthetic construct
  misc_feature 1..20: note = chemically synthesized
  source 1..20: mol_type = other DNA
tgccagttatttattggaaa

SEQ ID NO: 14576 - DNA, 20 bp, synthetic construct
  misc_feature 1..20: note = chemically synthesized
  source 1..20: mol_type = other DNA
ttatttattggaaatagcca

SEQ ID NO: 14577 - DNA, 20 bp, synthetic construct
  misc_feature 1..20: note = chemically synthesized
  source 1..20: mol_type = other DNA
ttattggaaatagccacaga

SEQ ID NO: 14578 - DNA, 20 bp, synthetic construct
  misc_feature 1..20: note = chemically synthesized
  source 1..20: mol_type = other DNA
ttggaaatagccacagatag

SEQ ID NO: 14579 - DNA, 20 bp, synthetic construct
  misc_feature 1..20: note = chemically synthesized
  source 1..20: mol_type = other DNA
gccacagatagcagccctga

SEQ ID NO: 14580 - DNA, 20 bp, synthetic construct
  misc_feature 1..20: note = chemically synthesized
  source 1..20: mol_type = other DNA
ccacagatagcagccctgat

SEQ ID NO: 14581 - DNA, 20 bp, synthetic construct
  misc_feature 1..20: note = chemically synthesized
  source 1..20: mol_type = other DNA
cacagatagcagccctgata

SEQ ID NO: 14582 - DNA, 20 bp, synthetic construct
  misc_feature 1..20: note = chemically synthesized
  source 1..20: mol_type = other DNA
ccctgatagggtgccatcgt

SEQ ID NO: 14583 - DNA, 20 bp, synthetic construct
  misc_feature 1..20: note = chemically synthesized
  source 1..20: mol_type = other DNA
ctgatagggtgccatcgtca

SEQ ID NO: 14584 - DNA, 20 bp, synthetic construct
  misc_feature 1..20: note = chemically synthesized
  source 1..20: mol_type = other DNA
ttgtgtaatgaattgtaatt

SEQ ID NO: 14585 - DNA, 20 bp, synthetic construct
  misc_feature 1..20: note = chemically synthesized
  source 1..20: mol_type = other DNA
tgtaatgaattgtaattcag

SEQ ID NO: 14586 - DNA, 20 bp, synthetic construct
  misc_feature 1..20: note = chemically synthesized
  source 1..20: mol_type = other DNA
agactgttaaatgtgaacca

SEQ ID NO: 14587 - DNA, 20 bp, synthetic construct
  misc_feature 1..20: note = chemically synthesized
  source 1..20: mol_type = other DNA
atgtgaaccacagaaccttt

SEQ ID NO: 14588 - DNA, 20 bp, synthetic construct
  misc_feature 1..20: note = chemically synthesized
  source 1..20: mol_type = other DNA
gtgaaccacagaacctttca

SEQ ID NO: 14589 - DNA, 20 bp, synthetic construct
  misc_feature 1..20: note = chemically synthesized
  source 1..20: mol_type = other DNA
tgaaccacagaacctttcag

SEQ ID NO: 14590 - DNA, 20 bp, synthetic construct
  misc_feature 1..20: note = chemically synthesized
  source 1..20: mol_type = other DNA
agaacctttcagaggtaata

SEQ ID NO: 14591 - DNA, 20 bp, synthetic construct
  misc_feature 1..20: note = chemically synthesized
  source 1..20: mol_type = other DNA
agtcattactttttacacta

SEQ ID NO: 14592 - DNA, 20 bp, synthetic construct
  misc_feature 1..20: note = chemically synthesized
  source 1..20: mol_type = other DNA
acactacagccaaccccgaa

SEQ ID NO: 14593 - DNA, 20 bp, synthetic construct
  misc_feature 1..20: note = chemically synthesized
  source 1..20: mol_type = other DNA
tcatttatatatcttctcta

SEQ ID NO: 14594 - DNA, 20 bp, synthetic construct
  misc_feature 1..20: note = chemically synthesized
  source 1..20: mol_type = other DNA
ttatatatcttctctataga

SEQ ID NO: 14595 - DNA, 20 bp, synthetic construct
  misc_feature 1..20: note = chemically synthesized
  source 1..20: mol_type = other DNA
tctctatagatggactttta

SEQ ID NO: 14596 - DNA, 20 bp, synthetic construct
  misc_feature 1..20: note = chemically synthesized
  source 1..20: mol_type = other DNA
tatagatggacttttatgga

SEQ ID NO: 14597 - DNA, 20 bp, synthetic construct
  misc_feature 1..20: note = chemically synthesized
  source 1..20: mol_type = other DNA
atagatggacttttatggac

SEQ ID NO: 14598 - DNA, 20 bp, synthetic construct
  misc_feature 1..20: note = chemically synthesized
  source 1..20: mol_type = other DNA
gatggacttttatggacggg

SEQ ID NO: 14599 - DNA, 20 bp, synthetic construct
  misc_feature 1..20: note = chemically synthesized
  source 1..20: mol_type = other DNA
atggacttttatggacgggt

SEQ ID NO: 14600 - DNA, 20 bp, synthetic construct
  misc_feature 1..20: note = chemically synthesized
  source 1..20: mol_type = other DNA
gaacaatattcaaatctgaa

SEQ ID NO: 14601 - DNA, 20 bp, synthetic construct
  misc_feature 1..20: note = chemically synthesized
  source 1..20: mol_type = other DNA
atattcaaatctgaaaagct

SEQ ID NO: 14602 - DNA, 20 bp, synthetic construct
  misc_feature 1..20: note = chemically synthesized
  source 1..20: mol_type = other DNA
tctgaaaagcttggttctga

SEQ ID NO: 14603 - DNA, 20 bp, synthetic construct
  misc_feature 1..20: note = chemically synthesized
  source 1..20: mol_type = other DNA
agcttggttctgaaagaatc

SEQ ID NO: 14604 - DNA, 20 bp, synthetic construct
  misc_feature 1..20: note = chemically synthesized
  source 1..20: mol_type = other DNA
tggctcactattgttacctg

SEQ ID NO: 14605 - DNA, 20 bp, synthetic construct
  misc_feature 1..20: note = chemically synthesized
  source 1..20: mol_type = other DNA
ggctcactattgttacctga

SEQ ID NO: 14606 - DNA, 20 bp, synthetic construct
  misc_feature 1..20: note = chemically synthesized
  source 1..20: mol_type = other DNA
gctcactattgttacctgaa

SEQ ID NO: 14607 - DNA, 20 bp, synthetic construct
  misc_feature 1..20: note = chemically synthesized
  source 1..20: mol_type = other DNA
ctcactattgttacctgaag

SEQ ID NO: 14608 - DNA, 20 bp, synthetic construct
  misc_feature 1..20: note = chemically synthesized
  source 1..20: mol_type = other DNA
ttttatttatttatttttca

SEQ ID NO: 14609 - DNA, 20 bp, synthetic construct
  misc_feature 1..20: note = chemically synthesized
  source 1..20: mol_type = other DNA
tttatttatttatttttcaa

SEQ ID NO: 14610 - DNA, 20 bp, synthetic construct
  misc_feature 1..20: note = chemically synthesized
  source 1..20: mol_type = other DNA
tttatttttcaaaggcctcc

SEQ ID NO: 14611 - DNA, 20 bp, synthetic construct
  misc_feature 1..20: note = chemically synthesized
  source 1..20: mol_type = other DNA
gtcctcccccgccacccccc

SEQ ID NO: 14612 - DNA, 20 bp, synthetic construct
  misc_feature 1..20: note = chemically synthesized
  source 1..20: mol_type = other DNA
ctcccccgccaccccccaag

SEQ ID NO: 14613 - DNA, 20 bp, synthetic construct
  misc_feature 1..20: note = chemically synthesized
  source 1..20: mol_type = other DNA
cccccaagaagacattcttt

SEQ ID NO: 14614 - DNA, 20 bp, synthetic construct
  misc_feature 1..20: note = chemically synthesized
  source 1..20: mol_type = other DNA
gacattcttttggtgactcc

SEQ ID NO: 14615 - DNA, 20 bp, synthetic construct
  misc_feature 1..20: note = chemically synthesized
  source 1..20: mol_type = other DNA
acattcttttggtgactcca

SEQ ID NO: 14616 - DNA, 20 bp, synthetic construct
  misc_feature 1..20: note = chemically synthesized
  source 1..20: mol_type = other DNA
tcttttggtgactccaaggc

SEQ ID NO: 14617 - DNA, 20 bp, synthetic construct
  misc_feature 1..20: note = chemically synthesized
  source 1..20: mol_type = other DNA
gactccaaggctggtttaac

SEQ ID NO: 14618 - DNA, 20 bp, synthetic construct
  misc_feature 1..20: note = chemically synthesized
  source 1..20: mol_type = other DNA
ggctggtttaacaagacaaa

SEQ ID NO: 14619 - DNA, 20 bp, synthetic construct
  misc_feature 1..20: note = chemically synthesized
  source 1..20: mol_type = other DNA
tggtttaacaagacaaaaag

SEQ ID NO: 14620 - DNA, 20 bp, synthetic construct
  misc_feature 1..20: note = chemically synthesized
  source 1..20: mol_type = other DNA
acaagacaaaaagcagactg

SEQ ID NO: 14621 - DNA, 20 bp, synthetic construct
  misc_feature 1..20: note = chemically synthesized
  source 1..20: mol_type = other DNA
agacaaaaagcagactgtgg

SEQ ID NO: 14622 - DNA, 20 bp, synthetic construct
  misc_feature 1..20: note = chemically synthesized
  source 1..20: mol_type = other DNA
aaaagcagactgtggtggaa

SEQ ID NO: 14623 - DNA, 20 bp, synthetic construct
  misc_feature 1..20: note = chemically synthesized
  source 1..20: mol_type = other DNA
aagcagactgtggtggaata

SEQ ID NO: 14624 - DNA, 20 bp, synthetic construct
  misc_feature 1..20: note = chemically synthesized
  source 1..20: mol_type = other DNA
agagatgctgacctgctctg

SEQ ID NO: 14625 - DNA, 20 bp, synthetic construct
  misc_feature 1..20: note = chemically synthesized
  source 1..20: mol_type = other DNA
ctgacctgctctgaagaact

SEQ ID NO: 14626 - DNA, 20 bp, synthetic construct
  misc_feature 1..20: note = chemically synthesized
  source 1..20: mol_type = other DNA
gctctgaagaactcagtgaa

SEQ ID NO: 14627 - DNA, 20 bp, synthetic construct
  misc_feature 1..20: note = chemically synthesized
  source 1..20: mol_type = other DNA
ctctgaagaactcagtgaaa

SEQ ID NO: 14628 - DNA, 20 bp, synthetic construct
  misc_feature 1..20: note = chemically synthesized
  source 1..20: mol_type = other DNA
tctgaagaactcagtgaaaa

SEQ ID NO: 14629 - DNA, 20 bp, synthetic construct
  misc_feature 1..20: note = chemically synthesized
  source 1..20: mol_type = other DNA
ctgaagaactcagtgaaaag

SEQ ID NO: 14630 - DNA, 20 bp, synthetic construct
  misc_feature 1..20: note = chemically synthesized
  source 1..20: mol_type = other DNA
aactcagtgaaaaggggaaa

SEQ ID NO: 14631 - DNA, 20 bp, synthetic construct
  misc_feature 1..20: note = chemically synthesized
  source 1..20: mol_type = other DNA
ggggaaatggtgtcacacac

SEQ ID NO: 14632 - DNA, 20 bp, synthetic construct
  misc_feature 1..20: note = chemically synthesized
  source 1..20: mol_type = other DNA
atggtgtcacacacaagcta

SEQ ID NO: 14633 - DNA, 20 bp, synthetic construct
  misc_feature 1..20: note = chemically synthesized
  source 1..20: mol_type = other DNA
ggtgtcacacacaagctaca

SEQ ID NO: 14634 - DNA, 20 bp, synthetic construct
  misc_feature 1..20: note = chemically synthesized
  source 1..20: mol_type = other DNA
aagctacagagcttaacttc

SEQ ID NO: 14635 - DNA, 20 bp, synthetic construct
  misc_feature 1..20: note = chemically synthesized
  source 1..20: mol_type = other DNA
gaatcctcccgcttcttaaa

SEQ ID NO: 14636 - DNA, 20 bp, synthetic construct
  misc_feature 1..20: note = chemically synthesized
  source 1..20: mol_type = other DNA
ccgcttcttaaacagaattt

SEQ ID NO: 14637 - DNA, 20 bp, synthetic construct
  misc_feature 1..20: note = chemically synthesized
  source 1..20: mol_type = other DNA
cgcttcttaaacagaatttg

SEQ ID NO: 14638 - DNA, 20 bp, synthetic construct
  misc_feature 1..20: note = chemically synthesized
  source 1..20: mol_type = other DNA
gaggtctccctcccacaaac

SEQ ID NO: 14639 - DNA, 20 bp, synthetic construct
  misc_feature 1..20: note = chemically synthesized
  source 1..20: mol_type = other DNA
ggtctccctcccacaaactg

SEQ ID NO: 14640 - DNA, 20 bp, synthetic construct
  misc_feature 1..20: note = chemically synthesized
  source 1..20: mol_type = other DNA
gtctccctcccacaaactgg

SEQ ID NO: 14641 - DNA, 20 bp, synthetic construct
  misc_feature 1..20: note = chemically synthesized
  source 1..20: mol_type = other DNA
tctccctcccacaaactgga

SEQ ID NO: 14642 - DNA, 20 bp, synthetic construct
  misc_feature 1..20: note = chemically synthesized
  source 1..20: mol_type = other DNA
aaaccacattgacacaatcc

SEQ ID NO: 14643 - DNA, 20 bp, synthetic construct
  misc_feature 1..20: note = chemically synthesized
  source 1..20: mol_type = other DNA
acattgacacaatcccagta

SEQ ID NO: 14644 - DNA, 20 bp, synthetic construct
  misc_feature 1..20: note = chemically synthesized
  source 1..20: mol_type = other DNA
cccacatctctctcaatgtt

SEQ ID NO: 14645 - DNA, 20 bp, synthetic construct
  misc_feature 1..20: note = chemically synthesized
  source 1..20: mol_type = other DNA
caaaacctccttttcttcct

SEQ ID NO: 14646 - DNA, 20 bp, synthetic construct
  misc_feature 1..20: note = chemically synthesized
  source 1..20: mol_type = other DNA
aaacctccttttcttcctta

SEQ ID NO: 14647 - DNA, 20 bp, synthetic construct
  misc_feature 1..20: note = chemically synthesized
  source 1..20: mol_type = other DNA
aacctccttttcttccttag

SEQ ID NO: 14648 - DNA, 20 bp, synthetic construct
  misc_feature 1..20: note = chemically synthesized
  source 1..20: mol_type = other DNA
acctccttttcttccttaga

SEQ ID NO: 14649 - DNA, 20 bp, synthetic construct
  misc_feature 1..20: note = chemically synthesized
  source 1..20: mol_type = other DNA
cctccttttcttccttagag

SEQ ID NO: 14650 - DNA, 20 bp, synthetic construct
  misc_feature 1..20: note = chemically synthesized
  source 1..20: mol_type = other DNA
ttcttccttagaggggtccg

SEQ ID NO: 14651 - DNA, 20 bp, synthetic construct
  misc_feature 1..20: note = chemically synthesized
  source 1..20: mol_type = other DNA
gaggggtccgaagctccgcc

SEQ ID NO: 14652 - DNA, 20 bp, synthetic construct
  misc_feature 1..20: note = chemically synthesized
  source 1..20: mol_type = other DNA
ggtccgaagctccgccgagc

SEQ ID NO: 14653 - DNA, 20 bp, synthetic construct
  misc_feature 1..20: note = chemically synthesized
  source 1..20: mol_type = other DNA
gtccgaagctccgccgagct

SEQ ID NO: 14654 - DNA, 20 bp, synthetic construct
  misc_feature 1..20: note = chemically synthesized
  source 1..20: mol_type = other DNA
gaagctccgccgagctaggc

SEQ ID NO: 14655 - DNA, 20 bp, synthetic construct
  misc_feature 1..20: note = chemically synthesized
  source 1..20: mol_type = other DNA
ctccgccgagctaggcaagc

SEQ ID NO: 14656 - DNA, 20 bp, synthetic construct
  misc_feature 1..20: note = chemically synthesized
  source 1..20: mol_type = other DNA
aagccagtcattttctaaca

SEQ ID NO: 14657 - DNA, 20 bp, synthetic construct
  misc_feature 1..20: note = chemically synthesized
  source 1..20: mol_type = other DNA
ccagtcattttctaacacag

SEQ ID NO: 14658 - DNA, 20 bp, synthetic construct
  misc_feature 1..20: note = chemically synthesized
  source 1..20: mol_type = other DNA
agtagacttgaaactttact

SEQ ID NO: 14659 - DNA, 20 bp, synthetic construct
  misc_feature 1..20: note = chemically synthesized
  source 1..20: mol_type = other DNA
gaaactttactaagacgaaa

SEQ ID NO: 14660 - DNA, 20 bp, synthetic construct
  misc_feature 1..20: note = chemically synthesized
  source 1..20: mol_type = other DNA
aaactttactaagacgaaac

SEQ ID NO: 14661 - DNA, 20 bp, synthetic construct
  misc_feature 1..20: note = chemically synthesized
  source 1..20: mol_type = other DNA
taagacgaaacaggaataaa

SEQ ID NO: 14662 - DNA, 20 bp, synthetic construct
  misc_feature 1..20: note = chemically synthesized
  source 1..20: mol_type = other DNA
aggaataaacagccgcttgc

SEQ ID NO: 14663 - DNA, 20 bp, synthetic construct
  misc_feature 1..20: note = chemically synthesized
  source 1..20: mol_type = other DNA
aataaacagccgcttgccgg

SEQ ID NO: 14664 - DNA, 20 bp, synthetic construct
  misc_feature 1..20: note = chemically synthesized
  source 1..20: mol_type = other DNA
ataaacagccgcttgccggc

SEQ ID NO: 14665 - DNA, 20 bp, synthetic construct
  misc_feature 1..20: note = chemically synthesized
  source 1..20: mol_type = other DNA
taaacagccgcttgccggca

SEQ ID NO: 14666 - DNA, 20 bp, synthetic construct
  misc_feature 1..20: note = chemically synthesized
  source 1..20: mol_type = other DNA
gccgcttgccggcagggctg

SEQ ID NO: 14667 - DNA, 20 bp, synthetic construct
  misc_feature 1..20: note = chemically synthesized
  source 1..20: mol_type = other DNA
ccgcttgccggcagggctgc

SEQ ID NO: 14668 - DNA, 20 bp, synthetic construct
  misc_feature 1..20: note = chemically synthesized
  source 1..20: mol_type = other DNA
ttgccggcagggctgcggga

SEQ ID NO: 14669 - DNA, 20 bp, synthetic construct
  misc_feature 1..20: note = chemically synthesized
  source 1..20: mol_type = other DNA
tgccggcagggctgcgggat

SEQ ID NO: 14670 - DNA, 20 bp, synthetic construct
  misc_feature 1..20: note = chemically synthesized
  source 1..20: mol_type = other DNA
ggcagggctgcgggatgggt

SEQ ID NO: 14671 - DNA, 20 bp, synthetic construct
  misc_feature 1..20: note = chemically synthesized
  source 1..20: mol_type = other DNA
cgggatgggtgagcgcgtgc

SEQ ID NO: 14672 - DNA, 20 bp, synthetic construct
  misc_feature 1..20: note = chemically synthesized
  source 1..20: mol_type = other DNA
tgggtgagcgcgtgcaagcc

SEQ ID NO: 14673 - DNA, 20 bp, synthetic construct
  misc_feature 1..20: note = chemically synthesized
  source 1..20: mol_type = other DNA
gggtgagcgcgtgcaagccc

SEQ ID NO: 14674 - DNA, 20 bp, synthetic construct
  misc_feature 1..20: note = chemically synthesized
  source 1..20: mol_type = other DNA
ggtgagcgcgtgcaagcccg

SEQ ID NO: 14675 - DNA, 20 bp, synthetic construct
  misc_feature 1..20: note = chemically synthesized
  source 1..20: mol_type = other DNA
ggccctcgcttaaaacaata

SEQ ID NO: 14676 - DNA, 20 bp, synthetic construct
  misc_feature 1..20: note = chemically synthesized
  source 1..20: mol_type = other DNA
aaacaataaagcccccccac

SEQ ID NO: 14677 - DNA, 20 bp, synthetic construct
  misc_feature 1..20: note = chemically synthesized
  source 1..20: mol_type = other DNA
aacaataaagcccccccacc

SEQ ID NO: 14678 - DNA, 20 bp, synthetic construct
  misc_feature 1..20: note = chemically synthesized
  source 1..20: mol_type = other DNA
aataaagcccccccaccggg

SEQ ID NO: 14679 - DNA, 20 bp, synthetic construct
  misc_feature 1..20: note = chemically synthesized
  source 1..20: mol_type = other DNA
ataaagcccccccaccgggt

SEQ ID NO: 14680 - DNA, 20 bp, synthetic construct
  misc_feature 1..20: note = chemically synthesized
  source 1..20: mol_type = other DNA
agcccccccaccgggtgggt

SEQ ID NO: 14681 - DNA, 20 bp, synthetic construct
  misc_feature 1..20: note = chemically synthesized
  source 1..20: mol_type = other DNA
ccaccgggtgggtgagttta

SEQ ID NO: 14682 - DNA, 20 bp, synthetic construct
  misc_feature 1..20: note = chemically synthesized
  source 1..20: mol_type = other DNA
ccgggtgggtgagtttacgg

SEQ ID NO: 14683 - DNA, 20 bp, synthetic construct
  misc_feature 1..20: note = chemically synthesized
  source 1..20: mol_type = other DNA
tttacggaagcgacaccctt

SEQ ID NO: 14684 - DNA, 20 bp, synthetic construct
  misc_feature 1..20: note = chemically synthesized
  source 1..20: mol_type = other DNA
aagcgacaccctttagactg

SEQ ID NO: 14685 - DNA, 20 bp, synthetic construct
  misc_feature 1..20: note = chemically synthesized
  source 1..20: mol_type = other DNA
gcgacaccctttagactgaa

SEQ ID NO: 14686 - DNA, 20 bp, synthetic construct
  misc_feature 1..20: note = chemically synthesized
  source 1..20: mol_type = other DNA
cgacaccctttagactgaag

SEQ ID NO: 14687 - DNA, 20 bp, synthetic construct
  misc_feature 1..20: note = chemically synthesized
  source 1..20: mol_type = other DNA
gacaccctttagactgaaga

SEQ ID NO: 14688 - DNA, 20 bp, synthetic construct
  misc_feature 1..20: note = chemically synthesized
  source 1..20: mol_type = other DNA
acaccctttagactgaagag

SEQ ID NO: 14689 - DNA, 20 bp, synthetic construct
  misc_feature 1..20: note = chemically synthesized
  source 1..20: mol_type = other DNA
caccctttagactgaagagg

SEQ ID NO: 14690 - DNA, 20 bp, synthetic construct
  misc_feature 1..20: note = chemically synthesized
  source 1..20: mol_type = other DNA
tttagactgaagagggggat

SEQ ID NO: 14691 - DNA, 20 bp, synthetic construct
  misc_feature 1..20: note = chemically synthesized
  source 1..20: mol_type = other DNA
agactgaagagggggatgag

SEQ ID NO: 14692 - DNA, 20 bp, synthetic construct
  misc_feature 1..20: note = chemically synthesized
  source 1..20: mol_type = other DNA
tgaagagggggatgagaaga

SEQ ID NO: 14693 - DNA, 20 bp, synthetic construct
  misc_feature 1..20: note = chemically synthesized
  source 1..20: mol_type = other DNA
gaagagggggatgagaagac

SEQ ID NO: 14694 - DNA, 20 bp, synthetic construct
  misc_feature 1..20: note = chemically synthesized
  source 1..20: mol_type = other DNA
aagagggggatgagaagacg

SEQ ID NO: 14695 - DNA, 20 bp, synthetic construct
  misc_feature 1..20: note = chemically synthesized
  source 1..20: mol_type = other DNA
agagggggatgagaagacgg

SEQ ID NO: 14696 - DNA, 20 bp, synthetic construct
  misc_feature 1..20: note = chemically synthesized
  source 1..20: mol_type = other DNA
ggatgagaagacgggggttg

SEQ ID NO: 14697 - DNA, 20 bp, synthetic construct
  misc_feature 1..20: note = chemically synthesized
  source 1..20: mol_type = other DNA
gggggttgtggaaccgctcc

SEQ ID NO: 14698 - DNA, 20 bp, synthetic construct
  misc_feature 1..20: note = chemically synthesized
  source 1..20: mol_type = other DNA
ggggttgtggaaccgctccg

SEQ ID NO: 14699 - DNA, 20 bp, synthetic construct
  misc_feature 1..20: note = chemically synthesized
  source 1..20: mol_type = other DNA
ggttgtggaaccgctccgag

SEQ ID NO: 14700 - DNA, 20 bp, synthetic construct
  misc_feature 1..20: note = chemically synthesized
  source 1..20: mol_type = other DNA
ttgtggaaccgctccgagga

SEQ ID NO: 14701 - DNA, 20 bp, synthetic construct
  misc_feature 1..20: note = chemically synthesized
  source 1..20: mol_type = other DNA
tgtggaaccgctccgaggag

SEQ ID NO: 14702 - DNA, 20 bp, synthetic construct
  misc_feature 1..20: note = chemically synthesized
  source 1..20: mol_type = other DNA
gtggaaccgctccgaggaga

SEQ ID NO: 14703 - DNA, 20 bp, synthetic construct
  misc_feature 1..20: note = chemically synthesized
  source 1..20: mol_type = other DNA
gaaccgctccgaggagaggg

SEQ ID NO: 14704 - DNA, 20 bp, synthetic construct
  misc_feature 1..20: note = chemically synthesized
  source 1..20: mol_type = other DNA
aaccgctccgaggagaggga

SEQ ID NO: 14705 - DNA, 20 bp, synthetic construct
  misc_feature 1..20: note = chemically synthesized
  source 1..20: mol_type = other DNA
ccgctccgaggagagggaag

SEQ ID NO: 14706 - DNA, 20 bp, synthetic construct
  misc_feature 1..20: note = chemically synthesized
  source 1..20: mol_type = other DNA
cgctccgaggagagggaagg

SEQ ID NO: 14707 - DNA, 20 bp, synthetic construct
  misc_feature 1..20: note = chemically synthesized
  source 1..20: mol_type = other DNA
gctccgaggagagggaagga

SEQ ID NO: 14708 - DNA, 20 bp, synthetic construct
  misc_feature 1..20: note = chemically synthesized
  source 1..20: mol_type = other DNA
aaggagggctcctcgctctg

SEQ ID NO: 14709 - DNA, 20 bp, synthetic construct
  misc_feature 1..20: note = chemically synthesized
  source 1..20: mol_type = other DNA
cactcacacatatccacctg

SEQ ID NO: 14710 - DNA, 20 bp, synthetic construct
  misc_feature 1..20: note = chemically synthesized
  source 1..20: mol_type = other DNA
acacatatccacctgcagct

SEQ ID NO: 14711 - DNA, 20 bp, synthetic construct
  misc_feature 1..20: note = chemically synthesized
  source 1..20: mol_type = other DNA
cacatatccacctgcagctc

SEQ ID NO: 14712 - DNA, 20 bp, synthetic construct
  misc_feature 1..20: note = chemically synthesized
  source 1..20: mol_type = other DNA
acatatccacctgcagctca

SEQ ID NO: 14713 - DNA, 20 bp, synthetic construct
  misc_feature 1..20: note = chemically synthesized
  source 1..20: mol_type = other DNA
acctgcagctcagggtctcg

SEQ ID NO: 14714 - DNA, 20 bp, synthetic construct
  misc_feature 1..20: note = chemically synthesized
  source 1..20: mol_type = other DNA
cctgcagctcagggtctcgc

SEQ ID NO: 14715 - DNA, 20 bp, synthetic construct
  misc_feature 1..20: note = chemically synthesized
  source 1..20: mol_type = other DNA
gctcagggtctcgcgggcca

SEQ ID NO: 14716 - DNA, 20 bp, synthetic construct
  misc_feature 1..20: note = chemically synthesized
  source 1..20: mol_type = other DNA
tgcaccctccgcacctccct

SEQ ID NO: 14717 - DNA, 20 bp, synthetic construct
  misc_feature 1..20: note = chemically synthesized
  source 1..20: mol_type = other DNA
tccgcacctcccttggacct

SEQ ID NO: 14718 - DNA, 20 bp, synthetic construct
  misc_feature 1..20: note = chemically synthesized
  source 1..20: mol_type = other DNA
cctctccccccaactccttc

SEQ ID NO: 14719 - DNA, 20 bp, synthetic construct
  misc_feature 1..20: note = chemically synthesized
  source 1..20: mol_type = other DNA
cccccaactccttccagatt

SEQ ID NO: 14720 - DNA, 20 bp, synthetic construct
  misc_feature 1..20: note = chemically synthesized
  source 1..20: mol_type = other DNA
actccttccagatttggaat

SEQ ID NO: 14721 - DNA, 20 bp, synthetic construct
  misc_feature 1..20: note = chemically synthesized
  source 1..20: mol_type = other DNA
gaatcggactgcgatctccc

SEQ ID NO: 14722 - DNA, 20 bp, synthetic construct
  misc_feature 1..20: note = chemically synthesized
  source 1..20: mol_type = other DNA
tcggactgcgatctccccgg

SEQ ID NO: 14723 - DNA, 20 bp, synthetic construct
  misc_feature 1..20: note = chemically synthesized
  source 1..20: mol_type = other DNA
gactgcgatctccccggcgg

SEQ ID NO: 14724 - DNA, 20 bp, synthetic construct
  misc_feature 1..20: note = chemically synthesized
  source 1..20: mol_type = other DNA
tgcgatctccccggcggcgg

SEQ ID NO: 14725 - DNA, 20 bp, synthetic construct
  misc_feature 1..20: note = chemically synthesized
  source 1..20: mol_type = other DNA
gatctccccggcggcggcgg

SEQ ID NO: 14726 - DNA, 20 bp, synthetic construct
  misc_feature 1..20: note = chemically synthesized
  source 1..20: mol_type = other DNA
ctccccggcggcggcggcgg

SEQ ID NO: 14727 - DNA, 20 bp, synthetic construct
  misc_feature 1..20: note = chemically synthesized
  source 1..20: mol_type = other DNA
ggcggcggcggcggcggctg

SEQ ID NO: 14728 - DNA, 20 bp, synthetic construct
  misc_feature 1..20: note = chemically synthesized
  source 1..20: mol_type = other DNA
cggcggcggcggcggctgca

SEQ ID NO: 14729 - DNA, 20 bp, synthetic construct
  misc_feature 1..20: note = chemically synthesized
  source 1..20: mol_type = other DNA
cggcggcggcggctgcagag

SEQ ID NO: 14730 - DNA, 20 bp, synthetic construct
  misc_feature 1..20: note = chemically synthesized
  source 1..20: mol_type = other DNA
cggcggctgcagagtggtgc

SEQ ID NO: 14731 - DNA, 20 bp, synthetic construct
  misc_feature 1..20: note = chemically synthesized
  source 1..20: mol_type = other DNA
cggctgcagagtggtgctgg

SEQ ID NO: 14732 - DNA, 20 bp, synthetic construct
  misc_feature 1..20: note = chemically synthesized
  source 1..20: mol_type = other DNA
ggctgcagagtggtgctggc

SEQ ID NO: 14733 - DNA, 20 bp, synthetic construct
  misc_feature 1..20: note = chemically synthesized
  source 1..20: mol_type = other DNA
tgcagagtggtgctggcagg

SEQ ID NO: 14734 - DNA, 20 bp, synthetic construct
  misc_feature 1..20: note = chemically synthesized
  source 1..20: mol_type = other DNA
gcagagtggtgctggcaggc

SEQ ID NO: 14735 - DNA, 20 bp, synthetic construct
  misc_feature 1..20: note = chemically synthesized
  source 1..20: mol_type = other DNA
cagagtggtgctggcaggca

SEQ ID NO: 14736 - DNA, 20 bp, synthetic construct
  misc_feature 1..20: note = chemically synthesized
  source 1..20: mol_type = other DNA
gagtggtgctggcaggcagg

SEQ ID NO: 14737 - DNA, 20 bp, synthetic construct
  misc_feature 1..20: note = chemically synthesized
  source 1..20: mol_type = other DNA
agtggtgctggcaggcaggg

SEQ ID NO: 14738 - DNA, 20 bp, synthetic construct
  misc_feature 1..20: note = chemically synthesized
  source 1..20: mol_type = other DNA
gtgctggcaggcagggaggc

SEQ ID NO: 14739 - DNA, 20 bp, synthetic construct
  misc_feature 1..20: note = chemically synthesized
  source 1..20: mol_type = other DNA
tgctggcaggcagggaggct

SEQ ID NO: 14740 - DNA, 20 bp, synthetic construct
  misc_feature 1..20: note = chemically synthesized
  source 1..20: mol_type = other DNA
ctggcaggcagggaggctgg

SEQ ID NO: 14741 - DNA, 20 bp, synthetic construct
  misc_feature 1..20: note = chemically synthesized
  source 1..20: mol_type = other DNA
tggcaggcagggaggctggg

SEQ ID NO: 14742 - DNA, 20 bp, synthetic construct
  misc_feature 1..20: note = chemically synthesized
  source 1..20: mol_type = other DNA
caggcagggaggctgggagg

SEQ ID NO: 14743 - DNA, 20 bp, synthetic construct
  misc_feature 1..20: note = chemically synthesized
  source 1..20: mol_type = other DNA
aggcagggaggctgggaggc

SEQ ID NO: 14744 - DNA, 20 bp, synthetic construct
  misc_feature 1..20: note = chemically synthesized
  source 1..20: mol_type = other DNA
gcagggaggctgggaggcgg

SEQ ID NO: 14745 - DNA, 20 bp, synthetic construct
  misc_feature 1..20: note = chemically synthesized
  source 1..20: mol_type = other DNA
cagggaggctgggaggcggg

SEQ ID NO: 14746 - DNA, 20 bp, synthetic construct
  misc_feature 1..20: note = chemically synthesized
  source 1..20: mol_type = other DNA
ggctgggaggcgggaggcgc

SEQ ID NO: 14747 - DNA, 20 bp, synthetic construct
  misc_feature 1..20: note = chemically synthesized
  source 1..20: mol_type = other DNA
gctgggaggcgggaggcgcc

SEQ ID NO: 14748 - DNA, 20 bp, synthetic construct
  misc_feature 1..20: note = chemically synthesized
  source 1..20: mol_type = other DNA
ctgggaggcgggaggcgcca

SEQ ID NO: 14749 - DNA, 20 bp, synthetic construct
  misc_feature 1..20: note = chemically synthesized
  source 1..20: mol_type = other DNA
tgggaggcgggaggcgccag

SEQ ID NO: 14750 - DNA, 20 bp, synthetic construct
  misc_feature 1..20: note = chemically synthesized
  source 1..20: mol_type = other DNA
ggaggcgccaggggacttta

SEQ ID NO: 14751 - DNA, 20 bp, synthetic construct
  misc_feature 1..20: note = chemically synthesized
  source 1..20: mol_type = other DNA
gaggcgccaggggactttac

SEQ ID NO: 14752 - DNA, 20 bp, synthetic construct
  misc_feature 1..20: note = chemically synthesized
  source 1..20: mol_type = other DNA
ctgaataaactttccaatcg

SEQ ID NO: 14753 - DNA, 20 bp, synthetic construct
  misc_feature 1..20: note = chemically synthesized
  source 1..20: mol_type = other DNA
tgaataaactttccaatcgc

SEQ ID NO: 14754 - DNA, 20 bp, synthetic construct
  misc_feature 1..20: note = chemically synthesized
  source 1..20: mol_type = other DNA
gaataaactttccaatcgca

SEQ ID NO: 14755 - DNA, 20 bp, synthetic construct
  misc_feature 1..20: note = chemically synthesized
  source 1..20: mol_type = other DNA
aataaactttccaatcgcag

SEQ ID NO: 14756 - DNA, 20 bp, synthetic construct
  misc_feature 1..20: note = chemically synthesized
  source 1..20: mol_type = other DNA
ataaactttccaatcgcagg

SEQ ID NO: 14757 - DNA, 20 bp, synthetic construct
  misc_feature 1..20: note = chemically synthesized
  source 1..20: mol_type = other DNA
tacattttacgtaaaactga

SEQ ID NO: 14758 - DNA, 20 bp, synthetic construct
  misc_feature 1..20: note = chemically synthesized
  source 1..20: mol_type = other DNA
aaactgaaagtatcccacgc

SEQ ID NO: 14759 - DNA, 20 bp, synthetic construct
  misc_feature 1..20: note = chemically synthesized
  source 1..20: mol_type = other DNA
actgaaagtatcccacgcca

SEQ ID NO: 14760 - DNA, 20 bp, synthetic construct
  misc_feature 1..20: note = chemically synthesized
  source 1..20: mol_type = other DNA
aagtatcccacgccagagtg

SEQ ID NO: 14761 - DNA, 20 bp, synthetic construct
  misc_feature 1..20: note = chemically synthesized
  source 1..20: mol_type = other DNA
gagtgaagcccgctttttga

SEQ ID NO: 14762 - DNA, 20 bp, synthetic construct
  misc_feature 1..20: note = chemically synthesized
  source 1..20: mol_type = other DNA
tgaagcccgctttttgacag

SEQ ID NO: 14763 - DNA, 20 bp, synthetic construct
  misc_feature 1..20: note = chemically synthesized
  source 1..20: mol_type = other DNA
agcccgctttttgacagcgg

SEQ ID NO: 14764 - DNA, 20 bp, synthetic construct
  misc_feature 1..20: note = chemically synthesized
  source 1..20: mol_type = other DNA
gtgtgtgcgtgtgtgcatta

SEQ ID NO: 14765 - DNA, 20 bp, synthetic construct
  misc_feature 1..20: note = chemically synthesized
  source 1..20: mol_type = other DNA
gtgtgcgtgtgtgcattaaa

SEQ ID NO: 14766 - DNA, 20 bp, synthetic construct
  misc_feature 1..20: note = chemically synthesized
  source 1..20: mol_type = other DNA
gcgtgtgtgcattaaagaga

SEQ ID NO: 14767 - DNA, 20 bp, synthetic construct
  misc_feature 1..20: note = chemically synthesized
  source 1..20: mol_type = other DNA
cgtgtgtgcattaaagagac

SEQ ID NO: 14768 - DNA, 20 bp, synthetic construct
  misc_feature 1..20: note = chemically synthesized
  source 1..20: mol_type = other DNA
gtgtgtgcattaaagagaca

SEQ ID NO: 14769 - DNA, 20 bp, synthetic construct
  misc_feature 1..20: note = chemically synthesized
  source 1..20: mol_type = other DNA
agacagggttttatttccaa

SEQ ID NO: 14770 - DNA, 20 bp, synthetic construct
  misc_feature 1..20: note = chemically synthesized
  source 1..20: mol_type = other DNA
gacagggttttatttccaac

SEQ ID NO: 14771 - DNA, 20 bp, synthetic construct
  misc_feature 1..20: note = chemically synthesized
  source 1..20: mol_type = other DNA
aacaggtcttccctaatttc

SEQ ID NO: 14772 - DNA, 20 bp, synthetic construct
  misc_feature 1..20: note = chemically synthesized
  source 1..20: mol_type = other DNA
acaggtcttccctaatttcc

SEQ ID NO: 14773 - DNA, 20 bp, synthetic construct
  misc_feature 1..20: note = chemically synthesized
  source 1..20: mol_type = other DNA
caggtcttccctaatttcca

SEQ ID NO: 14774 - DNA, 20 bp, synthetic construct
  misc_feature 1..20: note = chemically synthesized
  source 1..20: mol_type = other DNA
taatttccagggaacgtctg

SEQ ID NO: 14775 - DNA, 20 bp, synthetic construct
  misc_feature 1..20: note = chemically synthesized
  source 1..20: mol_type = other DNA
ttccagggaacgtctgcaga

SEQ ID NO: 14776 - DNA, 20 bp, synthetic construct
  misc_feature 1..20: note = chemically synthesized
  source 1..20: mol_type = other DNA
tccagggaacgtctgcagaa

SEQ ID NO: 14777 - DNA, 20 bp, synthetic construct
  misc_feature 1..20: note = chemically synthesized
  source 1..20: mol_type = other DNA
gggaacgtctgcagaaaggc

SEQ ID NO: 14778 - DNA, 20 bp, synthetic construct
  misc_feature 1..20: note = chemically synthesized
  source 1..20: mol_type = other DNA
gaacgtctgcagaaaggcga

SEQ ID NO: 14779 - DNA, 20 bp, synthetic construct
  misc_feature 1..20: note = chemically synthesized
  source 1..20: mol_type = other DNA
aacgtctgcagaaaggcgag

SEQ ID NO: 14780 - DNA, 20 bp, synthetic construct
  misc_feature 1..20: note = chemically synthesized
  source 1..20: mol_type = other DNA
acgtctgcagaaaggcgaga

SEQ ID NO: 14781 - DNA, 20 bp, synthetic construct
  misc_feature 1..20: note = chemically synthesized
  source 1..20: mol_type = other DNA
cgtctgcagaaaggcgagag

SEQ ID NO: 14782 - DNA, 20 bp, synthetic construct
  misc_feature 1..20: note = chemically synthesized
  source 1..20: mol_type = other DNA
gtctgcagaaaggcgagagg

SEQ ID NO: 14783 - DNA, 20 bp, synthetic construct
  misc_feature 1..20: note = chemically synthesized
  source 1..20: mol_type = other DNA
gaaaggcgagagggggctgc

SEQ ID NO: 14784 - DNA, 20 bp, synthetic construct
  misc_feature 1..20: note = chemically synthesized
  source 1..20: mol_type = other DNA
gagagggggctgctggctcc

SEQ ID NO: 14785 - DNA, 20 bp, synthetic construct
  misc_feature 1..20: note = chemically synthesized
  source 1..20: mol_type = other DNA
agagggggctgctggctcct

SEQ ID NO: 14786 - DNA, 20 bp, synthetic construct
  misc_feature 1..20: note = chemically synthesized
  source 1..20: mol_type = other DNA
tggctcctgggtgtgcgcct

SEQ ID NO: 14787 - DNA, 20 bp, synthetic construct
  misc_feature 1..20: note = chemically synthesized
  source 1..20: mol_type = other DNA
tcctgggtgtgcgccttggc

SEQ ID NO: 14788 - DNA, 20 bp, synthetic construct
  misc_feature 1..20: note = chemically synthesized
  source 1..20: mol_type = other DNA
tgggtgtgcgccttggccgg

SEQ ID NO: 14789 - DNA, 20 bp, synthetic construct
  misc_feature 1..20: note = chemically synthesized
  source 1..20: mol_type = other DNA
gcgccttggccggcggcgcc

SEQ ID NO: 14790 - DNA, 20 bp, synthetic construct
  misc_feature 1..20: note = chemically synthesized
  source 1..20: mol_type = other DNA
cgccttggccggcggcgcct

SEQ ID NO: 14791 - DNA, 20 bp, synthetic construct
  misc_feature 1..20: note = chemically synthesized
  source 1..20: mol_type = other DNA
gccttggccggcggcgcctg

SEQ ID NO: 14792 - DNA, 20 bp, synthetic construct
  misc_feature 1..20: note = chemically synthesized
  source 1..20: mol_type = other DNA
cttggccggcggcgcctggg

SEQ ID NO: 14793 - DNA, 20 bp, synthetic construct
  misc_feature 1..20: note = chemically synthesized
  source 1..20: mol_type = other DNA
ccggcggcgcctggggagcg

SEQ ID NO: 14794 - DNA, 20 bp, synthetic construct
  misc_feature 1..20: note = chemically synthesized
  source 1..20: mol_type = other DNA
gcggcgcctggggagcgcgg

SEQ ID NO: 14795 - DNA, 20 bp, synthetic construct
  misc_feature 1..20: note = chemically synthesized
  source 1..20: mol_type = other DNA
ggggagcgcggcggtgaccc

SEQ ID NO: 14796 - DNA, 20 bp, synthetic construct
  misc_feature 1..20: note = chemically synthesized
  source 1..20: mol_type = other DNA
gggagcgcggcggtgacccg

SEQ ID NO: 14797 - DNA, 20 bp, synthetic construct
  misc_feature 1..20: note = chemically synthesized
  source 1..20: mol_type = other DNA
agcgcggcggtgacccgagg

SEQ ID NO: 14798 - DNA, 20 bp, synthetic construct
  misc_feature 1..20: note = chemically synthesized
  source 1..20: mol_type = other DNA
aggcggtcatctcaccaccg

SEQ ID NO: 14799 - DNA, 20 bp, synthetic construct
  misc_feature 1..20: note = chemically synthesized
  source 1..20: mol_type = other DNA
ggtctccccgctgctcctgc

SEQ ID NO: 14800 - DNA, 20 bp, synthetic construct
  misc_feature 1..20: note = chemically synthesized
  source 1..20: mol_type = other DNA
attcccattttctctttccc

SEQ ID NO: 14801 - DNA, 20 bp, synthetic construct
  misc_feature 1..20: note = chemically synthesized
  source 1..20: mol_type = other DNA
ttcccattttctctttccct

SEQ ID NO: 14802 - DNA, 20 bp, synthetic construct
  misc_feature 1..20: note = chemically synthesized
  source 1..20: mol_type = other DNA
ttttctctttccctgggtaa

SEQ ID NO: 14803 - DNA, 20 bp, synthetic construct
  misc_feature 1..20: note = chemically synthesized
  source 1..20: mol_type = other DNA
tctttccctgggtaacagca

SEQ ID NO: 14804 - DNA, 20 bp, synthetic construct
  misc_feature 1..20: note = chemically synthesized
  source 1..20: mol_type = other DNA
ctttccctgggtaacagcac

SEQ ID NO: 14805 - DNA, 20 bp, synthetic construct
  misc_feature 1..20: note = chemically synthesized
  source 1..20: mol_type = other DNA
cctgggtaacagcacaggaa

SEQ ID NO: 14806 - DNA, 20 bp, synthetic construct
  misc_feature 1..20: note = chemically synthesized
  source 1..20: mol_type = other DNA
aacagttgtgctctgcccgt

SEQ ID NO: 14807 - DNA, 20 bp, synthetic construct
  misc_feature 1..20: note = chemically synthesized
  source 1..20: mol_type = other DNA
cccatccctctgtgcttttg

SEQ ID NO: 14808 - DNA, 20 bp, synthetic construct
  misc_feature 1..20: note = chemically synthesized
  source 1..20: mol_type = other DNA
ctgtgcttttgcagttgctc

SEQ ID NO: 14809 - DNA, 20 bp, synthetic construct
  misc_feature 1..20: note = chemically synthesized
  source 1..20: mol_type = other DNA
gtgcttttgcagttgctctg

SEQ ID NO: 14810 - DNA, 20 bp, synthetic construct
  misc_feature 1..20: note = chemically synthesized
  source 1..20: mol_type = other DNA
cttttgcagttgctctggag

SEQ ID NO: 14811 - DNA, 20 bp, synthetic construct
  misc_feature 1..20: note = chemically synthesized
  source 1..20: mol_type = other DNA
ttttgcagttgctctggagt

SEQ ID NO: 14812 - DNA, 20 bp, synthetic construct
  misc_feature 1..20: note = chemically synthesized
  source 1..20: mol_type = other DNA
ttgcagttgctctggagtgg

SEQ ID NO: 14813 - DNA, 20 bp, synthetic construct
  misc_feature 1..20: note = chemically synthesized
  source 1..20: mol_type = other DNA
tgcagttgctctggagtggg

SEQ ID NO: 14814 - DNA, 20 bp, synthetic construct
  misc_feature 1..20: note = chemically synthesized
  source 1..20: mol_type = other DNA
gcagttgctctggagtggga

SEQ ID NO: 14815 - DNA, 20 bp, synthetic construct
  misc_feature 1..20: note = chemically synthesized
  source 1..20: mol_type = other DNA
cagttgctctggagtgggag

SEQ ID NO: 14816 - DNA, 20 bp, synthetic construct
  misc_feature 1..20: note = chemically synthesized
  source 1..20: mol_type = other DNA
agttgctctggagtgggagg

SEQ ID NO: 14817 - DNA, 20 bp, synthetic construct
  misc_feature 1..20: note = chemically synthesized
  source 1..20: mol_type = other DNA
gggagggggtgtgtccctcc

SEQ ID NO: 14818 - DNA, 20 bp, synthetic construct
  misc_feature 1..20: note = chemically synthesized
  source 1..20: mol_type = other DNA
ggagggggtgtgtccctccc

SEQ ID NO: 14819 - DNA, 20 bp, synthetic construct
  misc_feature 1..20: note = chemically synthesized
  source 1..20: mol_type = other DNA
gagggggtgtgtccctccca

SEQ ID NO: 14820 - DNA, 20 bp, synthetic construct
  misc_feature 1..20: note = chemically synthesized
  source 1..20: mol_type = other DNA
gtgtgtccctcccagggacc

SEQ ID NO: 14821 - DNA, 20 bp, synthetic construct
  misc_feature 1..20: note = chemically synthesized
  source 1..20: mol_type = other DNA
tccctcccagggacccggct

SEQ ID NO: 14822 - DNA, 20 bp, synthetic construct
  misc_feature 1..20: note = chemically synthesized
  source 1..20: mol_type = other DNA
ccctcccagggacccggctc

SEQ ID NO: 14823 - DNA, 20 bp, synthetic construct
  misc_feature 1..20: note = chemically synthesized
  source 1..20: mol_type = other DNA
cctcccagggacccggctcg

SEQ ID NO: 14824 - DNA, 20 bp, synthetic construct
  misc_feature 1..20: note = chemically synthesized
  source 1..20: mol_type = other DNA
cccggctcggggacctcccg

SEQ ID NO: 14825 - DNA, 20 bp, synthetic construct
  misc_feature 1..20: note = chemically synthesized
  source 1..20: mol_type = other DNA
gggacctcccgcggcgccgt

SEQ ID NO: 14826 - DNA, 20 bp, synthetic construct
  misc_feature 1..20: note = chemically synthesized
  source 1..20: mol_type = other DNA
cggcgccgtgagcacattcc

SEQ ID NO: 14827 - DNA, 20 bp, synthetic construct
  misc_feature 1..20: note = chemically synthesized
  source 1..20: mol_type = other DNA
ggcgccgtgagcacattccc

SEQ ID NO: 14828 - DNA, 20 bp, synthetic construct
  misc_feature 1..20: note = chemically synthesized
  source 1..20: mol_type = other DNA
gcgccgtgagcacattccca

SEQ ID NO: 14829 - DNA, 20 bp, synthetic construct
  misc_feature 1..20: note = chemically synthesized
  source 1..20: mol_type = other DNA
gtgagcacattcccagggac

SEQ ID NO: 14830 - DNA, 20 bp, synthetic construct
  misc_feature 1..20: note = chemically synthesized
  source 1..20: mol_type = other DNA
tgagcacattcccagggact

SEQ ID NO: 14831 - DNA, 20 bp, synthetic construct
  misc_feature 1..20: note = chemically synthesized
  source 1..20: mol_type = other DNA
ttcccagggactgggactcc

SEQ ID NO: 14832 - DNA, 20 bp, synthetic construct
  misc_feature 1..20: note = chemically synthesized
  source 1..20: mol_type = other DNA
tcccagggactgggactccc

SEQ ID NO: 14833 - DNA, 20 bp, synthetic construct
  misc_feature 1..20: note = chemically synthesized
  source 1..20: mol_type = other DNA
gactgcccgcgctttgtcct

SEQ ID NO: 14834 - DNA, 20 bp, synthetic construct
  misc_feature 1..20: note = chemically synthesized
  source 1..20: mol_type = other DNA
gcgctttgtcctcggcctct

SEQ ID NO: 14835 - DNA, 20 bp, synthetic construct
  misc_feature 1..20: note = chemically synthesized
  source 1..20: mol_type = other DNA
gctttgtcctcggcctctca

SEQ ID NO: 14836 - DNA, 20 bp, synthetic construct
  misc_feature 1..20: note = chemically synthesized
  source 1..20: mol_type = other DNA
tttgtcctcggcctctcaga

SEQ ID NO: 14837 - DNA, 20 bp, synthetic construct
  misc_feature 1..20: note = chemically synthesized
  source 1..20: mol_type = other DNA
ttgtcctcggcctctcagag

SEQ ID NO: 14838 - DNA, 20 bp, synthetic construct
  misc_feature 1..20: note = chemically synthesized
  source 1..20: mol_type = other DNA
tcctcggcctctcagagagg

SEQ ID NO: 14839 - DNA, 20 bp, synthetic construct
  misc_feature 1..20: note = chemically synthesized
  source 1..20: mol_type = other DNA
tctcagagaggtggacgcct

SEQ ID NO: 14840 - DNA, 20 bp, synthetic construct
  misc_feature 1..20: note = chemically synthesized
  source 1..20: mol_type = other DNA
gcctcggtgcctctcttgcc

SEQ ID NO: 14841 - DNA, 20 bp, synthetic construct
  misc_feature 1..20: note = chemically synthesized
  source 1..20: mol_type = other DNA
cctcggtgcctctcttgccc

SEQ ID NO: 14842 - DNA, 20 bp, synthetic construct
  misc_feature 1..20: note = chemically synthesized
  source 1..20: mol_type = other DNA
gcctctcttgcccaggcccc

SEQ ID NO: 14843 - DNA, 20 bp, synthetic construct
  misc_feature 1..20: note = chemically synthesized
  source 1..20: mol_type = other DNA
aggcccccggcgctcccctc

SEQ ID NO: 14844 - DNA, 20 bp, synthetic construct
  misc_feature 1..20: note = chemically synthesized
  source 1..20: mol_type = other DNA
ggcccccggcgctcccctcc

SEQ ID NO: 14845 - DNA, 20 bp, synthetic construct
  misc_feature 1..20: note = chemically synthesized
  source 1..20: mol_type = other DNA
gcccccggcgctcccctccg

SEQ ID NO: 14846 - DNA, 20 bp, synthetic construct
  misc_feature 1..20: note = chemically synthesized
  source 1..20: mol_type = other DNA
cccccggcgctcccctccgg

SEQ ID NO: 14847 - DNA, 20 bp, synthetic construct
  misc_feature 1..20: note = chemically synthesized
  source 1..20: mol_type = other DNA
cggcgctcccctccgggggc

SEQ ID NO: 14848 - DNA, 20 bp, synthetic construct
  misc_feature 1..20: note = chemically synthesized
  source 1..20: mol_type = other DNA
cccctccgggggccagactc

SEQ ID NO: 14849 - DNA, 20 bp, synthetic construct
  misc_feature 1..20: note = chemically synthesized
  source 1..20: mol_type = other DNA
gctcctcgttctttattcct

SEQ ID NO: 14850 - DNA, 20 bp, synthetic construct
  misc_feature 1..20: note = chemically synthesized
  source 1..20: mol_type = other DNA
ctcctcgttctttattcctc

SEQ ID NO: 14851 - DNA, 20 bp, synthetic construct
  misc_feature 1..20: note = chemically synthesized
  source 1..20: mol_type = other DNA
ggctctctttctgcgaccct

SEQ ID NO: 14852 - DNA, 20 bp, synthetic construct
  misc_feature 1..20: note = chemically synthesized
  source 1..20: mol_type = other DNA
gctctctttctgcgaccctt

SEQ ID NO: 14853 - DNA, 20 bp, synthetic construct
  misc_feature 1..20: note = chemically synthesized
  source 1..20: mol_type = other DNA
tctctttctgcgacccttag

SEQ ID NO: 14854 - DNA, 20 bp, synthetic construct
  misc_feature 1..20: note = chemically synthesized
  source 1..20: mol_type = other DNA
tttctgcgacccttaggagc

SEQ ID NO: 14855 - DNA, 20 bp, synthetic construct
  misc_feature 1..20: note = chemically synthesized
  source 1..20: mol_type = other DNA
ttctgcgacccttaggagcc

SEQ ID NO: 14856 - DNA, 20 bp, synthetic construct
  misc_feature 1..20: note = chemically synthesized
  source 1..20: mol_type = other DNA
tctgcgacccttaggagccg

SEQ ID NO: 14857 - DNA, 20 bp, synthetic construct
  misc_feature 1..20: note = chemically synthesized
  source 1..20: mol_type = other DNA
acccttaggagccggggact

SEQ ID NO: 14858 - DNA, 20 bp, synthetic construct
  misc_feature 1..20: note = chemically synthesized
  source 1..20: mol_type = other DNA
agccggggactcggcgcttt

SEQ ID NO: 14859 - DNA, 20 bp, synthetic construct
  misc_feature 1..20: note = chemically synthesized
  source 1..20: mol_type = other DNA
tcggcgctttcagttgcatt

SEQ ID NO: 14860 - DNA, 20 bp, synthetic construct
  misc_feature 1..20: note = chemically synthesized
  source 1..20: mol_type = other DNA
ctttcagttgcattcagacc

SEQ ID NO: 14861 - DNA, 20 bp, synthetic construct
  misc_feature 1..20: note = chemically synthesized
  source 1..20: mol_type = other DNA
tgcattcagacccagtcgct

SEQ ID NO: 14862 - DNA, 20 bp, synthetic construct
  misc_feature 1..20: note = chemically synthesized
  source 1..20: mol_type = other DNA
attcagacccagtcgcttgg

SEQ ID NO: 14863 - DNA, 20 bp, synthetic construct
  misc_feature 1..20: note = chemically synthesized
  source 1..20: mol_type = other DNA
ttcagacccagtcgcttggc

SEQ ID NO: 14864 - DNA, 20 bp, synthetic construct
  misc_feature 1..20: note = chemically synthesized
  source 1..20: mol_type = other DNA
tcagacccagtcgcttggcg

SEQ ID NO: 14865 - DNA, 20 bp, synthetic construct
  misc_feature 1..20: note = chemically synthesized
  source 1..20: mol_type = other DNA
cagtcgcttggcggggcgct

SEQ ID NO: 14866 - DNA, 20 bp, synthetic construct
  misc_feature 1..20: note = chemically synthesized
  source 1..20: mol_type = other DNA
tggcggggcgctcagattcc

SEQ ID NO: 14867 - DNA, 20 bp, synthetic construct
  misc_feature 1..20: note = chemically synthesized
  source 1..20: mol_type = other DNA
gcgctcagattcccggtccc

SEQ ID NO: 14868 - DNA, 20 bp, synthetic construct
  misc_feature 1..20: note = chemically synthesized
  source 1..20: mol_type = other DNA
cagattcccggtccctggct

SEQ ID NO: 14869 - DNA, 20 bp, synthetic construct
  misc_feature 1..20: note = chemically synthesized
  source 1..20: mol_type = other DNA
cccggtccctggctcggcct

SEQ ID NO: 14870 - DNA, 20 bp, synthetic construct
  misc_feature 1..20: note = chemically synthesized
  source 1..20: mol_type = other DNA
ccggtccctggctcggcctt

SEQ ID NO: 14871 - DNA, 20 bp, synthetic construct
  misc_feature 1..20: note = chemically synthesized
  source 1..20: mol_type = other DNA
cggtccctggctcggccttg

SEQ ID NO: 14872 - DNA, 20 bp, synthetic construct
  misc_feature 1..20: note = chemically synthesized
  source 1..20: mol_type = other DNA
ggtccctggctcggccttgg

SEQ ID NO: 14873 - DNA, 20 bp, synthetic construct
  misc_feature 1..20: note = chemically synthesized
  source 1..20: mol_type = other DNA
ctcggccttgggggcgccct

SEQ ID NO: 14874 - DNA, 20 bp, synthetic construct
  misc_feature 1..20: note = chemically synthesized
  source 1..20: mol_type = other DNA
tcggccttgggggcgccctc

SEQ ID NO: 14875 - DNA, 20 bp, synthetic construct
  misc_feature 1..20: note = chemically synthesized
  source 1..20: mol_type = other DNA
ttgggggcgccctcgggccc

SEQ ID NO: 14876 - DNA, 20 bp, synthetic construct
  misc_feature 1..20: note = chemically synthesized
  source 1..20: mol_type = other DNA
ctgcgccgcctgcctctccc

SEQ ID NO: 14877 - DNA, 20 bp, synthetic construct
  misc_feature 1..20: note = chemically synthesized
  source 1..20: mol_type = other DNA
tctccccggtcccctctttc

SEQ ID NO: 14878 - DNA, 20 bp, synthetic construct
  misc_feature 1..20: note = chemically synthesized
  source 1..20: mol_type = other DNA
ctccccggtcccctctttcc

SEQ ID NO: 14879 - DNA, 20 bp, synthetic construct
  misc_feature 1..20: note = chemically synthesized
  source 1..20: mol_type = other DNA
tcccctctttccaggccgcg

SEQ ID NO: 14880 - DNA, 20 bp, synthetic construct
  misc_feature 1..20: note = chemically synthesized
  source 1..20: mol_type = other DNA
cccctctttccaggccgcgc

SEQ ID NO: 14881 - DNA, 20 bp, synthetic construct
  misc_feature 1..20: note = chemically synthesized
  source 1..20: mol_type = other DNA
ttccaggccgcgcgggctcc

SEQ ID NO: 14882 - DNA, 20 bp, synthetic construct
  misc_feature 1..20: note = chemically synthesized
  source 1..20: mol_type = other DNA
ccaggccgcgcgggctcctg

SEQ ID NO: 14883 - DNA, 20 bp, synthetic construct
  misc_feature 1..20: note = chemically synthesized
  source 1..20: mol_type = other DNA
cgcgcgggctcctggagact

SEQ ID NO: 14884 - DNA, 20 bp, synthetic construct
  misc_feature 1..20: note = chemically synthesized
  source 1..20: mol_type = other DNA
gcgcgggctcctggagactt

SEQ ID NO: 14885 - DNA, 20 bp, synthetic construct
  misc_feature 1..20: note = chemically synthesized
  source 1..20: mol_type = other DNA
agacttgggcgctgcccttc

SEQ ID NO: 14886 - DNA, 20 bp, synthetic construct
  misc_feature 1..20: note = chemically synthesized
  source 1..20: mol_type = other DNA
gcgctgcccttccggacccg

SEQ ID NO: 14887 - DNA, 20 bp, synthetic construct
  misc_feature 1..20: note = chemically synthesized
  source 1..20: mol_type = other DNA
gacccgcagccctccaaact

SEQ ID NO: 14888 - DNA, 20 bp, synthetic construct
  misc_feature 1..20: note = chemically synthesized
  source 1..20: mol_type = other DNA
acccgcagccctccaaactt

SEQ ID NO: 14889 - DNA, 20 bp, synthetic construct
  misc_feature 1..20: note = chemically synthesized
  source 1..20: mol_type = other DNA
gcagccctccaaacttaggc

SEQ ID NO: 14890 - DNA, 20 bp, synthetic construct
  misc_feature 1..20: note = chemically synthesized
  source 1..20: mol_type = other DNA
ccacctcccctcgcccgctg

SEQ ID NO: 14891 - DNA, 20 bp, synthetic construct
  misc_feature 1..20: note = chemically synthesized
  source 1..20: mol_type = other DNA
acctcccctcgcccgctgcg

SEQ ID NO: 14892 - DNA, 20 bp, synthetic construct
  misc_feature 1..20: note = chemically synthesized
  source 1..20: mol_type = other DNA
cccgctgcggagctgtaact

SEQ ID NO: 14893 - DNA, 20 bp, synthetic construct
  misc_feature 1..20: note = chemically synthesized
  source 1..20: mol_type = other DNA
cgctgcggagctgtaacttg

SEQ ID NO: 14894 - DNA, 20 bp, synthetic construct
  misc_feature 1..20: note = chemically synthesized
  source 1..20: mol_type = other DNA
gctgcggagctgtaacttgg

SEQ ID NO: 14895 - DNA, 20 bp, synthetic construct
  misc_feature 1..20: note = chemically synthesized
  source 1..20: mol_type = other DNA
ggagctgtaacttggaggct

SEQ ID NO: 14896 - DNA, 20 bp, synthetic construct
  misc_feature 1..20: note = chemically synthesized
  source 1..20: mol_type = other DNA
ggaggctcagctctcaactt

SEQ ID NO: 14897 - DNA, 20 bp, synthetic construct
  misc_feature 1..20: note = chemically synthesized
  source 1..20: mol_type = other DNA
gaggctcagctctcaacttc

SEQ ID NO: 14898 - DNA, 20 bp, synthetic construct
  misc_feature 1..20: note = chemically synthesized
  source 1..20: mol_type = other DNA
tttctttgctgtcctctcct

SEQ ID NO: 14899 - DNA, 20 bp, synthetic construct
  misc_feature 1..20: note = chemically synthesized
  source 1..20: mol_type = other DNA
ttctttgctgtcctctcctc

SEQ ID NO: 14900 - DNA, 20 bp, synthetic construct
  misc_feature 1..20: note = chemically synthesized
  source 1..20: mol_type = other DNA
tgctgtcctctcctcgggca

SEQ ID NO: 14901 - DNA, 20 bp, synthetic construct
  misc_feature 1..20: note = chemically synthesized
  source 1..20: mol_type = other DNA
ctcctcgggcaaagtttccc

SEQ ID NO: 14902 - DNA, 20 bp, synthetic construct
  misc_feature 1..20: note = chemically synthesized
  source 1..20: mol_type = other DNA
cgggcaaagtttcccgagcg

SEQ ID NO: 14903 - DNA, 20 bp, synthetic construct
  misc_feature 1..20: note = chemically synthesized
  source 1..20: mol_type = other DNA
aagtttcccgagcgcagccg

SEQ ID NO: 14904 - DNA, 20 bp, synthetic construct
  misc_feature 1..20: note = chemically synthesized
  source 1..20: mol_type = other DNA
agtttcccgagcgcagccgc

SEQ ID NO: 14905 - DNA, 20 bp, synthetic construct
  misc_feature 1..20: note = chemically synthesized
  source 1..20: mol_type = other DNA
cccgagcgcagccgcgggct

SEQ ID NO: 14906 - DNA, 20 bp, synthetic construct
  misc_feature 1..20: note = chemically synthesized
  source 1..20: mol_type = other DNA
ccgagcgcagccgcgggctc

SEQ ID NO: 14907 - DNA, 20 bp, synthetic construct
  misc_feature 1..20: note = chemically synthesized
  source 1..20: mol_type = other DNA
cgagcgcagccgcgggctcg

SEQ ID NO: 14908 - DNA, 20 bp, synthetic construct
  misc_feature 1..20: note = chemically synthesized
  source 1..20: mol_type = other DNA
cgggctcggggcttttactt

SEQ ID NO: 14909 - DNA, 20 bp, synthetic construct
  misc_feature 1..20: note = chemically synthesized
  source 1..20: mol_type = other DNA
ggggcttttacttcggcccc

SEQ ID NO: 14910 - DNA, 20 bp, synthetic construct
  misc_feature 1..20: note = chemically synthesized
  source 1..20: mol_type = other DNA
cggcccctggcgtccacacg

SEQ ID NO: 14911 - DNA, 20 bp, synthetic construct
  misc_feature 1..20: note = chemically synthesized
  source 1..20: mol_type = other DNA
ggcccctggcgtccacacgc

SEQ ID NO: 14912 - DNA, 20 bp, synthetic construct
  misc_feature 1..20: note = chemically synthesized
  source 1..20: mol_type = other DNA
gcccctggcgtccacacgcg

SEQ ID NO: 14913 - DNA, 20 bp, synthetic construct
  misc_feature 1..20: note = chemically synthesized
  source 1..20: mol_type = other DNA
ccctggcgtccacacgcggg

SEQ ID NO: 14914 - DNA, 20 bp, synthetic construct
  misc_feature 1..20: note = chemically synthesized
  source 1..20: mol_type = other DNA
ggcgtccacacgcggggagc

SEQ ID NO: 14915 - DNA, 20 bp, synthetic construct
  misc_feature 1..20: note = chemically synthesized
  source 1..20: mol_type = other DNA
ccacacgcggggagcgagcg

SEQ ID NO: 14916 - DNA, 20 bp, synthetic construct
  misc_feature 1..20: note = chemically synthesized
  source 1..20: mol_type = other DNA
cacgcggggagcgagcgcgg

SEQ ID NO: 14917 - DNA, 20 bp, synthetic construct
  misc_feature 1..20: note = chemically synthesized
  source 1..20: mol_type = other DNA
gcggggagcgagcgcggcgg

SEQ ID NO: 14918 - DNA, 20 bp, synthetic construct
  misc_feature 1..20: note = chemically synthesized
  source 1..20: mol_type = other DNA
gggagcgagcgcggcggcgg

SEQ ID NO: 14919 - DNA, 20 bp, synthetic construct
  misc_feature 1..20: note = chemically synthesized
  source 1..20: mol_type = other DNA
ggagcgagcgcggcggcggc

SEQ ID NO: 14920 - DNA, 20 bp, synthetic construct
  misc_feature 1..20: note = chemically synthesized
  source 1..20: mol_type = other DNA
gagcgagcgcggcggcggcg

SEQ ID NO: 14921 - DNA, 20 bp, synthetic construct
  misc_feature 1..20: note = chemically synthesized
  source 1..20: mol_type = other DNA
gcgagcgcggcggcggcggg

SEQ ID NO: 14922 - DNA, 20 bp, synthetic construct
  misc_feature 1..20: note = chemically synthesized
  source 1..20: mol_type = other DNA
cgagcgcggcggcggcgggg

SEQ ID NO: 14923 - DNA, 20 bp, synthetic construct
  misc_feature 1..20: note = chemically synthesized
  source 1..20: mol_type = other DNA
gagcgcggcggcggcgggga

SEQ ID NO: 14924 - DNA, 20 bp, synthetic construct
  misc_feature 1..20: note = chemically synthesized
  source 1..20: mol_type = other DNA
agcgcggcggcggcggggag

SEQ ID NO: 14925 - DNA, 20 bp, synthetic construct
  misc_feature 1..20: note = chemically synthesized
  source 1..20: mol_type = other DNA
gcggcggcggcggggagggg

SEQ ID NO: 14926 - DNA, 20 bp, synthetic construct
  misc_feature 1..20: note = chemically synthesized
  source 1..20: mol_type = other DNA
gcggcggcggggaggggaag

SEQ ID NO: 14927 - DNA, 20 bp, synthetic construct
  misc_feature 1..20: note = chemically synthesized
  source 1..20: mol_type = other DNA
cggcggcggggaggggaagt

SEQ ID NO: 14928 - DNA, 20 bp, synthetic construct
  misc_feature 1..20: note = chemically synthesized
  source 1..20: mol_type = other DNA
aggggaagtgggtgtgcgta

SEQ ID NO: 14929 - DNA, 20 bp, synthetic construct
  misc_feature 1..20: note = chemically synthesized
  source 1..20: mol_type = other DNA
gggaagtgggtgtgcgtacg

SEQ ID NO: 14930 - DNA, 20 bp, synthetic construct
  misc_feature 1..20: note = chemically synthesized
  source 1..20: mol_type = other DNA
ggaagtgggtgtgcgtacgg

SEQ ID NO: 14931 - DNA, 20 bp, synthetic construct
  misc_feature 1..20: note = chemically synthesized
  source 1..20: mol_type = other DNA
aagtgggtgtgcgtacggag

SEQ ID NO: 14932 - DNA, 20 bp, synthetic construct
  misc_feature 1..20: note = chemically synthesized
  source 1..20: mol_type = other DNA
agtgggtgtgcgtacggagg

SEQ ID NO: 14933 - DNA, 20 bp, synthetic construct
  misc_feature 1..20: note = chemically synthesized
  source 1..20: mol_type = other DNA
gtgggtgtgcgtacggagga

SEQ ID NO: 14934 - DNA, 20 bp, synthetic construct
  misc_feature 1..20: note = chemically synthesized
  source 1..20: mol_type = other DNA
tgcgtacggaggagggtgtc

SEQ ID NO: 14935 - DNA, 20 bp, synthetic construct
  misc_feature 1..20: note = chemically synthesized
  source 1..20: mol_type = other DNA
gcgtacggaggagggtgtcc

SEQ ID NO: 14936 - DNA, 20 bp, synthetic construct
  misc_feature 1..20: note = chemically synthesized
  source 1..20: mol_type = other DNA
gtacggaggagggtgtccgg

SEQ ID NO: 14937 - DNA, 20 bp, synthetic construct
  misc_feature 1..20: note = chemically synthesized
  source 1..20: mol_type = other DNA
tgtccgggagcaactctacc

SEQ ID NO: 14938 - DNA, 20 bp, synthetic construct
  misc_feature 1..20: note = chemically synthesized
  source 1..20: mol_type = other DNA
tccctccgcccgcgcttccc

SEQ ID NO: 14939 - DNA, 20 bp, synthetic construct
  misc_feature 1..20: note = chemically synthesized
  source 1..20: mol_type = other DNA
ccgcccgcgcttccccagcc

SEQ ID NO: 14940 - DNA, 20 bp, synthetic construct
  misc_feature 1..20: note = chemically synthesized
  source 1..20: mol_type = other DNA
cgcccgcgcttccccagccc

SEQ ID NO: 14941 - DNA, 20 bp, synthetic construct
  misc_feature 1..20: note = chemically synthesized
  source 1..20: mol_type = other DNA
gcccgcgcttccccagcccg

SEQ ID NO: 14942 - DNA, 20 bp, synthetic construct
  misc_feature 1..20: note = chemically synthesized
  source 1..20: mol_type = other DNA
gcttccccagcccggggctg

SEQ ID NO: 14943 - DNA, 20 bp, synthetic construct
  misc_feature 1..20: note = chemically synthesized
  source 1..20: mol_type = other DNA
agcccggggctgcagcctcc

SEQ ID NO: 14944 - DNA, 20 bp, synthetic construct
  misc_feature 1..20: note = chemically synthesized
  source 1..20: mol_type = other DNA
ttttgaataatctttcattt

SEQ ID NO: 14945 - DNA, 20 bp, synthetic construct
  misc_feature 1..20: note = chemically synthesized
  source 1..20: mol_type = other DNA
ttgaataatctttcatttta

SEQ ID NO: 14946 - DNA, 20 bp, synthetic construct
  misc_feature 1..20: note = chemically synthesized
  source 1..20: mol_type = other DNA
cattttagagtccgcgtgtg

SEQ ID NO: 14947 - DNA, 20 bp, synthetic construct
  misc_feature 1..20: note = chemically synthesized
  source 1..20: mol_type = other DNA
attttagagtccgcgtgtgt

SEQ ID NO: 14948 - DNA, 20 bp, synthetic construct
  misc_feature 1..20: note = chemically synthesized
  source 1..20: mol_type = other DNA
ttttagagtccgcgtgtgtg

SEQ ID NO: 14949 - DNA, 20 bp, synthetic construct
  misc_feature 1..20: note = chemically synthesized
  source 1..20: mol_type = other DNA
tttagagtccgcgtgtgtgg

SEQ ID NO: 14950 - DNA, 20 bp, synthetic construct
  misc_feature 1..20: note = chemically synthesized
  source 1..20: mol_type = other DNA
ttagagtccgcgtgtgtggg

SEQ ID NO: 14951 - DNA, 20 bp, synthetic construct
  misc_feature 1..20: note = chemically synthesized
  source 1..20: mol_type = other DNA
tagagtccgcgtgtgtgggg

SEQ ID NO: 14952 - DNA, 20 bp, synthetic construct
  misc_feature 1..20: note = chemically synthesized
  source 1..20: mol_type = other DNA
gagtccgcgtgtgtgggggg

SEQ ID NO: 14953 - DNA, 20 bp, synthetic construct
  misc_feature 1..20: note = chemically synthesized
  source 1..20: mol_type = other DNA
tccgcgtgtgtgggggggag

SEQ ID NO: 14954 - DNA, 20 bp, synthetic construct
  misc_feature 1..20: note = chemically synthesized
  source 1..20: mol_type = other DNA
ccgcgtgtgtgggggggagc

SEQ ID NO: 14955 - DNA, 20 bp, synthetic construct
  misc_feature 1..20: note = chemically synthesized
  source 1..20: mol_type = other DNA
cgcgtgtgtgggggggagca

SEQ ID NO: 14956 - DNA, 20 bp, synthetic construct
  misc_feature 1..20: note = chemically synthesized
  source 1..20: mol_type = other DNA
gccacccctttcttctctcc

SEQ ID NO: 14957 - DNA, 20 bp, synthetic construct
  misc_feature 1..20: note = chemically synthesized
  source 1..20: mol_type = other DNA
tcccggccacgccaccgccg

SEQ ID NO: 14958 - DNA, 20 bp, synthetic construct
  misc_feature 1..20: note = chemically synthesized
  source 1..20: mol_type = other DNA
caccgccgcggcgctcgctg

SEQ ID NO: 14959 - DNA, 20 bp, synthetic construct
  misc_feature 1..20: note = chemically synthesized
  source 1..20: mol_type = other DNA
gcggcgctcgctgcggccac

SEQ ID NO: 14960 - DNA, 20 bp, synthetic construct
  misc_feature 1..20: note = chemically synthesized
  source 1..20: mol_type = other DNA
cgctcgctgcggccactggt

SEQ ID NO: 14961 - DNA, 20 bp, synthetic construct
  misc_feature 1..20: note = chemically synthesized
  source 1..20: mol_type = other DNA
tgcggccactggtgagcccg

SEQ ID NO: 14962 - DNA, 20 bp, synthetic construct
  misc_feature 1..20: note = chemically synthesized
  source 1..20: mol_type = other DNA
cactggtgagcccgcggccc

SEQ ID NO: 14963 - DNA, 20 bp, synthetic construct
  misc_feature 1..20: note = chemically synthesized
  source 1..20: mol_type = other DNA
gccccagcgccccctcccct

SEQ ID NO: 14964 - DNA, 20 bp, synthetic construct
  misc_feature 1..20: note = chemically synthesized
  source 1..20: mol_type = other DNA
ccctcggcccgcccctcccc

SEQ ID NO: 14965 - DNA, 20 bp, synthetic construct
  misc_feature 1..20: note = chemically synthesized
  source 1..20: mol_type = other DNA
cctcggcccgcccctccccc

SEQ ID NO: 14966 - DNA, 20 bp, synthetic construct
  misc_feature 1..20: note = chemically synthesized
  source 1..20: mol_type = other DNA
ctcggcccgcccctcccccg

SEQ ID NO: 14967 - DNA, 20 bp, synthetic construct
  misc_feature 1..20: note = chemically synthesized
  source 1..20: mol_type = other DNA
tcggcccgcccctcccccgg

SEQ ID NO: 14968 - DNA, 20 bp, synthetic construct
  misc_feature 1..20: note = chemically synthesized
  source 1..20: mol_type = other DNA
cctcccccgggggccgcgtc

SEQ ID NO: 14969 - DNA, 20 bp, synthetic construct
  misc_feature 1..20: note = chemically synthesized
  source 1..20: mol_type = other DNA
ggggccgcgtctggcgtccg

SEQ ID NO: 14970 - DNA, 20 bp, synthetic construct
  misc_feature 1..20: note = chemically synthesized
  source 1..20: mol_type = other DNA
ggccgcgtctggcgtccgcg

SEQ ID NO: 14971 - DNA, 20 bp, synthetic construct
  misc_feature 1..20: note = chemically synthesized
  source 1..20: mol_type = other DNA
gcacctccccctccccgcac

SEQ ID NO: 14972 - DNA, 20 bp, synthetic construct
  misc_feature 1..20: note = chemically synthesized
  source 1..20: mol_type = other DNA
cccctccccgcactggccat

SEQ ID NO: 14973 - DNA, 20 bp, synthetic construct
  misc_feature 1..20: note = chemically synthesized
  source 1..20: mol_type = other DNA
cactggccattggcttgtcc

SEQ ID NO: 14974 - DNA, 20 bp, synthetic construct
  misc_feature 1..20: note = chemically synthesized
  source 1..20: mol_type = other DNA
cctggtctctttttcatgtc

SEQ ID NO: 14975 - DNA, 20 bp, synthetic construct
  misc_feature 1..20: note = chemically synthesized
  source 1..20: mol_type = other DNA
agcccctgatgtgtgtccat

SEQ ID NO: 14976 - DNA, 20 bp, synthetic construct
  misc_feature 1..20: note = chemically synthesized
  source 1..20: mol_type = other DNA
tgatgtgtgtccattggtgt

SEQ ID NO: 14977 - DNA, 20 bp, synthetic construct
  misc_feature 1..20: note = chemically synthesized
  source 1..20: mol_type = other DNA
tttgtgtgtctctgtccatc

SEQ ID NO: 14978 - DNA, 20 bp, synthetic construct
  misc_feature 1..20: note = chemically synthesized
  source 1..20: mol_type = other DNA
catccagactcctgacgttc

SEQ ID NO: 14979 - DNA, 20 bp, synthetic construct
  misc_feature 1..20: note = chemically synthesized
  source 1..20: mol_type = other DNA
actcctgacgttcaagttcg

SEQ ID NO: 14980 - DNA, 20 bp, synthetic construct
  misc_feature 1..20: note = chemically synthesized
  source 1..20: mol_type = other DNA
ctcctgacgttcaagttcgc

SEQ ID NO: 14981 - DNA, 20 bp, synthetic construct
  misc_feature 1..20: note = chemically synthesized
  source 1..20: mol_type = other DNA
tcctgacgttcaagttcgca

SEQ ID NO: 14982 - DNA, 20 bp, synthetic construct
  misc_feature 1..20: note = chemically synthesized
  source 1..20: mol_type = other DNA
cacgtccgcacttgaacttg

SEQ ID NO: 14983 - DNA, 20 bp, synthetic construct
  misc_feature 1..20: note = chemically synthesized
  source 1..20: mol_type = other DNA
ccgcacttgaacttgcagct

SEQ ID NO: 14984 - DNA, 20 bp, synthetic construct
  misc_feature 1..20: note = chemically synthesized
  source 1..20: mol_type = other DNA
cgcacttgaacttgcagctc

SEQ ID NO: 14985 - DNA, 20 bp, synthetic construct
  misc_feature 1..20: note = chemically synthesized
  source 1..20: mol_type = other DNA
gcacttgaacttgcagctca

SEQ ID NO: 14986 - DNA, 20 bp, synthetic construct
  misc_feature 1..20: note = chemically synthesized
  source 1..20: mol_type = other DNA
cacttgaacttgcagctcag

SEQ ID NO: 14987 - DNA, 20 bp, synthetic construct
  misc_feature 1..20: note = chemically synthesized
  source 1..20: mol_type = other DNA
acttgaacttgcagctcagg

SEQ ID NO: 14988 - DNA, 20 bp, synthetic construct
  misc_feature 1..20: note = chemically synthesized
  source 1..20: mol_type = other DNA
cttgaacttgcagctcaggg

SEQ ID NO: 14989 - DNA, 20 bp, synthetic construct
  misc_feature 1..20: note = chemically synthesized
  source 1..20: mol_type = other DNA
ttttttttttgcttaaaaaa

SEQ ID NO: 14990 - DNA, 20 bp, synthetic construct
  misc_feature 1..20: note = chemically synthesized
  source 1..20: mol_type = other DNA
tgcttaaaaaaaagccatga

SEQ ID NO: 14991 - DNA, 20 bp, synthetic construct
  misc_feature 1..20: note = chemically synthesized
  source 1..20: mol_type = other DNA
gtattatttctaatttattt

SEQ ID NO: 14992 - DNA, 20 bp, synthetic construct
  misc_feature 1..20: note = chemically synthesized
  source 1..20: mol_type = other DNA
taatttattttggatgtcaa

SEQ ID NO: 14993 - DNA, 20 bp, synthetic construct
  misc_feature 1..20: note = chemically synthesized
  source 1..20: mol_type = other DNA
aatttattttggatgtcaaa

SEQ ID NO: 14994 - DNA, 20 bp, synthetic construct
  misc_feature 1..20: note = chemically synthesized
  source 1..20: mol_type = other DNA
gatgtcaaaaggcactgatg

SEQ ID NO: 14995 - DNA, 20 bp, synthetic construct
  misc_feature 1..20: note = chemically synthesized
  source 1..20: mol_type = other DNA
actgatgaagatattttctc

SEQ ID NO: 14996 - DNA, 20 bp, synthetic construct
  misc_feature 1..20: note = chemically synthesized
  source 1..20: mol_type = other DNA
tgatgaagatattttctctg

SEQ ID NO: 14997 - DNA, 20 bp, synthetic construct
  misc_feature 1..20: note = chemically synthesized
  source 1..20: mol_type = other DNA
gagtctccttctttctaacc

SEQ ID NO: 14998 - DNA, 20 bp, synthetic construct
  misc_feature 1..20: note = chemically synthesized
  source 1..20: mol_type = other DNA
cggctctcccgatgtgaacc

SEQ ID NO: 14999 - DNA, 20 bp, synthetic construct
  misc_feature 1..20: note = chemically synthesized
  source 1..20: mol_type = other DNA
cgccgccgccgcccgccccg

SEQ ID NO: 15000 - DNA, 20 bp, synthetic construct
  misc_feature 1..20: note = chemically synthesized
  source 1..20: mol_type = other DNA
agcccaccatgtctcgccgc

SEQ ID NO: 15001 - DNA, 20 bp, synthetic construct
  misc_feature 1..20: note = chemically synthesized
  source 1..20: mol_type = other DNA
caccatgtctcgccgcaagc

SEQ ID NO: 15002 - DNA, 20 bp, synthetic construct
  misc_feature 1..20: note = chemically synthesized
  source 1..20: mol_type = other DNA
accatgtctcgccgcaagca

SEQ ID NO: 15003 - DNA, 20 bp, synthetic construct
  misc_feature 1..20: note = chemically synthesized
  source 1..20: mol_type = other DNA
gccgcaagcaaggcaaaccc

SEQ ID NO: 15004 - DNA, 20 bp, synthetic construct
  misc_feature 1..20: note = chemically synthesized
  source 1..20: mol_type = other DNA
caaggcaaaccccagcactt

SEQ ID NO: 15005 - DNA, 20 bp, synthetic construct
  misc_feature 1..20: note = chemically synthesized
  source 1..20: mol_type = other DNA
aaccccagcacttaagcaaa

SEQ ID NO: 15006 - DNA, 20 bp, synthetic construct
  misc_feature 1..20: note = chemically synthesized
  source 1..20: mol_type = other DNA
accccagcacttaagcaaac

SEQ ID NO: 15007 - DNA, 20 bp, synthetic construct
  misc_feature 1..20: note = chemically synthesized
  source 1..20: mol_type = other DNA
gcaaacgggaattctcgcgt

SEQ ID NO: 15008 - DNA, 20 bp, synthetic construct
  misc_feature 1..20: note = chemically synthesized
  source 1..20: mol_type = other DNA
tcgcgtaagtaacccaataa

SEQ ID NO: 15009 - DNA, 20 bp, synthetic construct
  misc_feature 1..20: note = chemically synthesized
  source 1..20: mol_type = other DNA
taataattattaataatcac

SEQ ID NO: 15010 - DNA, 20 bp, synthetic construct
  misc_feature 1..20: note = chemically synthesized
  source 1..20: mol_type = other DNA
ataattattaataatcacga

SEQ ID NO: 15011 - DNA, 20 bp, synthetic construct
  misc_feature 1..20: note = chemically synthesized
  source 1..20: mol_type = other DNA
ttaataatcacgagagcgcg

SEQ ID NO: 15012 - DNA, 20 bp, synthetic construct
  misc_feature 1..20: note = chemically synthesized
  source 1..20: mol_type = other DNA
taataatcacgagagcgcgc

SEQ ID NO: 15013 - DNA, 20 bp, synthetic construct
  misc_feature 1..20: note = chemically synthesized
  source 1..20: mol_type = other DNA
atcacgagagcgcgcaggac

SEQ ID NO: 15014 - DNA, 20 bp, synthetic construct
  misc_feature 1..20: note = chemically synthesized
  source 1..20: mol_type = other DNA
acgagagcgcgcaggactag

SEQ ID NO: 15015 - DNA, 20 bp, synthetic construct
  misc_feature 1..20: note = chemically synthesized
  source 1..20: mol_type = other DNA
gcgcgcaggactagaagcaa

SEQ ID NO: 15016 - DNA, 20 bp, synthetic construct
  misc_feature 1..20: note = chemically synthesized
  source 1..20: mol_type = other DNA
gcaggactagaagcaaaagc

SEQ ID NO: 15017 - DNA, 20 bp, synthetic construct
  misc_feature 1..20: note = chemically synthesized
  source 1..20: mol_type = other DNA
caggactagaagcaaaagcg

SEQ ID NO: 15018 - DNA, 20 bp, synthetic construct
  misc_feature 1..20: note = chemically synthesized
  source 1..20: mol_type = other DNA
aggactagaagcaaaagcga

SEQ ID NO: 15019 - DNA, 20 bp, synthetic construct
  misc_feature 1..20: note = chemically synthesized
  source 1..20: mol_type = other DNA
ggactagaagcaaaagcgag

SEQ ID NO: 15020 - DNA, 20 bp, synthetic construct
  misc_feature 1..20: note = chemically synthesized
  source 1..20: mol_type = other DNA
gactagaagcaaaagcgagg

SEQ ID NO: 15021 - DNA, 20 bp, synthetic construct
  misc_feature 1..20: note = chemically synthesized
  source 1..20: mol_type = other DNA
ctagaagcaaaagcgagggg

SEQ ID NO: 15022 - DNA, 20 bp, synthetic construct
  misc_feature 1..20: note = chemically synthesized
  source 1..20: mol_type = other DNA
agaagcaaaagcgaggggga

SEQ ID NO: 15023 - DNA, 20 bp, synthetic construct
  misc_feature 1..20: note = chemically synthesized
  source 1..20: mol_type = other DNA
aagcaaaagcgagggggaga

SEQ ID NO: 15024 - DNA, 20 bp, synthetic construct
  misc_feature 1..20: note = chemically synthesized
  source 1..20: mol_type = other DNA
agcaaaagcgagggggagag

SEQ ID NO: 15025 - DNA, 20 bp, synthetic construct
  misc_feature 1..20: note = chemically synthesized
  source 1..20: mol_type = other DNA
gcaaaagcgagggggagaga

SEQ ID NO: 15026 - DNA, 20 bp, synthetic construct
  misc_feature 1..20: note = chemically synthesized
  source 1..20: mol_type = other DNA
caaaagcgagggggagagag

SEQ ID NO: 15027 - DNA, 20 bp, synthetic construct
  misc_feature 1..20: note = chemically synthesized
  source 1..20: mol_type = other DNA
tgcatttttaaatttttcac

SEQ ID NO: 15028 - DNA, 20 bp, synthetic construct
  misc_feature 1..20: note = chemically synthesized
  source 1..20: mol_type = other DNA
ttttcacgagaaaaacctcc

SEQ ID NO: 15029 - DNA, 20 bp, synthetic construct
  misc_feature 1..20: note = chemically synthesized
  source 1..20: mol_type = other DNA
ttcacgagaaaaacctccga

SEQ ID NO: 15030 - DNA, 20 bp, synthetic construct
  misc_feature 1..20: note = chemically synthesized
  source 1..20: mol_type = other DNA
gagaaaaacctccgagagtc

SEQ ID NO: 15031 - DNA, 20 bp, synthetic construct
  misc_feature 1..20: note = chemically synthesized
  source 1..20: mol_type = other DNA
agaaaaacctccgagagtcg

SEQ ID NO: 15032 - DNA, 20 bp, synthetic construct
  misc_feature 1..20: note = chemically synthesized
  source 1..20: mol_type = other DNA
acctccgagagtcgaggtaa

SEQ ID NO: 15033 - DNA, 20 bp, synthetic construct
  misc_feature 1..20: note = chemically synthesized
  source 1..20: mol_type = other DNA
ctccgagagtcgaggtaaaa

SEQ ID NO: 15034 - DNA, 20 bp, synthetic construct
  misc_feature 1..20: note = chemically synthesized
  source 1..20: mol_type = other DNA
gagtcgaggtaaaagagata

SEQ ID NO: 15035 - DNA, 20 bp, synthetic construct
  misc_feature 1..20: note = chemically synthesized
  source 1..20: mol_type = other DNA
agtcgaggtaaaagagataa

SEQ ID NO: 15036 - DNA, 20 bp, synthetic construct
  misc_feature 1..20: note = chemically synthesized
  source 1..20: mol_type = other DNA
gtcgaggtaaaagagataaa

SEQ ID NO: 15037 - DNA, 20 bp, synthetic construct
  misc_feature 1..20: note = chemically synthesized
  source 1..20: mol_type = other DNA
tcgaggtaaaagagataaag

SEQ ID NO: 15038 - DNA, 20 bp, synthetic construct
  misc_feature 1..20: note = chemically synthesized
  source 1..20: mol_type = other DNA
cgaggtaaaagagataaagg

SEQ ID NO: 15039 - DNA, 20 bp, synthetic construct
  misc_feature 1..20: note = chemically synthesized
  source 1..20: mol_type = other DNA
gaaaaaaccctcatcccatc

SEQ ID NO: 15040 - DNA, 20 bp, synthetic construct
  misc_feature 1..20: note = chemically synthesized
  source 1..20: mol_type = other DNA
attgccgtgtatgcactttt

SEQ ID NO: 15041 - DNA, 20 bp, synthetic construct
  misc_feature 1..20: note = chemically synthesized
  source 1..20: mol_type = other DNA
ccgtgtatgcacttttgaga

SEQ ID NO: 15042 - DNA, 20 bp, synthetic construct
  misc_feature 1..20: note = chemically synthesized
  source 1..20: mol_type = other DNA
gctttatttctcttttcgaa

SEQ ID NO: 15043 - DNA, 20 bp, synthetic construct
  misc_feature 1..20: note = chemically synthesized
  source 1..20: mol_type = other DNA
ctttatttctcttttcgaaa

SEQ ID NO: 15044 - DNA, 20 bp, synthetic construct
  misc_feature 1..20: note = chemically synthesized
  source 1..20: mol_type = other DNA
ccactccccccccgccccgc

SEQ ID NO: 15045 - DNA, 20 bp, synthetic construct
  misc_feature 1..20: note = chemically synthesized
  source 1..20: mol_type = other DNA
gcaaaataatgaacaatgct

SEQ ID NO: 15046 - DNA, 20 bp, synthetic construct
  misc_feature 1..20: note = chemically synthesized
  source 1..20: mol_type = other DNA
caaaataatgaacaatgcta

SEQ ID NO: 15047 - DNA, 20 bp, synthetic construct
  misc_feature 1..20: note = chemically synthesized
  source 1..20: mol_type = other DNA
gaacaactcacatgcaaacc

SEQ ID NO: 15048 - DNA, 20 bp, synthetic construct
  misc_feature 1..20: note = chemically synthesized
  source 1..20: mol_type = other DNA
aacaactcacatgcaaacct

SEQ ID NO: 15049 - DNA, 20 bp, synthetic construct
  misc_feature 1..20: note = chemically synthesized
  source 1..20: mol_type = other DNA
acaactcacatgcaaacctg

SEQ ID NO: 15050 - DNA, 20 bp, synthetic construct
  misc_feature 1..20: note = chemically synthesized
  source 1..20: mol_type = other DNA
caactcacatgcaaacctgg

SEQ ID NO: 15051 - DNA, 20 bp, synthetic construct
  misc_feature 1..20: note = chemically synthesized
  source 1..20: mol_type = other DNA
ctcacatgcaaacctggggg

SEQ ID NO: 15052 - DNA, 20 bp, synthetic construct
  misc_feature 1..20: note = chemically synthesized
  source 1..20: mol_type = other DNA
tcacatgcaaacctgggggt

SEQ ID NO: 15053 - DNA, 20 bp, synthetic construct
  misc_feature 1..20: note = chemically synthesized
  source 1..20: mol_type = other DNA
acatgcaaacctgggggtgg

SEQ ID NO: 15054 - DNA, 20 bp, synthetic construct
  misc_feature 1..20: note = chemically synthesized
  source 1..20: mol_type = other DNA
gcaaacctgggggtgggagc

SEQ ID NO: 15055 - DNA, 20 bp, synthetic construct
  misc_feature 1..20: note = chemically synthesized
  source 1..20: mol_type = other DNA
aacctgggggtgggagctgg

SEQ ID NO: 15056 - DNA, 20 bp, synthetic construct
  misc_feature 1..20: note = chemically synthesized
  source 1..20: mol_type = other DNA
acctgggggtgggagctggt

SEQ ID NO: 15057 - DNA, 20 bp, synthetic construct
  misc_feature 1..20: note = chemically synthesized
  source 1..20: mol_type = other DNA
cctgggggtgggagctggtg

SEQ ID NO: 15058 - DNA, 20 bp, synthetic construct
  misc_feature 1..20: note = chemically synthesized
  source 1..20: mol_type = other DNA
ggggtgggagctggtgggga

SEQ ID NO: 15059 - DNA, 20 bp, synthetic construct
  misc_feature 1..20: note = chemically synthesized
  source 1..20: mol_type = other DNA
gggtgggagctggtggggaa

SEQ ID NO: 15060 - DNA, 20 bp, synthetic construct
  misc_feature 1..20: note = chemically synthesized
  source 1..20: mol_type = other DNA
ggtgggagctggtggggaaa

SEQ ID NO: 15061 - DNA, 20 bp, synthetic construct
  misc_feature 1..20: note = chemically synthesized
  source 1..20: mol_type = other DNA
tgggagctggtggggaaagg

SEQ ID NO: 15062 - DNA, 20 bp, synthetic construct
  misc_feature 1..20: note = chemically synthesized
  source 1..20: mol_type = other DNA
gggagctggtggggaaaggg

SEQ ID NO: 15063 - DNA, 20 bp, synthetic construct
  misc_feature 1..20: note = chemically synthesized
  source 1..20: mol_type = other DNA
ggttgcttcccactcaccgt

SEQ ID NO: 15064 - DNA, 20 bp, synthetic construct
  misc_feature 1..20: note = chemically synthesized
  source 1..20: mol_type = other DNA
tcccactcaccgtaagaaaa

SEQ ID NO: 15065 - DNA, 20 bp, synthetic construct
  misc_feature 1..20: note = chemically synthesized
  source 1..20: mol_type = other DNA
cccactcaccgtaagaaaat

SEQ ID NO: 15066 - DNA, 20 bp, synthetic construct
  misc_feature 1..20: note = chemically synthesized
  source 1..20: mol_type = other DNA
ccactcaccgtaagaaaatg

SEQ ID NO: 15067 - DNA, 20 bp, synthetic construct
  misc_feature 1..20: note = chemically synthesized
  source 1..20: mol_type = other DNA
cactcaccgtaagaaaatgg

SEQ ID NO: 15068 - DNA, 20 bp, synthetic construct
  misc_feature 1..20: note = chemically synthesized
  source 1..20: mol_type = other DNA
actcaccgtaagaaaatggg

SEQ ID NO: 15069 - DNA, 20 bp, synthetic construct
  misc_feature 1..20: note = chemically synthesized
  source 1..20: mol_type = other DNA
ctcaccgtaagaaaatgggg

SEQ ID NO: 15070 - DNA, 20 bp, synthetic construct
  misc_feature 1..20: note = chemically synthesized
  source 1..20: mol_type = other DNA
accgtaagaaaatggggggg

SEQ ID NO: 15071 - DNA, 20 bp, synthetic construct
  misc_feature 1..20: note = chemically synthesized
  source 1..20: mol_type = other DNA
ccgtaagaaaatgggggggt

SEQ ID NO: 15072 - DNA, 20 bp, synthetic construct
  misc_feature 1..20: note = chemically synthesized
  source 1..20: mol_type = other DNA
cgtaagaaaatgggggggta

SEQ ID NO: 15073 - DNA, 20 bp, synthetic construct
  misc_feature 1..20: note = chemically synthesized
  source 1..20: mol_type = other DNA
taagaaaatgggggggtagg

SEQ ID NO: 15074 - DNA, 20 bp, synthetic construct
  misc_feature 1..20: note = chemically synthesized
  source 1..20: mol_type = other DNA
aagaaaatgggggggtaggg

SEQ ID NO: 15075 - DNA, 20 bp, synthetic construct
  misc_feature 1..20: note = chemically synthesized
  source 1..20: mol_type = other DNA
agaaaatgggggggtaggga

SEQ ID NO: 15076 - DNA, 20 bp, synthetic construct
  misc_feature 1..20: note = chemically synthesized
  source 1..20: mol_type = other DNA
aaaatgggggggtagggagg

SEQ ID NO: 15077 - DNA, 20 bp, synthetic construct
  misc_feature 1..20: note = chemically synthesized
  source 1..20: mol_type = other DNA
tgggggggtagggagggagt

SEQ ID NO: 15078 - DNA, 20 bp, synthetic construct
  misc_feature 1..20: note = chemically synthesized
  source 1..20: mol_type = other DNA
ggtagggagggagtgagtac

SEQ ID NO: 15079 - DNA, 20 bp, synthetic construct
  misc_feature 1..20: note = chemically synthesized
  source 1..20: mol_type = other DNA
caagtctaaaaaacgattcc

SEQ ID NO: 15080 - DNA, 20 bp, synthetic construct
  misc_feature 1..20: note = chemically synthesized
  source 1..20: mol_type = other DNA
aagtctaaaaaacgattccc

SEQ ID NO: 15081 - DNA, 20 bp, synthetic construct
  misc_feature 1..20: note = chemically synthesized
  source 1..20: mol_type = other DNA
agtctaaaaaacgattcccg

SEQ ID NO: 15082 - DNA, 20 bp, synthetic construct
  misc_feature 1..20: note = chemically synthesized
  source 1..20: mol_type = other DNA
tctaaaaaacgattcccggg

SEQ ID NO: 15083 - DNA, 20 bp, synthetic construct
  misc_feature 1..20: note = chemically synthesized
  source 1..20: mol_type = other DNA
aaaacgattcccggggagaa

SEQ ID NO: 15084 - DNA, 20 bp, synthetic construct
  misc_feature 1..20: note = chemically synthesized
  source 1..20: mol_type = other DNA
aacgattcccggggagaaaa

SEQ ID NO: 15085 - DNA, 20 bp, synthetic construct
  misc_feature 1..20: note = chemically synthesized
  source 1..20: mol_type = other DNA
acgattcccggggagaaaag

SEQ ID NO: 15086 - DNA, 20 bp, synthetic construct
  misc_feature 1..20: note = chemically synthesized
  source 1..20: mol_type = other DNA
ttcccggggagaaaagaggt

SEQ ID NO: 15087 - DNA, 20 bp, synthetic construct
  misc_feature 1..20: note = chemically synthesized
  source 1..20: mol_type = other DNA
ggggagaaaagaggtgagac

SEQ ID NO: 15088 - DNA, 20 bp, synthetic construct
  misc_feature 1..20: note = chemically synthesized
  source 1..20: mol_type = other DNA
aaagaggtgagactggcttt

SEQ ID NO: 15089 - DNA, 20 bp, synthetic construct
  misc_feature 1..20: note = chemically synthesized
  source 1..20: mol_type = other DNA
tgagactggcttttggacac

SEQ ID NO: 15090 - DNA, 20 bp, synthetic construct
  misc_feature 1..20: note = chemically synthesized
  source 1..20: mol_type = other DNA
tttggacaccagcgcgctca

SEQ ID NO: 15091 - DNA, 20 bp, synthetic construct
  misc_feature 1..20: note = chemically synthesized
  source 1..20: mol_type = other DNA
acaccagcgcgctcacggtc

SEQ ID NO: 15092 - DNA, 20 bp, synthetic construct
  misc_feature 1..20: note = chemically synthesized
  source 1..20: mol_type = other DNA
cgcgctcacggtcaagtgtg

SEQ ID NO: 15093 - DNA, 20 bp, synthetic construct
  misc_feature 1..20: note = chemically synthesized
  source 1..20: mol_type = other DNA
gctcacggtcaagtgtgcag

SEQ ID NO: 15094 - DNA, 20 bp, synthetic construct
  misc_feature 1..20: note = chemically synthesized
  source 1..20: mol_type = other DNA
ctcacggtcaagtgtgcagc

SEQ ID NO: 15095 - DNA, 20 bp, synthetic construct
  misc_feature 1..20: note = chemically synthesized
  source 1..20: mol_type = other DNA
cacggtcaagtgtgcagcgg

SEQ ID NO: 15096 - DNA, 20 bp, synthetic construct
  misc_feature 1..20: note = chemically synthesized
  source 1..20: mol_type = other DNA
acggtcaagtgtgcagcggg

SEQ ID NO: 15097 - DNA, 20 bp, synthetic construct
  misc_feature 1..20: note = chemically synthesized
  source 1..20: mol_type = other DNA
tcaagtgtgcagcgggagga

SEQ ID NO: 15098 - DNA, 20 bp, synthetic construct
  misc_feature 1..20: note = chemically synthesized
  source 1..20: mol_type = other DNA
agtgtgcagcgggaggaaag

SEQ ID NO: 15099 - DNA, 20 bp, synthetic construct
  misc_feature 1..20: note = chemically synthesized
  source 1..20: mol_type = other DNA
gaaagtagtcatccccacaa

SEQ ID NO: 15100 - DNA, 20 bp, synthetic construct
  misc_feature 1..20: note = chemically synthesized
  source 1..20: mol_type = other DNA
gtagtcatccccacaatagt

SEQ ID NO: 15101 - DNA, 20 bp, synthetic construct
  misc_feature 1..20: note = chemically synthesized
  source 1..20: mol_type = other DNA
tcatccccacaatagtgaga

SEQ ID NO: 15102 - DNA, 20 bp, synthetic construct
  misc_feature 1..20: note = chemically synthesized
  source 1..20: mol_type = other DNA
tccccacaatagtgagaaag

SEQ ID NO: 15103 - DNA, 20 bp, synthetic construct
  misc_feature 1..20: note = chemically synthesized
  source 1..20: mol_type = other DNA
atagtgagaaagtggcactg

SEQ ID NO: 15104 - DNA, 20 bp, synthetic construct
  misc_feature 1..20: note = chemically synthesized
  source 1..20: mol_type = other DNA
tgagaaagtggcactgtgga

SEQ ID NO: 15105 - DNA, 20 bp, synthetic construct
  misc_feature 1..20: note = chemically synthesized
  source 1..20: mol_type = other DNA
gagaaagtggcactgtggaa

SEQ ID NO: 15106 - DNA, 20 bp, synthetic construct
  misc_feature 1..20: note = chemically synthesized
  source 1..20: mol_type = other DNA
agaaagtggcactgtggaaa

SEQ ID NO: 15107 - DNA, 20 bp, synthetic construct
  misc_feature 1..20: note = chemically synthesized
  source 1..20: mol_type = other DNA
gaaagtggcactgtggaaag

SEQ ID NO: 15108 - DNA, 20 bp, synthetic construct
  misc_feature 1..20: note = chemically synthesized
  source 1..20: mol_type = other DNA
gcactgtggaaaggggcccc

SEQ ID NO: 15109 - DNA, 20 bp, synthetic construct
  misc_feature 1..20: note = chemically synthesized
  source 1..20: mol_type = other DNA
aaggggcccccggcgctcct

SEQ ID NO: 15110 - DNA, 20 bp, synthetic construct
  misc_feature 1..20: note = chemically synthesized
  source 1..20: mol_type = other DNA
ccccggcgctcctgagtccg

SEQ ID NO: 15111 - DNA, 20 bp, synthetic construct
  misc_feature 1..20: note = chemically synthesized
  source 1..20: mol_type = other DNA
ccggcgctcctgagtccgcg

SEQ ID NO: 15112 - DNA, 20 bp, synthetic construct
  misc_feature 1..20: note = chemically synthesized
  source 1..20: mol_type = other DNA
cgctcctgagtccgcggagt

SEQ ID NO: 15113 - DNA, 20 bp, synthetic construct
  misc_feature 1..20: note = chemically synthesized
  source 1..20: mol_type = other DNA
gctcctgagtccgcggagtc

SEQ ID NO: 15114 - DNA, 20 bp, synthetic construct
  misc_feature 1..20: note = chemically synthesized
  source 1..20: mol_type = other DNA
tcctgagtccgcggagtcgg

SEQ ID NO: 15115 - DNA, 20 bp, synthetic construct
  misc_feature 1..20: note = chemically synthesized
  source 1..20: mol_type = other DNA
ctgagtccgcggagtcggga

SEQ ID NO: 15116 - DNA, 20 bp, synthetic construct
  misc_feature 1..20: note = chemically synthesized
  source 1..20: mol_type = other DNA
tgagtccgcggagtcgggag

SEQ ID NO: 15117 - DNA, 20 bp, synthetic construct
  misc_feature 1..20: note = chemically synthesized
  source 1..20: mol_type = other DNA
gagtccgcggagtcgggaga

SEQ ID NO: 15118 - DNA, 20 bp, synthetic construct
  misc_feature 1..20: note = chemically synthesized
  source 1..20: mol_type = other DNA
agtccgcggagtcgggagag

SEQ ID NO: 15119 - DNA, 20 bp, synthetic construct
  misc_feature 1..20: note = chemically synthesized
  source 1..20: mol_type = other DNA
cggagtcgggagaggggccg

SEQ ID NO: 15120 - DNA, 20 bp, synthetic construct
  misc_feature 1..20: note = chemically synthesized
  source 1..20: mol_type = other DNA
cgggagaggggccgcggcga

SEQ ID NO: 15121 - DNA, 20 bp, synthetic construct
  misc_feature 1..20: note = chemically synthesized
  source 1..20: mol_type = other DNA
gggagaggggccgcggcgac

SEQ ID NO: 15122 - DNA, 20 bp, synthetic construct
  misc_feature 1..20: note = chemically synthesized
  source 1..20: mol_type = other DNA
ggagaggggccgcggcgacg

SEQ ID NO: 15123 - DNA, 20 bp, synthetic construct
  misc_feature 1..20: note = chemically synthesized
  source 1..20: mol_type = other DNA
agaggggccgcggcgacggg

SEQ ID NO: 15124 - DNA, 20 bp, synthetic construct
  misc_feature 1..20: note = chemically synthesized
  source 1..20: mol_type = other DNA
aggggccgcggcgacgggga

SEQ ID NO: 15125 - DNA, 20 bp, synthetic construct
  misc_feature 1..20: note = chemically synthesized
  source 1..20: mol_type = other DNA
cgcggcgacggggagagccg

SEQ ID NO: 15126 - DNA, 20 bp, synthetic construct
  misc_feature 1..20: note = chemically synthesized
  source 1..20: mol_type = other DNA
gcggcgacggggagagccgt

SEQ ID NO: 15127 - DNA, 20 bp, synthetic construct
  misc_feature 1..20: note = chemically synthesized
  source 1..20: mol_type = other DNA
gacggggagagccgtgggac

SEQ ID NO: 15128 - DNA, 20 bp, synthetic construct
  misc_feature 1..20: note = chemically synthesized
  source 1..20: mol_type = other DNA
acggggagagccgtgggacc

SEQ ID NO: 15129 - DNA, 20 bp, synthetic construct
  misc_feature 1..20: note = chemically synthesized
  source 1..20: mol_type = other DNA
gggagagccgtgggaccggg

SEQ ID NO: 15130 - DNA, 20 bp, synthetic construct
  misc_feature 1..20: note = chemically synthesized
  source 1..20: mol_type = other DNA
ggagagccgtgggaccggga

SEQ ID NO: 15131 - DNA, 20 bp, synthetic construct
  misc_feature 1..20: note = chemically synthesized
  source 1..20: mol_type = other DNA
agccgtgggaccgggaagga

SEQ ID NO: 15132 - DNA, 20 bp, synthetic construct
  misc_feature 1..20: note = chemically synthesized
  source 1..20: mol_type = other DNA
gccgtgggaccgggaaggac

SEQ ID NO: 15133 - DNA, 20 bp, synthetic construct
  misc_feature 1..20: note = chemically synthesized
  source 1..20: mol_type = other DNA
cgtgggaccgggaaggacgg

SEQ ID NO: 15134 - DNA, 20 bp, synthetic construct
  misc_feature 1..20: note = chemically synthesized
  source 1..20: mol_type = other DNA
accgggaaggacgggagacg

SEQ ID NO: 15135 - DNA, 20 bp, synthetic construct
  misc_feature 1..20: note = chemically synthesized
  source 1..20: mol_type = other DNA
ggaaggacgggagacgcggc

SEQ ID NO: 15136 - DNA, 20 bp, synthetic construct
  misc_feature 1..20: note = chemically synthesized
  source 1..20: mol_type = other DNA
ggcactgccgccttttgttc

SEQ ID NO: 15137 - DNA, 20 bp, synthetic construct
  misc_feature 1..20: note = chemically synthesized
  source 1..20: mol_type = other DNA
ctgccgccttttgttccggc

SEQ ID NO: 15138 - DNA, 20 bp, synthetic construct
  misc_feature 1..20: note = chemically synthesized
  source 1..20: mol_type = other DNA
gccgccttttgttccggcca

SEQ ID NO: 15139 - DNA, 20 bp, synthetic construct
  misc_feature 1..20: note = chemically synthesized
  source 1..20: mol_type = other DNA
ccgccttttgttccggccag

SEQ ID NO: 15140 - DNA, 20 bp, synthetic construct
  misc_feature 1..20: note = chemically synthesized
  source 1..20: mol_type = other DNA
ccttttgttccggccagagg

SEQ ID NO: 15141 - DNA, 20 bp, synthetic construct
  misc_feature 1..20: note = chemically synthesized
  source 1..20: mol_type = other DNA
cttttgttccggccagaggt

SEQ ID NO: 15142 - DNA, 20 bp, synthetic construct
  misc_feature 1..20: note = chemically synthesized
  source 1..20: mol_type = other DNA
tgtcccgctgccttttgtgc

SEQ ID NO: 15143 - DNA, 20 bp, synthetic construct
  misc_feature 1..20: note = chemically synthesized
  source 1..20: mol_type = other DNA
cgccgccgccgccgccgccg

SEQ ID NO: 15144 - DNA, 20 bp, synthetic construct
  misc_feature 1..20: note = chemically synthesized
  source 1..20: mol_type = other DNA
gccgccgccgccgccgccga

SEQ ID NO: 15145 - DNA, 20 bp, synthetic construct
  misc_feature 1..20: note = chemically synthesized
  source 1..20: mol_type = other DNA
ccgccgccgccgccgccgaa

SEQ ID NO: 15146 - DNA, 20 bp, synthetic construct
  misc_feature 1..20: note = chemically synthesized
  source 1..20: mol_type = other DNA
ccgccgccgccgccgaaggg

SEQ ID NO: 15147 - DNA, 20 bp, synthetic construct
  misc_feature 1..20: note = chemically synthesized
  source 1..20: mol_type = other DNA
cgccgccgccgccgaagggc

SEQ ID NO: 15148 - DNA, 20 bp, synthetic construct
  misc_feature 1..20: note = chemically synthesized
  source 1..20: mol_type = other DNA
ccgccgccgccgaagggcag

SEQ ID NO: 15149 - DNA, 20 bp, synthetic construct
  misc_feature 1..20: note = chemically synthesized
  source 1..20: mol_type = other DNA
cgccgccgaagggcaggagc

SEQ ID NO: 15150 - DNA, 20 bp, synthetic construct
  misc_feature 1..20: note = chemically synthesized
  source 1..20: mol_type = other DNA
gccgccgaagggcaggagct

SEQ ID NO: 15151 - DNA, 20 bp, synthetic construct
  misc_feature 1..20: note = chemically synthesized
  source 1..20: mol_type = other DNA
ccgccgaagggcaggagcta

SEQ ID NO: 15152 - DNA, 20 bp, synthetic construct
  misc_feature 1..20: note = chemically synthesized
  source 1..20: mol_type = other DNA
cgaagggcaggagctagggc

SEQ ID NO: 15153 - DNA, 20 bp, synthetic construct
  misc_feature 1..20: note = chemically synthesized
  source 1..20: mol_type = other DNA
gaagggcaggagctagggcc

SEQ ID NO: 15154 - DNA, 20 bp, synthetic construct
  misc_feature 1..20: note = chemically synthesized
  source 1..20: mol_type = other DNA
aagggcaggagctagggccg

SEQ ID NO: 15155 - DNA, 20 bp, synthetic construct
  misc_feature 1..20: note = chemically synthesized
  source 1..20: mol_type = other DNA
agggcaggagctagggccgg

SEQ ID NO: 15156 - DNA, 20 bp, synthetic construct
  misc_feature 1..20: note = chemically synthesized
  source 1..20: mol_type = other DNA
ggcaggagctagggccgggg

SEQ ID NO: 15157 - DNA, 20 bp, synthetic construct
  misc_feature 1..20: note = chemically synthesized
  source 1..20: mol_type = other DNA
gcaggagctagggccggggg

SEQ ID NO: 15158 - DNA, 20 bp, synthetic construct
  misc_feature 1..20: note = chemically synthesized
  source 1..20: mol_type = other DNA
aggagctagggccgggggag

SEQ ID NO: 15159 - DNA, 20 bp, synthetic construct
  misc_feature 1..20: note = chemically synthesized
  source 1..20: mol_type = other DNA
ggagctagggccgggggagg

SEQ ID NO: 15160 - DNA, 20 bp, synthetic construct
  misc_feature 1..20: note = chemically synthesized
  source 1..20: mol_type = other DNA
gctagggccgggggaggagg

SEQ ID NO: 15161 - DNA, 20 bp, synthetic construct
  misc_feature 1..20: note = chemically synthesized
  source 1..20: mol_type = other DNA
gggccgggggaggaggcggc

SEQ ID NO: 15162 - DNA, 20 bp, synthetic construct
  misc_feature 1..20: note = chemically synthesized
  source 1..20: mol_type = other DNA
ggccgggggaggaggcggcc

SEQ ID NO: 15163 - DNA, 20 bp, synthetic construct
  misc_feature 1..20: note = chemically synthesized
  source 1..20: mol_type = other DNA
gccgggggaggaggcggccg

SEQ ID NO: 15164 - DNA, 20 bp, synthetic construct
  misc_feature 1..20: note = chemically synthesized
  source 1..20: mol_type = other DNA
ccgggggaggaggcggccgg

SEQ ID NO: 15165 - DNA, 20 bp, synthetic construct
  misc_feature 1..20: note = chemically synthesized
  source 1..20: mol_type = other DNA
aggaggcggccgggggcacg

SEQ ID NO: 15166 - DNA, 20 bp, synthetic construct
  misc_feature 1..20: note = chemically synthesized
  source 1..20: mol_type = other DNA
ggaggcggccgggggcacgc

SEQ ID NO: 15167 - DNA, 20 bp, synthetic construct
  misc_feature 1..20: note = chemically synthesized
  source 1..20: mol_type = other DNA
aggcggccgggggcacgcgg

SEQ ID NO: 15168 - DNA, 20 bp, synthetic construct
  misc_feature 1..20: note = chemically synthesized
  source 1..20: mol_type = other DNA
gcggccgggggcacgcggga

SEQ ID NO: 15169 - DNA, 20 bp, synthetic construct
  misc_feature 1..20: note = chemically synthesized
  source 1..20: mol_type = other DNA
cggccgggggcacgcgggag

SEQ ID NO: 15170 - DNA, 20 bp, synthetic construct
  misc_feature 1..20: note = chemically synthesized
  source 1..20: mol_type = other DNA
ggccgggggcacgcgggaga

SEQ ID NO: 15171 - DNA, 20 bp, synthetic construct
  misc_feature 1..20: note = chemically synthesized
  source 1..20: mol_type = other DNA
ccgggggcacgcgggagagg

SEQ ID NO: 15172 - DNA, 20 bp, synthetic construct
  misc_feature 1..20: note = chemically synthesized
  source 1..20: mol_type = other DNA
cgggggcacgcgggagaggg

SEQ ID NO: 15173 - DNA, 20 bp, synthetic construct
  misc_feature 1..20: note = chemically synthesized
  source 1..20: mol_type = other DNA
gggggcacgcgggagaggga

SEQ ID NO: 15174 - DNA, 20 bp, synthetic construct
  misc_feature 1..20: note = chemically synthesized
  source 1..20: mol_type = other DNA
gggcacgcgggagagggagg

SEQ ID NO: 15175 - DNA, 20 bp, synthetic construct
  misc_feature 1..20: note = chemically synthesized
  source 1..20: mol_type = other DNA
ggcacgcgggagagggaggg

SEQ ID NO: 15176 - DNA, 20 bp, synthetic construct
  misc_feature 1..20: note = chemically synthesized
  source 1..20: mol_type = other DNA
gcacgcgggagagggaggga

SEQ ID NO: 15177 - DNA, 20 bp, synthetic construct
  misc_feature 1..20: note = chemically synthesized
  source 1..20: mol_type = other DNA
acgcgggagagggagggagg

SEQ ID NO: 15178 - DNA, 20 bp, synthetic construct
  misc_feature 1..20: note = chemically synthesized
  source 1..20: mol_type = other DNA
ggagagggagggagggagcc

SEQ ID NO: 15179 - DNA, 20 bp, synthetic construct
  misc_feature 1..20: note = chemically synthesized
  source 1..20: mol_type = other DNA
gagcccggactgctgcctcc

SEQ ID NO: 15180 - DNA, 20 bp, synthetic construct
  misc_feature 1..20: note = chemically synthesized
  source 1..20: mol_type = other DNA
agcccggactgctgcctcct

SEQ ID NO: 15181 - DNA, 20 bp, synthetic construct
  misc_feature 1..20: note = chemically synthesized
  source 1..20: mol_type = other DNA
ctcccctcccgaccgaacct

SEQ ID NO: 15182 - DNA, 20 bp, synthetic construct
  misc_feature 1..20: note = chemically synthesized
  source 1..20: mol_type = other DNA
cccctcccgaccgaacctca

SEQ ID NO: 15183 - DNA, 20 bp, synthetic construct
  misc_feature 1..20: note = chemically synthesized
  source 1..20: mol_type = other DNA
ccctcccgaccgaacctcag

SEQ ID NO: 15184 - DNA, 20 bp, synthetic construct
  misc_feature 1..20: note = chemically synthesized
  source 1..20: mol_type = other DNA
tcccgaccgaacctcagagg

SEQ ID NO: 15185 - DNA, 20 bp, synthetic construct
  misc_feature 1..20: note = chemically synthesized
  source 1..20: mol_type = other DNA
gaccgaacctcagaggcagc

SEQ ID NO: 15186 - DNA, 20 bp, synthetic construct
  misc_feature 1..20: note = chemically synthesized
  source 1..20: mol_type = other DNA
accgaacctcagaggcagca

SEQ ID NO: 15187 - DNA, 20 bp, synthetic construct
  misc_feature 1..20: note = chemically synthesized
  source 1..20: mol_type = other DNA
cgaacctcagaggcagcaag

SEQ ID NO: 15188 - DNA, 20 bp, synthetic construct
  misc_feature 1..20: note = chemically synthesized
  source 1..20: mol_type = other DNA
acctcagaggcagcaaggag

SEQ ID NO: 15189 - DNA, 20 bp, synthetic construct
  misc_feature 1..20: note = chemically synthesized
  source 1..20: mol_type = other DNA
agaggcagcaaggagaagac

SEQ ID NO: 15190 - DNA, 20 bp, synthetic construct
  misc_feature 1..20: note = chemically synthesized
  source 1..20: mol_type = other DNA
aaaaataaaataaataaaac

SEQ ID NO: 15191 - DNA, 20 bp, synthetic construct
  misc_feature 1..20: note = chemically synthesized
  source 1..20: mol_type = other DNA
aaaataaaataaataaaaca

SEQ ID NO: 15192 - DNA, 20 bp, synthetic construct
  misc_feature 1..20: note = chemically synthesized
  source 1..20: mol_type = other DNA
taaaataaataaaacaaggc

SEQ ID NO: 15193 - DNA, 20 bp, synthetic construct
  misc_feature 1..20: note = chemically synthesized
  source 1..20: mol_type = other DNA
aaataaataaaacaaggcaa

SEQ ID NO: 15194 - DNA, 20 bp, synthetic construct
  misc_feature 1..20: note = chemically synthesized
  source 1..20: mol_type = other DNA
aatttcttgcccccaaaccg

SEQ ID NO: 15195 - DNA, 20 bp, synthetic construct
  misc_feature 1..20: note = chemically synthesized
  source 1..20: mol_type = other DNA
ctgccaacccttttctgtga

SEQ ID NO: 15196 - DNA, 20 bp, synthetic construct
  misc_feature 1..20: note = chemically synthesized
  source 1..20: mol_type = other DNA
cttctctttgactcccccac

SEQ ID NO: 15197 - DNA, 20 bp, synthetic construct
  misc_feature 1..20: note = chemically synthesized
  source 1..20: mol_type = other DNA
aaatctcacaatctctcatc

SEQ ID NO: 15198 - DNA, 20 bp, synthetic construct
  misc_feature 1..20: note = chemically synthesized
  source 1..20: mol_type = other DNA
cctcttcccccaaacccctt

SEQ ID NO: 15199 - DNA, 20 bp, synthetic construct
  misc_feature 1..20: note = chemically synthesized
  source 1..20: mol_type = other DNA
aaccccttcagttgcaaact

SEQ ID NO: 15200 - DNA, 20 bp, synthetic construct
  misc_feature 1..20: note = chemically synthesized
  source 1..20: mol_type = other DNA
accccttcagttgcaaactt

SEQ ID NO: 15201 - DNA, 20 bp, synthetic construct
  misc_feature 1..20: note = chemically synthesized
  source 1..20: mol_type = other DNA
ccccttcagttgcaaactta

SEQ ID NO: 15202 - DNA, 20 bp, synthetic construct
  misc_feature 1..20: note = chemically synthesized
  source 1..20: mol_type = other DNA
ttgcaaacttagggcgccga

SEQ ID NO: 15203 - DNA, 20 bp, synthetic construct
  misc_feature 1..20: note = chemically synthesized
  source 1..20: mol_type = other DNA
aacttagggcgccgacggca

SEQ ID NO: 15204 - DNA, 20 bp, synthetic construct
  misc_feature 1..20: note = chemically synthesized
  source 1..20: mol_type = other DNA
cttagggcgccgacggcacg

SEQ ID NO: 15205 - DNA, 20 bp, synthetic construct
  misc_feature 1..20: note = chemically synthesized
  source 1..20: mol_type = other DNA
tagggcgccgacggcacgga

SEQ ID NO: 15206 - DNA, 20 bp, synthetic construct
  misc_feature 1..20: note = chemically synthesized
  source 1..20: mol_type = other DNA
agggcgccgacggcacggag

SEQ ID NO: 15207 - DNA, 20 bp, synthetic construct
  misc_feature 1..20: note = chemically synthesized
  source 1..20: mol_type = other DNA
gggcgccgacggcacggaga

SEQ ID NO: 15208 - DNA, 20 bp, synthetic construct
  misc_feature 1..20: note = chemically synthesized
  source 1..20: mol_type = other DNA
gcgccgacggcacggagagg

SEQ ID NO: 15209 - DNA, 20 bp, synthetic construct
  misc_feature 1..20: note = chemically synthesized
  source 1..20: mol_type = other DNA
gccgacggcacggagaggga

SEQ ID NO: 15210 - DNA, 20 bp, synthetic construct
  misc_feature 1..20: note = chemically synthesized
  source 1..20: mol_type = other DNA
cgacggcacggagagggaga

SEQ ID NO: 15211 - DNA, 20 bp, synthetic construct
  misc_feature 1..20: note = chemically synthesized
  source 1..20: mol_type = other DNA
gacggcacggagagggagag

SEQ ID NO: 15212 - DNA, 20 bp, synthetic construct
  misc_feature 1..20: note = chemically synthesized
  source 1..20: mol_type = other DNA
tccctcctcttactattttt

SEQ ID NO: 15213 - DNA, 20 bp, synthetic construct
  misc_feature 1..20: note = chemically synthesized
  source 1..20: mol_type = other DNA
ctcctcttactattttttgg

SEQ ID NO: 15214 - DNA, 20 bp, synthetic construct
  misc_feature 1..20: note = chemically synthesized
  source 1..20: mol_type = other DNA
ttttggaagattttcaaaaa

SEQ ID NO: 15215 - DNA, 20 bp, synthetic construct
  misc_feature 1..20: note = chemically synthesized
  source 1..20: mol_type = other DNA
tggaagattttcaaaaaaag

SEQ ID NO: 15216 - DNA, 20 bp, synthetic construct
  misc_feature 1..20: note = chemically synthesized
  source 1..20: mol_type = other DNA
aagattttcaaaaaaagtgg

SEQ ID NO: 15217 - DNA, 20 bp, synthetic construct
  misc_feature 1..20: note = chemically synthesized
  source 1..20: mol_type = other DNA
attttcaaaaaaagtggaag

SEQ ID NO: 15218 - DNA, 20 bp, synthetic construct
  misc_feature 1..20: note = chemically synthesized
  source 1..20: mol_type = other DNA
aagtggaagtggattttgat

SEQ ID NO: 15219 - DNA, 20 bp, synthetic construct
  misc_feature 1..20: note = chemically synthesized
  source 1..20: mol_type = other DNA
agtggaagtggattttgatt

SEQ ID NO: 15220 - DNA, 20 bp, synthetic construct
  misc_feature 1..20: note = chemically synthesized
  source 1..20: mol_type = other DNA
tctcgtgtctgaatgtttac

SEQ ID NO: 15221 - DNA, 20 bp, synthetic construct
  misc_feature 1..20: note = chemically synthesized
  source 1..20: mol_type = other DNA
gtttacaagcaccgcgtgtg

SEQ ID NO: 15222 - DNA, 20 bp, synthetic construct
  misc_feature 1..20: note = chemically synthesized
  source 1..20: mol_type = other DNA
tttacaagcaccgcgtgtgc

SEQ ID NO: 15223 - DNA, 20 bp, synthetic construct
  misc_feature 1..20: note = chemically synthesized
  source 1..20: mol_type = other DNA
tacaagcaccgcgtgtgcgg

SEQ ID NO: 15224 - DNA, 20 bp, synthetic construct
  misc_feature 1..20: note = chemically synthesized
  source 1..20: mol_type = other DNA
gggagcctcctgccaacaaa

SEQ ID NO: 15225 - DNA, 20 bp, synthetic construct
  misc_feature 1..20: note = chemically synthesized
  source 1..20: mol_type = other DNA
gcctcctgccaacaaacaga

SEQ ID NO: 15226 - DNA, 20 bp, synthetic construct
  misc_feature 1..20: note = chemically synthesized
  source 1..20: mol_type = other DNA
ctcctgccaacaaacagaca

SEQ ID NO: 15227 - DNA, 20 bp, synthetic construct
  misc_feature 1..20: note = chemically synthesized
  source 1..20: mol_type = other DNA
tcctgccaacaaacagacag

SEQ ID NO: 15228 - DNA, 20 bp, synthetic construct
  misc_feature 1..20: note = chemically synthesized
  source 1..20: mol_type = other DNA
caacaaacagacagaggacc

SEQ ID NO: 15229 - DNA, 20 bp, synthetic construct
  misc_feature 1..20: note = chemically synthesized
  source 1..20: mol_type = other DNA
aacagacagaggaccgagcg

SEQ ID NO: 15230 - DNA, 20 bp, synthetic construct
  misc_feature 1..20: note = chemically synthesized
  source 1..20: mol_type = other DNA
acagaggaccgagcgcggcg

SEQ ID NO: 15231 - DNA, 20 bp, synthetic construct
  misc_feature 1..20: note = chemically synthesized
  source 1..20: mol_type = other DNA
gaggaccgagcgcggcgcgg

SEQ ID NO: 15232 - DNA, 20 bp, synthetic construct
  misc_feature 1..20: note = chemically synthesized
  source 1..20: mol_type = other DNA
cgagcgcggcgcggcagccc

SEQ ID NO: 15233 - DNA, 20 bp, synthetic construct
  misc_feature 1..20: note = chemically synthesized
  source 1..20: mol_type = other DNA
agcgcggcgcggcagccccg

SEQ ID NO: 15234 - DNA, 20 bp, synthetic construct
  misc_feature 1..20: note = chemically synthesized
  source 1..20: mol_type = other DNA
gcggcgcggcagccccggag

SEQ ID NO: 15235 - DNA, 20 bp, synthetic construct
  misc_feature 1..20: note = chemically synthesized
  source 1..20: mol_type = other DNA
cggcgcggcagccccggagc

SEQ ID NO: 15236 - DNA, 20 bp, synthetic construct
  misc_feature 1..20: note = chemically synthesized
  source 1..20: mol_type = other DNA
cgcggcagccccggagcagg

SEQ ID NO: 15237 - DNA, 20 bp, synthetic construct
  misc_feature 1..20: note = chemically synthesized
  source 1..20: mol_type = other DNA
ggcagccccggagcaggcgg

SEQ ID NO: 15238 - DNA, 20 bp, synthetic construct
  misc_feature 1..20: note = chemically synthesized
  source 1..20: mol_type = other DNA
agccccggagcaggcggcgg

SEQ ID NO: 15239 - DNA, 20 bp, synthetic construct
  misc_feature 1..20: note = chemically synthesized
  source 1..20: mol_type = other DNA
cccggagcaggcggcggcgg

SEQ ID NO: 15240 - DNA, 20 bp, synthetic construct
  misc_feature 1..20: note = chemically synthesized
  source 1..20: mol_type = other DNA
agcaggcggcggcggcggcc

SEQ ID NO: 15241 - DNA, 20 bp, synthetic construct
  misc_feature 1..20: note = chemically synthesized
  source 1..20: mol_type = other DNA
ggcggcggcctggcctcgcc

SEQ ID NO: 15242 - DNA, 20 bp, synthetic construct
  misc_feature 1..20: note = chemically synthesized
  source 1..20: mol_type = other DNA
gcggcggcctggcctcgccc

SEQ ID NO: 15243 - DNA, 20 bp, synthetic construct
  misc_feature 1..20: note = chemically synthesized
  source 1..20: mol_type = other DNA
tgcccgacctcgccgcgccc

SEQ ID NO: 15244 - DNA, 20 bp, synthetic construct
  misc_feature 1..20: note = chemically synthesized
  source 1..20: mol_type = other DNA
gacctcgccgcgccccagcc

SEQ ID NO: 15245 - DNA, 20 bp, synthetic construct
  misc_feature 1..20: note = chemically synthesized
  source 1..20: mol_type = other DNA
gccgcgccccagcccagccc

SEQ ID NO: 15246 - DNA, 20 bp, synthetic construct
  misc_feature 1..20: note = chemically synthesized
  source 1..20: mol_type = other DNA
ccagccccggatcgcccacc

SEQ ID NO: 15247 - DNA, 20 bp, synthetic construct
  misc_feature 1..20: note = chemically synthesized
  source 1..20: mol_type = other DNA
cggatcgcccacccggcgcc

SEQ ID NO: 15248 - DNA, 20 bp, synthetic construct
  misc_feature 1..20: note = chemically synthesized
  source 1..20: mol_type = other DNA
ggcgcccggcgcccacccgc

SEQ ID NO: 15249 - DNA, 20 bp, synthetic construct
  misc_feature 1..20: note = chemically synthesized
  source 1..20: mol_type = other DNA
gcgcccggcgcccacccgcc

SEQ ID NO: 15250 - DNA, 20 bp, synthetic construct
  misc_feature 1..20: note = chemically synthesized
  source 1..20: mol_type = other DNA
cggcgcccacccgccaggca

SEQ ID NO: 15251 - DNA, 20 bp, synthetic construct
  misc_feature 1..20: note = chemically synthesized
  source 1..20: mol_type = other DNA
cgcccacccgccaggcacgg

SEQ ID NO: 15252 - DNA, 20 bp, synthetic construct
  misc_feature 1..20: note = chemically synthesized
  source 1..20: mol_type = other DNA
ccacccgccaggcacggcgg

SEQ ID NO: 15253 - DNA, 20 bp, synthetic construct
  misc_feature 1..20: note = chemically synthesized
  source 1..20: mol_type = other DNA
cacccgccaggcacggcggc

SEQ ID NO: 15254 - DNA, 20 bp, synthetic construct
  misc_feature 1..20: note = chemically synthesized
  source 1..20: mol_type = other DNA
aggcacggcggcaggccacg

SEQ ID NO: 15255 - DNA, 20 bp, synthetic construct
  misc_feature 1..20: note = chemically synthesized
  source 1..20: mol_type = other DNA
gccacgcagtgtctccgcgc

SEQ ID NO: 15256 - DNA, 20 bp, synthetic construct
  misc_feature 1..20: note = chemically synthesized
  source 1..20: mol_type = other DNA
gcagtgtctccgcgccagcc

SEQ ID NO: 15257 - DNA, 20 bp, synthetic construct
  misc_feature 1..20: note = chemically synthesized
  source 1..20: mol_type = other DNA
ctccgcgccagcctggcccg

SEQ ID NO: 15258 - DNA, 20 bp, synthetic construct
  misc_feature 1..20: note = chemically synthesized
  source 1..20: mol_type = other DNA
gccagcctggcccgtggtcc

SEQ ID NO: 15259 - DNA, 20 bp, synthetic construct
  misc_feature 1..20: note = chemically synthesized
  source 1..20: mol_type = other DNA
ccgtggtcctggtccgcccc

SEQ ID NO: 15260 - DNA, 20 bp, synthetic construct
  misc_feature 1..20: note = chemically synthesized
  source 1..20: mol_type = other DNA
tccgcccccagcacaatgcc

SEQ ID NO: 15261 - DNA, 20 bp, synthetic construct
  misc_feature 1..20: note = chemically synthesized
  source 1..20: mol_type = other DNA
gagacctcttctcgacctcc

SEQ ID NO: 15262 - DNA, 20 bp, synthetic construct
  misc_feature 1..20: note = chemically synthesized
  source 1..20: mol_type = other DNA
gacctcccagactgcgaaat

SEQ ID NO: 15263 - DNA, 20 bp, synthetic construct
  misc_feature 1..20: note = chemically synthesized
  source 1..20: mol_type = other DNA
tcccagactgcgaaatcggc

SEQ ID NO: 15264 - DNA, 20 bp, synthetic construct
  misc_feature 1..20: note = chemically synthesized
  source 1..20: mol_type = other DNA
cccagactgcgaaatcggct

SEQ ID NO: 15265 - DNA, 20 bp, synthetic construct
  misc_feature 1..20: note = chemically synthesized
  source 1..20: mol_type = other DNA
gaaatcggctgggtgaaact

SEQ ID NO: 15266 - DNA, 20 bp, synthetic construct
  misc_feature 1..20: note = chemically synthesized
  source 1..20: mol_type = other DNA
gggtgaaactcggctttgca

SEQ ID NO: 15267 - DNA, 20 bp, synthetic construct
  misc_feature 1..20: note = chemically synthesized
  source 1..20: mol_type = other DNA
tgcaaagcatttttattttg

SEQ ID NO: 15268 - DNA, 20 bp, synthetic construct
  misc_feature 1..20: note = chemically synthesized
  source 1..20: mol_type = other DNA
gcaaagcatttttattttgc

SEQ ID NO: 15269 - DNA, 20 bp, synthetic construct
  misc_feature 1..20: note = chemically synthesized
  source 1..20: mol_type = other DNA
caaagcatttttattttgca

SEQ ID NO: 15270 - DNA, 20 bp, synthetic construct
  misc_feature 1..20: note = chemically synthesized
  source 1..20: mol_type = other DNA
attttgcagggcaactgtaa

SEQ ID NO: 15271 - DNA, 20 bp, synthetic construct
  misc_feature 1..20: note = chemically synthesized
  source 1..20: mol_type = other DNA
gcctcccctcccctccgccc

SEQ ID NO: 15272 - DNA, 20 bp, synthetic construct
  misc_feature 1..20: note = chemically synthesized
  source 1..20: mol_type = other DNA
cctcccctcccctccgccct

SEQ ID NO: 15273 - DNA, 20 bp, synthetic construct
  misc_feature 1..20: note = chemically synthesized
  source 1..20: mol_type = other DNA
ctccgccctgggtactttct

SEQ ID NO: 15274 - DNA, 20 bp, synthetic construct
  misc_feature 1..20: note = chemically synthesized
  source 1..20: mol_type = other DNA
tctcagacgtctcttgtcca

SEQ ID NO: 15275 - DNA, 20 bp, synthetic construct
  misc_feature 1..20: note = chemically synthesized
  source 1..20: mol_type = other DNA
gacgtctcttgtccacagct

SEQ ID NO: 15276 - DNA, 20 bp, synthetic construct
  misc_feature 1..20: note = chemically synthesized
  source 1..20: mol_type = other DNA
acgtctcttgtccacagctc

SEQ ID NO: 15277 - DNA, 20 bp, synthetic construct
  misc_feature 1..20: note = chemically synthesized
  source 1..20: mol_type = other DNA
tgtccacagctcgggaccgc

SEQ ID NO: 15278 - DNA, 20 bp, synthetic construct
  misc_feature 1..20: note = chemically synthesized
  source 1..20: mol_type = other DNA
gtccacagctcgggaccgcg

SEQ ID NO: 15279 - DNA, 20 bp, synthetic construct
  misc_feature 1..20: note = chemically synthesized
  source 1..20: mol_type = other DNA
ccacagctcgggaccgcgag

SEQ ID NO: 15280 - DNA, 20 bp, synthetic construct
  misc_feature 1..20: note = chemically synthesized
  source 1..20: mol_type = other DNA
cacagctcgggaccgcgagg

SEQ ID NO: 15281 - DNA, 20 bp, synthetic construct
  misc_feature 1..20: note = chemically synthesized
  source 1..20: mol_type = other DNA
tgcccaccccccaccccgcc

SEQ ID NO: 15282 - DNA, 20 bp, synthetic construct
  misc_feature 1..20: note = chemically synthesized
  source 1..20: mol_type = other DNA
accccccaccccgcccggtc

SEQ ID NO: 15283 - DNA, 20 bp, synthetic construct
  misc_feature 1..20: note = chemically synthesized
  source 1..20: mol_type = other DNA
accccgcccggtctggtcac

SEQ ID NO: 15284 - DNA, 20 bp, synthetic construct
  misc_feature 1..20: note = chemically synthesized
  source 1..20: mol_type = other DNA
caccagtccccctgcgcccc

SEQ ID NO: 15285 - DNA, 20 bp, synthetic construct
  misc_feature 1..20: note = chemically synthesized
  source 1..20: mol_type = other DNA
ccctgcgccccgagcacgac

SEQ ID NO: 15286 - DNA, 20 bp, synthetic construct
  misc_feature 1..20: note = chemically synthesized
  source 1..20: mol_type = other DNA
cctgcgccccgagcacgact

SEQ ID NO: 15287 - DNA, 20 bp, synthetic construct
  misc_feature 1..20: note = chemically synthesized
  source 1..20: mol_type = other DNA
cgccccgagcacgactaggc

SEQ ID NO: 15288 - DNA, 20 bp, synthetic construct
  misc_feature 1..20: note = chemically synthesized
  source 1..20: mol_type = other DNA
gccccgagcacgactaggcc

SEQ ID NO: 15289 - DNA, 20 bp, synthetic construct
  misc_feature 1..20: note = chemically synthesized
  source 1..20: mol_type = other DNA
ccgagcacgactaggccagg

SEQ ID NO: 15290 - DNA, 20 bp, synthetic construct
  misc_feature 1..20: note = chemically synthesized
  source 1..20: mol_type = other DNA
agcacgactaggccaggtgg

SEQ ID NO: 15291 - DNA, 20 bp, synthetic construct
  misc_feature 1..20: note = chemically synthesized
  source 1..20: mol_type = other DNA
gcacgactaggccaggtggc

SEQ ID NO: 15292 - DNA, 20 bp, synthetic construct
  misc_feature 1..20: note = chemically synthesized
  source 1..20: mol_type = other DNA
cacgactaggccaggtggcg

SEQ ID NO: 15293 - DNA, 20 bp, synthetic construct
  misc_feature 1..20: note = chemically synthesized
  source 1..20: mol_type = other DNA
aggccaggtggcggggttgc

SEQ ID NO: 15294 - DNA, 20 bp, synthetic construct
  misc_feature 1..20: note = chemically synthesized
  source 1..20: mol_type = other DNA
ggccaggtggcggggttgcc

SEQ ID NO: 15295 - DNA, 20 bp, synthetic construct
  misc_feature 1..20: note = chemically synthesized
  source 1..20: mol_type = other DNA
gccaggtggcggggttgccg

SEQ ID NO: 15296 - DNA, 20 bp, synthetic construct
  misc_feature 1..20: note = chemically synthesized
  source 1..20: mol_type = other DNA
aggtggcggggttgccgggg

SEQ ID NO: 15297 - DNA, 20 bp, synthetic construct
  misc_feature 1..20: note = chemically synthesized
  source 1..20: mol_type = other DNA
ggtggcggggttgccgggga

SEQ ID NO: 15298 - DNA, 20 bp, synthetic construct
  misc_feature 1..20: note = chemically synthesized
  source 1..20: mol_type = other DNA
gtggcggggttgccggggaa

SEQ ID NO: 15299 - DNA, 20 bp, synthetic construct
  misc_feature 1..20: note = chemically synthesized
  source 1..20: mol_type = other DNA
gcggggttgccggggaaggg

SEQ ID NO: 15300 - DNA, 20 bp, synthetic construct
  misc_feature 1..20: note = chemically synthesized
  source 1..20: mol_type = other DNA
cggggttgccggggaagggc

SEQ ID NO: 15301 - DNA, 20 bp, synthetic construct
  misc_feature 1..20: note = chemically synthesized
  source 1..20: mol_type = other DNA
ggggttgccggggaagggca

SEQ ID NO: 15302 - DNA, 20 bp, synthetic construct
  misc_feature 1..20: note = chemically synthesized
  source 1..20: mol_type = other DNA
gggttgccggggaagggcag

SEQ ID NO: 15303 - DNA, 20 bp, synthetic construct
  misc_feature 1..20: note = chemically synthesized
  source 1..20: mol_type = other DNA
gttgccggggaagggcaggg

SEQ ID NO: 15304 - DNA, 20 bp, synthetic construct
  misc_feature 1..20: note = chemically synthesized
  source 1..20: mol_type = other DNA
gccggggaagggcaggggag

SEQ ID NO: 15305 - DNA, 20 bp, synthetic construct
  misc_feature 1..20: note = chemically synthesized
  source 1..20: mol_type = other DNA
ggcaggggagaagtgtgttt

SEQ ID NO: 15306 - DNA, 20 bp, synthetic construct
  misc_feature 1..20: note = chemically synthesized
  source 1..20: mol_type = other DNA
tgtgtttgagtgtgcatttt

SEQ ID NO: 15307 - DNA, 20 bp, synthetic construct
  misc_feature 1..20: note = chemically synthesized
  source 1..20: mol_type = other DNA
gtgtttgagtgtgcatttta

SEQ ID NO: 15308 - DNA, 20 bp, synthetic construct
  misc_feature 1..20: note = chemically synthesized
  source 1..20: mol_type = other DNA
tgtttgagtgtgcattttaa

SEQ ID NO: 15309 - DNA, 20 bp, synthetic construct
  misc_feature 1..20: note = chemically synthesized
  source 1..20: mol_type = other DNA
agtgtgcattttaagggcgc

SEQ ID NO: 15310 - DNA, 20 bp, synthetic construct
  misc_feature 1..20: note = chemically synthesized
  source 1..20: mol_type = other DNA
attttaagggcgctggatcc

SEQ ID NO: 15311 - DNA, 20 bp, synthetic construct
  misc_feature 1..20: note = chemically synthesized
  source 1..20: mol_type = other DNA
ttttaagggcgctggatcct

SEQ ID NO: 15312 - DNA, 20 bp, synthetic construct
  misc_feature 1..20: note = chemically synthesized
  source 1..20: mol_type = other DNA
gcgctggatcctgggacccc

SEQ ID NO: 15313 - DNA, 20 bp, synthetic construct
  misc_feature 1..20: note = chemically synthesized
  source 1..20: mol_type = other DNA
accccgagcacttcaccctt

SEQ ID NO: 15314 - DNA, 20 bp, synthetic construct
  misc_feature 1..20: note = chemically synthesized
  source 1..20: mol_type = other DNA
ccccgagcacttcacccttt

SEQ ID NO: 15315 - DNA, 20 bp, synthetic construct
  misc_feature 1..20: note = chemically synthesized
  source 1..20: mol_type = other DNA
ttgggtcttgccctcttccc

SEQ ID NO: 15316 - DNA, 20 bp, synthetic construct
  misc_feature 1..20: note = chemically synthesized
  source 1..20: mol_type = other DNA
tgggtcttgccctcttcccc

SEQ ID NO: 15317 - DNA, 20 bp, synthetic construct
  misc_feature 1..20: note = chemically synthesized
  source 1..20: mol_type = other DNA
cttgccctcttccccaggcc

SEQ ID NO: 15318 - DNA, 20 bp, synthetic construct
  misc_feature 1..20: note = chemically synthesized
  source 1..20: mol_type = other DNA
cctcttccccaggcctggct

SEQ ID NO: 15319 - DNA, 20 bp, synthetic construct
  misc_feature 1..20: note = chemically synthesized
  source 1..20: mol_type = other DNA
ccccaggcctggcttggtct

SEQ ID NO: 15320 - DNA, 20 bp, synthetic construct
  misc_feature 1..20: note = chemically synthesized
  source 1..20: mol_type = other DNA
cccaggcctggcttggtctg

SEQ ID NO: 15321 - DNA, 20 bp, synthetic construct
  misc_feature 1..20: note = chemically synthesized
  source 1..20: mol_type = other DNA
gcttggtctgaggttcttgt

SEQ ID NO: 15322 - DNA, 20 bp, synthetic construct
  misc_feature 1..20: note = chemically synthesized
  source 1..20: mol_type = other DNA
aggttcttgtgagtctgtat

SEQ ID NO: 15323 - DNA, 20 bp, synthetic construct
  misc_feature 1..20: note = chemically synthesized
  source 1..20: mol_type = other DNA
gttcttgtgagtctgtataa

SEQ ID NO: 15324 - DNA, 20 bp, synthetic construct
  misc_feature 1..20: note = chemically synthesized
  source 1..20: mol_type = other DNA
ttgtgagtctgtataagagc

SEQ ID NO: 15325 - DNA, 20 bp, synthetic construct
  misc_feature 1..20: note = chemically synthesized
  source 1..20: mol_type = other DNA
tgagtctgtataagagctgg

SEQ ID NO: 15326 - DNA, 20 bp, synthetic construct
  misc_feature 1..20: note = chemically synthesized
  source 1..20: mol_type = other DNA
gtctgtataagagctggtgg

SEQ ID NO: 15327 - DNA, 20 bp, synthetic construct
  misc_feature 1..20: note = chemically synthesized
  source 1..20: mol_type = other DNA
tgtataagagctggtggtgg

SEQ ID NO: 15328 - DNA, 20 bp, synthetic construct
  misc_feature 1..20: note = chemically synthesized
  source 1..20: mol_type = other DNA
tgtctcccgctgactgcgcc

SEQ ID NO: 15329 - DNA, 20 bp, synthetic construct
  misc_feature 1..20: note = chemically synthesized
  source 1..20: mol_type = other DNA
tcccgctgactgcgcctgga

SEQ ID NO: 15330 - DNA, 20 bp, synthetic construct
  misc_feature 1..20: note = chemically synthesized
  source 1..20: mol_type = other DNA
cccgctgactgcgcctggaa

SEQ ID NO: 15331 - DNA, 20 bp, synthetic construct
  misc_feature 1..20: note = chemically synthesized
  source 1..20: mol_type = other DNA
gctgactgcgcctggaaagg

SEQ ID NO: 15332 - DNA, 20 bp, synthetic construct
  misc_feature 1..20: note = chemically synthesized
  source 1..20: mol_type = other DNA
ctgactgcgcctggaaaggc

SEQ ID NO: 15333 - DNA, 20 bp, synthetic construct
  misc_feature 1..20: note = chemically synthesized
  source 1..20: mol_type = other DNA
actgcgcctggaaaggcggg

SEQ ID NO: 15334 - DNA, 20 bp, synthetic construct
  misc_feature 1..20: note = chemically synthesized
  source 1..20: mol_type = other DNA
gcgcctggaaaggcgggcgg

SEQ ID NO: 15335 - DNA, 20 bp, synthetic construct
  misc_feature 1..20: note = chemically synthesized
  source 1..20: mol_type = other DNA
cgcctggaaaggcgggcggt

SEQ ID NO: 15336 - DNA, 20 bp, synthetic construct
  misc_feature 1..20: note = chemically synthesized
  source 1..20: mol_type = other DNA
aaaggcgggcggtgggcact

SEQ ID NO: 15337 - DNA, 20 bp, synthetic construct
  misc_feature 1..20: note = chemically synthesized
  source 1..20: mol_type = other DNA
aaggcgggcggtgggcactt

SEQ ID NO: 15338 - DNA, 20 bp, synthetic construct
  misc_feature 1..20: note = chemically synthesized
  source 1..20: mol_type = other DNA
cgggcggtgggcacttagga

SEQ ID NO: 15339 - DNA, 20 bp, synthetic construct
  misc_feature 1..20: note = chemically synthesized
  source 1..20: mol_type = other DNA
ggtgggcacttaggaaagtt

SEQ ID NO: 15340 - DNA, 20 bp, synthetic construct
  misc_feature 1..20: note = chemically synthesized
  source 1..20: mol_type = other DNA
gggcacttaggaaagtttgg

SEQ ID NO: 15341 - DNA, 20 bp, synthetic construct
  misc_feature 1..20: note = chemically synthesized
  source 1..20: mol_type = other DNA
acttaggaaagtttggcagc

SEQ ID NO: 15342 - DNA, 20 bp, synthetic construct
  misc_feature 1..20: note = chemically synthesized
  source 1..20: mol_type = other DNA
cttaggaaagtttggcagca

SEQ ID NO: 15343 - DNA, 20 bp, synthetic construct
  misc_feature 1..20: note = chemically synthesized
  source 1..20: mol_type = other DNA
ttaggaaagtttggcagcaa

SEQ ID NO: 15344 - DNA, 20 bp, synthetic construct
  misc_feature 1..20: note = chemically synthesized
  source 1..20: mol_type = other DNA
gaaagtttggcagcaaggga

SEQ ID NO: 15345 - DNA, 20 bp, synthetic construct
  misc_feature 1..20: note = chemically synthesized
  source 1..20: mol_type = other DNA
gtttggcagcaagggaaaga

SEQ ID NO: 15346 - DNA, 20 bp, synthetic construct
  misc_feature 1..20: note = chemically synthesized
  source 1..20: mol_type = other DNA
tttggcagcaagggaaagaa

SEQ ID NO: 15347 - DNA, 20 bp, synthetic construct
  misc_feature 1..20: note = chemically synthesized
  source 1..20: mol_type = other DNA
agcaagggaaagaaaggcgt

SEQ ID NO: 15348 - DNA, 20 bp, synthetic construct
  misc_feature 1..20: note = chemically synthesized
  source 1..20: mol_type = other DNA
gcaagggaaagaaaggcgtg

SEQ ID NO: 15349 - DNA, 20 bp, synthetic construct
  misc_feature 1..20: note = chemically synthesized
  source 1..20: mol_type = other DNA
caagggaaagaaaggcgtga

SEQ ID NO: 15350 - DNA, 20 bp, synthetic construct
  misc_feature 1..20: note = chemically synthesized
  source 1..20: mol_type = other DNA
cttactttaaatttttgatg

SEQ ID NO: 15351 - DNA, 20 bp, synthetic construct
  misc_feature 1..20: note = chemically synthesized
  source 1..20: mol_type = other DNA
aaatttttgatgcagtttta

SEQ ID NO: 15352 - DNA, 20 bp, synthetic construct
  misc_feature 1..20: note = chemically synthesized
  source 1..20: mol_type = other DNA
aatttttgatgcagttttaa

SEQ ID NO: 15353 - DNA, 20 bp, synthetic construct
  misc_feature 1..20: note = chemically synthesized
  source 1..20: mol_type = other DNA
tttaaaggaccacctatact

SEQ ID NO: 15354 - DNA, 20 bp, synthetic construct
  misc_feature 1..20: note = chemically synthesized
  source 1..20: mol_type = other DNA
cttggttctgtgttttttta

SEQ ID NO: 15355 - DNA, 20 bp, synthetic construct
  misc_feature 1..20: note = chemically synthesized
  source 1..20: mol_type = other DNA
ttggttctgtgtttttttaa

SEQ ID NO: 15356 - DNA, 20 bp, synthetic construct
  misc_feature 1..20: note = chemically synthesized
  source 1..20: mol_type = other DNA
tggttctgtgtttttttaaa

SEQ ID NO: 15357 - DNA, 20 bp, synthetic construct
  misc_feature 1..20: note = chemically synthesized
  source 1..20: mol_type = other DNA
ggttctgtgtttttttaaag

SEQ ID NO: 15358 - DNA, 20 bp, synthetic construct
  misc_feature 1..20: note = chemically synthesized
  source 1..20: mol_type = other DNA
tctgtgtttttttaaagggg

SEQ ID NO: 15359 - DNA, 20 bp, synthetic construct
  misc_feature 1..20: note = chemically synthesized
  source 1..20: mol_type = other DNA
gtgtttttttaaaggggtgg

SEQ ID NO: 15360 - DNA, 20 bp, synthetic construct
  misc_feature 1..20: note = chemically synthesized
  source 1..20: mol_type = other DNA
tttttttaaaggggtggtgg

SEQ ID NO: 15361 - DNA, 20 bp, synthetic construct
  misc_feature 1..20: note = chemically synthesized
  source 1..20: mol_type = other DNA
ttttttaaaggggtggtggt

SEQ ID NO: 15362 - DNA, 20 bp, synthetic construct
  misc_feature 1..20: note = chemically synthesized
  source 1..20: mol_type = other DNA
tttttaaaggggtggtggtg

SEQ ID NO: 15363 - DNA, 20 bp, synthetic construct
  misc_feature 1..20: note = chemically synthesized
  source 1..20: mol_type = other DNA
ttttaaaggggtggtggtgg

SEQ ID NO: 15364 - DNA, 20 bp, synthetic construct
  misc_feature 1..20: note = chemically synthesized
  source 1..20: mol_type = other DNA
tttaaaggggtggtggtggg

SEQ ID NO: 15365 - DNA, 20 bp, synthetic construct
  misc_feature 1..20: note = chemically synthesized
  source 1..20: mol_type = other DNA
gtggtggtggggggtgcgca

SEQ ID NO: 15366 - DNA, 20 bp, synthetic construct
  misc_feature 1..20: note = chemically synthesized
  source 1..20: mol_type = other DNA
tggtggtggggggtgcgcac

SEQ ID NO: 15367 - DNA, 20 bp, synthetic construct
  misc_feature 1..20: note = chemically synthesized
  source 1..20: mol_type = other DNA
ggtggtggggggtgcgcaca

SEQ ID NO: 15368 - DNA, 20 bp, synthetic construct
  misc_feature 1..20: note = chemically synthesized
  source 1..20: mol_type = other DNA
cagggaatttaatttttcac

SEQ ID NO: 15369 - DNA, 20 bp, synthetic construct
  misc_feature 1..20: note = chemically synthesized
  source 1..20: mol_type = other DNA
agggaatttaatttttcact

SEQ ID NO: 15370 - DNA, 20 bp, synthetic construct
  misc_feature 1..20: note = chemically synthesized
  source 1..20: mol_type = other DNA
tttaatttttcactgggccc

SEQ ID NO: 15371 - DNA, 20 bp, synthetic construct
  misc_feature 1..20: note = chemically synthesized
  source 1..20: mol_type = other DNA
ctggaacttgtcacacactt

SEQ ID NO: 15372 - DNA, 20 bp, synthetic construct
  misc_feature 1..20: note = chemically synthesized
  source 1..20: mol_type = other DNA
gaacttgtcacacacttcgg

SEQ ID NO: 15373 - DNA, 20 bp, synthetic construct
  misc_feature 1..20: note = chemically synthesized
  source 1..20: mol_type = other DNA
cttcggaagctcccccaccc

SEQ ID NO: 15374 - DNA, 20 bp, synthetic construct
  misc_feature 1..20: note = chemically synthesized
  source 1..20: mol_type = other DNA
ccccaccccggcacgttgcg

SEQ ID NO: 15375 - DNA, 20 bp, synthetic construct
  misc_feature 1..20: note = chemically synthesized
  source 1..20: mol_type = other DNA
tcccccgcccccaactcccc

SEQ ID NO: 15376 - DNA, 20 bp, synthetic construct
  misc_feature 1..20: note = chemically synthesized
  source 1..20: mol_type = other DNA
cccaactcccccggccgcgc

SEQ ID NO: 15377 - DNA, 20 bp, synthetic construct
  misc_feature 1..20: note = chemically synthesized
  source 1..20: mol_type = other DNA
tcccccggccgcgccggatg

SEQ ID NO: 15378 - DNA, 20 bp, synthetic construct
  misc_feature 1..20: note = chemically synthesized
  source 1..20: mol_type = other DNA
cggccgcgccggatgcggat

SEQ ID NO: 15379 - DNA, 20 bp, synthetic construct
  misc_feature 1..20: note = chemically synthesized
  source 1..20: mol_type = other DNA
cgccggatgcggatcagacg

SEQ ID NO: 15380 - DNA, 20 bp, synthetic construct
  misc_feature 1..20: note = chemically synthesized
  source 1..20: mol_type = other DNA
tgcggatcagacgcggcgcg

SEQ ID NO: 15381 - DNA, 20 bp, synthetic construct
  misc_feature 1..20: note = chemically synthesized
  source 1..20: mol_type = other DNA
ggatcagacgcggcgcgcgg

SEQ ID NO: 15382 - DNA, 20 bp, synthetic construct
  misc_feature 1..20: note = chemically synthesized
  source 1..20: mol_type = other DNA
acgcggcgcgcggcggtgtg

SEQ ID NO: 15383 - DNA, 20 bp, synthetic construct
  misc_feature 1..20: note = chemically synthesized
  source 1..20: mol_type = other DNA
cgcgcggcggtgtgaagtta

SEQ ID NO: 15384 - DNA, 20 bp, synthetic construct
  misc_feature 1..20: note = chemically synthesized
  source 1..20: mol_type = other DNA
ggcggtgtgaagttacagcc

SEQ ID NO: 15385 - DNA, 20 bp, synthetic construct
  misc_feature 1..20: note = chemically synthesized
  source 1..20: mol_type = other DNA
gtgtgaagttacagcccggc

SEQ ID NO: 15386 - DNA, 20 bp, synthetic construct
  misc_feature 1..20: note = chemically synthesized
  source 1..20: mol_type = other DNA
tgtgaagttacagcccggcc

SEQ ID NO: 15387 - DNA, 20 bp, synthetic construct
  misc_feature 1..20: note = chemically synthesized
  source 1..20: mol_type = other DNA
gttacagcccggccaggtac

SEQ ID NO: 15388 - DNA, 20 bp, synthetic construct
  misc_feature 1..20: note = chemically synthesized
  source 1..20: mol_type = other DNA
acagcccggccaggtaccgg

SEQ ID NO: 15389 - DNA, 20 bp, synthetic construct
  misc_feature 1..20: note = chemically synthesized
  source 1..20: mol_type = other DNA
cagcccggccaggtaccggc

SEQ ID NO: 15390 - DNA, 20 bp, synthetic construct
  misc_feature 1..20: note = chemically synthesized
  source 1..20: mol_type = other DNA
cccggccaggtaccggcggg

SEQ ID NO: 15391 - DNA, 20 bp, synthetic construct
  misc_feature 1..20: note = chemically synthesized
  source 1..20: mol_type = other DNA
ccggccaggtaccggcggga

SEQ ID NO: 15392 - DNA, 20 bp, synthetic construct
  misc_feature 1..20: note = chemically synthesized
  source 1..20: mol_type = other DNA
gccaggtaccggcgggaagg

SEQ ID NO: 15393 - DNA, 20 bp, synthetic construct
  misc_feature 1..20: note = chemically synthesized
  source 1..20: mol_type = other DNA
ccaggtaccggcgggaagga

SEQ ID NO: 15394 - DNA, 20 bp, synthetic construct
  misc_feature 1..20: note = chemically synthesized
  source 1..20: mol_type = other DNA
caggtaccggcgggaaggaa

SEQ ID NO: 15395 - DNA, 20 bp, synthetic construct
  misc_feature 1..20: note = chemically synthesized
  source 1..20: mol_type = other DNA
gtaccggcgggaaggaaggg

SEQ ID NO: 15396 - DNA, 20 bp, synthetic construct
  misc_feature 1..20: note = chemically synthesized
  source 1..20: mol_type = other DNA
ggaaggaagggcagtgttcg

SEQ ID NO: 15397 - DNA, 20 bp, synthetic construct
  misc_feature 1..20: note = chemically synthesized
  source 1..20: mol_type = other DNA
gaaggaagggcagtgttcgc

SEQ ID NO: 15398 - DNA, 20 bp, synthetic construct
  misc_feature 1..20: note = chemically synthesized
  source 1..20: mol_type = other DNA
agggcagtgttcgcaggact

SEQ ID NO: 15399 - DNA, 20 bp, synthetic construct
  misc_feature 1..20: note = chemically synthesized
  source 1..20: mol_type = other DNA
gggcagtgttcgcaggactc

SEQ ID NO: 15400 - DNA, 20 bp, synthetic construct
  misc_feature 1..20: note = chemically synthesized
  source 1..20: mol_type = other DNA
agtgttcgcaggactcggga

SEQ ID NO: 15401 - DNA, 20 bp, synthetic construct
  misc_feature 1..20: note = chemically synthesized
  source 1..20: mol_type = other DNA
ttcgcaggactcgggaaagt

SEQ ID NO: 15402 - DNA, 20 bp, synthetic construct
  misc_feature 1..20: note = chemically synthesized
  source 1..20: mol_type = other DNA
tcgcaggactcgggaaagtc

SEQ ID NO: 15403 - DNA, 20 bp, synthetic construct
  misc_feature 1..20: note = chemically synthesized
  source 1..20: mol_type = other DNA
gggaaagtcaggcccttctt

SEQ ID NO: 15404 - DNA, 20 bp, synthetic construct
  misc_feature 1..20: note = chemically synthesized
  source 1..20: mol_type = other DNA
aaagtcaggcccttcttcgg

SEQ ID NO: 15405 - DNA, 20 bp, synthetic construct
  misc_feature 1..20: note = chemically synthesized
  source 1..20: mol_type = other DNA
aagtcaggcccttcttcgga

SEQ ID NO: 15406 - DNA, 20 bp, synthetic construct
  misc_feature 1..20: note = chemically synthesized
  source 1..20: mol_type = other DNA
ggcccttcttcggaaggatg

SEQ ID NO: 15407 - DNA, 20 bp, synthetic construct
  misc_feature 1..20: note = chemically synthesized
  source 1..20: mol_type = other DNA
ccttcttcggaaggatgcag

SEQ ID NO: 15408 - DNA, 20 bp, synthetic construct
  misc_feature 1..20: note = chemically synthesized
  source 1..20: mol_type = other DNA
cttcttcggaaggatgcagt

SEQ ID NO: 15409 - DNA, 20 bp, synthetic construct
  misc_feature 1..20: note = chemically synthesized
  source 1..20: mol_type = other DNA
ttcttcggaaggatgcagtg

SEQ ID NO: 15410 - DNA, 20 bp, synthetic construct
  misc_feature 1..20: note = chemically synthesized
  source 1..20: mol_type = other DNA
tcttcggaaggatgcagtgg

SEQ ID NO: 15411 - DNA, 20 bp, synthetic construct
  misc_feature 1..20: note = chemically synthesized
  source 1..20: mol_type = other DNA
aaggatgcagtgggggctca

SEQ ID NO: 15412 - DNA, 20 bp, synthetic construct
  misc_feature 1..20: note = chemically synthesized
  source 1..20: mol_type = other DNA
aggatgcagtgggggctcaa

SEQ ID NO: 15413 - DNA, 20 bp, synthetic construct
  misc_feature 1..20: note = chemically synthesized
  source 1..20: mol_type = other DNA
tgcagtgggggctcaaagga

SEQ ID NO: 15414 - DNA, 20 bp, synthetic construct
  misc_feature 1..20: note = chemically synthesized
  source 1..20: mol_type = other DNA
tgggggctcaaaggacagac

SEQ ID NO: 15415 - DNA, 20 bp, synthetic construct
  misc_feature 1..20: note = chemically synthesized
  source 1..20: mol_type = other DNA
gggggctcaaaggacagacc

SEQ ID NO: 15416 - DNA, 20 bp, synthetic construct
  misc_feature 1..20: note = chemically synthesized
  source 1..20: mol_type = other DNA
ggggctcaaaggacagaccg

SEQ ID NO: 15417 - DNA, 20 bp, synthetic construct
  misc_feature 1..20: note = chemically synthesized
  source 1..20: mol_type = other DNA
aaaggacagaccggggcgcg

SEQ ID NO: 15418 - DNA, 20 bp, synthetic construct
  misc_feature 1..20: note = chemically synthesized
  source 1..20: mol_type = other DNA
acagaccggggcgcgcagtc

SEQ ID NO: 15419 - DNA, 20 bp, synthetic construct
  misc_feature 1..20: note = chemically synthesized
  source 1..20: mol_type = other DNA
cagaccggggcgcgcagtcc

SEQ ID NO: 15420 - DNA, 20 bp, synthetic construct
  misc_feature 1..20: note = chemically synthesized
  source 1..20: mol_type = other DNA
cctcgtacccctctccctcc

SEQ ID NO: 15421 - DNA, 20 bp, synthetic construct
  misc_feature 1..20: note = chemically synthesized
  source 1..20: mol_type = other DNA
ctcgtacccctctccctcct

SEQ ID NO: 15422 - DNA, 20 bp, synthetic construct
  misc_feature 1..20: note = chemically synthesized
  source 1..20: mol_type = other DNA
tctccctcctgggtccatct

SEQ ID NO: 15423 - DNA, 20 bp, synthetic construct
  misc_feature 1..20: note = chemically synthesized
  source 1..20: mol_type = other DNA
ctccctcctgggtccatctt

SEQ ID NO: 15424 - DNA, 20 bp, synthetic construct
  misc_feature 1..20: note = chemically synthesized
  source 1..20: mol_type = other DNA
gggtccatcttgggacactc

SEQ ID NO: 15425 - DNA, 20 bp, synthetic construct
  misc_feature 1..20: note = chemically synthesized
  source 1..20: mol_type = other DNA
ggtccatcttgggacactct

SEQ ID NO: 15426 - DNA, 20 bp, synthetic construct
  misc_feature 1..20: note = chemically synthesized
  source 1..20: mol_type = other DNA
catcttgggacactctaggc

SEQ ID NO: 15427 - DNA, 20 bp, synthetic construct
  misc_feature 1..20: note = chemically synthesized
  source 1..20: mol_type = other DNA
atcttgggacactctaggct

SEQ ID NO: 15428 - DNA, 20 bp, synthetic construct
  misc_feature 1..20: note = chemically synthesized
  source 1..20: mol_type = other DNA
cttgggacactctaggctgg

SEQ ID NO: 15429 - DNA, 20 bp, synthetic construct
  misc_feature 1..20: note = chemically synthesized
  source 1..20: mol_type = other DNA
ttgggacactctaggctggg

SEQ ID NO: 15430 - DNA, 20 bp, synthetic construct
  misc_feature 1..20: note = chemically synthesized
  source 1..20: mol_type = other DNA
tgggacactctaggctggga

SEQ ID NO: 15431 - DNA, 20 bp, synthetic construct
  misc_feature 1..20: note = chemically synthesized
  source 1..20: mol_type = other DNA
acactctaggctgggagggt

SEQ ID NO: 15432 - DNA, 20 bp, synthetic construct
  misc_feature 1..20: note = chemically synthesized
  source 1..20: mol_type = other DNA
agtaccccctcctcctgtcc

SEQ ID NO: 15433 - DNA, 20 bp, synthetic construct
  misc_feature 1..20: note = chemically synthesized
  source 1..20: mol_type = other DNA
gtaccccctcctcctgtccc

SEQ ID NO: 15434 - DNA, 20 bp, synthetic construct
  misc_feature 1..20: note = chemically synthesized
  source 1..20: mol_type = other DNA
taccccctcctcctgtcccg

SEQ ID NO: 15435 - DNA, 20 bp, synthetic construct
  misc_feature 1..20: note = chemically synthesized
  source 1..20: mol_type = other DNA
ctcctcctgtcccggggtta

SEQ ID NO: 15436 - DNA, 20 bp, synthetic construct
  misc_feature 1..20: note = chemically synthesized
  source 1..20: mol_type = other DNA
tcctcctgtcccggggttaa

SEQ ID NO: 15437 - DNA, 20 bp, synthetic construct
  misc_feature 1..20: note = chemically synthesized
  source 1..20: mol_type = other DNA
cctcctgtcccggggttaaa

SEQ ID NO: 15438 - DNA, 20 bp, synthetic construct
  misc_feature 1..20: note = chemically synthesized
  source 1..20: mol_type = other DNA
ctgtcccggggttaaagggc

SEQ ID NO: 15439 - DNA, 20 bp, synthetic construct
  misc_feature 1..20: note = chemically synthesized
  source 1..20: mol_type = other DNA
ccggggttaaagggccagtt

SEQ ID NO: 15440 - DNA, 20 bp, synthetic construct
  misc_feature 1..20: note = chemically synthesized
  source 1..20: mol_type = other DNA
cggggttaaagggccagttt

SEQ ID NO: 15441 - DNA, 20 bp, synthetic construct
  misc_feature 1..20: note = chemically synthesized
  source 1..20: mol_type = other DNA
gggttaaagggccagtttgg

SEQ ID NO: 15442 - DNA, 20 bp, synthetic construct
  misc_feature 1..20: note = chemically synthesized
  source 1..20: mol_type = other DNA
ggttaaagggccagtttggg

SEQ ID NO: 15443 - DNA, 20 bp, synthetic construct
  misc_feature 1..20: note = chemically synthesized
  source 1..20: mol_type = other DNA
gttaaagggccagtttggga

SEQ ID NO: 15444 - DNA, 20 bp, synthetic construct
  misc_feature 1..20: note = chemically synthesized
  source 1..20: mol_type = other DNA
ttaaagggccagtttgggag

SEQ ID NO: 15445 - DNA, 20 bp, synthetic construct
  misc_feature 1..20: note = chemically synthesized
  source 1..20: mol_type = other DNA
taaagggccagtttgggagg

SEQ ID NO: 15446 - DNA, 20 bp, synthetic construct
  misc_feature 1..20: note = chemically synthesized
  source 1..20: mol_type = other DNA
gggccagtttgggagggggt

SEQ ID NO: 15447 - DNA, 20 bp, synthetic construct
  misc_feature 1..20: note = chemically synthesized
  source 1..20: mol_type = other DNA
ggccagtttgggagggggtg

SEQ ID NO: 15448 - DNA, 20 bp, synthetic construct
  misc_feature 1..20: note = chemically synthesized
  source 1..20: mol_type = other DNA
gccagtttgggagggggtga

SEQ ID NO: 15449 - DNA, 20 bp, synthetic construct
  misc_feature 1..20: note = chemically synthesized
  source 1..20: mol_type = other DNA
ccagtttgggagggggtgag

SEQ ID NO: 15450 - DNA, 20 bp, synthetic construct
  misc_feature 1..20: note = chemically synthesized
  source 1..20: mol_type = other DNA
cagtttgggagggggtgagg

SEQ ID NO: 15451 - DNA, 20 bp, synthetic construct
  misc_feature 1..20: note = chemically synthesized
  source 1..20: mol_type = other DNA
ttctttctgtcctcattttc

SEQ ID NO: 15452 - DNA, 20 bp, synthetic construct
  misc_feature 1..20: note = chemically synthesized
  source 1..20: mol_type = other DNA
tctttctgtcctcattttct

SEQ ID NO: 15453 - DNA, 20 bp, synthetic construct
  misc_feature 1..20: note = chemically synthesized
  source 1..20: mol_type = other DNA
gtcctcattttctgggtgct

SEQ ID NO: 15454 - DNA, 20 bp, synthetic construct
  misc_feature 1..20: note = chemically synthesized
  source 1..20: mol_type = other DNA
cctcattttctgggtgctca

SEQ ID NO: 15455 - DNA, 20 bp, synthetic construct
  misc_feature 1..20: note = chemically synthesized
  source 1..20: mol_type = other DNA
ctcattttctgggtgctcag

SEQ ID NO: 15456 - DNA, 20 bp, synthetic construct
  misc_feature 1..20: note = chemically synthesized
  source 1..20: mol_type = other DNA
tcattttctgggtgctcaga

SEQ ID NO: 15457 - DNA, 20 bp, synthetic construct
  misc_feature 1..20: note = chemically synthesized
  source 1..20: mol_type = other DNA
cattttctgggtgctcagag

SEQ ID NO: 15458 - DNA, 20 bp, synthetic construct
  misc_feature 1..20: note = chemically synthesized
  source 1..20: mol_type = other DNA
attttctgggtgctcagagg

SEQ ID NO: 15459 - DNA, 20 bp, synthetic construct
  misc_feature 1..20: note = chemically synthesized
  source 1..20: mol_type = other DNA
ttctgggtgctcagaggggg

SEQ ID NO: 15460 - DNA, 20 bp, synthetic construct
  misc_feature 1..20: note = chemically synthesized
  source 1..20: mol_type = other DNA
tctgggtgctcagagggggc

SEQ ID NO: 15461 - DNA, 20 bp, synthetic construct
  misc_feature 1..20: note = chemically synthesized
  source 1..20: mol_type = other DNA
tgggtgctcagagggggcag

SEQ ID NO: 15462 - DNA, 20 bp, synthetic construct
  misc_feature 1..20: note = chemically synthesized
  source 1..20: mol_type = other DNA
agagggggcaggagccatcc

SEQ ID NO: 15463 - DNA, 20 bp, synthetic construct
  misc_feature 1..20: note = chemically synthesized
  source 1..20: mol_type = other DNA
gcaggagccatcccggtcct

SEQ ID NO: 15464 - DNA, 20 bp, synthetic construct
  misc_feature 1..20: note = chemically synthesized
  source 1..20: mol_type = other DNA
cgccccccgcctctgctatg

SEQ ID NO: 15465 - DNA, 20 bp, synthetic construct
  misc_feature 1..20: note = chemically synthesized
  source 1..20: mol_type = other DNA
gccccccgcctctgctatgt

SEQ ID NO: 15466 - DNA, 20 bp, synthetic construct
  misc_feature 1..20: note = chemically synthesized
  source 1..20: mol_type = other DNA
ctctgctatgtgggctgaat

SEQ ID NO: 15467 - DNA, 20 bp, synthetic construct
  misc_feature 1..20: note = chemically synthesized
  source 1..20: mol_type = other DNA
tgtgggctgaatgagccatt

SEQ ID NO: 15468 - DNA, 20 bp, synthetic construct
  misc_feature 1..20: note = chemically synthesized
  source 1..20: mol_type = other DNA
tgaatgagccattcggtcgc

SEQ ID NO: 15469 - DNA, 20 bp, synthetic construct
  misc_feature 1..20: note = chemically synthesized
  source 1..20: mol_type = other DNA
gaatgagccattcggtcgct

SEQ ID NO: 15470 - DNA, 20 bp, synthetic construct
  misc_feature 1..20: note = chemically synthesized
  source 1..20: mol_type = other DNA
atgagccattcggtcgctag

SEQ ID NO: 15471 - DNA, 20 bp, synthetic construct
  misc_feature 1..20: note = chemically synthesized
  source 1..20: mol_type = other DNA
tgagccattcggtcgctagg

SEQ ID NO: 15472 - DNA, 20 bp, synthetic construct
  misc_feature 1..20: note = chemically synthesized
  source 1..20: mol_type = other DNA
gccattcggtcgctaggagg

SEQ ID NO: 15473 - DNA, 20 bp, synthetic construct
  misc_feature 1..20: note = chemically synthesized
  source 1..20: mol_type = other DNA
cggtcgctaggaggcagaac

SEQ ID NO: 15474 - DNA, 20 bp, synthetic construct
  misc_feature 1..20: note = chemically synthesized
  source 1..20: mol_type = other DNA
ctaggaggcagaacaagatc

SEQ ID NO: 15475 - DNA, 20 bp, synthetic construct
  misc_feature 1..20: note = chemically synthesized
  source 1..20: mol_type = other DNA
gaggcagaacaagatcaaga

SEQ ID NO: 15476 - DNA, 20 bp, synthetic construct
  misc_feature 1..20: note = chemically synthesized
  source 1..20: mol_type = other DNA
agaacaagatcaagaaagct

SEQ ID NO: 15477 - DNA, 20 bp, synthetic construct
  misc_feature 1..20: note = chemically synthesized
  source 1..20: mol_type = other DNA
cagcgaacttgaacctgtac

SEQ ID NO: 15478 - DNA, 20 bp, synthetic construct
  misc_feature 1..20: note = chemically synthesized
  source 1..20: mol_type = other DNA
gcgaacttgaacctgtacca

SEQ ID NO: 15479 - DNA, 20 bp, synthetic construct
  misc_feature 1..20: note = chemically synthesized
  source 1..20: mol_type = other DNA
agcctcccccacctcctgcc

SEQ ID NO: 15480 - DNA, 20 bp, synthetic construct
  misc_feature 1..20: note = chemically synthesized
  source 1..20: mol_type = other DNA
cctgcccggcgattctcgtc

SEQ ID NO: 15481 - DNA, 20 bp, synthetic construct
  misc_feature 1..20: note = chemically synthesized
  source 1..20: mol_type = other DNA
ctgcccggcgattctcgtcc

SEQ ID NO: 15482 - DNA, 20 bp, synthetic construct
  misc_feature 1..20: note = chemically synthesized
  source 1..20: mol_type = other DNA
tgcccggcgattctcgtccg

SEQ ID NO: 15483 - DNA, 20 bp, synthetic construct
  misc_feature 1..20: note = chemically synthesized
  source 1..20: mol_type = other DNA
cccggcgattctcgtccggg

SEQ ID NO: 15484 - DNA, 20 bp, synthetic construct
  misc_feature 1..20: note = chemically synthesized
  source 1..20: mol_type = other DNA
ccggcgattctcgtccgggg

SEQ ID NO: 15485 - DNA, 20 bp, synthetic construct
  misc_feature 1..20: note = chemically synthesized
  source 1..20: mol_type = other DNA
attctcgtccggggaggaac

SEQ ID NO: 15486 - DNA, 20 bp, synthetic construct
  misc_feature 1..20: note = chemically synthesized
  source 1..20: mol_type = other DNA
cggggaggaacgagctttgc

SEQ ID NO: 15487 - DNA, 20 bp, synthetic construct
  misc_feature 1..20: note = chemically synthesized
  source 1..20: mol_type = other DNA
ggggaggaacgagctttgcg

SEQ ID NO: 15488 - DNA, 20 bp, synthetic construct
  misc_feature 1..20: note = chemically synthesized
  source 1..20: mol_type = other DNA
gggaggaacgagctttgcga

SEQ ID NO: 15489 - DNA, 20 bp, synthetic construct
  misc_feature 1..20: note = chemically synthesized
  source 1..20: mol_type = other DNA
aggaacgagctttgcgaggg

SEQ ID NO: 15490 - DNA, 20 bp, synthetic construct
  misc_feature 1..20: note = chemically synthesized
  source 1..20: mol_type = other DNA
ggaacgagctttgcgagggt

SEQ ID NO: 15491 - DNA, 20 bp, synthetic construct
  misc_feature 1..20: note = chemically synthesized
  source 1..20: mol_type = other DNA
gaacgagctttgcgagggtg

SEQ ID NO: 15492 - DNA, 20 bp, synthetic construct
  misc_feature 1..20: note = chemically synthesized
  source 1..20: mol_type = other DNA
aacgagctttgcgagggtgg

SEQ ID NO: 15493 - DNA, 20 bp, synthetic construct
  misc_feature 1..20: note = chemically synthesized
  source 1..20: mol_type = other DNA
gagctttgcgagggtggggg

SEQ ID NO: 15494 - DNA, 20 bp, synthetic construct
  misc_feature 1..20: note = chemically synthesized
  source 1..20: mol_type = other DNA
agctttgcgagggtgggggt

SEQ ID NO: 15495 - DNA, 20 bp, synthetic construct
  misc_feature 1..20: note = chemically synthesized
  source 1..20: mol_type = other DNA
gctttgcgagggtgggggtg

SEQ ID NO: 15496 - DNA, 20 bp, synthetic construct
  misc_feature 1..20: note = chemically synthesized
  source 1..20: mol_type = other DNA
ctttgcgagggtgggggtgg

SEQ ID NO: 15497 - DNA, 20 bp, synthetic construct
  misc_feature 1..20: note = chemically synthesized
  source 1..20: mol_type = other DNA
tttgcgagggtgggggtggg

SEQ ID NO: 15498 - DNA, 20 bp, synthetic construct
  misc_feature 1..20: note = chemically synthesized
  source 1..20: mol_type = other DNA
cgagggtgggggtgggggga

SEQ ID NO: 15499 - DNA, 20 bp, synthetic construct
  misc_feature 1..20: note = chemically synthesized
  source 1..20: mol_type = other DNA
gtgggggtggggggaaagaa

SEQ ID NO: 15500 - DNA, 20 bp, synthetic construct
  misc_feature 1..20: note = chemically synthesized
  source 1..20: mol_type = other DNA
gggtggggggaaagaacggt

SEQ ID NO: 15501 - DNA, 20 bp, synthetic construct
  misc_feature 1..20: note = chemically synthesized
  source 1..20: mol_type = other DNA
ggtggggggaaagaacggtt

SEQ ID NO: 15502 - DNA, 20 bp, synthetic construct
  misc_feature 1..20: note = chemically synthesized
  source 1..20: mol_type = other DNA
ggggggaaagaacggttagg

SEQ ID NO: 15503 - DNA, 20 bp, synthetic construct
  misc_feature 1..20: note = chemically synthesized
  source 1..20: mol_type = other DNA
tttgactttaaaaatgcttc

SEQ ID NO: 15504 - DNA, 20 bp, synthetic construct
  misc_feature 1..20: note = chemically synthesized
  source 1..20: mol_type = other DNA
actttaaaaatgcttctggc

SEQ ID NO: 15505 - DNA, 20 bp, synthetic construct
  misc_feature 1..20: note = chemically synthesized
  source 1..20: mol_type = other DNA
ctttaaaaatgcttctggcc

SEQ ID NO: 15506 - DNA, 20 bp, synthetic construct
  misc_feature 1..20: note = chemically synthesized
  source 1..20: mol_type = other DNA
tttaaaaatgcttctggccg

SEQ ID NO: 15507 - DNA, 20 bp, synthetic construct
  misc_feature 1..20: note = chemically synthesized
  source 1..20: mol_type = other DNA
aatgcttctggccggggccg

SEQ ID NO: 15508 - DNA, 20 bp, synthetic construct
  misc_feature 1..20: note = chemically synthesized
  source 1..20: mol_type = other DNA
tgcttctggccggggccgcg

SEQ ID NO: 15509 - DNA, 20 bp, synthetic construct
  misc_feature 1..20: note = chemically synthesized
  source 1..20: mol_type = other DNA
ttctggccggggccgcggag

SEQ ID NO: 15510 - DNA, 20 bp, synthetic construct
  misc_feature 1..20: note = chemically synthesized
  source 1..20: mol_type = other DNA
cggggccgcggagaagcgac

SEQ ID NO: 15511 - DNA, 20 bp, synthetic construct
  misc_feature 1..20: note = chemically synthesized
  source 1..20: mol_type = other DNA
ggggccgcggagaagcgacc

SEQ ID NO: 15512 - DNA, 20 bp, synthetic construct
  misc_feature 1..20: note = chemically synthesized
  source 1..20: mol_type = other DNA
cggagaagcgaccgggcgcg

SEQ ID NO: 15513 - DNA, 20 bp, synthetic construct
  misc_feature 1..20: note = chemically synthesized
  source 1..20: mol_type = other DNA
cggccgacacccccgtgcgc

SEQ ID NO: 15514 - DNA, 20 bp, synthetic construct
  misc_feature 1..20: note = chemically synthesized
  source 1..20: mol_type = other DNA
gacacccccgtgcgcgagct

SEQ ID NO: 15515 - DNA, 20 bp, synthetic construct
  misc_feature 1..20: note = chemically synthesized
  source 1..20: mol_type = other DNA
ccccgtgcgcgagctgagac

SEQ ID NO: 15516 - DNA, 20 bp, synthetic construct
  misc_feature 1..20: note = chemically synthesized
  source 1..20: mol_type = other DNA
gagctgagaccagcgcgcgc

SEQ ID NO: 15517 - DNA, 20 bp, synthetic construct
  misc_feature 1..20: note = chemically synthesized
  source 1..20: mol_type = other DNA
agctgagaccagcgcgcgcc

SEQ ID NO: 15518 - DNA, 20 bp, synthetic construct
  misc_feature 1..20: note = chemically synthesized
  source 1..20: mol_type = other DNA
agaccagcgcgcgccgggct

SEQ ID NO: 15519 - DNA, 20 bp, synthetic construct
  misc_feature 1..20: note = chemically synthesized
  source 1..20: mol_type = other DNA
accagcgcgcgccgggctcg

SEQ ID NO: 15520 - DNA, 20 bp, synthetic construct
  misc_feature 1..20: note = chemically synthesized
  source 1..20: mol_type = other DNA
cgcgcgccgggctcggagca

SEQ ID NO: 15521 - DNA, 20 bp, synthetic construct
  misc_feature 1..20: note = chemically synthesized
  source 1..20: mol_type = other DNA
gccgggctcggagcacggtg

SEQ ID NO: 15522 - DNA, 20 bp, synthetic construct
  misc_feature 1..20: note = chemically synthesized
  source 1..20: mol_type = other DNA
gtgcagttttcgctttcttt

SEQ ID NO: 15523 - DNA, 20 bp, synthetic construct
  misc_feature 1..20: note = chemically synthesized
  source 1..20: mol_type = other DNA
tgcagttttcgctttctttc

SEQ ID NO: 15524 - DNA, 20 bp, synthetic construct
  misc_feature 1..20: note = chemically synthesized
  source 1..20: mol_type = other DNA
gcagttttcgctttctttcg

SEQ ID NO: 15525 - DNA, 20 bp, synthetic construct
  misc_feature 1..20: note = chemically synthesized
  source 1..20: mol_type = other DNA
ttttcgctttctttcggggc

SEQ ID NO: 15526 - DNA, 20 bp, synthetic construct
  misc_feature 1..20: note = chemically synthesized
  source 1..20: mol_type = other DNA
tctttcggggccggcatttt

SEQ ID NO: 15527 - DNA, 20 bp, synthetic construct
  misc_feature 1..20: note = chemically synthesized
  source 1..20: mol_type = other DNA
ttcggggccggcatttttgg

SEQ ID NO: 15528 - DNA, 20 bp, synthetic construct
  misc_feature 1..20: note = chemically synthesized
  source 1..20: mol_type = other DNA
tcggggccggcatttttggt

SEQ ID NO: 15529 - DNA, 20 bp, synthetic construct
  misc_feature 1..20: note = chemically synthesized
  source 1..20: mol_type = other DNA
cggggccggcatttttggta

SEQ ID NO: 15530 - DNA, 20 bp, synthetic construct
  misc_feature 1..20: note = chemically synthesized
  source 1..20: mol_type = other DNA
gggccggcatttttggtagg

SEQ ID NO: 15531 - DNA, 20 bp, synthetic construct
  misc_feature 1..20: note = chemically synthesized
  source 1..20: mol_type = other DNA
ggccggcatttttggtaggg

SEQ ID NO: 15532 - DNA, 20 bp, synthetic construct
  misc_feature 1..20: note = chemically synthesized
  source 1..20: mol_type = other DNA
catttttggtagggaggaac

SEQ ID NO: 15533 - DNA, 20 bp, synthetic construct
  misc_feature 1..20: note = chemically synthesized
  source 1..20: mol_type = other DNA
atttttggtagggaggaacc

SEQ ID NO: 15534 - DNA, 20 bp, synthetic construct
  misc_feature 1..20: note = chemically synthesized
  source 1..20: mol_type = other DNA
ttttggtagggaggaaccgg

SEQ ID NO: 15535 - DNA, 20 bp, synthetic construct
  misc_feature 1..20: note = chemically synthesized
  source 1..20: mol_type = other DNA
ggaaccgggagtgcgcgctc

SEQ ID NO: 15536 - DNA, 20 bp, synthetic construct
  misc_feature 1..20: note = chemically synthesized
  source 1..20: mol_type = other DNA
gaaccgggagtgcgcgctct

SEQ ID NO: 15537 - DNA, 20 bp, synthetic construct
  misc_feature 1..20: note = chemically synthesized
  source 1..20: mol_type = other DNA
aaccgggagtgcgcgctcta

SEQ ID NO: 15538 - DNA, 20 bp, synthetic construct
  misc_feature 1..20: note = chemically synthesized
  source 1..20: mol_type = other DNA
gagtgcgcgctctagggctt

SEQ ID NO: 15539 - DNA, 20 bp, synthetic construct
  misc_feature 1..20: note = chemically synthesized
  source 1..20: mol_type = other DNA
agtgcgcgctctagggcttc

SEQ ID NO: 15540 - DNA, 20 bp, synthetic construct
  misc_feature 1..20: note = chemically synthesized
  source 1..20: mol_type = other DNA
gtgcgcgctctagggcttcg

SEQ ID NO: 15541 - DNA, 20 bp, synthetic construct
  misc_feature 1..20: note = chemically synthesized
  source 1..20: mol_type = other DNA
cgctctagggcttcggggca

SEQ ID NO: 15542 - DNA, 20 bp, synthetic construct
  misc_feature 1..20: note = chemically synthesized
  source 1..20: mol_type = other DNA
agggcttcggggcatggccg

SEQ ID NO: 15543 - DNA, 20 bp, synthetic construct
  misc_feature 1..20: note = chemically synthesized
  source 1..20: mol_type = other DNA
ggcttcggggcatggccgaa

SEQ ID NO: 15544 - DNA, 20 bp, synthetic construct
  misc_feature 1..20: note = chemically synthesized
  source 1..20: mol_type = other DNA
gcttcggggcatggccgaag

SEQ ID NO: 15545 - DNA, 20 bp, synthetic construct
  misc_feature 1..20: note = chemically synthesized
  source 1..20: mol_type = other DNA
cttcggggcatggccgaaga

SEQ ID NO: 15546 - DNA, 20 bp, synthetic construct
  misc_feature 1..20: note = chemically synthesized
  source 1..20: mol_type = other DNA
ttcggggcatggccgaagag

SEQ ID NO: 15547 - DNA, 20 bp, synthetic construct
  misc_feature 1..20: note = chemically synthesized
  source 1..20: mol_type = other DNA
tcggggcatggccgaagagg

SEQ ID NO: 15548 - DNA, 20 bp, synthetic construct
  misc_feature 1..20: note = chemically synthesized
  source 1..20: mol_type = other DNA
catggccgaagagggggata

SEQ ID NO: 15549 - DNA, 20 bp, synthetic construct
  misc_feature 1..20: note = chemically synthesized
  source 1..20: mol_type = other DNA
gccgaagagggggatatggc

SEQ ID NO: 15550 - DNA, 20 bp, synthetic construct
  misc_feature 1..20: note = chemically synthesized
  source 1..20: mol_type = other DNA
ggatatggcaagtttgcact

SEQ ID NO: 15551 - DNA, 20 bp, synthetic construct
  misc_feature 1..20: note = chemically synthesized
  source 1..20: mol_type = other DNA
gcaagtttgcacttggtctc

SEQ ID NO: 15552 - DNA, 20 bp, synthetic construct
  misc_feature 1..20: note = chemically synthesized
  source 1..20: mol_type = other DNA
caccccctcacccccatgca

SEQ ID NO: 15553 - DNA, 20 bp, synthetic construct
  misc_feature 1..20: note = chemically synthesized
  source 1..20: mol_type = other DNA
cctcacccccatgcaaagca

SEQ ID NO: 15554 - DNA, 20 bp, synthetic construct
  misc_feature 1..20: note = chemically synthesized
  source 1..20: mol_type = other DNA
cccatgcaaagcacagacct

SEQ ID NO: 15555 - DNA, 20 bp, synthetic construct
  misc_feature 1..20: note = chemically synthesized
  source 1..20: mol_type = other DNA
atgcaaagcacagacctcgg

SEQ ID NO: 15556 - DNA, 20 bp, synthetic construct
  misc_feature 1..20: note = chemically synthesized
  source 1..20: mol_type = other DNA
agcacagacctcggtggcct

SEQ ID NO: 15557 - DNA, 20 bp, synthetic construct
  misc_feature 1..20: note = chemically synthesized
  source 1..20: mol_type = other DNA
cagacctcggtggcctcggc

SEQ ID NO: 15558 - DNA, 20 bp, synthetic construct
  misc_feature 1..20: note = chemically synthesized
  source 1..20: mol_type = other DNA
ggtggcctcggctggcttgc

SEQ ID NO: 15559 - DNA, 20 bp, synthetic construct
  misc_feature 1..20: note = chemically synthesized
  source 1..20: mol_type = other DNA
gtggcctcggctggcttgct

SEQ ID NO: 15560 - DNA, 20 bp, synthetic construct
  misc_feature 1..20: note = chemically synthesized
  source 1..20: mol_type = other DNA
gcctcggctggcttgctggg

SEQ ID NO: 15561 - DNA, 20 bp, synthetic construct
  misc_feature 1..20: note = chemically synthesized
  source 1..20: mol_type = other DNA
tggcttgctgggcggctctg

SEQ ID NO: 15562 - DNA, 20 bp, synthetic construct
  misc_feature 1..20: note = chemically synthesized
  source 1..20: mol_type = other DNA
cgacaccccccctctcgcct

SEQ ID NO: 15563 - DNA, 20 bp, synthetic construct
  misc_feature 1..20: note = chemically synthesized
  source 1..20: mol_type = other DNA
acaccccccctctcgcctcg

SEQ ID NO: 15564 - DNA, 20 bp, synthetic construct
  misc_feature 1..20: note = chemically synthesized
  source 1..20: mol_type = other DNA
ccccctctcgcctcggagct

SEQ ID NO: 15565 - DNA, 20 bp, synthetic construct
  misc_feature 1..20: note = chemically synthesized
  source 1..20: mol_type = other DNA
ggagctcggaatcacaacaa

SEQ ID NO: 15566 - DNA, 20 bp, synthetic construct
  misc_feature 1..20: note = chemically synthesized
  source 1..20: mol_type = other DNA
cggaatcacaacaatagtaa

SEQ ID NO: 15567 - DNA, 20 bp, synthetic construct
  misc_feature 1..20: note = chemically synthesized
  source 1..20: mol_type = other DNA
tagttatcatcataatgatg

SEQ ID NO: 15568 - DNA, 20 bp, synthetic construct
  misc_feature 1..20: note = chemically synthesized
  source 1..20: mol_type = other DNA
agttatcatcataatgatgc

SEQ ID NO: 15569 - DNA, 20 bp, synthetic construct
  misc_feature 1..20: note = chemically synthesized
  source 1..20: mol_type = other DNA
tatcatcataatgatgcggg

SEQ ID NO: 15570 - DNA, 20 bp, synthetic construct
  misc_feature 1..20: note = chemically synthesized
  source 1..20: mol_type = other DNA
atcatcataatgatgcgggc

SEQ ID NO: 15571 - DNA, 20 bp, synthetic construct
  misc_feature 1..20: note = chemically synthesized
  source 1..20: mol_type = other DNA
atcataatgatgcgggcagg

SEQ ID NO: 15572 - DNA, 20 bp, synthetic construct
  misc_feature 1..20: note = chemically synthesized
  source 1..20: mol_type = other DNA
tcattaataatgaataaccg

SEQ ID NO: 15573 - DNA, 20 bp, synthetic construct
  misc_feature 1..20: note = chemically synthesized
  source 1..20: mol_type = other DNA
cagccgccgccgcgcacacc

SEQ ID NO: 15574 - DNA, 20 bp, synthetic construct
  misc_feature 1..20: note = chemically synthesized
  source 1..20: mol_type = other DNA
cgccgcgcacacccagtgcc

SEQ ID NO: 15575 - DNA, 20 bp, synthetic construct
  misc_feature 1..20: note = chemically synthesized
  source 1..20: mol_type = other DNA
acacccagtgcccagaattg

SEQ ID NO: 15576 - DNA, 20 bp, synthetic construct
  misc_feature 1..20: note = chemically synthesized
  source 1..20: mol_type = other DNA
cacccagtgcccagaattgc

SEQ ID NO: 15577 - DNA, 20 bp, synthetic construct
  misc_feature 1..20: note = chemically synthesized
  source 1..20: mol_type = other DNA
acccagtgcccagaattgcg

SEQ ID NO: 15578 - DNA, 20 bp, synthetic construct
  misc_feature 1..20: note = chemically synthesized
  source 1..20: mol_type = other DNA
cccagtgcccagaattgcgg

SEQ ID NO: 15579 - DNA, 20 bp, synthetic construct
  misc_feature 1..20: note = chemically synthesized
  source 1..20: mol_type = other DNA
ttgcgggggaaatgcatttg

SEQ ID NO: 15580 - DNA, 20 bp, synthetic construct
  misc_feature 1..20: note = chemically synthesized
  source 1..20: mol_type = other DNA
gcgggggaaatgcatttgca

SEQ ID NO: 15581 - DNA, 20 bp, synthetic construct
  misc_feature 1..20: note = chemically synthesized
  source 1..20: mol_type = other DNA
gcatttgcagagatccccca

SEQ ID NO: 15582 - DNA, 20 bp, synthetic construct
  misc_feature 1..20: note = chemically synthesized
  source 1..20: mol_type = other DNA
cagagatcccccaaagtaaa

SEQ ID NO: 15583 - DNA, 20 bp, synthetic construct
  misc_feature 1..20: note = chemically synthesized
  source 1..20: mol_type = other DNA
tcccccaaagtaaaaagtgt

SEQ ID NO: 15584 - DNA, 20 bp, synthetic construct
  misc_feature 1..20: note = chemically synthesized
  source 1..20: mol_type = other DNA
aagtaaaaagtgtaagcttg

SEQ ID NO: 15585 - DNA, 20 bp, synthetic construct
  misc_feature 1..20: note = chemically synthesized
  source 1..20: mol_type = other DNA
aaagtgtaagcttgtggaca

SEQ ID NO: 15586 - DNA, 20 bp, synthetic construct
  misc_feature 1..20: note = chemically synthesized
  source 1..20: mol_type = other DNA
tgtggacacagaatgaatct

SEQ ID NO: 15587 - DNA, 20 bp, synthetic construct
  misc_feature 1..20: note = chemically synthesized
  source 1..20: mol_type = other DNA
gtggacacagaatgaatctc

SEQ ID NO: 15588 - DNA, 20 bp, synthetic construct
  misc_feature 1..20: note = chemically synthesized
  source 1..20: mol_type = other DNA
gaatctcaggacccgcgctt

SEQ ID NO: 15589 - DNA, 20 bp, synthetic construct
  misc_feature 1..20: note = chemically synthesized
  source 1..20: mol_type = other DNA
aatctcaggacccgcgcttg

SEQ ID NO: 15590 - DNA, 20 bp, synthetic construct
  misc_feature 1..20: note = chemically synthesized
  source 1..20: mol_type = other DNA
acccgcgcttgaggtgtgtg

SEQ ID NO: 15591 - DNA, 20 bp, synthetic construct
  misc_feature 1..20: note = chemically synthesized
  source 1..20: mol_type = other DNA
ccgcgcttgaggtgtgtgcg

SEQ ID NO: 15592 - DNA, 20 bp, synthetic construct
  misc_feature 1..20: note = chemically synthesized
  source 1..20: mol_type = other DNA
gaggtgtgtgcggagatact

SEQ ID NO: 15593 - DNA, 20 bp, synthetic construct
  misc_feature 1..20: note = chemically synthesized
  source 1..20: mol_type = other DNA
cggagatactgagactgcac

SEQ ID NO: 15594 - DNA, 20 bp, synthetic construct
  misc_feature 1..20: note = chemically synthesized
  source 1..20: mol_type = other DNA
ggagatactgagactgcacc

SEQ ID NO: 15595 - DNA, 20 bp, synthetic construct
  misc_feature 1..20: note = chemically synthesized
  source 1..20: mol_type = other DNA
tgagactgcaccaggttaac

SEQ ID NO: 15596 - DNA, 20 bp, synthetic construct
  misc_feature 1..20: note = chemically synthesized
  source 1..20: mol_type = other DNA
actgcaccaggttaaccagc

SEQ ID NO: 15597 - DNA, 20 bp, synthetic construct
  misc_feature 1..20: note = chemically synthesized
  source 1..20: mol_type = other DNA
ctgcaccaggttaaccagcc

SEQ ID NO: 15598 - DNA, 20 bp, synthetic construct
  misc_feature 1..20: note = chemically synthesized
  source 1..20: mol_type = other DNA
tcacttcctttttcaccaac

SEQ ID NO: 15599 - DNA, 20 bp, synthetic construct
  misc_feature 1..20: note = chemically synthesized
  source 1..20: mol_type = other DNA
cttcctttttcaccaactgg

SEQ ID NO: 15600 - DNA, 20 bp, synthetic construct
  misc_feature 1..20: note = chemically synthesized
  source 1..20: mol_type = other DNA
ttcctttttcaccaactggc

SEQ ID NO: 15601 - DNA, 20 bp, synthetic construct
  misc_feature 1..20: note = chemically synthesized
  source 1..20: mol_type = other DNA
ttttcaccaactggcaggcc

SEQ ID NO: 15602 - DNA, 20 bp, synthetic construct
  misc_feature 1..20: note = chemically synthesized
  source 1..20: mol_type = other DNA
tttcaccaactggcaggccc

SEQ ID NO: 15603 - DNA, 20 bp, synthetic construct
  misc_feature 1..20: note = chemically synthesized
  source 1..20: mol_type = other DNA
ttcaccaactggcaggccca

SEQ ID NO: 15604 - DNA, 20 bp, synthetic construct
  misc_feature 1..20: note = chemically synthesized
  source 1..20: mol_type = other DNA
cccagggaaccgtcaccccg

SEQ ID NO: 15605 - DNA, 20 bp, synthetic construct
  misc_feature 1..20: note = chemically synthesized
  source 1..20: mol_type = other DNA
ggaaccgtcaccccgcggcc

SEQ ID NO: 15606 - DNA, 20 bp, synthetic construct
  misc_feature 1..20: note = chemically synthesized
  source 1..20: mol_type = other DNA
ccgtcaccccgcggccgagc

SEQ ID NO: 15607 - DNA, 20 bp, synthetic construct
  misc_feature 1..20: note = chemically synthesized
  source 1..20: mol_type = other DNA
accccgcggccgagctggcc

SEQ ID NO: 15608 - DNA, 20 bp, synthetic construct
  misc_feature 1..20: note = chemically synthesized
  source 1..20: mol_type = other DNA
cgcggccgagctggccgagc

SEQ ID NO: 15609 - DNA, 20 bp, synthetic construct
  misc_feature 1..20: note = chemically synthesized
  source 1..20: mol_type = other DNA
gccgagctggccgagctgga

SEQ ID NO: 15610 - DNA, 20 bp, synthetic construct
  misc_feature 1..20: note = chemically synthesized
  source 1..20: mol_type = other DNA
ccgagctggccgagctggac

SEQ ID NO: 15611 - DNA, 20 bp, synthetic construct
  misc_feature 1..20: note = chemically synthesized
  source 1..20: mol_type = other DNA
ctggccgagctggacgggca

SEQ ID NO: 15612 - DNA, 20 bp, synthetic construct
  misc_feature 1..20: note = chemically synthesized
  source 1..20: mol_type = other DNA
ggccgagctggacgggcatg

SEQ ID NO: 15613 - DNA, 20 bp, synthetic construct
  misc_feature 1..20: note = chemically synthesized
  source 1..20: mol_type = other DNA
gccgagctggacgggcatgg

SEQ ID NO: 15614 - DNA, 20 bp, synthetic construct
  misc_feature 1..20: note = chemically synthesized
  source 1..20: mol_type = other DNA
gagctggacgggcatggagg

SEQ ID NO: 15615 - DNA, 20 bp, synthetic construct
  misc_feature 1..20: note = chemically synthesized
  source 1..20: mol_type = other DNA
ctggacgggcatggaggcag

SEQ ID NO: 15616 - DNA, 20 bp, synthetic construct
  misc_feature 1..20: note = chemically synthesized
  source 1..20: mol_type = other DNA
acgggcatggaggcagcagt

SEQ ID NO: 15617 - DNA, 20 bp, synthetic construct
  misc_feature 1..20: note = chemically synthesized
  source 1..20: mol_type = other DNA
cgggcatggaggcagcagtc

SEQ ID NO: 15618 - DNA, 20 bp, synthetic construct
  misc_feature 1..20: note = chemically synthesized
  source 1..20: mol_type = other DNA
gggcatggaggcagcagtca

SEQ ID NO: 15619 - DNA, 20 bp, synthetic construct
  misc_feature 1..20: note = chemically synthesized
  source 1..20: mol_type = other DNA
gaggcagcagtcagggcccc

SEQ ID NO: 15620 - DNA, 20 bp, synthetic construct
  misc_feature 1..20: note = chemically synthesized
  source 1..20: mol_type = other DNA
ccctggctgccctccgtctc

SEQ ID NO: 15621 - DNA, 20 bp, synthetic construct
  misc_feature 1..20: note = chemically synthesized
  source 1..20: mol_type = other DNA
cctggctgccctccgtctcc

SEQ ID NO: 15622 - DNA, 20 bp, synthetic construct
  misc_feature 1..20: note = chemically synthesized
  source 1..20: mol_type = other DNA
gccctccgtctccgggcccc

SEQ ID NO: 15623 - DNA, 20 bp, synthetic construct
  misc_feature 1..20: note = chemically synthesized
  source 1..20: mol_type = other DNA
ccctccgtctccgggccccc

SEQ ID NO: 15624 - DNA, 20 bp, synthetic construct
  misc_feature 1..20: note = chemically synthesized
  source 1..20: mol_type = other DNA
tctccgggcccccgggcccc

SEQ ID NO: 15625 - DNA, 20 bp, synthetic construct
  misc_feature 1..20: note = chemically synthesized
  source 1..20: mol_type = other DNA
ctccgggcccccgggcccca

SEQ ID NO: 15626 - DNA, 20 bp, synthetic construct
  misc_feature 1..20: note = chemically synthesized
  source 1..20: mol_type = other DNA
ccccgggccccaaggccccg

SEQ ID NO: 15627 - DNA, 20 bp, synthetic construct
  misc_feature 1..20: note = chemically synthesized
  source 1..20: mol_type = other DNA
gccgctgctgcacgtgttcg

SEQ ID NO: 15628 - DNA, 20 bp, synthetic construct
  misc_feature 1..20: note = chemically synthesized
  source 1..20: mol_type = other DNA
ctgctgcacgtgttcgcagc

SEQ ID NO: 15629 - DNA, 20 bp, synthetic construct
  misc_feature 1..20: note = chemically synthesized
  source 1..20: mol_type = other DNA
gcacgtgttcgcagcaagcg

SEQ ID NO: 15630 - DNA, 20 bp, synthetic construct
  misc_feature 1..20: note = chemically synthesized
  source 1..20: mol_type = other DNA
cgtgttcgcagcaagcgcgg

SEQ ID NO: 15631 - DNA, 20 bp, synthetic construct
  misc_feature 1..20: note = chemically synthesized
  source 1..20: mol_type = other DNA
gtgttcgcagcaagcgcggc

SEQ ID NO: 15632 - DNA, 20 bp, synthetic construct
  misc_feature 1..20: note = chemically synthesized
  source 1..20: mol_type = other DNA
gttcgcagcaagcgcggcgg

SEQ ID NO: 15633 - DNA, 20 bp, synthetic construct
  misc_feature 1..20: note = chemically synthesized
  source 1..20: mol_type = other DNA
gcaagcgcggcgggagcctg

SEQ ID NO: 15634 - DNA, 20 bp, synthetic construct
  misc_feature 1..20: note = chemically synthesized
  source 1..20: mol_type = other DNA
gcgcggcgggagcctgcagc

SEQ ID NO: 15635 - DNA, 20 bp, synthetic construct
  misc_feature 1..20: note = chemically synthesized
  source 1..20: mol_type = other DNA
acgctgctcgctttgtgcct

SEQ ID NO: 15636 - DNA, 20 bp, synthetic construct
  misc_feature 1..20: note = chemically synthesized
  source 1..20: mol_type = other DNA
gctgctcgctttgtgcctca

SEQ ID NO: 15637 - DNA, 20 bp, synthetic construct
  misc_feature 1..20: note = chemically synthesized
  source 1..20: mol_type = other DNA
gcccaacttcactttctgca

SEQ ID NO: 15638 - DNA, 20 bp, synthetic construct
  misc_feature 1..20: note = chemically synthesized
  source 1..20: mol_type = other DNA
tctgcacggtccacccttgc

SEQ ID NO: 15639 - DNA, 20 bp, synthetic construct
  misc_feature 1..20: note = chemically synthesized
  source 1..20: mol_type = other DNA
ctgcacggtccacccttgcc

SEQ ID NO: 15640 - DNA, 20 bp, synthetic construct
  misc_feature 1..20: note = chemically synthesized
  source 1..20: mol_type = other DNA
tgcacggtccacccttgccg

SEQ ID NO: 15641 - DNA, 20 bp, synthetic construct
  misc_feature 1..20: note = chemically synthesized
  source 1..20: mol_type = other DNA
ccttgccggggcccctgccc

SEQ ID NO: 15642 - DNA, 20 bp, synthetic construct
  misc_feature 1..20: note = chemically synthesized
  source 1..20: mol_type = other DNA
cttgccggggcccctgcccc

SEQ ID NO: 15643 - DNA, 20 bp, synthetic construct
  misc_feature 1..20: note = chemically synthesized
  source 1..20: mol_type = other DNA
gggcccctgccccgggcctg

SEQ ID NO: 15644 - DNA, 20 bp, synthetic construct
  misc_feature 1..20: note = chemically synthesized
  source 1..20: mol_type = other DNA
tgccccgggcctgtagcccc

SEQ ID NO: 15645 - DNA, 20 bp, synthetic construct
  misc_feature 1..20: note = chemically synthesized
  source 1..20: mol_type = other DNA
tgcttttcctctctgaattt

SEQ ID NO: 15646 - DNA, 20 bp, synthetic construct
  misc_feature 1..20: note = chemically synthesized
  source 1..20: mol_type = other DNA
gtttgcttctttaccctgtt

SEQ ID NO: 15647 - DNA, 20 bp, synthetic construct
  misc_feature 1..20: note = chemically synthesized
  source 1..20: mol_type = other DNA
tttaccctgttaagacaatc

SEQ ID NO: 15648 - DNA, 20 bp, synthetic construct
  misc_feature 1..20: note = chemically synthesized
  source 1..20: mol_type = other DNA
ttaccctgttaagacaatca

SEQ ID NO: 15649 - DNA, 20 bp, synthetic construct
  misc_feature 1..20: note = chemically synthesized
  source 1..20: mol_type = other DNA
accctgttaagacaatcaag

SEQ ID NO: 15650 - DNA, 20 bp, synthetic construct
  misc_feature 1..20: note = chemically synthesized
  source 1..20: mol_type = other DNA
ctgttaagacaatcaaggag

SEQ ID NO: 15651 - DNA, 20 bp, synthetic construct
  misc_feature 1..20: note = chemically synthesized
  source 1..20: mol_type = other DNA
tgttaagacaatcaaggaga

SEQ ID NO: 15652 - DNA, 20 bp, synthetic construct
  misc_feature 1..20: note = chemically synthesized
  source 1..20: mol_type = other DNA
gacaatcaaggagaaggact

SEQ ID NO: 15653 - DNA, 20 bp, synthetic construct
  misc_feature 1..20: note = chemically synthesized
  source 1..20: mol_type = other DNA
atcaaggagaaggacttgga

SEQ ID NO: 15654 - DNA, 20 bp, synthetic construct
  misc_feature 1..20: note = chemically synthesized
  source 1..20: mol_type = other DNA
ggacttggaaagcaaacttg

SEQ ID NO: 15655 - DNA, 20 bp, synthetic construct
  misc_feature 1..20: note = chemically synthesized
  source 1..20: mol_type = other DNA
ccccctccccctccgctccc

SEQ ID NO: 15656 - DNA, 20 bp, synthetic construct
  misc_feature 1..20: note = chemically synthesized
  source 1..20: mol_type = other DNA
cctccccctccgctccccgg

SEQ ID NO: 15657 - DNA, 20 bp, synthetic construct
  misc_feature 1..20: note = chemically synthesized
  source 1..20: mol_type = other DNA
tccttaccaacatttcctat

SEQ ID NO: 15658 - DNA, 20 bp, synthetic construct
  misc_feature 1..20: note = chemically synthesized
  source 1..20: mol_type = other DNA
ccttaccaacatttcctata

SEQ ID NO: 15659 - DNA, 20 bp, synthetic construct
  misc_feature 1..20: note = chemically synthesized
  source 1..20: mol_type = other DNA
tttattcttttgcaactaca

SEQ ID NO: 15660 - DNA, 20 bp, synthetic construct
  misc_feature 1..20: note = chemically synthesized
  source 1..20: mol_type = other DNA
tattcttttgcaactacaca

SEQ ID NO: 15661 - DNA, 20 bp, synthetic construct
  misc_feature 1..20: note = chemically synthesized
  source 1..20: mol_type = other DNA
ttcttttgcaactacacaga

SEQ ID NO: 15662 - DNA, 20 bp, synthetic construct
  misc_feature 1..20: note = chemically synthesized
  source 1..20: mol_type = other DNA
tcttttgcaactacacagag

SEQ ID NO: 15663 - DNA, 20 bp, synthetic construct
  misc_feature 1..20: note = chemically synthesized
  source 1..20: mol_type = other DNA
ttgcaactacacagagagga

SEQ ID NO: 15664 - DNA, 20 bp, synthetic construct
  misc_feature 1..20: note = chemically synthesized
  source 1..20: mol_type = other DNA
gcaactacacagagaggaaa

SEQ ID NO: 15665 - DNA, 20 bp, synthetic construct
  misc_feature 1..20: note = chemically synthesized
  source 1..20: mol_type = other DNA
cacagagaggaaagagatct

SEQ ID NO: 15666 - DNA, 20 bp, synthetic construct
  misc_feature 1..20: note = chemically synthesized
  source 1..20: mol_type = other DNA
agagatctcagtctgtcact

SEQ ID NO: 15667 - DNA, 20 bp, synthetic construct
  misc_feature 1..20: note = chemically synthesized
  source 1..20: mol_type = other DNA
cagtctgtcactgagacatt

SEQ ID NO: 15668 - DNA, 20 bp, synthetic construct
  misc_feature 1..20: note = chemically synthesized
  source 1..20: mol_type = other DNA
actgagacattgagacgttc

SEQ ID NO: 15669 - DNA, 20 bp, synthetic construct
  misc_feature 1..20: note = chemically synthesized
  source 1..20: mol_type = other DNA
ctgagacattgagacgttcc

SEQ ID NO: 15670 - DNA, 20 bp, synthetic construct
  misc_feature 1..20: note = chemically synthesized
  source 1..20: mol_type = other DNA
gctgtcttgctgtttgaacg

SEQ ID NO: 15671 - DNA, 20 bp, synthetic construct
  misc_feature 1..20: note = chemically synthesized
  source 1..20: mol_type = other DNA
gtcttgctgtttgaacgtag

SEQ ID NO: 15672 - DNA, 20 bp, synthetic construct
  misc_feature 1..20: note = chemically synthesized
  source 1..20: mol_type = other DNA
tctatttcttcctcccctcg

SEQ ID NO: 15673 - DNA, 20 bp, synthetic construct
  misc_feature 1..20: note = chemically synthesized
  source 1..20: mol_type = other DNA
tatttcttcctcccctcgta

SEQ ID NO: 15674 - DNA, 20 bp, synthetic construct
  misc_feature 1..20: note = chemically synthesized
  source 1..20: mol_type = other DNA
tttcttcctcccctcgtaga

SEQ ID NO: 15675 - DNA, 20 bp, synthetic construct
  misc_feature 1..20: note = chemically synthesized
  source 1..20: mol_type = other DNA
cccctcgtagagagaattcg

SEQ ID NO: 15676 - DNA, 20 bp, synthetic construct
  misc_feature 1..20: note = chemically synthesized
  source 1..20: mol_type = other DNA
cactcccttccacttcaatc

SEQ ID NO: 15677 - DNA, 20 bp, synthetic construct
  misc_feature 1..20: note = chemically synthesized
  source 1..20: mol_type = other DNA
actcccttccacttcaatcg

SEQ ID NO: 15678 - DNA, 20 bp, synthetic construct
  misc_feature 1..20: note = chemically synthesized
  source 1..20: mol_type = other DNA
atcgaggactccctgctttg

SEQ ID NO: 15679 - DNA, 20 bp, synthetic construct
  misc_feature 1..20: note = chemically synthesized
  source 1..20: mol_type = other DNA
aggactccctgctttgtagc

SEQ ID NO: 15680 - DNA, 20 bp, synthetic construct
  misc_feature 1..20: note = chemically synthesized
  source 1..20: mol_type = other DNA
gactccctgctttgtagccg

SEQ ID NO: 15681 - DNA, 20 bp, synthetic construct
  misc_feature 1..20: note = chemically synthesized
  source 1..20: mol_type = other DNA
cctgctttgtagccggagtt

SEQ ID NO: 15682 - DNA, 20 bp, synthetic construct
  misc_feature 1..20: note = chemically synthesized
  source 1..20: mol_type = other DNA
ctgctttgtagccggagttt

SEQ ID NO: 15683 - DNA, 20 bp, synthetic construct
  misc_feature 1..20: note = chemically synthesized
  source 1..20: mol_type = other DNA
tttgtagccggagtttaggc

SEQ ID NO: 15684 - DNA, 20 bp, synthetic construct
  misc_feature 1..20: note = chemically synthesized
  source 1..20: mol_type = other DNA
tgtagccggagtttaggccg

SEQ ID NO: 15685 - DNA, 20 bp, synthetic construct
  misc_feature 1..20: note = chemically synthesized
  source 1..20: mol_type = other DNA
ccggagtttaggccggagct

SEQ ID NO: 15686 - DNA, 20 bp, synthetic construct
  misc_feature 1..20: note = chemically synthesized
  source 1..20: mol_type = other DNA
aggccggagcttagaaatgt

SEQ ID NO: 15687 - DNA, 20 bp, synthetic construct
  misc_feature 1..20: note = chemically synthesized
  source 1..20: mol_type = other DNA
cttagaaatgttggtattgt

SEQ ID NO: 15688 - DNA, 20 bp, synthetic construct
  misc_feature 1..20: note = chemically synthesized
  source 1..20: mol_type = other DNA
ttagaaatgttggtattgtt

SEQ ID NO: 15689 - DNA, 20 bp, synthetic construct
  misc_feature 1..20: note = chemically synthesized
  source 1..20: mol_type = other DNA
tagaaatgttggtattgttg

SEQ ID NO: 15690 - DNA, 20 bp, synthetic construct
  misc_feature 1..20: note = chemically synthesized
  source 1..20: mol_type = other DNA
atgttggtattgttggggcg

SEQ ID NO: 15691 - DNA, 20 bp, synthetic construct
  misc_feature 1..20: note = chemically synthesized
  source 1..20: mol_type = other DNA
tgttggtattgttggggcga

SEQ ID NO: 15692 - DNA, 20 bp, synthetic construct
  misc_feature 1..20: note = chemically synthesized
  source 1..20: mol_type = other DNA
ttggtattgttggggcgaag

SEQ ID NO: 15693 - DNA, 20 bp, synthetic construct
  misc_feature 1..20: note = chemically synthesized
  source 1..20: mol_type = other DNA
tggtattgttggggcgaagg

SEQ ID NO: 15694 - DNA, 20 bp, synthetic construct
  misc_feature 1..20: note = chemically synthesized
  source 1..20: mol_type = other DNA
attgttggggcgaaggagga

SEQ ID NO: 15695 - DNA, 20 bp, synthetic construct
  misc_feature 1..20: note = chemically synthesized
  source 1..20: mol_type = other DNA
tgttggggcgaaggaggatg

SEQ ID NO: 15696 - DNA, 20 bp, synthetic construct
  misc_feature 1..20: note = chemically synthesized
  source 1..20: mol_type = other DNA
aaggaggatggagttgaatt

SEQ ID NO: 15697 - DNA, 20 bp, synthetic construct
  misc_feature 1..20: note = chemically synthesized
  source 1..20: mol_type = other DNA
aggaggatggagttgaattg

SEQ ID NO: 15698 - DNA, 20 bp, synthetic construct
  misc_feature 1..20: note = chemically synthesized
  source 1..20: mol_type = other DNA
ggaggatggagttgaattga

SEQ ID NO: 15699 - DNA, 20 bp, synthetic construct
  misc_feature 1..20: note = chemically synthesized
  source 1..20: mol_type = other DNA
aggatggagttgaattgagg

SEQ ID NO: 15700 - DNA, 20 bp, synthetic construct
  misc_feature 1..20: note = chemically synthesized
  source 1..20: mol_type = other DNA
ggatggagttgaattgaggg

SEQ ID NO: 15701 - DNA, 20 bp, synthetic construct
  misc_feature 1..20: note = chemically synthesized
  source 1..20: mol_type = other DNA
gatggagttgaattgaggga

SEQ ID NO: 15702 - DNA, 20 bp, synthetic construct
  misc_feature 1..20: note = chemically synthesized
  source 1..20: mol_type = other DNA
atggagttgaattgagggag

SEQ ID NO: 15703 - DNA, 20 bp, synthetic construct
  misc_feature 1..20: note = chemically synthesized
  source 1..20: mol_type = other DNA
tggagttgaattgagggagg

SEQ ID NO: 15704 - DNA, 20 bp, synthetic construct
  misc_feature 1..20: note = chemically synthesized
  source 1..20: mol_type = other DNA
gaattgagggagggggtaaa

SEQ ID NO: 15705 - DNA, 20 bp, synthetic construct
  misc_feature 1..20: note = chemically synthesized
  source 1..20: mol_type = other DNA
gagggagggggtaaatggct

SEQ ID NO: 15706 - DNA, 20 bp, synthetic construct
  misc_feature 1..20: note = chemically synthesized
  source 1..20: mol_type = other DNA
agggagggggtaaatggctg

SEQ ID NO: 15707 - DNA, 20 bp, synthetic construct
  misc_feature 1..20: note = chemically synthesized
  source 1..20: mol_type = other DNA
gggagggggtaaatggctga

SEQ ID NO: 15708 - DNA, 20 bp, synthetic construct
  misc_feature 1..20: note = chemically synthesized
  source 1..20: mol_type = other DNA
gggggtaaatggctgagggt

SEQ ID NO: 15709 - DNA, 20 bp, synthetic construct
  misc_feature 1..20: note = chemically synthesized
  source 1..20: mol_type = other DNA
ggggtaaatggctgagggtt

SEQ ID NO: 15710 - DNA, 20 bp, synthetic construct
  misc_feature 1..20: note = chemically synthesized
  source 1..20: mol_type = other DNA
gtaaatggctgagggttagg

SEQ ID NO: 15711 - DNA, 20 bp, synthetic construct
  misc_feature 1..20: note = chemically synthesized
  source 1..20: mol_type = other DNA
taaatggctgagggttagga

SEQ ID NO: 15712 - DNA, 20 bp, synthetic construct
  misc_feature 1..20: note = chemically synthesized
  source 1..20: mol_type = other DNA
ctgagggttaggaaggtttt

SEQ ID NO: 15713 - DNA, 20 bp, synthetic construct
  misc_feature 1..20: note = chemically synthesized
  source 1..20: mol_type = other DNA
tgagggttaggaaggttttt

SEQ ID NO: 15714 - DNA, 20 bp, synthetic construct
  misc_feature 1..20: note = chemically synthesized
  source 1..20: mol_type = other DNA
gagggttaggaaggttttta

SEQ ID NO: 15715 - DNA, 20 bp, synthetic construct
  misc_feature 1..20: note = chemically synthesized
  source 1..20: mol_type = other DNA
gttaggaaggtttttaggga

SEQ ID NO: 15716 - DNA, 20 bp, synthetic construct
  misc_feature 1..20: note = chemically synthesized
  source 1..20: mol_type = other DNA
ttaggaaggtttttagggaa

SEQ ID NO: 15717 - DNA, 20 bp, synthetic construct
  misc_feature 1..20: note = chemically synthesized
  source 1..20: mol_type = other DNA
taggaaggtttttagggaaa

SEQ ID NO: 15718 - DNA, 20 bp, synthetic construct
  misc_feature 1..20: note = chemically synthesized
  source 1..20: mol_type = other DNA
aggaaggtttttagggaaag

SEQ ID NO: 15719 - DNA, 20 bp, synthetic construct
  misc_feature 1..20: note = chemically synthesized
  source 1..20: mol_type = other DNA
ggggaatttgcattaaaatg

SEQ ID NO: 15720 - DNA, 20 bp, synthetic construct
  misc_feature 1..20: note = chemically synthesized
  source 1..20: mol_type = other DNA
ggaatttgcattaaaatgca

SEQ ID NO: 15721 - DNA, 20 bp, synthetic construct
  misc_feature 1..20: note = chemically synthesized
  source 1..20: mol_type = other DNA
ttaaaatgcagagaaattat

SEQ ID NO: 15722 - DNA, 20 bp, synthetic construct
  misc_feature 1..20: note = chemically synthesized
  source 1..20: mol_type = other DNA
cagagaaattatcagatgcc

SEQ ID NO: 15723 - DNA, 20 bp, synthetic construct
  misc_feature 1..20: note = chemically synthesized
  source 1..20: mol_type = other DNA
gaaattatcagatgcccaga

SEQ ID NO: 15724 - DNA, 20 bp, synthetic construct
  misc_feature 1..20: note = chemically synthesized
  source 1..20: mol_type = other DNA
aaattatcagatgcccagaa

SEQ ID NO: 15725 - DNA, 20 bp, synthetic construct
  misc_feature 1..20: note = chemically synthesized
  source 1..20: mol_type = other DNA
aggaaatgttgattgccact

SEQ ID NO: 15726 - DNA, 20 bp, synthetic construct
  misc_feature 1..20: note = chemically synthesized
  source 1..20: mol_type = other DNA
atgttgattgccactgagaa

SEQ ID NO: 15727 - DNA, 20 bp, synthetic construct
  misc_feature 1..20: note = chemically synthesized
  source 1..20: mol_type = other DNA
gaaaagatgtcaatgcaaat

SEQ ID NO: 15728 - DNA, 20 bp, synthetic construct
  misc_feature 1..20: note = chemically synthesized
  source 1..20: mol_type = other DNA
aagatgtcaatgcaaatcag

SEQ ID NO: 15729 - DNA, 20 bp, synthetic construct
  misc_feature 1..20: note = chemically synthesized
  source 1..20: mol_type = other DNA
aaatcagtagactacaccat

SEQ ID NO: 15730 - DNA, 20 bp, synthetic construct
  misc_feature 1..20: note = chemically synthesized
  source 1..20: mol_type = other DNA
tctgatttttaataatatac

SEQ ID NO: 15731 - DNA, 20 bp, synthetic construct
  misc_feature 1..20: note = chemically synthesized
  source 1..20: mol_type = other DNA
gcaatgataaaaacacgttt

SEQ ID NO: 15732 - DNA, 20 bp, synthetic construct
  misc_feature 1..20: note = chemically synthesized
  source 1..20: mol_type = other DNA
ggtatttctctgaacaccac

SEQ ID NO: 15733 - DNA, 20 bp, synthetic construct
  misc_feature 1..20: note = chemically synthesized
  source 1..20: mol_type = other DNA
ccactagccaaatgttttgc

SEQ ID NO: 15734 - DNA, 20 bp, synthetic construct
  misc_feature 1..20: note = chemically synthesized
  source 1..20: mol_type = other DNA
cactagccaaatgttttgca

SEQ ID NO: 15735 - DNA, 20 bp, synthetic construct
  misc_feature 1..20: note = chemically synthesized
  source 1..20: mol_type = other DNA
ctagccaaatgttttgcaag

SEQ ID NO: 15736 - DNA, 20 bp, synthetic construct
  misc_feature 1..20: note = chemically synthesized
  source 1..20: mol_type = other DNA
gttaaacgtatttcatacat

SEQ ID NO: 15737 - DNA, 20 bp, synthetic construct
  misc_feature 1..20: note = chemically synthesized
  source 1..20: mol_type = other DNA
agaatataattcttgttaat

SEQ ID NO: 15738 - DNA, 20 bp, synthetic construct
  misc_feature 1..20: note = chemically synthesized
  source 1..20: mol_type = other DNA
aattagcaataatttacgtt

SEQ ID NO: 15739 - DNA, 20 bp, synthetic construct
  misc_feature 1..20: note = chemically synthesized
  source 1..20: mol_type = other DNA
ttagcaataatttacgttaa

SEQ ID NO: 15740 - DNA, 20 bp, synthetic construct
  misc_feature 1..20: note = chemically synthesized
  source 1..20: mol_type = other DNA
aataatttacgttaagagca

SEQ ID NO: 15741 - DNA, 20 bp, synthetic construct
  misc_feature 1..20: note = chemically synthesized
  source 1..20: mol_type = other DNA
ttaagagcatagaaaatgtt

SEQ ID NO: 15742 - DNA, 20 bp, synthetic construct
  misc_feature 1..20: note = chemically synthesized
  source 1..20: mol_type = other DNA
taagagcatagaaaatgttg

SEQ ID NO: 15743 - DNA, 20 bp, synthetic construct
  misc_feature 1..20: note = chemically synthesized
  source 1..20: mol_type = other DNA
catagaaaatgttgaggtta

SEQ ID NO: 15744 - DNA, 20 bp, synthetic construct
  misc_feature 1..20: note = chemically synthesized
  source 1..20: mol_type = other DNA
atagaaaatgttgaggttac

SEQ ID NO: 15745 - DNA, 20 bp, synthetic construct
  misc_feature 1..20: note = chemically synthesized
  source 1..20: mol_type = other DNA
ttgatcatcttgttattttc

SEQ ID NO: 15746 - DNA, 20 bp, synthetic construct
  misc_feature 1..20: note = chemically synthesized
  source 1..20: mol_type = other DNA
ttgcctcctataaaattaat

SEQ ID NO: 15747 - DNA, 20 bp, synthetic construct
  misc_feature 1..20: note = chemically synthesized
  source 1..20: mol_type = other DNA
tgcctcctataaaattaatt

SEQ ID NO: 15748 - DNA, 20 bp, synthetic construct
  misc_feature 1..20: note = chemically synthesized
  source 1..20: mol_type = other DNA
aaaattaattaggtgaaatg

SEQ ID NO: 15749 - DNA, 20 bp, synthetic construct
  misc_feature 1..20: note = chemically synthesized
  source 1..20: mol_type = other DNA
aattaattaggtgaaatgtg

SEQ ID NO: 15750 - DNA, 20 bp, synthetic construct
  misc_feature 1..20: note = chemically synthesized
  source 1..20: mol_type = other DNA
attaattaggtgaaatgtgg

SEQ ID NO: 15751 - DNA, 20 bp, synthetic construct
  misc_feature 1..20: note = chemically synthesized
  source 1..20: mol_type = other DNA
gtgaaatgtggaggtgtaat

SEQ ID NO: 15752 - DNA, 20 bp, synthetic construct
  misc_feature 1..20: note = chemically synthesized
  source 1..20: mol_type = other DNA
tgaattaccacttcatttcc

SEQ ID NO: 15753 - DNA, 20 bp, synthetic construct
  misc_feature 1..20: note = chemically synthesized
  source 1..20: mol_type = other DNA
tcccggttttgattgtaaat

SEQ ID NO: 15754 - DNA, 20 bp, synthetic construct
  misc_feature 1..20: note = chemically synthesized
  source 1..20: mol_type = other DNA
gttttgattgtaaatcagtt

SEQ ID NO: 15755 - DNA, 20 bp, synthetic construct
  misc_feature 1..20: note = chemically synthesized
  source 1..20: mol_type = other DNA
atcagttcagtcactacatt

SEQ ID NO: 15756 - DNA, 20 bp, synthetic construct
  misc_feature 1..20: note = chemically synthesized
  source 1..20: mol_type = other DNA
agttcagtcactacatttag

SEQ ID NO: 15757 - DNA, 20 bp, synthetic construct
  misc_feature 1..20: note = chemically synthesized
  source 1..20: mol_type = other DNA
acatttagaagactttaacc

SEQ ID NO: 15758 - DNA, 20 bp, synthetic construct
  misc_feature 1..20: note = chemically synthesized
  source 1..20: mol_type = other DNA
acctttaactatttgatacc

SEQ ID NO: 15759 - DNA, 20 bp, synthetic construct
  misc_feature 1..20: note = chemically synthesized
  source 1..20: mol_type = other DNA
cctttaactatttgatacct

SEQ ID NO: 15760 - DNA, 20 bp, synthetic construct
  misc_feature 1..20: note = chemically synthesized
  source 1..20: mol_type = other DNA
tttaactatttgatacctag

SEQ ID NO: 15761 - DNA, 20 bp, synthetic construct
  misc_feature 1..20: note = chemically synthesized
  source 1..20: mol_type = other DNA
ctaaataatattcccacttt

SEQ ID NO: 15762 - DNA, 20 bp, synthetic construct
  misc_feature 1..20: note = chemically synthesized
  source 1..20: mol_type = other DNA
tcccacttttagaaatgtgt

SEQ ID NO: 15763 - DNA, 20 bp, synthetic construct
  misc_feature 1..20: note = chemically synthesized
  source 1..20: mol_type = other DNA
tttagaaatgtgtcagacct

SEQ ID NO: 15764 - DNA, 20 bp, synthetic construct
  misc_feature 1..20: note = chemically synthesized
  source 1..20: mol_type = other DNA
ttagaaatgtgtcagacctt

SEQ ID NO: 15765 - DNA, 20 bp, synthetic construct
  misc_feature 1..20: note = chemically synthesized
  source 1..20: mol_type = other DNA
gggaacaaaaaaaaaaaaaa

SEQ ID NO: 15766 - DNA, 20 bp, synthetic construct
  misc_feature 1..20: note = chemically synthesized
  source 1..20: mol_type = other DNA
aaaaaaaaaaagaatcttaa

SEQ ID NO: 15767 - DNA, 20 bp, synthetic construct
  misc_feature 1..20: note = chemically synthesized
  source 1..20: mol_type = other DNA
aaaaaaaagaatcttaacgg

SEQ ID NO: 15768 - DNA, 20 bp, synthetic construct
  misc_feature 1..20: note = chemically synthesized
  source 1..20: mol_type = other DNA
aaaaaatttttttttttgca

SEQ ID NO: 15769 - DNA, 20 bp, synthetic construct
  misc_feature 1..20: note = chemically synthesized
  source 1..20: mol_type = other DNA
aaaaatttttttttttgcaa

SEQ ID NO: 15770 - DNA, 20 bp, synthetic construct
  misc_feature 1..20: note = chemically synthesized
  source 1..20: mol_type = other DNA
tttgcaaaggttctatgtac

SEQ ID NO: 15771 - DNA, 20 bp, synthetic construct
  misc_feature 1..20: note = chemically synthesized
  source 1..20: mol_type = other DNA
caaaggttctatgtactagt

SEQ ID NO: 15772 - DNA, 20 bp, synthetic construct
  misc_feature 1..20: note = chemically synthesized
  source 1..20: mol_type = other DNA
gtttgataaaatattttcct

SEQ ID NO: 15773 - DNA, 20 bp, synthetic construct
  misc_feature 1..20: note = chemically synthesized
  source 1..20: mol_type = other DNA
tattttcctaagtcttcctt

SEQ ID NO: 15774 - DNA, 20 bp, synthetic construct
  misc_feature 1..20: note = chemically synthesized
  source 1..20: mol_type = other DNA
ttccttcagtctgtaaacct

SEQ ID NO: 15775 - DNA, 20 bp, synthetic construct
  misc_feature 1..20: note = chemically synthesized
  source 1..20: mol_type = other DNA
tctgtaaacctcagaacttg

SEQ ID NO: 15776 - DNA, 20 bp, synthetic construct
  misc_feature 1..20: note = chemically synthesized
  source 1..20: mol_type = other DNA
gtagctaatgctaaacaaaa

SEQ ID NO: 15777 - DNA, 20 bp, synthetic construct
  misc_feature 1..20: note = chemically synthesized
  source 1..20: mol_type = other DNA
tgtacttaaaatccttaatt

SEQ ID NO: 15778 - DNA, 20 bp, synthetic construct
  misc_feature 1..20: note = chemically synthesized
  source 1..20: mol_type = other DNA
aaaatccttaattcagacaa

SEQ ID NO: 15779 - DNA, 20 bp, synthetic construct
  misc_feature 1..20: note = chemically synthesized
  source 1..20: mol_type = other DNA
aaatccttaattcagacaac

SEQ ID NO: 15780 - DNA, 20 bp, synthetic construct
  misc_feature 1..20: note = chemically synthesized
  source 1..20: mol_type = other DNA
tcagacaacaggaatatttt

SEQ ID NO: 15781 - DNA, 20 bp, synthetic construct
  misc_feature 1..20: note = chemically synthesized
  source 1..20: mol_type = other DNA
aacaggaatattttgagaat

SEQ ID NO: 15782 - DNA, 20 bp, synthetic construct
  misc_feature 1..20: note = chemically synthesized
  source 1..20: mol_type = other DNA
tgagttccctattcctcact

SEQ ID NO: 15783 - DNA, 20 bp, synthetic construct
  misc_feature 1..20: note = chemically synthesized
  source 1..20: mol_type = other DNA
tattcctcacttggtcaaaa

SEQ ID NO: 15784 - DNA, 20 bp, synthetic construct
  misc_feature 1..20: note = chemically synthesized
  source 1..20: mol_type = other DNA
tcctcacttggtcaaaatgg

SEQ ID NO: 15785 - DNA, 20 bp, synthetic construct
  misc_feature 1..20: note = chemically synthesized
  source 1..20: mol_type = other DNA
gtcaaaatggaagcaaatgt

SEQ ID NO: 15786 - DNA, 20 bp, synthetic construct
  misc_feature 1..20: note = chemically synthesized
  source 1..20: mol_type = other DNA
caaaatggaagcaaatgtaa

SEQ ID NO: 15787 - DNA, 20 bp, synthetic construct
  misc_feature 1..20: note = chemically synthesized
  source 1..20: mol_type = other DNA
aatggaagcaaatgtaagag

SEQ ID NO: 15788 - DNA, 20 bp, synthetic construct
  misc_feature 1..20: note = chemically synthesized
  source 1..20: mol_type = other DNA
tgtaagagaagaatgacatt

SEQ ID NO: 15789 - DNA, 20 bp, synthetic construct
  misc_feature 1..20: note = chemically synthesized
  source 1..20: mol_type = other DNA
gtaagagaagaatgacatta

SEQ ID NO: 15790 - DNA, 20 bp, synthetic construct
  misc_feature 1..20: note = chemically synthesized
  source 1..20: mol_type = other DNA
aatgacattaaggcacaatg

SEQ ID NO: 15791 - DNA, 20 bp, synthetic construct
  misc_feature 1..20: note = chemically synthesized
  source 1..20: mol_type = other DNA
tgacattaaggcacaatgca

SEQ ID NO: 15792 - DNA, 20 bp, synthetic construct
  misc_feature 1..20: note = chemically synthesized
  source 1..20: mol_type = other DNA
gacattaaggcacaatgcag

SEQ ID NO: 15793 - DNA, 20 bp, synthetic construct
  misc_feature 1..20: note = chemically synthesized
  source 1..20: mol_type = other DNA
tttgtcttcttttatttgaa

SEQ ID NO: 15794 - DNA, 20 bp, synthetic construct
  misc_feature 1..20: note = chemically synthesized
  source 1..20: mol_type = other DNA
tgtattctgtatttatcttt

SEQ ID NO: 15795 - DNA, 20 bp, synthetic construct
  misc_feature 1..20: note = chemically synthesized
  source 1..20: mol_type = other DNA
ttctgtatttatcttttggc

SEQ ID NO: 15796 - DNA, 20 bp, synthetic construct
  misc_feature 1..20: note = chemically synthesized
  source 1..20: mol_type = other DNA
ttatcttttggccagtatgt

SEQ ID NO: 15797 - DNA, 20 bp, synthetic construct
  misc_feature 1..20: note = chemically synthesized
  source 1..20: mol_type = other DNA
tatcttttggccagtatgtt

SEQ ID NO: 15798 - DNA, 20 bp, synthetic construct
  misc_feature 1..20: note = chemically synthesized
  source 1..20: mol_type = other DNA
tttggccagtatgttgggca

SEQ ID NO: 15799 - DNA, 20 bp, synthetic construct
  misc_feature 1..20: note = chemically synthesized
  source 1..20: mol_type = other DNA
tatgttgggcaaagaaacat

SEQ ID NO: 15800 - DNA, 20 bp, synthetic construct
  misc_feature 1..20: note = chemically synthesized
  source 1..20: mol_type = other DNA
gcttactttactgtctttat

SEQ ID NO: 15801 - DNA, 20 bp, synthetic construct
  misc_feature 1..20: note = chemically synthesized
  source 1..20: mol_type = other DNA
tactttactgtctttattag

SEQ ID NO: 15802 - DNA, 20 bp, synthetic construct
  misc_feature 1..20: note = chemically synthesized
  source 1..20: mol_type = other DNA
actttactgtctttattagt

SEQ ID NO: 15803 - DNA, 20 bp, synthetic construct
  misc_feature 1..20: note = chemically synthesized
  source 1..20: mol_type = other DNA
atataaccttcatattcctg

SEQ ID NO: 15804 - DNA, 20 bp, synthetic construct
  misc_feature 1..20: note = chemically synthesized
  source 1..20: mol_type = other DNA
gtggtgaccttatgttaaat

SEQ ID NO: 15805 - DNA, 20 bp, synthetic construct
  misc_feature 1..20: note = chemically synthesized
  source 1..20: mol_type = other DNA
tggtgaccttatgttaaatt

SEQ ID NO: 15806 - DNA, 20 bp, synthetic construct
  misc_feature 1..20: note = chemically synthesized
  source 1..20: mol_type = other DNA
gtgaccttatgttaaattag

SEQ ID NO: 15807 - DNA, 20 bp, synthetic construct
  misc_feature 1..20: note = chemically synthesized
  source 1..20: mol_type = other DNA
tgaccttatgttaaattagg

SEQ ID NO: 15808 - DNA, 20 bp, synthetic construct
  misc_feature 1..20: note = chemically synthesized
  source 1..20: mol_type = other DNA
accttatgttaaattaggag

SEQ ID NO: 15809 - DNA, 20 bp, synthetic construct
  misc_feature 1..20: note = chemically synthesized
  source 1..20: mol_type = other DNA
tgttaaattaggaggagtac

SEQ ID NO: 15810 - DNA, 20 bp, synthetic construct
  misc_feature 1..20: note = chemically synthesized
  source 1..20: mol_type = other DNA
ttaaattaggaggagtacca

SEQ ID NO: 15811 - DNA, 20 bp, synthetic construct
  misc_feature 1..20: note = chemically synthesized
  source 1..20: mol_type = other DNA
taaattaggaggagtaccag

SEQ ID NO: 15812 - DNA, 20 bp, synthetic construct
  misc_feature 1..20: note = chemically synthesized
  source 1..20: mol_type = other DNA
ttaggaggagtaccagaggc

SEQ ID NO: 15813 - DNA, 20 bp, synthetic construct
  misc_feature 1..20: note = chemically synthesized
  source 1..20: mol_type = other DNA
taccagaggctagaaattat

SEQ ID NO: 15814 - DNA, 20 bp, synthetic construct
  misc_feature 1..20: note = chemically synthesized
  source 1..20: mol_type = other DNA
aattatgagatgtcctactt

SEQ ID NO: 15815 - DNA, 20 bp, synthetic construct
  misc_feature 1..20: note = chemically synthesized
  source 1..20: mol_type = other DNA
tgagatgtcctacttgagca

SEQ ID NO: 15816 - DNA, 20 bp, synthetic construct
  misc_feature 1..20: note = chemically synthesized
  source 1..20: mol_type = other DNA
gagatgtcctacttgagcac

SEQ ID NO: 15817 - DNA, 20 bp, synthetic construct
  misc_feature 1..20: note = chemically synthesized
  source 1..20: mol_type = other DNA
gtcctacttgagcacaggtg

SEQ ID NO: 15818 - DNA, 20 bp, synthetic construct
  misc_feature 1..20: note = chemically synthesized
  source 1..20: mol_type = other DNA
tacttgagcacaggtgcagc

SEQ ID NO: 15819 - DNA, 20 bp, synthetic construct
  misc_feature 1..20: note = chemically synthesized
  source 1..20: mol_type = other DNA
acttgagcacaggtgcagct

SEQ ID NO: 15820 - DNA, 20 bp, synthetic construct
  misc_feature 1..20: note = chemically synthesized
  source 1..20: mol_type = other DNA
tgagcacaggtgcagctagg

SEQ ID NO: 15821 - DNA, 20 bp, synthetic construct
  misc_feature 1..20: note = chemically synthesized
  source 1..20: mol_type = other DNA
gagcacaggtgcagctaggc

SEQ ID NO: 15822 - DNA, 20 bp, synthetic construct
  misc_feature 1..20: note = chemically synthesized
  source 1..20: mol_type = other DNA
agcacaggtgcagctaggca

SEQ ID NO: 15823 - DNA, 20 bp, synthetic construct
  misc_feature 1..20: note = chemically synthesized
  source 1..20: mol_type = other DNA
tctctcaatattatttcacc

SEQ ID NO: 15824 - DNA, 20 bp, synthetic construct
  misc_feature 1..20: note = chemically synthesized
  source 1..20: mol_type = other DNA
attatttcacctagcacatc

SEQ ID NO: 15825 - DNA, 20 bp, synthetic construct
  misc_feature 1..20: note = chemically synthesized
  source 1..20: mol_type = other DNA
ttatttcacctagcacatct

SEQ ID NO: 15826 - DNA, 20 bp, synthetic construct
  misc_feature 1..20: note = chemically synthesized
  source 1..20: mol_type = other DNA
atttcacctagcacatctgg

SEQ ID NO: 15827 - DNA, 20 bp, synthetic construct
  misc_feature 1..20: note = chemically synthesized
  source 1..20: mol_type = other DNA
agcacatctgggagttactc

SEQ ID NO: 15828 - DNA, 20 bp, synthetic construct
  misc_feature 1..20: note = chemically synthesized
  source 1..20: mol_type = other DNA
agatcttccccctcaatatt

SEQ ID NO: 15829 - DNA, 20 bp, synthetic construct
  misc_feature 1..20: note = chemically synthesized
  source 1..20: mol_type = other DNA
ttccccctcaatattcagcc

SEQ ID NO: 15830 - DNA, 20 bp, synthetic construct
  misc_feature 1..20: note = chemically synthesized
  source 1..20: mol_type = other DNA
tccccctcaatattcagcct

SEQ ID NO: 15831 - DNA, 20 bp, synthetic construct
  misc_feature 1..20: note = chemically synthesized
  source 1..20: mol_type = other DNA
ccctcaatattcagcctggg

SEQ ID NO: 15832 - DNA, 20 bp, synthetic construct
  misc_feature 1..20: note = chemically synthesized
  source 1..20: mol_type = other DNA
cctcaatattcagcctgggt

SEQ ID NO: 15833 - DNA, 20 bp, synthetic construct
  misc_feature 1..20: note = chemically synthesized
  source 1..20: mol_type = other DNA
ctcaatattcagcctgggta

SEQ ID NO: 15834 - DNA, 20 bp, synthetic construct
  misc_feature 1..20: note = chemically synthesized
  source 1..20: mol_type = other DNA
ggttgaaataaatttaacct

SEQ ID NO: 15835 - DNA, 20 bp, synthetic construct
  misc_feature 1..20: note = chemically synthesized
  source 1..20: mol_type = other DNA
taaatttaacctgagttcac

SEQ ID NO: 15836 - DNA, 20 bp, synthetic construct
  misc_feature 1..20: note = chemically synthesized
  source 1..20: mol_type = other DNA
atctattttttgattctctg

SEQ ID NO: 15837 - DNA, 20 bp, synthetic construct
  misc_feature 1..20: note = chemically synthesized
  source 1..20: mol_type = other DNA
ttttgattctctgtggcttt

SEQ ID NO: 15838 - DNA, 20 bp, synthetic construct
  misc_feature 1..20: note = chemically synthesized
  source 1..20: mol_type = other DNA
aagttcattaaatgtaaaat

SEQ ID NO: 15839 - DNA, 20 bp, synthetic construct
  misc_feature 1..20: note = chemically synthesized
  source 1..20: mol_type = other DNA
ttcattaaatgtaaaattgg

SEQ ID NO: 15840 - DNA, 20 bp, synthetic construct
  misc_feature 1..20: note = chemically synthesized
  source 1..20: mol_type = other DNA
gtaaaattggcagcttgcta

SEQ ID NO: 15841 - DNA, 20 bp, synthetic construct
  misc_feature 1..20: note = chemically synthesized
  source 1..20: mol_type = other DNA
aaattggcagcttgctaaag

SEQ ID NO: 15842 - DNA, 20 bp, synthetic construct
  misc_feature 1..20: note = chemically synthesized
  source 1..20: mol_type = other DNA
aattggcagcttgctaaaga

SEQ ID NO: 15843 - DNA, 20 bp, synthetic construct
  misc_feature 1..20: note = chemically synthesized
  source 1..20: mol_type = other DNA
ggcagcttgctaaagaaggt

SEQ ID NO: 15844 - DNA, 20 bp, synthetic construct
  misc_feature 1..20: note = chemically synthesized
  source 1..20: mol_type = other DNA
gtcagactgattaactgttt

SEQ ID NO: 15845 - DNA, 20 bp, synthetic construct
  misc_feature 1..20: note = chemically synthesized
  source 1..20: mol_type = other DNA
gacttgtacattttctgctt

SEQ ID NO: 15846 - DNA, 20 bp, synthetic construct
  misc_feature 1..20: note = chemically synthesized
  source 1..20: mol_type = other DNA
tctgcttcagttttattaac

SEQ ID NO: 15847 - DNA, 20 bp, synthetic construct
  misc_feature 1..20: note = chemically synthesized
  source 1..20: mol_type = other DNA
gcttcagttttattaactgg

SEQ ID NO: 15848 - DNA, 20 bp, synthetic construct
  misc_feature 1..20: note = chemically synthesized
  source 1..20: mol_type = other DNA
tttattaactggcagcatcc

SEQ ID NO: 15849 - DNA, 20 bp, synthetic construct
  misc_feature 1..20: note = chemically synthesized
  source 1..20: mol_type = other DNA
gattttttttttttttttga

SEQ ID NO: 15850 - DNA, 20 bp, synthetic construct
  misc_feature 1..20: note = chemically synthesized
  source 1..20: mol_type = other DNA
ttttttttttttttttgata

SEQ ID NO: 15851 - DNA, 20 bp, synthetic construct
  misc_feature 1..20: note = chemically synthesized
  source 1..20: mol_type = other DNA
ttttttttttttgatagagc

SEQ ID NO: 15852 - DNA, 20 bp, synthetic construct
  misc_feature 1..20: note = chemically synthesized
  source 1..20: mol_type = other DNA
ttttttgatagagcaagcat

SEQ ID NO: 15853 - DNA, 20 bp, synthetic construct
  misc_feature 1..20: note = chemically synthesized
  source 1..20: mol_type = other DNA
gagcaagcataagatttcac

SEQ ID NO: 15854 - DNA, 20 bp, synthetic construct
  misc_feature 1..20: note = chemically synthesized
  source 1..20: mol_type = other DNA
caagcataagatttcacaag

SEQ ID NO: 15855 - DNA, 20 bp, synthetic construct
  misc_feature 1..20: note = chemically synthesized
  source 1..20: mol_type = other DNA
agcataagatttcacaagca

SEQ ID NO: 15856 - DNA, 20 bp, synthetic construct
  misc_feature 1..20: note = chemically synthesized
  source 1..20: mol_type = other DNA
accaactctcttttcccctt

SEQ ID NO: 15857 - DNA, 20 bp, synthetic construct
  misc_feature 1..20: note = chemically synthesized
  source 1..20: mol_type = other DNA
aactctcttttcccctttgg

SEQ ID NO: 15858 - DNA, 20 bp, synthetic construct
  misc_feature 1..20: note = chemically synthesized
  source 1..20: mol_type = other DNA
tttggaagcttaaaaaatga

SEQ ID NO: 15859 - DNA, 20 bp, synthetic construct
  misc_feature 1..20: note = chemically synthesized
  source 1..20: mol_type = other DNA
ggaagcttaaaaaatgatag

SEQ ID NO: 15860 - DNA, 20 bp, synthetic construct
  misc_feature 1..20: note = chemically synthesized
  source 1..20: mol_type = other DNA
gcttaaaaaatgatagaagc

SEQ ID NO: 15861 - DNA, 20 bp, synthetic construct
  misc_feature 1..20: note = chemically synthesized
  source 1..20: mol_type = other DNA
aaaaatgatagaagctggta

SEQ ID NO: 15862 - DNA, 20 bp, synthetic construct
  misc_feature 1..20: note = chemically synthesized
  source 1..20: mol_type = other DNA
aatgatagaagctggtaaag

SEQ ID NO: 15863 - DNA, 20 bp, synthetic construct
  misc_feature 1..20: note = chemically synthesized
  source 1..20: mol_type = other DNA
gaagctggtaaagtagatgc

SEQ ID NO: 15864 - DNA, 20 bp, synthetic construct
  misc_feature 1..20: note = chemically synthesized
  source 1..20: mol_type = other DNA
agctggtaaagtagatgctg

SEQ ID NO: 15865 - DNA, 20 bp, synthetic construct
  misc_feature 1..20: note = chemically synthesized
  source 1..20: mol_type = other DNA
aagtagatgctggagtattt

SEQ ID NO: 15866 - DNA, 20 bp, synthetic construct
  misc_feature 1..20: note = chemically synthesized
  source 1..20: mol_type = other DNA
tgctggagtattttagtaca

SEQ ID NO: 15867 - DNA, 20 bp, synthetic construct
  misc_feature 1..20: note = chemically synthesized
  source 1..20: mol_type = other DNA
tagtacaaagttaaaaaaaa

SEQ ID NO: 15868 - DNA, 20 bp, synthetic construct
  misc_feature 1..20: note = chemically synthesized
  source 1..20: mol_type = other DNA
aagttaaaaaaaaaagcaaa

SEQ ID NO: 15869 - DNA, 20 bp, synthetic construct
  misc_feature 1..20: note = chemically synthesized
  source 1..20: mol_type = other DNA
agttaaaaaaaaaagcaaac

SEQ ID NO: 15870 - DNA, 20 bp, synthetic construct
  misc_feature 1..20: note = chemically synthesized
  source 1..20: mol_type = other DNA
aaaaaaaaaagcaaacagga

SEQ ID NO: 15871 - DNA, 20 bp, synthetic construct
  misc_feature 1..20: note = chemically synthesized
  source 1..20: mol_type = other DNA
aaaaaagcaaacaggaaaga

SEQ ID NO: 15872 - DNA, 20 bp, synthetic construct
  misc_feature 1..20: note = chemically synthesized
  source 1..20: mol_type = other DNA
taccttgttataccatccgc

SEQ ID NO: 15873 - DNA, 20 bp, synthetic construct
  misc_feature 1..20: note = chemically synthesized
  source 1..20: mol_type = other DNA
tccgctggtgattatgtgtg

SEQ ID NO: 15874 - DNA, 20 bp, synthetic construct
  misc_feature 1..20: note = chemically synthesized
  source 1..20: mol_type = other DNA
ggtgattatgtgtgcagaaa

SEQ ID NO: 15875 - DNA, 20 bp, synthetic construct
  misc_feature 1..20: note = chemically synthesized
  source 1..20: mol_type = other DNA
gcagaaatagtctcataatg

SEQ ID NO: 15876 - DNA, 20 bp, synthetic construct
  misc_feature 1..20: note = chemically synthesized
  source 1..20: mol_type = other DNA
agtctcataatgaagcattt

SEQ ID NO: 15877 - DNA, 20 bp, synthetic construct
  misc_feature 1..20: note = chemically synthesized
  source 1..20: mol_type = other DNA
tctcataatgaagcattttg

SEQ ID NO: 15878 - DNA, 20 bp, synthetic construct
  misc_feature 1..20: note = chemically synthesized
  source 1..20: mol_type = other DNA
gaagcattttggagctcatt

SEQ ID NO: 15879 - DNA, 20 bp, synthetic construct
  misc_feature 1..20: note = chemically synthesized
  source 1..20: mol_type = other DNA
ttggagctcattcagaaaat

SEQ ID NO: 15880 - DNA, 20 bp, synthetic construct
  misc_feature 1..20: note = chemically synthesized
  source 1..20: mol_type = other DNA
ttagtccactttgacaacat

SEQ ID NO: 15881 - DNA, 20 bp, synthetic construct
  misc_feature 1..20: note = chemically synthesized
  source 1..20: mol_type = other DNA
tagtccactttgacaacatt

SEQ ID NO: 15882 - DNA, 20 bp, synthetic construct
  misc_feature 1..20: note = chemically synthesized
  source 1..20: mol_type = other DNA
cactttgacaacattaggcg

SEQ ID NO: 15883 - DNA, 20 bp, synthetic construct
  misc_feature 1..20: note = chemically synthesized
  source 1..20: mol_type = other DNA
aacattaggcgaagtatttc

SEQ ID NO: 15884 - DNA, 20 bp, synthetic construct
  misc_feature 1..20: note = chemically synthesized
  source 1..20: mol_type = other DNA
ggcgaagtatttcaagtcta

SEQ ID NO: 15885 - DNA, 20 bp, synthetic construct
  misc_feature 1..20: note = chemically synthesized
  source 1..20: mol_type = other DNA
aagtatttcaagtctaaaga

SEQ ID NO: 15886 - DNA, 20 bp, synthetic construct
  misc_feature 1..20: note = chemically synthesized
  source 1..20: mol_type = other DNA
agtatttcaagtctaaagaa

SEQ ID NO: 15887 - DNA, 20 bp, synthetic construct
  misc_feature 1..20: note = chemically synthesized
  source 1..20: mol_type = other DNA
agtctaaagaaaggacttct

SEQ ID NO: 15888 - DNA, 20 bp, synthetic construct
  misc_feature 1..20: note = chemically synthesized
  source 1..20: mol_type = other DNA
ctcagccttgctctgaaatg

SEQ ID NO: 15889 - DNA, 20 bp, synthetic construct
  misc_feature 1..20: note = chemically synthesized
  source 1..20: mol_type = other DNA
ccattctgatttttatatca

SEQ ID NO: 15890 - DNA, 20 bp, synthetic construct
  misc_feature 1..20: note = chemically synthesized
  source 1..20: mol_type = other DNA
tttatatcatagatgccacc

SEQ ID NO: 15891 - DNA, 20 bp, synthetic construct
  misc_feature 1..20: note = chemically synthesized
  source 1..20: mol_type = other DNA
ccaccaagtgcaaacatgtt

SEQ ID NO: 15892 - DNA, 20 bp, synthetic construct
  misc_feature 1..20: note = chemically synthesized
  source 1..20: mol_type = other DNA
caaacatgtttagaatatta

SEQ ID NO: 15893 - DNA, 20 bp, synthetic construct
  misc_feature 1..20: note = chemically synthesized
  source 1..20: mol_type = other DNA
aaacatgtttagaatattat

SEQ ID NO: 15894 - DNA, 20 bp, synthetic construct
  misc_feature 1..20: note = chemically synthesized
  source 1..20: mol_type = other DNA
attataggcattccatttct

SEQ ID NO: 15895 - DNA, 20 bp, synthetic construct
  misc_feature 1..20: note = chemically synthesized
  source 1..20: mol_type = other DNA
ataaaaaaaaaatgactaat

SEQ ID NO: 15896 - DNA, 20 bp, synthetic construct
  misc_feature 1..20: note = chemically synthesized
  source 1..20: mol_type = other DNA
actaattggcttattttctt

SEQ ID NO: 15897 - DNA, 20 bp, synthetic construct
  misc_feature 1..20: note = chemically synthesized
  source 1..20: mol_type = other DNA
ttattttcttaagtactcaa

SEQ ID NO: 15898 - DNA, 20 bp, synthetic construct
  misc_feature 1..20: note = chemically synthesized
  source 1..20: mol_type = other DNA
gtactcaaaagtatcccatt

SEQ ID NO: 15899 - DNA, 20 bp, synthetic construct
  misc_feature 1..20: note = chemically synthesized
  source 1..20: mol_type = other DNA
cccatttagctaatgtgtct

SEQ ID NO: 15900 - DNA, 20 bp, synthetic construct
  misc_feature 1..20: note = chemically synthesized
  source 1..20: mol_type = other DNA
agaaatactgcccgtgcatt

SEQ ID NO: 15901 - DNA, 20 bp, synthetic construct
  misc_feature 1..20: note = chemically synthesized
  source 1..20: mol_type = other DNA
ttggtatttctttgattttg

SEQ ID NO: 15902 - DNA, 20 bp, synthetic construct
  misc_feature 1..20: note = chemically synthesized
  source 1..20: mol_type = other DNA
tttgattttgtggcactgct

SEQ ID NO: 15903 - DNA, 20 bp, synthetic construct
  misc_feature 1..20: note = chemically synthesized
  source 1..20: mol_type = other DNA
tgattttgtggcactgctga

SEQ ID NO: 15904 - DNA, 20 bp, synthetic construct
  misc_feature 1..20: note = chemically synthesized
  source 1..20: mol_type = other DNA
tttgtggcactgctgagagt

SEQ ID NO: 15905 - DNA, 20 bp, synthetic construct
  misc_feature 1..20: note = chemically synthesized
  source 1..20: mol_type = other DNA
tgtggcactgctgagagtga

SEQ ID NO: 15906 - DNA, 20 bp, synthetic construct
  misc_feature 1..20: note = chemically synthesized
  source 1..20: mol_type = other DNA
ggcactgctgagagtgagag

SEQ ID NO: 15907 - DNA, 20 bp, synthetic construct
  misc_feature 1..20: note = chemically synthesized
  source 1..20: mol_type = other DNA
ctgctgagagtgagagcaga

SEQ ID NO: 15908 - DNA, 20 bp, synthetic construct
  misc_feature 1..20: note = chemically synthesized
  source 1..20: mol_type = other DNA
tgctgagagtgagagcagaa

SEQ ID NO: 15909 - DNA, 20 bp, synthetic construct
  misc_feature 1..20: note = chemically synthesized
  source 1..20: mol_type = other DNA
agtgagagcagaaaggtttt

SEQ ID NO: 15910 - DNA, 20 bp, synthetic construct
  misc_feature 1..20: note = chemically synthesized
  source 1..20: mol_type = other DNA
gagagcagaaaggtttttgg

SEQ ID NO: 15911 - DNA, 20 bp, synthetic construct
  misc_feature 1..20: note = chemically synthesized
  source 1..20: mol_type = other DNA
gctgcgacatgattattatt

SEQ ID NO: 15912 - DNA, 20 bp, synthetic construct
  misc_feature 1..20: note = chemically synthesized
  source 1..20: mol_type = other DNA
tattatttagatccgtttca

SEQ ID NO: 15913 - DNA, 20 bp, synthetic construct
  misc_feature 1..20: note = chemically synthesized
  source 1..20: mol_type = other DNA
attatttagatccgtttcat

SEQ ID NO: 15914 - DNA, 20 bp, synthetic construct
  misc_feature 1..20: note = chemically synthesized
  source 1..20: mol_type = other DNA
atccgtttcataggtgcatg

SEQ ID NO: 15915 - DNA, 20 bp, synthetic construct
  misc_feature 1..20: note = chemically synthesized
  source 1..20: mol_type = other DNA
atgcagtcgttttcttatta

SEQ ID NO: 15916 - DNA, 20 bp, synthetic construct
  misc_feature 1..20: note = chemically synthesized
  source 1..20: mol_type = other DNA
cagtcgttttcttattacag

SEQ ID NO: 15917 - DNA, 20 bp, synthetic construct
  misc_feature 1..20: note = chemically synthesized
  source 1..20: mol_type = other DNA
ttattacagcagtgtaaatg

SEQ ID NO: 15918 - DNA, 20 bp, synthetic construct
  misc_feature 1..20: note = chemically synthesized
  source 1..20: mol_type = other DNA
ggcacatttttcatgtgaca

SEQ ID NO: 15919 - DNA, 20 bp, synthetic construct
  misc_feature 1..20: note = chemically synthesized
  source 1..20: mol_type = other DNA
acatttttcatgtgacatag

SEQ ID NO: 15920 - DNA, 20 bp, synthetic construct
  misc_feature 1..20: note = chemically synthesized
  source 1..20: mol_type = other DNA
tagtagctttctaatttatg

SEQ ID NO: 15921 - DNA, 20 bp, synthetic construct
  misc_feature 1..20: note = chemically synthesized
  source 1..20: mol_type = other DNA
tgaagccatgtctgtttact

SEQ ID NO: 15922 - DNA, 20 bp, synthetic construct
  misc_feature 1..20: note = chemically synthesized
  source 1..20: mol_type = other DNA
gaagccatgtctgtttactt

SEQ ID NO: 15923 - DNA, 20 bp, synthetic construct
  misc_feature 1..20: note = chemically synthesized
  source 1..20: mol_type = other DNA
agccatgtctgtttacttag

SEQ ID NO: 15924 - DNA, 20 bp, synthetic construct
  misc_feature 1..20: note = chemically synthesized
  source 1..20: mol_type = other DNA
agtatatacattcacacaca

SEQ ID NO: 15925 - DNA, 20 bp, synthetic construct
  misc_feature 1..20: note = chemically synthesized
  source 1..20: mol_type = other DNA
gtatatacattcacacacaa

SEQ ID NO: 15926 - DNA, 20 bp, synthetic construct
  misc_feature 1..20: note = chemically synthesized
  source 1..20: mol_type = other DNA
tatatacattcacacacaaa

SEQ ID NO: 15927 - DNA, 20 bp, synthetic construct
  misc_feature 1..20: note = chemically synthesized
  source 1..20: mol_type = other DNA
tcacctctcctttcattctt

SEQ ID NO: 15928 - DNA, 20 bp, synthetic construct
  misc_feature 1..20: note = chemically synthesized
  source 1..20: mol_type = other DNA
cctttcattctttggcacaa

SEQ ID NO: 15929 - DNA, 20 bp, synthetic construct
  misc_feature 1..20: note = chemically synthesized
  source 1..20: mol_type = other DNA
ctttggcacaatggacaact

SEQ ID NO: 15930 - DNA, 20 bp, synthetic construct
  misc_feature 1..20: note = chemically synthesized
  source 1..20: mol_type = other DNA
acaatggacaacttggtgta

SEQ ID NO: 15931 - DNA, 20 bp, synthetic construct
  misc_feature 1..20: note = chemically synthesized
  source 1..20: mol_type = other DNA
caatggacaacttggtgtat

SEQ ID NO: 15932 - DNA, 20 bp, synthetic construct
  misc_feature 1..20: note = chemically synthesized
  source 1..20: mol_type = other DNA
caacttggtgtataggaaaa

SEQ ID NO: 15933 - DNA, 20 bp, synthetic construct
  misc_feature 1..20: note = chemically synthesized
  source 1..20: mol_type = other DNA
taggaaaaaagaaacaaatt

SEQ ID NO: 15934 - DNA, 20 bp, synthetic construct
  misc_feature 1..20: note = chemically synthesized
  source 1..20: mol_type = other DNA
tatccacttttttttttaac

SEQ ID NO: 15935 - DNA, 20 bp, synthetic construct
  misc_feature 1..20: note = chemically synthesized
  source 1..20: mol_type = other DNA
tttttaaccagtttttcttg

SEQ ID NO: 15936 - DNA, 20 bp, synthetic construct
  misc_feature 1..20: note = chemically synthesized
  source 1..20: mol_type = other DNA
ttttcttgtagttattattt

SEQ ID NO: 15937 - DNA, 20 bp, synthetic construct
  misc_feature 1..20: note = chemically synthesized
  source 1..20: mol_type = other DNA
gttccctgtgttaactattt

SEQ ID NO: 15938 - DNA, 20 bp, synthetic construct
  misc_feature 1..20: note = chemically synthesized
  source 1..20: mol_type = other DNA
ccctgtgttaactatttaag

SEQ ID NO: 15939 - DNA, 20 bp, synthetic construct
  misc_feature 1..20: note = chemically synthesized
  source 1..20: mol_type = other DNA
ttctttctaaacttacaaac

SEQ ID NO: 15940 - DNA, 20 bp, synthetic construct
  misc_feature 1..20: note = chemically synthesized
  source 1..20: mol_type = other DNA
accagacacatttgttgctg

SEQ ID NO: 15941 - DNA, 20 bp, synthetic construct
  misc_feature 1..20: note = chemically synthesized
  source 1..20: mol_type = other DNA
ccagacacatttgttgctgt

SEQ ID NO: 15942 - DNA, 20 bp, synthetic construct
  misc_feature 1..20: note = chemically synthesized
  source 1..20: mol_type = other DNA
tgttgctgtgggtgtgtgca

SEQ ID NO: 15943 - DNA, 20 bp, synthetic construct
  misc_feature 1..20: note = chemically synthesized
  source 1..20: mol_type = other DNA
gttgctgtgggtgtgtgcat

SEQ ID NO: 15944 - DNA, 20 bp, synthetic construct
  misc_feature 1..20: note = chemically synthesized
  source 1..20: mol_type = other DNA
atgtgtgtgtgtgtgttctc

SEQ ID NO: 15945 - DNA, 20 bp, synthetic construct
  misc_feature 1..20: note = chemically synthesized
  source 1..20: mol_type = other DNA
gtgtgtgtgtgtgttctctg

SEQ ID NO: 15946 - DNA, 20 bp, synthetic construct
  misc_feature 1..20: note = chemically synthesized
  source 1..20: mol_type = other DNA
tgtgttctctggagttatgc

SEQ ID NO: 15947 - DNA, 20 bp, synthetic construct
  misc_feature 1..20: note = chemically synthesized
  source 1..20: mol_type = other DNA
gtgttctctggagttatgca

SEQ ID NO: 15948 - DNA, 20 bp, synthetic construct
  misc_feature 1..20: note = chemically synthesized
  source 1..20: mol_type = other DNA
ttctctggagttatgcaagg

SEQ ID NO: 15949 - DNA, 20 bp, synthetic construct
  misc_feature 1..20: note = chemically synthesized
  source 1..20: mol_type = other DNA
tcattgacaaatttgctctc

SEQ ID NO: 15950 - DNA, 20 bp, synthetic construct
  misc_feature 1..20: note = chemically synthesized
  source 1..20: mol_type = other DNA
ttttgtatgctcacattttc

SEQ ID NO: 15951 - DNA, 20 bp, synthetic construct
  misc_feature 1..20: note = chemically synthesized
  source 1..20: mol_type = other DNA
tttgtatgctcacattttct

SEQ ID NO: 15952 - DNA, 20 bp, synthetic construct
  misc_feature 1..20: note = chemically synthesized
  source 1..20: mol_type = other DNA
cacattttctgggtattata

SEQ ID NO: 15953 - DNA, 20 bp, synthetic construct
  misc_feature 1..20: note = chemically synthesized
  source 1..20: mol_type = other DNA
cattttctgggtattatata

SEQ ID NO: 15954 - DNA, 20 bp, synthetic construct
  misc_feature 1..20: note = chemically synthesized
  source 1..20: mol_type = other DNA
tttctgggtattatatagag

SEQ ID NO: 15955 - DNA, 20 bp, synthetic construct
  misc_feature 1..20: note = chemically synthesized
  source 1..20: mol_type = other DNA
gggtattatatagagaagcc

SEQ ID NO: 15956 - DNA, 20 bp, synthetic construct
  misc_feature 1..20: note = chemically synthesized
  source 1..20: mol_type = other DNA
tagaaacactttacatgatg

SEQ ID NO: 15957 - DNA, 20 bp, synthetic construct
  misc_feature 1..20: note = chemically synthesized
  source 1..20: mol_type = other DNA
aaacactttacatgatgtgg

SEQ ID NO: 15958 - DNA, 20 bp, synthetic construct
  misc_feature 1..20: note = chemically synthesized
  source 1..20: mol_type = other DNA
aacactttacatgatgtggt

SEQ ID NO: 15959 - DNA, 20 bp, synthetic construct
  misc_feature 1..20: note = chemically synthesized
  source 1..20: mol_type = other DNA
ctttacatgatgtggtggga

SEQ ID NO: 15960 - DNA, 20 bp, synthetic construct
  misc_feature 1..20: note = chemically synthesized
  source 1..20: mol_type = other DNA
catgatgtggtgggatggca

SEQ ID NO: 15961 - DNA, 20 bp, synthetic construct
  misc_feature 1..20: note = chemically synthesized
  source 1..20: mol_type = other DNA
atgatgtggtgggatggcat

SEQ ID NO: 15962 - DNA, 20 bp, synthetic construct
  misc_feature 1..20: note = chemically synthesized
  source 1..20: mol_type = other DNA
tgatgtggtgggatggcatg

SEQ ID NO: 15963 - DNA, 20 bp, synthetic construct
  misc_feature 1..20: note = chemically synthesized
  source 1..20: mol_type = other DNA
tggtgggatggcatggggtt

SEQ ID NO: 15964 - DNA, 20 bp, synthetic construct
  misc_feature 1..20: note = chemically synthesized
  source 1..20: mol_type = other DNA
tctcccctttctgtcctctc

SEQ ID NO: 15965 - DNA, 20 bp, synthetic construct
  misc_feature 1..20: note = chemically synthesized
  source 1..20: mol_type = other DNA
tgcttttgtttctccaacca

SEQ ID NO: 15966 - DNA, 20 bp, synthetic construct
  misc_feature 1..20: note = chemically synthesized
  source 1..20: mol_type = other DNA
ttgtttctccaaccacagcc

SEQ ID NO: 15967 - DNA, 20 bp, synthetic construct
  misc_feature 1..20: note = chemically synthesized
  source 1..20: mol_type = other DNA
aaccacagccgagcctcttg

SEQ ID NO: 15968 - DNA, 20 bp, synthetic construct
  misc_feature 1..20: note = chemically synthesized
  source 1..20: mol_type = other DNA
gcctcttgaagccattctta

SEQ ID NO: 15969 - DNA, 20 bp, synthetic construct
  misc_feature 1..20: note = chemically synthesized
  source 1..20: mol_type = other DNA
cattcttacagatgatgaac

SEQ ID NO: 15970 - DNA, 20 bp, synthetic construct
  misc_feature 1..20: note = chemically synthesized
  source 1..20: mol_type = other DNA
acagatgatgaaccagacca

SEQ ID NO: 15971 - DNA, 20 bp, synthetic construct
  misc_feature 1..20: note = chemically synthesized
  source 1..20: mol_type = other DNA
tgaaccagaccacggcccgt

SEQ ID NO: 15972 - DNA, 20 bp, synthetic construct
  misc_feature 1..20: note = chemically synthesized
  source 1..20: mol_type = other DNA
gaaccagaccacggcccgtt

SEQ ID NO: 15973 - DNA, 20 bp, synthetic construct
  misc_feature 1..20: note = chemically synthesized
  source 1..20: mol_type = other DNA
accagaccacggcccgttgg

SEQ ID NO: 15974 - DNA, 20 bp, synthetic construct
  misc_feature 1..20: note = chemically synthesized
  source 1..20: mol_type = other DNA
ccacggcccgttgggagctc

SEQ ID NO: 15975 - DNA, 20 bp, synthetic construct
  misc_feature 1..20: note = chemically synthesized
  source 1..20: mol_type = other DNA
cggcccgttgggagctccag

SEQ ID NO: 15976 - DNA, 20 bp, synthetic construct
  misc_feature 1..20: note = chemically synthesized
  source 1..20: mol_type = other DNA
ggcccgttgggagctccaga

SEQ ID NO: 15977 - DNA, 20 bp, synthetic construct
  misc_feature 1..20: note = chemically synthesized
  source 1..20: mol_type = other DNA
gcccgttgggagctccagaa

SEQ ID NO: 15978 - DNA, 20 bp, synthetic construct
  misc_feature 1..20: note = chemically synthesized
  source 1..20: mol_type = other DNA
cccgttgggagctccagaag

SEQ ID NO: 15979 - DNA, 20 bp, synthetic construct
  misc_feature 1..20: note = chemically synthesized
  source 1..20: mol_type = other DNA
gatcatgacctcctcacctg

SEQ ID NO: 15980 - DNA, 20 bp, synthetic construct
  misc_feature 1..20: note = chemically synthesized
  source 1..20: mol_type = other DNA
atcatgacctcctcacctgt

SEQ ID NO: 15981 - DNA, 20 bp, synthetic construct
  misc_feature 1..20: note = chemically synthesized
  source 1..20: mol_type = other DNA
atgacctcctcacctgtggg

SEQ ID NO: 15982 - DNA, 20 bp, synthetic construct
  misc_feature 1..20: note = chemically synthesized
  source 1..20: mol_type = other DNA
tcctcacctgtgggcagtgc

SEQ ID NO: 15983 - DNA, 20 bp, synthetic construct
  misc_feature 1..20: note = chemically synthesized
  source 1..20: mol_type = other DNA
gtgccagatgaacttcccat

SEQ ID NO: 15984 - DNA, 20 bp, synthetic construct
  misc_feature 1..20: note = chemically synthesized
  source 1..20: mol_type = other DNA
tgccagatgaacttcccatt

SEQ ID NO: 15985 - DNA, 20 bp, synthetic construct
  misc_feature 1..20: note = chemically synthesized
  source 1..20: mol_type = other DNA
gccagatgaacttcccattg

SEQ ID NO: 15986 - DNA, 20 bp, synthetic construct
  misc_feature 1..20: note = chemically synthesized
  source 1..20: mol_type = other DNA
ccagatgaacttcccattgg

SEQ ID NO: 15987 - DNA, 20 bp, synthetic construct
  misc_feature 1..20: note = chemically synthesized
  source 1..20: mol_type = other DNA
gggacattcttatttttatc

SEQ ID NO: 15988 - DNA, 20 bp, synthetic construct
  misc_feature 1..20: note = chemically synthesized
  source 1..20: mol_type = other DNA
ttatttttatcgagcacaaa

SEQ ID NO: 15989 - DNA, 20 bp, synthetic construct
  misc_feature 1..20: note = chemically synthesized
  source 1..20: mol_type = other DNA
cacaaacggaaacaatgcaa

SEQ ID NO: 15990 - DNA, 20 bp, synthetic construct
  misc_feature 1..20: note = chemically synthesized
  source 1..20: mol_type = other DNA
aaacggaaacaatgcaatgg

SEQ ID NO: 15991 - DNA, 20 bp, synthetic construct
  misc_feature 1..20: note = chemically synthesized
  source 1..20: mol_type = other DNA
atgcaatggcagcctctgct

SEQ ID NO: 15992 - DNA, 20 bp, synthetic construct
  misc_feature 1..20: note = chemically synthesized
  source 1..20: mol_type = other DNA
tggcagcctctgcttagaaa

SEQ ID NO: 15993 - DNA, 20 bp, synthetic construct
  misc_feature 1..20: note = chemically synthesized
  source 1..20: mol_type = other DNA
cctctgcttagaaaaagctg

SEQ ID NO: 15994 - DNA, 20 bp, synthetic construct
  misc_feature 1..20: note = chemically synthesized
  source 1..20: mol_type = other DNA
gcttagaaaaagctgtggat

SEQ ID NO: 15995 - DNA, 20 bp, synthetic construct
  misc_feature 1..20: note = chemically synthesized
  source 1..20: mol_type = other DNA
caccttccccttcaccaatc

SEQ ID NO: 15996 - DNA, 20 bp, synthetic construct
  misc_feature 1..20: note = chemically synthesized
  source 1..20: mol_type = other DNA
ttcaccaatcgagatgaaaa

SEQ ID NO: 15997 - DNA, 20 bp, synthetic construct
  misc_feature 1..20: note = chemically synthesized
  source 1..20: mol_type = other DNA
gaaaaaagcatccaatcccg

SEQ ID NO: 15998 - DNA, 20 bp, synthetic construct
  misc_feature 1..20: note = chemically synthesized
  source 1..20: mol_type = other DNA
aaaaagcatccaatcccgtg

SEQ ID NO: 15999 - DNA, 20 bp, synthetic construct
  misc_feature 1..20: note = chemically synthesized
  source 1..20: mol_type = other DNA
aaaagcatccaatcccgtgg

SEQ ID NO: 16000 - DNA, 20 bp, synthetic construct
  misc_feature 1..20: note = chemically synthesized
  source 1..20: mol_type = other DNA
gcatccaatcccgtggaggt

SEQ ID NO: 16001 - DNA, 20 bp, synthetic construct
  misc_feature 1..20: note = chemically synthesized
  source 1..20: mol_type = other DNA
atcccgtggaggttggcatc

SEQ ID NO: 16002 - DNA, 20 bp, synthetic construct
  misc_feature 1..20: note = chemically synthesized
  source 1..20: mol_type = other DNA
tcccgtggaggttggcatcc

SEQ ID NO: 16003 - DNA, 20 bp, synthetic construct
  misc_feature 1..20: note = chemically synthesized
  source 1..20: mol_type = other DNA
ggttggcatccaggtcacgc

SEQ ID NO: 16004 - DNA, 20 bp, synthetic construct
  misc_feature 1..20: note = chemically synthesized
  source 1..20: mol_type = other DNA
ttggcatccaggtcacgcca

SEQ ID NO: 16005 - DNA, 20 bp, synthetic construct
  misc_feature 1..20: note = chemically synthesized
  source 1..20: mol_type = other DNA
tggcatccaggtcacgccag

SEQ ID NO: 16006 - DNA, 20 bp, synthetic construct
  misc_feature 1..20: note = chemically synthesized
  source 1..20: mol_type = other DNA
gattgtttatcaacgtcatc

SEQ ID NO: 16007 - DNA, 20 bp, synthetic construct
  misc_feature 1..20: note = chemically synthesized
  source 1..20: mol_type = other DNA
ttgtttatcaacgtcatcta

SEQ ID NO: 16008 - DNA, 20 bp, synthetic construct
  misc_feature 1..20: note = chemically synthesized
  source 1..20: mol_type = other DNA
tgtttatcaacgtcatctag

SEQ ID NO: 16009 - DNA, 20 bp, synthetic construct
  misc_feature 1..20: note = chemically synthesized
  source 1..20: mol_type = other DNA
ctagaggaatttgccccaaa

SEQ ID NO: 16010 - DNA, 20 bp, synthetic construct
  misc_feature 1..20: note = chemically synthesized
  source 1..20: mol_type = other DNA
tagaggaatttgccccaaac

SEQ ID NO: 16011 - DNA, 20 bp, synthetic construct
  misc_feature 1..20: note = chemically synthesized
  source 1..20: mol_type = other DNA
ttgccccaaacaggaacaca

SEQ ID NO: 16012 - DNA, 20 bp, synthetic construct
  misc_feature 1..20: note = chemically synthesized
  source 1..20: mol_type = other DNA
ccccaaacaggaacacatag

SEQ ID NO: 16013 - DNA, 20 bp, synthetic construct
  misc_feature 1..20: note = chemically synthesized
  source 1..20: mol_type = other DNA
cccaaacaggaacacatagc

SEQ ID NO: 16014 - DNA, 20 bp, synthetic construct
  misc_feature 1..20: note = chemically synthesized
  source 1..20: mol_type = other DNA
ggaacacatagcaggtaaat

SEQ ID NO: 16015 - DNA, 20 bp, synthetic construct
  misc_feature 1..20: note = chemically synthesized
  source 1..20: mol_type = other DNA
acacatagcaggtaaatgag

SEQ ID NO: 16016 - DNA, 20 bp, synthetic construct
  misc_feature 1..20: note = chemically synthesized
  source 1..20: mol_type = other DNA
atagcaggtaaatgagaagc

SEQ ID NO: 16017 - DNA, 20 bp, synthetic construct
  misc_feature 1..20: note = chemically synthesized
  source 1..20: mol_type = other DNA
tagcaggtaaatgagaagca

SEQ ID NO: 16018 - DNA, 20 bp, synthetic construct
  misc_feature 1..20: note = chemically synthesized
  source 1..20: mol_type = other DNA
gcaggtaaatgagaagcaag

SEQ ID NO: 16019 - DNA, 20 bp, synthetic construct
  misc_feature 1..20: note = chemically synthesized
  source 1..20: mol_type = other DNA
taaatgagaagcaaggagaa

SEQ ID NO: 16020 - DNA, 20 bp, synthetic construct
  misc_feature 1..20: note = chemically synthesized
  source 1..20: mol_type = other DNA
gcatgttttcttttcatttt

SEQ ID NO: 16021 - DNA, 20 bp, synthetic construct
  misc_feature 1..20: note = chemically synthesized
  source 1..20: mol_type = other DNA
atgttttcttttcattttca

SEQ ID NO: 16022 - DNA, 20 bp, synthetic construct
  misc_feature 1..20: note = chemically synthesized
  source 1..20: mol_type = other DNA
tgttttcttttcattttcag

SEQ ID NO: 16023 - DNA, 20 bp, synthetic construct
  misc_feature 1..20: note = chemically synthesized
  source 1..20: mol_type = other DNA
tttcattttcagaggtgctg

SEQ ID NO: 16024 - DNA, 20 bp, synthetic construct
  misc_feature 1..20: note = chemically synthesized
  source 1..20: mol_type = other DNA
ttttcagaggtgctgtagcc

SEQ ID NO: 16025 - DNA, 20 bp, synthetic construct
  misc_feature 1..20: note = chemically synthesized
  source 1..20: mol_type = other DNA
tcagaggtgctgtagccaag

SEQ ID NO: 16026 - DNA, 20 bp, synthetic construct
  misc_feature 1..20: note = chemically synthesized
  source 1..20: mol_type = other DNA
aggtgctgtagccaagcagt

SEQ ID NO: 16027 - DNA, 20 bp, synthetic construct
  misc_feature 1..20: note = chemically synthesized
  source 1..20: mol_type = other DNA
ggtgctgtagccaagcagta

SEQ ID NO: 16028 - DNA, 20 bp, synthetic construct
  misc_feature 1..20: note = chemically synthesized
  source 1..20: mol_type = other DNA
tgctgtagccaagcagtaag

SEQ ID NO: 16029 - DNA, 20 bp, synthetic construct
  misc_feature 1..20: note = chemically synthesized
  source 1..20: mol_type = other DNA
ccaagcagtaaggagttgtg

SEQ ID NO: 16030 - DNA, 20 bp, synthetic construct
  misc_feature 1..20: note = chemically synthesized
  source 1..20: mol_type = other DNA
ctctatgtgactgtccatga

SEQ ID NO: 16031 - DNA, 20 bp, synthetic construct
  misc_feature 1..20: note = chemically synthesized
  source 1..20: mol_type = other DNA
tcatttctgttgcttacgtc

SEQ ID NO: 16032 - DNA, 20 bp, synthetic construct
  misc_feature 1..20: note = chemically synthesized
  source 1..20: mol_type = other DNA
tgttgcttacgtccagaaca

SEQ ID NO: 16033 - DNA, 20 bp, synthetic construct
  misc_feature 1..20: note = chemically synthesized
  source 1..20: mol_type = other DNA
tattttccacctcactgaat

SEQ ID NO: 16034 - DNA, 20 bp, synthetic construct
  misc_feature 1..20: note = chemically synthesized
  source 1..20: mol_type = other DNA
ccacctcactgaatcagatg

SEQ ID NO: 16035 - DNA, 20 bp, synthetic construct
  misc_feature 1..20: note = chemically synthesized
  source 1..20: mol_type = other DNA
cacctcactgaatcagatgt

SEQ ID NO: 16036 - DNA, 20 bp, synthetic construct
  misc_feature 1..20: note = chemically synthesized
  source 1..20: mol_type = other DNA
ctcactgaatcagatgtagg

SEQ ID NO: 16037 - DNA, 20 bp, synthetic construct
  misc_feature 1..20: note = chemically synthesized
  source 1..20: mol_type = other DNA
tcactgaatcagatgtaggc

SEQ ID NO: 16038 - DNA, 20 bp, synthetic construct
  misc_feature 1..20: note = chemically synthesized
  source 1..20: mol_type = other DNA
tgaatcagatgtaggcagga

SEQ ID NO: 16039 - DNA, 20 bp, synthetic construct
  misc_feature 1..20: note = chemically synthesized
  source 1..20: mol_type = other DNA
gaatcagatgtaggcaggat

SEQ ID NO: 16040 - DNA, 20 bp, synthetic construct
  misc_feature 1..20: note = chemically synthesized
  source 1..20: mol_type = other DNA
ggcaggataggtacacacat

SEQ ID NO: 16041 - DNA, 20 bp, synthetic construct
  misc_feature 1..20: note = chemically synthesized
  source 1..20: mol_type = other DNA
cacatcagacaccttctctc

SEQ ID NO: 16042 - DNA, 20 bp, synthetic construct
  misc_feature 1..20: note = chemically synthesized
  source 1..20: mol_type = other DNA
ctctctggatctgtcgattt

SEQ ID NO: 16043 - DNA, 20 bp, synthetic construct
  misc_feature 1..20: note = chemically synthesized
  source 1..20: mol_type = other DNA
atccccaccttctcattttg

SEQ ID NO: 16044 - DNA, 20 bp, synthetic construct
  misc_feature 1..20: note = chemically synthesized
  source 1..20: mol_type = other DNA
ccttctcattttgaagtatt

SEQ ID NO: 16045 - DNA, 20 bp, synthetic construct
  misc_feature 1..20: note = chemically synthesized
  source 1..20: mol_type = other DNA
gtattgagctttactacacc

SEQ ID NO: 16046 - DNA, 20 bp, synthetic construct
  misc_feature 1..20: note = chemically synthesized
  source 1..20: mol_type = other DNA
gagctttactacacctagtc

SEQ ID NO: 16047 - DNA, 20 bp, synthetic construct
  misc_feature 1..20: note = chemically synthesized
  source 1..20: mol_type = other DNA
cagcttccattgtccatttc

SEQ ID NO: 16048 - DNA, 20 bp, synthetic construct
  misc_feature 1..20: note = chemically synthesized
  source 1..20: mol_type = other DNA
ccattgtccatttccagcct

SEQ ID NO: 16049 - DNA, 20 bp, synthetic construct
  misc_feature 1..20: note = chemically synthesized
  source 1..20: mol_type = other DNA
ttccagccttggtgacgtgt

SEQ ID NO: 16050 - DNA, 20 bp, synthetic construct
  misc_feature 1..20: note = chemically synthesized
  source 1..20: mol_type = other DNA
ccagccttggtgacgtgtca

SEQ ID NO: 16051 - DNA, 20 bp, synthetic construct
  misc_feature 1..20: note = chemically synthesized
  source 1..20: mol_type = other DNA
cagccttggtgacgtgtcag

SEQ ID NO: 16052 - DNA, 20 bp, synthetic construct
  misc_feature 1..20: note = chemically synthesized
  source 1..20: mol_type = other DNA
ttggtgacgtgtcagaggca

SEQ ID NO: 16053 - DNA, 20 bp, synthetic construct
  misc_feature 1..20: note = chemically synthesized
  source 1..20: mol_type = other DNA
gtgacgtgtcagaggcaaag

SEQ ID NO: 16054 - DNA, 20 bp, synthetic construct
  misc_feature 1..20: note = chemically synthesized
  source 1..20: mol_type = other DNA
tcagaggcaaagtggccata

SEQ ID NO: 16055 - DNA, 20 bp, synthetic construct
  misc_feature 1..20: note = chemically synthesized
  source 1..20: mol_type = other DNA
cagaggcaaagtggccatat

SEQ ID NO: 16056 - DNA, 20 bp, synthetic construct
  misc_feature 1..20: note = chemically synthesized
  source 1..20: mol_type = other DNA
agtggccatataggcatttg

SEQ ID NO: 16057 - DNA, 20 bp, synthetic construct
  misc_feature 1..20: note = chemically synthesized
  source 1..20: mol_type = other DNA
ccatataggcatttgcagtt

SEQ ID NO: 16058 - DNA, 20 bp, synthetic construct
  misc_feature 1..20: note = chemically synthesized
  source 1..20: mol_type = other DNA
agccaatgacttgtttgact

SEQ ID NO: 16059 - DNA, 20 bp, synthetic construct
  misc_feature 1..20: note = chemically synthesized
  source 1..20: mol_type = other DNA
cttgtttgactcagaacatc

SEQ ID NO: 16060 - DNA, 20 bp, synthetic construct
  misc_feature 1..20: note = chemically synthesized
  source 1..20: mol_type = other DNA
tttgactcagaacatctggc

SEQ ID NO: 16061 - DNA, 20 bp, synthetic construct
  misc_feature 1..20: note = chemically synthesized
  source 1..20: mol_type = other DNA
ttgactcagaacatctggcc

SEQ ID NO: 16062 - DNA, 20 bp, synthetic construct
  misc_feature 1..20: note = chemically synthesized
  source 1..20: mol_type = other DNA
aacatctggccaggcctcct

SEQ ID NO: 16063 - DNA, 20 bp, synthetic construct
  misc_feature 1..20: note = chemically synthesized
  source 1..20: mol_type = other DNA
acatctggccaggcctcctt

SEQ ID NO: 16064 - DNA, 20 bp, synthetic construct
  misc_feature 1..20: note = chemically synthesized
  source 1..20: mol_type = other DNA
catctggccaggcctcctta

SEQ ID NO: 16065 - DNA, 20 bp, synthetic construct
  misc_feature 1..20: note = chemically synthesized
  source 1..20: mol_type = other DNA
atctggccaggcctccttag

SEQ ID NO: 16066 - DNA, 20 bp, synthetic construct
  misc_feature 1..20: note = chemically synthesized
  source 1..20: mol_type = other DNA
gccaggcctccttaggggtt

SEQ ID NO: 16067 - DNA, 20 bp, synthetic construct
  misc_feature 1..20: note = chemically synthesized
  source 1..20: mol_type = other DNA
taggggttcagctcgttctc

SEQ ID NO: 16068 - DNA, 20 bp, synthetic construct
  misc_feature 1..20: note = chemically synthesized
  source 1..20: mol_type = other DNA
aggggttcagctcgttctca

SEQ ID NO: 16069 - DNA, 20 bp, synthetic construct
  misc_feature 1..20: note = chemically synthesized
  source 1..20: mol_type = other DNA
tcgttctcaaggcttccctg

SEQ ID NO: 16070 - DNA, 20 bp, synthetic construct
  misc_feature 1..20: note = chemically synthesized
  source 1..20: mol_type = other DNA
ttctcaaggcttccctgaag

SEQ ID NO: 16071 - DNA, 20 bp, synthetic construct
  misc_feature 1..20: note = chemically synthesized
  source 1..20: mol_type = other DNA
ctcaaggcttccctgaagta

SEQ ID NO: 16072 - DNA, 20 bp, synthetic construct
  misc_feature 1..20: note = chemically synthesized
  source 1..20: mol_type = other DNA
aaggcttccctgaagtagag

SEQ ID NO: 16073 - DNA, 20 bp, synthetic construct
  misc_feature 1..20: note = chemically synthesized
  source 1..20: mol_type = other DNA
aggcttccctgaagtagagt

SEQ ID NO: 16074 - DNA, 20 bp, synthetic construct
  misc_feature 1..20: note = chemically synthesized
  source 1..20: mol_type = other DNA
ttccctgaagtagagtgggc

SEQ ID NO: 16075 - DNA, 20 bp, synthetic construct
  misc_feature 1..20: note = chemically synthesized
  source 1..20: mol_type = other DNA
cctgaagtagagtgggctgg

SEQ ID NO: 16076 - DNA, 20 bp, synthetic construct
  misc_feature 1..20: note = chemically synthesized
  source 1..20: mol_type = other DNA
ctgaagtagagtgggctggc

SEQ ID NO: 16077 - DNA, 20 bp, synthetic construct
  misc_feature 1..20: note = chemically synthesized
  source 1..20: mol_type = other DNA
tgaagtagagtgggctggca

SEQ ID NO: 16078 - DNA, 20 bp, synthetic construct
  misc_feature 1..20: note = chemically synthesized
  source 1..20: mol_type = other DNA
agtagagtgggctggcaggg

SEQ ID NO: 16079 - DNA, 20 bp, synthetic construct
  misc_feature 1..20: note = chemically synthesized
  source 1..20: mol_type = other DNA
gagtgggctggcagggtagt

SEQ ID NO: 16080 - DNA, 20 bp, synthetic construct
  misc_feature 1..20: note = chemically synthesized
  source 1..20: mol_type = other DNA
gtgggctggcagggtagttg

SEQ ID NO: 16081 - DNA, 20 bp, synthetic construct
  misc_feature 1..20: note = chemically synthesized
  source 1..20: mol_type = other DNA
tgggctggcagggtagttgg

SEQ ID NO: 16082 - DNA, 20 bp, synthetic construct
  misc_feature 1..20: note = chemically synthesized
  source 1..20: mol_type = other DNA
gctggcagggtagttggagg

SEQ ID NO: 16083 - DNA, 20 bp, synthetic construct
  misc_feature 1..20: note = chemically synthesized
  source 1..20: mol_type = other DNA
ggcagggtagttggaggtgg

SEQ ID NO: 16084 - DNA, 20 bp, synthetic construct
  misc_feature 1..20: note = chemically synthesized
  source 1..20: mol_type = other DNA
gggtagttggaggtggtgga

SEQ ID NO: 16085 - DNA, 20 bp, synthetic construct
  misc_feature 1..20: note = chemically synthesized
  source 1..20: mol_type = other DNA
gtagttggaggtggtggaaa

SEQ ID NO: 16086 - DNA, 20 bp, synthetic construct
  misc_feature 1..20: note = chemically synthesized
  source 1..20: mol_type = other DNA
ggtggtggaaagagttaact

SEQ ID NO: 16087 - DNA, 20 bp, synthetic construct
  misc_feature 1..20: note = chemically synthesized
  source 1..20: mol_type = other DNA
ggaaagagttaactgagctt

SEQ ID NO: 16088 - DNA, 20 bp, synthetic construct
  misc_feature 1..20: note = chemically synthesized
  source 1..20: mol_type = other DNA
gaaagagttaactgagcttc

SEQ ID NO: 16089 - DNA, 20 bp, synthetic construct
  misc_feature 1..20: note = chemically synthesized
  source 1..20: mol_type = other DNA
aaagagttaactgagcttca

SEQ ID NO: 16090 - DNA, 20 bp, synthetic construct
  misc_feature 1..20: note = chemically synthesized
  source 1..20: mol_type = other DNA
agttaactgagcttcagggc

SEQ ID NO: 16091 - DNA, 20 bp, synthetic construct
  misc_feature 1..20: note = chemically synthesized
  source 1..20: mol_type = other DNA
ctgagcttcagggctagcct

SEQ ID NO: 16092 - DNA, 20 bp, synthetic construct
  misc_feature 1..20: note = chemically synthesized
  source 1..20: mol_type = other DNA
ggctagccttggatccatat

SEQ ID NO: 16093 - DNA, 20 bp, synthetic construct
  misc_feature 1..20: note = chemically synthesized
  source 1..20: mol_type = other DNA
cttggatccatattggctgt

SEQ ID NO: 16094 - DNA, 20 bp, synthetic construct
  misc_feature 1..20: note = chemically synthesized
  source 1..20: mol_type = other DNA
atccatattggctgtcagcc

SEQ ID NO: 16095 - DNA, 20 bp, synthetic construct
  misc_feature 1..20: note = chemically synthesized
  source 1..20: mol_type = other DNA
atattggctgtcagcccgga

SEQ ID NO: 16096 - DNA, 20 bp, synthetic construct
  misc_feature 1..20: note = chemically synthesized
  source 1..20: mol_type = other DNA
tattggctgtcagcccggat

SEQ ID NO: 16097 - DNA, 20 bp, synthetic construct
  misc_feature 1..20: note = chemically synthesized
  source 1..20: mol_type = other DNA
attggctgtcagcccggatg

SEQ ID NO: 16098 - DNA, 20 bp, synthetic construct
  misc_feature 1..20: note = chemically synthesized
  source 1..20: mol_type = other DNA
gatggggctgtaattaaaca

SEQ ID NO: 16099 - DNA, 20 bp, synthetic construct
  misc_feature 1..20: note = chemically synthesized
  source 1..20: mol_type = other DNA
tgtaattaaacacagccccg

SEQ ID NO: 16100 - DNA, 20 bp, synthetic construct
  misc_feature 1..20: note = chemically synthesized
  source 1..20: mol_type = other DNA
aattaaacacagccccgtgg

SEQ ID NO: 16101 - DNA, 20 bp, synthetic construct
  misc_feature 1..20: note = chemically synthesized
  source 1..20: mol_type = other DNA
attaaacacagccccgtggt

SEQ ID NO: 16102 - DNA, 20 bp, synthetic construct
  misc_feature 1..20: note = chemically synthesized
  source 1..20: mol_type = other DNA
gacaccatgaccttgacttt

SEQ ID NO: 16103 - DNA, 20 bp, synthetic construct
  misc_feature 1..20: note = chemically synthesized
  source 1..20: mol_type = other DNA
tttaagatgccattttcgac

SEQ ID NO: 16104 - DNA, 20 bp, synthetic construct
  misc_feature 1..20: note = chemically synthesized
  source 1..20: mol_type = other DNA
agatgccattttcgactggc

SEQ ID NO: 16105 - DNA, 20 bp, synthetic construct
  misc_feature 1..20: note = chemically synthesized
  source 1..20: mol_type = other DNA
gatgccattttcgactggcc

SEQ ID NO: 16106 - DNA, 20 bp, synthetic construct
  misc_feature 1..20: note = chemically synthesized
  source 1..20: mol_type = other DNA
ccattttcgactggccaggc

SEQ ID NO: 16107 - DNA, 20 bp, synthetic construct
  misc_feature 1..20: note = chemically synthesized
  source 1..20: mol_type = other DNA
attttcgactggccaggcca

SEQ ID NO: 16108 - DNA, 20 bp, synthetic construct
  misc_feature 1..20: note = chemically synthesized
  source 1..20: mol_type = other DNA
ttcgactggccaggccagag

SEQ ID NO: 16109 - DNA, 20 bp, synthetic construct
  misc_feature 1..20: note = chemically synthesized
  source 1..20: mol_type = other DNA
cgactggccaggccagagta

SEQ ID NO: 16110 - DNA, 20 bp, synthetic construct
  misc_feature 1..20: note = chemically synthesized
  source 1..20: mol_type = other DNA
actggccaggccagagtaga

SEQ ID NO: 16111 - DNA, 20 bp, synthetic construct
  misc_feature 1..20: note = chemically synthesized
  source 1..20: mol_type = other DNA
ctggccaggccagagtagag

SEQ ID NO: 16112 - DNA, 20 bp, synthetic construct
  misc_feature 1..20: note = chemically synthesized
  source 1..20: mol_type = other DNA
tggccaggccagagtagaga

SEQ ID NO: 16113 - DNA, 20 bp, synthetic construct
  misc_feature 1..20: note = chemically synthesized
  source 1..20: mol_type = other DNA
ccaggccagagtagagaggg

SEQ ID NO: 16114 - DNA, 20 bp, synthetic construct
  misc_feature 1..20: note = chemically synthesized
  source 1..20: mol_type = other DNA
agtagagagggcagttgctg

SEQ ID NO: 16115 - DNA, 20 bp, synthetic construct
  misc_feature 1..20: note = chemically synthesized
  source 1..20: mol_type = other DNA
agggcagttgctgaagcgca

SEQ ID NO: 16116 - DNA, 20 bp, synthetic construct
  misc_feature 1..20: note = chemically synthesized
  source 1..20: mol_type = other DNA
cacagacatgcttactcgaa

SEQ ID NO: 16117 - DNA, 20 bp, synthetic construct
  misc_feature 1..20: note = chemically synthesized
  source 1..20: mol_type = other DNA
catgcttactcgaaaagttt

SEQ ID NO: 16118 - DNA, 20 bp, synthetic construct
  misc_feature 1..20: note = chemically synthesized
  source 1..20: mol_type = other DNA
atgcttactcgaaaagttta

SEQ ID NO: 16119 - DNA, 20 bp, synthetic construct
  misc_feature 1..20: note = chemically synthesized
  source 1..20: mol_type = other DNA
tgcttactcgaaaagtttaa

SEQ ID NO: 16120 - DNA, 20 bp, synthetic construct
  misc_feature 1..20: note = chemically synthesized
  source 1..20: mol_type = other DNA
cgaaaagtttaagggcatgt

SEQ ID NO: 16121 - DNA, 20 bp, synthetic construct
  misc_feature 1..20: note = chemically synthesized
  source 1..20: mol_type = other DNA
gggcatgttggaaatttcaa

SEQ ID NO: 16122 - DNA, 20 bp, synthetic construct
  misc_feature 1..20: note = chemically synthesized
  source 1..20: mol_type = other DNA
ggcatgttggaaatttcaaa

SEQ ID NO: 16123 - DNA, 20 bp, synthetic construct
  misc_feature 1..20: note = chemically synthesized
  source 1..20: mol_type = other DNA
tgttggaaatttcaaaaggt

SEQ ID NO: 16124 - DNA, 20 bp, synthetic construct
  misc_feature 1..20: note = chemically synthesized
  source 1..20: mol_type = other DNA
atttcaaaaggttggtttga

SEQ ID NO: 16125 - DNA, 20 bp, synthetic construct
  misc_feature 1..20: note = chemically synthesized
  source 1..20: mol_type = other DNA
tttcaaaaggttggtttgac

SEQ ID NO: 16126 - DNA, 20 bp, synthetic construct
  misc_feature 1..20: note = chemically synthesized
  source 1..20: mol_type = other DNA
aaaggttggtttgacaggaa

SEQ ID NO: 16127 - DNA, 20 bp, synthetic construct
  misc_feature 1..20: note = chemically synthesized
  source 1..20: mol_type = other DNA
acaggaacggctgctccctg

SEQ ID NO: 16128 - DNA, 20 bp, synthetic construct
  misc_feature 1..20: note = chemically synthesized
  source 1..20: mol_type = other DNA
ctccctgcagcctgcctcct

SEQ ID NO: 16129 - DNA, 20 bp, synthetic construct
  misc_feature 1..20: note = chemically synthesized
  source 1..20: mol_type = other DNA
gctctctcttgtctctgatg

SEQ ID NO: 16130 - DNA, 20 bp, synthetic construct
  misc_feature 1..20: note = chemically synthesized
  source 1..20: mol_type = other DNA
tgtctctgatgtggttttga

SEQ ID NO: 16131 - DNA, 20 bp, synthetic construct
  misc_feature 1..20: note = chemically synthesized
  source 1..20: mol_type = other DNA
atgtatcttgattttgtttg

SEQ ID NO: 16132 - DNA, 20 bp, synthetic construct
  misc_feature 1..20: note = chemically synthesized
  source 1..20: mol_type = other DNA
gattttgtttgtggtttaca

SEQ ID NO: 16133 - DNA, 20 bp, synthetic construct
  misc_feature 1..20: note = chemically synthesized
  source 1..20: mol_type = other DNA
atgtcacccttacaaatgtc

SEQ ID NO: 16134 - DNA, 20 bp, synthetic construct
  misc_feature 1..20: note = chemically synthesized
  source 1..20: mol_type = other DNA
acccttacaaatgtccagtc

SEQ ID NO: 16135 - DNA, 20 bp, synthetic construct
  misc_feature 1..20: note = chemically synthesized
  source 1..20: mol_type = other DNA
acacaatgtaaaaattttct

SEQ ID NO: 16136 - DNA, 20 bp, synthetic construct
  misc_feature 1..20: note = chemically synthesized
  source 1..20: mol_type = other DNA
aaatacacacacgtattcaa

SEQ ID NO: 16137 - DNA, 20 bp, synthetic construct
  misc_feature 1..20: note = chemically synthesized
  source 1..20: mol_type = other DNA
ttcaacagccctccctcctt

SEQ ID NO: 16138 - DNA, 20 bp, synthetic construct
  misc_feature 1..20: note = chemically synthesized
  source 1..20: mol_type = other DNA
ctccctcctttggttaattt

SEQ ID NO: 16139 - DNA, 20 bp, synthetic construct
  misc_feature 1..20: note = chemically synthesized
  source 1..20: mol_type = other DNA
cctcctttggttaattttag

SEQ ID NO: 16140 - DNA, 20 bp, synthetic construct
  misc_feature 1..20: note = chemically synthesized
  source 1..20: mol_type = other DNA
ctcctttggttaattttagc

SEQ ID NO: 16141 - DNA, 20 bp, synthetic construct
  misc_feature 1..20: note = chemically synthesized
  source 1..20: mol_type = other DNA
tcctttggttaattttagca

SEQ ID NO: 16142 - DNA, 20 bp, synthetic construct
  misc_feature 1..20: note = chemically synthesized
  source 1..20: mol_type = other DNA
ctttggttaattttagcagg

SEQ ID NO: 16143 - DNA, 20 bp, synthetic construct
  misc_feature 1..20: note = chemically synthesized
  source 1..20: mol_type = other DNA
tttggttaattttagcaggg

SEQ ID NO: 16144 - DNA, 20 bp, synthetic construct
  misc_feature 1..20: note = chemically synthesized
  source 1..20: mol_type = other DNA
ggttaattttagcagggagg

SEQ ID NO: 16145 - DNA, 20 bp, synthetic construct
  misc_feature 1..20: note = chemically synthesized
  source 1..20: mol_type = other DNA
aattttagcagggaggcagc

SEQ ID NO: 16146 - DNA, 20 bp, synthetic construct
  misc_feature 1..20: note = chemically synthesized
  source 1..20: mol_type = other DNA
attttagcagggaggcagct

SEQ ID NO: 16147 - DNA, 20 bp, synthetic construct
  misc_feature 1..20: note = chemically synthesized
  source 1..20: mol_type = other DNA
cagggaggcagctaggtgtg

SEQ ID NO: 16148 - DNA, 20 bp, synthetic construct
  misc_feature 1..20: note = chemically synthesized
  source 1..20: mol_type = other DNA
agggaggcagctaggtgtgt

SEQ ID NO: 16149 - DNA, 20 bp, synthetic construct
  misc_feature 1..20: note = chemically synthesized
  source 1..20: mol_type = other DNA
agctaggtgtgtgggtttct

SEQ ID NO: 16150 - DNA, 20 bp, synthetic construct
  misc_feature 1..20: note = chemically synthesized
  source 1..20: mol_type = other DNA
taggtgtgtgggtttctcgg

SEQ ID NO: 16151 - DNA, 20 bp, synthetic construct
  misc_feature 1..20: note = chemically synthesized
  source 1..20: mol_type = other DNA
tgtgggtttctcggcagctc

SEQ ID NO: 16152 - DNA, 20 bp, synthetic construct
  misc_feature 1..20: note = chemically synthesized
  source 1..20: mol_type = other DNA
gtgggtttctcggcagctca

SEQ ID NO: 16153 - DNA, 20 bp, synthetic construct
  misc_feature 1..20: note = chemically synthesized
  source 1..20: mol_type = other DNA
tgggtttctcggcagctcaa

SEQ ID NO: 16154 - DNA, 20 bp, synthetic construct
  misc_feature 1..20: note = chemically synthesized
  source 1..20: mol_type = other DNA
ttctcggcagctcaagggaa

SEQ ID NO: 16155 - DNA, 20 bp, synthetic construct
  misc_feature 1..20: note = chemically synthesized
  source 1..20: mol_type = other DNA
tctcggcagctcaagggaaa

SEQ ID NO: 16156 - DNA, 20 bp, synthetic construct
  misc_feature 1..20: note = chemically synthesized
  source 1..20: mol_type = other DNA
gctcaagggaaaaggaatta

SEQ ID NO: 16157 - DNA, 20 bp, synthetic construct
  misc_feature 1..20: note = chemically synthesized
  source 1..20: mol_type = other DNA
ctcaagggaaaaggaattaa

SEQ ID NO: 16158 - DNA, 20 bp, synthetic construct
  misc_feature 1..20: note = chemically synthesized
  source 1..20: mol_type = other DNA
agggaaaaggaattaaaggc

SEQ ID NO: 16159 - DNA, 20 bp, synthetic construct
  misc_feature 1..20: note = chemically synthesized
  source 1..20: mol_type = other DNA
gaaaaggaattaaaggctag

SEQ ID NO: 16160 - DNA, 20 bp, synthetic construct
  misc_feature 1..20: note = chemically synthesized
  source 1..20: mol_type = other DNA
aaggaattaaaggctagcag

SEQ ID NO: 16161 - DNA, 20 bp, synthetic construct
  misc_feature 1..20: note = chemically synthesized
  source 1..20: mol_type = other DNA
aggaattaaaggctagcagt

SEQ ID NO: 16162 - DNA, 20 bp, synthetic construct
  misc_feature 1..20: note = chemically synthesized
  source 1..20: mol_type = other DNA
ggacttaaattcccttctct

SEQ ID NO: 16163 - DNA, 20 bp, synthetic construct
  misc_feature 1..20: note = chemically synthesized
  source 1..20: mol_type = other DNA
tcccttctctaagtgataaa

SEQ ID NO: 16164 - DNA, 20 bp, synthetic construct
  misc_feature 1..20: note = chemically synthesized
  source 1..20: mol_type = other DNA
tgataaacagtaacactata

SEQ ID NO: 16165 - DNA, 20 bp, synthetic construct
  misc_feature 1..20: note = chemically synthesized
  source 1..20: mol_type = other DNA
cctcaaaacattttttgctt

SEQ ID NO: 16166 - DNA, 20 bp, synthetic construct
  misc_feature 1..20: note = chemically synthesized
  source 1..20: mol_type = other DNA
cattttttgcttgagcatgt

SEQ ID NO: 16167 - DNA, 20 bp, synthetic construct
  misc_feature 1..20: note = chemically synthesized
  source 1..20: mol_type = other DNA
tgcttgagcatgttagacaa

SEQ ID NO: 16168 - DNA, 20 bp, synthetic construct
  misc_feature 1..20: note = chemically synthesized
  source 1..20: mol_type = other DNA
atgttagacaaaagtcaatg

SEQ ID NO: 16169 - DNA, 20 bp, synthetic construct
  misc_feature 1..20: note = chemically synthesized
  source 1..20: mol_type = other DNA
caatgcagattctgtgatga

SEQ ID NO: 16170 - DNA, 20 bp, synthetic construct
  misc_feature 1..20: note = chemically synthesized
  source 1..20: mol_type = other DNA
gacagacatgccatgcctgt

SEQ ID NO: 16171 - DNA, 20 bp, synthetic construct
  misc_feature 1..20: note = chemically synthesized
  source 1..20: mol_type = other DNA
agacatgccatgcctgttgg

SEQ ID NO: 16172 - DNA, 20 bp, synthetic construct
  misc_feature 1..20: note = chemically synthesized
  source 1..20: mol_type = other DNA
tcttccatctacctaccacc

SEQ ID NO: 16173 - DNA, 20 bp, synthetic construct
  misc_feature 1..20: note = chemically synthesized
  source 1..20: mol_type = other DNA
acctaccacccagctcccga

SEQ ID NO: 16174 - DNA, 20 bp, synthetic construct
  misc_feature 1..20: note = chemically synthesized
  source 1..20: mol_type = other DNA
cctaccacccagctcccgaa

SEQ ID NO: 16175 - DNA, 20 bp, synthetic construct
  misc_feature 1..20: note = chemically synthesized
  source 1..20: mol_type = other DNA
ccacccagctcccgaaaggc

SEQ ID NO: 16176 - DNA, 20 bp, synthetic construct
  misc_feature 1..20: note = chemically synthesized
  source 1..20: mol_type = other DNA
acccagctcccgaaaggcaa

SEQ ID NO: 16177 - DNA, 20 bp, synthetic construct
  misc_feature 1..20: note = chemically synthesized
  source 1..20: mol_type = other DNA
cccagctcccgaaaggcaag

SEQ ID NO: 16178 - DNA, 20 bp, synthetic construct
  misc_feature 1..20: note = chemically synthesized
  source 1..20: mol_type = other DNA
cgaaaggcaagaggtttgtt

SEQ ID NO: 16179 - DNA, 20 bp, synthetic construct
  misc_feature 1..20: note = chemically synthesized
  source 1..20: mol_type = other DNA
gcaagaggtttgttcagttt

SEQ ID NO: 16180 - DNA, 20 bp, synthetic construct
  misc_feature 1..20: note = chemically synthesized
  source 1..20: mol_type = other DNA
caagaggtttgttcagtttt

SEQ ID NO: 16181 - DNA, 20 bp, synthetic construct
  misc_feature 1..20: note = chemically synthesized
  source 1..20: mol_type = other DNA
aggtttgttcagttttagga

SEQ ID NO: 16182 - DNA, 20 bp, synthetic construct
  misc_feature 1..20: note = chemically synthesized
  source 1..20: mol_type = other DNA
ggtttgttcagttttaggaa

SEQ ID NO: 16183 - DNA, 20 bp, synthetic construct
  misc_feature 1..20: note = chemically synthesized
  source 1..20: mol_type = other DNA
ttgttcagttttaggaaagg

SEQ ID NO: 16184 - DNA, 20 bp, synthetic construct
  misc_feature 1..20: note = chemically synthesized
  source 1..20: mol_type = other DNA
catatcatgaattgattcac

SEQ ID NO: 16185 - DNA, 20 bp, synthetic construct
  misc_feature 1..20: note = chemically synthesized
  source 1..20: mol_type = other DNA
tggaacttgtctctccgacc

SEQ ID NO: 16186 - DNA, 20 bp, synthetic construct
  misc_feature 1..20: note = chemically synthesized
  source 1..20: mol_type = other DNA
tccgacctagtttgaccaca

SEQ ID NO: 16187 - DNA, 20 bp, synthetic construct
  misc_feature 1..20: note = chemically synthesized
  source 1..20: mol_type = other DNA
accacaaagttgaaccataa

SEQ ID NO: 16188 - DNA, 20 bp, synthetic construct
  misc_feature 1..20: note = chemically synthesized
  source 1..20: mol_type = other DNA
ccacaaagttgaaccataat

SEQ ID NO: 16189 - DNA, 20 bp, synthetic construct
  misc_feature 1..20: note = chemically synthesized
  source 1..20: mol_type = other DNA
aaagttgaaccataataggt

SEQ ID NO: 16190 - DNA, 20 bp, synthetic construct
  misc_feature 1..20: note = chemically synthesized
  source 1..20: mol_type = other DNA
gttgaaccataataggtcag

SEQ ID NO: 16191 - DNA, 20 bp, synthetic construct
  misc_feature 1..20: note = chemically synthesized
  source 1..20: mol_type = other DNA
accataataggtcagtggtc

SEQ ID NO: 16192 - DNA, 20 bp, synthetic construct
  misc_feature 1..20: note = chemically synthesized
  source 1..20: mol_type = other DNA
cataataggtcagtggtcta

SEQ ID NO: 16193 - DNA, 20 bp, synthetic construct
  misc_feature 1..20: note = chemically synthesized
  source 1..20: mol_type = other DNA
ataataggtcagtggtctag

SEQ ID NO: 16194 - DNA, 20 bp, synthetic construct
  misc_feature 1..20: note = chemically synthesized
  source 1..20: mol_type = other DNA
taataggtcagtggtctaga

SEQ ID NO: 16195 - DNA, 20 bp, synthetic construct
  misc_feature 1..20: note = chemically synthesized
  source 1..20: mol_type = other DNA
aataggtcagtggtctagag

SEQ ID NO: 16196 - DNA, 20 bp, synthetic construct
  misc_feature 1..20: note = chemically synthesized
  source 1..20: mol_type = other DNA
ttatttctcctctccccctc

SEQ ID NO: 16197 - DNA, 20 bp, synthetic construct
  misc_feature 1..20: note = chemically synthesized
  source 1..20: mol_type = other DNA
ttgatcattaaaaccaaaca

SEQ ID NO: 16198 - DNA, 20 bp, synthetic construct
  misc_feature 1..20: note = chemically synthesized
  source 1..20: mol_type = other DNA
tggcattttctttctttttt

SEQ ID NO: 16199 - DNA, 20 bp, synthetic construct
  misc_feature 1..20: note = chemically synthesized
  source 1..20: mol_type = other DNA
ttttttagtgctttctgtga

SEQ ID NO: 16200 - DNA, 20 bp, synthetic construct
  misc_feature 1..20: note = chemically synthesized
  source 1..20: mol_type = other DNA
gtgctttctgtgatagcact

SEQ ID NO: 16201 - DNA, 20 bp, synthetic construct
  misc_feature 1..20: note = chemically synthesized
  source 1..20: mol_type = other DNA
gcactcagatactttccctt

SEQ ID NO: 16202 - DNA, 20 bp, synthetic construct
  misc_feature 1..20: note = chemically synthesized
  source 1..20: mol_type = other DNA
atactttccctttagtgaaa

SEQ ID NO: 16203 - DNA, 20 bp, synthetic construct
  misc_feature 1..20: note = chemically synthesized
  source 1..20: mol_type = other DNA
tactttccctttagtgaaat

SEQ ID NO: 16204 - DNA, 20 bp, synthetic construct
  misc_feature 1..20: note = chemically synthesized
  source 1..20: mol_type = other DNA
tgaaatgggaaatctgctgc

SEQ ID NO: 16205 - DNA, 20 bp, synthetic construct
  misc_feature 1..20: note = chemically synthesized
  source 1..20: mol_type = other DNA
gaaatgggaaatctgctgct

SEQ ID NO: 16206 - DNA, 20 bp, synthetic construct
  misc_feature 1..20: note = chemically synthesized
  source 1..20: mol_type = other DNA
aaatgggaaatctgctgcta

SEQ ID NO: 16207 - DNA, 20 bp, synthetic construct
  misc_feature 1..20: note = chemically synthesized
  source 1..20: mol_type = other DNA
tgggaaatctgctgctaggg

SEQ ID NO: 16208 - DNA, 20 bp, synthetic construct
  misc_feature 1..20: note = chemically synthesized
  source 1..20: mol_type = other DNA
tgctagggaagctgcatttg

SEQ ID NO: 16209 - DNA, 20 bp, synthetic construct
  misc_feature 1..20: note = chemically synthesized
  source 1..20: mol_type = other DNA
ctagggaagctgcatttgtg

SEQ ID NO: 16210 - DNA, 20 bp, synthetic construct
  misc_feature 1..20: note = chemically synthesized
  source 1..20: mol_type = other DNA
catttaccttatgtgacatg

SEQ ID NO: 16211 - DNA, 20 bp, synthetic construct
  misc_feature 1..20: note = chemically synthesized
  source 1..20: mol_type = other DNA
atttaccttatgtgacatgt

SEQ ID NO: 16212 - DNA, 20 bp, synthetic construct
  misc_feature 1..20: note = chemically synthesized
  source 1..20: mol_type = other DNA
ccttatgtgacatgtaggtg

SEQ ID NO: 16213 - DNA, 20 bp, synthetic construct
  misc_feature 1..20: note = chemically synthesized
  source 1..20: mol_type = other DNA
attttatctcccctaccccc

SEQ ID NO: 16214 - DNA, 20 bp, synthetic construct
  misc_feature 1..20: note = chemically synthesized
  source 1..20: mol_type = other DNA
ttatctcccctaccccccag

SEQ ID NO: 16215 - DNA, 20 bp, synthetic construct
  misc_feature 1..20: note = chemically synthesized
  source 1..20: mol_type = other DNA
tatctcccctaccccccagc

SEQ ID NO: 16216 - DNA, 20 bp, synthetic construct
  misc_feature 1..20: note = chemically synthesized
  source 1..20: mol_type = other DNA
ccctaccccccagcaggatg

SEQ ID NO: 16217 - DNA, 20 bp, synthetic construct
  misc_feature 1..20: note = chemically synthesized
  source 1..20: mol_type = other DNA
cctaccccccagcaggatgt

SEQ ID NO: 16218 - DNA, 20 bp, synthetic construct
  misc_feature 1..20: note = chemically synthesized
  source 1..20: mol_type = other DNA
tccatgtgttgtcttgtgac

SEQ ID NO: 16219 - DNA, 20 bp, synthetic construct
  misc_feature 1..20: note = chemically synthesized
  source 1..20: mol_type = other DNA
atgtgttgtcttgtgactgg

SEQ ID NO: 16220 - DNA, 20 bp, synthetic construct
  misc_feature 1..20: note = chemically synthesized
  source 1..20: mol_type = other DNA
tgtgttgtcttgtgactgga

SEQ ID NO: 16221 - DNA, 20 bp, synthetic construct
  misc_feature 1..20: note = chemically synthesized
  source 1..20: mol_type = other DNA
gtgactggaaggaaaatgaa

SEQ ID NO: 16222 - DNA, 20 bp, synthetic construct
  misc_feature 1..20: note = chemically synthesized
  source 1..20: mol_type = other DNA
actggaaggaaaatgaacag

SEQ ID NO: 16223 - DNA, 20 bp, synthetic construct
  misc_feature 1..20: note = chemically synthesized
  source 1..20: mol_type = other DNA
aggaaaatgaacagaagtgt

SEQ ID NO: 16224 - DNA, 20 bp, synthetic construct
  misc_feature 1..20: note = chemically synthesized
  source 1..20: mol_type = other DNA
ggaaaatgaacagaagtgta

SEQ ID NO: 16225 - DNA, 20 bp, synthetic construct
  misc_feature 1..20: note = chemically synthesized
  source 1..20: mol_type = other DNA
agtgtaaggcatgattaatg

SEQ ID NO: 16226 - DNA, 20 bp, synthetic construct
  misc_feature 1..20: note = chemically synthesized
  source 1..20: mol_type = other DNA
taaggcatgattaatgaagc

SEQ ID NO: 16227 - DNA, 20 bp, synthetic construct
  misc_feature 1..20: note = chemically synthesized
  source 1..20: mol_type = other DNA
aggcatgattaatgaagcaa

SEQ ID NO: 16228 - DNA, 20 bp, synthetic construct
  misc_feature 1..20: note = chemically synthesized
  source 1..20: mol_type = other DNA
catgattaatgaagcaagag

SEQ ID NO: 16229 - DNA, 20 bp, synthetic construct
  misc_feature 1..20: note = chemically synthesized
  source 1..20: mol_type = other DNA
atgattaatgaagcaagagc

SEQ ID NO: 16230 - DNA, 20 bp, synthetic construct
  misc_feature 1..20: note = chemically synthesized
  source 1..20: mol_type = other DNA
attaatgaagcaagagcagg

SEQ ID NO: 16231 - DNA, 20 bp, synthetic construct
  misc_feature 1..20: note = chemically synthesized
  source 1..20: mol_type = other DNA
aatgaagcaagagcaggcgg

SEQ ID NO: 16232 - DNA, 20 bp, synthetic construct
  misc_feature 1..20: note = chemically synthesized
  source 1..20: mol_type = other DNA
atgaagcaagagcaggcgga

SEQ ID NO: 16233 - DNA, 20 bp, synthetic construct
  misc_feature 1..20: note = chemically synthesized
  source 1..20: mol_type = other DNA
tgaagcaagagcaggcggaa

SEQ ID NO: 16234 - DNA, 20 bp, synthetic construct
  misc_feature 1..20: note = chemically synthesized
  source 1..20: mol_type = other DNA
gaagcaagagcaggcggaag

SEQ ID NO: 16235 - DNA, 20 bp, synthetic construct
  misc_feature 1..20: note = chemically synthesized
  source 1..20: mol_type = other DNA
ggaaggggatttgtcgtctt

SEQ ID NO: 16236 - DNA, 20 bp, synthetic construct
  misc_feature 1..20: note = chemically synthesized
  source 1..20: mol_type = other DNA
aaggggatttgtcgtcttcg

SEQ ID NO: 16237 - DNA, 20 bp, synthetic construct
  misc_feature 1..20: note = chemically synthesized
  source 1..20: mol_type = other DNA
ttgtcgtcttcggagatcca

SEQ ID NO: 16238 - DNA, 20 bp, synthetic construct
  misc_feature 1..20: note = chemically synthesized
  source 1..20: mol_type = other DNA
ccttgctaaatcaccaaata

SEQ ID NO: 16239 - DNA, 20 bp, synthetic construct
  misc_feature 1..20: note = chemically synthesized
  source 1..20: mol_type = other DNA
ttgctaaatcaccaaatatg

SEQ ID NO: 16240 - DNA, 20 bp, synthetic construct
  misc_feature 1..20: note = chemically synthesized
  source 1..20: mol_type = other DNA
taacatcgtatttacatatc

SEQ ID NO: 16241 - DNA, 20 bp, synthetic construct
  misc_feature 1..20: note = chemically synthesized
  source 1..20: mol_type = other DNA
atatcgagctgctcgtttaa

SEQ ID NO: 16242 - DNA, 20 bp, synthetic construct
  misc_feature 1..20: note = chemically synthesized
  source 1..20: mol_type = other DNA
ctcgtttaaaagacaaaaca

SEQ ID NO: 16243 - DNA, 20 bp, synthetic construct
  misc_feature 1..20: note = chemically synthesized
  source 1..20: mol_type = other DNA
gacaaaacacagtgtctgtc

SEQ ID NO: 16244 - DNA, 20 bp, synthetic construct
  misc_feature 1..20: note = chemically synthesized
  source 1..20: mol_type = other DNA
aaacacagtgtctgtcaagc

SEQ ID NO: 16245 - DNA, 20 bp, synthetic construct
  misc_feature 1..20: note = chemically synthesized
  source 1..20: mol_type = other DNA
ttaaaaccacacttcttact

SEQ ID NO: 16246 - DNA, 20 bp, synthetic construct
  misc_feature 1..20: note = chemically synthesized
  source 1..20: mol_type = other DNA
taaaaccacacttcttactg

SEQ ID NO: 16247 - DNA, 20 bp, synthetic construct
  misc_feature 1..20: note = chemically synthesized
  source 1..20: mol_type = other DNA
cttcttactgaggtcccaaa

SEQ ID NO: 16248 - DNA, 20 bp, synthetic construct
  misc_feature 1..20: note = chemically synthesized
  source 1..20: mol_type = other DNA
ttcttactgaggtcccaaat

SEQ ID NO: 16249 - DNA, 20 bp, synthetic construct
  misc_feature 1..20: note = chemically synthesized
  source 1..20: mol_type = other DNA
gaggtcccaaataggttatt

SEQ ID NO: 16250 - DNA, 20 bp, synthetic construct
  misc_feature 1..20: note = chemically synthesized
  source 1..20: mol_type = other DNA
ccaaataggttattcagtct

SEQ ID NO: 16251 - DNA, 20 bp, synthetic construct
  misc_feature 1..20: note = chemically synthesized
  source 1..20: mol_type = other DNA
ttattcagtcttagattaac

SEQ ID NO: 16252 - DNA, 20 bp, synthetic construct
  misc_feature 1..20: note = chemically synthesized
  source 1..20: mol_type = other DNA
aaattctgtgcctctgtatt

SEQ ID NO: 16253 - DNA, 20 bp, synthetic construct
  misc_feature 1..20: note = chemically synthesized
  source 1..20: mol_type = other DNA
attctgtgcctctgtattta

SEQ ID NO: 16254 - DNA, 20 bp, synthetic construct
  misc_feature 1..20: note = chemically synthesized
  source 1..20: mol_type = other DNA
ttctgtgcctctgtatttag

SEQ ID NO: 16255 - DNA, 20 bp, synthetic construct
  misc_feature 1..20: note = chemically synthesized
  source 1..20: mol_type = other DNA
ctgtgcctctgtatttagag

SEQ ID NO: 16256 - DNA, 20 bp, synthetic construct
  misc_feature 1..20: note = chemically synthesized
  source 1..20: mol_type = other DNA
tgtgcctctgtatttagagg

SEQ ID NO: 16257 - DNA, 20 bp, synthetic construct
  misc_feature 1..20: note = chemically synthesized
  source 1..20: mol_type = other DNA
tagaggaggaatctaaatgc

SEQ ID NO: 16258 - DNA, 20 bp, synthetic construct
  misc_feature 1..20: note = chemically synthesized
  source 1..20: mol_type = other DNA
agaggaggaatctaaatgct

SEQ ID NO: 16259 - DNA, 20 bp, synthetic construct
  misc_feature 1..20: note = chemically synthesized
  source 1..20: mol_type = other DNA
gaggaggaatctaaatgctg

SEQ ID NO: 16260 - DNA, 20 bp, synthetic construct
  misc_feature 1..20: note = chemically synthesized
  source 1..20: mol_type = other DNA
aggaggaatctaaatgctgg

SEQ ID NO: 16261 - DNA, 20 bp, synthetic construct
  misc_feature 1..20: note = chemically synthesized
  source 1..20: mol_type = other DNA
ggaggaatctaaatgctggg

SEQ ID NO: 16262 - DNA, 20 bp, synthetic construct
  misc_feature 1..20: note = chemically synthesized
  source 1..20: mol_type = other DNA
ggaatctaaatgctgggggg

SEQ ID NO: 16263 - DNA, 20 bp, synthetic construct
  misc_feature 1..20: note = chemically synthesized
  source 1..20: mol_type = other DNA
gaatctaaatgctgggggga

SEQ ID NO: 16264 - DNA, 20 bp, synthetic construct
  misc_feature 1..20: note = chemically synthesized
  source 1..20: mol_type = other DNA
tggggggaaggccttacata

SEQ ID NO: 16265 - DNA, 20 bp, synthetic construct
  misc_feature 1..20: note = chemically synthesized
  source 1..20: mol_type = other DNA
ggaaggccttacatatagtt

SEQ ID NO: 16266 - DNA, 20 bp, synthetic construct
  misc_feature 1..20: note = chemically synthesized
  source 1..20: mol_type = other DNA
agttaagacttttactgcta

SEQ ID NO: 16267 - DNA, 20 bp, synthetic construct
  misc_feature 1..20: note = chemically synthesized
  source 1..20: mol_type = other DNA
gctatagttgtgaatctatg

SEQ ID NO: 16268 - DNA, 20 bp, synthetic construct
  misc_feature 1..20: note = chemically synthesized
  source 1..20: mol_type = other DNA
ctatagttgtgaatctatgt

SEQ ID NO: 16269 - DNA, 20 bp, synthetic construct
  misc_feature 1..20: note = chemically synthesized
  source 1..20: mol_type = other DNA
tatagttgtgaatctatgta

SEQ ID NO: 16270 - DNA, 20 bp, synthetic construct
  misc_feature 1..20: note = chemically synthesized
  source 1..20: mol_type = other DNA
gtgaatctatgtagggaaat

SEQ ID NO: 16271 - DNA, 20 bp, synthetic construct
  misc_feature 1..20: note = chemically synthesized
  source 1..20: mol_type = other DNA
gaatctatgtagggaaataa

SEQ ID NO: 16272 - DNA, 20 bp, synthetic construct
  misc_feature 1..20: note = chemically synthesized
  source 1..20: mol_type = other DNA
agatatttgcttgaactccc

SEQ ID NO: 16273 - DNA, 20 bp, synthetic construct
  misc_feature 1..20: note = chemically synthesized
  source 1..20: mol_type = other DNA
ttgaactccctggttgtcta

SEQ ID NO: 16274 - DNA, 20 bp, synthetic construct
  misc_feature 1..20: note = chemically synthesized
  source 1..20: mol_type = other DNA
tgaactccctggttgtctaa

SEQ ID NO: 16275 - DNA, 20 bp, synthetic construct
  misc_feature 1..20: note = chemically synthesized
  source 1..20: mol_type = other DNA
gttctgttattattttttta

SEQ ID NO: 16276 - DNA, 20 bp, synthetic construct
  misc_feature 1..20: note = chemically synthesized
  source 1..20: mol_type = other DNA
ttattatttttttaaagaac

SEQ ID NO: 16277 - DNA, 20 bp, synthetic construct
  misc_feature 1..20: note = chemically synthesized
  source 1..20: mol_type = other DNA
tttttaaagaacaagtataa

SEQ ID NO: 16278 - DNA, 20 bp, synthetic construct
  misc_feature 1..20: note = chemically synthesized
  source 1..20: mol_type = other DNA
ttaaagaacaagtataatag

SEQ ID NO: 16279 - DNA, 20 bp, synthetic construct
  misc_feature 1..20: note = chemically synthesized
  source 1..20: mol_type = other DNA
aaagaacaagtataatagca

SEQ ID NO: 16280 - DNA, 20 bp, synthetic construct
  misc_feature 1..20: note = chemically synthesized
  source 1..20: mol_type = other DNA
acaagtataatagcagagcc

SEQ ID NO: 16281 - DNA, 20 bp, synthetic construct
  misc_feature 1..20: note = chemically synthesized
  source 1..20: mol_type = other DNA
aagtataatagcagagccta

SEQ ID NO: 16282 - DNA, 20 bp, synthetic construct
  misc_feature 1..20: note = chemically synthesized
  source 1..20: mol_type = other DNA
tataatagcagagcctagag

SEQ ID NO: 16283 - DNA, 20 bp, synthetic construct
  misc_feature 1..20: note = chemically synthesized
  source 1..20: mol_type = other DNA
cctagagaagccaaaaccaa

SEQ ID NO: 16284 - DNA, 20 bp, synthetic construct
  misc_feature 1..20: note = chemically synthesized
  source 1..20: mol_type = other DNA
caaatttaaaatatatttta

SEQ ID NO: 16285 - DNA, 20 bp, synthetic construct
  misc_feature 1..20: note = chemically synthesized
  source 1..20: mol_type = other DNA
taataatcaatcatttaact

SEQ ID NO: 16286 - DNA, 20 bp, synthetic construct
  misc_feature 1..20: note = chemically synthesized
  source 1..20: mol_type = other DNA
aatcatttaactgagacgaa

SEQ ID NO: 16287 - DNA, 20 bp, synthetic construct
  misc_feature 1..20: note = chemically synthesized
  source 1..20: mol_type = other DNA
actgagacgaaaagctctct

SEQ ID NO: 16288 - DNA, 20 bp, synthetic construct
  misc_feature 1..20: note = chemically synthesized
  source 1..20: mol_type = other DNA
aaaagctctctaagatgtct

SEQ ID NO: 16289 - DNA, 20 bp, synthetic construct
  misc_feature 1..20: note = chemically synthesized
  source 1..20: mol_type = other DNA
aagatgtctaagatattcaa

SEQ ID NO: 16290 - DNA, 20 bp, synthetic construct
  misc_feature 1..20: note = chemically synthesized
  source 1..20: mol_type = other DNA
agatgtctaagatattcaat

SEQ ID NO: 16291 - DNA, 20 bp, synthetic construct
  misc_feature 1..20: note = chemically synthesized
  source 1..20: mol_type = other DNA
atattcaatgggcgcacaac

SEQ ID NO: 16292 - DNA, 20 bp, synthetic construct
  misc_feature 1..20: note = chemically synthesized
  source 1..20: mol_type = other DNA
gcacaacaagtgctgtgacc

SEQ ID NO: 16293 - DNA, 20 bp, synthetic construct
  misc_feature 1..20: note = chemically synthesized
  source 1..20: mol_type = other DNA
cacaacaagtgctgtgaccc

SEQ ID NO: 16294 - DNA, 20 bp, synthetic construct
  misc_feature 1..20: note = chemically synthesized
  source 1..20: mol_type = other DNA
acaagtgctgtgacccaggt

SEQ ID NO: 16295 - DNA, 20 bp, synthetic construct
  misc_feature 1..20: note = chemically synthesized
  source 1..20: mol_type = other DNA
caagtgctgtgacccaggtg

SEQ ID NO: 16296 - DNA, 20 bp, synthetic construct
  misc_feature 1..20: note = chemically synthesized
  source 1..20: mol_type = other DNA
ttcgtgcatgaataattaca

SEQ ID NO: 16297 - DNA, 20 bp, synthetic construct
  misc_feature 1..20: note = chemically synthesized
  source 1..20: mol_type = other DNA
ttaatcacctgttcccaccc

SEQ ID NO: 16298 - DNA, 20 bp, synthetic construct
  misc_feature 1..20: note = chemically synthesized
  source 1..20: mol_type = other DNA
acctgttcccaccctggaac

SEQ ID NO: 16299 - DNA, 20 bp, synthetic construct
  misc_feature 1..20: note = chemically synthesized
  source 1..20: mol_type = other DNA
tggaactggctgaacataaa

SEQ ID NO: 16300 - DNA, 20 bp, synthetic construct
  misc_feature 1..20: note = chemically synthesized
  source 1..20: mol_type = other DNA
ctggctgaacataaatagtg

SEQ ID NO: 16301 - DNA, 20 bp, synthetic construct
  misc_feature 1..20: note = chemically synthesized
  source 1..20: mol_type = other DNA
aatagtgtggtcacatctca

SEQ ID NO: 16302 - DNA, 20 bp, synthetic construct
  misc_feature 1..20: note = chemically synthesized
  source 1..20: mol_type = other DNA
gtgtggtcacatctcaaagt

SEQ ID NO: 16303 - DNA, 20 bp, synthetic construct
  misc_feature 1..20: note = chemically synthesized
  source 1..20: mol_type = other DNA
cacatctcaaagtgagatgt

SEQ ID NO: 16304 - DNA, 20 bp, synthetic construct
  misc_feature 1..20: note = chemically synthesized
  source 1..20: mol_type = other DNA
caaagtgagatgtcagtaac

SEQ ID NO: 16305 - DNA, 20 bp, synthetic construct
  misc_feature 1..20: note = chemically synthesized
  source 1..20: mol_type = other DNA
tcacgacttctcataattca

SEQ ID NO: 16306 - DNA, 20 bp, synthetic construct
  misc_feature 1..20: note = chemically synthesized
  source 1..20: mol_type = other DNA
ataattcacagtaatgaatt

SEQ ID NO: 16307 - DNA, 20 bp, synthetic construct
  misc_feature 1..20: note = chemically synthesized
  source 1..20: mol_type = other DNA
aattcacagtaatgaattaa

SEQ ID NO: 16308 - DNA, 20 bp, synthetic construct
  misc_feature 1..20: note = chemically synthesized
  source 1..20: mol_type = other DNA
aatgaattaagagtttccta

SEQ ID NO: 16309 - DNA, 20 bp, synthetic construct
  misc_feature 1..20: note = chemically synthesized
  source 1..20: mol_type = other DNA
attaagagtttcctatggtg

SEQ ID NO: 16310 - DNA, 20 bp, synthetic construct
  misc_feature 1..20: note = chemically synthesized
  source 1..20: mol_type = other DNA
gcacataaattccgacgctc

SEQ ID NO: 16311 - DNA, 20 bp, synthetic construct
  misc_feature 1..20: note = chemically synthesized
  source 1..20: mol_type = other DNA
aattccgacgctctggccct

SEQ ID NO: 16312 - DNA, 20 bp, synthetic construct
  misc_feature 1..20: note = chemically synthesized
  source 1..20: mol_type = other DNA
attccgacgctctggccctc

SEQ ID NO: 16313 - DNA, 20 bp, synthetic construct
  misc_feature 1..20: note = chemically synthesized
  source 1..20: mol_type = other DNA
ctggccctcaggtgcccctg

SEQ ID NO: 16314 - DNA, 20 bp, synthetic construct
  misc_feature 1..20: note = chemically synthesized
  source 1..20: mol_type = other DNA
cctcaggtgcccctgaagcg

SEQ ID NO: 16315 - DNA, 20 bp, synthetic construct
  misc_feature 1..20: note = chemically synthesized
  source 1..20: mol_type = other DNA
gtgcccctgaagcgaagttc

SEQ ID NO: 16316 - DNA, 20 bp, synthetic construct
  misc_feature 1..20: note = chemically synthesized
  source 1..20: mol_type = other DNA
cccctgaagcgaagttctgg

SEQ ID NO: 16317 - DNA, 20 bp, synthetic construct
  misc_feature 1..20: note = chemically synthesized
  source 1..20: mol_type = other DNA
tgaagcgaagttctggaaga

SEQ ID NO: 16318 - DNA, 20 bp, synthetic construct
  misc_feature 1..20: note = chemically synthesized
  source 1..20: mol_type = other DNA
gacggctgtgtgtgtacccc

SEQ ID NO: 16319 - DNA, 20 bp, synthetic construct
  misc_feature 1..20: note = chemically synthesized
  source 1..20: mol_type = other DNA
acccccagcccatttctcta

SEQ ID NO: 16320 - DNA, 20 bp, synthetic construct
  misc_feature 1..20: note = chemically synthesized
  source 1..20: mol_type = other DNA
aagcacgtctgcacaattcc

SEQ ID NO: 16321 - DNA, 20 bp, synthetic construct
  misc_feature 1..20: note = chemically synthesized
  source 1..20: mol_type = other DNA
tctgcttttctttttatgat

SEQ ID NO: 16322 - DNA, 20 bp, synthetic construct
  misc_feature 1..20: note = chemically synthesized
  source 1..20: mol_type = other DNA
ctgcttttctttttatgatg

SEQ ID NO: 16323 - DNA, 20 bp, synthetic construct
  misc_feature 1..20: note = chemically synthesized
  source 1..20: mol_type = other DNA
cttttctttttatgatgagg

SEQ ID NO: 16324 - DNA, 20 bp, synthetic construct
  misc_feature 1..20: note = chemically synthesized
  source 1..20: mol_type = other DNA
ttttctttttatgatgagga

SEQ ID NO: 16325 - DNA, 20 bp, synthetic construct
  misc_feature 1..20: note = chemically synthesized
  source 1..20: mol_type = other DNA
gatgaggaaggaaacaataa

SEQ ID NO: 16326 - DNA, 20 bp, synthetic construct
  misc_feature 1..20: note = chemically synthesized
  source 1..20: mol_type = other DNA
aaacaataacagtaatcatt

SEQ ID NO: 16327 - DNA, 20 bp, synthetic construct
  misc_feature 1..20: note = chemically synthesized
  source 1..20: mol_type = other DNA
caataacagtaatcattcag

SEQ ID NO: 16328 - DNA, 20 bp, synthetic construct
  misc_feature 1..20: note = chemically synthesized
  source 1..20: mol_type = other DNA
tatttgaattgtgtcacaaa

SEQ ID NO: 16329 - DNA, 20 bp, synthetic construct
  misc_feature 1..20: note = chemically synthesized
  source 1..20: mol_type = other DNA
tgaattgtgtcacaaaaaga

SEQ ID NO: 16330 - DNA, 20 bp, synthetic construct
  misc_feature 1..20: note = chemically synthesized
  source 1..20: mol_type = other DNA
gaattgtgtcacaaaaagaa

SEQ ID NO: 16331 - DNA, 20 bp, synthetic construct
  misc_feature 1..20: note = chemically synthesized
  source 1..20: mol_type = other DNA
attgtgtcacaaaaagaaag

SEQ ID NO: 16332 - DNA, 20 bp, synthetic construct
  misc_feature 1..20: note = chemically synthesized
  source 1..20: mol_type = other DNA
gtgtcacaaaaagaaaggag

SEQ ID NO: 16333 - DNA, 20 bp, synthetic construct
  misc_feature 1..20: note = chemically synthesized
  source 1..20: mol_type = other DNA
gagaagcaatgccttgtatt

SEQ ID NO: 16334 - DNA, 20 bp, synthetic construct
  misc_feature 1..20: note = chemically synthesized
  source 1..20: mol_type = other DNA
agaagcaatgccttgtatta

SEQ ID NO: 16335 - DNA, 20 bp, synthetic construct
  misc_feature 1..20: note = chemically synthesized
  source 1..20: mol_type = other DNA
gcaatgccttgtattaagga

SEQ ID NO: 16336 - DNA, 20 bp, synthetic construct
  misc_feature 1..20: note = chemically synthesized
  source 1..20: mol_type = other DNA
aatgccttgtattaaggaaa

SEQ ID NO: 16337 - DNA, 20 bp, synthetic construct
  misc_feature 1..20: note = chemically synthesized
  source 1..20: mol_type = other DNA
gagatatattgatgaatctc

SEQ ID NO: 16338 - DNA, 20 bp, synthetic construct
  misc_feature 1..20: note = chemically synthesized
  source 1..20: mol_type = other DNA
atatattgatgaatctctag

SEQ ID NO: 16339 - DNA, 20 bp, synthetic construct
  misc_feature 1..20: note = chemically synthesized
  source 1..20: mol_type = other DNA
aatctctagaagaatgtgtt

SEQ ID NO: 16340 - DNA, 20 bp, synthetic construct
  misc_feature 1..20: note = chemically synthesized
  source 1..20: mol_type = other DNA
tgtgtttggcaaccacataa

SEQ ID NO: 16341 - DNA, 20 bp, synthetic construct
  misc_feature 1..20: note = chemically synthesized
  source 1..20: mol_type = other DNA
gtgtttggcaaccacataaa

SEQ ID NO: 16342 - DNA, 20 bp, synthetic construct
  misc_feature 1..20: note = chemically synthesized
  source 1..20: mol_type = other DNA
tttggcaaccacataaaagg

SEQ ID NO: 16343 - DNA, 20 bp, synthetic construct
  misc_feature 1..20: note = chemically synthesized
  source 1..20: mol_type = other DNA
cacataaaaggtagtcattt

SEQ ID NO: 16344 - DNA, 20 bp, synthetic construct
  misc_feature 1..20: note = chemically synthesized
  source 1..20: mol_type = other DNA
aggtagtcatttaagcgtgc

SEQ ID NO: 16345 - DNA, 20 bp, synthetic construct
  misc_feature 1..20: note = chemically synthesized
  source 1..20: mol_type = other DNA
ggtagtcatttaagcgtgct

SEQ ID NO: 16346 - DNA, 20 bp, synthetic construct
  misc_feature 1..20: note = chemically synthesized
  source 1..20: mol_type = other DNA
agtcatttaagcgtgctggg

SEQ ID NO: 16347 - DNA, 20 bp, synthetic construct
  misc_feature 1..20: note = chemically synthesized
  source 1..20: mol_type = other DNA
gtcatttaagcgtgctgggt

SEQ ID NO: 16348 - DNA, 20 bp, synthetic construct
  misc_feature 1..20: note = chemically synthesized
  source 1..20: mol_type = other DNA
tttaagcgtgctgggtagga

SEQ ID NO: 16349 - DNA, 20 bp, synthetic construct
  misc_feature 1..20: note = chemically synthesized
  source 1..20: mol_type = other DNA
ttaagcgtgctgggtaggaa

SEQ ID NO: 16350 - DNA, 20 bp, synthetic construct
  misc_feature 1..20: note = chemically synthesized
  source 1..20: mol_type = other DNA
gggtaggaaaggctttatta

SEQ ID NO: 16351 - DNA, 20 bp, synthetic construct
  misc_feature 1..20: note = chemically synthesized
  source 1..20: mol_type = other DNA
aggctttattaaagtgatgt

SEQ ID NO: 16352 - DNA, 20 bp, synthetic construct
  misc_feature 1..20: note = chemically synthesized
  source 1..20: mol_type = other DNA
tttattaaagtgatgtaagt

SEQ ID NO: 16353 - DNA, 20 bp, synthetic construct
  misc_feature 1..20: note = chemically synthesized
  source 1..20: mol_type = other DNA
aagtgatgtaagttggattt

SEQ ID NO: 16354 - DNA, 20 bp, synthetic construct
  misc_feature 1..20: note = chemically synthesized
  source 1..20: mol_type = other DNA
gttggatttgagttcactgt

SEQ ID NO: 16355 - DNA, 20 bp, synthetic construct
  misc_feature 1..20: note = chemically synthesized
  source 1..20: mol_type = other DNA
tgtgagcctgtactatttta

SEQ ID NO: 16356 - DNA, 20 bp, synthetic construct
  misc_feature 1..20: note = chemically synthesized
  source 1..20: mol_type = other DNA
gtgagcctgtactattttat

SEQ ID NO: 16357 - DNA, 20 bp, synthetic construct
  misc_feature 1..20: note = chemically synthesized
  source 1..20: mol_type = other DNA
agcctgtactattttatagg

SEQ ID NO: 16358 - DNA, 20 bp, synthetic construct
  misc_feature 1..20: note = chemically synthesized
  source 1..20: mol_type = other DNA
gcctgtactattttataggc

SEQ ID NO: 16359 - DNA, 20 bp, synthetic construct
  misc_feature 1..20: note = chemically synthesized
  source 1..20: mol_type = other DNA
tgtactattttataggcagg

SEQ ID NO: 16360 - DNA, 20 bp, synthetic construct
  misc_feature 1..20: note = chemically synthesized
  source 1..20: mol_type = other DNA
ctattttataggcaggaagc

SEQ ID NO: 16361 - DNA, 20 bp, synthetic construct
  misc_feature 1..20: note = chemically synthesized
  source 1..20: mol_type = other DNA
ggcaggaagcaagaataaaa

SEQ ID NO: 16362 - DNA, 20 bp, synthetic construct
  misc_feature 1..20: note = chemically synthesized
  source 1..20: mol_type = other DNA
aagcaagaataaaacagtga

SEQ ID NO: 16363 - DNA, 20 bp, synthetic construct
  misc_feature 1..20: note = chemically synthesized
  source 1..20: mol_type = other DNA
cagtgacagatcttcttcct

SEQ ID NO: 16364 - DNA, 20 bp, synthetic construct
  misc_feature 1..20: note = chemically synthesized
  source 1..20: mol_type = other DNA
tcttcttcctaagataaata

SEQ ID NO: 16365 - DNA, 20 bp, synthetic construct
  misc_feature 1..20: note = chemically synthesized
  source 1..20: mol_type = other DNA
ttcctaagataaataaagct

SEQ ID NO: 16366 - DNA, 20 bp, synthetic construct
  misc_feature 1..20: note = chemically synthesized
  source 1..20: mol_type = other DNA
gataaataaagcttagaatt

SEQ ID NO: 16367 - DNA, 20 bp, synthetic construct
  misc_feature 1..20: note = chemically synthesized
  source 1..20: mol_type = other DNA
ataaataaagcttagaattc

SEQ ID NO: 16368 - DNA, 20 bp, synthetic construct
  misc_feature 1..20: note = chemically synthesized
  source 1..20: mol_type = other DNA
agcttagaattcgggacttt

SEQ ID NO: 16369 - DNA, 20 bp, synthetic construct
  misc_feature 1..20: note = chemically synthesized
  source 1..20: mol_type = other DNA
tagaattcgggactttcaga

SEQ ID NO: 16370 - DNA, 20 bp, synthetic construct
  misc_feature 1..20: note = chemically synthesized
  source 1..20: mol_type = other DNA
agaattcgggactttcagat

SEQ ID NO: 16371 - DNA, 20 bp, synthetic construct
  misc_feature 1..20: note = chemically synthesized
  source 1..20: mol_type = other DNA
aattcgggactttcagatag

SEQ ID NO: 16372 - DNA, 20 bp, synthetic construct
  misc_feature 1..20: note = chemically synthesized
  source 1..20: mol_type = other DNA
ggactttcagataggagaat

SEQ ID NO: 16373 - DNA, 20 bp, synthetic construct
  misc_feature 1..20: note = chemically synthesized
  source 1..20: mol_type = other DNA
gactttcagataggagaata

SEQ ID NO: 16374 - DNA, 20 bp, synthetic construct
  misc_feature 1..20: note = chemically synthesized
  source 1..20: mol_type = other DNA
tttcagataggagaataagg

SEQ ID NO: 16375 - DNA, 20 bp, synthetic construct
  misc_feature 1..20: note = chemically synthesized
  source 1..20: mol_type = other DNA
tcagataggagaataaggca

SEQ ID NO: 16376 - DNA, 20 bp, synthetic construct
  misc_feature 1..20: note = chemically synthesized
  source 1..20: mol_type = other DNA
ggcagagttctttaaatctt

SEQ ID NO: 16377 - DNA, 20 bp, synthetic construct
  misc_feature 1..20: note = chemically synthesized
  source 1..20: mol_type = other DNA
tctttaaatcttgagtaaaa

SEQ ID NO: 16378 - DNA, 20 bp, synthetic construct
  misc_feature 1..20: note = chemically synthesized
  source 1..20: mol_type = other DNA
gtatgcattttcactgtact

SEQ ID NO: 16379 - DNA, 20 bp, synthetic construct
  misc_feature 1..20: note = chemically synthesized
  source 1..20: mol_type = other DNA
tatgcattttcactgtactc

SEQ ID NO: 16380 - DNA, 20 bp, synthetic construct
  misc_feature 1..20: note = chemically synthesized
  source 1..20: mol_type = other DNA
cactgtactcaggcctctcc

SEQ ID NO: 16381 - DNA, 20 bp, synthetic construct
  misc_feature 1..20: note = chemically synthesized
  source 1..20: mol_type = other DNA
tactcaggcctctccaagct

SEQ ID NO: 16382 - DNA, 20 bp, synthetic construct
  misc_feature 1..20: note = chemically synthesized
  source 1..20: mol_type = other DNA
tttttttttttttttttttt

SEQ ID NO: 16383 - DNA, 20 bp, synthetic construct
  misc_feature 1..20: note = chemically synthesized
  source 1..20: mol_type = other DNA
tttttttttttttttttaga

SEQ ID NO: 16384 - DNA, 20 bp, synthetic construct
  misc_feature 1..20: note = chemically synthesized
  source 1..20: mol_type = other DNA
tttttttttttttttagaca

SEQ ID NO: 16385 - DNA, 20 bp, synthetic construct
  misc_feature 1..20: note = chemically synthesized
  source 1..20: mol_type = other DNA
agagttttgctcttgttgcc

SEQ ID NO: 16386 - DNA, 20 bp, synthetic construct
  misc_feature 1..20: note = chemically synthesized
  source 1..20: mol_type = other DNA
gagttttgctcttgttgccc

SEQ ID NO: 16387 - DNA, 20 bp, synthetic construct
  misc_feature 1..20: note = chemically synthesized
  source 1..20: mol_type = other DNA
tttgctcttgttgcccaggc

SEQ ID NO: 16388 - DNA, 20 bp, synthetic construct
  misc_feature 1..20: note = chemically synthesized
  source 1..20: mol_type = other DNA
tgctcttgttgcccaggctg

SEQ ID NO: 16389 - DNA, 20 bp, synthetic construct
  misc_feature 1..20: note = chemically synthesized
  source 1..20: mol_type = other DNA
ttgttgcccaggctggagtg

SEQ ID NO: 16390 - DNA, 20 bp, synthetic construct
  misc_feature 1..20: note = chemically synthesized
  source 1..20: mol_type = other DNA
ttgcccaggctggagtgcag

SEQ ID NO: 16391 - DNA, 20 bp, synthetic construct
  misc_feature 1..20: note = chemically synthesized
  source 1..20: mol_type = other DNA
ggagtgcagtggcatgattt

SEQ ID NO: 16392 - DNA, 20 bp, synthetic construct
  misc_feature 1..20: note = chemically synthesized
  source 1..20: mol_type = other DNA
tcactgcaacctctgcctcc

SEQ ID NO: 16393 - DNA, 20 bp, synthetic construct
  misc_feature 1..20: note = chemically synthesized
  source 1..20: mol_type = other DNA
cactgcaacctctgcctcct

SEQ ID NO: 16394 - DNA, 20 bp, synthetic construct
  misc_feature 1..20: note = chemically synthesized
  source 1..20: mol_type = other DNA
aacctctgcctcctaggttc

SEQ ID NO: 16395 - DNA, 20 bp, synthetic construct
  misc_feature 1..20: note = chemically synthesized
  source 1..20: mol_type = other DNA
ttcaagcgattctcctgcct

SEQ ID NO: 16396 - DNA, 20 bp, synthetic construct
  misc_feature 1..20: note = chemically synthesized
  source 1..20: mol_type = other DNA
ttctcctgcctcagcctccc

SEQ ID NO: 16397 - DNA, 20 bp, synthetic construct
  misc_feature 1..20: note = chemically synthesized
  source 1..20: mol_type = other DNA
tcctgcctcagcctcccaag

SEQ ID NO: 16398 - DNA, 20 bp, synthetic construct
  misc_feature 1..20: note = chemically synthesized
  source 1..20: mol_type = other DNA
gcctcagcctcccaagtagc

SEQ ID NO: 16399 - DNA, 20 bp, synthetic construct
  misc_feature 1..20: note = chemically synthesized
  source 1..20: mol_type = other DNA
cctcagcctcccaagtagct

SEQ ID NO: 16400 - DNA, 20 bp, synthetic construct
  misc_feature 1..20: note = chemically synthesized
  source 1..20: mol_type = other DNA
ctcccaagtagctgggatta

SEQ ID NO: 16401 - DNA, 20 bp, synthetic construct
  misc_feature 1..20: note = chemically synthesized
  source 1..20: mol_type = other DNA
tcccaagtagctgggattac

SEQ ID NO: 16402 - DNA, 20 bp, synthetic construct
  misc_feature 1..20: note = chemically synthesized
  source 1..20: mol_type = other DNA
caggcgtgtgccactacgcc

SEQ ID NO: 16403 - DNA, 20 bp, synthetic construct
  misc_feature 1..20: note = chemically synthesized
  source 1..20: mol_type = other DNA
cgtgtgccactacgcccagc

SEQ ID NO: 16404 - DNA, 20 bp, synthetic construct
  misc_feature 1..20: note = chemically synthesized
  source 1..20: mol_type = other DNA
cagctagttttttgtatttt

SEQ ID NO: 16405 - DNA, 20 bp, synthetic construct
  misc_feature 1..20: note = chemically synthesized
  source 1..20: mol_type = other DNA
ctagttttttgtattttcag

SEQ ID NO: 16406 - DNA, 20 bp, synthetic construct
  misc_feature 1..20: note = chemically synthesized
  source 1..20: mol_type = other DNA
agttttttgtattttcagta

SEQ ID NO: 16407 - DNA, 20 bp, synthetic construct
  misc_feature 1..20: note = chemically synthesized
  source 1..20: mol_type = other DNA
gttttttgtattttcagtag

SEQ ID NO: 16408 - DNA, 20 bp, synthetic construct
  misc_feature 1..20: note = chemically synthesized
  source 1..20: mol_type = other DNA
ttttgtattttcagtagagg

SEQ ID NO: 16409 - DNA, 20 bp, synthetic construct
  misc_feature 1..20: note = chemically synthesized
  source 1..20: mol_type = other DNA
tttgtattttcagtagaggc

SEQ ID NO: 16410 - DNA, 20 bp, synthetic construct
  misc_feature 1..20: note = chemically synthesized
  source 1..20: mol_type = other DNA
ttgtattttcagtagaggca

SEQ ID NO: 16411 - DNA, 20 bp, synthetic construct
  misc_feature 1..20: note = chemically synthesized
  source 1..20: mol_type = other DNA
gaggcagggtttcaccatgt

SEQ ID NO: 16412 - DNA, 20 bp, synthetic construct
  misc_feature 1..20: note = chemically synthesized
  source 1..20: mol_type = other DNA
cagggtttcaccatgttggc

SEQ ID NO: 16413 - DNA, 20 bp, synthetic construct
  misc_feature 1..20: note = chemically synthesized
  source 1..20: mol_type = other DNA
agggtttcaccatgttggcc

SEQ ID NO: 16414 - DNA, 20 bp, synthetic construct
  misc_feature 1..20: note = chemically synthesized
  source 1..20: mol_type = other DNA
tttcaccatgttggccaggc

SEQ ID NO: 16415 - DNA, 20 bp, synthetic construct
  misc_feature 1..20: note = chemically synthesized
  source 1..20: mol_type = other DNA
tggtcttgaactcctgacct

SEQ ID NO: 16416 - DNA, 20 bp, synthetic construct
  misc_feature 1..20: note = chemically synthesized
  source 1..20: mol_type = other DNA
ggtcttgaactcctgacctc

SEQ ID NO: 16417 - DNA, 20 bp, synthetic construct
  misc_feature 1..20: note = chemically synthesized
  source 1..20: mol_type = other DNA
ctgacctcaggtgatccacc

SEQ ID NO: 16418 - DNA, 20 bp, synthetic construct
  misc_feature 1..20: note = chemically synthesized
  source 1..20: mol_type = other DNA
ctcaggtgatccacctggct

SEQ ID NO: 16419 - DNA, 20 bp, synthetic construct
  misc_feature 1..20: note = chemically synthesized
  source 1..20: mol_type = other DNA
ccacctggcttggcctccca

SEQ ID NO: 16420 - DNA, 20 bp, synthetic construct
  misc_feature 1..20: note = chemically synthesized
  source 1..20: mol_type = other DNA
ggcttggcctcccaaagtgc

SEQ ID NO: 16421 - DNA, 20 bp, synthetic construct
  misc_feature 1..20: note = chemically synthesized
  source 1..20: mol_type = other DNA
gcttggcctcccaaagtgct

SEQ ID NO: 16422 - DNA, 20 bp, synthetic construct
  misc_feature 1..20: note = chemically synthesized
  source 1..20: mol_type = other DNA
ctcccaaagtgctgggatta

SEQ ID NO: 16423 - DNA, 20 bp, synthetic construct
  misc_feature 1..20: note = chemically synthesized
  source 1..20: mol_type = other DNA
tcccaaagtgctgggattac

SEQ ID NO: 16424 - DNA, 20 bp, synthetic construct
  misc_feature 1..20: note = chemically synthesized
  source 1..20: mol_type = other DNA
agtgctgggattacaggctt

SEQ ID NO: 16425 - DNA, 20 bp, synthetic construct
  misc_feature 1..20: note = chemically synthesized
  source 1..20: mol_type = other DNA
caggcttgagcgaccgcacc

SEQ ID NO: 16426 - DNA, 20 bp, synthetic construct
  misc_feature 1..20: note = chemically synthesized
  source 1..20: mol_type = other DNA
gaccgcacctggcccaaact

SEQ ID NO: 16427 - DNA, 20 bp, synthetic construct
  misc_feature 1..20: note = chemically synthesized
  source 1..20: mol_type = other DNA
ggcccaaactgagtattttt

SEQ ID NO: 16428 - DNA, 20 bp, synthetic construct
  misc_feature 1..20: note = chemically synthesized
  source 1..20: mol_type = other DNA
cccaaactgagtatttttta

SEQ ID NO: 16429 - DNA, 20 bp, synthetic construct
  misc_feature 1..20: note = chemically synthesized
  source 1..20: mol_type = other DNA
ccaaactgagtattttttag

SEQ ID NO: 16430 - DNA, 20 bp, synthetic construct
  misc_feature 1..20: note = chemically synthesized
  source 1..20: mol_type = other DNA
tttagaggattctttttacc

SEQ ID NO: 16431 - DNA, 20 bp, synthetic construct
  misc_feature 1..20: note = chemically synthesized
  source 1..20: mol_type = other DNA
gattctttttacctggtgaa

SEQ ID NO: 16432 - DNA, 20 bp, synthetic construct
  misc_feature 1..20: note = chemically synthesized
  source 1..20: mol_type = other DNA
ctttttacctggtgaataga

SEQ ID NO: 16433 - DNA, 20 bp, synthetic construct
  misc_feature 1..20: note = chemically synthesized
  source 1..20: mol_type = other DNA
tttttacctggtgaatagat

SEQ ID NO: 16434 - DNA, 20 bp, synthetic construct
  misc_feature 1..20: note = chemically synthesized
  source 1..20: mol_type = other DNA
cttcatccacgtacacatat

SEQ ID NO: 16435 - DNA, 20 bp, synthetic construct
  misc_feature 1..20: note = chemically synthesized
  source 1..20: mol_type = other DNA
acacatatgagctgtacaca

SEQ ID NO: 16436 - DNA, 20 bp, synthetic construct
  misc_feature 1..20: note = chemically synthesized
  source 1..20: mol_type = other DNA
ctgtacacatagatgttaat

SEQ ID NO: 16437 - DNA, 20 bp, synthetic construct
  misc_feature 1..20: note = chemically synthesized
  source 1..20: mol_type = other DNA
tgtacacatagatgttaatc

SEQ ID NO: 16438 - DNA, 20 bp, synthetic construct
  misc_feature 1..20: note = chemically synthesized
  source 1..20: mol_type = other DNA
ttgtgtgattgtgatccatt

SEQ ID NO: 16439 - DNA, 20 bp, synthetic construct
  misc_feature 1..20: note = chemically synthesized
  source 1..20: mol_type = other DNA
gtgatccattgagatcattg

SEQ ID NO: 16440 - DNA, 20 bp, synthetic construct
  misc_feature 1..20: note = chemically synthesized
  source 1..20: mol_type = other DNA
atccattgagatcattgaag

SEQ ID NO: 16441 - DNA, 20 bp, synthetic construct
  misc_feature 1..20: note = chemically synthesized
  source 1..20: mol_type = other DNA
tcattgaagtagtattaatt

SEQ ID NO: 16442 - DNA, 20 bp, synthetic construct
  misc_feature 1..20: note = chemically synthesized
  source 1..20: mol_type = other DNA
tgaagtagtattaatttagc

SEQ ID NO: 16443 - DNA, 20 bp, synthetic construct
  misc_feature 1..20: note = chemically synthesized
  source 1..20: mol_type = other DNA
gaagtagtattaatttagct

SEQ ID NO: 16444 - DNA, 20 bp, synthetic construct
  misc_feature 1..20: note = chemically synthesized
  source 1..20: mol_type = other DNA
gtattaatttagctgggaat

SEQ ID NO: 16445 - DNA, 20 bp, synthetic construct
  misc_feature 1..20: note = chemically synthesized
  source 1..20: mol_type = other DNA
ttaatttagctgggaattag

SEQ ID NO: 16446 - DNA, 20 bp, synthetic construct
  misc_feature 1..20: note = chemically synthesized
  source 1..20: mol_type = other DNA
aattagcagcttatgttgtg

SEQ ID NO: 16447 - DNA, 20 bp, synthetic construct
  misc_feature 1..20: note = chemically synthesized
  source 1..20: mol_type = other DNA
attagcagcttatgttgtgt

SEQ ID NO: 16448 - DNA, 20 bp, synthetic construct
  misc_feature 1..20: note = chemically synthesized
  source 1..20: mol_type = other DNA
cagcttatgttgtgtgggcc

SEQ ID NO: 16449 - DNA, 20 bp, synthetic construct
  misc_feature 1..20: note = chemically synthesized
  source 1..20: mol_type = other DNA
gtgtgtcaaatatccaccct

SEQ ID NO: 16450 - DNA, 20 bp, synthetic construct
  misc_feature 1..20: note = chemically synthesized
  source 1..20: mol_type = other DNA
aaatatccaccctcagatat

SEQ ID NO: 16451 - DNA, 20 bp, synthetic construct
  misc_feature 1..20: note = chemically synthesized
  source 1..20: mol_type = other DNA
tatccaccctcagatatcag

SEQ ID NO: 16452 - DNA, 20 bp, synthetic construct
  misc_feature 1..20: note = chemically synthesized
  source 1..20: mol_type = other DNA
tatcagcagcctttgacttg

SEQ ID NO: 16453 - DNA, 20 bp, synthetic construct
  misc_feature 1..20: note = chemically synthesized
  source 1..20: mol_type = other DNA
agcagcctttgacttgcagt

SEQ ID NO: 16454 - DNA, 20 bp, synthetic construct
  misc_feature 1..20: note = chemically synthesized
  source 1..20: mol_type = other DNA
cagcctttgacttgcagtca

SEQ ID NO: 16455 - DNA, 20 bp, synthetic construct
  misc_feature 1..20: note = chemically synthesized
  source 1..20: mol_type = other DNA
cttgcagtcagagctttcaa

SEQ ID NO: 16456 - DNA, 20 bp, synthetic construct
  misc_feature 1..20: note = chemically synthesized
  source 1..20: mol_type = other DNA
ttgcagtcagagctttcaat

SEQ ID NO: 16457 - DNA, 20 bp, synthetic construct
  misc_feature 1..20: note = chemically synthesized
  source 1..20: mol_type = other DNA
tgcagtcagagctttcaata

SEQ ID NO: 16458 - DNA, 20 bp, synthetic construct
  misc_feature 1..20: note = chemically synthesized
  source 1..20: mol_type = other DNA
gcagtcagagctttcaatag

SEQ ID NO: 16459 - DNA, 20 bp, synthetic construct
  misc_feature 1..20: note = chemically synthesized
  source 1..20: mol_type = other DNA
tgttttgttttctttttttt

SEQ ID NO: 16460 - DNA, 20 bp, synthetic construct
  misc_feature 1..20: note = chemically synthesized
  source 1..20: mol_type = other DNA
tttagtctcatattttatga

SEQ ID NO: 16461 - DNA, 20 bp, synthetic construct
  misc_feature 1..20: note = chemically synthesized
  source 1..20: mol_type = other DNA
ttagtctcatattttatgat

SEQ ID NO: 16462 - DNA, 20 bp, synthetic construct
  misc_feature 1..20: note = chemically synthesized
  source 1..20: mol_type = other DNA
tagtctcatattttatgatg

SEQ ID NO: 16463 - DNA, 20 bp, synthetic construct
  misc_feature 1..20: note = chemically synthesized
  source 1..20: mol_type = other DNA
agtctcatattttatgatgg

SEQ ID NO: 16464 - DNA, 20 bp, synthetic construct
  misc_feature 1..20: note = chemically synthesized
  source 1..20: mol_type = other DNA
gtctcatattttatgatggg

SEQ ID NO: 16465 - DNA, 20 bp, synthetic construct
  misc_feature 1..20: note = chemically synthesized
  source 1..20: mol_type = other DNA
atgatggggggaaatattca

SEQ ID NO: 16466 - DNA, 20 bp, synthetic construct
  misc_feature 1..20: note = chemically synthesized
  source 1..20: mol_type = other DNA
atggggggaaatattcatgg

SEQ ID NO: 16467 - DNA, 20 bp, synthetic construct
  misc_feature 1..20: note = chemically synthesized
  source 1..20: mol_type = other DNA
gtgaaactgctgttccctta

SEQ ID NO: 16468 - DNA, 20 bp, synthetic construct
  misc_feature 1..20: note = chemically synthesized
  source 1..20: mol_type = other DNA
actgctgttcccttatagaa

SEQ ID NO: 16469 - DNA, 20 bp, synthetic construct
  misc_feature 1..20: note = chemically synthesized
  source 1..20: mol_type = other DNA
caaacattatcccatcatgt

SEQ ID NO: 16470 - DNA, 20 bp, synthetic construct
  misc_feature 1..20: note = chemically synthesized
  source 1..20: mol_type = other DNA
tatcccatcatgtcagattt

SEQ ID NO: 16471 - DNA, 20 bp, synthetic construct
  misc_feature 1..20: note = chemically synthesized
  source 1..20: mol_type = other DNA
atcccatcatgtcagatttg

SEQ ID NO: 16472 - DNA, 20 bp, synthetic construct
  misc_feature 1..20: note = chemically synthesized
  source 1..20: mol_type = other DNA
tcatgtcagatttgaggttt

SEQ ID NO: 16473 - DNA, 20 bp, synthetic construct
  misc_feature 1..20: note = chemically synthesized
  source 1..20: mol_type = other DNA
aggttttggcttattgcaca

SEQ ID NO: 16474 - DNA, 20 bp, synthetic construct
  misc_feature 1..20: note = chemically synthesized
  source 1..20: mol_type = other DNA
ggttttggcttattgcacat

SEQ ID NO: 16475 - DNA, 20 bp, synthetic construct
  misc_feature 1..20: note = chemically synthesized
  source 1..20: mol_type = other DNA
gcacataggaatctttaaat

SEQ ID NO: 16476 - DNA, 20 bp, synthetic construct
  misc_feature 1..20: note = chemically synthesized
  source 1..20: mol_type = other DNA
cacataggaatctttaaatt

SEQ ID NO: 16477 - DNA, 20 bp, synthetic construct
  misc_feature 1..20: note = chemically synthesized
  source 1..20: mol_type = other DNA
aggaatctttaaattaggtt

SEQ ID NO: 16478 - DNA, 20 bp, synthetic construct
  misc_feature 1..20: note = chemically synthesized
  source 1..20: mol_type = other DNA
ggaatctttaaattaggttt

SEQ ID NO: 16479 - DNA, 20 bp, synthetic construct
  misc_feature 1..20: note = chemically synthesized
  source 1..20: mol_type = other DNA
attaggtttgggctgtcata

SEQ ID NO: 16480 - DNA, 20 bp, synthetic construct
  misc_feature 1..20: note = chemically synthesized
  source 1..20: mol_type = other DNA
ggtttgggctgtcataaagt

SEQ ID NO: 16481 - DNA, 20 bp, synthetic construct
  misc_feature 1..20: note = chemically synthesized
  source 1..20: mol_type = other DNA
tgtcataaagttagcttttt

SEQ ID NO: 16482 - DNA, 20 bp, synthetic construct
  misc_feature 1..20: note = chemically synthesized
  source 1..20: mol_type = other DNA
tcataaagttagctttttga

SEQ ID NO: 16483 - DNA, 20 bp, synthetic construct
  misc_feature 1..20: note = chemically synthesized
  source 1..20: mol_type = other DNA
aagttagctttttgagagac

SEQ ID NO: 16484 - DNA, 20 bp, synthetic construct
  misc_feature 1..20: note = chemically synthesized
  source 1..20: mol_type = other DNA
gttagctttttgagagacta

SEQ ID NO: 16485 - DNA, 20 bp, synthetic construct
  misc_feature 1..20: note = chemically synthesized
  source 1..20: mol_type = other DNA
gactagagaaaaaatatgac

SEQ ID NO: 16486 - DNA, 20 bp, synthetic construct
  misc_feature 1..20: note = chemically synthesized
  source 1..20: mol_type = other DNA
atgacaagtcctataaaatg

SEQ ID NO: 16487 - DNA, 20 bp, synthetic construct
  misc_feature 1..20: note = chemically synthesized
  source 1..20: mol_type = other DNA
aagtcctataaaatgtagta

SEQ ID NO: 16488 - DNA, 20 bp, synthetic construct
  misc_feature 1..20: note = chemically synthesized
  source 1..20: mol_type = other DNA
tctctttaaaatcatgaaca

SEQ ID NO: 16489 - DNA, 20 bp, synthetic construct
  misc_feature 1..20: note = chemically synthesized
  source 1..20: mol_type = other DNA
atgaacatagacatttatat

SEQ ID NO: 16490 - DNA, 20 bp, synthetic construct
  misc_feature 1..20: note = chemically synthesized
  source 1..20: mol_type = other DNA
tgaacatagacatttatatc

SEQ ID NO: 16491 - DNA, 20 bp, synthetic construct
  misc_feature 1..20: note = chemically synthesized
  source 1..20: mol_type = other DNA
gaacatagacatttatatca

SEQ ID NO: 16492 - DNA, 20 bp, synthetic construct
  misc_feature 1..20: note = chemically synthesized
  source 1..20: mol_type = other DNA
ggtatttaaaattatttgcc

SEQ ID NO: 16493 - DNA, 20 bp, synthetic construct
  misc_feature 1..20: note = chemically synthesized
  source 1..20: mol_type = other DNA
tttaaaattatttgcctaga

SEQ ID NO: 16494 - DNA, 20 bp, synthetic construct
  misc_feature 1..20: note = chemically synthesized
  source 1..20: mol_type = other DNA
aattatttgcctagacagta

SEQ ID NO: 16495 - DNA, 20 bp, synthetic construct
  misc_feature 1..20: note = chemically synthesized
  source 1..20: mol_type = other DNA
atttgcctagacagtatagc

SEQ ID NO: 16496 - DNA, 20 bp, synthetic construct
  misc_feature 1..20: note = chemically synthesized
  source 1..20: mol_type = other DNA
tagacagtatagctggtatt

SEQ ID NO: 16497 - DNA, 20 bp, synthetic construct
  misc_feature 1..20: note = chemically synthesized
  source 1..20: mol_type = other DNA
gtatttagataatgatatat

SEQ ID NO: 16498 - DNA, 20 bp, synthetic construct
  misc_feature 1..20: note = chemically synthesized
  source 1..20: mol_type = other DNA
ttagataatgatatatcaga

SEQ ID NO: 16499 - DNA, 20 bp, synthetic construct
  misc_feature 1..20: note = chemically synthesized
  source 1..20: mol_type = other DNA
tatatcagacagatactcta

SEQ ID NO: 16500 - DNA, 20 bp, synthetic construct
  misc_feature 1..20: note = chemically synthesized
  source 1..20: mol_type = other DNA
atcagacagatactctaaag

SEQ ID NO: 16501 - DNA, 20 bp, synthetic construct
  misc_feature 1..20: note = chemically synthesized
  source 1..20: mol_type = other DNA
tcagacagatactctaaaga

SEQ ID NO: 16502 - DNA, 20 bp, synthetic construct
  misc_feature 1..20: note = chemically synthesized
  source 1..20: mol_type = other DNA
cagacagatactctaaagaa

SEQ ID NO: 16503 - DNA, 20 bp, synthetic construct
  misc_feature 1..20: note = chemically synthesized
  source 1..20: mol_type = other DNA
gacagatactctaaagaagg

SEQ ID NO: 16504 - DNA, 20 bp, synthetic construct
  misc_feature 1..20: note = chemically synthesized
  source 1..20: mol_type = other DNA
tactctaaagaagggagata

SEQ ID NO: 16505 - DNA, 20 bp, synthetic construct
  misc_feature 1..20: note = chemically synthesized
  source 1..20: mol_type = other DNA
ggagatatagtaattcaaaa

SEQ ID NO: 16506 - DNA, 20 bp, synthetic construct
  misc_feature 1..20: note = chemically synthesized
  source 1..20: mol_type = other DNA
aattcaaaatggaaatacat

SEQ ID NO: 16507 - DNA, 20 bp, synthetic construct
  misc_feature 1..20: note = chemically synthesized
  source 1..20: mol_type = other DNA
atacattagcatgctcttaa

SEQ ID NO: 16508 - DNA, 20 bp, synthetic construct
  misc_feature 1..20: note = chemically synthesized
  source 1..20: mol_type = other DNA
atcaaatacaatatgctttt

SEQ ID NO: 16509 - DNA, 20 bp, synthetic construct
  misc_feature 1..20: note = chemically synthesized
  source 1..20: mol_type = other DNA
acaatatgcttttcagaatt

SEQ ID NO: 16510 - DNA, 20 bp, synthetic construct
  misc_feature 1..20: note = chemically synthesized
  source 1..20: mol_type = other DNA
tatccattctgattctctcc

SEQ ID NO: 16511 - DNA, 20 bp, synthetic construct
  misc_feature 1..20: note = chemically synthesized
  source 1..20: mol_type = other DNA
attctgattctctcctagct

SEQ ID NO: 16512 - DNA, 20 bp, synthetic construct
  misc_feature 1..20: note = chemically synthesized
  source 1..20: mol_type = other DNA
tctcctagctcagactgaac

SEQ ID NO: 16513 - DNA, 20 bp, synthetic construct
  misc_feature 1..20: note = chemically synthesized
  source 1..20: mol_type = other DNA
tcctagctcagactgaactg

SEQ ID NO: 16514 - DNA, 20 bp, synthetic construct
  misc_feature 1..20: note = chemically synthesized
  source 1..20: mol_type = other DNA
cctagctcagactgaactgg

SEQ ID NO: 16515 - DNA, 20 bp, synthetic construct
  misc_feature 1..20: note = chemically synthesized
  source 1..20: mol_type = other DNA
ggatgtatttgtgtacctta

SEQ ID NO: 16516 - DNA, 20 bp, synthetic construct
  misc_feature 1..20: note = chemically synthesized
  source 1..20: mol_type = other DNA
cttatggtgtaattgtaaat

SEQ ID NO: 16517 - DNA, 20 bp, synthetic construct
  misc_feature 1..20: note = chemically synthesized
  source 1..20: mol_type = other DNA
gtaaatgagactataaatta

SEQ ID NO: 16518 - DNA, 20 bp, synthetic construct
  misc_feature 1..20: note = chemically synthesized
  source 1..20: mol_type = other DNA
ataaaaacgactgacttctg

SEQ ID NO: 16519 - DNA, 20 bp, synthetic construct
  misc_feature 1..20: note = chemically synthesized
  source 1..20: mol_type = other DNA
tgacttctgaagtgaatttt

SEQ ID NO: 16520 - DNA, 20 bp, synthetic construct
  misc_feature 1..20: note = chemically synthesized
  source 1..20: mol_type = other DNA
tctgaagtgaattttcagca

SEQ ID NO: 16521 - DNA, 20 bp, synthetic construct
  misc_feature 1..20: note = chemically synthesized
  source 1..20: mol_type = other DNA
gaagtgaattttcagcatgg

SEQ ID NO: 16522 - DNA, 20 bp, synthetic construct
  misc_feature 1..20: note = chemically synthesized
  source 1..20: mol_type = other DNA
taccacaaaaaacaatatac

SEQ ID NO: 16523 - DNA, 20 bp, synthetic construct
  misc_feature 1..20: note = chemically synthesized
  source 1..20: mol_type = other DNA
ttttacttaccttcaaaatc

SEQ ID NO: 16524 - DNA, 20 bp, synthetic construct
  misc_feature 1..20: note = chemically synthesized
  source 1..20: mol_type = other DNA
ttacttaccttcaaaatcca

SEQ ID NO: 16525 - DNA, 20 bp, synthetic construct
  misc_feature 1..20: note = chemically synthesized
  source 1..20: mol_type = other DNA
acttaccttcaaaatccaga

SEQ ID NO: 16526 - DNA, 20 bp, synthetic construct
  misc_feature 1..20: note = chemically synthesized
  source 1..20: mol_type = other DNA
taccttcaaaatccagagag

SEQ ID NO: 16527 - DNA, 20 bp, synthetic construct
  misc_feature 1..20: note = chemically synthesized
  source 1..20: mol_type = other DNA
ccttcaaaatccagagagta

SEQ ID NO: 16528 - DNA, 20 bp, synthetic construct
  misc_feature 1..20: note = chemically synthesized
  source 1..20: mol_type = other DNA
agagaatattgttttctaat

SEQ ID NO: 16529 - DNA, 20 bp, synthetic construct
  misc_feature 1..20: note = chemically synthesized
  source 1..20: mol_type = other DNA
attgttttctaataagtacc

SEQ ID NO: 16530 - DNA, 20 bp, synthetic construct
  misc_feature 1..20: note = chemically synthesized
  source 1..20: mol_type = other DNA
ttgttttctaataagtacct

SEQ ID NO: 16531 - DNA, 20 bp, synthetic construct
  misc_feature 1..20: note = chemically synthesized
  source 1..20: mol_type = other DNA
ataagtacctaggattttca

SEQ ID NO: 16532 - DNA, 20 bp, synthetic construct
  misc_feature 1..20: note = chemically synthesized
  source 1..20: mol_type = other DNA
taagtacctaggattttcat

SEQ ID NO: 16533 - DNA, 20 bp, synthetic construct
  misc_feature 1..20: note = chemically synthesized
  source 1..20: mol_type = other DNA
aagtacctaggattttcata

SEQ ID NO: 16534 - DNA, 20 bp, synthetic construct
  misc_feature 1..20: note = chemically synthesized
  source 1..20: mol_type = other DNA
gtacctaggattttcatagg

SEQ ID NO: 16535 - DNA, 20 bp, synthetic construct
  misc_feature 1..20: note = chemically synthesized
  source 1..20: mol_type = other DNA
catagggagcctatgtttgt

SEQ ID NO: 16536 - DNA, 20 bp, synthetic construct
  misc_feature 1..20: note = chemically synthesized
  source 1..20: mol_type = other DNA
atagggagcctatgtttgtg

SEQ ID NO: 16537 - DNA, 20 bp, synthetic construct
  misc_feature 1..20: note = chemically synthesized
  source 1..20: mol_type = other DNA
gtttgtgaggccactatcca

SEQ ID NO: 16538 - DNA, 20 bp, synthetic construct
  misc_feature 1..20: note = chemically synthesized
  source 1..20: mol_type = other DNA
aagactaatgttcatgaaac

SEQ ID NO: 16539 - DNA, 20 bp, synthetic construct
  misc_feature 1..20: note = chemically synthesized
  source 1..20: mol_type = other DNA
agactaatgttcatgaaact

SEQ ID NO: 16540 - DNA, 20 bp, synthetic construct
  misc_feature 1..20: note = chemically synthesized
  source 1..20: mol_type = other DNA
actaatgttcatgaaactgg

SEQ ID NO: 16541 - DNA, 20 bp, synthetic construct
  misc_feature 1..20: note = chemically synthesized
  source 1..20: mol_type = other DNA
aaactgggagtcctatatac

SEQ ID NO: 16542 - DNA, 20 bp, synthetic construct
  misc_feature 1..20: note = chemically synthesized
  source 1..20: mol_type = other DNA
tacaagctgtatttgtaaat

SEQ ID NO: 16543 - DNA, 20 bp, synthetic construct
  misc_feature 1..20: note = chemically synthesized
  source 1..20: mol_type = other DNA
agctgtatttgtaaataaga

SEQ ID NO: 16544 - DNA, 20 bp, synthetic construct
  misc_feature 1..20: note = chemically synthesized
  source 1..20: mol_type = other DNA
ctgtatttgtaaataagaca

SEQ ID NO: 16545 - DNA, 20 bp, synthetic construct
  misc_feature 1..20: note = chemically synthesized
  source 1..20: mol_type = other DNA
atttgtaaataagacagaga

SEQ ID NO: 16546 - DNA, 20 bp, synthetic construct
  misc_feature 1..20: note = chemically synthesized
  source 1..20: mol_type = other DNA
tttgtaaataagacagagaa

SEQ ID NO: 16547 - DNA, 20 bp, synthetic construct
  misc_feature 1..20: note = chemically synthesized
  source 1..20: mol_type = other DNA
gacagagaaaggttgtgaac

SEQ ID NO: 16548 - DNA, 20 bp, synthetic construct
  misc_feature 1..20: note = chemically synthesized
  source 1..20: mol_type = other DNA
agagaaaggttgtgaactgg

SEQ ID NO: 16549 - DNA, 20 bp, synthetic construct
  misc_feature 1..20: note = chemically synthesized
  source 1..20: mol_type = other DNA
aaggttgtgaactggcagct

SEQ ID NO: 16550 - DNA, 20 bp, synthetic construct
  misc_feature 1..20: note = chemically synthesized
  source 1..20: mol_type = other DNA
gcagcttggatgttttgtca

SEQ ID NO: 16551 - DNA, 20 bp, synthetic construct
  misc_feature 1..20: note = chemically synthesized
  source 1..20: mol_type = other DNA
gttttgtcaaagtacaatgt

SEQ ID NO: 16552 - DNA, 20 bp, synthetic construct
  misc_feature 1..20: note = chemically synthesized
  source 1..20: mol_type = other DNA
tttgtcaaagtacaatgtca

SEQ ID NO: 16553 - DNA, 20 bp, synthetic construct
  misc_feature 1..20: note = chemically synthesized
  source 1..20: mol_type = other DNA
atgtcagagaaactctttct

SEQ ID NO: 16554 - DNA, 20 bp, synthetic construct
  misc_feature 1..20: note = chemically synthesized
  source 1..20: mol_type = other DNA
tttctaagacaaattgtaaa

SEQ ID NO: 16555 - DNA, 20 bp, synthetic construct
  misc_feature 1..20: note = chemically synthesized
  source 1..20: mol_type = other DNA
aattgtaaatagaactgtca

SEQ ID NO: 16556 - DNA, 20 bp, synthetic construct
  misc_feature 1..20: note = chemically synthesized
  source 1..20: mol_type = other DNA
gtcacagtgattgcatgatt

SEQ ID NO: 16557 - DNA, 20 bp, synthetic construct
  misc_feature 1..20: note = chemically synthesized
  source 1..20: mol_type = other DNA
gtgattgcatgattgagccg

SEQ ID NO: 16558 - DNA, 20 bp, synthetic construct
  misc_feature 1..20: note = chemically synthesized
  source 1..20: mol_type = other DNA
attgcatgattgagccgcag

SEQ ID NO: 16559 - DNA, 20 bp, synthetic construct
  misc_feature 1..20: note = chemically synthesized
  source 1..20: mol_type = other DNA
cagaagtgtcctacaattgt

SEQ ID NO: 16560 - DNA, 20 bp, synthetic construct
  misc_feature 1..20: note = chemically synthesized
  source 1..20: mol_type = other DNA
cctacaattgttggcattgt

SEQ ID NO: 16561 - DNA, 20 bp, synthetic construct
  misc_feature 1..20: note = chemically synthesized
  source 1..20: mol_type = other DNA
ctacaattgttggcattgtc

SEQ ID NO: 16562 - DNA, 20 bp, synthetic construct
  misc_feature 1..20: note = chemically synthesized
  source 1..20: mol_type = other DNA
ggcattgtcaggacttttga

SEQ ID NO: 16563 - DNA, 20 bp, synthetic construct
  misc_feature 1..20: note = chemically synthesized
  source 1..20: mol_type = other DNA
tttgaaagcttaattaaaca

SEQ ID NO: 16564 - DNA, 20 bp, synthetic construct
  misc_feature 1..20: note = chemically synthesized
  source 1..20: mol_type = other DNA
gaaagcttaattaaacacag

SEQ ID NO: 16565 - DNA, 20 bp, synthetic construct
  misc_feature 1..20: note = chemically synthesized
  source 1..20: mol_type = other DNA
attaaacacagtggcccgca

SEQ ID NO: 16566 - DNA, 20 bp, synthetic construct
  misc_feature 1..20: note = chemically synthesized
  source 1..20: mol_type = other DNA
gcatggctgctaaacttact

SEQ ID NO: 16567 - DNA, 20 bp, synthetic construct
  misc_feature 1..20: note = chemically synthesized
  source 1..20: mol_type = other DNA
catggctgctaaacttacta

SEQ ID NO: 16568 - DNA, 20 bp, synthetic construct
  misc_feature 1..20: note = chemically synthesized
  source 1..20: mol_type = other DNA
gctgctaaacttactaagga

SEQ ID NO: 16569 - DNA, 20 bp, synthetic construct
  misc_feature 1..20: note = chemically synthesized
  source 1..20: mol_type = other DNA
aacttactaaggaaagccaa

SEQ ID NO: 16570 - DNA, 20 bp, synthetic construct
  misc_feature 1..20: note = chemically synthesized
  source 1..20: mol_type = other DNA
acttactaaggaaagccaaa

SEQ ID NO: 16571 - DNA, 20 bp, synthetic construct
  misc_feature 1..20: note = chemically synthesized
  source 1..20: mol_type = other DNA
aaaaaaatatatctaaaatg

SEQ ID NO: 16572 - DNA, 20 bp, synthetic construct
  misc_feature 1..20: note = chemically synthesized
  source 1..20: mol_type = other DNA
aaaatatatctaaaatgtag

SEQ ID NO: 16573 - DNA, 20 bp, synthetic construct
  misc_feature 1..20: note = chemically synthesized
  source 1..20: mol_type = other DNA
ctaaaatgtagaagatccta

SEQ ID NO: 16574 - DNA, 20 bp, synthetic construct
  misc_feature 1..20: note = chemically synthesized
  source 1..20: mol_type = other DNA
ctaaagatcccaaacttctt

SEQ ID NO: 16575 - DNA, 20 bp, synthetic construct
  misc_feature 1..20: note = chemically synthesized
  source 1..20: mol_type = other DNA
ttcttcagacattacccttg

SEQ ID NO: 16576 - DNA, 20 bp, synthetic construct
  misc_feature 1..20: note = chemically synthesized
  source 1..20: mol_type = other DNA
acattacccttgtggtgaca

SEQ ID NO: 16577 - DNA, 20 bp, synthetic construct
  misc_feature 1..20: note = chemically synthesized
  source 1..20: mol_type = other DNA
acccttgtggtgacacagaa

SEQ ID NO: 16578 - DNA, 20 bp, synthetic construct
  misc_feature 1..20: note = chemically synthesized
  source 1..20: mol_type = other DNA
agatgcattgtgcattttcc

SEQ ID NO: 16579 - DNA, 20 bp, synthetic construct
  misc_feature 1..20: note = chemically synthesized
  source 1..20: mol_type = other DNA
tcttttataaataatgtttt

SEQ ID NO: 16580 - DNA, 20 bp, synthetic construct
  misc_feature 1..20: note = chemically synthesized
  source 1..20: mol_type = other DNA
tataaataatgttttgagaa

SEQ ID NO: 16581 - DNA, 20 bp, synthetic construct
  misc_feature 1..20: note = chemically synthesized
  source 1..20: mol_type = other DNA
ataaataatgttttgagaat

SEQ ID NO: 16582 - DNA, 20 bp, synthetic construct
  misc_feature 1..20: note = chemically synthesized
  source 1..20: mol_type = other DNA
gaataggtccacgtgatatg

SEQ ID NO: 16583 - DNA, 20 bp, synthetic construct
  misc_feature 1..20: note = chemically synthesized
  source 1..20: mol_type = other DNA
agatcatcctgtgtgtgatg

SEQ ID NO: 16584 - DNA, 20 bp, synthetic construct
  misc_feature 1..20: note = chemically synthesized
  source 1..20: mol_type = other DNA
atcatcctgtgtgtgatgtg

SEQ ID NO: 16585 - DNA, 20 bp, synthetic construct
  misc_feature 1..20: note = chemically synthesized
  source 1..20: mol_type = other DNA
gtgtgatgtggagattgtgt

SEQ ID NO: 16586 - DNA, 20 bp, synthetic construct
  misc_feature 1..20: note = chemically synthesized
  source 1..20: mol_type = other DNA
ttttctgtctcctgctgtta

SEQ ID NO: 16587 - DNA, 20 bp, synthetic construct
  misc_feature 1..20: note = chemically synthesized
  source 1..20: mol_type = other DNA
ctgtctcctgctgttacaga

SEQ ID NO: 16588 - DNA, 20 bp, synthetic construct
  misc_feature 1..20: note = chemically synthesized
  source 1..20: mol_type = other DNA
acagacagttaatgtaaaaa

SEQ ID NO: 16589 - DNA, 20 bp, synthetic construct
  misc_feature 1..20: note = chemically synthesized
  source 1..20: mol_type = other DNA
atgtaaaaatggccttttat

SEQ ID NO: 16590 - DNA, 20 bp, synthetic construct
  misc_feature 1..20: note = chemically synthesized
  source 1..20: mol_type = other DNA
cacaaatatgtattcacttc

SEQ ID NO: 16591 - DNA, 20 bp, synthetic construct
  misc_feature 1..20: note = chemically synthesized
  source 1..20: mol_type = other DNA
atatgtattcacttcaagaa

SEQ ID NO: 16592 - DNA, 20 bp, synthetic construct
  misc_feature 1..20: note = chemically synthesized
  source 1..20: mol_type = other DNA
tatgtattcacttcaagaac

SEQ ID NO: 16593 - DNA, 20 bp, synthetic construct
  misc_feature 1..20: note = chemically synthesized
  source 1..20: mol_type = other DNA
tgtattcacttcaagaacag

SEQ ID NO: 16594 - DNA, 20 bp, synthetic construct
  misc_feature 1..20: note = chemically synthesized
  source 1..20: mol_type = other DNA
attcacttcaagaacaggag

SEQ ID NO: 16595 - DNA, 20 bp, synthetic construct
  misc_feature 1..20: note = chemically synthesized
  source 1..20: mol_type = other DNA
tcacttcaagaacaggagca

SEQ ID NO: 16596 - DNA, 20 bp, synthetic construct
  misc_feature 1..20: note = chemically synthesized
  source 1..20: mol_type = other DNA
cacttcaagaacaggagcag

SEQ ID NO: 16597 - DNA, 20 bp, synthetic construct
  misc_feature 1..20: note = chemically synthesized
  source 1..20: mol_type = other DNA
acttcaagaacaggagcaga

SEQ ID NO: 16598 - DNA, 20 bp, synthetic construct
  misc_feature 1..20: note = chemically synthesized
  source 1..20: mol_type = other DNA
cttcaagaacaggagcagag

SEQ ID NO: 16599 - DNA, 20 bp, synthetic construct
  misc_feature 1..20: note = chemically synthesized
  source 1..20: mol_type = other DNA
ttcaagaacaggagcagagg

SEQ ID NO: 16600 - DNA, 20 bp, synthetic construct
  misc_feature 1..20: note = chemically synthesized
  source 1..20: mol_type = other DNA
aacaggagcagagggggaca

SEQ ID NO: 16601 - DNA, 20 bp, synthetic construct
  misc_feature 1..20: note = chemically synthesized
  source 1..20: mol_type = other DNA
tctctgtgtttattctgtga

SEQ ID NO: 16602 - DNA, 20 bp, synthetic construct
  misc_feature 1..20: note = chemically synthesized
  source 1..20: mol_type = other DNA
cacacacacacacacaaaac

SEQ ID NO: 16603 - DNA, 20 bp, synthetic construct
  misc_feature 1..20: note = chemically synthesized
  source 1..20: mol_type = other DNA
cccattccttgttgtgttgc

SEQ ID NO: 16604 - DNA, 20 bp, synthetic construct
  misc_feature 1..20: note = chemically synthesized
  source 1..20: mol_type = other DNA
caagttgtgcctttactata

SEQ ID NO: 16605 - DNA, 20 bp, synthetic construct
  misc_feature 1..20: note = chemically synthesized
  source 1..20: mol_type = other DNA
aagttgtgcctttactataa

SEQ ID NO: 16606 - DNA, 20 bp, synthetic construct
  misc_feature 1..20: note = chemically synthesized
  source 1..20: mol_type = other DNA
tgttttgcacacctttctct

SEQ ID NO: 16607 - DNA, 20 bp, synthetic construct
  misc_feature 1..20: note = chemically synthesized
  source 1..20: mol_type = other DNA
cacctttctcttagtgaatg

SEQ ID NO: 16608 - DNA, 20 bp, synthetic construct
  misc_feature 1..20: note = chemically synthesized
  source 1..20: mol_type = other DNA
gtgaatgtggcatataattg

SEQ ID NO: 16609 - DNA, 20 bp, synthetic construct
  misc_feature 1..20: note = chemically synthesized
  source 1..20: mol_type = other DNA
gaatgtggcatataattgtg

SEQ ID NO: 16610 - DNA, 20 bp, synthetic construct
  misc_feature 1..20: note = chemically synthesized
  source 1..20: mol_type = other DNA
tataattgtggagctgcaca

SEQ ID NO: 16611 - DNA, 20 bp, synthetic construct
  misc_feature 1..20: note = chemically synthesized
  source 1..20: mol_type = other DNA
ataattgtggagctgcacat

SEQ ID NO: 16612 - DNA, 20 bp, synthetic construct
  misc_feature 1..20: note = chemically synthesized
  source 1..20: mol_type = other DNA
ttgtggagctgcacatgggc

SEQ ID NO: 16613 - DNA, 20 bp, synthetic construct
  misc_feature 1..20: note = chemically synthesized
  source 1..20: mol_type = other DNA
catgggctggaaaatgcaac

SEQ ID NO: 16614 - DNA, 20 bp, synthetic construct
  misc_feature 1..20: note = chemically synthesized
  source 1..20: mol_type = other DNA
atgggctggaaaatgcaact

SEQ ID NO: 16615 - DNA, 20 bp, synthetic construct
  misc_feature 1..20: note = chemically synthesized
  source 1..20: mol_type = other DNA
ctggaaaatgcaactgggtg

SEQ ID NO: 16616 - DNA, 20 bp, synthetic construct
  misc_feature 1..20: note = chemically synthesized
  source 1..20: mol_type = other DNA
caactgggtgtagaaacgtg

SEQ ID NO: 16617 - DNA, 20 bp, synthetic construct
  misc_feature 1..20: note = chemically synthesized
  source 1..20: mol_type = other DNA
aactgggtgtagaaacgtgc

SEQ ID NO: 16618 - DNA, 20 bp, synthetic construct
  misc_feature 1..20: note = chemically synthesized
  source 1..20: mol_type = other DNA
tgggtgtagaaacgtgcagg

SEQ ID NO: 16619 - DNA, 20 bp, synthetic construct
  misc_feature 1..20: note = chemically synthesized
  source 1..20: mol_type = other DNA
gggtgtagaaacgtgcaggc

SEQ ID NO: 16620 - DNA, 20 bp, synthetic construct
  misc_feature 1..20: note = chemically synthesized
  source 1..20: mol_type = other DNA
ggtgtagaaacgtgcaggca

SEQ ID NO: 16621 - DNA, 20 bp, synthetic construct
  misc_feature 1..20: note = chemically synthesized
  source 1..20: mol_type = other DNA
tagaaacgtgcaggcagggt

SEQ ID NO: 16622 - DNA, 20 bp, synthetic construct
  misc_feature 1..20: note = chemically synthesized
  source 1..20: mol_type = other DNA
agaaacgtgcaggcagggtc

SEQ ID NO: 16623 - DNA, 20 bp, synthetic construct
  misc_feature 1..20: note = chemically synthesized
  source 1..20: mol_type = other DNA
acgtgcaggcagggtcagga

SEQ ID NO: 16624 - DNA, 20 bp, synthetic construct
  misc_feature 1..20: note = chemically synthesized
  source 1..20: mol_type = other DNA
cgtgcaggcagggtcaggac

SEQ ID NO: 16625 - DNA, 20 bp, synthetic construct
  misc_feature 1..20: note = chemically synthesized
  source 1..20: mol_type = other DNA
gggtcaggacaggcaacctt

SEQ ID NO: 16626 - DNA, 20 bp, synthetic construct
  misc_feature 1..20: note = chemically synthesized
  source 1..20: mol_type = other DNA
aggacaggcaaccttcagct

SEQ ID NO: 16627 - DNA, 20 bp, synthetic construct
  misc_feature 1..20: note = chemically synthesized
  source 1..20: mol_type = other DNA
ggacaggcaaccttcagctc

SEQ ID NO: 16628 - DNA, 20 bp, synthetic construct
  misc_feature 1..20: note = chemically synthesized
  source 1..20: mol_type = other DNA
gacaggcaaccttcagctca

SEQ ID NO: 16629 - DNA, 20 bp, synthetic construct
  misc_feature 1..20: note = chemically synthesized
  source 1..20: mol_type = other DNA
caggcaaccttcagctcagg

SEQ ID NO: 16630 - DNA, 20 bp, synthetic construct
  misc_feature 1..20: note = chemically synthesized
  source 1..20: mol_type = other DNA
aggcaaccttcagctcaggg

SEQ ID NO: 16631 - DNA, 20 bp, synthetic construct
  misc_feature 1..20: note = chemically synthesized
  source 1..20: mol_type = other DNA
gcaaccttcagctcagggag

SEQ ID NO: 16632 - DNA, 20 bp, synthetic construct
  misc_feature 1..20: note = chemically synthesized
  source 1..20: mol_type = other DNA
caaccttcagctcagggagg

SEQ ID NO: 16633 - DNA, 20 bp, synthetic construct
  misc_feature 1..20: note = chemically synthesized
  source 1..20: mol_type = other DNA
cttcagctcagggaggaggc

SEQ ID NO: 16634 - DNA, 20 bp, synthetic construct
  misc_feature 1..20: note = chemically synthesized
  source 1..20: mol_type = other DNA
agctcagggaggaggcgagt

SEQ ID NO: 16635 - DNA, 20 bp, synthetic construct
  misc_feature 1..20: note = chemically synthesized
  source 1..20: mol_type = other DNA
gcgagttggatgcttattaa

SEQ ID NO: 16636 - DNA, 20 bp, synthetic construct
  misc_feature 1..20: note = chemically synthesized
  source 1..20: mol_type = other DNA
tgcttattaatggcatcttt

SEQ ID NO: 16637 - DNA, 20 bp, synthetic construct
  misc_feature 1..20: note = chemically synthesized
  source 1..20: mol_type = other DNA
cttattaatggcatctttta

SEQ ID NO: 16638 - DNA, 20 bp, synthetic construct
  misc_feature 1..20: note = chemically synthesized
  source 1..20: mol_type = other DNA
aatggcatcttttagagtcc

SEQ ID NO: 16639 - DNA, 20 bp, synthetic construct
  misc_feature 1..20: note = chemically synthesized
  source 1..20: mol_type = other DNA
aaatcattaatttcacactg

SEQ ID NO: 16640 - DNA, 20 bp, synthetic construct
  misc_feature 1..20: note = chemically synthesized
  source 1..20: mol_type = other DNA
ttcacactgcagcttccatg

SEQ ID NO: 16641 - DNA, 20 bp, synthetic construct
  misc_feature 1..20: note = chemically synthesized
  source 1..20: mol_type = other DNA
actgcagcttccatgtagtt

SEQ ID NO: 16642 - DNA, 20 bp, synthetic construct
  misc_feature 1..20: note = chemically synthesized
  source 1..20: mol_type = other DNA
tccatgtagtttggctaatg

SEQ ID NO: 16643 - DNA, 20 bp, synthetic construct
  misc_feature 1..20: note = chemically synthesized
  source 1..20: mol_type = other DNA
ccatgtagtttggctaatgt

SEQ ID NO: 16644 - DNA, 20 bp, synthetic construct
  misc_feature 1..20: note = chemically synthesized
  source 1..20: mol_type = other DNA
atgtagtttggctaatgtgg

SEQ ID NO: 16645 - DNA, 20 bp, synthetic construct
  misc_feature 1..20: note = chemically synthesized
  source 1..20: mol_type = other DNA
ctaatgtgggagtactaaat

SEQ ID NO: 16646 - DNA, 20 bp, synthetic construct
  misc_feature 1..20: note = chemically synthesized
  source 1..20: mol_type = other DNA
taatgtgggagtactaaatt

SEQ ID NO: 16647 - DNA, 20 bp, synthetic construct
  misc_feature 1..20: note = chemically synthesized
  source 1..20: mol_type = other DNA
aatgtgggagtactaaattg

SEQ ID NO: 16648 - DNA, 20 bp, synthetic construct
  misc_feature 1..20: note = chemically synthesized
  source 1..20: mol_type = other DNA
cataaaaaacatgcaaatcc

SEQ ID NO: 16649 - DNA, 20 bp, synthetic construct
  misc_feature 1..20: note = chemically synthesized
  source 1..20: mol_type = other DNA
ataaaaaacatgcaaatcct

SEQ ID NO: 16650 - DNA, 20 bp, synthetic construct
  misc_feature 1..20: note = chemically synthesized
  source 1..20: mol_type = other DNA
taaaaaacatgcaaatccta

SEQ ID NO: 16651 - DNA, 20 bp, synthetic construct
  misc_feature 1..20: note = chemically synthesized
  source 1..20: mol_type = other DNA
aatcctagggaaacattttt

SEQ ID NO: 16652 - DNA, 20 bp, synthetic construct
  misc_feature 1..20: note = chemically synthesized
  source 1..20: mol_type = other DNA
ctcaatgaaaatgtttaata

SEQ ID NO: 16653 - DNA, 20 bp, synthetic construct
  misc_feature 1..20: note = chemically synthesized
  source 1..20: mol_type = other DNA
tcaatgaaaatgtttaataa

SEQ ID NO: 16654 - DNA, 20 bp, synthetic construct
  misc_feature 1..20: note = chemically synthesized
  source 1..20: mol_type = other DNA
aatgaaaatgtttaataaag

SEQ ID NO: 16655 - DNA, 20 bp, synthetic construct
  misc_feature 1..20: note = chemically synthesized
  source 1..20: mol_type = other DNA
aaatgtttaataaaggagaa

SEQ ID NO: 16656 - DNA, 20 bp, synthetic construct
  misc_feature 1..20: note = chemically synthesized
  source 1..20: mol_type = other DNA
aatgtttaataaaggagaat

SEQ ID NO: 16657 - DNA, 20 bp, synthetic construct
  misc_feature 1..20: note = chemically synthesized
  source 1..20: mol_type = other DNA
aataaaggagaataggtgaa

SEQ ID NO: 16658 - DNA, 20 bp, synthetic construct
  misc_feature 1..20: note = chemically synthesized
  source 1..20: mol_type = other DNA
aaaggagaataggtgaatgg

SEQ ID NO: 16659 - DNA, 20 bp, synthetic construct
  misc_feature 1..20: note = chemically synthesized
  source 1..20: mol_type = other DNA
tgaatggtggctttgcgtgc

SEQ ID NO: 16660 - DNA, 20 bp, synthetic construct
  misc_feature 1..20: note = chemically synthesized
  source 1..20: mol_type = other DNA
tggtggctttgcgtgctggt

SEQ ID NO: 16661 - DNA, 20 bp, synthetic construct
  misc_feature 1..20: note = chemically synthesized
  source 1..20: mol_type = other DNA
ggctttgcgtgctggtcagt

SEQ ID NO: 16662 - DNA, 20 bp, synthetic construct
  misc_feature 1..20: note = chemically synthesized
  source 1..20: mol_type = other DNA
ttgcgtgctggtcagtaaga

SEQ ID NO: 16663 - DNA, 20 bp, synthetic construct
  misc_feature 1..20: note = chemically synthesized
  source 1..20: mol_type = other DNA
tgcgtgctggtcagtaagaa

SEQ ID NO: 16664 - DNA, 20 bp, synthetic construct
  misc_feature 1..20: note = chemically synthesized
  source 1..20: mol_type = other DNA
gtaagaaaggaaacaaattt

SEQ ID NO: 16665 - DNA, 20 bp, synthetic construct
  misc_feature 1..20: note = chemically synthesized
  source 1..20: mol_type = other DNA
aacaaattttggctttcctt

SEQ ID NO: 16666 - DNA, 20 bp, synthetic construct
  misc_feature 1..20: note = chemically synthesized
  source 1..20: mol_type = other DNA
acaaattttggctttccttt

SEQ ID NO: 16667 - DNA, 20 bp, synthetic construct
  misc_feature 1..20: note = chemically synthesized
  source 1..20: mol_type = other DNA
caaattttggctttcctttg

SEQ ID NO: 16668 - DNA, 20 bp, synthetic construct
  misc_feature 1..20: note = chemically synthesized
  source 1..20: mol_type = other DNA
aaattttggctttcctttgg

SEQ ID NO: 16669 - DNA, 20 bp, synthetic construct
  misc_feature 1..20: note = chemically synthesized
  source 1..20: mol_type = other DNA
aattttggctttcctttggg

SEQ ID NO: 16670 - DNA, 20 bp, synthetic construct
  misc_feature 1..20: note = chemically synthesized
  source 1..20: mol_type = other DNA
ggaaatattaaatttaaccg

SEQ ID NO: 16671 - DNA, 20 bp, synthetic construct
  misc_feature 1..20: note = chemically synthesized
  source 1..20: mol_type = other DNA
aatattaaatttaaccgaag

SEQ ID NO: 16672 - DNA, 20 bp, synthetic construct
  misc_feature 1..20: note = chemically synthesized
  source 1..20: mol_type = other DNA
ttaaatttaaccgaagtaga

SEQ ID NO: 16673 - DNA, 20 bp, synthetic construct
  misc_feature 1..20: note = chemically synthesized
  source 1..20: mol_type = other DNA
tttaaccgaagtagaaagca

SEQ ID NO: 16674 - DNA, 20 bp, synthetic construct
  misc_feature 1..20: note = chemically synthesized
  source 1..20: mol_type = other DNA
accgaagtagaaagcacagc

SEQ ID NO: 16675 - DNA, 20 bp, synthetic construct
  misc_feature 1..20: note = chemically synthesized
  source 1..20: mol_type = other DNA
ccgaagtagaaagcacagct

SEQ ID NO: 16676 - DNA, 20 bp, synthetic construct
  misc_feature 1..20: note = chemically synthesized
  source 1..20: mol_type = other DNA
cgaagtagaaagcacagcta

SEQ ID NO: 16677 - DNA, 20 bp, synthetic construct
  misc_feature 1..20: note = chemically synthesized
  source 1..20: mol_type = other DNA
aagtagaaagcacagctagg

SEQ ID NO: 16678 - DNA, 20 bp, synthetic construct
  misc_feature 1..20: note = chemically synthesized
  source 1..20: mol_type = other DNA
cacagctagggagatgcacc

SEQ ID NO: 16679 - DNA, 20 bp, synthetic construct
  misc_feature 1..20: note = chemically synthesized
  source 1..20: mol_type = other DNA
atgcaccaagattgcgtcac

SEQ ID NO: 16680 - DNA, 20 bp, synthetic construct
  misc_feature 1..20: note = chemically synthesized
  source 1..20: mol_type = other DNA
gatgttaatttaatctactt

SEQ ID NO: 16681 - DNA, 20 bp, synthetic construct
  misc_feature 1..20: note = chemically synthesized
  source 1..20: mol_type = other DNA
ttaatttaatctactttggt

SEQ ID NO: 16682 - DNA, 20 bp, synthetic construct
  misc_feature 1..20: note = chemically synthesized
  source 1..20: mol_type = other DNA
ttcacaccctttattgcaca

SEQ ID NO: 16683 - DNA, 20 bp, synthetic construct
  misc_feature 1..20: note = chemically synthesized
  source 1..20: mol_type = other DNA
acaccctttattgcacaaag

SEQ ID NO: 16684 - DNA, 20 bp, synthetic construct
  misc_feature 1..20: note = chemically synthesized
  source 1..20: mol_type = other DNA
catttgacaaaatttacccc

SEQ ID NO: 16685 - DNA, 20 bp, synthetic construct
  misc_feature 1..20: note = chemically synthesized
  source 1..20: mol_type = other DNA
acaaaatttaccccaagccc

SEQ ID NO: 16686 - DNA, 20 bp, synthetic construct
  misc_feature 1..20: note = chemically synthesized
  source 1..20: mol_type = other DNA
cccaagtctgtttttacata

SEQ ID NO: 16687 - DNA, 20 bp, synthetic construct
  misc_feature 1..20: note = chemically synthesized
  source 1..20: mol_type = other DNA
aagtctgtttttacatacag

SEQ ID NO: 16688 - DNA, 20 bp, synthetic construct
  misc_feature 1..20: note = chemically synthesized
  source 1..20: mol_type = other DNA
gtttttacatacagtagtac

SEQ ID NO: 16689 - DNA, 20 bp, synthetic construct
  misc_feature 1..20: note = chemically synthesized
  source 1..20: mol_type = other DNA
taccagctttgtgcaataaa

SEQ ID NO: 16690 - DNA, 20 bp, synthetic construct
  misc_feature 1..20: note = chemically synthesized
  source 1..20: mol_type = other DNA
tttgtgcaataaaaagcact

SEQ ID NO: 16691 - DNA, 20 bp, synthetic construct
  misc_feature 1..20: note = chemically synthesized
  source 1..20: mol_type = other DNA
aataaaaagcacttagcatc

SEQ ID NO: 16692 - DNA, 20 bp, synthetic construct
  misc_feature 1..20: note = chemically synthesized
  source 1..20: mol_type = other DNA
aaaagcacttagcatcaagc

SEQ ID NO: 16693 - DNA, 20 bp, synthetic construct
  misc_feature 1..20: note = chemically synthesized
  source 1..20: mol_type = other DNA
acttagcatcaagctggacc

SEQ ID NO: 16694 - DNA, 20 bp, synthetic construct
  misc_feature 1..20: note = chemically synthesized
  source 1..20: mol_type = other DNA
gcatcaagctggacccagcc

SEQ ID NO: 16695 - DNA, 20 bp, synthetic construct
  misc_feature 1..20: note = chemically synthesized
  source 1..20: mol_type = other DNA
ctggcaccttgccacttttt

SEQ ID NO: 16696 - DNA, 20 bp, synthetic construct
  misc_feature 1..20: note = chemically synthesized
  source 1..20: mol_type = other DNA
ccttgccacttttttagcat

SEQ ID NO: 16697 - DNA, 20 bp, synthetic construct
  misc_feature 1..20: note = chemically synthesized
  source 1..20: mol_type = other DNA
tagcatgagatttaatcacc

SEQ ID NO: 16698 - DNA, 20 bp, synthetic construct
  misc_feature 1..20: note = chemically synthesized
  source 1..20: mol_type = other DNA
atttaatcaccaagcatctt

SEQ ID NO: 16699 - DNA, 20 bp, synthetic construct
  misc_feature 1..20: note = chemically synthesized
  source 1..20: mol_type = other DNA
ttagtacctttctgcttgtt

SEQ ID NO: 16700 - DNA, 20 bp, synthetic construct
  misc_feature 1..20: note = chemically synthesized
  source 1..20: mol_type = other DNA
ctgcttgttcagatttcatt

SEQ ID NO: 16701 - DNA, 20 bp, synthetic construct
  misc_feature 1..20: note = chemically synthesized
  source 1..20: mol_type = other DNA
tgcttgttcagatttcattt

SEQ ID NO: 16702 - DNA, 20 bp, synthetic construct
  misc_feature 1..20: note = chemically synthesized
  source 1..20: mol_type = other DNA
ttcagatttcatttgggtca

SEQ ID NO: 16703 - DNA, 20 bp, synthetic construct
  misc_feature 1..20: note = chemically synthesized
  source 1..20: mol_type = other DNA
catttgggtcatggctatgt

SEQ ID NO: 16704 - DNA, 20 bp, synthetic construct
  misc_feature 1..20: note = chemically synthesized
  source 1..20: mol_type = other DNA
ttgggtcatggctatgtcag

SEQ ID NO: 16705 - DNA, 20 bp, synthetic construct
  misc_feature 1..20: note = chemically synthesized
  source 1..20: mol_type = other DNA
gtcagcagtgttgttatttc

SEQ ID NO: 16706 - DNA, 20 bp, synthetic construct
  misc_feature 1..20: note = chemically synthesized
  source 1..20: mol_type = other DNA
tcagcagtgttgttatttca

SEQ ID NO: 16707 - DNA, 20 bp, synthetic construct
  misc_feature 1..20: note = chemically synthesized
  source 1..20: mol_type = other DNA
tatttcaaggattaaaaaaa

SEQ ID NO: 16708 - DNA, 20 bp, synthetic construct
  misc_feature 1..20: note = chemically synthesized
  source 1..20: mol_type = other DNA
taaaaaaaaagattctaact

SEQ ID NO: 16709 - DNA, 20 bp, synthetic construct
  misc_feature 1..20: note = chemically synthesized
  source 1..20: mol_type = other DNA
aaaaaaaagattctaactta

SEQ ID NO: 16710 - DNA, 20 bp, synthetic construct
  misc_feature 1..20: note = chemically synthesized
  source 1..20: mol_type = other DNA
ttttaacattatttcaaatc

SEQ ID NO: 16711 - DNA, 20 bp, synthetic construct
  misc_feature 1..20: note = chemically synthesized
  source 1..20: mol_type = other DNA
taacattatttcaaatcaag

SEQ ID NO: 16712 - DNA, 20 bp, synthetic construct
  misc_feature 1..20: note = chemically synthesized
  source 1..20: mol_type = other DNA
aacattatttcaaatcaagc

SEQ ID NO: 16713 - DNA, 20 bp, synthetic construct
  misc_feature 1..20: note = chemically synthesized
  source 1..20: mol_type = other DNA
ttttatgttatgtatcaatt

SEQ ID NO: 16714 - DNA, 20 bp, synthetic construct
  misc_feature 1..20: note = chemically synthesized
  source 1..20: mol_type = other DNA
caatttggatgacattaatg

SEQ ID NO: 16715 - DNA, 20 bp, synthetic construct
  misc_feature 1..20: note = chemically synthesized
  source 1..20: mol_type = other DNA
tgaagttcataaaatatgtt

SEQ ID NO: 16716 - DNA, 20 bp, synthetic construct
  misc_feature 1..20: note = chemically synthesized
  source 1..20: mol_type = other DNA
gttcagactatataatttaa

SEQ ID NO: 16717 - DNA, 20 bp, synthetic construct
  misc_feature 1..20: note = chemically synthesized
  source 1..20: mol_type = other DNA
atttttatttgtaatacaaa

SEQ ID NO: 16718 - DNA, 20 bp, synthetic construct
  misc_feature 1..20: note = chemically synthesized
  source 1..20: mol_type = other DNA
tttttatttgtaatacaaat

SEQ ID NO: 16719 - DNA, 20 bp, synthetic construct
  misc_feature 1..20: note = chemically synthesized
  source 1..20: mol_type = other DNA
ctgttgtctccctccctcct

SEQ ID NO: 16720 - DNA, 20 bp, synthetic construct
  misc_feature 1..20: note = chemically synthesized
  source 1..20: mol_type = other DNA
cttggttcttttctcctacc

SEQ ID NO: 16721 - DNA, 20 bp, synthetic construct
  misc_feature 1..20: note = chemically synthesized
  source 1..20: mol_type = other DNA
ttggttcttttctcctacct

SEQ ID NO: 16722 - DNA, 20 bp, synthetic construct
  misc_feature 1..20: note = chemically synthesized
  source 1..20: mol_type = other DNA
ttttctcctacctaggtaaa

SEQ ID NO: 16723 - DNA, 20 bp, synthetic construct
  misc_feature 1..20: note = chemically synthesized
  source 1..20: mol_type = other DNA
tttctcctacctaggtaaat

SEQ ID NO: 16724 - DNA, 20 bp, synthetic construct
  misc_feature 1..20: note = chemically synthesized
  source 1..20: mol_type = other DNA
ggtaaatgggcatccttaaa

SEQ ID NO: 16725 - DNA, 20 bp, synthetic construct
  misc_feature 1..20: note = chemically synthesized
  source 1..20: mol_type = other DNA
cagcttctcccctttacgac

SEQ ID NO: 16726 - DNA, 20 bp, synthetic construct
  misc_feature 1..20: note = chemically synthesized
  source 1..20: mol_type = other DNA
agcttctcccctttacgacc

SEQ ID NO: 16727 - DNA, 20 bp, synthetic construct
  misc_feature 1..20: note = chemically synthesized
  source 1..20: mol_type = other DNA
gcttctcccctttacgacca

SEQ ID NO: 16728 - DNA, 20 bp, synthetic construct
  misc_feature 1..20: note = chemically synthesized
  source 1..20: mol_type = other DNA
tcccctttacgaccagggta

SEQ ID NO: 16729 - DNA, 20 bp, synthetic construct
  misc_feature 1..20: note = chemically synthesized
  source 1..20: mol_type = other DNA
ccctttacgaccagggtata

SEQ ID NO: 16730 - DNA, 20 bp, synthetic construct
  misc_feature 1..20: note = chemically synthesized
  source 1..20: mol_type = other DNA
acgaccagggtatagagcac

SEQ ID NO: 16731 - DNA, 20 bp, synthetic construct
  misc_feature 1..20: note = chemically synthesized
  source 1..20: mol_type = other DNA
tatagagcactggccaatat

SEQ ID NO: 16732 - DNA, 20 bp, synthetic construct
  misc_feature 1..20: note = chemically synthesized
  source 1..20: mol_type = other DNA
tacctttgtaatttgccacg

SEQ ID NO: 16733 - DNA, 20 bp, synthetic construct
  misc_feature 1..20: note = chemically synthesized
  source 1..20: mol_type = other DNA
caacatgacctaattaattt

SEQ ID NO: 16734 - DNA, 20 bp, synthetic construct
  misc_feature 1..20: note = chemically synthesized
  source 1..20: mol_type = other DNA
acgaaccatattattgctac

SEQ ID NO: 16735 - DNA, 20 bp, synthetic construct
  misc_feature 1..20: note = chemically synthesized
  source 1..20: mol_type = other DNA
gaaccatattattgctactg

SEQ ID NO: 16736 - DNA, 20 bp, synthetic construct
  misc_feature 1..20: note = chemically synthesized
  source 1..20: mol_type = other DNA
tctgtcacaaacttaatttc

SEQ ID NO: 16737 - DNA, 20 bp, synthetic construct
  misc_feature 1..20: note = chemically synthesized
  source 1..20: mol_type = other DNA
ctgtcacaaacttaatttcc

SEQ ID NO: 16738 - DNA, 20 bp, synthetic construct
  misc_feature 1..20: note = chemically synthesized
  source 1..20: mol_type = other DNA
ggaaatgtaacctgacaaat

SEQ ID NO: 16739 - DNA, 20 bp, synthetic construct
  misc_feature 1..20: note = chemically synthesized
  source 1..20: mol_type = other DNA
cctgacaaataagaattctt

SEQ ID NO: 16740 - DNA, 20 bp, synthetic construct
  misc_feature 1..20: note = chemically synthesized
  source 1..20: mol_type = other DNA
tagctctctacatgtgctcc

SEQ ID NO: 16741 - DNA, 20 bp, synthetic construct
  misc_feature 1..20: note = chemically synthesized
  source 1..20: mol_type = other DNA
gctctctacatgtgctccta

SEQ ID NO: 16742 - DNA, 20 bp, synthetic construct
  misc_feature 1..20: note = chemically synthesized
  source 1..20: mol_type = other DNA
acatgtgctcctagagacca

SEQ ID NO: 16743 - DNA, 20 bp, synthetic construct
  misc_feature 1..20: note = chemically synthesized
  source 1..20: mol_type = other DNA
catgtgctcctagagaccaa

SEQ ID NO: 16744 - DNA, 20 bp, synthetic construct
  misc_feature 1..20: note = chemically synthesized
  source 1..20: mol_type = other DNA
gtgctcctagagaccaaagg

SEQ ID NO: 16745 - DNA, 20 bp, synthetic construct
  misc_feature 1..20: note = chemically synthesized
  source 1..20: mol_type = other DNA
taaaataataataattttaa

SEQ ID NO: 16746 - DNA, 20 bp, synthetic construct
  misc_feature 1..20: note = chemically synthesized
  source 1..20: mol_type = other DNA
aataataattttaaaagtgc

SEQ ID NO: 16747 - DNA, 20 bp, synthetic construct
  misc_feature 1..20: note = chemically synthesized
  source 1..20: mol_type = other DNA
taaaagtgccagcattatta

SEQ ID NO: 16748 - DNA, 20 bp, synthetic construct
  misc_feature 1..20: note = chemically synthesized
  source 1..20: mol_type = other DNA
agtgccagcattattaaagc

SEQ ID NO: 16749 - DNA, 20 bp, synthetic construct
  misc_feature 1..20: note = chemically synthesized
  source 1..20: mol_type = other DNA
ttgatgccaaactcaatttg

SEQ ID NO: 16750 - DNA, 20 bp, synthetic construct
  misc_feature 1..20: note = chemically synthesized
  source 1..20: mol_type = other DNA
tgccaaactcaatttgaagc

SEQ ID NO: 16751 - DNA, 20 bp, synthetic construct
  misc_feature 1..20: note = chemically synthesized
  source 1..20: mol_type = other DNA
aatttgaagccagtaaacat

SEQ ID NO: 16752 - DNA, 20 bp, synthetic construct
  misc_feature 1..20: note = chemically synthesized
  source 1..20: mol_type = other DNA
catcagactgtatttctaat

SEQ ID NO: 16753 - DNA, 20 bp, synthetic construct
  misc_feature 1..20: note = chemically synthesized
  source 1..20: mol_type = other DNA
aaatgtaacttattccatat

SEQ ID NO: 16754 - DNA, 20 bp, synthetic construct
  misc_feature 1..20: note = chemically synthesized
  source 1..20: mol_type = other DNA
aatgtaacttattccatatt

SEQ ID NO: 16755 - DNA, 20 bp, synthetic construct
  misc_feature 1..20: note = chemically synthesized
  source 1..20: mol_type = other DNA
ttattccatattgggttcat

SEQ ID NO: 16756 - DNA, 20 bp, synthetic construct
  misc_feature 1..20: note = chemically synthesized
  source 1..20: mol_type = other DNA
tttgtctccctgctttttac

SEQ ID NO: 16757 - DNA, 20 bp, synthetic construct
  misc_feature 1..20: note = chemically synthesized
  source 1..20: mol_type = other DNA
tctccctgctttttactggc

SEQ ID NO: 16758 - DNA, 20 bp, synthetic construct
  misc_feature 1..20: note = chemically synthesized
  source 1..20: mol_type = other DNA
tatgcatttttaaaacattt

SEQ ID NO: 16759 - DNA, 20 bp, synthetic construct
  misc_feature 1..20: note = chemically synthesized
  source 1..20: mol_type = other DNA
atttttaaaacatttcagca

SEQ ID NO: 16760 - DNA, 20 bp, synthetic construct
  misc_feature 1..20: note = chemically synthesized
  source 1..20: mol_type = other DNA
tttttaaaacatttcagcaa

SEQ ID NO: 16761 - DNA, 20 bp, synthetic construct
  misc_feature 1..20: note = chemically synthesized
  source 1..20: mol_type = other DNA
gcaaaggcttttgctgttct

SEQ ID NO: 16762 - DNA, 20 bp, synthetic construct
  misc_feature 1..20: note = chemically synthesized
  source 1..20: mol_type = other DNA
aaggcttttgctgttcttag

SEQ ID NO: 16763 - DNA, 20 bp, synthetic construct
  misc_feature 1..20: note = chemically synthesized
  source 1..20: mol_type = other DNA
aggcttttgctgttcttagc

SEQ ID NO: 16764 - DNA, 20 bp, synthetic construct
  misc_feature 1..20: note = chemically synthesized
  source 1..20: mol_type = other DNA
ggcttttgctgttcttagca

SEQ ID NO: 16765 - DNA, 20 bp, synthetic construct
  misc_feature 1..20: note = chemically synthesized
  source 1..20: mol_type = other DNA
tttgctgttcttagcagggt

SEQ ID NO: 16766 - DNA, 20 bp, synthetic construct
  misc_feature 1..20: note = chemically synthesized
  source 1..20: mol_type = other DNA
tcttagcagggttagtaact

SEQ ID NO: 16767 - DNA, 20 bp, synthetic construct
  misc_feature 1..20: note = chemically synthesized
  source 1..20: mol_type = other DNA
cttagcagggttagtaactt

SEQ ID NO: 16768 - DNA, 20 bp, synthetic construct
  misc_feature 1..20: note = chemically synthesized
  source 1..20: mol_type = other DNA
ttagcagggttagtaacttg

SEQ ID NO: 16769 - DNA, 20 bp, synthetic construct
  misc_feature 1..20: note = chemically synthesized
  source 1..20: mol_type = other DNA
gtaacttggggtctatttct

SEQ ID NO: 16770 - DNA, 20 bp, synthetic construct
  misc_feature 1..20: note = chemically synthesized
  source 1..20: mol_type = other DNA
gctcattcgtcattctgcaa

SEQ ID NO: 16771 - DNA, 20 bp, synthetic construct
  misc_feature 1..20: note = chemically synthesized
  source 1..20: mol_type = other DNA
cgtcattctgcaatggcatt

SEQ ID NO: 16772 - DNA, 20 bp, synthetic construct
  misc_feature 1..20: note = chemically synthesized
  source 1..20: mol_type = other DNA
attctgcaatggcattgagt

SEQ ID NO: 16773 - DNA, 20 bp, synthetic construct
  misc_feature 1..20: note = chemically synthesized
  source 1..20: mol_type = other DNA
ttctgcaatggcattgagtt

SEQ ID NO: 16774 - DNA, 20 bp, synthetic construct
  misc_feature 1..20: note = chemically synthesized
  source 1..20: mol_type = other DNA
gcaatggcattgagttaggt

SEQ ID NO: 16775 - DNA, 20 bp, synthetic construct
  misc_feature 1..20: note = chemically synthesized
  source 1..20: mol_type = other DNA
tggcattgagttaggttggc

SEQ ID NO: 16776 - DNA, 20 bp, synthetic construct
  misc_feature 1..20: note = chemically synthesized
  source 1..20: mol_type = other DNA
ggcattgagttaggttggca

SEQ ID NO: 16777 - DNA, 20 bp, synthetic construct
  misc_feature 1..20: note = chemically synthesized
  source 1..20: mol_type = other DNA
gcattgagttaggttggcaa

SEQ ID NO: 16778 - DNA, 20 bp, synthetic construct
  misc_feature 1..20: note = chemically synthesized
  source 1..20: mol_type = other DNA
ttgagttaggttggcaaggg

SEQ ID NO: 16779 - DNA, 20 bp, synthetic construct
  misc_feature 1..20: note = chemically synthesized
  source 1..20: mol_type = other DNA
tgagttaggttggcaaggga

SEQ ID NO: 16780 - DNA, 20 bp, synthetic construct
  misc_feature 1..20: note = chemically synthesized
  source 1..20: mol_type = other DNA
ggttggcaagggaaggattt

SEQ ID NO: 16781 - DNA, 20 bp, synthetic construct
  misc_feature 1..20: note = chemically synthesized
  source 1..20: mol_type = other DNA
gttggcaagggaaggatttg

SEQ ID NO: 16782 - DNA, 20 bp, synthetic construct
  misc_feature 1..20: note = chemically synthesized
  source 1..20: mol_type = other DNA
caagggaaggatttgaggca

SEQ ID NO: 16783 - DNA, 20 bp, synthetic construct
  misc_feature 1..20: note = chemically synthesized
  source 1..20: mol_type = other DNA
aagggaaggatttgaggcat

SEQ ID NO: 16784 - DNA, 20 bp, synthetic construct
  misc_feature 1..20: note = chemically synthesized
  source 1..20: mol_type = other DNA
agggaaggatttgaggcatg

SEQ ID NO: 16785 - DNA, 20 bp, synthetic construct
  misc_feature 1..20: note = chemically synthesized
  source 1..20: mol_type = other DNA
gggaaggatttgaggcatgg

SEQ ID NO: 16786 - DNA, 20 bp, synthetic construct
  misc_feature 1..20: note = chemically synthesized
  source 1..20: mol_type = other DNA
ggaaggatttgaggcatggg

SEQ ID NO: 16787 - DNA, 20 bp, synthetic construct
  misc_feature 1..20: note = chemically synthesized
  source 1..20: mol_type = other DNA
aggatttgaggcatgggggg

SEQ ID NO: 16788 - DNA, 20 bp, synthetic construct
  misc_feature 1..20: note = chemically synthesized
  source 1..20: mol_type = other DNA
tttgaggcatggggggtggt

SEQ ID NO: 16789 - DNA, 20 bp, synthetic construct
  misc_feature 1..20: note = chemically synthesized
  source 1..20: mol_type = other DNA
ttgaggcatggggggtggtg

SEQ ID NO: 16790 - DNA, 20 bp, synthetic construct
  misc_feature 1..20: note = chemically synthesized
  source 1..20: mol_type = other DNA
ggtgaggtcacttctgatcc

SEQ ID NO: 16791 - DNA, 20 bp, synthetic construct
  misc_feature 1..20: note = chemically synthesized
  source 1..20: mol_type = other DNA
gaggtcacttctgatcccag

SEQ ID NO: 16792 - DNA, 20 bp, synthetic construct
  misc_feature 1..20: note = chemically synthesized
  source 1..20: mol_type = other DNA
aggtcacttctgatcccagc

SEQ ID NO: 16793 - DNA, 20 bp, synthetic construct
  misc_feature 1..20: note = chemically synthesized
  source 1..20: mol_type = other DNA
ggtcacttctgatcccagca

SEQ ID NO: 16794 - DNA, 20 bp, synthetic construct
  misc_feature 1..20: note = chemically synthesized
  source 1..20: mol_type = other DNA
cttctgatcccagcagggaa

SEQ ID NO: 16795 - DNA, 20 bp, synthetic construct
  misc_feature 1..20: note = chemically synthesized
  source 1..20: mol_type = other DNA
ttctgatcccagcagggaat

SEQ ID NO: 16796 - DNA, 20 bp, synthetic construct
  misc_feature 1..20: note = chemically synthesized
  source 1..20: mol_type = other DNA
gatcccagcagggaataggt

SEQ ID NO: 16797 - DNA, 20 bp, synthetic construct
  misc_feature 1..20: note = chemically synthesized
  source 1..20: mol_type = other DNA
agcttcatttgcctttacaa

SEQ ID NO: 16798 - DNA, 20 bp, synthetic construct
  misc_feature 1..20: note = chemically synthesized
  source 1..20: mol_type = other DNA
gcttcatttgcctttacaat

SEQ ID NO: 16799 - DNA, 20 bp, synthetic construct
  misc_feature 1..20: note = chemically synthesized
  source 1..20: mol_type = other DNA
ttgcctttacaataggcgca

SEQ ID NO: 16800 - DNA, 20 bp, synthetic construct
  misc_feature 1..20: note = chemically synthesized
  source 1..20: mol_type = other DNA
ggcgcacagttactgcacct

SEQ ID NO: 16801 - DNA, 20 bp, synthetic construct
  misc_feature 1..20: note = chemically synthesized
  source 1..20: mol_type = other DNA
cgcacagttactgcaccttg

SEQ ID NO: 16802 - DNA, 20 bp, synthetic construct
  misc_feature 1..20: note = chemically synthesized
  source 1..20: mol_type = other DNA
gcacagttactgcaccttgg

SEQ ID NO: 16803 - DNA, 20 bp, synthetic construct
  misc_feature 1..20: note = chemically synthesized
  source 1..20: mol_type = other DNA
acagttactgcaccttggag

SEQ ID NO: 16804 - DNA, 20 bp, synthetic construct
  misc_feature 1..20: note = chemically synthesized
  source 1..20: mol_type = other DNA
ctgcaccttggaggagctct

SEQ ID NO: 16805 - DNA, 20 bp, synthetic construct
  misc_feature 1..20: note = chemically synthesized
  source 1..20: mol_type = other DNA
tgcaccttggaggagctctc

SEQ ID NO: 16806 - DNA, 20 bp, synthetic construct
  misc_feature 1..20: note = chemically synthesized
  source 1..20: mol_type = other DNA
aggagctctcaggtgccgct

SEQ ID NO: 16807 - DNA, 20 bp, synthetic construct
  misc_feature 1..20: note = chemically synthesized
  source 1..20: mol_type = other DNA
gctctcaggtgccgctcaga

SEQ ID NO: 16808 - DNA, 20 bp, synthetic construct
  misc_feature 1..20: note = chemically synthesized
  source 1..20: mol_type = other DNA
ctctcaggtgccgctcagat

SEQ ID NO: 16809 - DNA, 20 bp, synthetic construct
  misc_feature 1..20: note = chemically synthesized
  source 1..20: mol_type = other DNA
ggcgcatgtaaatgccctgt

SEQ ID NO: 16810 - DNA, 20 bp, synthetic construct
  misc_feature 1..20: note = chemically synthesized
  source 1..20: mol_type = other DNA
tgtaaatgccctgtcagatg

SEQ ID NO: 16811 - DNA, 20 bp, synthetic construct
  misc_feature 1..20: note = chemically synthesized
  source 1..20: mol_type = other DNA
taaatgccctgtcagatgcg

SEQ ID NO: 16812 - DNA, 20 bp, synthetic construct
  misc_feature 1..20: note = chemically synthesized
  source 1..20: mol_type = other DNA
tgccctgtcagatgcggagc

SEQ ID NO: 16813 - DNA, 20 bp, synthetic construct
  misc_feature 1..20: note = chemically synthesized
  source 1..20: mol_type = other DNA
tccaccaccacaccataata

SEQ ID NO: 16814 - DNA, 20 bp, synthetic construct
  misc_feature 1..20: note = chemically synthesized
  source 1..20: mol_type = other DNA
caccataataaagctgtaca

SEQ ID NO: 16815 - DNA, 20 bp, synthetic construct
  misc_feature 1..20: note = chemically synthesized
  source 1..20: mol_type = other DNA
ataataaagctgtacacagc

SEQ ID NO: 16816 - DNA, 20 bp, synthetic construct
  misc_feature 1..20: note = chemically synthesized
  source 1..20: mol_type = other DNA
tacacagcaagcttaatatg

SEQ ID NO: 16817 - DNA, 20 bp, synthetic construct
  misc_feature 1..20: note = chemically synthesized
  source 1..20: mol_type = other DNA
cagcaagcttaatatgcagc

SEQ ID NO: 16818 - DNA, 20 bp, synthetic construct
  misc_feature 1..20: note = chemically synthesized
  source 1..20: mol_type = other DNA
agcttaatatgcagctagtc

SEQ ID NO: 16819 - DNA, 20 bp, synthetic construct
  misc_feature 1..20: note = chemically synthesized
  source 1..20: mol_type = other DNA
gcttaatatgcagctagtct

SEQ ID NO: 16820 - DNA, 20 bp, synthetic construct
  misc_feature 1..20: note = chemically synthesized
  source 1..20: mol_type = other DNA
cttaatatgcagctagtctg

SEQ ID NO: 16821 - DNA, 20 bp, synthetic construct
  misc_feature 1..20: note = chemically synthesized
  source 1..20: mol_type = other DNA
tctggggaattgtataaact

SEQ ID NO: 16822 - DNA, 20 bp, synthetic construct
  misc_feature 1..20: note = chemically synthesized
  source 1..20: mol_type = other DNA
gggaattgtataaacttaga

SEQ ID NO: 16823 - DNA, 20 bp, synthetic construct
  misc_feature 1..20: note = chemically synthesized
  source 1..20: mol_type = other DNA
ttgtataaacttagatagcc

SEQ ID NO: 16824 - DNA, 20 bp, synthetic construct
  misc_feature 1..20: note = chemically synthesized
  source 1..20: mol_type = other DNA
acttagatagcccagtgtga

SEQ ID NO: 16825 - DNA, 20 bp, synthetic construct
  misc_feature 1..20: note = chemically synthesized
  source 1..20: mol_type = other DNA
agatagcccagtgtgaaaga

SEQ ID NO: 16826 - DNA, 20 bp, synthetic construct
  misc_feature 1..20: note = chemically synthesized
  source 1..20: mol_type = other DNA
cccagtgtgaaagacagcaa

SEQ ID NO: 16827 - DNA, 20 bp, synthetic construct
  misc_feature 1..20: note = chemically synthesized
  source 1..20: mol_type = other DNA
gaaaaatgctcgatatgcca

SEQ ID NO: 16828 - DNA, 20 bp, synthetic construct
  misc_feature 1..20: note = chemically synthesized
  source 1..20: mol_type = other DNA
tcttgttctcctttgatcta

SEQ ID NO: 16829 - DNA, 20 bp, synthetic construct
  misc_feature 1..20: note = chemically synthesized
  source 1..20: mol_type = other DNA
acatcatccttttcttctct

SEQ ID NO: 16830 - DNA, 20 bp, synthetic construct
  misc_feature 1..20: note = chemically synthesized
  source 1..20: mol_type = other DNA
atcatccttttcttctcttg

SEQ ID NO: 16831 - DNA, 20 bp, synthetic construct
  misc_feature 1..20: note = chemically synthesized
  source 1..20: mol_type = other DNA
gccacctcccaattcaccac

SEQ ID NO: 16832 - DNA, 20 bp, synthetic construct
  misc_feature 1..20: note = chemically synthesized
  source 1..20: mol_type = other DNA
cagaatttttttgcatgtgc

SEQ ID NO: 16833 - DNA, 20 bp, synthetic construct
  misc_feature 1..20: note = chemically synthesized
  source 1..20: mol_type = other DNA
tttttttgcatgtgctggta

SEQ ID NO: 16834 - DNA, 20 bp, synthetic construct
  misc_feature 1..20: note = chemically synthesized
  source 1..20: mol_type = other DNA
tttttgcatgtgctggtatg

SEQ ID NO: 16835 - DNA, 20 bp, synthetic construct
  misc_feature 1..20: note = chemically synthesized
  source 1..20: mol_type = other DNA
gcaacataatttgtttcata

SEQ ID NO: 16836 - DNA, 20 bp, synthetic construct
  misc_feature 1..20: note = chemically synthesized
  source 1..20: mol_type = other DNA
ttgtttcatatggttaatta

SEQ ID NO: 16837 - DNA, 20 bp, synthetic construct
  misc_feature 1..20: note = chemically synthesized
  source 1..20: mol_type = other DNA
tgtttcatatggttaattac

SEQ ID NO: 16838 - DNA, 20 bp, synthetic construct
  misc_feature 1..20: note = chemically synthesized
  source 1..20: mol_type = other DNA
tgaatatttaaaattttaaa

SEQ ID NO: 16839 - DNA, 20 bp, synthetic construct
  misc_feature 1..20: note = chemically synthesized
  source 1..20: mol_type = other DNA
tttaaaattttaaatagcca

SEQ ID NO: 16840 - DNA, 20 bp, synthetic construct
  misc_feature 1..20: note = chemically synthesized
  source 1..20: mol_type = other DNA
attttaaatagccacagttc

SEQ ID NO: 16841 - DNA, 20 bp, synthetic construct
  misc_feature 1..20: note = chemically synthesized
  source 1..20: mol_type = other DNA
gttccagcttttcccgttaa

SEQ ID NO: 16842 - DNA, 20 bp, synthetic construct
  misc_feature 1..20: note = chemically synthesized
  source 1..20: mol_type = other DNA
aaaagtatgtgatttgaaca

SEQ ID NO: 16843 - DNA, 20 bp, synthetic construct
  misc_feature 1..20: note = chemically synthesized
  source 1..20: mol_type = other DNA
aaagtatgtgatttgaacaa

SEQ ID NO: 16844 - DNA, 20 bp, synthetic construct
  misc_feature 1..20: note = chemically synthesized
  source 1..20: mol_type = other DNA
aagtatgtgatttgaacaaa

SEQ ID NO: 16845 - DNA, 20 bp, synthetic construct
  misc_feature 1..20: note = chemically synthesized
  source 1..20: mol_type = other DNA
gtatgtgatttgaacaaagg

SEQ ID NO: 16846 - DNA, 20 bp, synthetic construct
  misc_feature 1..20: note = chemically synthesized
  source 1..20: mol_type = other DNA
tgatttgaacaaagggagta

SEQ ID NO: 16847 - DNA, 20 bp, synthetic construct
  misc_feature 1..20: note = chemically synthesized
  source 1..20: mol_type = other DNA
gagtacagtgtaaatatttg

SEQ ID NO: 16848 - DNA, 20 bp, synthetic construct
  misc_feature 1..20: note = chemically synthesized
  source 1..20: mol_type = other DNA
cacacacacacacacacaca

SEQ ID NO: 16849 - DNA, 20 bp, synthetic construct
  misc_feature 1..20: note = chemically synthesized
  source 1..20: mol_type = other DNA
cacacacacacacacacaca

SEQ ID NO: 16850 - DNA, 20 bp, synthetic construct
  misc_feature 1..20: note = chemically synthesized
  source 1..20: mol_type = other DNA
cacacacacacacacacaga

SEQ ID NO: 16851 - DNA, 20 bp, synthetic construct
  misc_feature 1..20: note = chemically synthesized
  source 1..20: mol_type = other DNA
cacacacacacacacagaga

SEQ ID NO: 16852 - DNA, 20 bp, synthetic construct
  misc_feature 1..20: note = chemically synthesized
  source 1..20: mol_type = other DNA
cacacacacacacagagaga

SEQ ID NO: 16853 - DNA, 20 bp, synthetic construct
  misc_feature 1..20: note = chemically synthesized
  source 1..20: mol_type = other DNA
cacacacacacagagagaga

SEQ ID NO: 16854 - DNA, 20 bp, synthetic construct
  misc_feature 1..20: note = chemically synthesized
  source 1..20: mol_type = other DNA
cacacacacagagagagaga

SEQ ID NO: 16855 - DNA, 20 bp, synthetic construct
  misc_feature 1..20: note = chemically synthesized
  source 1..20: mol_type = other DNA
cacacacagagagagagaga

SEQ ID NO: 16856 - DNA, 20 bp, synthetic construct
  misc_feature 1..20: note = chemically synthesized
  source 1..20: mol_type = other DNA
cacacagagagagagagaga

SEQ ID NO: 16857 - DNA, 20 bp, synthetic construct
  misc_feature 1..20: note = chemically synthesized
  source 1..20: mol_type = other DNA
cacagagagagagagagaga

SEQ ID NO: 16858 - DNA, 20 bp, synthetic construct
  misc_feature 1..20: note = chemically synthesized
  source 1..20: mol_type = other DNA
gagagagagagagagacatt

SEQ ID NO: 16859 - DNA, 20 bp, synthetic construct
  misc_feature 1..20: note = chemically synthesized
  source 1..20: mol_type = other DNA
agagacattcagtttaaatc

SEQ ID NO: 16860 - DNA, 20 bp, synthetic construct
  misc_feature 1..20: note = chemically synthesized
  source 1..20: mol_type = other DNA
ttaaatctagtactgatcta

SEQ ID NO: 16861 - DNA, 20 bp, synthetic construct
  misc_feature 1..20: note = chemically synthesized
  source 1..20: mol_type = other DNA
taaatctagtactgatctaa

SEQ ID NO: 16862 - DNA, 20 bp, synthetic construct
  misc_feature 1..20: note = chemically synthesized
  source 1..20: mol_type = other DNA
tttaaaaaacaactttcaac

SEQ ID NO: 16863 - DNA, 20 bp, synthetic construct
  misc_feature 1..20: note = chemically synthesized
  source 1..20: mol_type = other DNA
tatttcaccattatattttt

SEQ ID NO: 16864 - DNA, 20 bp, synthetic construct
  misc_feature 1..20: note = chemically synthesized
  source 1..20: mol_type = other DNA
tttttgagtccacattgctt

SEQ ID NO: 16865 - DNA, 20 bp, synthetic construct
  misc_feature 1..20: note = chemically synthesized
  source 1..20: mol_type = other DNA
ttttgagtccacattgcttg

SEQ ID NO: 16866 - DNA, 20 bp, synthetic construct
  misc_feature 1..20: note = chemically synthesized
  source 1..20: mol_type = other DNA
ccacattgcttgaggtttta

SEQ ID NO: 16867 - DNA, 20 bp, synthetic construct
  misc_feature 1..20: note = chemically synthesized
  source 1..20: mol_type = other DNA
cattgcttgaggttttaaag

SEQ ID NO: 16868 - DNA, 20 bp, synthetic construct
  misc_feature 1..20: note = chemically synthesized
  source 1..20: mol_type = other DNA
tttataatgtgttcctttaa

SEQ ID NO: 16869 - DNA, 20 bp, synthetic construct
  misc_feature 1..20: note = chemically synthesized
  source 1..20: mol_type = other DNA
tgttcctttaacagaatcaa

SEQ ID NO: 16870 - DNA, 20 bp, synthetic construct
  misc_feature 1..20: note = chemically synthesized
  source 1..20: mol_type = other DNA
ttaacagaatcaacagctgt

SEQ ID NO: 16871 - DNA, 20 bp, synthetic construct
  misc_feature 1..20: note = chemically synthesized
  source 1..20: mol_type = other DNA
acagaatcaacagctgtcag

SEQ ID NO: 16872 - DNA, 20 bp, synthetic construct
  misc_feature 1..20: note = chemically synthesized
  source 1..20: mol_type = other DNA
gaatcaacagctgtcagaag

SEQ ID NO: 16873 - DNA, 20 bp, synthetic construct
  misc_feature 1..20: note = chemically synthesized
  source 1..20: mol_type = other DNA
acagctgtcagaagcagttg

SEQ ID NO: 16874 - DNA, 20 bp, synthetic construct
  misc_feature 1..20: note = chemically synthesized
  source 1..20: mol_type = other DNA
gctgtcagaagcagttgtgg

SEQ ID NO: 16875 - DNA, 20 bp, synthetic construct
  misc_feature 1..20: note = chemically synthesized
  source 1..20: mol_type = other DNA
gtagatccacaaaacgtata

SEQ ID NO: 16876 - DNA, 20 bp, synthetic construct
  misc_feature 1..20: note = chemically synthesized
  source 1..20: mol_type = other DNA
gtttcctgaaacaaaacact

SEQ ID NO: 16877 - DNA, 20 bp, synthetic construct
  misc_feature 1..20: note = chemically synthesized
  source 1..20: mol_type = other DNA
aacaaaacacttggaaaaat

SEQ ID NO: 16878 - DNA, 20 bp, synthetic construct
  misc_feature 1..20: note = chemically synthesized
  source 1..20: mol_type = other DNA
acttggaaaaataagctgct

SEQ ID NO: 16879 - DNA, 20 bp, synthetic construct
  misc_feature 1..20: note = chemically synthesized
  source 1..20: mol_type = other DNA
aaaaataagctgctaagaac

SEQ ID NO: 16880 - DNA, 20 bp, synthetic construct
  misc_feature 1..20: note = chemically synthesized
  source 1..20: mol_type = other DNA
gctgctaagaactggcgaat

SEQ ID NO: 16881 - DNA, 20 bp, synthetic construct
  misc_feature 1..20: note = chemically synthesized
  source 1..20: mol_type = other DNA
gctaagaactggcgaattag

SEQ ID NO: 16882 - DNA, 20 bp, synthetic construct
  misc_feature 1..20: note = chemically synthesized
  source 1..20: mol_type = other DNA
actggcgaattagaagtttg

SEQ ID NO: 16883 - DNA, 20 bp, synthetic construct
  misc_feature 1..20: note = chemically synthesized
  source 1..20: mol_type = other DNA
gcgaattagaagtttgcaga

SEQ ID NO: 16884 - DNA, 20 bp, synthetic construct
  misc_feature 1..20: note = chemically synthesized
  source 1..20: mol_type = other DNA
cgaattagaagtttgcagac

SEQ ID NO: 16885 - DNA, 20 bp, synthetic construct
  misc_feature 1..20: note = chemically synthesized
  source 1..20: mol_type = other DNA
gaattagaagtttgcagaca

SEQ ID NO: 16886 - DNA, 20 bp, synthetic construct
  misc_feature 1..20: note = chemically synthesized
  source 1..20: mol_type = other DNA
agtttgcagacagggaactg

SEQ ID NO: 16887 - DNA, 20 bp, synthetic construct
  misc_feature 1..20: note = chemically synthesized
  source 1..20: mol_type = other DNA
ggaactgaagtgtcatctct

SEQ ID NO: 16888 - DNA, 20 bp, synthetic construct
  misc_feature 1..20: note = chemically synthesized
  source 1..20: mol_type = other DNA
tgtcatctcttggttcaccc

SEQ ID NO: 16889 - DNA, 20 bp, synthetic construct
  misc_feature 1..20: note = chemically synthesized
  source 1..20: mol_type = other DNA
tcatctcttggttcaccctg

SEQ ID NO: 16890 - DNA, 20 bp, synthetic construct
  misc_feature 1..20: note = chemically synthesized
  source 1..20: mol_type = other DNA
ttcaccctggagactgatgt

SEQ ID NO: 16891 - DNA, 20 bp, synthetic construct
  misc_feature 1..20: note = chemically synthesized
  source 1..20: mol_type = other DNA
accctggagactgatgtgag

SEQ ID NO: 16892 - DNA, 20 bp, synthetic construct
  misc_feature 1..20: note = chemically synthesized
  source 1..20: mol_type = other DNA
tggatctgatgcaatgctgc

SEQ ID NO: 16893 - DNA, 20 bp, synthetic construct
  misc_feature 1..20: note = chemically synthesized
  source 1..20: mol_type = other DNA
atctgatgcaatgctgctgg

SEQ ID NO: 16894 - DNA, 20 bp, synthetic construct
  misc_feature 1..20: note = chemically synthesized
  source 1..20: mol_type = other DNA
tgctggaagatttacctgca

SEQ ID NO: 16895 - DNA, 20 bp, synthetic construct
  misc_feature 1..20: note = chemically synthesized
  source 1..20: mol_type = other DNA
gctggaagatttacctgcac

SEQ ID NO: 16896 - DNA, 20 bp, synthetic construct
  misc_feature 1..20: note = chemically synthesized
  source 1..20: mol_type = other DNA
cctgcacaggttgctcctct

SEQ ID NO: 16897 - DNA, 20 bp, synthetic construct
  misc_feature 1..20: note = chemically synthesized
  source 1..20: mol_type = other DNA
ctgcacaggttgctcctcta

SEQ ID NO: 16898 - DNA, 20 bp, synthetic construct
  misc_feature 1..20: note = chemically synthesized
  source 1..20: mol_type = other DNA
tgctcctctaaggcaacgcg

SEQ ID NO: 16899 - DNA, 20 bp, synthetic construct
  misc_feature 1..20: note = chemically synthesized
  source 1..20: mol_type = other DNA
tgcacgattgacgtatgcac

SEQ ID NO: 16900 - DNA, 20 bp, synthetic construct
  misc_feature 1..20: note = chemically synthesized
  source 1..20: mol_type = other DNA
cacgattgacgtatgcacca

SEQ ID NO: 16901 - DNA, 20 bp, synthetic construct
  misc_feature 1..20: note = chemically synthesized
  source 1..20: mol_type = other DNA
attgacgtatgcaccagagc

SEQ ID NO: 16902 - DNA, 20 bp, synthetic construct
  misc_feature 1..20: note = chemically synthesized
  source 1..20: mol_type = other DNA
ttgacgtatgcaccagagct

SEQ ID NO: 16903 - DNA, 20 bp, synthetic construct
  misc_feature 1..20: note = chemically synthesized
  source 1..20: mol_type = other DNA
cgtatgcaccagagctaggc

SEQ ID NO: 16904 - DNA, 20 bp, synthetic construct
  misc_feature 1..20: note = chemically synthesized
  source 1..20: mol_type = other DNA
gtatgcaccagagctaggct

SEQ ID NO: 16905 - DNA, 20 bp, synthetic construct
  misc_feature 1..20: note = chemically synthesized
  source 1..20: mol_type = other DNA
accagagctaggctgggcct

SEQ ID NO: 16906 - DNA, 20 bp, synthetic construct
  misc_feature 1..20: note = chemically synthesized
  source 1..20: mol_type = other DNA
tttgccctttttgatctctt

SEQ ID NO: 16907 - DNA, 20 bp, synthetic construct
  misc_feature 1..20: note = chemically synthesized
  source 1..20: mol_type = other DNA
ccctttttgatctctttaga

SEQ ID NO: 16908 - DNA, 20 bp, synthetic construct
  misc_feature 1..20: note = chemically synthesized
  source 1..20: mol_type = other DNA
ctttagatagataaaatacc

SEQ ID NO: 16909 - DNA, 20 bp, synthetic construct
  misc_feature 1..20: note = chemically synthesized
  source 1..20: mol_type = other DNA
tagataaaataccaagttct

SEQ ID NO: 16910 - DNA, 20 bp, synthetic construct
  misc_feature 1..20: note = chemically synthesized
  source 1..20: mol_type = other DNA
gataaaataccaagttctca

SEQ ID NO: 16911 - DNA, 20 bp, synthetic construct
  misc_feature 1..20: note = chemically synthesized
  source 1..20: mol_type = other DNA
caacaaattatatataccta

SEQ ID NO: 16912 - DNA, 20 bp, synthetic construct
  misc_feature 1..20: note = chemically synthesized
  source 1..20: mol_type = other DNA
aacaaattatatatacctaa

SEQ ID NO: 16913 - DNA, 20 bp, synthetic construct
  misc_feature 1..20: note = chemically synthesized
  source 1..20: mol_type = other DNA
aattatatatacctaaaggt

SEQ ID NO: 16914 - DNA, 20 bp, synthetic construct
  misc_feature 1..20: note = chemically synthesized
  source 1..20: mol_type = other DNA
atacctaaaggtgagatgat

SEQ ID NO: 16915 - DNA, 20 bp, synthetic construct
  misc_feature 1..20: note = chemically synthesized
  source 1..20: mol_type = other DNA
tacctaaaggtgagatgatc

SEQ ID NO: 16916 - DNA, 20 bp, synthetic construct
  misc_feature 1..20: note = chemically synthesized
  source 1..20: mol_type = other DNA
caggtttaaacttcctgtaa

SEQ ID NO: 16917 - DNA, 20 bp, synthetic construct
  misc_feature 1..20: note = chemically synthesized
  source 1..20: mol_type = other DNA
ggtttaaacttcctgtaaaa

SEQ ID NO: 16918 - DNA, 20 bp, synthetic construct
  misc_feature 1..20: note = chemically synthesized
  source 1..20: mol_type = other DNA
gtttaaacttcctgtaaaag

SEQ ID NO: 16919 - DNA, 20 bp, synthetic construct
  misc_feature 1..20: note = chemically synthesized
  source 1..20: mol_type = other DNA
aaacttcctgtaaaagaggc

SEQ ID NO: 16920 - DNA, 20 bp, synthetic construct
  misc_feature 1..20: note = chemically synthesized
  source 1..20: mol_type = other DNA
cttcctgtaaaagaggcgag

SEQ ID NO: 16921 - DNA, 20 bp, synthetic construct
  misc_feature 1..20: note = chemically synthesized
  source 1..20: mol_type = other DNA
ttcctgtaaaagaggcgaga

SEQ ID NO: 16922 - DNA, 20 bp, synthetic construct
  misc_feature 1..20: note = chemically synthesized
  source 1..20: mol_type = other DNA
gcgccttgcacacccttttc

SEQ ID NO: 16923 - DNA, 20 bp, synthetic construct
  misc_feature 1..20: note = chemically synthesized
  source 1..20: mol_type = other DNA
cttgcacacccttttccaga

SEQ ID NO: 16924 - DNA, 20 bp, synthetic construct
  misc_feature 1..20: note = chemically synthesized
  source 1..20: mol_type = other DNA
ttgcacacccttttccagat

SEQ ID NO: 16925 - DNA, 20 bp, synthetic construct
  misc_feature 1..20: note = chemically synthesized
  source 1..20: mol_type = other DNA
tgcacacccttttccagata

SEQ ID NO: 16926 - DNA, 20 bp, synthetic construct
  misc_feature 1..20: note = chemically synthesized
  source 1..20: mol_type = other DNA
cacccttttccagatagggc

SEQ ID NO: 16927 - DNA, 20 bp, synthetic construct
  misc_feature 1..20: note = chemically synthesized
  source 1..20: mol_type = other DNA
ccttttccagatagggctgg

SEQ ID NO: 16928 - DNA, 20 bp, synthetic construct
  misc_feature 1..20: note = chemically synthesized
  source 1..20: mol_type = other DNA
agggctggcagcatgttatt

SEQ ID NO: 16929 - DNA, 20 bp, synthetic construct
  misc_feature 1..20: note = chemically synthesized
  source 1..20: mol_type = other DNA
catgttattcagaactgaat

SEQ ID NO: 16930 - DNA, 20 bp, synthetic construct
  misc_feature 1..20: note = chemically synthesized
  source 1..20: mol_type = other DNA
agaactgaatcagtctctgc

SEQ ID NO: 16931 - DNA, 20 bp, synthetic construct
  misc_feature 1..20: note = chemically synthesized
  source 1..20: mol_type = other DNA
aactgaatcagtctctgcca

SEQ ID NO: 16932 - DNA, 20 bp, synthetic construct
  misc_feature 1..20: note = chemically synthesized
  source 1..20: mol_type = other DNA
agtctctgccagagaattcc

SEQ ID NO: 16933 - DNA, 20 bp, synthetic construct
  misc_feature 1..20: note = chemically synthesized
  source 1..20: mol_type = other DNA
ctctgccagagaattcccag

SEQ ID NO: 16934 - DNA, 20 bp, synthetic construct
  misc_feature 1..20: note = chemically synthesized
  source 1..20: mol_type = other DNA
tctgccagagaattcccagt

SEQ ID NO: 16935 - DNA, 20 bp, synthetic construct
  misc_feature 1..20: note = chemically synthesized
  source 1..20: mol_type = other DNA
gagaattcccagtgggaacc

SEQ ID NO: 16936 - DNA, 20 bp, synthetic construct
  misc_feature 1..20: note = chemically synthesized
  source 1..20: mol_type = other DNA
gaattcccagtgggaacctg

SEQ ID NO: 16937 - DNA, 20 bp, synthetic construct
  misc_feature 1..20: note = chemically synthesized
  source 1..20: mol_type = other DNA
ttcccagtgggaacctggag

SEQ ID NO: 16938 - DNA, 20 bp, synthetic construct
  misc_feature 1..20: note = chemically synthesized
  source 1..20: mol_type = other DNA
tcccagtgggaacctggagc

SEQ ID NO: 16939 - DNA, 20 bp, synthetic construct
  misc_feature 1..20: note = chemically synthesized
  source 1..20: mol_type = other DNA
ctggagcaggtatgttgatg

SEQ ID NO: 16940 - DNA, 20 bp, synthetic construct
  misc_feature 1..20: note = chemically synthesized
  source 1..20: mol_type = other DNA
tggagcaggtatgttgatga

SEQ ID NO: 16941 - DNA, 20 bp, synthetic construct
  misc_feature 1..20: note = chemically synthesized
  source 1..20: mol_type = other DNA
ggagcaggtatgttgatgaa

SEQ ID NO: 16942 - DNA, 20 bp, synthetic construct
  misc_feature 1..20: note = chemically synthesized
  source 1..20: mol_type = other DNA
gagcaggtatgttgatgaag

SEQ ID NO: 16943 - DNA, 20 bp, synthetic construct
  misc_feature 1..20: note = chemically synthesized
  source 1..20: mol_type = other DNA
atgttgatgaaggggatacc

SEQ ID NO: 16944 - DNA, 20 bp, synthetic construct
  misc_feature 1..20: note = chemically synthesized
  source 1..20: mol_type = other DNA
tgttgatgaaggggatacct

SEQ ID NO: 16945 - DNA, 20 bp, synthetic construct
  misc_feature 1..20: note = chemically synthesized
  source 1..20: mol_type = other DNA
gttgatgaaggggatacctg

SEQ ID NO: 16946 - DNA, 20 bp, synthetic construct
  misc_feature 1..20: note = chemically synthesized
  source 1..20: mol_type = other DNA
aggggatacctggggacctt

SEQ ID NO: 16947 - DNA, 20 bp, synthetic construct
  misc_feature 1..20: note = chemically synthesized
  source 1..20: mol_type = other DNA
gacctttggtcactcacaat

SEQ ID NO: 16948 - DNA, 20 bp, synthetic construct
  misc_feature 1..20: note = chemically synthesized
  source 1..20: mol_type = other DNA
gtttgtattctcactgttgt

SEQ ID NO: 16949 - DNA, 20 bp, synthetic construct
  misc_feature 1..20: note = chemically synthesized
  source 1..20: mol_type = other DNA
ttgcacctacaatttgattt

SEQ ID NO: 16950 - DNA, 20 bp, synthetic construct
  misc_feature 1..20: note = chemically synthesized
  source 1..20: mol_type = other DNA
ctacaatttgattttagttt

SEQ ID NO: 16951 - DNA, 20 bp, synthetic construct
  misc_feature 1..20: note = chemically synthesized
  source 1..20: mol_type = other DNA
aatttgattttagttttaga

SEQ ID NO: 16952 - DNA, 20 bp, synthetic construct
  misc_feature 1..20: note = chemically synthesized
  source 1..20: mol_type = other DNA
tttgattttagttttagata

SEQ ID NO: 16953 - DNA, 20 bp, synthetic construct
  misc_feature 1..20: note = chemically synthesized
  source 1..20: mol_type = other DNA
ttgattttagttttagatag

SEQ ID NO: 16954 - DNA, 20 bp, synthetic construct
  misc_feature 1..20: note = chemically synthesized
  source 1..20: mol_type = other DNA
taaaaactcccattaaaata

SEQ ID NO: 16955 - DNA, 20 bp, synthetic construct
  misc_feature 1..20: note = chemically synthesized
  source 1..20: mol_type = other DNA
actcccattaaaataaagaa

SEQ ID NO: 16956 - DNA, 20 bp, synthetic construct
  misc_feature 1..20: note = chemically synthesized
  source 1..20: mol_type = other DNA
ggaattattgtgaaacctgc

SEQ ID NO: 16957 - DNA, 20 bp, synthetic construct
  misc_feature 1..20: note = chemically synthesized
  source 1..20: mol_type = other DNA
gaattattgtgaaacctgca

SEQ ID NO: 16958 - DNA, 20 bp, synthetic construct
  misc_feature 1..20: note = chemically synthesized
  source 1..20: mol_type = other DNA
aattattgtgaaacctgcaa

SEQ ID NO: 16959 - DNA, 20 bp, synthetic construct
  misc_feature 1..20: note = chemically synthesized
  source 1..20: mol_type = other DNA
cctgcaagggtgccttcaaa

SEQ ID NO: 16960 - DNA, 20 bp, synthetic construct
  misc_feature 1..20: note = chemically synthesized
  source 1..20: mol_type = other DNA
ggtgccttcaaaaagaaaac

SEQ ID NO: 16961 - DNA, 20 bp, synthetic construct
  misc_feature 1..20: note = chemically synthesized
  source 1..20: mol_type = other DNA
ttgaactttctaaaaaacac

SEQ ID NO: 16962 - DNA, 20 bp, synthetic construct
  misc_feature 1..20: note = chemically synthesized
  source 1..20: mol_type = other DNA
tgaactttctaaaaaacaca

SEQ ID NO: 16963 - DNA, 20 bp, synthetic construct
  misc_feature 1..20: note = chemically synthesized
  source 1..20: mol_type = other DNA
actttctaaaaaacacaagg

SEQ ID NO: 16964 - DNA, 20 bp, synthetic construct
  misc_feature 1..20: note = chemically synthesized
  source 1..20: mol_type = other DNA
acacaaggaagctttttgct

SEQ ID NO: 16965 - DNA, 20 bp, synthetic construct
  misc_feature 1..20: note = chemically synthesized
  source 1..20: mol_type = other DNA
ggaagctttttgctaagcat

SEQ ID NO: 16966 - DNA, 20 bp, synthetic construct
  misc_feature 1..20: note = chemically synthesized
  source 1..20: mol_type = other DNA
gaagctttttgctaagcatc

SEQ ID NO: 16967 - DNA, 20 bp, synthetic construct
  misc_feature 1..20: note = chemically synthesized
  source 1..20: mol_type = other DNA
aagctttttgctaagcatca

SEQ ID NO: 16968 - DNA, 20 bp, synthetic construct
  misc_feature 1..20: note = chemically synthesized
  source 1..20: mol_type = other DNA
gcatttaaatttatattcat

SEQ ID NO: 16969 - DNA, 20 bp, synthetic construct
  misc_feature 1..20: note = chemically synthesized
  source 1..20: mol_type = other DNA
aatatgtaatgatgcataaa

SEQ ID NO: 16970 - DNA, 20 bp, synthetic construct
  misc_feature 1..20: note = chemically synthesized
  source 1..20: mol_type = other DNA
atatgtaatgatgcataaaa

SEQ ID NO: 16971 - DNA, 20 bp, synthetic construct
  misc_feature 1..20: note = chemically synthesized
  source 1..20: mol_type = other DNA
atgatgcataaaaaggctgc

SEQ ID NO: 16972 - DNA, 20 bp, synthetic construct
  misc_feature 1..20: note = chemically synthesized
  source 1..20: mol_type = other DNA
tgatgcataaaaaggctgca

SEQ ID NO: 16973 - DNA, 20 bp, synthetic construct
  misc_feature 1..20: note = chemically synthesized
  source 1..20: mol_type = other DNA
aaatcacatctgttaatttt

SEQ ID NO: 16974 - DNA, 20 bp, synthetic construct
  misc_feature 1..20: note = chemically synthesized
  source 1..20: mol_type = other DNA
aatcacatctgttaattttt

SEQ ID NO: 16975 - DNA, 20 bp, synthetic construct
  misc_feature 1..20: note = chemically synthesized
  source 1..20: mol_type = other DNA
atcacatctgttaattttta

SEQ ID NO: 16976 - DNA, 20 bp, synthetic construct
  misc_feature 1..20: note = chemically synthesized
  source 1..20: mol_type = other DNA
tgttaatttttagggaaata

SEQ ID NO: 16977 - DNA, 20 bp, synthetic construct
  misc_feature 1..20: note = chemically synthesized
  source 1..20: mol_type = other DNA
atttttagggaaataaagtg

SEQ ID NO: 16978 - DNA, 20 bp, synthetic construct
  misc_feature 1..20: note = chemically synthesized
  source 1..20: mol_type = other DNA
tagggaaataaagtgtagct

SEQ ID NO: 16979 - DNA, 20 bp, synthetic construct
  misc_feature 1..20: note = chemically synthesized
  source 1..20: mol_type = other DNA
tgtagcttggattcttatgt

SEQ ID NO: 16980 - DNA, 20 bp, synthetic construct
  misc_feature 1..20: note = chemically synthesized
  source 1..20: mol_type = other DNA
tagcttggattcttatgttg

SEQ ID NO: 16981 - DNA, 20 bp, synthetic construct
  misc_feature 1..20: note = chemically synthesized
  source 1..20: mol_type = other DNA
gattcttatgttggagcaca

SEQ ID NO: 16982 - DNA, 20 bp, synthetic construct
  misc_feature 1..20: note = chemically synthesized
  source 1..20: mol_type = other DNA
agcacaaagcactatgtgcc

SEQ ID NO: 16983 - DNA, 20 bp, synthetic construct
  misc_feature 1..20: note = chemically synthesized
  source 1..20: mol_type = other DNA
gttcctgtacattttaaata

SEQ ID NO: 16984 - DNA, 20 bp, synthetic construct
  misc_feature 1..20: note = chemically synthesized
  source 1..20: mol_type = other DNA
tcctgtacattttaaatata

SEQ ID NO: 16985 - DNA, 20 bp, synthetic construct
  misc_feature 1..20: note = chemically synthesized
  source 1..20: mol_type = other DNA
aaatatagagttttaatatt

SEQ ID NO: 16986 - DNA, 20 bp, synthetic construct
  misc_feature 1..20: note = chemically synthesized
  source 1..20: mol_type = other DNA
aaaacaaacctcaaaaaact

SEQ ID NO: 16987 - DNA, 20 bp, synthetic construct
  misc_feature 1..20: note = chemically synthesized
  source 1..20: mol_type = other DNA
aacaaacctcaaaaaactaa

SEQ ID NO: 16988 - DNA, 20 bp, synthetic construct
  misc_feature 1..20: note = chemically synthesized
  source 1..20: mol_type = other DNA
aactaagagaaccaaacctg

SEQ ID NO: 16989 - DNA, 20 bp, synthetic construct
  misc_feature 1..20: note = chemically synthesized
  source 1..20: mol_type = other DNA
gtattctccttcaccaactc

SEQ ID NO: 16990 - DNA, 20 bp, synthetic construct
  misc_feature 1..20: note = chemically synthesized
  source 1..20: mol_type = other DNA
tattctccttcaccaactca

SEQ ID NO: 16991 - DNA, 20 bp, synthetic construct
  misc_feature 1..20: note = chemically synthesized
  source 1..20: mol_type = other DNA
ttttatgatttatttacatt

SEQ ID NO: 16992 - DNA, 20 bp, synthetic construct
  misc_feature 1..20: note = chemically synthesized
  source 1..20: mol_type = other DNA
tttatgatttatttacattt

SEQ ID NO: 16993 - DNA, 20 bp, synthetic construct
  misc_feature 1..20: note = chemically synthesized
  source 1..20: mol_type = other DNA
ttatgatttatttacattta

SEQ ID NO: 16994 - DNA, 20 bp, synthetic construct
  misc_feature 1..20: note = chemically synthesized
  source 1..20: mol_type = other DNA
tatgatttatttacatttag

SEQ ID NO: 16995 - DNA, 20 bp, synthetic construct
  misc_feature 1..20: note = chemically synthesized
  source 1..20: mol_type = other DNA
atgatttatttacatttagg

SEQ ID NO: 16996 - DNA, 20 bp, synthetic construct
  misc_feature 1..20: note = chemically synthesized
  source 1..20: mol_type = other DNA
tgatttatttacatttaggg

SEQ ID NO: 16997 - DNA, 20 bp, synthetic construct
  misc_feature 1..20: note = chemically synthesized
  source 1..20: mol_type = other DNA
acatttaggggggaacccct

SEQ ID NO: 16998 - DNA, 20 bp, synthetic construct
  misc_feature 1..20: note = chemically synthesized
  source 1..20: mol_type = other DNA
ctcccctgccccgatccttt

SEQ ID NO: 16999 - DNA, 20 bp, synthetic construct
  misc_feature 1..20: note = chemically synthesized
  source 1..20: mol_type = other DNA
gccccgatcctttcagtttc

SEQ ID NO: 17000 - DNA, 20 bp, synthetic construct
  misc_feature 1..20: note = chemically synthesized
  source 1..20: mol_type = other DNA
tgttaaatcttaaatctcgt

SEQ ID NO: 17001 - DNA, 20 bp, synthetic construct
  misc_feature 1..20: note = chemically synthesized
  source 1..20: mol_type = other DNA
ttacatttaaaactgaacat

SEQ ID NO: 17002 - DNA, 20 bp, synthetic construct
  misc_feature 1..20: note = chemically synthesized
  source 1..20: mol_type = other DNA
aaactgaacattggctactg

SEQ ID NO: 17003 - DNA, 20 bp, synthetic construct
  misc_feature 1..20: note = chemically synthesized
  source 1..20: mol_type = other DNA
ggctactgaagaatgattta

SEQ ID NO: 17004 - DNA, 20 bp, synthetic construct
  misc_feature 1..20: note = chemically synthesized
  source 1..20: mol_type = other DNA
gctactgaagaatgatttaa

SEQ ID NO: 17005 - DNA, 20 bp, synthetic construct
  misc_feature 1..20: note = chemically synthesized
  source 1..20: mol_type = other DNA
tgttatgtttttgttatgtt

SEQ ID NO: 17006 - DNA, 20 bp, synthetic construct
  misc_feature 1..20: note = chemically synthesized
  source 1..20: mol_type = other DNA
gttatgtttttgttatgtta

SEQ ID NO: 17007 - DNA, 20 bp, synthetic construct
  misc_feature 1..20: note = chemically synthesized
  source 1..20: mol_type = other DNA
tatgtttttgttatgttaag

SEQ ID NO: 17008 - DNA, 20 bp, synthetic construct
  misc_feature 1..20: note = chemically synthesized
  source 1..20: mol_type = other DNA
ttaaggagaaaaaaatcaat

SEQ ID NO: 17009 - DNA, 20 bp, synthetic construct
  misc_feature 1..20: note = chemically synthesized
  source 1..20: mol_type = other DNA
taaggagaaaaaaatcaata

SEQ ID NO: 17010 - DNA, 20 bp, synthetic construct
  misc_feature 1..20: note = chemically synthesized
  source 1..20: mol_type = other DNA
ggaaaaatttaattctgata

SEQ ID NO: 17011 - DNA, 20 bp, synthetic construct
  misc_feature 1..20: note = chemically synthesized
  source 1..20: mol_type = other DNA
aattctgataaagatactct

SEQ ID NO: 17012 - DNA, 20 bp, synthetic construct
  misc_feature 1..20: note = chemically synthesized
  source 1..20: mol_type = other DNA
tccttttaactaaaacattt

SEQ ID NO: 17013 - DNA, 20 bp, synthetic construct
  misc_feature 1..20: note = chemically synthesized
  source 1..20: mol_type = other DNA
ttttaactaaaacatttgag

SEQ ID NO: 17014 - DNA, 20 bp, synthetic construct
  misc_feature 1..20: note = chemically synthesized
  source 1..20: mol_type = other DNA
aaaacatttgagcagcttca

SEQ ID NO: 17015 - DNA, 20 bp, synthetic construct
  misc_feature 1..20: note = chemically synthesized
  source 1..20: mol_type = other DNA
ctatgtatttcttctgatct

SEQ ID NO: 17016 - DNA, 20 bp, synthetic construct
  misc_feature 1..20: note = chemically synthesized
  source 1..20: mol_type = other DNA
atgtatttcttctgatcttg

SEQ ID NO: 17017 - DNA, 20 bp, synthetic construct
  misc_feature 1..20: note = chemically synthesized
  source 1..20: mol_type = other DNA
tgatcttggagctgtgtgac

SEQ ID NO: 17018 - DNA, 20 bp, synthetic construct
  misc_feature 1..20: note = chemically synthesized
  source 1..20: mol_type = other DNA
tcttggagctgtgtgactgg

SEQ ID NO: 17019 - DNA, 20 bp, synthetic construct
  misc_feature 1..20: note = chemically synthesized
  source 1..20: mol_type = other DNA
ggagctgtgtgactggtagc

SEQ ID NO: 17020 - DNA, 20 bp, synthetic construct
  misc_feature 1..20: note = chemically synthesized
  source 1..20: mol_type = other DNA
ctgtgtgactggtagcaaga

SEQ ID NO: 17021 - DNA, 20 bp, synthetic construct
  misc_feature 1..20: note = chemically synthesized
  source 1..20: mol_type = other DNA
aaaaatcttattctacatac

SEQ ID NO: 17022 - DNA, 20 bp, synthetic construct
  misc_feature 1..20: note = chemically synthesized
  source 1..20: mol_type = other DNA
aatcttattctacatacaag

SEQ ID NO: 17023 - DNA, 20 bp, synthetic construct
  misc_feature 1..20: note = chemically synthesized
  source 1..20: mol_type = other DNA
atacaagtggattgcttaac

SEQ ID NO: 17024 - DNA, 20 bp, synthetic construct
  misc_feature 1..20: note = chemically synthesized
  source 1..20: mol_type = other DNA
aagtggattgcttaacaagt

SEQ ID NO: 17025 - DNA, 20 bp, synthetic construct
  misc_feature 1..20: note = chemically synthesized
  source 1..20: mol_type = other DNA
gattgcttaacaagtcagca

SEQ ID NO: 17026 - DNA, 20 bp, synthetic construct
  misc_feature 1..20: note = chemically synthesized
  source 1..20: mol_type = other DNA
acacgtacttgtttgtacaa

SEQ ID NO: 17027 - DNA, 20 bp, synthetic construct
  misc_feature 1..20: note = chemically synthesized
  source 1..20: mol_type = other DNA
acgtacttgtttgtacaata

SEQ ID NO: 17028 - DNA, 20 bp, synthetic construct
  misc_feature 1..20: note = chemically synthesized
  source 1..20: mol_type = other DNA
attcctgtataaaaataatt

SEQ ID NO: 17029 - DNA, 20 bp, synthetic construct
  misc_feature 1..20: note = chemically synthesized
  source 1..20: mol_type = other DNA
aaaaataattcagctgctga

SEQ ID NO: 17030 - DNA, 20 bp, synthetic construct
  misc_feature 1..20: note = chemically synthesized
  source 1..20: mol_type = other DNA
aataattcagctgctgacag

SEQ ID NO: 17031 - DNA, 20 bp, synthetic construct
  misc_feature 1..20: note = chemically synthesized
  source 1..20: mol_type = other DNA
ataattcagctgctgacagc

SEQ ID NO: 17032 - DNA, 20 bp, synthetic construct
  misc_feature 1..20: note = chemically synthesized
  source 1..20: mol_type = other DNA
ctgacagcaggcattgttgt

SEQ ID NO: 17033 - DNA, 20 bp, synthetic construct
  misc_feature 1..20: note = chemically synthesized
  source 1..20: mol_type = other DNA
cctgtcttttgtgcttgtcc

SEQ ID NO: 17034 - DNA, 20 bp, synthetic construct
  misc_feature 1..20: note = chemically synthesized
  source 1..20: mol_type = other DNA
ttttgtgcttgtcccagctc

SEQ ID NO: 17035 - DNA, 20 bp, synthetic construct
  misc_feature 1..20: note = chemically synthesized
  source 1..20: mol_type = other DNA
tttgtgcttgtcccagctct

SEQ ID NO: 17036 - DNA, 20 bp, synthetic construct
  misc_feature 1..20: note = chemically synthesized
  source 1..20: mol_type = other DNA
cccctcccctcctatctgct

SEQ ID NO: 17037 - DNA, 20 bp, synthetic construct
  misc_feature 1..20: note = chemically synthesized
  source 1..20: mol_type = other DNA
ccctcccctcctatctgctt

SEQ ID NO: 17038 - DNA, 20 bp, synthetic construct
  misc_feature 1..20: note = chemically synthesized
  source 1..20: mol_type = other DNA
cctcccctcctatctgcttg

SEQ ID NO: 17039 - DNA, 20 bp, synthetic construct
  misc_feature 1..20: note = chemically synthesized
  source 1..20: mol_type = other DNA
cccctcctatctgcttgggg

SEQ ID NO: 17040 - DNA, 20 bp, synthetic construct
  misc_feature 1..20: note = chemically synthesized
  source 1..20: mol_type = other DNA
gctgcctgcacactgctgac

SEQ ID NO: 17041 - DNA, 20 bp, synthetic construct
  misc_feature 1..20: note = chemically synthesized
  source 1..20: mol_type = other DNA
gcctgcacactgctgaccag

SEQ ID NO: 17042 - DNA, 20 bp, synthetic construct
  misc_feature 1..20: note = chemically synthesized
  source 1..20: mol_type = other DNA
gaagttaattgctatatatt

SEQ ID NO: 17043 - DNA, 20 bp, synthetic construct
  misc_feature 1..20: note = chemically synthesized
  source 1..20: mol_type = other DNA
attgctatatattaagtata

SEQ ID NO: 17044 - DNA, 20 bp, synthetic construct
  misc_feature 1..20: note = chemically synthesized
  source 1..20: mol_type = other DNA
ttgctatatattaagtatat

SEQ ID NO: 17045 - DNA, 20 bp, synthetic construct
  misc_feature 1..20: note = chemically synthesized
  source 1..20: mol_type = other DNA
gtatataggtattgtattta

SEQ ID NO: 17046 - DNA, 20 bp, synthetic construct
  misc_feature 1..20: note = chemically synthesized
  source 1..20: mol_type = other DNA
atataggtattgtatttaaa

SEQ ID NO: 17047 - DNA, 20 bp, synthetic construct
  misc_feature 1..20: note = chemically synthesized
  source 1..20: mol_type = other DNA
tataggtattgtatttaaag

SEQ ID NO: 17048 - DNA, 20 bp, synthetic construct
  misc_feature 1..20: note = chemically synthesized
  source 1..20: mol_type = other DNA
tatttaaagaggaatatctc

SEQ ID NO: 17049 - DNA, 20 bp, synthetic construct
  misc_feature 1..20: note = chemically synthesized
  source 1..20: mol_type = other DNA
atttaaagaggaatatctca

SEQ ID NO: 17050 - DNA, 20 bp, synthetic construct
  misc_feature 1..20: note = chemically synthesized
  source 1..20: mol_type = other DNA
tttactttctgatgtgattg

SEQ ID NO: 17051 - DNA, 20 bp, synthetic construct
  misc_feature 1..20: note = chemically synthesized
  source 1..20: mol_type = other DNA
tgatgtgattgcggtgttgc

SEQ ID NO: 17052 - DNA, 20 bp, synthetic construct
  misc_feature 1..20: note = chemically synthesized
  source 1..20: mol_type = other DNA
tgtgattgcggtgttgccag

SEQ ID NO: 17053 - DNA, 20 bp, synthetic construct
  misc_feature 1..20: note = chemically synthesized
  source 1..20: mol_type = other DNA
gtgattgcggtgttgccagc

SEQ ID NO: 17054 - DNA, 20 bp, synthetic construct
  misc_feature 1..20: note = chemically synthesized
  source 1..20: mol_type = other DNA
tgattgcggtgttgccagca

SEQ ID NO: 17055 - DNA, 20 bp, synthetic construct
  misc_feature 1..20: note = chemically synthesized
  source 1..20: mol_type = other DNA
gattgcggtgttgccagcag

SEQ ID NO: 17056 - DNA, 20 bp, synthetic construct
  misc_feature 1..20: note = chemically synthesized
  source 1..20: mol_type = other DNA
attgcggtgttgccagcagg

SEQ ID NO: 17057 - DNA, 20 bp, synthetic construct
  misc_feature 1..20: note = chemically synthesized
  source 1..20: mol_type = other DNA
ttgcggtgttgccagcaggg

SEQ ID NO: 17058 - DNA, 20 bp, synthetic construct
  misc_feature 1..20: note = chemically synthesized
  source 1..20: mol_type = other DNA
cggtgttgccagcagggggg

SEQ ID NO: 17059 - DNA, 20 bp, synthetic construct
  misc_feature 1..20: note = chemically synthesized
  source 1..20: mol_type = other DNA
tgttgccagcaggggggtgg

SEQ ID NO: 17060 - DNA, 20 bp, synthetic construct
  misc_feature 1..20: note = chemically synthesized
  source 1..20: mol_type = other DNA
gttgccagcaggggggtggc

SEQ ID NO: 17061 - DNA, 20 bp, synthetic construct
  misc_feature 1..20: note = chemically synthesized
  source 1..20: mol_type = other DNA
gtggcaggcaaacgctctaa

SEQ ID NO: 17062 - DNA, 20 bp, synthetic construct
  misc_feature 1..20: note = chemically synthesized
  source 1..20: mol_type = other DNA
tggcaggcaaacgctctaat

SEQ ID NO: 17063 - DNA, 20 bp, synthetic construct
  misc_feature 1..20: note = chemically synthesized
  source 1..20: mol_type = other DNA
ggcaggcaaacgctctaata

SEQ ID NO: 17064 - DNA, 20 bp, synthetic construct
  misc_feature 1..20: note = chemically synthesized
  source 1..20: mol_type = other DNA
ctaatagggaaaatcacttg

SEQ ID NO: 17065 - DNA, 20 bp, synthetic construct
  misc_feature 1..20: note = chemically synthesized
  source 1..20: mol_type = other DNA
taatagggaaaatcacttga

SEQ ID NO: 17066 - DNA, 20 bp, synthetic construct
  misc_feature 1..20: note = chemically synthesized
  source 1..20: mol_type = other DNA
tagggaaaatcacttgaagg

SEQ ID NO: 17067 - DNA, 20 bp, synthetic construct
  misc_feature 1..20: note = chemically synthesized
  source 1..20: mol_type = other DNA
gaaaatcacttgaaggcagt

SEQ ID NO: 17068 - DNA, 20 bp, synthetic construct
  misc_feature 1..20: note = chemically synthesized
  source 1..20: mol_type = other DNA
aaaatcacttgaaggcagtt

SEQ ID NO: 17069 - DNA, 20 bp, synthetic construct
  misc_feature 1..20: note = chemically synthesized
  source 1..20: mol_type = other DNA
aaatcacttgaaggcagtta

SEQ ID NO: 17070 - DNA, 20 bp, synthetic construct
  misc_feature 1..20: note = chemically synthesized
  source 1..20: mol_type = other DNA
aatcacttgaaggcagttag

SEQ ID NO: 17071 - DNA, 20 bp, synthetic construct
  misc_feature 1..20: note = chemically synthesized
  source 1..20: mol_type = other DNA
gaaggcagttaggggaaatt

SEQ ID NO: 17072 - DNA, 20 bp, synthetic construct
  misc_feature 1..20: note = chemically synthesized
  source 1..20: mol_type = other DNA
ttaggggaaatttggccttc

SEQ ID NO: 17073 - DNA, 20 bp, synthetic construct
  misc_feature 1..20: note = chemically synthesized
  source 1..20: mol_type = other DNA
ttcaagtcccatttgctctg

SEQ ID NO: 17074 - DNA, 20 bp, synthetic construct
  misc_feature 1..20: note = chemically synthesized
  source 1..20: mol_type = other DNA
gtcccatttgctctgtagtg

SEQ ID NO: 17075 - DNA, 20 bp, synthetic construct
  misc_feature 1..20: note = chemically synthesized
  source 1..20: mol_type = other DNA
tttgctctgtagtgtagcat

SEQ ID NO: 17076 - DNA, 20 bp, synthetic construct
  misc_feature 1..20: note = chemically synthesized
  source 1..20: mol_type = other DNA
ctcattgaactctactcatg

SEQ ID NO: 17077 - DNA, 20 bp, synthetic construct
  misc_feature 1..20: note = chemically synthesized
  source 1..20: mol_type = other DNA
cattgaactctactcatgta

SEQ ID NO: 17078 - DNA, 20 bp, synthetic construct
  misc_feature 1..20: note = chemically synthesized
  source 1..20: mol_type = other DNA
ctactcatgtagagtaacat

SEQ ID NO: 17079 - DNA, 20 bp, synthetic construct
  misc_feature 1..20: note = chemically synthesized
  source 1..20: mol_type = other DNA
agagtaacattagtgtcaaa

SEQ ID NO: 17080 - DNA, 20 bp, synthetic construct
  misc_feature 1..20: note = chemically synthesized
  source 1..20: mol_type = other DNA
acattagtgtcaaacggaat

SEQ ID NO: 17081 - DNA, 20 bp, synthetic construct
  misc_feature 1..20: note = chemically synthesized
  source 1..20: mol_type = other DNA
tagtgtcaaacggaattggt

SEQ ID NO: 17082 - DNA, 20 bp, synthetic construct
  misc_feature 1..20: note = chemically synthesized
  source 1..20: mol_type = other DNA
agtgtcaaacggaattggtc

SEQ ID NO: 17083 - DNA, 20 bp, synthetic construct
  misc_feature 1..20: note = chemically synthesized
  source 1..20: mol_type = other DNA
aacggaattggtcaggactg

SEQ ID NO: 17084 - DNA, 20 bp, synthetic construct
  misc_feature 1..20: note = chemically synthesized
  source 1..20: mol_type = other DNA
tggtcaggactgtggacctg

SEQ ID NO: 17085 - DNA, 20 bp, synthetic construct
  misc_feature 1..20: note = chemically synthesized
  source 1..20: mol_type = other DNA
ctgtggacctgtggctcata

SEQ ID NO: 17086 - DNA, 20 bp, synthetic construct
  misc_feature 1..20: note = chemically synthesized
  source 1..20: mol_type = other DNA
ggacctgtggctcatacaga

SEQ ID NO: 17087 - DNA, 20 bp, synthetic construct
  misc_feature 1..20: note = chemically synthesized
  source 1..20: mol_type = other DNA
gtggctcatacagatggttg

SEQ ID NO: 17088 - DNA, 20 bp, synthetic construct
  misc_feature 1..20: note = chemically synthesized
  source 1..20: mol_type = other DNA
catacagatggttgtggatg

SEQ ID NO: 17089 - DNA, 20 bp, synthetic construct
  misc_feature 1..20: note = chemically synthesized
  source 1..20: mol_type = other DNA
atacagatggttgtggatgt

SEQ ID NO: 17090 - DNA, 20 bp, synthetic construct
  misc_feature 1..20: note = chemically synthesized
  source 1..20: mol_type = other DNA
ttgtggatgtgggttccatg

SEQ ID NO: 17091 - DNA, 20 bp, synthetic construct
  misc_feature 1..20: note = chemically synthesized
  source 1..20: mol_type = other DNA
ttctaataaatgttaaaatg

SEQ ID NO: 17092 - DNA, 20 bp, synthetic construct
  misc_feature 1..20: note = chemically synthesized
  source 1..20: mol_type = other DNA
ttaaaatgtggcacatttct

SEQ ID NO: 17093 - DNA, 20 bp, synthetic construct
  misc_feature 1..20: note = chemically synthesized
  source 1..20: mol_type = other DNA
aaatgtggcacatttctgag

SEQ ID NO: 17094 - DNA, 20 bp, synthetic construct
  misc_feature 1..20: note = chemically synthesized
  source 1..20: mol_type = other DNA
aatgtggcacatttctgagc

SEQ ID NO: 17095 - DNA, 20 bp, synthetic construct
  misc_feature 1..20: note = chemically synthesized
  source 1..20: mol_type = other DNA
atgtggcacatttctgagca

SEQ ID NO: 17096 - DNA, 20 bp, synthetic construct
  misc_feature 1..20: note = chemically synthesized
  source 1..20: mol_type = other DNA
cacatttctgagcagggccc

SEQ ID NO: 17097 - DNA, 20 bp, synthetic construct
  misc_feature 1..20: note = chemically synthesized
  source 1..20: mol_type = other DNA
acatttctgagcagggccca

SEQ ID NO: 17098 - DNA, 20 bp, synthetic construct
  misc_feature 1..20: note = chemically synthesized
  source 1..20: mol_type = other DNA
tctgagcagggcccaaggat

SEQ ID NO: 17099 - DNA, 20 bp, synthetic construct
  misc_feature 1..20: note = chemically synthesized
  source 1..20: mol_type = other DNA
tgagcagggcccaaggataa

SEQ ID NO: 17100 - DNA, 20 bp, synthetic construct
  misc_feature 1..20: note = chemically synthesized
  source 1..20: mol_type = other DNA
agcagggcccaaggataaga

SEQ ID NO: 17101 - DNA, 20 bp, synthetic construct
  misc_feature 1..20: note = chemically synthesized
  source 1..20: mol_type = other DNA
ggcccaaggataagagagtt

SEQ ID NO: 17102 - DNA, 20 bp, synthetic construct
  misc_feature 1..20: note = chemically synthesized
  source 1..20: mol_type = other DNA
ggataagagagttaagaaat

SEQ ID NO: 17103 - DNA, 20 bp, synthetic construct
  misc_feature 1..20: note = chemically synthesized
  source 1..20: mol_type = other DNA
gataagagagttaagaaatc

SEQ ID NO: 17104 - DNA, 20 bp, synthetic construct
  misc_feature 1..20: note = chemically synthesized
  source 1..20: mol_type = other DNA
ataagagagttaagaaatca

SEQ ID NO: 17105 - DNA, 20 bp, synthetic construct
  misc_feature 1..20: note = chemically synthesized
  source 1..20: mol_type = other DNA
taagagagttaagaaatcag

SEQ ID NO: 17106 - DNA, 20 bp, synthetic construct
  misc_feature 1..20: note = chemically synthesized
  source 1..20: mol_type = other DNA
aagagagttaagaaatcagg

SEQ ID NO: 17107 - DNA, 20 bp, synthetic construct
  misc_feature 1..20: note = chemically synthesized
  source 1..20: mol_type = other DNA
agagttaagaaatcaggggg

SEQ ID NO: 17108 - DNA, 20 bp, synthetic construct
  misc_feature 1..20: note = chemically synthesized
  source 1..20: mol_type = other DNA
gaaatcagggggtagtacct

SEQ ID NO: 17109 - DNA, 20 bp, synthetic construct
  misc_feature 1..20: note = chemically synthesized
  source 1..20: mol_type = other DNA
cttgataacatccacatttc

SEQ ID NO: 17110 - DNA, 20 bp, synthetic construct
  misc_feature 1..20: note = chemically synthesized
  source 1..20: mol_type = other DNA
ataacatccacatttccggt

SEQ ID NO: 17111 - DNA, 20 bp, synthetic construct
  misc_feature 1..20: note = chemically synthesized
  source 1..20: mol_type = other DNA
atttccggtaagatcaactc

SEQ ID NO: 17112 - DNA, 20 bp, synthetic construct
  misc_feature 1..20: note = chemically synthesized
  source 1..20: mol_type = other DNA
tttccggtaagatcaactct

SEQ ID NO: 17113 - DNA, 20 bp, synthetic construct
  misc_feature 1..20: note = chemically synthesized
  source 1..20: mol_type = other DNA
tccggtaagatcaactctag

SEQ ID NO: 17114 - DNA, 20 bp, synthetic construct
  misc_feature 1..20: note = chemically synthesized
  source 1..20: mol_type = other DNA
gtaagatcaactctaggaga

SEQ ID NO: 17115 - DNA, 20 bp, synthetic construct
  misc_feature 1..20: note = chemically synthesized
  source 1..20: mol_type = other DNA
tcaactctaggagaaagtct

SEQ ID NO: 17116 - DNA, 20 bp, synthetic construct
  misc_feature 1..20: note = chemically synthesized
  source 1..20: mol_type = other DNA
caactctaggagaaagtctg

SEQ ID NO: 17117 - DNA, 20 bp, synthetic construct
  misc_feature 1..20: note = chemically synthesized
  source 1..20: mol_type = other DNA
tctaggagaaagtctgaggc

SEQ ID NO: 17118 - DNA, 20 bp, synthetic construct
  misc_feature 1..20: note = chemically synthesized
  source 1..20: mol_type = other DNA
ctaggagaaagtctgaggct

SEQ ID NO: 17119 - DNA, 20 bp, synthetic construct
  misc_feature 1..20: note = chemically synthesized
  source 1..20: mol_type = other DNA
taggagaaagtctgaggctg

SEQ ID NO: 17120 - DNA, 20 bp, synthetic construct
  misc_feature 1..20: note = chemically synthesized
  source 1..20: mol_type = other DNA
aggagaaagtctgaggctgg

SEQ ID NO: 17121 - DNA, 20 bp, synthetic construct
  misc_feature 1..20: note = chemically synthesized
  source 1..20: mol_type = other DNA
gagaaagtctgaggctgggg

SEQ ID NO: 17122 - DNA, 20 bp, synthetic construct
  misc_feature 1..20: note = chemically synthesized
  source 1..20: mol_type = other DNA
gaaagtctgaggctggggga

SEQ ID NO: 17123 - DNA, 20 bp, synthetic construct
  misc_feature 1..20: note = chemically synthesized
  source 1..20: mol_type = other DNA
aagtctgaggctgggggaga

SEQ ID NO: 17124 - DNA, 20 bp, synthetic construct
  misc_feature 1..20: note = chemically synthesized
  source 1..20: mol_type = other DNA
agtctgaggctgggggagag

SEQ ID NO: 17125 - DNA, 20 bp, synthetic construct
  misc_feature 1..20: note = chemically synthesized
  source 1..20: mol_type = other DNA
gtctgaggctgggggagaga

SEQ ID NO: 17126 - DNA, 20 bp, synthetic construct
  misc_feature 1..20: note = chemically synthesized
  source 1..20: mol_type = other DNA
tctgaggctgggggagagag

SEQ ID NO: 17127 - DNA, 20 bp, synthetic construct
  misc_feature 1..20: note = chemically synthesized
  source 1..20: mol_type = other DNA
ctgaggctgggggagagagg

SEQ ID NO: 17128 - DNA, 20 bp, synthetic construct
  misc_feature 1..20: note = chemically synthesized
  source 1..20: mol_type = other DNA
gaggctgggggagagagggg

SEQ ID NO: 17129 - DNA, 20 bp, synthetic construct
  misc_feature 1..20: note = chemically synthesized
  source 1..20: mol_type = other DNA
gctgggggagagagggggag

SEQ ID NO: 17130 - DNA, 20 bp, synthetic construct
  misc_feature 1..20: note = chemically synthesized
  source 1..20: mol_type = other DNA
ctgggggagagagggggaga

SEQ ID NO: 17131 - DNA, 20 bp, synthetic construct
  misc_feature 1..20: note = chemically synthesized
  source 1..20: mol_type = other DNA
tgggggagagagggggagaa

SEQ ID NO: 17132 - DNA, 20 bp, synthetic construct
  misc_feature 1..20: note = chemically synthesized
  source 1..20: mol_type = other DNA
gagagagggggagaagggtg

SEQ ID NO: 17133 - DNA, 20 bp, synthetic construct
  misc_feature 1..20: note = chemically synthesized
  source 1..20: mol_type = other DNA
gagagggggagaagggtgcg

SEQ ID NO: 17134 - DNA, 20 bp, synthetic construct
  misc_feature 1..20: note = chemically synthesized
  source 1..20: mol_type = other DNA
gagggggagaagggtgcgga

SEQ ID NO: 17135 - DNA, 20 bp, synthetic construct
  misc_feature 1..20: note = chemically synthesized
  source 1..20: mol_type = other DNA
gggggagaagggtgcggaga

SEQ ID NO: 17136 - DNA, 20 bp, synthetic construct
  misc_feature 1..20: note = chemically synthesized
  source 1..20: mol_type = other DNA
ggggagaagggtgcggagag

SEQ ID NO: 17137 - DNA, 20 bp, synthetic construct
  misc_feature 1..20: note = chemically synthesized
  source 1..20: mol_type = other DNA
agggtgcggagagaggttct

SEQ ID NO: 17138 - DNA, 20 bp, synthetic construct
  misc_feature 1..20: note = chemically synthesized
  source 1..20: mol_type = other DNA
gttcttggaatattcttcga

SEQ ID NO: 17139 - DNA, 20 bp, synthetic construct
  misc_feature 1..20: note = chemically synthesized
  source 1..20: mol_type = other DNA
cttggaatattcttcgatag

SEQ ID NO: 17140 - DNA, 20 bp, synthetic construct
  misc_feature 1..20: note = chemically synthesized
  source 1..20: mol_type = other DNA
cagttcaaatgaaatcccca

SEQ ID NO: 17141 - DNA, 20 bp, synthetic construct
  misc_feature 1..20: note = chemically synthesized
  source 1..20: mol_type = other DNA
ttcaaatgaaatccccacag

SEQ ID NO: 17142 - DNA, 20 bp, synthetic construct
  misc_feature 1..20: note = chemically synthesized
  source 1..20: mol_type = other DNA
caaatgaaatccccacagca

SEQ ID NO: 17143 - DNA, 20 bp, synthetic construct
  misc_feature 1..20: note = chemically synthesized
  source 1..20: mol_type = other DNA
aatgaaatccccacagcaga

SEQ ID NO: 17144 - DNA, 20 bp, synthetic construct
  misc_feature 1..20: note = chemically synthesized
  source 1..20: mol_type = other DNA
tccccacagcagagagcttt

SEQ ID NO: 17145 - DNA, 20 bp, synthetic construct
  misc_feature 1..20: note = chemically synthesized
  source 1..20: mol_type = other DNA
ccccacagcagagagctttt

SEQ ID NO: 17146 - DNA, 20 bp, synthetic construct
  misc_feature 1..20: note = chemically synthesized
  source 1..20: mol_type = other DNA
cagcagagagcttttgggtc

SEQ ID NO: 17147 - DNA, 20 bp, synthetic construct
  misc_feature 1..20: note = chemically synthesized
  source 1..20: mol_type = other DNA
cagagagcttttgggtctag

SEQ ID NO: 17148 - DNA, 20 bp, synthetic construct
  misc_feature 1..20: note = chemically synthesized
  source 1..20: mol_type = other DNA
agagcttttgggtctagcag

SEQ ID NO: 17149 - DNA, 20 bp, synthetic construct
  misc_feature 1..20: note = chemically synthesized
  source 1..20: mol_type = other DNA
agcttttgggtctagcagtg

SEQ ID NO: 17150 - DNA, 20 bp, synthetic construct
  misc_feature 1..20: note = chemically synthesized
  source 1..20: mol_type = other DNA
ttttgggtctagcagtggag

SEQ ID NO: 17151 - DNA, 20 bp, synthetic construct
  misc_feature 1..20: note = chemically synthesized
  source 1..20: mol_type = other DNA
gggtctagcagtggagcggt

SEQ ID NO: 17152 - DNA, 20 bp, synthetic construct
  misc_feature 1..20: note = chemically synthesized
  source 1..20: mol_type = other DNA
ctagcagtggagcggtaagc

SEQ ID NO: 17153 - DNA, 20 bp, synthetic construct
  misc_feature 1..20: note = chemically synthesized
  source 1..20: mol_type = other DNA
tagcagtggagcggtaagct

SEQ ID NO: 17154 - DNA, 20 bp, synthetic construct
  misc_feature 1..20: note = chemically synthesized
  source 1..20: mol_type = other DNA
gagcggtaagctgggacacg

SEQ ID NO: 17155 - DNA, 20 bp, synthetic construct
  misc_feature 1..20: note = chemically synthesized
  source 1..20: mol_type = other DNA
ctgggacacgtggcctttcg

SEQ ID NO: 17156 - DNA, 20 bp, synthetic construct
  misc_feature 1..20: note = chemically synthesized
  source 1..20: mol_type = other DNA
cctttcgaagctgttattct

SEQ ID NO: 17157 - DNA, 20 bp, synthetic construct
  misc_feature 1..20: note = chemically synthesized
  source 1..20: mol_type = other DNA
tctcagtctgacttgcacac

SEQ ID NO: 17158 - DNA, 20 bp, synthetic construct
  misc_feature 1..20: note = chemically synthesized
  source 1..20: mol_type = other DNA
gtctgacttgcacaccagct

SEQ ID NO: 17159 - DNA, 20 bp, synthetic construct
  misc_feature 1..20: note = chemically synthesized
  source 1..20: mol_type = other DNA
gacttgcacaccagctgaga

SEQ ID NO: 17160 - DNA, 20 bp, synthetic construct
  misc_feature 1..20: note = chemically synthesized
  source 1..20: mol_type = other DNA
acttgcacaccagctgagat

SEQ ID NO: 17161 - DNA, 20 bp, synthetic construct
  misc_feature 1..20: note = chemically synthesized
  source 1..20: mol_type = other DNA
tatactttcttgctttcacc

SEQ ID NO: 17162 - DNA, 20 bp, synthetic construct
  misc_feature 1..20: note = chemically synthesized
  source 1..20: mol_type = other DNA
atactttcttgctttcacct

SEQ ID NO: 17163 - DNA, 20 bp, synthetic construct
  misc_feature 1..20: note = chemically synthesized
  source 1..20: mol_type = other DNA
tttcttgctttcacctgggt

SEQ ID NO: 17164 - DNA, 20 bp, synthetic construct
  misc_feature 1..20: note = chemically synthesized
  source 1..20: mol_type = other DNA
tcttgctttcacctgggttg

SEQ ID NO: 17165 - DNA, 20 bp, synthetic construct
  misc_feature 1..20: note = chemically synthesized
  source 1..20: mol_type = other DNA
ttgctttcacctgggttgga

SEQ ID NO: 17166 - DNA, 20 bp, synthetic construct
  misc_feature 1..20: note = chemically synthesized
  source 1..20: mol_type = other DNA
tgctttcacctgggttggag

SEQ ID NO: 17167 - DNA, 20 bp, synthetic construct
  misc_feature 1..20: note = chemically synthesized
  source 1..20: mol_type = other DNA
ttcacctgggttggagaggt

SEQ ID NO: 17168 - DNA, 20 bp, synthetic construct
  misc_feature 1..20: note = chemically synthesized
  source 1..20: mol_type = other DNA
tcacctgggttggagaggtt

SEQ ID NO: 17169 - DNA, 20 bp, synthetic construct
  misc_feature 1..20: note = chemically synthesized
  source 1..20: mol_type = other DNA
cacctgggttggagaggttg

SEQ ID NO: 17170 - DNA, 20 bp, synthetic construct
  misc_feature 1..20: note = chemically synthesized
  source 1..20: mol_type = other DNA
tgggttggagaggttggggt

SEQ ID NO: 17171 - DNA, 20 bp, synthetic construct
  misc_feature 1..20: note = chemically synthesized
  source 1..20: mol_type = other DNA
gggttggagaggttggggtt

SEQ ID NO: 17172 - DNA, 20 bp, synthetic construct
  misc_feature 1..20: note = chemically synthesized
  source 1..20: mol_type = other DNA
gttggagaggttggggttgg

SEQ ID NO: 17173 - DNA, 20 bp, synthetic construct
  misc_feature 1..20: note = chemically synthesized
  source 1..20: mol_type = other DNA
ttggagaggttggggttggg

SEQ ID NO: 17174 - DNA, 20 bp, synthetic construct
  misc_feature 1..20: note = chemically synthesized
  source 1..20: mol_type = other DNA
gagaggttggggttgggagg

SEQ ID NO: 17175 - DNA, 20 bp, synthetic construct
  misc_feature 1..20: note = chemically synthesized
  source 1..20: mol_type = other DNA
gaggttggggttgggaggaa

SEQ ID NO: 17176 - DNA, 20 bp, synthetic construct
  misc_feature 1..20: note = chemically synthesized
  source 1..20: mol_type = other DNA
aggttggggttgggaggaag

SEQ ID NO: 17177 - DNA, 20 bp, synthetic construct
  misc_feature 1..20: note = chemically synthesized
  source 1..20: mol_type = other DNA
gttggggttgggaggaagag

SEQ ID NO: 17178 - DNA, 20 bp, synthetic construct
  misc_feature 1..20: note = chemically synthesized
  source 1..20: mol_type = other DNA
ttggggttgggaggaagagg

SEQ ID NO: 17179 - DNA, 20 bp, synthetic construct
  misc_feature 1..20: note = chemically synthesized
  source 1..20: mol_type = other DNA
ggggttgggaggaagaggag

SEQ ID NO: 17180 - DNA, 20 bp, synthetic construct
  misc_feature 1..20: note = chemically synthesized
  source 1..20: mol_type = other DNA
gaggaagaggaggagttcat

SEQ ID NO: 17181 - DNA, 20 bp, synthetic construct
  misc_feature 1..20: note = chemically synthesized
  source 1..20: mol_type = other DNA
aggaagaggaggagttcatt

SEQ ID NO: 17182 - DNA, 20 bp, synthetic construct
  misc_feature 1..20: note = chemically synthesized
  source 1..20: mol_type = other DNA
ttcattgggaattctgtcac

SEQ ID NO: 17183 - DNA, 20 bp, synthetic construct
  misc_feature 1..20: note = chemically synthesized
  source 1..20: mol_type = other DNA
cactagaattttttaaatgt

SEQ ID NO: 17184 - DNA, 20 bp, synthetic construct
  misc_feature 1..20: note = chemically synthesized
  source 1..20: mol_type = other DNA
actagaattttttaaatgtc

SEQ ID NO: 17185 - DNA, 20 bp, synthetic construct
  misc_feature 1..20: note = chemically synthesized
  source 1..20: mol_type = other DNA
tagaattttttaaatgtcag

SEQ ID NO: 17186 - DNA, 20 bp, synthetic construct
  misc_feature 1..20: note = chemically synthesized
  source 1..20: mol_type = other DNA
agaattttttaaatgtcagg

SEQ ID NO: 17187 - DNA, 20 bp, synthetic construct
  misc_feature 1..20: note = chemically synthesized
  source 1..20: mol_type = other DNA
ttttttaaatgtcaggaggt

SEQ ID NO: 17188 - DNA, 20 bp, synthetic construct
  misc_feature 1..20: note = chemically synthesized
  source 1..20: mol_type = other DNA
ttaaatgtcaggaggttagc

SEQ ID NO: 17189 - DNA, 20 bp, synthetic construct
  misc_feature 1..20: note = chemically synthesized
  source 1..20: mol_type = other DNA
taaatgtcaggaggttagca

SEQ ID NO: 17190 - DNA, 20 bp, synthetic construct
  misc_feature 1..20: note = chemically synthesized
  source 1..20: mol_type = other DNA
tcaggaggttagcaaggtgt

SEQ ID NO: 17191 - DNA, 20 bp, synthetic construct
  misc_feature 1..20: note = chemically synthesized
  source 1..20: mol_type = other DNA
gaggttagcaaggtgtgagt

SEQ ID NO: 17192 - DNA, 20 bp, synthetic construct
  misc_feature 1..20: note = chemically synthesized
  source 1..20: mol_type = other DNA
caaggtgtgagttagcattc

SEQ ID NO: 17193 - DNA, 20 bp, synthetic construct
  misc_feature 1..20: note = chemically synthesized
  source 1..20: mol_type = other DNA
tgtgagttagcattcaagca

SEQ ID NO: 17194 - DNA, 20 bp, synthetic construct
  misc_feature 1..20: note = chemically synthesized
  source 1..20: mol_type = other DNA
gtgagttagcattcaagcaa

SEQ ID NO: 17195 - DNA, 20 bp, synthetic construct
  misc_feature 1..20: note = chemically synthesized
  source 1..20: mol_type = other DNA
tcaagcaaaggattcttctc

SEQ ID NO: 17196 - DNA, 20 bp, synthetic construct
  misc_feature 1..20: note = chemically synthesized
  source 1..20: mol_type = other DNA
caaaggattcttctccagac

SEQ ID NO: 17197 - DNA, 20 bp, synthetic construct
  misc_feature 1..20: note = chemically synthesized
  source 1..20: mol_type = other DNA
ttcttctccagactagtaat

SEQ ID NO: 17198 - DNA, 20 bp, synthetic construct
  misc_feature 1..20: note = chemically synthesized
  source 1..20: mol_type = other DNA
tctccagactagtaattgga

SEQ ID NO: 17199 - DNA, 20 bp, synthetic construct
  misc_feature 1..20: note = chemically synthesized
  source 1..20: mol_type = other DNA
aattggaaagcctgcaaatc

SEQ ID NO: 17200 - DNA, 20 bp, synthetic construct
  misc_feature 1..20: note = chemically synthesized
  source 1..20: mol_type = other DNA
attggaaagcctgcaaatcc

SEQ ID NO: 17201 - DNA, 20 bp, synthetic construct
  misc_feature 1..20: note = chemically synthesized
  source 1..20: mol_type = other DNA
ccacgatactctctaataac

SEQ ID NO: 17202 - DNA, 20 bp, synthetic construct
  misc_feature 1..20: note = chemically synthesized
  source 1..20: mol_type = other DNA
cacgatactctctaataact

SEQ ID NO: 17203 - DNA, 20 bp, synthetic construct
  misc_feature 1..20: note = chemically synthesized
  source 1..20: mol_type = other DNA
acgatactctctaataactg

SEQ ID NO: 17204 - DNA, 20 bp, synthetic construct
  misc_feature 1..20: note = chemically synthesized
  source 1..20: mol_type = other DNA
atactctctaataactgggg

SEQ ID NO: 17205 - DNA, 20 bp, synthetic construct
  misc_feature 1..20: note = chemically synthesized
  source 1..20: mol_type = other DNA
tactctctaataactggggt

SEQ ID NO: 17206 - DNA, 20 bp, synthetic construct
  misc_feature 1..20: note = chemically synthesized
  source 1..20: mol_type = other DNA
ctctaataactggggtggga

SEQ ID NO: 17207 - DNA, 20 bp, synthetic construct
  misc_feature 1..20: note = chemically synthesized
  source 1..20: mol_type = other DNA
taataactggggtgggatgg

SEQ ID NO: 17208 - DNA, 20 bp, synthetic construct
  misc_feature 1..20: note = chemically synthesized
  source 1..20: mol_type = other DNA
taactggggtgggatggtgg

SEQ ID NO: 17209 - DNA, 20 bp, synthetic construct
  misc_feature 1..20: note = chemically synthesized
  source 1..20: mol_type = other DNA
ctggggtgggatggtggtgg

SEQ ID NO: 17210 - DNA, 20 bp, synthetic construct
  misc_feature 1..20: note = chemically synthesized
  source 1..20: mol_type = other DNA
tggggtgggatggtggtggt

SEQ ID NO: 17211 - DNA, 20 bp, synthetic construct
  misc_feature 1..20: note = chemically synthesized
  source 1..20: mol_type = other DNA
ggtgggatggtggtggtggg

SEQ ID NO: 17212 - DNA, 20 bp, synthetic construct
  misc_feature 1..20: note = chemically synthesized
  source 1..20: mol_type = other DNA
caccacaactttctgaatgt

SEQ ID NO: 17213 - DNA, 20 bp, synthetic construct
  misc_feature 1..20: note = chemically synthesized
  source 1..20: mol_type = other DNA
tctgcatgacccgttcacca

SEQ ID NO: 17214 - DNA, 20 bp, synthetic construct
  misc_feature 1..20: note = chemically synthesized
  source 1..20: mol_type = other DNA
cgttcaccatggattaaatg

SEQ ID NO: 17215 - DNA, 20 bp, synthetic construct
  misc_feature 1..20: note = chemically synthesized
  source 1..20: mol_type = other DNA
caccatggattaaatgcggc

SEQ ID NO: 17216 - DNA, 20 bp, synthetic construct
  misc_feature 1..20: note = chemically synthesized
  source 1..20: mol_type = other DNA
taaatgcggctggtgccgaa

SEQ ID NO: 17217 - DNA, 20 bp, synthetic construct
  misc_feature 1..20: note = chemically synthesized
  source 1..20: mol_type = other DNA
aatgcggctggtgccgaatg

SEQ ID NO: 17218 - DNA, 20 bp, synthetic construct
  misc_feature 1..20: note = chemically synthesized
  source 1..20: mol_type = other DNA
atgcggctggtgccgaatgg

SEQ ID NO: 17219 - DNA, 20 bp, synthetic construct
  misc_feature 1..20: note = chemically synthesized
  source 1..20: mol_type = other DNA
tggtgccgaatggaggaaat

SEQ ID NO: 17220 - DNA, 20 bp, synthetic construct
  misc_feature 1..20: note = chemically synthesized
  source 1..20: mol_type = other DNA
gccgaatggaggaaatcaga

SEQ ID NO: 17221 - DNA, 20 bp, synthetic construct
  misc_feature 1..20: note = chemically synthesized
  source 1..20: mol_type = other DNA
ccgaatggaggaaatcagaa

SEQ ID NO: 17222 - DNA, 20 bp, synthetic construct
  misc_feature 1..20: note = chemically synthesized
  source 1..20: mol_type = other DNA
aaatcagaaaggcaaatctc

SEQ ID NO: 17223 - DNA, 20 bp, synthetic construct
  misc_feature 1..20: note = chemically synthesized
  source 1..20: mol_type = other DNA
gaaaggcaaatctcaagcaa

SEQ ID NO: 17224 - DNA, 20 bp, synthetic construct
  misc_feature 1..20: note = chemically synthesized
  source 1..20: mol_type = other DNA
aaaggcaaatctcaagcaac

SEQ ID NO: 17225 - DNA, 20 bp, synthetic construct
  misc_feature 1..20: note = chemically synthesized
  source 1..20: mol_type = other DNA
gcaacaggatttgcactcct

SEQ ID NO: 17226 - DNA, 20 bp, synthetic construct
  misc_feature 1..20: note = chemically synthesized
  source 1..20: mol_type = other DNA
acaggatttgcactcctcag

SEQ ID NO: 17227 - DNA, 20 bp, synthetic construct
  misc_feature 1..20: note = chemically synthesized
  source 1..20: mol_type = other DNA
tgcactcctcagaagtaaac

SEQ ID NO: 17228 - DNA, 20 bp, synthetic construct
  misc_feature 1..20: note = chemically synthesized
  source 1..20: mol_type = other DNA
ctgtgcttctcctttcttgc

SEQ ID NO: 17229 - DNA, 20 bp, synthetic construct
  misc_feature 1..20: note = chemically synthesized
  source 1..20: mol_type = other DNA
ctttcttgctggtttccctt

SEQ ID NO: 17230 - DNA, 20 bp, synthetic construct
  misc_feature 1..20: note = chemically synthesized
  source 1..20: mol_type = other DNA
tcttgctggtttccctttgg

SEQ ID NO: 17231 - DNA, 20 bp, synthetic construct
  misc_feature 1..20: note = chemically synthesized
  source 1..20: mol_type = other DNA
tgctggtttccctttggaag

SEQ ID NO: 17232 - DNA, 20 bp, synthetic construct
  misc_feature 1..20: note = chemically synthesized
  source 1..20: mol_type = other DNA
tctaaaattaatgccactcc

SEQ ID NO: 17233 - DNA, 20 bp, synthetic construct
  misc_feature 1..20: note = chemically synthesized
  source 1..20: mol_type = other DNA
gccactccaagccaatgaaa

SEQ ID NO: 17234 - DNA, 20 bp, synthetic construct
  misc_feature 1..20: note = chemically synthesized
  source 1..20: mol_type = other DNA
aaaaagctgtttttatacca

SEQ ID NO: 17235 - DNA, 20 bp, synthetic construct
  misc_feature 1..20: note = chemically synthesized
  source 1..20: mol_type = other DNA
aagctgtttttataccacag

SEQ ID NO: 17236 - DNA, 20 bp, synthetic construct
  misc_feature 1..20: note = chemically synthesized
  source 1..20: mol_type = other DNA
taccacagtggatgtttaca

SEQ ID NO: 17237 - DNA, 20 bp, synthetic construct
  misc_feature 1..20: note = chemically synthesized
  source 1..20: mol_type = other DNA
accacagtggatgtttacac

SEQ ID NO: 17238 - DNA, 20 bp, synthetic construct
  misc_feature 1..20: note = chemically synthesized
  source 1..20: mol_type = other DNA
cacagtggatgtttacacag

SEQ ID NO: 17239 - DNA, 20 bp, synthetic construct
  misc_feature 1..20: note = chemically synthesized
  source 1..20: mol_type = other DNA
cagtggatgtttacacagga

SEQ ID NO: 17240 - DNA, 20 bp, synthetic construct
  misc_feature 1..20: note = chemically synthesized
  source 1..20: mol_type = other DNA
ttacacaggagagacaactt

SEQ ID NO: 17241 - DNA, 20 bp, synthetic construct
  misc_feature 1..20: note = chemically synthesized
  source 1..20: mol_type = other DNA
tacacaggagagacaacttg

SEQ ID NO: 17242 - DNA, 20 bp, synthetic construct
  misc_feature 1..20: note = chemically synthesized
  source 1..20: mol_type = other DNA
acacaggagagacaacttga

SEQ ID NO: 17243 - DNA, 20 bp, synthetic construct
  misc_feature 1..20: note = chemically synthesized
  source 1..20: mol_type = other DNA
cacaggagagacaacttgag

SEQ ID NO: 17244 - DNA, 20 bp, synthetic construct
  misc_feature 1..20: note = chemically synthesized
  source 1..20: mol_type = other DNA
acaggagagacaacttgagg

SEQ ID NO: 17245 - DNA, 20 bp, synthetic construct
  misc_feature 1..20: note = chemically synthesized
  source 1..20: mol_type = other DNA
agagacaacttgagggggaa

SEQ ID NO: 17246 - DNA, 20 bp, synthetic construct
  misc_feature 1..20: note = chemically synthesized
  source 1..20: mol_type = other DNA
gagacaacttgagggggaaa

SEQ ID NO: 17247 - DNA, 20 bp, synthetic construct
  misc_feature 1..20: note = chemically synthesized
  source 1..20: mol_type = other DNA
ttgagggggaaaaggctttt

SEQ ID NO: 17248 - DNA, 20 bp, synthetic construct
  misc_feature 1..20: note = chemically synthesized
  source 1..20: mol_type = other DNA
agggggaaaaggctttttgg

SEQ ID NO: 17249 - DNA, 20 bp, synthetic construct
  misc_feature 1..20: note = chemically synthesized
  source 1..20: mol_type = other DNA
gggggaaaaggctttttgga

SEQ ID NO: 17250 - DNA, 20 bp, synthetic construct
  misc_feature 1..20: note = chemically synthesized
  source 1..20: mol_type = other DNA
ggggaaaaggctttttggaa

SEQ ID NO: 17251 - DNA, 20 bp, synthetic construct
  misc_feature 1..20: note = chemically synthesized
  source 1..20: mol_type = other DNA
gaaaaggctttttggaaggg

SEQ ID NO: 17252 - DNA, 20 bp, synthetic construct
  misc_feature 1..20: note = chemically synthesized
  source 1..20: mol_type = other DNA
aaaggctttttggaagggtg

SEQ ID NO: 17253 - DNA, 20 bp, synthetic construct
  misc_feature 1..20: note = chemically synthesized
  source 1..20: mol_type = other DNA
aaggctttttggaagggtgg

SEQ ID NO: 17254 - DNA, 20 bp, synthetic construct
  misc_feature 1..20: note = chemically synthesized
  source 1..20: mol_type = other DNA
aggctttttggaagggtgga

SEQ ID NO: 17255 - DNA, 20 bp, synthetic construct
  misc_feature 1..20: note = chemically synthesized
  source 1..20: mol_type = other DNA
ctcgtgttaatctgttctgt

SEQ ID NO: 17256 - DNA, 20 bp, synthetic construct
  misc_feature 1..20: note = chemically synthesized
  source 1..20: mol_type = other DNA
cgtgttaatctgttctgttg

SEQ ID NO: 17257 - DNA, 20 bp, synthetic construct
  misc_feature 1..20: note = chemically synthesized
  source 1..20: mol_type = other DNA
gtgttaatctgttctgttgg

SEQ ID NO: 17258 - DNA, 20 bp, synthetic construct
  misc_feature 1..20: note = chemically synthesized
  source 1..20: mol_type = other DNA
tgttctgttggaggactatg

SEQ ID NO: 17259 - DNA, 20 bp, synthetic construct
  misc_feature 1..20: note = chemically synthesized
  source 1..20: mol_type = other DNA
gactatgcagtattgcctat

SEQ ID NO: 17260 - DNA, 20 bp, synthetic construct
  misc_feature 1..20: note = chemically synthesized
  source 1..20: mol_type = other DNA
gtattgcctatgagcgactc

SEQ ID NO: 17261 - DNA, 20 bp, synthetic construct
  misc_feature 1..20: note = chemically synthesized
  source 1..20: mol_type = other DNA
tattgcctatgagcgactct

SEQ ID NO: 17262 - DNA, 20 bp, synthetic construct
  misc_feature 1..20: note = chemically synthesized
  source 1..20: mol_type = other DNA
ttttgataaattaccatgtt

SEQ ID NO: 17263 - DNA, 20 bp, synthetic construct
  misc_feature 1..20: note = chemically synthesized
  source 1..20: mol_type = other DNA
ttgataaattaccatgttta

SEQ ID NO: 17264 - DNA, 20 bp, synthetic construct
  misc_feature 1..20: note = chemically synthesized
  source 1..20: mol_type = other DNA
taaattaccatgtttagaga

SEQ ID NO: 17265 - DNA, 20 bp, synthetic construct
  misc_feature 1..20: note = chemically synthesized
  source 1..20: mol_type = other DNA
aaattaccatgtttagagat

SEQ ID NO: 17266 - DNA, 20 bp, synthetic construct
  misc_feature 1..20: note = chemically synthesized
  source 1..20: mol_type = other DNA
accatgtttagagataggtt

SEQ ID NO: 17267 - DNA, 20 bp, synthetic construct
  misc_feature 1..20: note = chemically synthesized
  source 1..20: mol_type = other DNA
tagagataggtttggctctt

SEQ ID NO: 17268 - DNA, 20 bp, synthetic construct
  misc_feature 1..20: note = chemically synthesized
  source 1..20: mol_type = other DNA
agagataggtttggctctta

SEQ ID NO: 17269 - DNA, 20 bp, synthetic construct
  misc_feature 1..20: note = chemically synthesized
  source 1..20: mol_type = other DNA
gagataggtttggctcttaa

SEQ ID NO: 17270 - DNA, 20 bp, synthetic construct
  misc_feature 1..20: note = chemically synthesized
  source 1..20: mol_type = other DNA
aggtttggctcttaagggct

SEQ ID NO: 17271 - DNA, 20 bp, synthetic construct
  misc_feature 1..20: note = chemically synthesized
  source 1..20: mol_type = other DNA
agggcttagttttatgaaca

SEQ ID NO: 17272 - DNA, 20 bp, synthetic construct
  misc_feature 1..20: note = chemically synthesized
  source 1..20: mol_type = other DNA
aaagtccgtgacgatgtttg

SEQ ID NO: 17273 - DNA, 20 bp, synthetic construct
  misc_feature 1..20: note = chemically synthesized
  source 1..20: mol_type = other DNA
tgcagcctctgtttgtatct

SEQ ID NO: 17274 - DNA, 20 bp, synthetic construct
  misc_feature 1..20: note = chemically synthesized
  source 1..20: mol_type = other DNA
tgtttgtatcttagcccctt

SEQ ID NO: 17275 - DNA, 20 bp, synthetic construct
  misc_feature 1..20: note = chemically synthesized
  source 1..20: mol_type = other DNA
cttagcccctttggcttgac

SEQ ID NO: 17276 - DNA, 20 bp, synthetic construct
  misc_feature 1..20: note = chemically synthesized
  source 1..20: mol_type = other DNA
agcccctttggcttgactag

SEQ ID NO: 17277 - DNA, 20 bp, synthetic construct
  misc_feature 1..20: note = chemically synthesized
  source 1..20: mol_type = other DNA
ttgactagaagctctatgtt

SEQ ID NO: 17278 - DNA, 20 bp, synthetic construct
  misc_feature 1..20: note = chemically synthesized
  source 1..20: mol_type = other DNA
agaagctctatgtttagttt

SEQ ID NO: 17279 - DNA, 20 bp, synthetic construct
  misc_feature 1..20: note = chemically synthesized
  source 1..20: mol_type = other DNA
ctctatgtttagtttaagct

SEQ ID NO: 17280 - DNA, 20 bp, synthetic construct
  misc_feature 1..20: note = chemically synthesized
  source 1..20: mol_type = other DNA
tgtttagtttaagctcagtc

SEQ ID NO: 17281 - DNA, 20 bp, synthetic construct
  misc_feature 1..20: note = chemically synthesized
  source 1..20: mol_type = other DNA
ttagtttaagctcagtctgg

SEQ ID NO: 17282 - DNA, 20 bp, synthetic construct
  misc_feature 1..20: note = chemically synthesized
  source 1..20: mol_type = other DNA
caattttgcattaaaaaaat

SEQ ID NO: 17283 - DNA, 20 bp, synthetic construct
  misc_feature 1..20: note = chemically synthesized
  source 1..20: mol_type = other DNA
aattttgcattaaaaaaatg

SEQ ID NO: 17284 - DNA, 20 bp, synthetic construct
  misc_feature 1..20: note = chemically synthesized
  source 1..20: mol_type = other DNA
ttaaaaaaatgaggaaatca

SEQ ID NO: 17285 - DNA, 20 bp, synthetic construct
  misc_feature 1..20: note = chemically synthesized
  source 1..20: mol_type = other DNA
taaaaaaatgaggaaatcat

SEQ ID NO: 17286 - DNA, 20 bp, synthetic construct
  misc_feature 1..20: note = chemically synthesized
  source 1..20: mol_type = other DNA
aaaaatgaggaaatcatagg

SEQ ID NO: 17287 - DNA, 20 bp, synthetic construct
  misc_feature 1..20: note = chemically synthesized
  source 1..20: mol_type = other DNA
aagaaaaaccctttgctttt

SEQ ID NO: 17288 - DNA, 20 bp, synthetic construct
  misc_feature 1..20: note = chemically synthesized
  source 1..20: mol_type = other DNA
atcttactgataatttgcta

SEQ ID NO: 17289 - DNA, 20 bp, synthetic construct
  misc_feature 1..20: note = chemically synthesized
  source 1..20: mol_type = other DNA
ctaaagctcatttgaatttt

SEQ ID NO: 17290 - DNA, 20 bp, synthetic construct
  misc_feature 1..20: note = chemically synthesized
  source 1..20: mol_type = other DNA
aagcacttctttaatcttca

SEQ ID NO: 17291 - DNA, 20 bp, synthetic construct
  misc_feature 1..20: note = chemically synthesized
  source 1..20: mol_type = other DNA
agcacttctttaatcttcaa

SEQ ID NO: 17292 - DNA, 20 bp, synthetic construct
  misc_feature 1..20: note = chemically synthesized
  source 1..20: mol_type = other DNA
aattgctttatgaatatgca

SEQ ID NO: 17293 - DNA, 20 bp, synthetic construct
  misc_feature 1..20: note = chemically synthesized
  source 1..20: mol_type = other DNA
ctttatgaatatgcatggtg

SEQ ID NO: 17294 - DNA, 20 bp, synthetic construct
  misc_feature 1..20: note = chemically synthesized
  source 1..20: mol_type = other DNA
tttatgaatatgcatggtgt

SEQ ID NO: 17295 - DNA, 20 bp, synthetic construct
  misc_feature 1..20: note = chemically synthesized
  source 1..20: mol_type = other DNA
atgaatatgcatggtgtggg

SEQ ID NO: 17296 - DNA, 20 bp, synthetic construct
  misc_feature 1..20: note = chemically synthesized
  source 1..20: mol_type = other DNA
tgcatggtgtgggcagactt

SEQ ID NO: 17297 - DNA, 20 bp, synthetic construct
  misc_feature 1..20: note = chemically synthesized
  source 1..20: mol_type = other DNA
gcagacttcagttcattacc

SEQ ID NO: 17298 - DNA, 20 bp, synthetic construct
  misc_feature 1..20: note = chemically synthesized
  source 1..20: mol_type = other DNA
ttgtaaattctaatgaccat

SEQ ID NO: 17299 - DNA, 20 bp, synthetic construct
  misc_feature 1..20: note = chemically synthesized
  source 1..20: mol_type = other DNA
tgtaaattctaatgaccatt

SEQ ID NO: 17300 - DNA, 20 bp, synthetic construct
  misc_feature 1..20: note = chemically synthesized
  source 1..20: mol_type = other DNA
taatgaccattaggtccttc

SEQ ID NO: 17301 - DNA, 20 bp, synthetic construct
  misc_feature 1..20: note = chemically synthesized
  source 1..20: mol_type = other DNA
aattgttttgcatttttgat

SEQ ID NO: 17302 - DNA, 20 bp, synthetic construct
  misc_feature 1..20: note = chemically synthesized
  source 1..20: mol_type = other DNA
ggcctattaacatgtacatt

SEQ ID NO: 17303 - DNA, 20 bp, synthetic construct
  misc_feature 1..20: note = chemically synthesized
  source 1..20: mol_type = other DNA
catgtacattcggtgcacat

SEQ ID NO: 17304 - DNA, 20 bp, synthetic construct
  misc_feature 1..20: note = chemically synthesized
  source 1..20: mol_type = other DNA
atgtacattcggtgcacatc

SEQ ID NO: 17305 - DNA, 20 bp, synthetic construct
  misc_feature 1..20: note = chemically synthesized
  source 1..20: mol_type = other DNA
acattcggtgcacatcaggc

SEQ ID NO: 17306 - DNA, 20 bp, synthetic construct
  misc_feature 1..20: note = chemically synthesized
  source 1..20: mol_type = other DNA
tgcacatcaggctggcctgt

SEQ ID NO: 17307 - DNA, 20 bp, synthetic construct
  misc_feature 1..20: note = chemically synthesized
  source 1..20: mol_type = other DNA
gctggcctgtcagcctgctg

SEQ ID NO: 17308 - DNA, 20 bp, synthetic construct
  misc_feature 1..20: note = chemically synthesized
  source 1..20: mol_type = other DNA
ctggcctgtcagcctgctga

SEQ ID NO: 17309 - DNA, 20 bp, synthetic construct
  misc_feature 1..20: note = chemically synthesized
  source 1..20: mol_type = other DNA
ggcctgtcagcctgctgaag

SEQ ID NO: 17310 - DNA, 20 bp, synthetic construct
  misc_feature 1..20: note = chemically synthesized
  source 1..20: mol_type = other DNA
gcctgctgaaggagaaaaaa

SEQ ID NO: 17311 - DNA, 20 bp, synthetic construct
  misc_feature 1..20: note = chemically synthesized
  source 1..20: mol_type = other DNA
cctgctgaaggagaaaaaaa

SEQ ID NO: 17312 - DNA, 20 bp, synthetic construct
  misc_feature 1..20: note = chemically synthesized
  source 1..20: mol_type = other DNA
aaaaaggtgaaaattgttta

SEQ ID NO: 17313 - DNA, 20 bp, synthetic construct
  misc_feature 1..20: note = chemically synthesized
  source 1..20: mol_type = other DNA
tgaaaattgtttatagcacc

SEQ ID NO: 17314 - DNA, 20 bp, synthetic construct
  misc_feature 1..20: note = chemically synthesized
  source 1..20: mol_type = other DNA
gtttatagcaccaagattct

SEQ ID NO: 17315 - DNA, 20 bp, synthetic construct
  misc_feature 1..20: note = chemically synthesized
  source 1..20: mol_type = other DNA
ttgatgatgtaaaaaaatta

SEQ ID NO: 17316 - DNA, 20 bp, synthetic construct
  misc_feature 1..20: note = chemically synthesized
  source 1..20: mol_type = other DNA
atgatgtaaaaaaattaaag

SEQ ID NO: 17317 - DNA, 20 bp, synthetic construct
  misc_feature 1..20: note = chemically synthesized
  source 1..20: mol_type = other DNA
aagcagtgttttttcttctc

SEQ ID NO: 17318 - DNA, 20 bp, synthetic construct
  misc_feature 1..20: note = chemically synthesized
  source 1..20: mol_type = other DNA
ttttttcttctcaagattaa

SEQ ID NO: 17319 - DNA, 20 bp, synthetic construct
  misc_feature 1..20: note = chemically synthesized
  source 1..20: mol_type = other DNA
ctcaagattaaaagttcacc

SEQ ID NO: 17320 - DNA, 20 bp, synthetic construct
  misc_feature 1..20: note = chemically synthesized
  source 1..20: mol_type = other DNA
caagattaaaagttcaccaa

SEQ ID NO: 17321 - DNA, 20 bp, synthetic construct
  misc_feature 1..20: note = chemically synthesized
  source 1..20: mol_type = other DNA
attaatgtaatttgcatatg

SEQ ID NO: 17322 - DNA, 20 bp, synthetic construct
  misc_feature 1..20: note = chemically synthesized
  source 1..20: mol_type = other DNA
tttgatcatgttttgtgtat

SEQ ID NO: 17323 - DNA, 20 bp, synthetic construct
  misc_feature 1..20: note = chemically synthesized
  source 1..20: mol_type = other DNA
gttttgtgtattagctgcct

SEQ ID NO: 17324 - DNA, 20 bp, synthetic construct
  misc_feature 1..20: note = chemically synthesized
  source 1..20: mol_type = other DNA
ttgtgtattagctgcctcag

SEQ ID NO: 17325 - DNA, 20 bp, synthetic construct
  misc_feature 1..20: note = chemically synthesized
  source 1..20: mol_type = other DNA
gcctcagtggctctcctcct

SEQ ID NO: 17326 - DNA, 20 bp, synthetic construct
  misc_feature 1..20: note = chemically synthesized
  source 1..20: mol_type = other DNA
gctctcctcctcagatgccc

SEQ ID NO: 17327 - DNA, 20 bp, synthetic construct
  misc_feature 1..20: note = chemically synthesized
  source 1..20: mol_type = other DNA
ctcctcctcagatgccccag

SEQ ID NO: 17328 - DNA, 20 bp, synthetic construct
  misc_feature 1..20: note = chemically synthesized
  source 1..20: mol_type = other DNA
tcctcagatgccccagtaga

SEQ ID NO: 17329 - DNA, 20 bp, synthetic construct
  misc_feature 1..20: note = chemically synthesized
  source 1..20: mol_type = other DNA
cctcagatgccccagtagaa

SEQ ID NO: 17330 - DNA, 20 bp, synthetic construct
  misc_feature 1..20: note = chemically synthesized
  source 1..20: mol_type = other DNA
tcagatgccccagtagaaag

SEQ ID NO: 17331 - DNA, 20 bp, synthetic construct
  misc_feature 1..20: note = chemically synthesized
  source 1..20: mol_type = other DNA
aaatgatgcatcttcttgcc

SEQ ID NO: 17332 - DNA, 20 bp, synthetic construct
  misc_feature 1..20: note = chemically synthesized
  source 1..20: mol_type = other DNA
tcttcttgccaagtttcctt

SEQ ID NO: 17333 - DNA, 20 bp, synthetic construct
  misc_feature 1..20: note = chemically synthesized
  source 1..20: mol_type = other DNA
caagtttcctttagtgaatt

SEQ ID NO: 17334 - DNA, 20 bp, synthetic construct
  misc_feature 1..20: note = chemically synthesized
  source 1..20: mol_type = other DNA
aagtttcctttagtgaattg

SEQ ID NO: 17335 - DNA, 20 bp, synthetic construct
  misc_feature 1..20: note = chemically synthesized
  source 1..20: mol_type = other DNA
cctttagtgaattgaggaat

SEQ ID NO: 17336 - DNA, 20 bp, synthetic construct
  misc_feature 1..20: note = chemically synthesized
  source 1..20: mol_type = other DNA
ttagtgaattgaggaattag

SEQ ID NO: 17337 - DNA, 20 bp, synthetic construct
  misc_feature 1..20: note = chemically synthesized
  source 1..20: mol_type = other DNA
ggaattagaagtctaacctt

SEQ ID NO: 17338 - DNA, 20 bp, synthetic construct
  misc_feature 1..20: note = chemically synthesized
  source 1..20: mol_type = other DNA
atccgttttcttttaacgtt

SEQ ID NO: 17339 - DNA, 20 bp, synthetic construct
  misc_feature 1..20: note = chemically synthesized
  source 1..20: mol_type = other DNA
ttttcttttaacgttaagta

SEQ ID NO: 17340 - DNA, 20 bp, synthetic construct
  misc_feature 1..20: note = chemically synthesized
  source 1..20: mol_type = other DNA
agtacagtttgtgaacgtgt

SEQ ID NO: 17341 - DNA, 20 bp, synthetic construct
  misc_feature 1..20: note = chemically synthesized
  source 1..20: mol_type = other DNA
cagtttgtgaacgtgttggc

SEQ ID NO: 17342 - DNA, 20 bp, synthetic construct
  misc_feature 1..20: note = chemically synthesized
  source 1..20: mol_type = other DNA
ggctggaaatcgttctcatt

SEQ ID NO: 17343 - DNA, 20 bp, synthetic construct
  misc_feature 1..20: note = chemically synthesized
  source 1..20: mol_type = other DNA
gctggaaatcgttctcattt

SEQ ID NO: 17344 - DNA, 20 bp, synthetic construct
  misc_feature 1..20: note = chemically synthesized
  source 1..20: mol_type = other DNA
ctggaaatcgttctcatttg

SEQ ID NO: 17345 - DNA, 20 bp, synthetic construct
  misc_feature 1..20: note = chemically synthesized
  source 1..20: mol_type = other DNA
ggaaatcgttctcatttggg

SEQ ID NO: 17346 - DNA, 20 bp, synthetic construct
  misc_feature 1..20: note = chemically synthesized
  source 1..20: mol_type = other DNA
aatcgttctcatttggggag

SEQ ID NO: 17347 - DNA, 20 bp, synthetic construct
  misc_feature 1..20: note = chemically synthesized
  source 1..20: mol_type = other DNA
gggagaagactgtaaaattt

SEQ ID NO: 17348 - DNA, 20 bp, synthetic construct
  misc_feature 1..20: note = chemically synthesized
  source 1..20: mol_type = other DNA
taaaatttaagtatatgatt

SEQ ID NO: 17349 - DNA, 20 bp, synthetic construct
  misc_feature 1..20: note = chemically synthesized
  source 1..20: mol_type = other DNA
aaaatttaagtatatgattg

SEQ ID NO: 17350 - DNA, 20 bp, synthetic construct
  misc_feature 1..20: note = chemically synthesized
  source 1..20: mol_type = other DNA
gtatatgattgaggcacttc

SEQ ID NO: 17351 - DNA, 20 bp, synthetic construct
  misc_feature 1..20: note = chemically synthesized
  source 1..20: mol_type = other DNA
ttgaggcacttccagataca

SEQ ID NO: 17352 - DNA, 20 bp, synthetic construct
  misc_feature 1..20: note = chemically synthesized
  source 1..20: mol_type = other DNA
gaggcacttccagatacata

SEQ ID NO: 17353 - DNA, 20 bp, synthetic construct
  misc_feature 1..20: note = chemically synthesized
  source 1..20: mol_type = other DNA
tctgttccccacgaacattg

SEQ ID NO: 17354 - DNA, 20 bp, synthetic construct
  misc_feature 1..20: note = chemically synthesized
  source 1..20: mol_type = other DNA
ctgttccccacgaacattgc

SEQ ID NO: 17355 - DNA, 20 bp, synthetic construct
  misc_feature 1..20: note = chemically synthesized
  source 1..20: mol_type = other DNA
tgttccccacgaacattgca

SEQ ID NO: 17356 - DNA, 20 bp, synthetic construct
  misc_feature 1..20: note = chemically synthesized
  source 1..20: mol_type = other DNA
tccccacgaacattgcaggg

SEQ ID NO: 17357 - DNA, 20 bp, synthetic construct
  misc_feature 1..20: note = chemically synthesized
  source 1..20: mol_type = other DNA
ttgcagggcagttttattgt

SEQ ID NO: 17358 - DNA, 20 bp, synthetic construct
  misc_feature 1..20: note = chemically synthesized
  source 1..20: mol_type = other DNA
cagggcagttttattgttag

SEQ ID NO: 17359 - DNA, 20 bp, synthetic construct
  misc_feature 1..20: note = chemically synthesized
  source 1..20: mol_type = other DNA
ttttattgttagcagtttga

SEQ ID NO: 17360 - DNA, 20 bp, synthetic construct
  misc_feature 1..20: note = chemically synthesized
  source 1..20: mol_type = other DNA
tattgttagcagtttgatgg

SEQ ID NO: 17361 - DNA, 20 bp, synthetic construct
  misc_feature 1..20: note = chemically synthesized
  source 1..20: mol_type = other DNA
attgttagcagtttgatggc

SEQ ID NO: 17362 - DNA, 20 bp, synthetic construct
  misc_feature 1..20: note = chemically synthesized
  source 1..20: mol_type = other DNA
gttagcagtttgatggcagg

SEQ ID NO: 17363 - DNA, 20 bp, synthetic construct
  misc_feature 1..20: note = chemically synthesized
  source 1..20: mol_type = other DNA
agtttgatggcaggaagcct

SEQ ID NO: 17364 - DNA, 20 bp, synthetic construct
  misc_feature 1..20: note = chemically synthesized
  source 1..20: mol_type = other DNA
gcaggaagccttggctatta

SEQ ID NO: 17365 - DNA, 20 bp, synthetic construct
  misc_feature 1..20: note = chemically synthesized
  source 1..20: mol_type = other DNA
cttggctattatagtgtatt

SEQ ID NO: 17366 - DNA, 20 bp, synthetic construct
  misc_feature 1..20: note = chemically synthesized
  source 1..20: mol_type = other DNA
attatagtgtattaagacat

SEQ ID NO: 17367 - DNA, 20 bp, synthetic construct
  misc_feature 1..20: note = chemically synthesized
  source 1..20: mol_type = other DNA
ttatagtgtattaagacatc

SEQ ID NO: 17368 - DNA, 20 bp, synthetic construct
  misc_feature 1..20: note = chemically synthesized
  source 1..20: mol_type = other DNA
aagacatcaggttcctcctt

SEQ ID NO: 17369 - DNA, 20 bp, synthetic construct
  misc_feature 1..20: note = chemically synthesized
  source 1..20: mol_type = other DNA
gacatcaggttcctcctttg

SEQ ID NO: 17370 - DNA, 20 bp, synthetic construct
  misc_feature 1..20: note = chemically synthesized
  source 1..20: mol_type = other DNA
acatcaggttcctcctttgg

SEQ ID NO: 17371 - DNA, 20 bp, synthetic construct
  misc_feature 1..20: note = chemically synthesized
  source 1..20: mol_type = other DNA
atcaggttcctcctttggag

SEQ ID NO: 17372 - DNA, 20 bp, synthetic construct
  misc_feature 1..20: note = chemically synthesized
  source 1..20: mol_type = other DNA
tcaggttcctcctttggagg

SEQ ID NO: 17373 - DNA, 20 bp, synthetic construct
  misc_feature 1..20: note = chemically synthesized
  source 1..20: mol_type = other DNA
caggttcctcctttggagga

SEQ ID NO: 17374 - DNA, 20 bp, synthetic construct
  misc_feature 1..20: note = chemically synthesized
  source 1..20: mol_type = other DNA
gttcctcctttggaggaggg

SEQ ID NO: 17375 - DNA, 20 bp, synthetic construct
  misc_feature 1..20: note = chemically synthesized
  source 1..20: mol_type = other DNA
ttcctcctttggaggaggga

SEQ ID NO: 17376 - DNA, 20 bp, synthetic construct
  misc_feature 1..20: note = chemically synthesized
  source 1..20: mol_type = other DNA
ctttggaggagggaaggcta

SEQ ID NO: 17377 - DNA, 20 bp, synthetic construct
  misc_feature 1..20: note = chemically synthesized
  source 1..20: mol_type = other DNA
aaacctttctaacaatgctt

SEQ ID NO: 17378 - DNA, 20 bp, synthetic construct
  misc_feature 1..20: note = chemically synthesized
  source 1..20: mol_type = other DNA
aacctttctaacaatgcttt

SEQ ID NO: 17379 - DNA, 20 bp, synthetic construct
  misc_feature 1..20: note = chemically synthesized
  source 1..20: mol_type = other DNA
aatgctttaggtttcttctt

SEQ ID NO: 17380 - DNA, 20 bp, synthetic construct
  misc_feature 1..20: note = chemically synthesized
  source 1..20: mol_type = other DNA
ctttaggtttcttctttaga

SEQ ID NO: 17381 - DNA, 20 bp, synthetic construct
  misc_feature 1..20: note = chemically synthesized
  source 1..20: mol_type = other DNA
aggtttcttctttagataga

SEQ ID NO: 17382 - DNA, 20 bp, synthetic construct
  misc_feature 1..20: note = chemically synthesized
  source 1..20: mol_type = other DNA
ttcttctttagatagatggc

SEQ ID NO: 17383 - DNA, 20 bp, synthetic construct
  misc_feature 1..20: note = chemically synthesized
  source 1..20: mol_type = other DNA
agatagatggctggcaccta

SEQ ID NO: 17384 - DNA, 20 bp, synthetic construct
  misc_feature 1..20: note = chemically synthesized
  source 1..20: mol_type = other DNA
gatagatggctggcacctaa

SEQ ID NO: 17385 - DNA, 20 bp, synthetic construct
  misc_feature 1..20: note = chemically synthesized
  source 1..20: mol_type = other DNA
tggctggcacctaaaggact

SEQ ID NO: 17386 - DNA, 20 bp, synthetic construct
  misc_feature 1..20: note = chemically synthesized
  source 1..20: mol_type = other DNA
ggctggcacctaaaggactt

SEQ ID NO: 17387 - DNA, 20 bp, synthetic construct
  misc_feature 1..20: note = chemically synthesized
  source 1..20: mol_type = other DNA
gcacctaaaggacttgggcc

SEQ ID NO: 17388 - DNA, 20 bp, synthetic construct
  misc_feature 1..20: note = chemically synthesized
  source 1..20: mol_type = other DNA
cacctaaaggacttgggcct

SEQ ID NO: 17389 - DNA, 20 bp, synthetic construct
  misc_feature 1..20: note = chemically synthesized
  source 1..20: mol_type = other DNA
aaaggacttgggcctgggtt

SEQ ID NO: 17390 - DNA, 20 bp, synthetic construct
  misc_feature 1..20: note = chemically synthesized
  source 1..20: mol_type = other DNA
tggctgactcttttatcttt

SEQ ID NO: 17391 - DNA, 20 bp, synthetic construct
  misc_feature 1..20: note = chemically synthesized
  source 1..20: mol_type = other DNA
actcttttatcttttagatc

SEQ ID NO: 17392 - DNA, 20 bp, synthetic construct
  misc_feature 1..20: note = chemically synthesized
  source 1..20: mol_type = other DNA
ttttatcttttagatcaagt

SEQ ID NO: 17393 - DNA, 20 bp, synthetic construct
  misc_feature 1..20: note = chemically synthesized
  source 1..20: mol_type = other DNA
atcaagtaagttttctcatt

SEQ ID NO: 17394 - DNA, 20 bp, synthetic construct
  misc_feature 1..20: note = chemically synthesized
  source 1..20: mol_type = other DNA
tctcattcagctgctgctct

SEQ ID NO: 17395 - DNA, 20 bp, synthetic construct
  misc_feature 1..20: note = chemically synthesized
  source 1..20: mol_type = other DNA
gtgtcctcccctcatcacca

SEQ ID NO: 17396 - DNA, 20 bp, synthetic construct
  misc_feature 1..20: note = chemically synthesized
  source 1..20: mol_type = other DNA
ctcatcaccaaagtatatcc

SEQ ID NO: 17397 - DNA, 20 bp, synthetic construct
  misc_feature 1..20: note = chemically synthesized
  source 1..20: mol_type = other DNA
ccaaagtatatcctggtctc

SEQ ID NO: 17398 - DNA, 20 bp, synthetic construct
  misc_feature 1..20: note = chemically synthesized
  source 1..20: mol_type = other DNA
caaagtatatcctggtctcc

SEQ ID NO: 17399 - DNA, 20 bp, synthetic construct
  misc_feature 1..20: note = chemically synthesized
  source 1..20: mol_type = other DNA
atcctggtctccaggctccc

SEQ ID NO: 17400 - DNA, 20 bp, synthetic construct
  misc_feature 1..20: note = chemically synthesized
  source 1..20: mol_type = other DNA
tcctggtctccaggctccct

SEQ ID NO: 17401 - DNA, 20 bp, synthetic construct
  misc_feature 1..20: note = chemically synthesized
  source 1..20: mol_type = other DNA
ctccaggctccctgggctcc

SEQ ID NO: 17402 - DNA, 20 bp, synthetic construct
  misc_feature 1..20: note = chemically synthesized
  source 1..20: mol_type = other DNA
gggctcccagtgtctccctc

SEQ ID NO: 17403 - DNA, 20 bp, synthetic construct
  misc_feature 1..20: note = chemically synthesized
  source 1..20: mol_type = other DNA
ggctcccagtgtctccctca

SEQ ID NO: 17404 - DNA, 20 bp, synthetic construct
  misc_feature 1..20: note = chemically synthesized
  source 1..20: mol_type = other DNA
gtgtctccctcaaggtacac

SEQ ID NO: 17405 - DNA, 20 bp, synthetic construct
  misc_feature 1..20: note = chemically synthesized
  source 1..20: mol_type = other DNA
ctcaaggtacacgagtgccc

SEQ ID NO: 17406 - DNA, 20 bp, synthetic construct
  misc_feature 1..20: note = chemically synthesized
  source 1..20: mol_type = other DNA
aaggtacacgagtgccctgg

SEQ ID NO: 17407 - DNA, 20 bp, synthetic construct
  misc_feature 1..20: note = chemically synthesized
  source 1..20: mol_type = other DNA
agtgccctggtggtgaaaac

SEQ ID NO: 17408 - DNA, 20 bp, synthetic construct
  misc_feature 1..20: note = chemically synthesized
  source 1..20: mol_type = other DNA
gtgccctggtggtgaaaaca

SEQ ID NO: 17409 - DNA, 20 bp, synthetic construct
  misc_feature 1..20: note = chemically synthesized
  source 1..20: mol_type = other DNA
gaaaacaaggtgctaactaa

SEQ ID NO: 17410 - DNA, 20 bp, synthetic construct
  misc_feature 1..20: note = chemically synthesized
  source 1..20: mol_type = other DNA
actaacggtttccgattttt

SEQ ID NO: 17411 - DNA, 20 bp, synthetic construct
  misc_feature 1..20: note = chemically synthesized
  source 1..20: mol_type = other DNA
taacggtttccgatttttga

SEQ ID NO: 17412 - DNA, 20 bp, synthetic construct
  misc_feature 1..20: note = chemically synthesized
  source 1..20: mol_type = other DNA
tttttgagagcctgtgattt

SEQ ID NO: 17413 - DNA, 20 bp, synthetic construct
  misc_feature 1..20: note = chemically synthesized
  source 1..20: mol_type = other DNA
gtattattgatgttcatctt

SEQ ID NO: 17414 - DNA, 20 bp, synthetic construct
  misc_feature 1..20: note = chemically synthesized
  source 1..20: mol_type = other DNA
gatgttcatctttggtttat

SEQ ID NO: 17415 - DNA, 20 bp, synthetic construct
  misc_feature 1..20: note = chemically synthesized
  source 1..20: mol_type = other DNA
ttggtttatgagtttatcac

SEQ ID NO: 17416 - DNA, 20 bp, synthetic construct
  misc_feature 1..20: note = chemically synthesized
  source 1..20: mol_type = other DNA
tgagtttatcactggttaac

SEQ ID NO: 17417 - DNA, 20 bp, synthetic construct
  misc_feature 1..20: note = chemically synthesized
  source 1..20: mol_type = other DNA
gtttatcactggttaacaag

SEQ ID NO: 17418 - DNA, 20 bp, synthetic construct
  misc_feature 1..20: note = chemically synthesized
  source 1..20: mol_type = other DNA
cactggttaacaagcagaat

SEQ ID NO: 17419 - DNA, 20 bp, synthetic construct
  misc_feature 1..20: note = chemically synthesized
  source 1..20: mol_type = other DNA
gttaacaagcagaatcagaa

SEQ ID NO: 17420 - DNA, 20 bp, synthetic construct
  misc_feature 1..20: note = chemically synthesized
  source 1..20: mol_type = other DNA
ttaaaacgaatgtttaatga

SEQ ID NO: 17421 - DNA, 20 bp, synthetic construct
  misc_feature 1..20: note = chemically synthesized
  source 1..20: mol_type = other DNA
tgaaagaaaataaattgtga

SEQ ID NO: 17422 - DNA, 20 bp, synthetic construct
  misc_feature 1..20: note = chemically synthesized
  source 1..20: mol_type = other DNA
aaattgtgatggaaaatgaa

SEQ ID NO: 17423 - DNA, 20 bp, synthetic construct
  misc_feature 1..20: note = chemically synthesized
  source 1..20: mol_type = other DNA
atggaaaatgaacagtgtgt

SEQ ID NO: 17424 - DNA, 20 bp, synthetic construct
  misc_feature 1..20: note = chemically synthesized
  source 1..20: mol_type = other DNA
taactataattttaacctcc

SEQ ID NO: 17425 - DNA, 20 bp, synthetic construct
  misc_feature 1..20: note = chemically synthesized
  source 1..20: mol_type = other DNA
aactataattttaacctccg

SEQ ID NO: 17426 - DNA, 20 bp, synthetic construct
  misc_feature 1..20: note = chemically synthesized
  source 1..20: mol_type = other DNA
actataattttaacctccga

SEQ ID NO: 17427 - DNA, 20 bp, synthetic construct
  misc_feature 1..20: note = chemically synthesized
  source 1..20: mol_type = other DNA
attttaacctccgagggacc

SEQ ID NO: 17428 - DNA, 20 bp, synthetic construct
  misc_feature 1..20: note = chemically synthesized
  source 1..20: mol_type = other DNA
ttccatccataccatgctaa

SEQ ID NO: 17429 - DNA, 20 bp, synthetic construct
  misc_feature 1..20: note = chemically synthesized
  source 1..20: mol_type = other DNA
accatgctaaaagcatgctt

SEQ ID NO: 17430 - DNA, 20 bp, synthetic construct
  misc_feature 1..20: note = chemically synthesized
  source 1..20: mol_type = other DNA
taaaagcatgcttcagttta

SEQ ID NO: 17431 - DNA, 20 bp, synthetic construct
  misc_feature 1..20: note = chemically synthesized
  source 1..20: mol_type = other DNA
agtttaaagttgttaatatt

SEQ ID NO: 17432 - DNA, 20 bp, synthetic construct
  misc_feature 1..20: note = chemically synthesized
  source 1..20: mol_type = other DNA
taaagttgttaatattcagc

SEQ ID NO: 17433 - DNA, 20 bp, synthetic construct
  misc_feature 1..20: note = chemically synthesized
  source 1..20: mol_type = other DNA
aaagttgttaatattcagct

SEQ ID NO: 17434 - DNA, 20 bp, synthetic construct
  misc_feature 1..20: note = chemically synthesized
  source 1..20: mol_type = other DNA
gttaatattcagctgggaaa

SEQ ID NO: 17435 - DNA, 20 bp, synthetic construct
  misc_feature 1..20: note = chemically synthesized
  source 1..20: mol_type = other DNA
ttcagctgggaaacagtatc

SEQ ID NO: 17436 - DNA, 20 bp, synthetic construct
  misc_feature 1..20: note = chemically synthesized
  source 1..20: mol_type = other DNA
cagaacacaaataaattatt

SEQ ID NO: 17437 - DNA, 20 bp, synthetic construct
  misc_feature 1..20: note = chemically synthesized
  source 1..20: mol_type = other DNA
tattaagtgcatgaactttt

SEQ ID NO: 17438 - DNA, 20 bp, synthetic construct
  misc_feature 1..20: note = chemically synthesized
  source 1..20: mol_type = other DNA
attaagtgcatgaacttttt

SEQ ID NO: 17439 - DNA, 20 bp, synthetic construct
  misc_feature 1..20: note = chemically synthesized
  source 1..20: mol_type = other DNA
aagtgcatgaactttttagg

SEQ ID NO: 17440 - DNA, 20 bp, synthetic construct
  misc_feature 1..20: note = chemically synthesized
  source 1..20: mol_type = other DNA
gcatgaactttttaggcagt

SEQ ID NO: 17441 - DNA, 20 bp, synthetic construct
  misc_feature 1..20: note = chemically synthesized
  source 1..20: mol_type = other DNA
taggcagtaagatgaactga

SEQ ID NO: 17442 - DNA, 20 bp, synthetic construct
  misc_feature 1..20: note = chemically synthesized
  source 1..20: mol_type = other DNA
aggcagtaagatgaactgat

SEQ ID NO: 17443 - DNA, 20 bp, synthetic construct
  misc_feature 1..20: note = chemically synthesized
  source 1..20: mol_type = other DNA
ggcagtaagatgaactgatg

SEQ ID NO: 17444 - DNA, 20 bp, synthetic construct
  misc_feature 1..20: note = chemically synthesized
  source 1..20: mol_type = other DNA
aactgatggggtccatctgt

SEQ ID NO: 17445 - DNA, 20 bp, synthetic construct
  misc_feature 1..20: note = chemically synthesized
  source 1..20: mol_type = other DNA
tggggtccatctgtgagatc

SEQ ID NO: 17446 - DNA, 20 bp, synthetic construct
  misc_feature 1..20: note = chemically synthesized
  source 1..20: mol_type = other DNA
ggggtccatctgtgagatcc

SEQ ID NO: 17447 - DNA, 20 bp, synthetic construct
  misc_feature 1..20: note = chemically synthesized
  source 1..20: mol_type = other DNA
gggtccatctgtgagatcca

SEQ ID NO: 17448 - DNA, 20 bp, synthetic construct
  misc_feature 1..20: note = chemically synthesized
  source 1..20: mol_type = other DNA
ggtccatctgtgagatccag

SEQ ID NO: 17449 - DNA, 20 bp, synthetic construct
  misc_feature 1..20: note = chemically synthesized
  source 1..20: mol_type = other DNA
gctttttatttgtgtgtgtc

SEQ ID NO: 17450 - DNA, 20 bp, synthetic construct
  misc_feature 1..20: note = chemically synthesized
  source 1..20: mol_type = other DNA
ttctgccctctccgacttca

SEQ ID NO: 17451 - DNA, 20 bp, synthetic construct
  misc_feature 1..20: note = chemically synthesized
  source 1..20: mol_type = other DNA
ctctccgacttcacagcctt

SEQ ID NO: 17452 - DNA, 20 bp, synthetic construct
  misc_feature 1..20: note = chemically synthesized
  source 1..20: mol_type = other DNA
acttcacagcctttggtctc

SEQ ID NO: 17453 - DNA, 20 bp, synthetic construct
  misc_feature 1..20: note = chemically synthesized
  source 1..20: mol_type = other DNA
cttgatgtaattgctttact

SEQ ID NO: 17454 - DNA, 20 bp, synthetic construct
  misc_feature 1..20: note = chemically synthesized
  source 1..20: mol_type = other DNA
taagatatgatgaaatctaa

SEQ ID NO: 17455 - DNA, 20 bp, synthetic construct
  misc_feature 1..20: note = chemically synthesized
  source 1..20: mol_type = other DNA
gataatttgctatttgaaaa

SEQ ID NO: 17456 - DNA, 20 bp, synthetic construct
  misc_feature 1..20: note = chemically synthesized
  source 1..20: mol_type = other DNA
aaaaatcttcatactttatg

SEQ ID NO: 17457 - DNA, 20 bp, synthetic construct
  misc_feature 1..20: note = chemically synthesized
  source 1..20: mol_type = other DNA
aaaatcttcatactttatgt

SEQ ID NO: 17458 - DNA, 20 bp, synthetic construct
  misc_feature 1..20: note = chemically synthesized
  source 1..20: mol_type = other DNA
aaatcttcatactttatgtg

SEQ ID NO: 17459 - DNA, 20 bp, synthetic construct
  misc_feature 1..20: note = chemically synthesized
  source 1..20: mol_type = other DNA
ttcatactttatgtggggct

SEQ ID NO: 17460 - DNA, 20 bp, synthetic construct
  misc_feature 1..20: note = chemically synthesized
  source 1..20: mol_type = other DNA
atactttatgtggggctgag

SEQ ID NO: 17461 - DNA, 20 bp, synthetic construct
  misc_feature 1..20: note = chemically synthesized
  source 1..20: mol_type = other DNA
tactttatgtggggctgagt

SEQ ID NO: 17462 - DNA, 20 bp, synthetic construct
  misc_feature 1..20: note = chemically synthesized
  source 1..20: mol_type = other DNA
tttatgtggggctgagtggg

SEQ ID NO: 17463 - DNA, 20 bp, synthetic construct
  misc_feature 1..20: note = chemically synthesized
  source 1..20: mol_type = other DNA
atgtggggctgagtgggcag

SEQ ID NO: 17464 - DNA, 20 bp, synthetic construct
  misc_feature 1..20: note = chemically synthesized
  source 1..20: mol_type = other DNA
gtggggctgagtgggcagtg

SEQ ID NO: 17465 - DNA, 20 bp, synthetic construct
  misc_feature 1..20: note = chemically synthesized
  source 1..20: mol_type = other DNA
ggctgagtgggcagtggaga

SEQ ID NO: 17466 - DNA, 20 bp, synthetic construct
  misc_feature 1..20: note = chemically synthesized
  source 1..20: mol_type = other DNA
gctgagtgggcagtggagaa

SEQ ID NO: 17467 - DNA, 20 bp, synthetic construct
  misc_feature 1..20: note = chemically synthesized
  source 1..20: mol_type = other DNA
ctgagtgggcagtggagaaa

SEQ ID NO: 17468 - DNA, 20 bp, synthetic construct
  misc_feature 1..20: note = chemically synthesized
  source 1..20: mol_type = other DNA
tgagtgggcagtggagaaag

SEQ ID NO: 17469 - DNA, 20 bp, synthetic construct
  misc_feature 1..20: note = chemically synthesized
  source 1..20: mol_type = other DNA
gcagtggagaaaggggtatt

SEQ ID NO: 17470 - DNA, 20 bp, synthetic construct
  misc_feature 1..20: note = chemically synthesized
  source 1..20: mol_type = other DNA
aaaggggtattcagctgacc

SEQ ID NO: 17471 - DNA, 20 bp, synthetic construct
  misc_feature 1..20: note = chemically synthesized
  source 1..20: mol_type = other DNA
attcagctgacccggtattt

SEQ ID NO: 17472 - DNA, 20 bp, synthetic construct
  misc_feature 1..20: note = chemically synthesized
  source 1..20: mol_type = other DNA
ggtatttaagaaaacaaaac

SEQ ID NO: 17473 - DNA, 20 bp, synthetic construct
  misc_feature 1..20: note = chemically synthesized
  source 1..20: mol_type = other DNA
ctaacttatgcatgctgctt

SEQ ID NO: 17474 - DNA, 20 bp, synthetic construct
  misc_feature 1..20: note = chemically synthesized
  source 1..20: mol_type = other DNA
gcatgctgcttcagtcgcgt

SEQ ID NO: 17475 - DNA, 20 bp, synthetic construct
  misc_feature 1..20: note = chemically synthesized
  source 1..20: mol_type = other DNA
tgcttcagtcgcgttggctg

SEQ ID NO: 17476 - DNA, 20 bp, synthetic construct
  misc_feature 1..20: note = chemically synthesized
  source 1..20: mol_type = other DNA
tcagtcgcgttggctgtgga

SEQ ID NO: 17477 - DNA, 20 bp, synthetic construct
  misc_feature 1..20: note = chemically synthesized
  source 1..20: mol_type = other DNA
cagtcgcgttggctgtggat

SEQ ID NO: 17478 - DNA, 20 bp, synthetic construct
  misc_feature 1..20: note = chemically synthesized
  source 1..20: mol_type = other DNA
tcgcgttggctgtggatagg

SEQ ID NO: 17479 - DNA, 20 bp, synthetic construct
  misc_feature 1..20: note = chemically synthesized
  source 1..20: mol_type = other DNA
cgcgttggctgtggatagga

SEQ ID NO: 17480 - DNA, 20 bp, synthetic construct
  misc_feature 1..20: note = chemically synthesized
  source 1..20: mol_type = other DNA
aggaaggtctttgtgacata

SEQ ID NO: 17481 - DNA, 20 bp, synthetic construct
  misc_feature 1..20: note = chemically synthesized
  source 1..20: mol_type = other DNA
aaggtctttgtgacatatgg

SEQ ID NO: 17482 - DNA, 20 bp, synthetic construct
  misc_feature 1..20: note = chemically synthesized
  source 1..20: mol_type = other DNA
tctttgtgacatatggaagc

SEQ ID NO: 17483 - DNA, 20 bp, synthetic construct
  misc_feature 1..20: note = chemically synthesized
  source 1..20: mol_type = other DNA
ctctctcccccaaactttac

SEQ ID NO: 17484 - DNA, 20 bp, synthetic construct
  misc_feature 1..20: note = chemically synthesized
  source 1..20: mol_type = other DNA
ctcccccaaactttacaaga

SEQ ID NO: 17485 - DNA, 20 bp, synthetic construct
  misc_feature 1..20: note = chemically synthesized
  source 1..20: mol_type = other DNA
tcccccaaactttacaagaa

SEQ ID NO: 17486 - DNA, 20 bp, synthetic construct
  misc_feature 1..20: note = chemically synthesized
  source 1..20: mol_type = other DNA
cccccaaactttacaagaaa

SEQ ID NO: 17487 - DNA, 20 bp, synthetic construct
  misc_feature 1..20: note = chemically synthesized
  source 1..20: mol_type = other DNA
tacaagaaagggatcctaac

SEQ ID NO: 17488 - DNA, 20 bp, synthetic construct
  misc_feature 1..20: note = chemically synthesized
  source 1..20: mol_type = other DNA
acaagaaagggatcctaaca

SEQ ID NO: 17489 - DNA, 20 bp, synthetic construct
  misc_feature 1..20: note = chemically synthesized
  source 1..20: mol_type = other DNA
agggatcctaacaaggtaaa

SEQ ID NO: 17490 - DNA, 20 bp, synthetic construct
  misc_feature 1..20: note = chemically synthesized
  source 1..20: mol_type = other DNA
aaggtaaaaagtaaacaatt

SEQ ID NO: 17491 - DNA, 20 bp, synthetic construct
  misc_feature 1..20: note = chemically synthesized
  source 1..20: mol_type = other DNA
gtaaacaatttagtcatcac

SEQ ID NO: 17492 - DNA, 20 bp, synthetic construct
  misc_feature 1..20: note = chemically synthesized
  source 1..20: mol_type = other DNA
tcatcacaagccttattatt

SEQ ID NO: 17493 - DNA, 20 bp, synthetic construct
  misc_feature 1..20: note = chemically synthesized
  source 1..20: mol_type = other DNA
gccttattattcagtctatc

SEQ ID NO: 17494 - DNA, 20 bp, synthetic construct
  misc_feature 1..20: note = chemically synthesized
  source 1..20: mol_type = other DNA
ccttattattcagtctatcc

SEQ ID NO: 17495 - DNA, 20 bp, synthetic construct
  misc_feature 1..20: note = chemically synthesized
  source 1..20: mol_type = other DNA
ttattattcagtctatccag

SEQ ID NO: 17496 - DNA, 20 bp, synthetic construct
  misc_feature 1..20: note = chemically synthesized
  source 1..20: mol_type = other DNA
atccaggagttttgccatgt

SEQ ID NO: 17497 - DNA, 20 bp, synthetic construct
  misc_feature 1..20: note = chemically synthesized
  source 1..20: mol_type = other DNA
atgtcggtttatttaacttc

SEQ ID NO: 17498 - DNA, 20 bp, synthetic construct
  misc_feature 1..20: note = chemically synthesized
  source 1..20: mol_type = other DNA
tgtcggtttatttaacttcc

SEQ ID NO: 17499 - DNA, 20 bp, synthetic construct
  misc_feature 1..20: note = chemically synthesized
  source 1..20: mol_type = other DNA
caggaatgtaaacactgaca

SEQ ID NO: 17500 - DNA, 20 bp, synthetic construct
  misc_feature 1..20: note = chemically synthesized
  source 1..20: mol_type = other DNA
tgtaaacactgacacagccc

SEQ ID NO: 17501 - DNA, 20 bp, synthetic construct
  misc_feature 1..20: note = chemically synthesized
  source 1..20: mol_type = other DNA
aaacactgacacagccctag

SEQ ID NO: 17502 - DNA, 20 bp, synthetic construct
  misc_feature 1..20: note = chemically synthesized
  source 1..20: mol_type = other DNA
cactgacacagccctagaag

SEQ ID NO: 17503 - DNA, 20 bp, synthetic construct
  misc_feature 1..20: note = chemically synthesized
  source 1..20: mol_type = other DNA
gacacagccctagaagcagc

SEQ ID NO: 17504 - DNA, 20 bp, synthetic construct
  misc_feature 1..20: note = chemically synthesized
  source 1..20: mol_type = other DNA
cagccctagaagcagcaaga

SEQ ID NO: 17505 - DNA, 20 bp, synthetic construct
  misc_feature 1..20: note = chemically synthesized
  source 1..20: mol_type = other DNA
agaagcagcaagaaagatta

SEQ ID NO: 17506 - DNA, 20 bp, synthetic construct
  misc_feature 1..20: note = chemically synthesized
  source 1..20: mol_type = other DNA
agcaagaaagattacagtat

SEQ ID NO: 17507 - DNA, 20 bp, synthetic construct
  misc_feature 1..20: note = chemically synthesized
  source 1..20: mol_type = other DNA
caagaaagattacagtatta

SEQ ID NO: 17508 - DNA, 20 bp, synthetic construct
  misc_feature 1..20: note = chemically synthesized
  source 1..20: mol_type = other DNA
agtattagagttaaaaacgt

SEQ ID NO: 17509 - DNA, 20 bp, synthetic construct
  misc_feature 1..20: note = chemically synthesized
  source 1..20: mol_type = other DNA
tagagttaaaaacgtgagca

SEQ ID NO: 17510 - DNA, 20 bp, synthetic construct
  misc_feature 1..20: note = chemically synthesized
  source 1..20: mol_type = other DNA
gagttaaaaacgtgagcatg

SEQ ID NO: 17511 - DNA, 20 bp, synthetic construct
  misc_feature 1..20: note = chemically synthesized
  source 1..20: mol_type = other DNA
agttaaaaacgtgagcatgg

SEQ ID NO: 17512 - DNA, 20 bp, synthetic construct
  misc_feature 1..20: note = chemically synthesized
  source 1..20: mol_type = other DNA
ttaaaaacgtgagcatggag

SEQ ID NO: 17513 - DNA, 20 bp, synthetic construct
  misc_feature 1..20: note = chemically synthesized
  source 1..20: mol_type = other DNA
cactttacattgaaacataa

SEQ ID NO: 17514 - DNA, 20 bp, synthetic construct
  misc_feature 1..20: note = chemically synthesized
  source 1..20: mol_type = other DNA
ttacattgaaacataatggt

SEQ ID NO: 17515 - DNA, 20 bp, synthetic construct
  misc_feature 1..20: note = chemically synthesized
  source 1..20: mol_type = other DNA
gaaacataatggtaagtcaa

SEQ ID NO: 17516 - DNA, 20 bp, synthetic construct
  misc_feature 1..20: note = chemically synthesized
  source 1..20: mol_type = other DNA
aatggtaagtcaaaagtgac

SEQ ID NO: 17517 - DNA, 20 bp, synthetic construct
  misc_feature 1..20: note = chemically synthesized
  source 1..20: mol_type = other DNA
actggaaacttctgcttata

SEQ ID NO: 17518 - DNA, 20 bp, synthetic construct
  misc_feature 1..20: note = chemically synthesized
  source 1..20: mol_type = other DNA
tggaaacttctgcttatatg

SEQ ID NO: 17519 - DNA, 20 bp, synthetic construct
  misc_feature 1..20: note = chemically synthesized
  source 1..20: mol_type = other DNA
gagtacaaatttcattctaa

SEQ ID NO: 17520 - DNA, 20 bp, synthetic construct
  misc_feature 1..20: note = chemically synthesized
  source 1..20: mol_type = other DNA
caaatttcattctaatagat

SEQ ID NO: 17521 - DNA, 20 bp, synthetic construct
  misc_feature 1..20: note = chemically synthesized
  source 1..20: mol_type = other DNA
tctaatagattggcataatc

SEQ ID NO: 17522 - DNA, 20 bp, synthetic construct
  misc_feature 1..20: note = chemically synthesized
  source 1..20: mol_type = other DNA
ttggcataatctagtgtacc

SEQ ID NO: 17523 - DNA, 20 bp, synthetic construct
  misc_feature 1..20: note = chemically synthesized
  source 1..20: mol_type = other DNA
tggcataatctagtgtaccc

SEQ ID NO: 17524 - DNA, 20 bp, synthetic construct
  misc_feature 1..20: note = chemically synthesized
  source 1..20: mol_type = other DNA
ggcataatctagtgtaccca

SEQ ID NO: 17525 - DNA, 20 bp, synthetic construct
  misc_feature 1..20: note = chemically synthesized
  source 1..20: mol_type = other DNA
ataatctagtgtacccaggg

SEQ ID NO: 17526 - DNA, 20 bp, synthetic construct
  misc_feature 1..20: note = chemically synthesized
  source 1..20: mol_type = other DNA
cagggtagattgttatataa

SEQ ID NO: 17527 - DNA, 20 bp, synthetic construct
  misc_feature 1..20: note = chemically synthesized
  source 1..20: mol_type = other DNA
gggtagattgttatataatg

SEQ ID NO: 17528 - DNA, 20 bp, synthetic construct
  misc_feature 1..20: note = chemically synthesized
  source 1..20: mol_type = other DNA
ggagaaactgtataaatgtc

SEQ ID NO: 17529 - DNA, 20 bp, synthetic construct
  misc_feature 1..20: note = chemically synthesized
  source 1..20: mol_type = other DNA
caagtacacaaataattcta

SEQ ID NO: 17530 - DNA, 20 bp, synthetic construct
  misc_feature 1..20: note = chemically synthesized
  source 1..20: mol_type = other DNA
aagtacacaaataattctac

SEQ ID NO: 17531 - DNA, 20 bp, synthetic construct
  misc_feature 1..20: note = chemically synthesized
  source 1..20: mol_type = other DNA
tacacaaataattctacagg

SEQ ID NO: 17532 - DNA, 20 bp, synthetic construct
  misc_feature 1..20: note = chemically synthesized
  source 1..20: mol_type = other DNA
ttctacaggaagtaaataaa

SEQ ID NO: 17533 - DNA, 20 bp, synthetic construct
  misc_feature 1..20: note = chemically synthesized
  source 1..20: mol_type = other DNA
aggaagtaaataaaaagtat

SEQ ID NO: 17534 - DNA, 20 bp, synthetic construct
  misc_feature 1..20: note = chemically synthesized
  source 1..20: mol_type = other DNA
aaaaagtattagaatttctt

SEQ ID NO: 17535 - DNA, 20 bp, synthetic construct
  misc_feature 1..20: note = chemically synthesized
  source 1..20: mol_type = other DNA
cttaagtcaccattaaattt

SEQ ID NO: 17536 - DNA, 20 bp, synthetic construct
  misc_feature 1..20: note = chemically synthesized
  source 1..20: mol_type = other DNA
aagtcaccattaaattttgg

SEQ ID NO: 17537 - DNA, 20 bp, synthetic construct
  misc_feature 1..20: note = chemically synthesized
  source 1..20: mol_type = other DNA
tcaccattaaattttggtgg

SEQ ID NO: 17538 - DNA, 20 bp, synthetic construct
  misc_feature 1..20: note = chemically synthesized
  source 1..20: mol_type = other DNA
caccattaaattttggtggt

SEQ ID NO: 17539 - DNA, 20 bp, synthetic construct
  misc_feature 1..20: note = chemically synthesized
  source 1..20: mol_type = other DNA
tggtggtgggacaatctcat

SEQ ID NO: 17540 - DNA, 20 bp, synthetic construct
  misc_feature 1..20: note = chemically synthesized
  source 1..20: mol_type = other DNA
ttagctccttcaaaatcatg

SEQ ID NO: 17541 - DNA, 20 bp, synthetic construct
  misc_feature 1..20: note = chemically synthesized
  source 1..20: mol_type = other DNA
aaaatcatgtggctttgcat

SEQ ID NO: 17542 - DNA, 20 bp, synthetic construct
  misc_feature 1..20: note = chemically synthesized
  source 1..20: mol_type = other DNA
gtcttttgaaaatgtatttt

SEQ ID NO: 17543 - DNA, 20 bp, synthetic construct
  misc_feature 1..20: note = chemically synthesized
  source 1..20: mol_type = other DNA
tcttttgaaaatgtattttc

SEQ ID NO: 17544 - DNA, 20 bp, synthetic construct
  misc_feature 1..20: note = chemically synthesized
  source 1..20: mol_type = other DNA
cttttgaaaatgtattttca

SEQ ID NO: 17545 - DNA, 20 bp, synthetic construct
  misc_feature 1..20: note = chemically synthesized
  source 1..20: mol_type = other DNA
atgtattttcagggaattta

SEQ ID NO: 17546 - DNA, 20 bp, synthetic construct
  misc_feature 1..20: note = chemically synthesized
  source 1..20: mol_type = other DNA
attttcagggaatttacaga

SEQ ID NO: 17547 - DNA, 20 bp, synthetic construct
  misc_feature 1..20: note = chemically synthesized
  source 1..20: mol_type = other DNA
aacattgttttaatccaaac

SEQ ID NO: 17548 - DNA, 20 bp, synthetic construct
  misc_feature 1..20: note = chemically synthesized
  source 1..20: mol_type = other DNA
aaaaattgtactgtttttcg

SEQ ID NO: 17549 - DNA, 20 bp, synthetic construct
  misc_feature 1..20: note = chemically synthesized
  source 1..20: mol_type = other DNA
actgtttttcgaagtactta

SEQ ID NO: 17550 - DNA, 20 bp, synthetic construct
  misc_feature 1..20: note = chemically synthesized
  source 1..20: mol_type = other DNA
ctgtttttcgaagtacttaa

SEQ ID NO: 17551 - DNA, 20 bp, synthetic construct
  misc_feature 1..20: note = chemically synthesized
  source 1..20: mol_type = other DNA
tgtttttcgaagtacttaaa

SEQ ID NO: 17552 - DNA, 20 bp, synthetic construct
  misc_feature 1..20: note = chemically synthesized
  source 1..20: mol_type = other DNA
tttttcgaagtacttaaagg

SEQ ID NO: 17553 - DNA, 20 bp, synthetic construct
  misc_feature 1..20: note = chemically synthesized
  source 1..20: mol_type = other DNA
ttcgaagtacttaaagggag

SEQ ID NO: 17554 - DNA, 20 bp, synthetic construct
  misc_feature 1..20: note = chemically synthesized
  source 1..20: mol_type = other DNA
cgaagtacttaaagggagtg

SEQ ID NO: 17555 - DNA, 20 bp, synthetic construct
  misc_feature 1..20: note = chemically synthesized
  source 1..20: mol_type = other DNA
gaagtacttaaagggagtgg

SEQ ID NO: 17556 - DNA, 20 bp, synthetic construct
  misc_feature 1..20: note = chemically synthesized
  source 1..20: mol_type = other DNA
aagtacttaaagggagtgga

SEQ ID NO: 17557 - DNA, 20 bp, synthetic construct
  misc_feature 1..20: note = chemically synthesized
  source 1..20: mol_type = other DNA
agtacttaaagggagtggag

SEQ ID NO: 17558 - DNA, 20 bp, synthetic construct
  misc_feature 1..20: note = chemically synthesized
  source 1..20: mol_type = other DNA
acttaaagggagtggagggg

SEQ ID NO: 17559 - DNA, 20 bp, synthetic construct
  misc_feature 1..20: note = chemically synthesized
  source 1..20: mol_type = other DNA
aaagggagtggaggggtaga

SEQ ID NO: 17560 - DNA, 20 bp, synthetic construct
  misc_feature 1..20: note = chemically synthesized
  source 1..20: mol_type = other DNA
tggaggggtagaaagcatat

SEQ ID NO: 17561 - DNA, 20 bp, synthetic construct
  misc_feature 1..20: note = chemically synthesized
  source 1..20: mol_type = other DNA
taagtgaatccatctcactg

SEQ ID NO: 17562 - DNA, 20 bp, synthetic construct
  misc_feature 1..20: note = chemically synthesized
  source 1..20: mol_type = other DNA
actgtggcaaactgtttttc

SEQ ID NO: 17563 - DNA, 20 bp, synthetic construct
  misc_feature 1..20: note = chemically synthesized
  source 1..20: mol_type = other DNA
ggcaaactgtttttcaagta

SEQ ID NO: 17564 - DNA, 20 bp, synthetic construct
  misc_feature 1..20: note = chemically synthesized
  source 1..20: mol_type = other DNA
cacatgatctgaaatttgat

SEQ ID NO: 17565 - DNA, 20 bp, synthetic construct
  misc_feature 1..20: note = chemically synthesized
  source 1..20: mol_type = other DNA
agcaaacatatccttatgcc

SEQ ID NO: 17566 - DNA, 20 bp, synthetic construct
  misc_feature 1..20: note = chemically synthesized
  source 1..20: mol_type = other DNA
gcaaacatatccttatgcca

SEQ ID NO: 17567 - DNA, 20 bp, synthetic construct
  misc_feature 1..20: note = chemically synthesized
  source 1..20: mol_type = other DNA
tttttcgccattcacatacc

SEQ ID NO: 17568 - DNA, 20 bp, synthetic construct
  misc_feature 1..20: note = chemically synthesized
  source 1..20: mol_type = other DNA
ttttcgccattcacatacca

SEQ ID NO: 17569 - DNA, 20 bp, synthetic construct
  misc_feature 1..20: note = chemically synthesized
  source 1..20: mol_type = other DNA
cataccaaggttctgtaaat

SEQ ID NO: 17570 - DNA, 20 bp, synthetic construct
  misc_feature 1..20: note = chemically synthesized
  source 1..20: mol_type = other DNA
ggttctgtaaatcagtaaac

SEQ ID NO: 17571 - DNA, 20 bp, synthetic construct
  misc_feature 1..20: note = chemically synthesized
  source 1..20: mol_type = other DNA
gttctgtaaatcagtaaacc

SEQ ID NO: 17572 - DNA, 20 bp, synthetic construct
  misc_feature 1..20: note = chemically synthesized
  source 1..20: mol_type = other DNA
ctgtaaatcagtaaaccagg

SEQ ID NO: 17573 - DNA, 20 bp, synthetic construct
  misc_feature 1..20: note = chemically synthesized
  source 1..20: mol_type = other DNA
gtaaatcagtaaaccaggca

SEQ ID NO: 17574 - DNA, 20 bp, synthetic construct
  misc_feature 1..20: note = chemically synthesized
  source 1..20: mol_type = other DNA
aaatcagtaaaccaggcaga

SEQ ID NO: 17575 - DNA, 20 bp, synthetic construct
  misc_feature 1..20: note = chemically synthesized
  source 1..20: mol_type = other DNA
aggcagagagtaactattgt

SEQ ID NO: 17576 - DNA, 20 bp, synthetic construct
  misc_feature 1..20: note = chemically synthesized
  source 1..20: mol_type = other DNA
ggcagagagtaactattgta

SEQ ID NO: 17577 - DNA, 20 bp, synthetic construct
  misc_feature 1..20: note = chemically synthesized
  source 1..20: mol_type = other DNA
gcagagagtaactattgtaa

SEQ ID NO: 17578 - DNA, 20 bp, synthetic construct
  misc_feature 1..20: note = chemically synthesized
  source 1..20: mol_type = other DNA
cagagagtaactattgtaag

SEQ ID NO: 17579 - DNA, 20 bp, synthetic construct
  misc_feature 1..20: note = chemically synthesized
  source 1..20: mol_type = other DNA
agagagtaactattgtaagg

SEQ ID NO: 17580 - DNA, 20 bp, synthetic construct
  misc_feature 1..20: note = chemically synthesized
  source 1..20: mol_type = other DNA
ggaaaccaaatcataatacc

SEQ ID NO: 17581 - DNA, 20 bp, synthetic construct
  misc_feature 1..20: note = chemically synthesized
  source 1..20: mol_type = other DNA
aaaccaaatcataataccca

SEQ ID NO: 17582 - DNA, 20 bp, synthetic construct
  misc_feature 1..20: note = chemically synthesized
  source 1..20: mol_type = other DNA
ccaaatcataatacccagag

SEQ ID NO: 17583 - DNA, 20 bp, synthetic construct
  misc_feature 1..20: note = chemically synthesized
  source 1..20: mol_type = other DNA
tcataatacccagagtggcc

SEQ ID NO: 17584 - DNA, 20 bp, synthetic construct
  misc_feature 1..20: note = chemically synthesized
  source 1..20: mol_type = other DNA
taatacccagagtggcccag

SEQ ID NO: 17585 - DNA, 20 bp, synthetic construct
  misc_feature 1..20: note = chemically synthesized
  source 1..20: mol_type = other DNA
gcccagaagctgtctttctg

SEQ ID NO: 17586 - DNA, 20 bp, synthetic construct
  misc_feature 1..20: note = chemically synthesized
  source 1..20: mol_type = other DNA
aacgccaccaccaccaaaaa

SEQ ID NO: 17587 - DNA, 20 bp, synthetic construct
  misc_feature 1..20: note = chemically synthesized
  source 1..20: mol_type = other DNA
aaacaaaaaaacaaaaaaca

SEQ ID NO: 17588 - DNA, 20 bp, synthetic construct
  misc_feature 1..20: note = chemically synthesized
  source 1..20: mol_type = other DNA
acaaaacctttttaaaaaac

SEQ ID NO: 17589 - DNA, 20 bp, synthetic construct
  misc_feature 1..20: note = chemically synthesized
  source 1..20: mol_type = other DNA
ttttaaaaaactggaaatga

SEQ ID NO: 17590 - DNA, 20 bp, synthetic construct
  misc_feature 1..20: note = chemically synthesized
  source 1..20: mol_type = other DNA
aaaaactggaaatgacagaa

SEQ ID NO: 17591 - DNA, 20 bp, synthetic construct
  misc_feature 1..20: note = chemically synthesized
  source 1..20: mol_type = other DNA
aaatgacagaatagttttaa

SEQ ID NO: 17592 - DNA, 20 bp, synthetic construct
  misc_feature 1..20: note = chemically synthesized
  source 1..20: mol_type = other DNA
aatgacagaatagttttaaa

SEQ ID NO: 17593 - DNA, 20 bp, synthetic construct
  misc_feature 1..20: note = chemically synthesized
  source 1..20: mol_type = other DNA
aaaaaaacccaaaaaccaaa

SEQ ID NO: 17594 - DNA, 20 bp, synthetic construct
  misc_feature 1..20: note = chemically synthesized
  source 1..20: mol_type = other DNA
tcaaaacttcaaactattaa

SEQ ID NO: 17595 - DNA, 20 bp, synthetic construct
  misc_feature 1..20: note = chemically synthesized
  source 1..20: mol_type = other DNA
tcaaactattaatagaccac

SEQ ID NO: 17596 - DNA, 20 bp, synthetic construct
  misc_feature 1..20: note = chemically synthesized
  source 1..20: mol_type = other DNA
actattaatagaccaccagt

SEQ ID NO: 17597 - DNA, 20 bp, synthetic construct
  misc_feature 1..20: note = chemically synthesized
  source 1..20: mol_type = other DNA
ttaatagaccaccagtgaga

SEQ ID NO: 17598 - DNA, 20 bp, synthetic construct
  misc_feature 1..20: note = chemically synthesized
  source 1..20: mol_type = other DNA
tgtgccttgaaatgcaaaat

SEQ ID NO: 17599 - DNA, 20 bp, synthetic construct
  misc_feature 1..20: note = chemically synthesized
  source 1..20: mol_type = other DNA
gtgccttgaaatgcaaaatg

SEQ ID NO: 17600 - DNA, 20 bp, synthetic construct
  misc_feature 1..20: note = chemically synthesized
  source 1..20: mol_type = other DNA
tgccttgaaatgcaaaatga

SEQ ID NO: 17601 - DNA, 20 bp, synthetic construct
  misc_feature 1..20: note = chemically synthesized
  source 1..20: mol_type = other DNA
tgcaaaatgagggaaataat

SEQ ID NO: 17602 - DNA, 20 bp, synthetic construct
  misc_feature 1..20: note = chemically synthesized
  source 1..20: mol_type = other DNA
aaaatgagggaaataattag

SEQ ID NO: 17603 - DNA, 20 bp, synthetic construct
  misc_feature 1..20: note = chemically synthesized
  source 1..20: mol_type = other DNA
aatgagggaaataattagca

SEQ ID NO: 17604 - DNA, 20 bp, synthetic construct
  misc_feature 1..20: note = chemically synthesized
  source 1..20: mol_type = other DNA
atgagggaaataattagcag

SEQ ID NO: 17605 - DNA, 20 bp, synthetic construct
  misc_feature 1..20: note = chemically synthesized
  source 1..20: mol_type = other DNA
aacaaaattctcaaaatttg

SEQ ID NO: 17606 - DNA, 20 bp, synthetic construct
  misc_feature 1..20: note = chemically synthesized
  source 1..20: mol_type = other DNA
tgaagaacttctgtgattac

SEQ ID NO: 17607 - DNA, 20 bp, synthetic construct
  misc_feature 1..20: note = chemically synthesized
  source 1..20: mol_type = other DNA
gaagaacttctgtgattact

SEQ ID NO: 17608 - DNA, 20 bp, synthetic construct
  misc_feature 1..20: note = chemically synthesized
  source 1..20: mol_type = other DNA
aagaacttctgtgattactg

SEQ ID NO: 17609 - DNA, 20 bp, synthetic construct
  misc_feature 1..20: note = chemically synthesized
  source 1..20: mol_type = other DNA
agaacttctgtgattactgg

SEQ ID NO: 17610 - DNA, 20 bp, synthetic construct
  misc_feature 1..20: note = chemically synthesized
  source 1..20: mol_type = other DNA
ttctgtgattactgggggta

SEQ ID NO: 17611 - DNA, 20 bp, synthetic construct
  misc_feature 1..20: note = chemically synthesized
  source 1..20: mol_type = other DNA
attactgggggtacagtgaa

SEQ ID NO: 17612 - DNA, 20 bp, synthetic construct
  misc_feature 1..20: note = chemically synthesized
  source 1..20: mol_type = other DNA
aatttcttcctgatcttaat

SEQ ID NO: 17613 - DNA, 20 bp, synthetic construct
  misc_feature 1..20: note = chemically synthesized
  source 1..20: mol_type = other DNA
cttaattagattcgattgtg

SEQ ID NO: 17614 - DNA, 20 bp, synthetic construct
  misc_feature 1..20: note = chemically synthesized
  source 1..20: mol_type = other DNA
aattagattcgattgtgcgg

SEQ ID NO: 17615 - DNA, 20 bp, synthetic construct
  misc_feature 1..20: note = chemically synthesized
  source 1..20: mol_type = other DNA
attagattcgattgtgcggt

SEQ ID NO: 17616 - DNA, 20 bp, synthetic construct
  misc_feature 1..20: note = chemically synthesized
  source 1..20: mol_type = other DNA
cgattgtgcggtgggtgtgt

SEQ ID NO: 17617 - DNA, 20 bp, synthetic construct
  misc_feature 1..20: note = chemically synthesized
  source 1..20: mol_type = other DNA
tgcggtgggtgtgttggatt

SEQ ID NO: 17618 - DNA, 20 bp, synthetic construct
  misc_feature 1..20: note = chemically synthesized
  source 1..20: mol_type = other DNA
gcggtgggtgtgttggattt

SEQ ID NO: 17619 - DNA, 20 bp, synthetic construct
  misc_feature 1..20: note = chemically synthesized
  source 1..20: mol_type = other DNA
cggtgggtgtgttggatttg

SEQ ID NO: 17620 - DNA, 20 bp, synthetic construct
  misc_feature 1..20: note = chemically synthesized
  source 1..20: mol_type = other DNA
ggtgggtgtgttggatttgg

SEQ ID NO: 17621 - DNA, 20 bp, synthetic construct
  misc_feature 1..20: note = chemically synthesized
  source 1..20: mol_type = other DNA
gtgggtgtgttggatttggg

SEQ ID NO: 17622 - DNA, 20 bp, synthetic construct
  misc_feature 1..20: note = chemically synthesized
  source 1..20: mol_type = other DNA
gggtgtgttggatttggggg

SEQ ID NO: 17623 - DNA, 20 bp, synthetic construct
  misc_feature 1..20: note = chemically synthesized
  source 1..20: mol_type = other DNA
ggtgtgttggatttgggggg

SEQ ID NO: 17624 - DNA, 20 bp, synthetic construct
  misc_feature 1..20: note = chemically synthesized
  source 1..20: mol_type = other DNA
gtgtgttggatttgggggga

SEQ ID NO: 17625 - DNA, 20 bp, synthetic construct
  misc_feature 1..20: note = chemically synthesized
  source 1..20: mol_type = other DNA
tgtgttggatttggggggag

SEQ ID NO: 17626 - DNA, 20 bp, synthetic construct
  misc_feature 1..20: note = chemically synthesized
  source 1..20: mol_type = other DNA
gttggatttggggggagggg

SEQ ID NO: 17627 - DNA, 20 bp, synthetic construct
  misc_feature 1..20: note = chemically synthesized
  source 1..20: mol_type = other DNA
tggatttggggggaggggca

SEQ ID NO: 17628 - DNA, 20 bp, synthetic construct
  misc_feature 1..20: note = chemically synthesized
  source 1..20: mol_type = other DNA
ggatttggggggaggggcag

SEQ ID NO: 17629 - DNA, 20 bp, synthetic construct
  misc_feature 1..20: note = chemically synthesized
  source 1..20: mol_type = other DNA
tttggggggaggggcagagg

SEQ ID NO: 17630 - DNA, 20 bp, synthetic construct
  misc_feature 1..20: note = chemically synthesized
  source 1..20: mol_type = other DNA
ttggggggaggggcagaggc

SEQ ID NO: 17631 - DNA, 20 bp, synthetic construct
  misc_feature 1..20: note = chemically synthesized
  source 1..20: mol_type = other DNA
tggggggaggggcagaggca

SEQ ID NO: 17632 - DNA, 20 bp, synthetic construct
  misc_feature 1..20: note = chemically synthesized
  source 1..20: mol_type = other DNA
gggggaggggcagaggcagg

SEQ ID NO: 17633 - DNA, 20 bp, synthetic construct
  misc_feature 1..20: note = chemically synthesized
  source 1..20: mol_type = other DNA
ggggcagaggcagggagtgc

SEQ ID NO: 17634 - DNA, 20 bp, synthetic construct
  misc_feature 1..20: note = chemically synthesized
  source 1..20: mol_type = other DNA
gggcagaggcagggagtgct

SEQ ID NO: 17635 - DNA, 20 bp, synthetic construct
  misc_feature 1..20: note = chemically synthesized
  source 1..20: mol_type = other DNA
ggcagaggcagggagtgctg

SEQ ID NO: 17636 - DNA, 20 bp, synthetic construct
  misc_feature 1..20: note = chemically synthesized
  source 1..20: mol_type = other DNA
gaggcagggagtgctggggt

SEQ ID NO: 17637 - DNA, 20 bp, synthetic construct
  misc_feature 1..20: note = chemically synthesized
  source 1..20: mol_type = other DNA
aggcagggagtgctggggtg

SEQ ID NO: 17638 - DNA, 20 bp, synthetic construct
  misc_feature 1..20: note = chemically synthesized
  source 1..20: mol_type = other DNA
ggagtgctggggtgaggcgt

SEQ ID NO: 17639 - DNA, 20 bp, synthetic construct
  misc_feature 1..20: note = chemically synthesized
  source 1..20: mol_type = other DNA
gagtgctggggtgaggcgtg

SEQ ID NO: 17640 - DNA, 20 bp, synthetic construct
  misc_feature 1..20: note = chemically synthesized
  source 1..20: mol_type = other DNA
ctggggtgaggcgtgaggct

SEQ ID NO: 17641 - DNA, 20 bp, synthetic construct
  misc_feature 1..20: note = chemically synthesized
  source 1..20: mol_type = other DNA
aggcgtgaggctgagtgttg

SEQ ID NO: 17642 - DNA, 20 bp, synthetic construct
  misc_feature 1..20: note = chemically synthesized
  source 1..20: mol_type = other DNA
gcgtgaggctgagtgttgtg

SEQ ID NO: 17643 - DNA, 20 bp, synthetic construct
  misc_feature 1..20: note = chemically synthesized
  source 1..20: mol_type = other DNA
gaggctgagtgttgtggaga

SEQ ID NO: 17644 - DNA, 20 bp, synthetic construct
  misc_feature 1..20: note = chemically synthesized
  source 1..20: mol_type = other DNA
aggctgagtgttgtggagac

SEQ ID NO: 17645 - DNA, 20 bp, synthetic construct
  misc_feature 1..20: note = chemically synthesized
  source 1..20: mol_type = other DNA
tgagtgttgtggagacaggt

SEQ ID NO: 17646 - DNA, 20 bp, synthetic construct
  misc_feature 1..20: note = chemically synthesized
  source 1..20: mol_type = other DNA
gtgttgtggagacaggttag

SEQ ID NO: 17647 - DNA, 20 bp, synthetic construct
  misc_feature 1..20: note = chemically synthesized
  source 1..20: mol_type = other DNA
tgttgtggagacaggttagc

SEQ ID NO: 17648 - DNA, 20 bp, synthetic construct
  misc_feature 1..20: note = chemically synthesized
  source 1..20: mol_type = other DNA
gttgtggagacaggttagca

SEQ ID NO: 17649 - DNA, 20 bp, synthetic construct
  misc_feature 1..20: note = chemically synthesized
  source 1..20: mol_type = other DNA
ttgtggagacaggttagcag

SEQ ID NO: 17650 - DNA, 20 bp, synthetic construct
  misc_feature 1..20: note = chemically synthesized
  source 1..20: mol_type = other DNA
gagacaggttagcaggggcc

SEQ ID NO: 17651 - DNA, 20 bp, synthetic construct
  misc_feature 1..20: note = chemically synthesized
  source 1..20: mol_type = other DNA
acaggttagcaggggcccgg

SEQ ID NO: 17652 - DNA, 20 bp, synthetic construct
  misc_feature 1..20: note = chemically synthesized
  source 1..20: mol_type = other DNA
ttagcaggggcccggcggtg

SEQ ID NO: 17653 - DNA, 20 bp, synthetic construct
  misc_feature 1..20: note = chemically synthesized
  source 1..20: mol_type = other DNA
gcaggggcccggcggtgtgg

SEQ ID NO: 17654 - DNA, 20 bp, synthetic construct
  misc_feature 1..20: note = chemically synthesized
  source 1..20: mol_type = other DNA
caggggcccggcggtgtggc

SEQ ID NO: 17655 - DNA, 20 bp, synthetic construct
  misc_feature 1..20: note = chemically synthesized
  source 1..20: mol_type = other DNA
ccggcggtgtggcaggaaca

SEQ ID NO: 17656 - DNA, 20 bp, synthetic construct
  misc_feature 1..20: note = chemically synthesized
  source 1..20: mol_type = other DNA
cggcggtgtggcaggaacaa

SEQ ID NO: 17657 - DNA, 20 bp, synthetic construct
  misc_feature 1..20: note = chemically synthesized
  source 1..20: mol_type = other DNA
cggtgtggcaggaacaaagg

SEQ ID NO: 17658 - DNA, 20 bp, synthetic construct
  misc_feature 1..20: note = chemically synthesized
  source 1..20: mol_type = other DNA
acaaaggcagcttccaacgc

SEQ ID NO: 17659 - DNA, 20 bp, synthetic construct
  misc_feature 1..20: note = chemically synthesized
  source 1..20: mol_type = other DNA
ggcagcttccaacgctggtg

SEQ ID NO: 17660 - DNA, 20 bp, synthetic construct
  misc_feature 1..20: note = chemically synthesized
  source 1..20: mol_type = other DNA
gcagcttccaacgctggtgc

SEQ ID NO: 17661 - DNA, 20 bp, synthetic construct
  misc_feature 1..20: note = chemically synthesized
  source 1..20: mol_type = other DNA
caacgctggtgcaggattcc

SEQ ID NO: 17662 - DNA, 20 bp, synthetic construct
  misc_feature 1..20: note = chemically synthesized
  source 1..20: mol_type = other DNA
caggattccgagccttaacc

SEQ ID NO: 17663 - DNA, 20 bp, synthetic construct
  misc_feature 1..20: note = chemically synthesized
  source 1..20: mol_type = other DNA
agccttaacccagatgctca

SEQ ID NO: 17664 - DNA, 20 bp, synthetic construct
  misc_feature 1..20: note = chemically synthesized
  source 1..20: mol_type = other DNA
cccagatgctcatggtgccc

SEQ ID NO: 17665 - DNA, 20 bp, synthetic construct
  misc_feature 1..20: note = chemically synthesized
  source 1..20: mol_type = other DNA
gctcatggtgccctagtctt

SEQ ID NO: 17666 - DNA, 20 bp, synthetic construct
  misc_feature 1..20: note = chemically synthesized
  source 1..20: mol_type = other DNA
ctagtcttgagttcttcatt

SEQ ID NO: 17667 - DNA, 20 bp, synthetic construct
  misc_feature 1..20: note = chemically synthesized
  source 1..20: mol_type = other DNA
tagtcttgagttcttcattt

SEQ ID NO: 17668 - DNA, 20 bp, synthetic construct
  misc_feature 1..20: note = chemically synthesized
  source 1..20: mol_type = other DNA
tcttgagttcttcatttagg

SEQ ID NO: 17669 - DNA, 20 bp, synthetic construct
  misc_feature 1..20: note = chemically synthesized
  source 1..20: mol_type = other DNA
cttgagttcttcatttaggt

SEQ ID NO: 17670 - DNA, 20 bp, synthetic construct
  misc_feature 1..20: note = chemically synthesized
  source 1..20: mol_type = other DNA
taggtgggcttatttcccac

SEQ ID NO: 17671 - DNA, 20 bp, synthetic construct
  misc_feature 1..20: note = chemically synthesized
  source 1..20: mol_type = other DNA
aggtgggcttatttcccact

SEQ ID NO: 17672 - DNA, 20 bp, synthetic construct
  misc_feature 1..20: note = chemically synthesized
  source 1..20: mol_type = other DNA
ggcttatttcccactgggtc

SEQ ID NO: 17673 - DNA, 20 bp, synthetic construct
  misc_feature 1..20: note = chemically synthesized
  source 1..20: mol_type = other DNA
gcttatttcccactgggtct

SEQ ID NO: 17674 - DNA, 20 bp, synthetic construct
  misc_feature 1..20: note = chemically synthesized
  source 1..20: mol_type = other DNA
cttatttcccactgggtctg

SEQ ID NO: 17675 - DNA, 20 bp, synthetic construct
  misc_feature 1..20: note = chemically synthesized
  source 1..20: mol_type = other DNA
ttatttcccactgggtctgg

SEQ ID NO: 17676 - DNA, 20 bp, synthetic construct
  misc_feature 1..20: note = chemically synthesized
  source 1..20: mol_type = other DNA
ggggatttcatttgtccttt

SEQ ID NO: 17677 - DNA, 20 bp, synthetic construct
  misc_feature 1..20: note = chemically synthesized
  source 1..20: mol_type = other DNA
gggatttcatttgtcctttg

SEQ ID NO: 17678 - DNA, 20 bp, synthetic construct
  misc_feature 1..20: note = chemically synthesized
  source 1..20: mol_type = other DNA
ggatttcatttgtcctttga

SEQ ID NO: 17679 - DNA, 20 bp, synthetic construct
  misc_feature 1..20: note = chemically synthesized
  source 1..20: mol_type = other DNA
gatttcatttgtcctttgag

SEQ ID NO: 17680 - DNA, 20 bp, synthetic construct
  misc_feature 1..20: note = chemically synthesized
  source 1..20: mol_type = other DNA
ttcatttgtcctttgagggg

SEQ ID NO: 17681 - DNA, 20 bp, synthetic construct
  misc_feature 1..20: note = chemically synthesized
  source 1..20: mol_type = other DNA
tcatttgtcctttgaggggc

SEQ ID NO: 17682 - DNA, 20 bp, synthetic construct
  misc_feature 1..20: note = chemically synthesized
  source 1..20: mol_type = other DNA
catttgtcctttgaggggca

SEQ ID NO: 17683 - DNA, 20 bp, synthetic construct
  misc_feature 1..20: note = chemically synthesized
  source 1..20: mol_type = other DNA
ttgtcctttgaggggcaggg

SEQ ID NO: 17684 - DNA, 20 bp, synthetic construct
  misc_feature 1..20: note = chemically synthesized
  source 1..20: mol_type = other DNA
aggggcagggtggacactga

SEQ ID NO: 17685 - DNA, 20 bp, synthetic construct
  misc_feature 1..20: note = chemically synthesized
  source 1..20: mol_type = other DNA
cagggtggacactgacagaa

SEQ ID NO: 17686 - DNA, 20 bp, synthetic construct
  misc_feature 1..20: note = chemically synthesized
  source 1..20: mol_type = other DNA
ggacactgacagaacagctg

SEQ ID NO: 17687 - DNA, 20 bp, synthetic construct
  misc_feature 1..20: note = chemically synthesized
  source 1..20: mol_type = other DNA
actgacagaacagctgcggc

SEQ ID NO: 17688 - DNA, 20 bp, synthetic construct
  misc_feature 1..20: note = chemically synthesized
  source 1..20: mol_type = other DNA
gacagaacagctgcggccgg

SEQ ID NO: 17689 - DNA, 20 bp, synthetic construct
  misc_feature 1..20: note = chemically synthesized
  source 1..20: mol_type = other DNA
cagaacagctgcggccggca

SEQ ID NO: 17690 - DNA, 20 bp, synthetic construct
  misc_feature 1..20: note = chemically synthesized
  source 1..20: mol_type = other DNA
gaacagctgcggccggcaga

SEQ ID NO: 17691 - DNA, 20 bp, synthetic construct
  misc_feature 1..20: note = chemically synthesized
  source 1..20: mol_type = other DNA
aacagctgcggccggcagag

SEQ ID NO: 17692 - DNA, 20 bp, synthetic construct
  misc_feature 1..20: note = chemically synthesized
  source 1..20: mol_type = other DNA
acagctgcggccggcagaga

SEQ ID NO: 17693 - DNA, 20 bp, synthetic construct
  misc_feature 1..20: note = chemically synthesized
  source 1..20: mol_type = other DNA
gctgcggccggcagagaggg

SEQ ID NO: 17694 - DNA, 20 bp, synthetic construct
  misc_feature 1..20: note = chemically synthesized
  source 1..20: mol_type = other DNA
cggccggcagagagggtggt

SEQ ID NO: 17695 - DNA, 20 bp, synthetic construct
  misc_feature 1..20: note = chemically synthesized
  source 1..20: mol_type = other DNA
ggccggcagagagggtggtt

SEQ ID NO: 17696 - DNA, 20 bp, synthetic construct
  misc_feature 1..20: note = chemically synthesized
  source 1..20: mol_type = other DNA
cggcagagagggtggttagg

SEQ ID NO: 17697 - DNA, 20 bp, synthetic construct
  misc_feature 1..20: note = chemically synthesized
  source 1..20: mol_type = other DNA
gcagagagggtggttaggaa

SEQ ID NO: 17698 - DNA, 20 bp, synthetic construct
  misc_feature 1..20: note = chemically synthesized
  source 1..20: mol_type = other DNA
cagagagggtggttaggaag

SEQ ID NO: 17699 - DNA, 20 bp, synthetic construct
  misc_feature 1..20: note = chemically synthesized
  source 1..20: mol_type = other DNA
agagagggtggttaggaaga

SEQ ID NO: 17700 - DNA, 20 bp, synthetic construct
  misc_feature 1..20: note = chemically synthesized
  source 1..20: mol_type = other DNA
gagggtggttaggaagaggg

SEQ ID NO: 17701 - DNA, 20 bp, synthetic construct
  misc_feature 1..20: note = chemically synthesized
  source 1..20: mol_type = other DNA
ggtggttaggaagagggaag

SEQ ID NO: 17702 - DNA, 20 bp, synthetic construct
  misc_feature 1..20: note = chemically synthesized
  source 1..20: mol_type = other DNA
aggaagagggaagcagcctg

SEQ ID NO: 17703 - DNA, 20 bp, synthetic construct
  misc_feature 1..20: note = chemically synthesized
  source 1..20: mol_type = other DNA
ggaagagggaagcagcctgt

SEQ ID NO: 17704 - DNA, 20 bp, synthetic construct
  misc_feature 1..20: note = chemically synthesized
  source 1..20: mol_type = other DNA
tgggtaacttcccgaccaca

SEQ ID NO: 17705 - DNA, 20 bp, synthetic construct
  misc_feature 1..20: note = chemically synthesized
  source 1..20: mol_type = other DNA
taacttcccgaccacatgga

SEQ ID NO: 17706 - DNA, 20 bp, synthetic construct
  misc_feature 1..20: note = chemically synthesized
  source 1..20: mol_type = other DNA
aacttcccgaccacatggaa

SEQ ID NO: 17707 - DNA, 20 bp, synthetic construct
  misc_feature 1..20: note = chemically synthesized
  source 1..20: mol_type = other DNA
accacatggaaaggctgaat

SEQ ID NO: 17708 - DNA, 20 bp, synthetic construct
  misc_feature 1..20: note = chemically synthesized
  source 1..20: mol_type = other DNA
aaaggctgaataagacgtta

SEQ ID NO: 17709 - DNA, 20 bp, synthetic construct
  misc_feature 1..20: note = chemically synthesized
  source 1..20: mol_type = other DNA
agacgttatggaccctgcct

SEQ ID NO: 17710 - DNA, 20 bp, synthetic construct
  misc_feature 1..20: note = chemically synthesized
  source 1..20: mol_type = other DNA
gacgttatggaccctgcctt

SEQ ID NO: 17711 - DNA, 20 bp, synthetic construct
  misc_feature 1..20: note = chemically synthesized
  source 1..20: mol_type = other DNA
atggaccctgccttgggtac

SEQ ID NO: 17712 - DNA, 20 bp, synthetic construct
  misc_feature 1..20: note = chemically synthesized
  source 1..20: mol_type = other DNA
tggaccctgccttgggtact

SEQ ID NO: 17713 - DNA, 20 bp, synthetic construct
  misc_feature 1..20: note = chemically synthesized
  source 1..20: mol_type = other DNA
ggaccctgccttgggtactg

SEQ ID NO: 17714 - DNA, 20 bp, synthetic construct
  misc_feature 1..20: note = chemically synthesized
  source 1..20: mol_type = other DNA
cctgccttgggtactggggt

SEQ ID NO: 17715 - DNA, 20 bp, synthetic construct
  misc_feature 1..20: note = chemically synthesized
  source 1..20: mol_type = other DNA
gtactggggtcagcgtctcc

SEQ ID NO: 17716 - DNA, 20 bp, synthetic construct
  misc_feature 1..20: note = chemically synthesized
  source 1..20: mol_type = other DNA
ctggggtcagcgtctcctgg

SEQ ID NO: 17717 - DNA, 20 bp, synthetic construct
  misc_feature 1..20: note = chemically synthesized
  source 1..20: mol_type = other DNA
gtctcctggtggtgtctgca

SEQ ID NO: 17718 - DNA, 20 bp, synthetic construct
  misc_feature 1..20: note = chemically synthesized
  source 1..20: mol_type = other DNA
tctcctggtggtgtctgcac

SEQ ID NO: 17719 - DNA, 20 bp, synthetic construct
  misc_feature 1..20: note = chemically synthesized
  source 1..20: mol_type = other DNA
ctcctggtggtgtctgcaca

SEQ ID NO: 17720 - DNA, 20 bp, synthetic construct
  misc_feature 1..20: note = chemically synthesized
  source 1..20: mol_type = other DNA
tgcacagggccccccaatgc

SEQ ID NO: 17721 - DNA, 20 bp, synthetic construct
  misc_feature 1..20: note = chemically synthesized
  source 1..20: mol_type = other DNA
gcacagggccccccaatgcc

SEQ ID NO: 17722 - DNA, 20 bp, synthetic construct
  misc_feature 1..20: note = chemically synthesized
  source 1..20: mol_type = other DNA
cacagggccccccaatgcca

SEQ ID NO: 17723 - DNA, 20 bp, synthetic construct
  misc_feature 1..20: note = chemically synthesized
  source 1..20: mol_type = other DNA
cactgccaaaacacgctctt

SEQ ID NO: 17724 - DNA, 20 bp, synthetic construct
  misc_feature 1..20: note = chemically synthesized
  source 1..20: mol_type = other DNA
aaacacgctcttgagtttaa

SEQ ID NO: 17725 - DNA, 20 bp, synthetic construct
  misc_feature 1..20: note = chemically synthesized
  source 1..20: mol_type = other DNA
cacgctcttgagtttaatgg

SEQ ID NO: 17726 - DNA, 20 bp, synthetic construct
  misc_feature 1..20: note = chemically synthesized
  source 1..20: mol_type = other DNA
gctcttgagtttaatggtag

SEQ ID NO: 17727 - DNA, 20 bp, synthetic construct
  misc_feature 1..20: note = chemically synthesized
  source 1..20: mol_type = other DNA
ttgagtttaatggtagtggt

SEQ ID NO: 17728 - DNA, 20 bp, synthetic construct
  misc_feature 1..20: note = chemically synthesized
  source 1..20: mol_type = other DNA
ttaatggtagtggttggtct

SEQ ID NO: 17729 - DNA, 20 bp, synthetic construct
  misc_feature 1..20: note = chemically synthesized
  source 1..20: mol_type = other DNA
ggttggtctgagtcctgcca

SEQ ID NO: 17730 - DNA, 20 bp, synthetic construct
  misc_feature 1..20: note = chemically synthesized
  source 1..20: mol_type = other DNA
ctgagtcctgccaaagtgta

SEQ ID NO: 17731 - DNA, 20 bp, synthetic construct
  misc_feature 1..20: note = chemically synthesized
  source 1..20: mol_type = other DNA
gagtcctgccaaagtgtatg

SEQ ID NO: 17732 - DNA, 20 bp, synthetic construct
  misc_feature 1..20: note = chemically synthesized
  source 1..20: mol_type = other DNA
cctgccaaagtgtatggagc

SEQ ID NO: 17733 - DNA, 20 bp, synthetic construct
  misc_feature 1..20: note = chemically synthesized
  source 1..20: mol_type = other DNA
gtgtatggagcaagtttcat

SEQ ID NO: 17734 - DNA, 20 bp, synthetic construct
  misc_feature 1..20: note = chemically synthesized
  source 1..20: mol_type = other DNA
atggagcaagtttcattggc

SEQ ID NO: 17735 - DNA, 20 bp, synthetic construct
  misc_feature 1..20: note = chemically synthesized
  source 1..20: mol_type = other DNA
ccccttgcatgaaataataa

SEQ ID NO: 17736 - DNA, 20 bp, synthetic construct
  misc_feature 1..20: note = chemically synthesized
  source 1..20: mol_type = other DNA
gcatgaaataataaaagccc

SEQ ID NO: 17737 - DNA, 20 bp, synthetic construct
  misc_feature 1..20: note = chemically synthesized
  source 1..20: mol_type = other DNA
aaataataaaagccctggcc

SEQ ID NO: 17738 - DNA, 20 bp, synthetic construct
  misc_feature 1..20: note = chemically synthesized
  source 1..20: mol_type = other DNA
aataataaaagccctggcca

SEQ ID NO: 17739 - DNA, 20 bp, synthetic construct
  misc_feature 1..20: note = chemically synthesized
  source 1..20: mol_type = other DNA
tgtattttattaatattttt

SEQ ID NO: 17740 - DNA, 20 bp, synthetic construct
  misc_feature 1..20: note = chemically synthesized
  source 1..20: mol_type = other DNA
tattttattaatattttttg

SEQ ID NO: 17741 - DNA, 20 bp, synthetic construct
  misc_feature 1..20: note = chemically synthesized
  source 1..20: mol_type = other DNA
attttattaatattttttgg

SEQ ID NO: 17742 - DNA, 20 bp, synthetic construct
  misc_feature 1..20: note = chemically synthesized
  source 1..20: mol_type = other DNA
ttttattaatattttttgga

SEQ ID NO: 17743 - DNA, 20 bp, synthetic construct
  misc_feature 1..20: note = chemically synthesized
  source 1..20: mol_type = other DNA
tgctctcatttgaccatttg

SEQ ID NO: 17744 - DNA, 20 bp, synthetic construct
  misc_feature 1..20: note = chemically synthesized
  source 1..20: mol_type = other DNA
ataattaatgcattccgtac

SEQ ID NO: 17745 - DNA, 20 bp, synthetic construct
  misc_feature 1..20: note = chemically synthesized
  source 1..20: mol_type = other DNA
cattccgtactggttgtaaa

SEQ ID NO: 17746 - DNA, 20 bp, synthetic construct
  misc_feature 1..20: note = chemically synthesized
  source 1..20: mol_type = other DNA
gtgtgcttgcatttaattgc

SEQ ID NO: 17747 - DNA, 20 bp, synthetic construct
  misc_feature 1..20: note = chemically synthesized
  source 1..20: mol_type = other DNA
gcttgcatttaattgcaagt

SEQ ID NO: 17748 - DNA, 20 bp, synthetic construct
  misc_feature 1..20: note = chemically synthesized
  source 1..20: mol_type = other DNA
cttgcatttaattgcaagtc

SEQ ID NO: 17749 - DNA, 20 bp, synthetic construct
  misc_feature 1..20: note = chemically synthesized
  source 1..20: mol_type = other DNA
ttgcatttaattgcaagtca

SEQ ID NO: 17750 - DNA, 20 bp, synthetic construct
  misc_feature 1..20: note = chemically synthesized
  source 1..20: mol_type = other DNA
tgcaagtcagggtaaattaa

SEQ ID NO: 17751 - DNA, 20 bp, synthetic construct
  misc_feature 1..20: note = chemically synthesized
  source 1..20: mol_type = other DNA
actcacttaaaatattcttg

SEQ ID NO: 17752 - DNA, 20 bp, synthetic construct
  misc_feature 1..20: note = chemically synthesized
  source 1..20: mol_type = other DNA
aaatattcttgcagaacgca

SEQ ID NO: 17753 - DNA, 20 bp, synthetic construct
  misc_feature 1..20: note = chemically synthesized
  source 1..20: mol_type = other DNA
aatattcttgcagaacgcaa

SEQ ID NO: 17754 - DNA, 20 bp, synthetic construct
  misc_feature 1..20: note = chemically synthesized
  source 1..20: mol_type = other DNA
tattcttgcagaacgcaaag

SEQ ID NO: 17755 - DNA, 20 bp, synthetic construct
  misc_feature 1..20: note = chemically synthesized
  source 1..20: mol_type = other DNA
attcttgcagaacgcaaagg

SEQ ID NO: 17756 - DNA, 20 bp, synthetic construct
  misc_feature 1..20: note = chemically synthesized
  source 1..20: mol_type = other DNA
ttcttgcagaacgcaaagga

SEQ ID NO: 17757 - DNA, 20 bp, synthetic construct
  misc_feature 1..20: note = chemically synthesized
  source 1..20: mol_type = other DNA
tcttgcagaacgcaaaggag

SEQ ID NO: 17758 - DNA, 20 bp, synthetic construct
  misc_feature 1..20: note = chemically synthesized
  source 1..20: mol_type = other DNA
cttgcagaacgcaaaggagg

SEQ ID NO: 17759 - DNA, 20 bp, synthetic construct
  misc_feature 1..20: note = chemically synthesized
  source 1..20: mol_type = other DNA
gcagaacgcaaaggaggggg

SEQ ID NO: 17760 - DNA, 20 bp, synthetic construct
  misc_feature 1..20: note = chemically synthesized
  source 1..20: mol_type = other DNA
cgcaaaggagggggcagtcc

SEQ ID NO: 17761 - DNA, 20 bp, synthetic construct
  misc_feature 1..20: note = chemically synthesized
  source 1..20: mol_type = other DNA
ccagtatttaatttattttc

SEQ ID NO: 17762 - DNA, 20 bp, synthetic construct
  misc_feature 1..20: note = chemically synthesized
  source 1..20: mol_type = other DNA
atttaatttattttctggtt

SEQ ID NO: 17763 - DNA, 20 bp, synthetic construct
  misc_feature 1..20: note = chemically synthesized
  source 1..20: mol_type = other DNA
tttattttctggtttagtgt

SEQ ID NO: 17764 - DNA, 20 bp, synthetic construct
  misc_feature 1..20: note = chemically synthesized
  source 1..20: mol_type = other DNA
ttctggtttagtgttagtgt

SEQ ID NO: 17765 - DNA, 20 bp, synthetic construct
  misc_feature 1..20: note = chemically synthesized
  source 1..20: mol_type = other DNA
ctggtttagtgttagtgtga

SEQ ID NO: 17766 - DNA, 20 bp, synthetic construct
  misc_feature 1..20: note = chemically synthesized
  source 1..20: mol_type = other DNA
tggtttagtgttagtgtgag

SEQ ID NO: 17767 - DNA, 20 bp, synthetic construct
  misc_feature 1..20: note = chemically synthesized
  source 1..20: mol_type = other DNA
ggtttagtgttagtgtgaga

SEQ ID NO: 17768 - DNA, 20 bp, synthetic construct
  misc_feature 1..20: note = chemically synthesized
  source 1..20: mol_type = other DNA
gttagtgtgagagggtcgaa

SEQ ID NO: 17769 - DNA, 20 bp, synthetic construct
  misc_feature 1..20: note = chemically synthesized
  source 1..20: mol_type = other DNA
agagggtcgaaaagattctg

SEQ ID NO: 17770 - DNA, 20 bp, synthetic construct
  misc_feature 1..20: note = chemically synthesized
  source 1..20: mol_type = other DNA
gagggtcgaaaagattctgt

SEQ ID NO: 17771 - DNA, 20 bp, synthetic construct
  misc_feature 1..20: note = chemically synthesized
  source 1..20: mol_type = other DNA
aaaagattctgtgggtccaa

SEQ ID NO: 17772 - DNA, 20 bp, synthetic construct
  misc_feature 1..20: note = chemically synthesized
  source 1..20: mol_type = other DNA
aaagattctgtgggtccaac

SEQ ID NO: 17773 - DNA, 20 bp, synthetic construct
  misc_feature 1..20: note = chemically synthesized
  source 1..20: mol_type = other DNA
gggatttgtgtctgtgtgtg

SEQ ID NO: 17774 - DNA, 20 bp, synthetic construct
  misc_feature 1..20: note = chemically synthesized
  source 1..20: mol_type = other DNA
ggatttgtgtctgtgtgtgc

SEQ ID NO: 17775 - DNA, 20 bp, synthetic construct
  misc_feature 1..20: note = chemically synthesized
  source 1..20: mol_type = other DNA
gtctgtgtgtgcaggaccgt

SEQ ID NO: 17776 - DNA, 20 bp, synthetic construct
  misc_feature 1..20: note = chemically synthesized
  source 1..20: mol_type = other DNA
tctgtgtgtgcaggaccgtc

SEQ ID NO: 17777 - DNA, 20 bp, synthetic construct
  misc_feature 1..20: note = chemically synthesized
  source 1..20: mol_type = other DNA
tgcaggaccgtcgggcaaca

SEQ ID NO: 17778 - DNA, 20 bp, synthetic construct
  misc_feature 1..20: note = chemically synthesized
  source 1..20: mol_type = other DNA
caggaccgtcgggcaacaca

SEQ ID NO: 17779 - DNA, 20 bp, synthetic construct
  misc_feature 1..20: note = chemically synthesized
  source 1..20: mol_type = other DNA
aggaccgtcgggcaacacag

SEQ ID NO: 17780 - DNA, 20 bp, synthetic construct
  misc_feature 1..20: note = chemically synthesized
  source 1..20: mol_type = other DNA
ggaccgtcgggcaacacaga

SEQ ID NO: 17781 - DNA, 20 bp, synthetic construct
  misc_feature 1..20: note = chemically synthesized
  source 1..20: mol_type = other DNA
accgtcgggcaacacagagg

SEQ ID NO: 17782 - DNA, 20 bp, synthetic construct
  misc_feature 1..20: note = chemically synthesized
  source 1..20: mol_type = other DNA
ccgtcgggcaacacagaggg

SEQ ID NO: 17783 - DNA, 20 bp, synthetic construct
  misc_feature 1..20: note = chemically synthesized
  source 1..20: mol_type = other DNA
gtcgggcaacacagagggag

SEQ ID NO: 17784 - DNA, 20 bp, synthetic construct
  misc_feature 1..20: note = chemically synthesized
  source 1..20: mol_type = other DNA
acagagggaggagaaaaacc

SEQ ID NO: 17785 - DNA, 20 bp, synthetic construct
  misc_feature 1..20: note = chemically synthesized
  source 1..20: mol_type = other DNA
gggaggagaaaaacctggac

SEQ ID NO: 17786 - DNA, 20 bp, synthetic construct
  misc_feature 1..20: note = chemically synthesized
  source 1..20: mol_type = other DNA
gaggagaaaaacctggaccg

SEQ ID NO: 17787 - DNA, 20 bp, synthetic construct
  misc_feature 1..20: note = chemically synthesized
  source 1..20: mol_type = other DNA
gagaaaaacctggaccggag

SEQ ID NO: 17788 - DNA, 20 bp, synthetic construct
  misc_feature 1..20: note = chemically synthesized
  source 1..20: mol_type = other DNA
agaaaaacctggaccggagt

SEQ ID NO: 17789 - DNA, 20 bp, synthetic construct
  misc_feature 1..20: note = chemically synthesized
  source 1..20: mol_type = other DNA
gaaaaacctggaccggagta

SEQ ID NO: 17790 - DNA, 20 bp, synthetic construct
  misc_feature 1..20: note = chemically synthesized
  source 1..20: mol_type = other DNA
aaacctggaccggagtaggg

SEQ ID NO: 17791 - DNA, 20 bp, synthetic construct
  misc_feature 1..20: note = chemically synthesized
  source 1..20: mol_type = other DNA
ctggaccggagtagggtagc

SEQ ID NO: 17792 - DNA, 20 bp, synthetic construct
  misc_feature 1..20: note = chemically synthesized
  source 1..20: mol_type = other DNA
tggaccggagtagggtagcc

SEQ ID NO: 17793 - DNA, 20 bp, synthetic construct
  misc_feature 1..20: note = chemically synthesized
  source 1..20: mol_type = other DNA
gaccggagtagggtagccag

SEQ ID NO: 17794 - DNA, 20 bp, synthetic construct
  misc_feature 1..20: note = chemically synthesized
  source 1..20: mol_type = other DNA
tttttttttctctaatttct

SEQ ID NO: 17795 - DNA, 20 bp, synthetic construct
  misc_feature 1..20: note = chemically synthesized
  source 1..20: mol_type = other DNA
ttttttttctctaatttctg

SEQ ID NO: 17796 - DNA, 20 bp, synthetic construct
  misc_feature 1..20: note = chemically synthesized
  source 1..20: mol_type = other DNA
tctctaatttctgaggttgc

SEQ ID NO: 17797 - DNA, 20 bp, synthetic construct
  misc_feature 1..20: note = chemically synthesized
  source 1..20: mol_type = other DNA
ctctaatttctgaggttgcc

SEQ ID NO: 17798 - DNA, 20 bp, synthetic construct
  misc_feature 1..20: note = chemically synthesized
  source 1..20: mol_type = other DNA
ctaatttctgaggttgccag

SEQ ID NO: 17799 - DNA, 20 bp, synthetic construct
  misc_feature 1..20: note = chemically synthesized
  source 1..20: mol_type = other DNA
taatttctgaggttgccagg

SEQ ID NO: 17800 - DNA, 20 bp, synthetic construct
  misc_feature 1..20: note = chemically synthesized
  source 1..20: mol_type = other DNA
aatttctgaggttgccagga

SEQ ID NO: 17801 - DNA, 20 bp, synthetic construct
  misc_feature 1..20: note = chemically synthesized
  source 1..20: mol_type = other DNA
atttctgaggttgccaggag

SEQ ID NO: 17802 - DNA, 20 bp, synthetic construct
  misc_feature 1..20: note = chemically synthesized
  source 1..20: mol_type = other DNA
gaggttgccaggaggggctt

SEQ ID NO: 17803 - DNA, 20 bp, synthetic construct
  misc_feature 1..20: note = chemically synthesized
  source 1..20: mol_type = other DNA
tgccaggaggggcttaagca

SEQ ID NO: 17804 - DNA, 20 bp, synthetic construct
  misc_feature 1..20: note = chemically synthesized
  source 1..20: mol_type = other DNA
caggaggggcttaagcaaag

SEQ ID NO: 17805 - DNA, 20 bp, synthetic construct
  misc_feature 1..20: note = chemically synthesized
  source 1..20: mol_type = other DNA
ggggcttaagcaaagtggtc

SEQ ID NO: 17806 - DNA, 20 bp, synthetic construct
  misc_feature 1..20: note = chemically synthesized
  source 1..20: mol_type = other DNA
gtggtcaagtccatctgctc

SEQ ID NO: 17807 - DNA, 20 bp, synthetic construct
  misc_feature 1..20: note = chemically synthesized
  source 1..20: mol_type = other DNA
ggtcaagtccatctgctccg

SEQ ID NO: 17808 - DNA, 20 bp, synthetic construct
  misc_feature 1..20: note = chemically synthesized
  source 1..20: mol_type = other DNA
caagtccatctgctccggag

SEQ ID NO: 17809 - DNA, 20 bp, synthetic construct
  misc_feature 1..20: note = chemically synthesized
  source 1..20: mol_type = other DNA
aagtccatctgctccggaga

SEQ ID NO: 17810 - DNA, 20 bp, synthetic construct
  misc_feature 1..20: note = chemically synthesized
  source 1..20: mol_type = other DNA
tccatctgctccggagaagg

SEQ ID NO: 17811 - DNA, 20 bp, synthetic construct
  misc_feature 1..20: note = chemically synthesized
  source 1..20: mol_type = other DNA
ctgctccggagaaggtggta

SEQ ID NO: 17812 - DNA, 20 bp, synthetic construct
  misc_feature 1..20: note = chemically synthesized
  source 1..20: mol_type = other DNA
ccggagaaggtggtaaagaa

SEQ ID NO: 17813 - DNA, 20 bp, synthetic construct
  misc_feature 1..20: note = chemically synthesized
  source 1..20: mol_type = other DNA
ggagaaggtggtaaagaaaa

SEQ ID NO: 17814 - DNA, 20 bp, synthetic construct
  misc_feature 1..20: note = chemically synthesized
  source 1..20: mol_type = other DNA
gagaaggtggtaaagaaaag

SEQ ID NO: 17815 - DNA, 20 bp, synthetic construct
  misc_feature 1..20: note = chemically synthesized
  source 1..20: mol_type = other DNA
aggtggtaaagaaaagaggt

SEQ ID NO: 17816 - DNA, 20 bp, synthetic construct
  misc_feature 1..20: note = chemically synthesized
  source 1..20: mol_type = other DNA
tggtaaagaaaagaggttag

SEQ ID NO: 17817 - DNA, 20 bp, synthetic construct
  misc_feature 1..20: note = chemically synthesized
  source 1..20: mol_type = other DNA
aaagaaaagaggttagtggc

SEQ ID NO: 17818 - DNA, 20 bp, synthetic construct
  misc_feature 1..20: note = chemically synthesized
  source 1..20: mol_type = other DNA
agaaaagaggttagtggcaa

SEQ ID NO: 17819 - DNA, 20 bp, synthetic construct
  misc_feature 1..20: note = chemically synthesized
  source 1..20: mol_type = other DNA
gaaaagaggttagtggcaag

SEQ ID NO: 17820 - DNA, 20 bp, synthetic construct
  misc_feature 1..20: note = chemically synthesized
  source 1..20: mol_type = other DNA
aaaagaggttagtggcaaga

SEQ ID NO: 17821 - DNA, 20 bp, synthetic construct
  misc_feature 1..20: note = chemically synthesized
  source 1..20: mol_type = other DNA
agaggttagtggcaagaggg

SEQ ID NO: 17822 - DNA, 20 bp, synthetic construct
  misc_feature 1..20: note = chemically synthesized
  source 1..20: mol_type = other DNA
gaggttagtggcaagaggga

SEQ ID NO: 17823 - DNA, 20 bp, synthetic construct
  misc_feature 1..20: note = chemically synthesized
  source 1..20: mol_type = other DNA
ggttagtggcaagagggaag

SEQ ID NO: 17824 - DNA, 20 bp, synthetic construct
  misc_feature 1..20: note = chemically synthesized
  source 1..20: mol_type = other DNA
ggcaagagggaaggagcaca

SEQ ID NO: 17825 - DNA, 20 bp, synthetic construct
  misc_feature 1..20: note = chemically synthesized
  source 1..20: mol_type = other DNA
gcaagagggaaggagcacaa

SEQ ID NO: 17826 - DNA, 20 bp, synthetic construct
  misc_feature 1..20: note = chemically synthesized
  source 1..20: mol_type = other DNA
caagagggaaggagcacaaa

SEQ ID NO: 17827 - DNA, 20 bp, synthetic construct
  misc_feature 1..20: note = chemically synthesized
  source 1..20: mol_type = other DNA
acaaagggaaaattgtacat

SEQ ID NO: 17828 - DNA, 20 bp, synthetic construct
  misc_feature 1..20: note = chemically synthesized
  source 1..20: mol_type = other DNA
caaagggaaaattgtacatt

SEQ ID NO: 17829 - DNA, 20 bp, synthetic construct
  misc_feature 1..20: note = chemically synthesized
  source 1..20: mol_type = other DNA
aagggaaaattgtacattgg

SEQ ID NO: 17830 - DNA, 20 bp, synthetic construct
  misc_feature 1..20: note = chemically synthesized
  source 1..20: mol_type = other DNA
attgggagcgttactctccc

SEQ ID NO: 17831 - DNA, 20 bp, synthetic construct
  misc_feature 1..20: note = chemically synthesized
  source 1..20: mol_type = other DNA
agcgttactctccctggcca

SEQ ID NO: 17832 - DNA, 20 bp, synthetic construct
  misc_feature 1..20: note = chemically synthesized
  source 1..20: mol_type = other DNA
tactctccctggccatggtg

SEQ ID NO: 17833 - DNA, 20 bp, synthetic construct
  misc_feature 1..20: note = chemically synthesized
  source 1..20: mol_type = other DNA
ctccctggccatggtgtagc

SEQ ID NO: 17834 - DNA, 20 bp, synthetic construct
  misc_feature 1..20: note = chemically synthesized
  source 1..20: mol_type = other DNA
tggccatggtgtagccagac

SEQ ID NO: 17835 - DNA, 20 bp, synthetic construct
  misc_feature 1..20: note = chemically synthesized
  source 1..20: mol_type = other DNA
atggtgtagccagactggtt

SEQ ID NO: 17836 - DNA, 20 bp, synthetic construct
  misc_feature 1..20: note = chemically synthesized
  source 1..20: mol_type = other DNA
gtgtagccagactggtttag

SEQ ID NO: 17837 - DNA, 20 bp, synthetic construct
  misc_feature 1..20: note = chemically synthesized
  source 1..20: mol_type = other DNA
agccagactggtttagcaga

SEQ ID NO: 17838 - DNA, 20 bp, synthetic construct
  misc_feature 1..20: note = chemically synthesized
  source 1..20: mol_type = other DNA
tggtttagcagacagaatga

SEQ ID NO: 17839 - DNA, 20 bp, synthetic construct
  misc_feature 1..20: note = chemically synthesized
  source 1..20: mol_type = other DNA
agaatgatagattgttttgt

SEQ ID NO: 17840 - DNA, 20 bp, synthetic construct
  misc_feature 1..20: note = chemically synthesized
  source 1..20: mol_type = other DNA
gaatgatagattgttttgtc

SEQ ID NO: 17841 - DNA, 20 bp, synthetic construct
  misc_feature 1..20: note = chemically synthesized
  source 1..20: mol_type = other DNA
aatgatagattgttttgtca

SEQ ID NO: 17842 - DNA, 20 bp, synthetic construct
  misc_feature 1..20: note = chemically synthesized
  source 1..20: mol_type = other DNA
atgatagattgttttgtcag

SEQ ID NO: 17843 - DNA, 20 bp, synthetic construct
  misc_feature 1..20: note = chemically synthesized
  source 1..20: mol_type = other DNA
gattgttttgtcaggggtcc

SEQ ID NO: 17844 - DNA, 20 bp, synthetic construct
  misc_feature 1..20: note = chemically synthesized
  source 1..20: mol_type = other DNA
attgttttgtcaggggtccc

SEQ ID NO: 17845 - DNA, 20 bp, synthetic construct
  misc_feature 1..20: note = chemically synthesized
  source 1..20: mol_type = other DNA
ttgttttgtcaggggtccca

SEQ ID NO: 17846 - DNA, 20 bp, synthetic construct
  misc_feature 1..20: note = chemically synthesized
  source 1..20: mol_type = other DNA
cagggtgcgccctgaacttg

SEQ ID NO: 17847 - DNA, 20 bp, synthetic construct
  misc_feature 1..20: note = chemically synthesized
  source 1..20: mol_type = other DNA
agcactttgtttatcttgaa

SEQ ID NO: 17848 - DNA, 20 bp, synthetic construct
  misc_feature 1..20: note = chemically synthesized
  source 1..20: mol_type = other DNA
ctttgtttatcttgaataga

SEQ ID NO: 17849 - DNA, 20 bp, synthetic construct
  misc_feature 1..20: note = chemically synthesized
  source 1..20: mol_type = other DNA
tttgtttatcttgaatagaa

SEQ ID NO: 17850 - DNA, 20 bp, synthetic construct
  misc_feature 1..20: note = chemically synthesized
  source 1..20: mol_type = other DNA
ttgtttatcttgaatagaaa

SEQ ID NO: 17851 - DNA, 20 bp, synthetic construct
  misc_feature 1..20: note = chemically synthesized
  source 1..20: mol_type = other DNA
tatcttgaatagaaagggaa

SEQ ID NO: 17852 - DNA, 20 bp, synthetic construct
  misc_feature 1..20: note = chemically synthesized
  source 1..20: mol_type = other DNA
tgaatagaaagggaaaagcg

SEQ ID NO: 17853 - DNA, 20 bp, synthetic construct
  misc_feature 1..20: note = chemically synthesized
  source 1..20: mol_type = other DNA
gcgcagacataatcgatgtc

SEQ ID NO: 17854 - DNA, 20 bp, synthetic construct
  misc_feature 1..20: note = chemically synthesized
  source 1..20: mol_type = other DNA
cataatcgatgtctagtttt

SEQ ID NO: 17855 - DNA, 20 bp, synthetic construct
  misc_feature 1..20: note = chemically synthesized
  source 1..20: mol_type = other DNA
ataatcgatgtctagttttt

SEQ ID NO: 17856 - DNA, 20 bp, synthetic construct
  misc_feature 1..20: note = chemically synthesized
  source 1..20: mol_type = other DNA
aatcgatgtctagtttttag

SEQ ID NO: 17857 - DNA, 20 bp, synthetic construct
  misc_feature 1..20: note = chemically synthesized
  source 1..20: mol_type = other DNA
tctagtttttaggagctcga

SEQ ID NO: 17858 - DNA, 20 bp, synthetic construct
  misc_feature 1..20: note = chemically synthesized
  source 1..20: mol_type = other DNA
tagtttttaggagctcgaaa

SEQ ID NO: 17859 - DNA, 20 bp, synthetic construct
  misc_feature 1..20: note = chemically synthesized
  source 1..20: mol_type = other DNA
agtttttaggagctcgaaag

SEQ ID NO: 17860 - DNA, 20 bp, synthetic construct
  misc_feature 1..20: note = chemically synthesized
  source 1..20: mol_type = other DNA
ttttaggagctcgaaagagg

SEQ ID NO: 17861 - DNA, 20 bp, synthetic construct
  misc_feature 1..20: note = chemically synthesized
  source 1..20: mol_type = other DNA
tttaggagctcgaaagaggt

SEQ ID NO: 17862 - DNA, 20 bp, synthetic construct
  misc_feature 1..20: note = chemically synthesized
  source 1..20: mol_type = other DNA
taggagctcgaaagaggtag

SEQ ID NO: 17863 - DNA, 20 bp, synthetic construct
  misc_feature 1..20: note = chemically synthesized
  source 1..20: mol_type = other DNA
gctcgaaagaggtaggagaa

SEQ ID NO: 17864 - DNA, 20 bp, synthetic construct
  misc_feature 1..20: note = chemically synthesized
  source 1..20: mol_type = other DNA
tcgaaagaggtaggagaaca

SEQ ID NO: 17865 - DNA, 20 bp, synthetic construct
  misc_feature 1..20: note = chemically synthesized
  source 1..20: mol_type = other DNA
aaagaggtaggagaacagag

SEQ ID NO: 17866 - DNA, 20 bp, synthetic construct
  misc_feature 1..20: note = chemically synthesized
  source 1..20: mol_type = other DNA
gtaggagaacagagaagact

SEQ ID NO: 17867 - DNA, 20 bp, synthetic construct
  misc_feature 1..20: note = chemically synthesized
  source 1..20: mol_type = other DNA
taggagaacagagaagactc

SEQ ID NO: 17868 - DNA, 20 bp, synthetic construct
  misc_feature 1..20: note = chemically synthesized
  source 1..20: mol_type = other DNA
ggagaacagagaagactcag

SEQ ID NO: 17869 - DNA, 20 bp, synthetic construct
  misc_feature 1..20: note = chemically synthesized
  source 1..20: mol_type = other DNA
gagaacagagaagactcagg

SEQ ID NO: 17870 - DNA, 20 bp, synthetic construct
  misc_feature 1..20: note = chemically synthesized
  source 1..20: mol_type = other DNA
agaacagagaagactcagga

SEQ ID NO: 17871 - DNA, 20 bp, synthetic construct
  misc_feature 1..20: note = chemically synthesized
  source 1..20: mol_type = other DNA
gaacagagaagactcaggag

SEQ ID NO: 17872 - DNA, 20 bp, synthetic construct
  misc_feature 1..20: note = chemically synthesized
  source 1..20: mol_type = other DNA
cagagaagactcaggagggg

SEQ ID NO: 17873 - DNA, 20 bp, synthetic construct
  misc_feature 1..20: note = chemically synthesized
  source 1..20: mol_type = other DNA
agaagactcaggaggggtag

SEQ ID NO: 17874 - DNA, 20 bp, synthetic construct
  misc_feature 1..20: note = chemically synthesized
  source 1..20: mol_type = other DNA
gaagactcaggaggggtagt

SEQ ID NO: 17875 - DNA, 20 bp, synthetic construct
  misc_feature 1..20: note = chemically synthesized
  source 1..20: mol_type = other DNA
agactcaggaggggtagtgg

SEQ ID NO: 17876 - DNA, 20 bp, synthetic construct
  misc_feature 1..20: note = chemically synthesized
  source 1..20: mol_type = other DNA
gactcaggaggggtagtggg

SEQ ID NO: 17877 - DNA, 20 bp, synthetic construct
  misc_feature 1..20: note = chemically synthesized
  source 1..20: mol_type = other DNA
tcaggaggggtagtgggagg

SEQ ID NO: 17878 - DNA, 20 bp, synthetic construct
  misc_feature 1..20: note = chemically synthesized
  source 1..20: mol_type = other DNA
caggaggggtagtgggaggt

SEQ ID NO: 17879 - DNA, 20 bp, synthetic construct
  misc_feature 1..20: note = chemically synthesized
  source 1..20: mol_type = other DNA
aggaggggtagtgggaggtg

SEQ ID NO: 17880 - DNA, 20 bp, synthetic construct
  misc_feature 1..20: note = chemically synthesized
  source 1..20: mol_type = other DNA
ggaggggtagtgggaggtgg

SEQ ID NO: 17881 - DNA, 20 bp, synthetic construct
  misc_feature 1..20: note = chemically synthesized
  source 1..20: mol_type = other DNA
aggggtagtgggaggtgggg

SEQ ID NO: 17882 - DNA, 20 bp, synthetic construct
  misc_feature 1..20: note = chemically synthesized
  source 1..20: mol_type = other DNA
ggggtagtgggaggtggggg

SEQ ID NO: 17883 - DNA, 20 bp, synthetic construct
  misc_feature 1..20: note = chemically synthesized
  source 1..20: mol_type = other DNA
agtgggaggtgggggaggtg

SEQ ID NO: 17884 - DNA, 20 bp, synthetic construct
  misc_feature 1..20: note = chemically synthesized
  source 1..20: mol_type = other DNA
gtgggaggtgggggaggtgc

SEQ ID NO: 17885 - DNA, 20 bp, synthetic construct
  misc_feature 1..20: note = chemically synthesized
  source 1..20: mol_type = other DNA
ggtgggggaggtgcaggccc

SEQ ID NO: 17886 - DNA, 20 bp, synthetic construct
  misc_feature 1..20: note = chemically synthesized
  source 1..20: mol_type = other DNA
ggaggtgcaggccctggttg

SEQ ID NO: 17887 - DNA, 20 bp, synthetic construct
  misc_feature 1..20: note = chemically synthesized
  source 1..20: mol_type = other DNA
tggttgtggttgtccattaa

SEQ ID NO: 17888 - DNA, 20 bp, synthetic construct
  misc_feature 1..20: note = chemically synthesized
  source 1..20: mol_type = other DNA
tgtccattaacagatgaact

SEQ ID NO: 17889 - DNA, 20 bp, synthetic construct
  misc_feature 1..20: note = chemically synthesized
  source 1..20: mol_type = other DNA
attaacagatgaacttggcc

SEQ ID NO: 17890 - DNA, 20 bp, synthetic construct
  misc_feature 1..20: note = chemically synthesized
  source 1..20: mol_type = other DNA
ttaacagatgaacttggccg

SEQ ID NO: 17891 - DNA, 20 bp, synthetic construct
  misc_feature 1..20: note = chemically synthesized
  source 1..20: mol_type = other DNA
taacagatgaacttggccga

SEQ ID NO: 17892 - DNA, 20 bp, synthetic construct
  misc_feature 1..20: note = chemically synthesized
  source 1..20: mol_type = other DNA
agatgaacttggccgagggc

SEQ ID NO: 17893 - DNA, 20 bp, synthetic construct
  misc_feature 1..20: note = chemically synthesized
  source 1..20: mol_type = other DNA
gatgaacttggccgagggcc

SEQ ID NO: 17894 - DNA, 20 bp, synthetic construct
  misc_feature 1..20: note = chemically synthesized
  source 1..20: mol_type = other DNA
cttggccgagggccaggctt

SEQ ID NO: 17895 - DNA, 20 bp, synthetic construct
  misc_feature 1..20: note = chemically synthesized
  source 1..20: mol_type = other DNA
ccgagggccaggctttagat

SEQ ID NO: 17896 - DNA, 20 bp, synthetic construct
  misc_feature 1..20: note = chemically synthesized
  source 1..20: mol_type = other DNA
gagggccaggctttagatga

SEQ ID NO: 17897 - DNA, 20 bp, synthetic construct
  misc_feature 1..20: note = chemically synthesized
  source 1..20: mol_type = other DNA
ggctttagatgagagcgtgt

SEQ ID NO: 17898 - DNA, 20 bp, synthetic construct
  misc_feature 1..20: note = chemically synthesized
  source 1..20: mol_type = other DNA
gctttagatgagagcgtgtc

SEQ ID NO: 17899 - DNA, 20 bp, synthetic construct
  misc_feature 1..20: note = chemically synthesized
  source 1..20: mol_type = other DNA
ctttagatgagagcgtgtca

SEQ ID NO: 17900 - DNA, 20 bp, synthetic construct
  misc_feature 1..20: note = chemically synthesized
  source 1..20: mol_type = other DNA
atgagagcgtgtcagggccc

SEQ ID NO: 17901 - DNA, 20 bp, synthetic construct
  misc_feature 1..20: note = chemically synthesized
  source 1..20: mol_type = other DNA
agcgtgtcagggccccagtg

SEQ ID NO: 17902 - DNA, 20 bp, synthetic construct
  misc_feature 1..20: note = chemically synthesized
  source 1..20: mol_type = other DNA
gtcagggccccagtgcagcc

SEQ ID NO: 17903 - DNA, 20 bp, synthetic construct
  misc_feature 1..20: note = chemically synthesized
  source 1..20: mol_type = other DNA
ccagtgcagccaagcctttt

SEQ ID NO: 17904 - DNA, 20 bp, synthetic construct
  misc_feature 1..20: note = chemically synthesized
  source 1..20: mol_type = other DNA
actgtacatcaaatgctccc

SEQ ID NO: 17905 - DNA, 20 bp, synthetic construct
  misc_feature 1..20: note = chemically synthesized
  source 1..20: mol_type = other DNA
tcaaatgctccctggtcttt

SEQ ID NO: 17906 - DNA, 20 bp, synthetic construct
  misc_feature 1..20: note = chemically synthesized
  source 1..20: mol_type = other DNA
gctccctggtcttttggcta

SEQ ID NO: 17907 - DNA, 20 bp, synthetic construct
  misc_feature 1..20: note = chemically synthesized
  source 1..20: mol_type = other DNA
ctccctggtcttttggctaa

SEQ ID NO: 17908 - DNA, 20 bp, synthetic construct
  misc_feature 1..20: note = chemically synthesized
  source 1..20: mol_type = other DNA
aaataaaaaataaaaaaaaa

SEQ ID NO: 17909 - DNA, 20 bp, synthetic construct
  misc_feature 1..20: note = chemically synthesized
  source 1..20: mol_type = other DNA
ataaaaaataaaaaaaaaaa

SEQ ID NO: 17910 - DNA, 20 bp, synthetic construct
  misc_feature 1..20: note = chemically synthesized
  source 1..20: mol_type = other DNA
taaaaaaaaaaagagacgca

SEQ ID NO: 17911 - DNA, 20 bp, synthetic construct
  misc_feature 1..20: note = chemically synthesized
  source 1..20: mol_type = other DNA
attttttccctcctctgaac

SEQ ID NO: 17912 - DNA, 20 bp, synthetic construct
  misc_feature 1..20: note = chemically synthesized
  source 1..20: mol_type = other DNA
ttccctcctctgaaccagtt

SEQ ID NO: 17913 - DNA, 20 bp, synthetic construct
  misc_feature 1..20: note = chemically synthesized
  source 1..20: mol_type = other DNA
tccctcctctgaaccagttg

SEQ ID NO: 17914 - DNA, 20 bp, synthetic construct
  misc_feature 1..20: note = chemically synthesized
  source 1..20: mol_type = other DNA
tcctctgaaccagttgaggc

SEQ ID NO: 17915 - DNA, 20 bp, synthetic construct
  misc_feature 1..20: note = chemically synthesized
  source 1..20: mol_type = other DNA
accagttgaggccagtcttt

SEQ ID NO: 17916 - DNA, 20 bp, synthetic construct
  misc_feature 1..20: note = chemically synthesized
  source 1..20: mol_type = other DNA
cagtcttttggctacatatg

SEQ ID NO: 17917 - DNA, 20 bp, synthetic construct
  misc_feature 1..20: note = chemically synthesized
  source 1..20: mol_type = other DNA
agtcttttggctacatatgc

SEQ ID NO: 17918 - DNA, 20 bp, synthetic construct
  misc_feature 1..20: note = chemically synthesized
  source 1..20: mol_type = other DNA
gcgggttctatcatctttcc

SEQ ID NO: 17919 - DNA, 20 bp, synthetic construct
  misc_feature 1..20: note = chemically synthesized
  source 1..20: mol_type = other DNA
catctttcctggcttgccgt

SEQ ID NO: 17920 - DNA, 20 bp, synthetic construct
  misc_feature 1..20: note = chemically synthesized
  source 1..20: mol_type = other DNA
atctttcctggcttgccgtt

SEQ ID NO: 17921 - DNA, 20 bp, synthetic construct
  misc_feature 1..20: note = chemically synthesized
  source 1..20: mol_type = other DNA
tggcttgccgttgggaaaaa

SEQ ID NO: 17922 - DNA, 20 bp, synthetic construct
  misc_feature 1..20: note = chemically synthesized
  source 1..20: mol_type = other DNA
aaaaaaagttgtgataacgc

SEQ ID NO: 17923 - DNA, 20 bp, synthetic construct
  misc_feature 1..20: note = chemically synthesized
  source 1..20: mol_type = other DNA
tgtgataacgccagtaaccc

SEQ ID NO: 17924 - DNA, 20 bp, synthetic construct
  misc_feature 1..20: note = chemically synthesized
  source 1..20: mol_type = other DNA
gtgataacgccagtaacccg

SEQ ID NO: 17925 - DNA, 20 bp, synthetic construct
  misc_feature 1..20: note = chemically synthesized
  source 1..20: mol_type = other DNA
tgataacgccagtaacccga

SEQ ID NO: 17926 - DNA, 20 bp, synthetic construct
  misc_feature 1..20: note = chemically synthesized
  source 1..20: mol_type = other DNA
aacgccagtaacccgagggc

SEQ ID NO: 17927 - DNA, 20 bp, synthetic construct
  misc_feature 1..20: note = chemically synthesized
  source 1..20: mol_type = other DNA
ccagtaacccgagggccaga

SEQ ID NO: 17928 - DNA, 20 bp, synthetic construct
  misc_feature 1..20: note = chemically synthesized
  source 1..20: mol_type = other DNA
cagtaacccgagggccagat

SEQ ID NO: 17929 - DNA, 20 bp, synthetic construct
  misc_feature 1..20: note = chemically synthesized
  source 1..20: mol_type = other DNA
taacccgagggccagatggg

SEQ ID NO: 17930 - DNA, 20 bp, synthetic construct
  misc_feature 1..20: note = chemically synthesized
  source 1..20: mol_type = other DNA
aacccgagggccagatggga

SEQ ID NO: 17931 - DNA, 20 bp, synthetic construct
  misc_feature 1..20: note = chemically synthesized
  source 1..20: mol_type = other DNA
acccgagggccagatgggaa

SEQ ID NO: 17932 - DNA, 20 bp, synthetic construct
  misc_feature 1..20: note = chemically synthesized
  source 1..20: mol_type = other DNA
agggccagatgggaagggtt

SEQ ID NO: 17933 - DNA, 20 bp, synthetic construct
  misc_feature 1..20: note = chemically synthesized
  source 1..20: mol_type = other DNA
gggaagggtttggttgtgtt

SEQ ID NO: 17934 - DNA, 20 bp, synthetic construct
  misc_feature 1..20: note = chemically synthesized
  source 1..20: mol_type = other DNA
ggaagggtttggttgtgttc

SEQ ID NO: 17935 - DNA, 20 bp, synthetic construct
  misc_feature 1..20: note = chemically synthesized
  source 1..20: mol_type = other DNA
tttggttgtgttcaggcgac

SEQ ID NO: 17936 - DNA, 20 bp, synthetic construct
  misc_feature 1..20: note = chemically synthesized
  source 1..20: mol_type = other DNA
ttggttgtgttcaggcgacc

SEQ ID NO: 17937 - DNA, 20 bp, synthetic construct
  misc_feature 1..20: note = chemically synthesized
  source 1..20: mol_type = other DNA
gtgttcaggcgaccaggtgt

SEQ ID NO: 17938 - DNA, 20 bp, synthetic construct
  misc_feature 1..20: note = chemically synthesized
  source 1..20: mol_type = other DNA
gttcaggcgaccaggtgtga

SEQ ID NO: 17939 - DNA, 20 bp, synthetic construct
  misc_feature 1..20: note = chemically synthesized
  source 1..20: mol_type = other DNA
cgaccaggtgtgagagctcg

SEQ ID NO: 17940 - DNA, 20 bp, synthetic construct
  misc_feature 1..20: note = chemically synthesized
  source 1..20: mol_type = other DNA
aggtgtgagagctcgtggtg

SEQ ID NO: 17941 - DNA, 20 bp, synthetic construct
  misc_feature 1..20: note = chemically synthesized
  source 1..20: mol_type = other DNA
tgtgagagctcgtggtgcag

SEQ ID NO: 17942 - DNA, 20 bp, synthetic construct
  misc_feature 1..20: note = chemically synthesized
  source 1..20: mol_type = other DNA
gtgagagctcgtggtgcagt

SEQ ID NO: 17943 - DNA, 20 bp, synthetic construct
  misc_feature 1..20: note = chemically synthesized
  source 1..20: mol_type = other DNA
tgagagctcgtggtgcagtg

SEQ ID NO: 17944 - DNA, 20 bp, synthetic construct
  misc_feature 1..20: note = chemically synthesized
  source 1..20: mol_type = other DNA
gagctcgtggtgcagtgggg

SEQ ID NO: 17945 - DNA, 20 bp, synthetic construct
  misc_feature 1..20: note = chemically synthesized
  source 1..20: mol_type = other DNA
agctcgtggtgcagtggggt

SEQ ID NO: 17946 - DNA, 20 bp, synthetic construct
  misc_feature 1..20: note = chemically synthesized
  source 1..20: mol_type = other DNA
gctcgtggtgcagtggggtg

SEQ ID NO: 17947 - DNA, 20 bp, synthetic construct
  misc_feature 1..20: note = chemically synthesized
  source 1..20: mol_type = other DNA
tggtgcagtggggtggggcg

SEQ ID NO: 17948 - DNA, 20 bp, synthetic construct
  misc_feature 1..20: note = chemically synthesized
  source 1..20: mol_type = other DNA
gcagtggggtggggcgtggc

SEQ ID NO: 17949 - DNA, 20 bp, synthetic construct
  misc_feature 1..20: note = chemically synthesized
  source 1..20: mol_type = other DNA
ggccggcgtgcctgcgtgtg

SEQ ID NO: 17950 - DNA, 20 bp, synthetic construct
  misc_feature 1..20: note = chemically synthesized
  source 1..20: mol_type = other DNA
gccggcgtgcctgcgtgtgc

SEQ ID NO: 17951 - DNA, 20 bp, synthetic construct
  misc_feature 1..20: note = chemically synthesized
  source 1..20: mol_type = other DNA
gcgtgcctgcgtgtgcaggt

SEQ ID NO: 17952 - DNA, 20 bp, synthetic construct
  misc_feature 1..20: note = chemically synthesized
  source 1..20: mol_type = other DNA
tgcgtgtgcaggtaagaaat

SEQ ID NO: 17953 - DNA, 20 bp, synthetic construct
  misc_feature 1..20: note = chemically synthesized
  source 1..20: mol_type = other DNA
gtgtgcaggtaagaaatcag

SEQ ID NO: 17954 - DNA, 20 bp, synthetic construct
  misc_feature 1..20: note = chemically synthesized
  source 1..20: mol_type = other DNA
tttttttttttttttttaaa

SEQ ID NO: 17955 - DNA, 20 bp, synthetic construct
  misc_feature 1..20: note = chemically synthesized
  source 1..20: mol_type = other DNA
tttttttttttaaatggctg

SEQ ID NO: 17956 - DNA, 20 bp, synthetic construct
  misc_feature 1..20: note = chemically synthesized
  source 1..20: mol_type = other DNA
atggctgaagtttaacttgt

SEQ ID NO: 17957 - DNA, 20 bp, synthetic construct
  misc_feature 1..20: note = chemically synthesized
  source 1..20: mol_type = other DNA
gctgaagtttaacttgttgg

SEQ ID NO: 17958 - DNA, 20 bp, synthetic construct
  misc_feature 1..20: note = chemically synthesized
  source 1..20: mol_type = other DNA
ctgaagtttaacttgttgga

SEQ ID NO: 17959 - DNA, 20 bp, synthetic construct
  misc_feature 1..20: note = chemically synthesized
  source 1..20: mol_type = other DNA
tgaagtttaacttgttggaa

SEQ ID NO: 17960 - DNA, 20 bp, synthetic construct
  misc_feature 1..20: note = chemically synthesized
  source 1..20: mol_type = other DNA
gttggaagggcctgtgaatt

SEQ ID NO: 17961 - DNA, 20 bp, synthetic construct
  misc_feature 1..20: note = chemically synthesized
  source 1..20: mol_type = other DNA
gggcctgtgaattaagctgt

SEQ ID NO: 17962 - DNA, 20 bp, synthetic construct
  misc_feature 1..20: note = chemically synthesized
  source 1..20: mol_type = other DNA
cctgtgaattaagctgtcgg

SEQ ID NO: 17963 - DNA, 20 bp, synthetic construct
  misc_feature 1..20: note = chemically synthesized
  source 1..20: mol_type = other DNA
gaattaagctgtcggtggct

SEQ ID NO: 17964 - DNA, 20 bp, synthetic construct
  misc_feature 1..20: note = chemically synthesized
  source 1..20: mol_type = other DNA
ggctgagaacgataatatgc

SEQ ID NO: 17965 - DNA, 20 bp, synthetic construct
  misc_feature 1..20: note = chemically synthesized
  source 1..20: mol_type = other DNA
gctgagaacgataatatgca

SEQ ID NO: 17966 - DNA, 20 bp, synthetic construct
  misc_feature 1..20: note = chemically synthesized
  source 1..20: mol_type = other DNA
gagaacgataatatgcaagg

SEQ ID NO: 17967 - DNA, 20 bp, synthetic construct
  misc_feature 1..20: note = chemically synthesized
  source 1..20: mol_type = other DNA
agaacgataatatgcaagga

SEQ ID NO: 17968 - DNA, 20 bp, synthetic construct
  misc_feature 1..20: note = chemically synthesized
  source 1..20: mol_type = other DNA
ataatatgcaaggaaggctc

SEQ ID NO: 17969 - DNA, 20 bp, synthetic construct
  misc_feature 1..20: note = chemically synthesized
  source 1..20: mol_type = other DNA
taatatgcaaggaaggctca

SEQ ID NO: 17970 - DNA, 20 bp, synthetic construct
  misc_feature 1..20: note = chemically synthesized
  source 1..20: mol_type = other DNA
tatgcaaggaaggctcaagg

SEQ ID NO: 17971 - DNA, 20 bp, synthetic construct
  misc_feature 1..20: note = chemically synthesized
  source 1..20: mol_type = other DNA
atgcaaggaaggctcaagga

SEQ ID NO: 17972 - DNA, 20 bp, synthetic construct
  misc_feature 1..20: note = chemically synthesized
  source 1..20: mol_type = other DNA
ggaaggctcaaggaaggctc

SEQ ID NO: 17973 - DNA, 20 bp, synthetic construct
  misc_feature 1..20: note = chemically synthesized
  source 1..20: mol_type = other DNA
ggctcaaggaaggctcaaga

SEQ ID NO: 17974 - DNA, 20 bp, synthetic construct
  misc_feature 1..20: note = chemically synthesized
  source 1..20: mol_type = other DNA
gctcaaggaaggctcaagaa

SEQ ID NO: 17975 - DNA, 20 bp, synthetic construct
  misc_feature 1..20: note = chemically synthesized
  source 1..20: mol_type = other DNA
aaggaaggctcaagaaaggc

SEQ ID NO: 17976 - DNA, 20 bp, synthetic construct
  misc_feature 1..20: note = chemically synthesized
  source 1..20: mol_type = other DNA
aggaaggctcaagaaaggcc

SEQ ID NO: 17977 - DNA, 20 bp, synthetic construct
  misc_feature 1..20: note = chemically synthesized
  source 1..20: mol_type = other DNA
ggaaggctcaagaaaggcca

SEQ ID NO: 17978 - DNA, 20 bp, synthetic construct
  misc_feature 1..20: note = chemically synthesized
  source 1..20: mol_type = other DNA
gaaggctcaagaaaggccag

SEQ ID NO: 17979 - DNA, 20 bp, synthetic construct
  misc_feature 1..20: note = chemically synthesized
  source 1..20: mol_type = other DNA
ggctcaagaaaggccagggg

SEQ ID NO: 17980 - DNA, 20 bp, synthetic construct
  misc_feature 1..20: note = chemically synthesized
  source 1..20: mol_type = other DNA
gctcaagaaaggccaggggt

SEQ ID NO: 17981 - DNA, 20 bp, synthetic construct
  misc_feature 1..20: note = chemically synthesized
  source 1..20: mol_type = other DNA
ctcaagaaaggccaggggtg

SEQ ID NO: 17982 - DNA, 20 bp, synthetic construct
  misc_feature 1..20: note = chemically synthesized
  source 1..20: mol_type = other DNA
gaaaggccaggggtggggaa

SEQ ID NO: 17983 - DNA, 20 bp, synthetic construct
  misc_feature 1..20: note = chemically synthesized
  source 1..20: mol_type = other DNA
aaaggccaggggtggggaaa

SEQ ID NO: 17984 - DNA, 20 bp, synthetic construct
  misc_feature 1..20: note = chemically synthesized
  source 1..20: mol_type = other DNA
tggggaaaaggtgctcttgt

SEQ ID NO: 17985 - DNA, 20 bp, synthetic construct
  misc_feature 1..20: note = chemically synthesized
  source 1..20: mol_type = other DNA
gggaaaaggtgctcttgtta

SEQ ID NO: 17986 - DNA, 20 bp, synthetic construct
  misc_feature 1..20: note = chemically synthesized
  source 1..20: mol_type = other DNA
ggaaaaggtgctcttgttag

SEQ ID NO: 17987 - DNA, 20 bp, synthetic construct
  misc_feature 1..20: note = chemically synthesized
  source 1..20: mol_type = other DNA
aggtgctcttgttagaggcg

SEQ ID NO: 17988 - DNA, 20 bp, synthetic construct
  misc_feature 1..20: note = chemically synthesized
  source 1..20: mol_type = other DNA
gttagaggcgcagcctttcc

SEQ ID NO: 17989 - DNA, 20 bp, synthetic construct
  misc_feature 1..20: note = chemically synthesized
  source 1..20: mol_type = other DNA
ttagaggcgcagcctttcct

SEQ ID NO: 17990 - DNA, 20 bp, synthetic construct
  misc_feature 1..20: note = chemically synthesized
  source 1..20: mol_type = other DNA
gaggcgcagcctttcctggg

SEQ ID NO: 17991 - DNA, 20 bp, synthetic construct
  misc_feature 1..20: note = chemically synthesized
  source 1..20: mol_type = other DNA
aggcgcagcctttcctgggc

SEQ ID NO: 17992 - DNA, 20 bp, synthetic construct
  misc_feature 1..20: note = chemically synthesized
  source 1..20: mol_type = other DNA
agcctttcctgggcaggacc

SEQ ID NO: 17993 - DNA, 20 bp, synthetic construct
  misc_feature 1..20: note = chemically synthesized
  source 1..20: mol_type = other DNA
gcctttcctgggcaggaccc

SEQ ID NO: 17994 - DNA, 20 bp, synthetic construct
  misc_feature 1..20: note = chemically synthesized
  source 1..20: mol_type = other DNA
tgggcaggacccaggaccga

SEQ ID NO: 17995 - DNA, 20 bp, synthetic construct
  misc_feature 1..20: note = chemically synthesized
  source 1..20: mol_type = other DNA
cgatggcaaacccatgtgtt

SEQ ID NO: 17996 - DNA, 20 bp, synthetic construct
  misc_feature 1..20: note = chemically synthesized
  source 1..20: mol_type = other DNA
gatggcaaacccatgtgttt

SEQ ID NO: 17997 - DNA, 20 bp, synthetic construct
  misc_feature 1..20: note = chemically synthesized
  source 1..20: mol_type = other DNA
tctcgattttcttatcttct

SEQ ID NO: 17998 - DNA, 20 bp, synthetic construct
  misc_feature 1..20: note = chemically synthesized
  source 1..20: mol_type = other DNA
tggcctcttcctgtgttttt

SEQ ID NO: 17999 - DNA, 20 bp, synthetic construct
  misc_feature 1..20: note = chemically synthesized
  source 1..20: mol_type = other DNA
atgcattcatatatgaatgt

SEQ ID NO: 18000 - DNA, 20 bp, synthetic construct
  misc_feature 1..20: note = chemically synthesized
  source 1..20: mol_type = other DNA
attcatatatgaatgttggc

SEQ ID NO: 18001 - DNA, 20 bp, synthetic construct
  misc_feature 1..20: note = chemically synthesized
  source 1..20: mol_type = other DNA
catatatgaatgttggcaag

SEQ ID NO: 18002 - DNA, 20 bp, synthetic construct
  misc_feature 1..20: note = chemically synthesized
  source 1..20: mol_type = other DNA
atatatgaatgttggcaagc

SEQ ID NO: 18003 - DNA, 20 bp, synthetic construct
  misc_feature 1..20: note = chemically synthesized
  source 1..20: mol_type = other DNA
atatgaatgttggcaagcag

SEQ ID NO: 18004 - DNA, 20 bp, synthetic construct
  misc_feature 1..20: note = chemically synthesized
  source 1..20: mol_type = other DNA
caataacttcctgacatttt

SEQ ID NO: 18005 - DNA, 20 bp, synthetic construct
  misc_feature 1..20: note = chemically synthesized
  source 1..20: mol_type = other DNA
tttttagctcttttaatgtg

SEQ ID NO: 18006 - DNA, 20 bp, synthetic construct
  misc_feature 1..20: note = chemically synthesized
  source 1..20: mol_type = other DNA
agtctttgccctcctgccac

SEQ ID NO: 18007 - DNA, 20 bp, synthetic construct
  misc_feature 1..20: note = chemically synthesized
  source 1..20: mol_type = other DNA
ctttgccctcctgccacaag

SEQ ID NO: 18008 - DNA, 20 bp, synthetic construct
  misc_feature 1..20: note = chemically synthesized
  source 1..20: mol_type = other DNA
ccctcctgccacaagtggcg

SEQ ID NO: 18009 - DNA, 20 bp, synthetic construct
  misc_feature 1..20: note = chemically synthesized
  source 1..20: mol_type = other DNA
tgaatttccctgttactaac

SEQ ID NO: 18010 - DNA, 20 bp, synthetic construct
  misc_feature 1..20: note = chemically synthesized
  source 1..20: mol_type = other DNA
atttccctgttactaactgg

SEQ ID NO: 18011 - DNA, 20 bp, synthetic construct
  misc_feature 1..20: note = chemically synthesized
  source 1..20: mol_type = other DNA
tttccctgttactaactggc

SEQ ID NO: 18012 - DNA, 20 bp, synthetic construct
  misc_feature 1..20: note = chemically synthesized
  source 1..20: mol_type = other DNA
tccctgttactaactggcag

SEQ ID NO: 18013 - DNA, 20 bp, synthetic construct
  misc_feature 1..20: note = chemically synthesized
  source 1..20: mol_type = other DNA
ccctgttactaactggcagg

SEQ ID NO: 18014 - DNA, 20 bp, synthetic construct
  misc_feature 1..20: note = chemically synthesized
  source 1..20: mol_type = other DNA
aactggcaggaggcatgttc

SEQ ID NO: 18015 - DNA, 20 bp, synthetic construct
  misc_feature 1..20: note = chemically synthesized
  source 1..20: mol_type = other DNA
aggcatgttctagttcccac

SEQ ID NO: 18016 - DNA, 20 bp, synthetic construct
  misc_feature 1..20: note = chemically synthesized
  source 1..20: mol_type = other DNA
gcatgttctagttcccacca

SEQ ID NO: 18017 - DNA, 20 bp, synthetic construct
  misc_feature 1..20: note = chemically synthesized
  source 1..20: mol_type = other DNA
catgttctagttcccaccag

SEQ ID NO: 18018 - DNA, 20 bp, synthetic construct
  misc_feature 1..20: note = chemically synthesized
  source 1..20: mol_type = other DNA
tgttctagttcccaccagag

SEQ ID NO: 18019 - DNA, 20 bp, synthetic construct
  misc_feature 1..20: note = chemically synthesized
  source 1..20: mol_type = other DNA
gttcccaccagaggagctgc

SEQ ID NO: 18020 - DNA, 20 bp, synthetic construct
  misc_feature 1..20: note = chemically synthesized
  source 1..20: mol_type = other DNA
ttcccaccagaggagctgct

SEQ ID NO: 18021 - DNA, 20 bp, synthetic construct
  misc_feature 1..20: note = chemically synthesized
  source 1..20: mol_type = other DNA
tcccaccagaggagctgctg

SEQ ID NO: 18022 - DNA, 20 bp, synthetic construct
  misc_feature 1..20: note = chemically synthesized
  source 1..20: mol_type = other DNA
cagaggagctgctggggcta

SEQ ID NO: 18023 - DNA, 20 bp, synthetic construct
  misc_feature 1..20: note = chemically synthesized
  source 1..20: mol_type = other DNA
ggagctgctggggctaaagc

SEQ ID NO: 18024 - DNA, 20 bp, synthetic construct
  misc_feature 1..20: note = chemically synthesized
  source 1..20: mol_type = other DNA
gagctgctggggctaaagct

SEQ ID NO: 18025 - DNA, 20 bp, synthetic construct
  misc_feature 1..20: note = chemically synthesized
  source 1..20: mol_type = other DNA
tggggctaaagctgggttca

SEQ ID NO: 18026 - DNA, 20 bp, synthetic construct
  misc_feature 1..20: note = chemically synthesized
  source 1..20: mol_type = other DNA
tgggttcatagaatcccacc

SEQ ID NO: 18027 - DNA, 20 bp, synthetic construct
  misc_feature 1..20: note = chemically synthesized
  source 1..20: mol_type = other DNA
gggttcatagaatcccacct

SEQ ID NO: 18028 - DNA, 20 bp, synthetic construct
  misc_feature 1..20: note = chemically synthesized
  source 1..20: mol_type = other DNA
ggttcatagaatcccaccta

SEQ ID NO: 18029 - DNA, 20 bp, synthetic construct
  misc_feature 1..20: note = chemically synthesized
  source 1..20: mol_type = other DNA
gttcatagaatcccacctag

SEQ ID NO: 18030 - DNA, 20 bp, synthetic construct
  misc_feature 1..20: note = chemically synthesized
  source 1..20: mol_type = other DNA
gaatcccacctaggggacac

SEQ ID NO: 18031 - DNA, 20 bp, synthetic construct
  misc_feature 1..20: note = chemically synthesized
  source 1..20: mol_type = other DNA
aatcccacctaggggacacc

SEQ ID NO: 18032 - DNA, 20 bp, synthetic construct
  misc_feature 1..20: note = chemically synthesized
  source 1..20: mol_type = other DNA
atcccacctaggggacacca

SEQ ID NO: 18033 - DNA, 20 bp, synthetic construct
  misc_feature 1..20: note = chemically synthesized
  source 1..20: mol_type = other DNA
taggggacaccagggctttc

SEQ ID NO: 18034 - DNA, 20 bp, synthetic construct
  misc_feature 1..20: note = chemically synthesized
  source 1..20: mol_type = other DNA
gggacaccagggctttcaag

SEQ ID NO: 18035 - DNA, 20 bp, synthetic construct
  misc_feature 1..20: note = chemically synthesized
  source 1..20: mol_type = other DNA
accagggctttcaagtggtt

SEQ ID NO: 18036 - DNA, 20 bp, synthetic construct
  misc_feature 1..20: note = chemically synthesized
  source 1..20: mol_type = other DNA
ccagggctttcaagtggttt

SEQ ID NO: 18037 - DNA, 20 bp, synthetic construct
  misc_feature 1..20: note = chemically synthesized
  source 1..20: mol_type = other DNA
cagggctttcaagtggtttg

SEQ ID NO: 18038 - DNA, 20 bp, synthetic construct
  misc_feature 1..20: note = chemically synthesized
  source 1..20: mol_type = other DNA
aaaaaatatttttcccatca

SEQ ID NO: 18039 - DNA, 20 bp, synthetic construct
  misc_feature 1..20: note = chemically synthesized
  source 1..20: mol_type = other DNA
tttcccatcatagacttgaa

SEQ ID NO: 18040 - DNA, 20 bp, synthetic construct
  misc_feature 1..20: note = chemically synthesized
  source 1..20: mol_type = other DNA
ttcccatcatagacttgaaa

SEQ ID NO: 18041 - DNA, 20 bp, synthetic construct
  misc_feature 1..20: note = chemically synthesized
  source 1..20: mol_type = other DNA
aaaatcacatttacttcccc

SEQ ID NO: 18042 - DNA, 20 bp, synthetic construct
  misc_feature 1..20: note = chemically synthesized
  source 1..20: mol_type = other DNA
tcacatttacttcccctggc

SEQ ID NO: 18043 - DNA, 20 bp, synthetic construct
  misc_feature 1..20: note = chemically synthesized
  source 1..20: mol_type = other DNA
cacatttacttcccctggct

SEQ ID NO: 18044 - DNA, 20 bp, synthetic construct
  misc_feature 1..20: note = chemically synthesized
  source 1..20: mol_type = other DNA
ttcccctggctaggcctcat

SEQ ID NO: 18045 - DNA, 20 bp, synthetic construct
  misc_feature 1..20: note = chemically synthesized
  source 1..20: mol_type = other DNA
tcccctggctaggcctcata

SEQ ID NO: 18046 - DNA, 20 bp, synthetic construct
  misc_feature 1..20: note = chemically synthesized
  source 1..20: mol_type = other DNA
cccctggctaggcctcataa

SEQ ID NO: 18047 - DNA, 20 bp, synthetic construct
  misc_feature 1..20: note = chemically synthesized
  source 1..20: mol_type = other DNA
cctggctaggcctcataagg

SEQ ID NO: 18048 - DNA, 20 bp, synthetic construct
  misc_feature 1..20: note = chemically synthesized
  source 1..20: mol_type = other DNA
ctggctaggcctcataaggg

SEQ ID NO: 18049 - DNA, 20 bp, synthetic construct
  misc_feature 1..20: note = chemically synthesized
  source 1..20: mol_type = other DNA
gctaggcctcataagggagg

SEQ ID NO: 18050 - DNA, 20 bp, synthetic construct
  misc_feature 1..20: note = chemically synthesized
  source 1..20: mol_type = other DNA
ctaggcctcataagggaggc

SEQ ID NO: 18051 - DNA, 20 bp, synthetic construct
  misc_feature 1..20: note = chemically synthesized
  source 1..20: mol_type = other DNA
aggatttccttctccttttc

SEQ ID NO: 18052 - DNA, 20 bp, synthetic construct
  misc_feature 1..20: note = chemically synthesized
  source 1..20: mol_type = other DNA
atttccttctccttttctag

SEQ ID NO: 18053 - DNA, 20 bp, synthetic construct
  misc_feature 1..20: note = chemically synthesized
  source 1..20: mol_type = other DNA
ttctagtagcaaataaaaac

SEQ ID NO: 18054 - DNA, 20 bp, synthetic construct
  misc_feature 1..20: note = chemically synthesized
  source 1..20: mol_type = other DNA
tctagtagcaaataaaaact

SEQ ID NO: 18055 - DNA, 20 bp, synthetic construct
  misc_feature 1..20: note = chemically synthesized
  source 1..20: mol_type = other DNA
aaataaaaactgggaaaatt

SEQ ID NO: 18056 - DNA, 20 bp, synthetic construct
  misc_feature 1..20: note = chemically synthesized
  source 1..20: mol_type = other DNA
aataaaaactgggaaaattt

SEQ ID NO: 18057 - DNA, 20 bp, synthetic construct
  misc_feature 1..20: note = chemically synthesized
  source 1..20: mol_type = other DNA
ataaaaactgggaaaatttg

SEQ ID NO: 18058 - DNA, 20 bp, synthetic construct
  misc_feature 1..20: note = chemically synthesized
  source 1..20: mol_type = other DNA
taaaaactgggaaaatttgg

SEQ ID NO: 18059 - DNA, 20 bp, synthetic construct
  misc_feature 1..20: note = chemically synthesized
  source 1..20: mol_type = other DNA
tgggaaaatttgggggcctc

SEQ ID NO: 18060 - DNA, 20 bp, synthetic construct
  misc_feature 1..20: note = chemically synthesized
  source 1..20: mol_type = other DNA
gggaaaatttgggggcctct

SEQ ID NO: 18061 - DNA, 20 bp, synthetic construct
  misc_feature 1..20: note = chemically synthesized
  source 1..20: mol_type = other DNA
gggcctctgggtttatccca

SEQ ID NO: 18062 - DNA, 20 bp, synthetic construct
  misc_feature 1..20: note = chemically synthesized
  source 1..20: mol_type = other DNA
cccgctcccgcccgccaact

SEQ ID NO: 18063 - DNA, 20 bp, synthetic construct
  misc_feature 1..20: note = chemically synthesized
  source 1..20: mol_type = other DNA
tcccgcccgccaactcagcc

SEQ ID NO: 18064 - DNA, 20 bp, synthetic construct
  misc_feature 1..20: note = chemically synthesized
  source 1..20: mol_type = other DNA
cgccaactcagccaagccct

SEQ ID NO: 18065 - DNA, 20 bp, synthetic construct
  misc_feature 1..20: note = chemically synthesized
  source 1..20: mol_type = other DNA
ccaactcagccaagccctta

SEQ ID NO: 18066 - DNA, 20 bp, synthetic construct
  misc_feature 1..20: note = chemically synthesized
  source 1..20: mol_type = other DNA
caactcagccaagcccttag

SEQ ID NO: 18067 - DNA, 20 bp, synthetic construct
  misc_feature 1..20: note = chemically synthesized
  source 1..20: mol_type = other DNA
ctcagccaagcccttagagg

SEQ ID NO: 18068 - DNA, 20 bp, synthetic construct
  misc_feature 1..20: note = chemically synthesized
  source 1..20: mol_type = other DNA
aggcagtcttctctcccacc

SEQ ID NO: 18069 - DNA, 20 bp, synthetic construct
  misc_feature 1..20: note = chemically synthesized
  source 1..20: mol_type = other DNA
cctagatgtctttgtaacct

SEQ ID NO: 18070 - DNA, 20 bp, synthetic construct
  misc_feature 1..20: note = chemically synthesized
  source 1..20: mol_type = other DNA
gatgtctttgtaacctgagc

SEQ ID NO: 18071 - DNA, 20 bp, synthetic construct
  misc_feature 1..20: note = chemically synthesized
  source 1..20: mol_type = other DNA
tctttgtaacctgagctggt

SEQ ID NO: 18072 - DNA, 20 bp, synthetic construct
  misc_feature 1..20: note = chemically synthesized
  source 1..20: mol_type = other DNA
tgtaacctgagctggtaaga

SEQ ID NO: 18073 - DNA, 20 bp, synthetic construct
  misc_feature 1..20: note = chemically synthesized
  source 1..20: mol_type = other DNA
gtaacctgagctggtaagaa

SEQ ID NO: 18074 - DNA, 20 bp, synthetic construct
  misc_feature 1..20: note = chemically synthesized
  source 1..20: mol_type = other DNA
taacctgagctggtaagaaa

SEQ ID NO: 18075 - DNA, 20 bp, synthetic construct
  misc_feature 1..20: note = chemically synthesized
  source 1..20: mol_type = other DNA
acctgagctggtaagaaagg

SEQ ID NO: 18076 - DNA, 20 bp, synthetic construct
  misc_feature 1..20: note = chemically synthesized
  source 1..20: mol_type = other DNA
cctgagctggtaagaaaggg

SEQ ID NO: 18077 - DNA, 20 bp, synthetic construct
  misc_feature 1..20: note = chemically synthesized
  source 1..20: mol_type = other DNA
tgagctggtaagaaagggag

SEQ ID NO: 18078 - DNA, 20 bp, synthetic construct
  misc_feature 1..20: note = chemically synthesized
  source 1..20: mol_type = other DNA
gagctggtaagaaagggagg

SEQ ID NO: 18079 - DNA, 20 bp, synthetic construct
  misc_feature 1..20: note = chemically synthesized
  source 1..20: mol_type = other DNA
agctggtaagaaagggagga

SEQ ID NO: 18080 - DNA, 20 bp, synthetic construct
  misc_feature 1..20: note = chemically synthesized
  source 1..20: mol_type = other DNA
ggtaagaaagggaggaggga

SEQ ID NO: 18081 - DNA, 20 bp, synthetic construct
  misc_feature 1..20: note = chemically synthesized
  source 1..20: mol_type = other DNA
agaaagggaggagggacaga

SEQ ID NO: 18082 - DNA, 20 bp, synthetic construct
  misc_feature 1..20: note = chemically synthesized
  source 1..20: mol_type = other DNA
aaagggaggagggacagaaa

SEQ ID NO: 18083 - DNA, 20 bp, synthetic construct
  misc_feature 1..20: note = chemically synthesized
  source 1..20: mol_type = other DNA
aagggaggagggacagaaag

SEQ ID NO: 18084 - DNA, 20 bp, synthetic construct
  misc_feature 1..20: note = chemically synthesized
  source 1..20: mol_type = other DNA
agggaggagggacagaaaga

SEQ ID NO: 18085 - DNA, 20 bp, synthetic construct
  misc_feature 1..20: note = chemically synthesized
  source 1..20: mol_type = other DNA
gggaggagggacagaaagag

SEQ ID NO: 18086 - DNA, 20 bp, synthetic construct
  misc_feature 1..20: note = chemically synthesized
  source 1..20: mol_type = other DNA
tttgattacacgaaataaaa

SEQ ID NO: 18087 - DNA, 20 bp, synthetic construct
  misc_feature 1..20: note = chemically synthesized
  source 1..20: mol_type = other DNA
ttacacgaaataaaatggtt

SEQ ID NO: 18088 - DNA, 20 bp, synthetic construct
  misc_feature 1..20: note = chemically synthesized
  source 1..20: mol_type = other DNA
tacacgaaataaaatggttt

SEQ ID NO: 18089 - DNA, 20 bp, synthetic construct
  misc_feature 1..20: note = chemically synthesized
  source 1..20: mol_type = other DNA
gaaataaaatggtttaggct

SEQ ID NO: 18090 - DNA, 20 bp, synthetic construct
  misc_feature 1..20: note = chemically synthesized
  source 1..20: mol_type = other DNA
aaataaaatggtttaggctg

SEQ ID NO: 18091 - DNA, 20 bp, synthetic construct
  misc_feature 1..20: note = chemically synthesized
  source 1..20: mol_type = other DNA
aataaaatggtttaggctga

SEQ ID NO: 18092 - DNA, 20 bp, synthetic construct
  misc_feature 1..20: note = chemically synthesized
  source 1..20: mol_type = other DNA
aatggtttaggctgagggta

SEQ ID NO: 18093 - DNA, 20 bp, synthetic construct
  misc_feature 1..20: note = chemically synthesized
  source 1..20: mol_type = other DNA
ggtttaggctgagggtaaag

SEQ ID NO: 18094 - DNA, 20 bp, synthetic construct
  misc_feature 1..20: note = chemically synthesized
  source 1..20: mol_type = other DNA
taaagaagtaataccatttc

SEQ ID NO: 18095 - DNA, 20 bp, synthetic construct
  misc_feature 1..20: note = chemically synthesized
  source 1..20: mol_type = other DNA
catttctagttgtgcaacct

SEQ ID NO: 18096 - DNA, 20 bp, synthetic construct
  misc_feature 1..20: note = chemically synthesized
  source 1..20: mol_type = other DNA
atttctagttgtgcaacctt

SEQ ID NO: 18097 - DNA, 20 bp, synthetic construct
  misc_feature 1..20: note = chemically synthesized
  source 1..20: mol_type = other DNA
tctagttgtgcaaccttggg

SEQ ID NO: 18098 - DNA, 20 bp, synthetic construct
  misc_feature 1..20: note = chemically synthesized
  source 1..20: mol_type = other DNA
ttgggcagatttcattccct

SEQ ID NO: 18099 - DNA, 20 bp, synthetic construct
  misc_feature 1..20: note = chemically synthesized
  source 1..20: mol_type = other DNA
ctccgcttcctcaatctgta

SEQ ID NO: 18100 - DNA, 20 bp, synthetic construct
  misc_feature 1..20: note = chemically synthesized
  source 1..20: mol_type = other DNA
cgcttcctcaatctgtaaag

SEQ ID NO: 18101 - DNA, 20 bp, synthetic construct
  misc_feature 1..20: note = chemically synthesized
  source 1..20: mol_type = other DNA
gcttcctcaatctgtaaagt

SEQ ID NO: 18102 - DNA, 20 bp, synthetic construct
  misc_feature 1..20: note = chemically synthesized
  source 1..20: mol_type = other DNA
cttcctcaatctgtaaagtg

SEQ ID NO: 18103 - DNA, 20 bp, synthetic construct
  misc_feature 1..20: note = chemically synthesized
  source 1..20: mol_type = other DNA
tcctcaatctgtaaagtggg

SEQ ID NO: 18104 - DNA, 20 bp, synthetic construct
  misc_feature 1..20: note = chemically synthesized
  source 1..20: mol_type = other DNA
ctgtaaagtggggagaatca

SEQ ID NO: 18105 - DNA, 20 bp, synthetic construct
  misc_feature 1..20: note = chemically synthesized
  source 1..20: mol_type = other DNA
tgtaaagtggggagaatcac

SEQ ID NO: 18106 - DNA, 20 bp, synthetic construct
  misc_feature 1..20: note = chemically synthesized
  source 1..20: mol_type = other DNA
gtaaagtggggagaatcacg

SEQ ID NO: 18107 - DNA, 20 bp, synthetic construct
  misc_feature 1..20: note = chemically synthesized
  source 1..20: mol_type = other DNA
gaatcacggggcttgcctca

SEQ ID NO: 18108 - DNA, 20 bp, synthetic construct
  misc_feature 1..20: note = chemically synthesized
  source 1..20: mol_type = other DNA
aatcacggggcttgcctcat

SEQ ID NO: 18109 - DNA, 20 bp, synthetic construct
  misc_feature 1..20: note = chemically synthesized
  source 1..20: mol_type = other DNA
atcacggggcttgcctcata

SEQ ID NO: 18110 - DNA, 20 bp, synthetic construct
  misc_feature 1..20: note = chemically synthesized
  source 1..20: mol_type = other DNA
gcttgcctcatagggccttt

SEQ ID NO: 18111 - DNA, 20 bp, synthetic construct
  misc_feature 1..20: note = chemically synthesized
  source 1..20: mol_type = other DNA
agggcctttgagcatcctat

SEQ ID NO: 18112 - DNA, 20 bp, synthetic construct
  misc_feature 1..20: note = chemically synthesized
  source 1..20: mol_type = other DNA
ggcctttgagcatcctatga

SEQ ID NO: 18113 - DNA, 20 bp, synthetic construct
  misc_feature 1..20: note = chemically synthesized
  source 1..20: mol_type = other DNA
gagcatcctatgagagcatg

SEQ ID NO: 18114 - DNA, 20 bp, synthetic construct
  misc_feature 1..20: note = chemically synthesized
  source 1..20: mol_type = other DNA
agcatcctatgagagcatgt

SEQ ID NO: 18115 - DNA, 20 bp, synthetic construct
  misc_feature 1..20: note = chemically synthesized
  source 1..20: mol_type = other DNA
gcatcctatgagagcatgtg

SEQ ID NO: 18116 - DNA, 20 bp, synthetic construct
  misc_feature 1..20: note = chemically synthesized
  source 1..20: mol_type = other DNA
catcctatgagagcatgtgg

SEQ ID NO: 18117 - DNA, 20 bp, synthetic construct
  misc_feature 1..20: note = chemically synthesized
  source 1..20: mol_type = other DNA
atgagagcatgtgggggcgc

SEQ ID NO: 18118 - DNA, 20 bp, synthetic construct
  misc_feature 1..20: note = chemically synthesized
  source 1..20: mol_type = other DNA
tgagagcatgtgggggcgct

SEQ ID NO: 18119 - DNA, 20 bp, synthetic construct
  misc_feature 1..20: note = chemically synthesized
  source 1..20: mol_type = other DNA
gcatgtgggggcgctgggct

SEQ ID NO: 18120 - DNA, 20 bp, synthetic construct
  misc_feature 1..20: note = chemically synthesized
  source 1..20: mol_type = other DNA
gggggcgctgggctcagtgc

SEQ ID NO: 18121 - DNA, 20 bp, synthetic construct
  misc_feature 1..20: note = chemically synthesized
  source 1..20: mol_type = other DNA
ggggcgctgggctcagtgct

SEQ ID NO: 18122 - DNA, 20 bp, synthetic construct
  misc_feature 1..20: note = chemically synthesized
  source 1..20: mol_type = other DNA
tgggctcagtgctgggcaca

SEQ ID NO: 18123 - DNA, 20 bp, synthetic construct
  misc_feature 1..20: note = chemically synthesized
  source 1..20: mol_type = other DNA
catggtaaaacatgtcacaa

SEQ ID NO: 18124 - DNA, 20 bp, synthetic construct
  misc_feature 1..20: note = chemically synthesized
  source 1..20: mol_type = other DNA
acaaaagctcattactatta

SEQ ID NO: 18125 - DNA, 20 bp, synthetic construct
  misc_feature 1..20: note = chemically synthesized
  source 1..20: mol_type = other DNA
actattacggttatgactca

SEQ ID NO: 18126 - DNA, 20 bp, synthetic construct
  misc_feature 1..20: note = chemically synthesized
  source 1..20: mol_type = other DNA
tacggttatgactcatggct

SEQ ID NO: 18127 - DNA, 20 bp, synthetic construct
  misc_feature 1..20: note = chemically synthesized
  source 1..20: mol_type = other DNA
ggcttggaactgtgtgctcc

SEQ ID NO: 18128 - DNA, 20 bp, synthetic construct
  misc_feature 1..20: note = chemically synthesized
  source 1..20: mol_type = other DNA
gcttggaactgtgtgctcct

SEQ ID NO: 18129 - DNA, 20 bp, synthetic construct
  misc_feature 1..20: note = chemically synthesized
  source 1..20: mol_type = other DNA
cttggaactgtgtgctcctg

SEQ ID NO: 18130 - DNA, 20 bp, synthetic construct
  misc_feature 1..20: note = chemically synthesized
  source 1..20: mol_type = other DNA
tgtgtgctcctggggtctca

SEQ ID NO: 18131 - DNA, 20 bp, synthetic construct
  misc_feature 1..20: note = chemically synthesized
  source 1..20: mol_type = other DNA
gtgctcctggggtctcaaag

SEQ ID NO: 18132 - DNA, 20 bp, synthetic construct
  misc_feature 1..20: note = chemically synthesized
  source 1..20: mol_type = other DNA
tcaaagtagttcccccatta

SEQ ID NO: 18133 - DNA, 20 bp, synthetic construct
  misc_feature 1..20: note = chemically synthesized
  source 1..20: mol_type = other DNA
caaagtagttcccccattat

SEQ ID NO: 18134 - DNA, 20 bp, synthetic construct
  misc_feature 1..20: note = chemically synthesized
  source 1..20: mol_type = other DNA
aaagtagttcccccattatg

SEQ ID NO: 18135 - DNA, 20 bp, synthetic construct
  misc_feature 1..20: note = chemically synthesized
  source 1..20: mol_type = other DNA
tagttcccccattatggggt

SEQ ID NO: 18136 - DNA, 20 bp, synthetic construct
  misc_feature 1..20: note = chemically synthesized
  source 1..20: mol_type = other DNA
ttcccccattatggggtgag

SEQ ID NO: 18137 - DNA, 20 bp, synthetic construct
  misc_feature 1..20: note = chemically synthesized
  source 1..20: mol_type = other DNA
tcccccattatggggtgagc

SEQ ID NO: 18138 - DNA, 20 bp, synthetic construct
  misc_feature 1..20: note = chemically synthesized
  source 1..20: mol_type = other DNA
ccattatggggtgagcaggt

SEQ ID NO: 18139 - DNA, 20 bp, synthetic construct
  misc_feature 1..20: note = chemically synthesized
  source 1..20: mol_type = other DNA
cattatggggtgagcaggtt

SEQ ID NO: 18140 - DNA, 20 bp, synthetic construct
  misc_feature 1..20: note = chemically synthesized
  source 1..20: mol_type = other DNA
tggggtgagcaggttgggat

SEQ ID NO: 18141 - DNA, 20 bp, synthetic construct
  misc_feature 1..20: note = chemically synthesized
  source 1..20: mol_type = other DNA
gggtgagcaggttgggatga

SEQ ID NO: 18142 - DNA, 20 bp, synthetic construct
  misc_feature 1..20: note = chemically synthesized
  source 1..20: mol_type = other DNA
tgagcaggttgggatgagag

SEQ ID NO: 18143 - DNA, 20 bp, synthetic construct
  misc_feature 1..20: note = chemically synthesized
  source 1..20: mol_type = other DNA
agcaggttgggatgagagaa

SEQ ID NO: 18144 - DNA, 20 bp, synthetic construct
  misc_feature 1..20: note = chemically synthesized
  source 1..20: mol_type = other DNA
aggttgggatgagagaagag

SEQ ID NO: 18145 - DNA, 20 bp, synthetic construct
  misc_feature 1..20: note = chemically synthesized
  source 1..20: mol_type = other DNA
ggttgggatgagagaagagc

SEQ ID NO: 18146 - DNA, 20 bp, synthetic construct
  misc_feature 1..20: note = chemically synthesized
  source 1..20: mol_type = other DNA
gttgggatgagagaagagca

SEQ ID NO: 18147 - DNA, 20 bp, synthetic construct
  misc_feature 1..20: note = chemically synthesized
  source 1..20: mol_type = other DNA
gggatgagagaagagcaggg

SEQ ID NO: 18148 - DNA, 20 bp, synthetic construct
  misc_feature 1..20: note = chemically synthesized
  source 1..20: mol_type = other DNA
ggatgagagaagagcagggc

SEQ ID NO: 18149 - DNA, 20 bp, synthetic construct
  misc_feature 1..20: note = chemically synthesized
  source 1..20: mol_type = other DNA
tgagagaagagcagggcagg

SEQ ID NO: 18150 - DNA, 20 bp, synthetic construct
  misc_feature 1..20: note = chemically synthesized
  source 1..20: mol_type = other DNA
gagagaagagcagggcaggt

SEQ ID NO: 18151 - DNA, 20 bp, synthetic construct
  misc_feature 1..20: note = chemically synthesized
  source 1..20: mol_type = other DNA
agagaagagcagggcaggtg

SEQ ID NO: 18152 - DNA, 20 bp, synthetic construct
  misc_feature 1..20: note = chemically synthesized
  source 1..20: mol_type = other DNA
gagaagagcagggcaggtgg

SEQ ID NO: 18153 - DNA, 20 bp, synthetic construct
  misc_feature 1..20: note = chemically synthesized
  source 1..20: mol_type = other DNA
gcagggcaggtgggggtcta

SEQ ID NO: 18154 - DNA, 20 bp, synthetic construct
  misc_feature 1..20: note = chemically synthesized
  source 1..20: mol_type = other DNA
agggcaggtgggggtctaaa

SEQ ID NO: 18155 - DNA, 20 bp, synthetic construct
  misc_feature 1..20: note = chemically synthesized
  source 1..20: mol_type = other DNA
aggtgggggtctaaagagct

SEQ ID NO: 18156 - DNA, 20 bp, synthetic construct
  misc_feature 1..20: note = chemically synthesized
  source 1..20: mol_type = other DNA
ggtgggggtctaaagagctc

SEQ ID NO: 18157 - DNA, 20 bp, synthetic construct
  misc_feature 1..20: note = chemically synthesized
  source 1..20: mol_type = other DNA
gtgggggtctaaagagctca

SEQ ID NO: 18158 - DNA, 20 bp, synthetic construct
  misc_feature 1..20: note = chemically synthesized
  source 1..20: mol_type = other DNA
tcagggtctcattatgtttc

SEQ ID NO: 18159 - DNA, 20 bp, synthetic construct
  misc_feature 1..20: note = chemically synthesized
  source 1..20: mol_type = other DNA
gggtctcattatgtttctgg

SEQ ID NO: 18160 - DNA, 20 bp, synthetic construct
  misc_feature 1..20: note = chemically synthesized
  source 1..20: mol_type = other DNA
tctcattatgtttctggtgg

SEQ ID NO: 18161 - DNA, 20 bp, synthetic construct
  misc_feature 1..20: note = chemically synthesized
  source 1..20: mol_type = other DNA
ttctggtggcagctccctcg

SEQ ID NO: 18162 - DNA, 20 bp, synthetic construct
  misc_feature 1..20: note = chemically synthesized
  source 1..20: mol_type = other DNA
tctggtggcagctccctcgt

SEQ ID NO: 18163 - DNA, 20 bp, synthetic construct
  misc_feature 1..20: note = chemically synthesized
  source 1..20: mol_type = other DNA
ggtggcagctccctcgtggg

SEQ ID NO: 18164 - DNA, 20 bp, synthetic construct
  misc_feature 1..20: note = chemically synthesized
  source 1..20: mol_type = other DNA
gtggcagctccctcgtgggt

SEQ ID NO: 18165 - DNA, 20 bp, synthetic construct
  misc_feature 1..20: note = chemically synthesized
  source 1..20: mol_type = other DNA
ggcagctccctcgtgggtgg

SEQ ID NO: 18166 - DNA, 20 bp, synthetic construct
  misc_feature 1..20: note = chemically synthesized
  source 1..20: mol_type = other DNA
gtgggagtcccctctcccca

SEQ ID NO: 18167 - DNA, 20 bp, synthetic construct
  misc_feature 1..20: note = chemically synthesized
  source 1..20: mol_type = other DNA
atagacgtgtgttgccttac

SEQ ID NO: 18168 - DNA, 20 bp, synthetic construct
  misc_feature 1..20: note = chemically synthesized
  source 1..20: mol_type = other DNA
agacgtgtgttgccttacga

SEQ ID NO: 18169 - DNA, 20 bp, synthetic construct
  misc_feature 1..20: note = chemically synthesized
  source 1..20: mol_type = other DNA
gacgtgtgttgccttacgag

SEQ ID NO: 18170 - DNA, 20 bp, synthetic construct
  misc_feature 1..20: note = chemically synthesized
  source 1..20: mol_type = other DNA
acgagaggcttgtgcctgcc

SEQ ID NO: 18171 - DNA, 20 bp, synthetic construct
  misc_feature 1..20: note = chemically synthesized
  source 1..20: mol_type = other DNA
cgagaggcttgtgcctgcct

SEQ ID NO: 18172 - DNA, 20 bp, synthetic construct
  misc_feature 1..20: note = chemically synthesized
  source 1..20: mol_type = other DNA
gcctgcctgggtgtgtgaca

SEQ ID NO: 18173 - DNA, 20 bp, synthetic construct
  misc_feature 1..20: note = chemically synthesized
  source 1..20: mol_type = other DNA
ggtgtgtgacacagttactc

SEQ ID NO: 18174 - DNA, 20 bp, synthetic construct
  misc_feature 1..20: note = chemically synthesized
  source 1..20: mol_type = other DNA
gtgtgtgacacagttactct

SEQ ID NO: 18175 - DNA, 20 bp, synthetic construct
  misc_feature 1..20: note = chemically synthesized
  source 1..20: mol_type = other DNA
tgacacagttactctgggtt

SEQ ID NO: 18176 - DNA, 20 bp, synthetic construct
  misc_feature 1..20: note = chemically synthesized
  source 1..20: mol_type = other DNA
tcagatttctatgttactgc

SEQ ID NO: 18177 - DNA, 20 bp, synthetic construct
  misc_feature 1..20: note = chemically synthesized
  source 1..20: mol_type = other DNA
atttctatgttactgctagc

SEQ ID NO: 18178 - DNA, 20 bp, synthetic construct
  misc_feature 1..20: note = chemically synthesized
  source 1..20: mol_type = other DNA
ctatgttactgctagctggt

SEQ ID NO: 18179 - DNA, 20 bp, synthetic construct
  misc_feature 1..20: note = chemically synthesized
  source 1..20: mol_type = other DNA
tatgttactgctagctggtt

SEQ ID NO: 18180 - DNA, 20 bp, synthetic construct
  misc_feature 1..20: note = chemically synthesized
  source 1..20: mol_type = other DNA
tgttactgctagctggttgg

SEQ ID NO: 18181 - DNA, 20 bp, synthetic construct
  misc_feature 1..20: note = chemically synthesized
  source 1..20: mol_type = other DNA
ttactgctagctggttggga

SEQ ID NO: 18182 - DNA, 20 bp, synthetic construct
  misc_feature 1..20: note = chemically synthesized
  source 1..20: mol_type = other DNA
ctagctggttgggagagtct

SEQ ID NO: 18183 - DNA, 20 bp, synthetic construct
  misc_feature 1..20: note = chemically synthesized
  source 1..20: mol_type = other DNA
tagctggttgggagagtctg

SEQ ID NO: 18184 - DNA, 20 bp, synthetic construct
  misc_feature 1..20: note = chemically synthesized
  source 1..20: mol_type = other DNA
agctggttgggagagtctga

SEQ ID NO: 18185 - DNA, 20 bp, synthetic construct
  misc_feature 1..20: note = chemically synthesized
  source 1..20: mol_type = other DNA
catttcacctctctgtgaaa

SEQ ID NO: 18186 - DNA, 20 bp, synthetic construct
  misc_feature 1..20: note = chemically synthesized
  source 1..20: mol_type = other DNA
tttcacctctctgtgaaatg

SEQ ID NO: 18187 - DNA, 20 bp, synthetic construct
  misc_feature 1..20: note = chemically synthesized
  source 1..20: mol_type = other DNA
ctgtgaaatggagataactc

SEQ ID NO: 18188 - DNA, 20 bp, synthetic construct
  misc_feature 1..20: note = chemically synthesized
  source 1..20: mol_type = other DNA
tgtgaaatggagataactca

SEQ ID NO: 18189 - DNA, 20 bp, synthetic construct
  misc_feature 1..20: note = chemically synthesized
  source 1..20: mol_type = other DNA
actcaaggtcccttacctca

SEQ ID NO: 18190 - DNA, 20 bp, synthetic construct
  misc_feature 1..20: note = chemically synthesized
  source 1..20: mol_type = other DNA
tcaaggtcccttacctcata

SEQ ID NO: 18191 - DNA, 20 bp, synthetic construct
  misc_feature 1..20: note = chemically synthesized
  source 1..20: mol_type = other DNA
ttacctcatagagtccatgt

SEQ ID NO: 18192 - DNA, 20 bp, synthetic construct
  misc_feature 1..20: note = chemically synthesized
  source 1..20: mol_type = other DNA
cctcatagagtccatgtgag

SEQ ID NO: 18193 - DNA, 20 bp, synthetic construct
  misc_feature 1..20: note = chemically synthesized
  source 1..20: mol_type = other DNA
agtccatgtgagaagtaaat

SEQ ID NO: 18194 - DNA, 20 bp, synthetic construct
  misc_feature 1..20: note = chemically synthesized
  source 1..20: mol_type = other DNA
gtccatgtgagaagtaaatg

SEQ ID NO: 18195 - DNA, 20 bp, synthetic construct
  misc_feature 1..20: note = chemically synthesized
  source 1..20: mol_type = other DNA
tccatgtgagaagtaaatga

SEQ ID NO: 18196 - DNA, 20 bp, synthetic construct
  misc_feature 1..20: note = chemically synthesized
  source 1..20: mol_type = other DNA
tgtgagaagtaaatgaggga

SEQ ID NO: 18197 - DNA, 20 bp, synthetic construct
  misc_feature 1..20: note = chemically synthesized
  source 1..20: mol_type = other DNA
gaagtaaatgagggaaagca

SEQ ID NO: 18198 - DNA, 20 bp, synthetic construct
  misc_feature 1..20: note = chemically synthesized
  source 1..20: mol_type = other DNA
agcacagacattactcgctc

SEQ ID NO: 18199 - DNA, 20 bp, synthetic construct
  misc_feature 1..20: note = chemically synthesized
  source 1..20: mol_type = other DNA
gcacagacattactcgctcc

SEQ ID NO: 18200 - DNA, 20 bp, synthetic construct
  misc_feature 1..20: note = chemically synthesized
  source 1..20: mol_type = other DNA
cacagacattactcgctccg

SEQ ID NO: 18201 - DNA, 20 bp, synthetic construct
  misc_feature 1..20: note = chemically synthesized
  source 1..20: mol_type = other DNA
acagacattactcgctccgg

SEQ ID NO: 18202 - DNA, 20 bp, synthetic construct
  misc_feature 1..20: note = chemically synthesized
  source 1..20: mol_type = other DNA
cgctccgggggctgcacctc

SEQ ID NO: 18203 - DNA, 20 bp, synthetic construct
  misc_feature 1..20: note = chemically synthesized
  source 1..20: mol_type = other DNA
attccatcccacaacaacct

SEQ ID NO: 18204 - DNA, 20 bp, synthetic construct
  misc_feature 1..20: note = chemically synthesized
  source 1..20: mol_type = other DNA
catcccacaacaacctcgga

SEQ ID NO: 18205 - DNA, 20 bp, synthetic construct
  misc_feature 1..20: note = chemically synthesized
  source 1..20: mol_type = other DNA
atcccacaacaacctcggaa

SEQ ID NO: 18206 - DNA, 20 bp, synthetic construct
  misc_feature 1..20: note = chemically synthesized
  source 1..20: mol_type = other DNA
cggaaaggaaacactcccat

SEQ ID NO: 18207 - DNA, 20 bp, synthetic construct
  misc_feature 1..20: note = chemically synthesized
  source 1..20: mol_type = other DNA
acactcccattagcctcatt

SEQ ID NO: 18208 - DNA, 20 bp, synthetic construct
  misc_feature 1..20: note = chemically synthesized
  source 1..20: mol_type = other DNA
ctcccattagcctcatttgg

SEQ ID NO: 18209 - DNA, 20 bp, synthetic construct
  misc_feature 1..20: note = chemically synthesized
  source 1..20: mol_type = other DNA
cccattagcctcatttggta

SEQ ID NO: 18210 - DNA, 20 bp, synthetic construct
  misc_feature 1..20: note = chemically synthesized
  source 1..20: mol_type = other DNA
ccattagcctcatttggtag

SEQ ID NO: 18211 - DNA, 20 bp, synthetic construct
  misc_feature 1..20: note = chemically synthesized
  source 1..20: mol_type = other DNA
attagcctcatttggtagag

SEQ ID NO: 18212 - DNA, 20 bp, synthetic construct
  misc_feature 1..20: note = chemically synthesized
  source 1..20: mol_type = other DNA
ttagcctcatttggtagagg

SEQ ID NO: 18213 - DNA, 20 bp, synthetic construct
  misc_feature 1..20: note = chemically synthesized
  source 1..20: mol_type = other DNA
catttggtagaggaggaaat

SEQ ID NO: 18214 - DNA, 20 bp, synthetic construct
  misc_feature 1..20: note = chemically synthesized
  source 1..20: mol_type = other DNA
atttggtagaggaggaaatt

SEQ ID NO: 18215 - DNA, 20 bp, synthetic construct
  misc_feature 1..20: note = chemically synthesized
  source 1..20: mol_type = other DNA
tttggtagaggaggaaattg

SEQ ID NO: 18216 - DNA, 20 bp, synthetic construct
  misc_feature 1..20: note = chemically synthesized
  source 1..20: mol_type = other DNA
ggaggaaattggggttcatc

SEQ ID NO: 18217 - DNA, 20 bp, synthetic construct
  misc_feature 1..20: note = chemically synthesized
  source 1..20: mol_type = other DNA
gaggaaattggggttcatca

SEQ ID NO: 18218 - DNA, 20 bp, synthetic construct
  misc_feature 1..20: note = chemically synthesized
  source 1..20: mol_type = other DNA
aggaaattggggttcatcaa

SEQ ID NO: 18219 - DNA, 20 bp, synthetic construct
  misc_feature 1..20: note = chemically synthesized
  source 1..20: mol_type = other DNA
aagggttaaatgacttccct

SEQ ID NO: 18220 - DNA, 20 bp, synthetic construct
  misc_feature 1..20: note = chemically synthesized
  source 1..20: mol_type = other DNA
agggttaaatgacttccctg

SEQ ID NO: 18221 - DNA, 20 bp, synthetic construct
  misc_feature 1..20: note = chemically synthesized
  source 1..20: mol_type = other DNA
gggttaaatgacttccctga

SEQ ID NO: 18222 - DNA, 20 bp, synthetic construct
  misc_feature 1..20: note = chemically synthesized
  source 1..20: mol_type = other DNA
atgacttccctgagggtcca

SEQ ID NO: 18223 - DNA, 20 bp, synthetic construct
  misc_feature 1..20: note = chemically synthesized
  source 1..20: mol_type = other DNA
tccacagttgttcaatcctt

SEQ ID NO: 18224 - DNA, 20 bp, synthetic construct
  misc_feature 1..20: note = chemically synthesized
  source 1..20: mol_type = other DNA
ttgttcaatcctttggcctg

SEQ ID NO: 18225 - DNA, 20 bp, synthetic construct
  misc_feature 1..20: note = chemically synthesized
  source 1..20: mol_type = other DNA
gccaccctctgctacctctt

SEQ ID NO: 18226 - DNA, 20 bp, synthetic construct
  misc_feature 1..20: note = chemically synthesized
  source 1..20: mol_type = other DNA
ctacctcttcagtacgtttg

SEQ ID NO: 18227 - DNA, 20 bp, synthetic construct
  misc_feature 1..20: note = chemically synthesized
  source 1..20: mol_type = other DNA
agtacgtttgcagctttctt

SEQ ID NO: 18228 - DNA, 20 bp, synthetic construct
  misc_feature 1..20: note = chemically synthesized
  source 1..20: mol_type = other DNA
acgtttgcagctttcttcag

SEQ ID NO: 18229 - DNA, 20 bp, synthetic construct
  misc_feature 1..20: note = chemically synthesized
  source 1..20: mol_type = other DNA
gcagctttcttcagcggtgc

SEQ ID NO: 18230 - DNA, 20 bp, synthetic construct
  misc_feature 1..20: note = chemically synthesized
  source 1..20: mol_type = other DNA
cagctttcttcagcggtgcc

SEQ ID NO: 18231 - DNA, 20 bp, synthetic construct
  misc_feature 1..20: note = chemically synthesized
  source 1..20: mol_type = other DNA
cagcggtgccaggcaacaac

SEQ ID NO: 18232 - DNA, 20 bp, synthetic construct
  misc_feature 1..20: note = chemically synthesized
  source 1..20: mol_type = other DNA
agcggtgccaggcaacaact

SEQ ID NO: 18233 - DNA, 20 bp, synthetic construct
  misc_feature 1..20: note = chemically synthesized
  source 1..20: mol_type = other DNA
ggtgccaggcaacaactggg

SEQ ID NO: 18234 - DNA, 20 bp, synthetic construct
  misc_feature 1..20: note = chemically synthesized
  source 1..20: mol_type = other DNA
gtgccaggcaacaactgggc

SEQ ID NO: 18235 - DNA, 20 bp, synthetic construct
  misc_feature 1..20: note = chemically synthesized
  source 1..20: mol_type = other DNA
ccaggcaacaactgggcagg

SEQ ID NO: 18236 - DNA, 20 bp, synthetic construct
  misc_feature 1..20: note = chemically synthesized
  source 1..20: mol_type = other DNA
aacaactgggcaggaagctc

SEQ ID NO: 18237 - DNA, 20 bp, synthetic construct
  misc_feature 1..20: note = chemically synthesized
  source 1..20: mol_type = other DNA
tgggcaggaagctctggtgc

SEQ ID NO: 18238 - DNA, 20 bp, synthetic construct
  misc_feature 1..20: note = chemically synthesized
  source 1..20: mol_type = other DNA
caggaagctctggtgctgga

SEQ ID NO: 18239 - DNA, 20 bp, synthetic construct
  misc_feature 1..20: note = chemically synthesized
  source 1..20: mol_type = other DNA
ctggacagttgtccctccca

SEQ ID NO: 18240 - DNA, 20 bp, synthetic construct
  misc_feature 1..20: note = chemically synthesized
  source 1..20: mol_type = other DNA
tggacagttgtccctcccat

SEQ ID NO: 18241 - DNA, 20 bp, synthetic construct
  misc_feature 1..20: note = chemically synthesized
  source 1..20: mol_type = other DNA
tgtccctcccatgggttctg

SEQ ID NO: 18242 - DNA, 20 bp, synthetic construct
  misc_feature 1..20: note = chemically synthesized
  source 1..20: mol_type = other DNA
ctcccatgggttctgtggtc

SEQ ID NO: 18243 - DNA, 20 bp, synthetic construct
  misc_feature 1..20: note = chemically synthesized
  source 1..20: mol_type = other DNA
ggtcaagtttttcaatcttc

SEQ ID NO: 18244 - DNA, 20 bp, synthetic construct
  misc_feature 1..20: note = chemically synthesized
  source 1..20: mol_type = other DNA
gtcaagtttttcaatcttct

SEQ ID NO: 18245 - DNA, 20 bp, synthetic construct
  misc_feature 1..20: note = chemically synthesized
  source 1..20: mol_type = other DNA
agtttttcaatcttctggga

SEQ ID NO: 18246 - DNA, 20 bp, synthetic construct
  misc_feature 1..20: note = chemically synthesized
  source 1..20: mol_type = other DNA
tttttcaatcttctgggaaa

SEQ ID NO: 18247 - DNA, 20 bp, synthetic construct
  misc_feature 1..20: note = chemically synthesized
  source 1..20: mol_type = other DNA
ttcaatcttctgggaaagag

SEQ ID NO: 18248 - DNA, 20 bp, synthetic construct
  misc_feature 1..20: note = chemically synthesized
  source 1..20: mol_type = other DNA
aagagaagaatgttcccctc

SEQ ID NO: 18249 - DNA, 20 bp, synthetic construct
  misc_feature 1..20: note = chemically synthesized
  source 1..20: mol_type = other DNA
agaatgttcccctccagttc

SEQ ID NO: 18250 - DNA, 20 bp, synthetic construct
  misc_feature 1..20: note = chemically synthesized
  source 1..20: mol_type = other DNA
gaatgttcccctccagttct

SEQ ID NO: 18251 - DNA, 20 bp, synthetic construct
  misc_feature 1..20: note = chemically synthesized
  source 1..20: mol_type = other DNA
ctccagttctgggcatattg

SEQ ID NO: 18252 - DNA, 20 bp, synthetic construct
  misc_feature 1..20: note = chemically synthesized
  source 1..20: mol_type = other DNA
tccagttctgggcatattga

SEQ ID NO: 18253 - DNA, 20 bp, synthetic construct
  misc_feature 1..20: note = chemically synthesized
  source 1..20: mol_type = other DNA
cagttctgggcatattgaag

SEQ ID NO: 18254 - DNA, 20 bp, synthetic construct
  misc_feature 1..20: note = chemically synthesized
  source 1..20: mol_type = other DNA
ctgggcatattgaaggagca

SEQ ID NO: 18255 - DNA, 20 bp, synthetic construct
  misc_feature 1..20: note = chemically synthesized
  source 1..20: mol_type = other DNA
gggcatattgaaggagcacg

SEQ ID NO: 18256 - DNA, 20 bp, synthetic construct
  misc_feature 1..20: note = chemically synthesized
  source 1..20: mol_type = other DNA
ttgaaggagcacggagctgt

SEQ ID NO: 18257 - DNA, 20 bp, synthetic construct
  misc_feature 1..20: note = chemically synthesized
  source 1..20: mol_type = other DNA
tgaaggagcacggagctgtt

SEQ ID NO: 18258 - DNA, 20 bp, synthetic construct
  misc_feature 1..20: note = chemically synthesized
  source 1..20: mol_type = other DNA
gagcacggagctgttgggaa

SEQ ID NO: 18259 - DNA, 20 bp, synthetic construct
  misc_feature 1..20: note = chemically synthesized
  source 1..20: mol_type = other DNA
gttgggaaaagttgcaatgt

SEQ ID NO: 18260 - DNA, 20 bp, synthetic construct
  misc_feature 1..20: note = chemically synthesized
  source 1..20: mol_type = other DNA
ttgggaaaagttgcaatgta

SEQ ID NO: 18261 - DNA, 20 bp, synthetic construct
  misc_feature 1..20: note = chemically synthesized
  source 1..20: mol_type = other DNA
tgtaaggaatcctgctttgc

SEQ ID NO: 18262 - DNA, 20 bp, synthetic construct
  misc_feature 1..20: note = chemically synthesized
  source 1..20: mol_type = other DNA
aaggaatcctgctttgcaag

SEQ ID NO: 18263 - DNA, 20 bp, synthetic construct
  misc_feature 1..20: note = chemically synthesized
  source 1..20: mol_type = other DNA
tagtcatttccccatctgtc

SEQ ID NO: 18264 - DNA, 20 bp, synthetic construct
  misc_feature 1..20: note = chemically synthesized
  source 1..20: mol_type = other DNA
tttccccatctgtccagaat

SEQ ID NO: 18265 - DNA, 20 bp, synthetic construct
  misc_feature 1..20: note = chemically synthesized
  source 1..20: mol_type = other DNA
tccagaatgagcctgaaatc

SEQ ID NO: 18266 - DNA, 20 bp, synthetic construct
  misc_feature 1..20: note = chemically synthesized
  source 1..20: mol_type = other DNA
gaatgagcctgaaatcaagt

SEQ ID NO: 18267 - DNA, 20 bp, synthetic construct
  misc_feature 1..20: note = chemically synthesized
  source 1..20: mol_type = other DNA
aatgagcctgaaatcaagtg

SEQ ID NO: 18268 - DNA, 20 bp, synthetic construct
  misc_feature 1..20: note = chemically synthesized
  source 1..20: mol_type = other DNA
atgagcctgaaatcaagtga

SEQ ID NO: 18269 - DNA, 20 bp, synthetic construct
  misc_feature 1..20: note = chemically synthesized
  source 1..20: mol_type = other DNA
tgaaatcaagtgagggtcct

SEQ ID NO: 18270 - DNA, 20 bp, synthetic construct
  misc_feature 1..20: note = chemically synthesized
  source 1..20: mol_type = other DNA
caagtgagggtcctgagaaa

SEQ ID NO: 18271 - DNA, 20 bp, synthetic construct
  misc_feature 1..20: note = chemically synthesized
  source 1..20: mol_type = other DNA
agtgagggtcctgagaaaca

SEQ ID NO: 18272 - DNA, 20 bp, synthetic construct
  misc_feature 1..20: note = chemically synthesized
  source 1..20: mol_type = other DNA
gtgagggtcctgagaaacag

SEQ ID NO: 18273 - DNA, 20 bp, synthetic construct
  misc_feature 1..20: note = chemically synthesized
  source 1..20: mol_type = other DNA
tgagggtcctgagaaacaga

SEQ ID NO: 18274 - DNA, 20 bp, synthetic construct
  misc_feature 1..20: note = chemically synthesized
  source 1..20: mol_type = other DNA
agggtcctgagaaacagagg

SEQ ID NO: 18275 - DNA, 20 bp, synthetic construct
  misc_feature 1..20: note = chemically synthesized
  source 1..20: mol_type = other DNA
gggtcctgagaaacagaggg

SEQ ID NO: 18276 - DNA, 20 bp, synthetic construct
  misc_feature 1..20: note = chemically synthesized
  source 1..20: mol_type = other DNA
gtcctgagaaacagagggag

SEQ ID NO: 18277 - DNA, 20 bp, synthetic construct
  misc_feature 1..20: note = chemically synthesized
  source 1..20: mol_type = other DNA
tcctgagaaacagagggagg

SEQ ID NO: 18278 - DNA, 20 bp, synthetic construct
  misc_feature 1..20: note = chemically synthesized
  source 1..20: mol_type = other DNA
gaggttttactgtttgtgtg

SEQ ID NO: 18279 - DNA, 20 bp, synthetic construct
  misc_feature 1..20: note = chemically synthesized
  source 1..20: mol_type = other DNA
tttactgtttgtgtgtggct

SEQ ID NO: 18280 - DNA, 20 bp, synthetic construct
  misc_feature 1..20: note = chemically synthesized
  source 1..20: mol_type = other DNA
ctgtttgtgtgtggcttggt

SEQ ID NO: 18281 - DNA, 20 bp, synthetic construct
  misc_feature 1..20: note = chemically synthesized
  source 1..20: mol_type = other DNA
tgtttgtgtgtggcttggtc

SEQ ID NO: 18282 - DNA, 20 bp, synthetic construct
  misc_feature 1..20: note = chemically synthesized
  source 1..20: mol_type = other DNA
tttgtgtgtggcttggtcag

SEQ ID NO: 18283 - DNA, 20 bp, synthetic construct
  misc_feature 1..20: note = chemically synthesized
  source 1..20: mol_type = other DNA
gtggcttggtcaggagactg

SEQ ID NO: 18284 - DNA, 20 bp, synthetic construct
  misc_feature 1..20: note = chemically synthesized
  source 1..20: mol_type = other DNA
gcttggtcaggagactgcag

SEQ ID NO: 18285 - DNA, 20 bp, synthetic construct
  misc_feature 1..20: note = chemically synthesized
  source 1..20: mol_type = other DNA
cttggtcaggagactgcagt

SEQ ID NO: 18286 - DNA, 20 bp, synthetic construct
  misc_feature 1..20: note = chemically synthesized
  source 1..20: mol_type = other DNA
gagactgcagtgggctgaat

SEQ ID NO: 18287 - DNA, 20 bp, synthetic construct
  misc_feature 1..20: note = chemically synthesized
  source 1..20: mol_type = other DNA
agtgggctgaatgagaaact

SEQ ID NO: 18288 - DNA, 20 bp, synthetic construct
  misc_feature 1..20: note = chemically synthesized
  source 1..20: mol_type = other DNA
gctgaatgagaaactaagct

SEQ ID NO: 18289 - DNA, 20 bp, synthetic construct
  misc_feature 1..20: note = chemically synthesized
  source 1..20: mol_type = other DNA
gaaactaagctcggactttt

SEQ ID NO: 18290 - DNA, 20 bp, synthetic construct
  misc_feature 1..20: note = chemically synthesized
  source 1..20: mol_type = other DNA
actaagctcggacttttaag

SEQ ID NO: 18291 - DNA, 20 bp, synthetic construct
  misc_feature 1..20: note = chemically synthesized
  source 1..20: mol_type = other DNA
aagctcggacttttaagaag

SEQ ID NO: 18292 - DNA, 20 bp, synthetic construct
  misc_feature 1..20: note = chemically synthesized
  source 1..20: mol_type = other DNA
tcggacttttaagaagtggt

SEQ ID NO: 18293 - DNA, 20 bp, synthetic construct
  misc_feature 1..20: note = chemically synthesized
  source 1..20: mol_type = other DNA
cggacttttaagaagtggtg

SEQ ID NO: 18294 - DNA, 20 bp, synthetic construct
  misc_feature 1..20: note = chemically synthesized
  source 1..20: mol_type = other DNA
ttttaagaagtggtgaggct

SEQ ID NO: 18295 - DNA, 20 bp, synthetic construct
  misc_feature 1..20: note = chemically synthesized
  source 1..20: mol_type = other DNA
aagtggtgaggcttggcctg

SEQ ID NO: 18296 - DNA, 20 bp, synthetic construct
  misc_feature 1..20: note = chemically synthesized
  source 1..20: mol_type = other DNA
tggtgaggcttggcctgcag

SEQ ID NO: 18297 - DNA, 20 bp, synthetic construct
  misc_feature 1..20: note = chemically synthesized
  source 1..20: mol_type = other DNA
agttctgtgtgttgtctctg

SEQ ID NO: 18298 - DNA, 20 bp, synthetic construct
  misc_feature 1..20: note = chemically synthesized
  source 1..20: mol_type = other DNA
tctctgtggcatttacttct

SEQ ID NO: 18299 - DNA, 20 bp, synthetic construct
  misc_feature 1..20: note = chemically synthesized
  source 1..20: mol_type = other DNA
cttctcggatcgtaccttca

SEQ ID NO: 18300 - DNA, 20 bp, synthetic construct
  misc_feature 1..20: note = chemically synthesized
  source 1..20: mol_type = other DNA
ttctcggatcgtaccttcaa

SEQ ID NO: 18301 - DNA, 20 bp, synthetic construct
  misc_feature 1..20: note = chemically synthesized
  source 1..20: mol_type = other DNA
cggatcgtaccttcaaaggc

SEQ ID NO: 18302 - DNA, 20 bp, synthetic construct
  misc_feature 1..20: note = chemically synthesized
  source 1..20: mol_type = other DNA
ggatcgtaccttcaaaggct

SEQ ID NO: 18303 - DNA, 20 bp, synthetic construct
  misc_feature 1..20: note = chemically synthesized
  source 1..20: mol_type = other DNA
gatcgtaccttcaaaggctg

SEQ ID NO: 18304 - DNA, 20 bp, synthetic construct
  misc_feature 1..20: note = chemically synthesized
  source 1..20: mol_type = other DNA
tcgtaccttcaaaggctggg

SEQ ID NO: 18305 - DNA, 20 bp, synthetic construct
  misc_feature 1..20: note = chemically synthesized
  source 1..20: mol_type = other DNA
cttcaaaggctggggagaat

SEQ ID NO: 18306 - DNA, 20 bp, synthetic construct
  misc_feature 1..20: note = chemically synthesized
  source 1..20: mol_type = other DNA
tggggagaatcagaattata

SEQ ID NO: 18307 - DNA, 20 bp, synthetic construct
  misc_feature 1..20: note = chemically synthesized
  source 1..20: mol_type = other DNA
ggggagaatcagaattatac

SEQ ID NO: 18308 - DNA, 20 bp, synthetic construct
  misc_feature 1..20: note = chemically synthesized
  source 1..20: mol_type = other DNA
gggagaatcagaattataca

SEQ ID NO: 18309 - DNA, 20 bp, synthetic construct
  misc_feature 1..20: note = chemically synthesized
  source 1..20: mol_type = other DNA
gagaatcagaattatacagg

SEQ ID NO: 18310 - DNA, 20 bp, synthetic construct
  misc_feature 1..20: note = chemically synthesized
  source 1..20: mol_type = other DNA
agaatcagaattatacaggg

SEQ ID NO: 18311 - DNA, 20 bp, synthetic construct
  misc_feature 1..20: note = chemically synthesized
  source 1..20: mol_type = other DNA
gaatcagaattatacaggga

SEQ ID NO: 18312 - DNA, 20 bp, synthetic construct
  misc_feature 1..20: note = chemically synthesized
  source 1..20: mol_type = other DNA
atcagaattatacagggagg

SEQ ID NO: 18313 - DNA, 20 bp, synthetic construct
  misc_feature 1..20: note = chemically synthesized
  source 1..20: mol_type = other DNA
cagaattatacagggaggga

SEQ ID NO: 18314 - DNA, 20 bp, synthetic construct
  misc_feature 1..20: note = chemically synthesized
  source 1..20: mol_type = other DNA
tatacagggagggagagact

SEQ ID NO: 18315 - DNA, 20 bp, synthetic construct
  misc_feature 1..20: note = chemically synthesized
  source 1..20: mol_type = other DNA
gggagggagagactgagtgt

SEQ ID NO: 18316 - DNA, 20 bp, synthetic construct
  misc_feature 1..20: note = chemically synthesized
  source 1..20: mol_type = other DNA
gggagagactgagtgtgagt

SEQ ID NO: 18317 - DNA, 20 bp, synthetic construct
  misc_feature 1..20: note = chemically synthesized
  source 1..20: mol_type = other DNA
tgagtgtgagtgagtgtgcg

SEQ ID NO: 18318 - DNA, 20 bp, synthetic construct
  misc_feature 1..20: note = chemically synthesized
  source 1..20: mol_type = other DNA
gtgtgagtgagtgtgcgtgg

SEQ ID NO: 18319 - DNA, 20 bp, synthetic construct
  misc_feature 1..20: note = chemically synthesized
  source 1..20: mol_type = other DNA
tgagtgagtgtgcgtggcag

SEQ ID NO: 18320 - DNA, 20 bp, synthetic construct
  misc_feature 1..20: note = chemically synthesized
  source 1..20: mol_type = other DNA
tgcgtggcagtggtgtttct

SEQ ID NO: 18321 - DNA, 20 bp, synthetic construct
  misc_feature 1..20: note = chemically synthesized
  source 1..20: mol_type = other DNA
gcgtggcagtggtgtttctt

SEQ ID NO: 18322 - DNA, 20 bp, synthetic construct
  misc_feature 1..20: note = chemically synthesized
  source 1..20: mol_type = other DNA
agtggtgtttcttaggacga

SEQ ID NO: 18323 - DNA, 20 bp, synthetic construct
  misc_feature 1..20: note = chemically synthesized
  source 1..20: mol_type = other DNA
gtggtgtttcttaggacgat

SEQ ID NO: 18324 - DNA, 20 bp, synthetic construct
  misc_feature 1..20: note = chemically synthesized
  source 1..20: mol_type = other DNA
tttcttaggacgatgggttc

SEQ ID NO: 18325 - DNA, 20 bp, synthetic construct
  misc_feature 1..20: note = chemically synthesized
  source 1..20: mol_type = other DNA
ttcttaggacgatgggttct

SEQ ID NO: 18326 - DNA, 20 bp, synthetic construct
  misc_feature 1..20: note = chemically synthesized
  source 1..20: mol_type = other DNA
tcttaggacgatgggttctg

SEQ ID NO: 18327 - DNA, 20 bp, synthetic construct
  misc_feature 1..20: note = chemically synthesized
  source 1..20: mol_type = other DNA
cttaggacgatgggttctgg

SEQ ID NO: 18328 - DNA, 20 bp, synthetic construct
  misc_feature 1..20: note = chemically synthesized
  source 1..20: mol_type = other DNA
ttaggacgatgggttctggg

SEQ ID NO: 18329 - DNA, 20 bp, synthetic construct
  misc_feature 1..20: note = chemically synthesized
  source 1..20: mol_type = other DNA
ggggggtcataatctgcttc

SEQ ID NO: 18330 - DNA, 20 bp, synthetic construct
  misc_feature 1..20: note = chemically synthesized
  source 1..20: mol_type = other DNA
gggggtcataatctgcttcg

SEQ ID NO: 18331 - DNA, 20 bp, synthetic construct
  misc_feature 1..20: note = chemically synthesized
  source 1..20: mol_type = other DNA
gggtcataatctgcttcgag

SEQ ID NO: 18332 - DNA, 20 bp, synthetic construct
  misc_feature 1..20: note = chemically synthesized
  source 1..20: mol_type = other DNA
ggtcataatctgcttcgagg

SEQ ID NO: 18333 - DNA, 20 bp, synthetic construct
  misc_feature 1..20: note = chemically synthesized
  source 1..20: mol_type = other DNA
ttcgaggaggttttcatttc

SEQ ID NO: 18334 - DNA, 20 bp, synthetic construct
  misc_feature 1..20: note = chemically synthesized
  source 1..20: mol_type = other DNA
gttttcatttctggctgaac

SEQ ID NO: 18335 - DNA, 20 bp, synthetic construct
  misc_feature 1..20: note = chemically synthesized
  source 1..20: mol_type = other DNA
ttttcatttctggctgaaca

SEQ ID NO: 18336 - DNA, 20 bp, synthetic construct
  misc_feature 1..20: note = chemically synthesized
  source 1..20: mol_type = other DNA
tttctggctgaacaaggctg

SEQ ID NO: 18337 - DNA, 20 bp, synthetic construct
  misc_feature 1..20: note = chemically synthesized
  source 1..20: mol_type = other DNA
tggctgaacaaggctgtggt

SEQ ID NO: 18338 - DNA, 20 bp, synthetic construct
  misc_feature 1..20: note = chemically synthesized
  source 1..20: mol_type = other DNA
ggctgaacaaggctgtggta

SEQ ID NO: 18339 - DNA, 20 bp, synthetic construct
  misc_feature 1..20: note = chemically synthesized
  source 1..20: mol_type = other DNA
gaacaaggctgtggtaaggc

SEQ ID NO: 18340 - DNA, 20 bp, synthetic construct
  misc_feature 1..20: note = chemically synthesized
  source 1..20: mol_type = other DNA
aggctgtggtaaggcaagtc

SEQ ID NO: 18341 - DNA, 20 bp, synthetic construct
  misc_feature 1..20: note = chemically synthesized
  source 1..20: mol_type = other DNA
ctgtggtaaggcaagtccgg

SEQ ID NO: 18342 - DNA, 20 bp, synthetic construct
  misc_feature 1..20: note = chemically synthesized
  source 1..20: mol_type = other DNA
tgtggtaaggcaagtccgga

SEQ ID NO: 18343 - DNA, 20 bp, synthetic construct
  misc_feature 1..20: note = chemically synthesized
  source 1..20: mol_type = other DNA
ggcaagtccggaaggcatgc

SEQ ID NO: 18344 - DNA, 20 bp, synthetic construct
  misc_feature 1..20: note = chemically synthesized
  source 1..20: mol_type = other DNA
ggaaggcatgctggaaactt

SEQ ID NO: 18345 - DNA, 20 bp, synthetic construct
  misc_feature 1..20: note = chemically synthesized
  source 1..20: mol_type = other DNA
gaaggcatgctggaaacttg

SEQ ID NO: 18346 - DNA, 20 bp, synthetic construct
  misc_feature 1..20: note = chemically synthesized
  source 1..20: mol_type = other DNA
aaggcatgctggaaacttga

SEQ ID NO: 18347 - DNA, 20 bp, synthetic construct
  misc_feature 1..20: note = chemically synthesized
  source 1..20: mol_type = other DNA
gcatgctggaaacttgaggg

SEQ ID NO: 18348 - DNA, 20 bp, synthetic construct
  misc_feature 1..20: note = chemically synthesized
  source 1..20: mol_type = other DNA
aacttgagggaagttttgaa

SEQ ID NO: 18349 - DNA, 20 bp, synthetic construct
  misc_feature 1..20: note = chemically synthesized
  source 1..20: mol_type = other DNA
gaagttttgaatggaaactg

SEQ ID NO: 18350 - DNA, 20 bp, synthetic construct
  misc_feature 1..20: note = chemically synthesized
  source 1..20: mol_type = other DNA
tgaatggaaactgcagtcaa

SEQ ID NO: 18351 - DNA, 20 bp, synthetic construct
  misc_feature 1..20: note = chemically synthesized
  source 1..20: mol_type = other DNA
agctccatatgatccgcatg

SEQ ID NO: 18352 - DNA, 20 bp, synthetic construct
  misc_feature 1..20: note = chemically synthesized
  source 1..20: mol_type = other DNA
tgatccgcatgtggcttccc

SEQ ID NO: 18353 - DNA, 20 bp, synthetic construct
  misc_feature 1..20: note = chemically synthesized
  source 1..20: mol_type = other DNA
atccgcatgtggcttcccca

SEQ ID NO: 18354 - DNA, 20 bp, synthetic construct
  misc_feature 1..20: note = chemically synthesized
  source 1..20: mol_type = other DNA
tccgcatgtggcttccccag

SEQ ID NO: 18355 - DNA, 20 bp, synthetic construct
  misc_feature 1..20: note = chemically synthesized
  source 1..20: mol_type = other DNA
catgtggcttccccagaggc

SEQ ID NO: 18356 - DNA, 20 bp, synthetic construct
  misc_feature 1..20: note = chemically synthesized
  source 1..20: mol_type = other DNA
cttccccagaggcaagtttt

SEQ ID NO: 18357 - DNA, 20 bp, synthetic construct
  misc_feature 1..20: note = chemically synthesized
  source 1..20: mol_type = other DNA
gaggcaagttttcagctgcg

SEQ ID NO: 18358 - DNA, 20 bp, synthetic construct
  misc_feature 1..20: note = chemically synthesized
  source 1..20: mol_type = other DNA
gcaagttttcagctgcgtgg

SEQ ID NO: 18359 - DNA, 20 bp, synthetic construct
  misc_feature 1..20: note = chemically synthesized
  source 1..20: mol_type = other DNA
agctgcgtggtggcctctcc

SEQ ID NO: 18360 - DNA, 20 bp, synthetic construct
  misc_feature 1..20: note = chemically synthesized
  source 1..20: mol_type = other DNA
ggcctctcccagtcactcca

SEQ ID NO: 18361 - DNA, 20 bp, synthetic construct
  misc_feature 1..20: note = chemically synthesized
  source 1..20: mol_type = other DNA
gcctctcccagtcactccac

SEQ ID NO: 18362 - DNA, 20 bp, synthetic construct
  misc_feature 1..20: note = chemically synthesized
  source 1..20: mol_type = other DNA
gacgctattaatatttgctg

SEQ ID NO: 18363 - DNA, 20 bp, synthetic construct
  misc_feature 1..20: note = chemically synthesized
  source 1..20: mol_type = other DNA
ctattaatatttgctgaagc

SEQ ID NO: 18364 - DNA, 20 bp, synthetic construct
  misc_feature 1..20: note = chemically synthesized
  source 1..20: mol_type = other DNA
tatttgctgaagcaagacct

SEQ ID NO: 18365 - DNA, 20 bp, synthetic construct
  misc_feature 1..20: note = chemically synthesized
  source 1..20: mol_type = other DNA
atttgctgaagcaagacctg

SEQ ID NO: 18366 - DNA, 20 bp, synthetic construct
  misc_feature 1..20: note = chemically synthesized
  source 1..20: mol_type = other DNA
gcaagacctgaggttcgttg

SEQ ID NO: 18367 - DNA, 20 bp, synthetic construct
  misc_feature 1..20: note = chemically synthesized
  source 1..20: mol_type = other DNA
gacctgaggttcgttgcaga

SEQ ID NO: 18368 - DNA, 20 bp, synthetic construct
  misc_feature 1..20: note = chemically synthesized
  source 1..20: mol_type = other DNA
tattctccatcctttcaaat

SEQ ID NO: 18369 - DNA, 20 bp, synthetic construct
  misc_feature 1..20: note = chemically synthesized
  source 1..20: mol_type = other DNA
ctccatcctttcaaattggc

SEQ ID NO: 18370 - DNA, 20 bp, synthetic construct
  misc_feature 1..20: note = chemically synthesized
  source 1..20: mol_type = other DNA
tccatcctttcaaattggcc

SEQ ID NO: 18371 - DNA, 20 bp, synthetic construct
  misc_feature 1..20: note = chemically synthesized
  source 1..20: mol_type = other DNA
tcaaattggccaggctaaca

SEQ ID NO: 18372 - DNA, 20 bp, synthetic construct
  misc_feature 1..20: note = chemically synthesized
  source 1..20: mol_type = other DNA
ggctaacatagacctccact

SEQ ID NO: 18373 - DNA, 20 bp, synthetic construct
  misc_feature 1..20: note = chemically synthesized
  source 1..20: mol_type = other DNA
ctaacatagacctccactga

SEQ ID NO: 18374 - DNA, 20 bp, synthetic construct
  misc_feature 1..20: note = chemically synthesized
  source 1..20: mol_type = other DNA
gacctccactgagagaattt

SEQ ID NO: 18375 - DNA, 20 bp, synthetic construct
  misc_feature 1..20: note = chemically synthesized
  source 1..20: mol_type = other DNA
gagagaatttcagaatcatt

SEQ ID NO: 18376 - DNA, 20 bp, synthetic construct
  misc_feature 1..20: note = chemically synthesized
  source 1..20: mol_type = other DNA
agaatttcagaatcatttgg

SEQ ID NO: 18377 - DNA, 20 bp, synthetic construct
  misc_feature 1..20: note = chemically synthesized
  source 1..20: mol_type = other DNA
ttcagaatcatttggtagtt

SEQ ID NO: 18378 - DNA, 20 bp, synthetic construct
  misc_feature 1..20: note = chemically synthesized
  source 1..20: mol_type = other DNA
agaatcatttggtagttgag

SEQ ID NO: 18379 - DNA, 20 bp, synthetic construct
  misc_feature 1..20: note = chemically synthesized
  source 1..20: mol_type = other DNA
tgagaagcgcctacttcatg

SEQ ID NO: 18380 - DNA, 20 bp, synthetic construct
  misc_feature 1..20: note = chemically synthesized
  source 1..20: mol_type = other DNA
agaagcgcctacttcatgcg

SEQ ID NO: 18381 - DNA, 20 bp, synthetic construct
  misc_feature 1..20: note = chemically synthesized
  source 1..20: mol_type = other DNA
gaagcgcctacttcatgcgg

SEQ ID NO: 18382 - DNA, 20 bp, synthetic construct
  misc_feature 1..20: note = chemically synthesized
  source 1..20: mol_type = other DNA
tacttcatgcggaggccccg

SEQ ID NO: 18383 - DNA, 20 bp, synthetic construct
  misc_feature 1..20: note = chemically synthesized
  source 1..20: mol_type = other DNA
acttcatgcggaggccccgt

SEQ ID NO: 18384 - DNA, 20 bp, synthetic construct
  misc_feature 1..20: note = chemically synthesized
  source 1..20: mol_type = other DNA
ttcatgcggaggccccgtgg

SEQ ID NO: 18385 - DNA, 20 bp, synthetic construct
  misc_feature 1..20: note = chemically synthesized
  source 1..20: mol_type = other DNA
tcatgcggaggccccgtggg

SEQ ID NO: 18386 - DNA, 20 bp, synthetic construct
  misc_feature 1..20: note = chemically synthesized
  source 1..20: mol_type = other DNA
atgcggaggccccgtgggag

SEQ ID NO: 18387 - DNA, 20 bp, synthetic construct
  misc_feature 1..20: note = chemically synthesized
  source 1..20: mol_type = other DNA
cggaggccccgtgggaggag

SEQ ID NO: 18388 - DNA, 20 bp, synthetic construct
  misc_feature 1..20: note = chemically synthesized
  source 1..20: mol_type = other DNA
aggccccgtgggaggagtgg

SEQ ID NO: 18389 - DNA, 20 bp, synthetic construct
  misc_feature 1..20: note = chemically synthesized
  source 1..20: mol_type = other DNA
gccccgtgggaggagtggaa

SEQ ID NO: 18390 - DNA, 20 bp, synthetic construct
  misc_feature 1..20: note = chemically synthesized
  source 1..20: mol_type = other DNA
cgtgggaggagtggaagagt

SEQ ID NO: 18391 - DNA, 20 bp, synthetic construct
  misc_feature 1..20: note = chemically synthesized
  source 1..20: mol_type = other DNA
aggagtggaagagttggcct

SEQ ID NO: 18392 - DNA, 20 bp, synthetic construct
  misc_feature 1..20: note = chemically synthesized
  source 1..20: mol_type = other DNA
ggaagagttggcctcagcac

SEQ ID NO: 18393 - DNA, 20 bp, synthetic construct
  misc_feature 1..20: note = chemically synthesized
  source 1..20: mol_type = other DNA
gagttggcctcagcactggc

SEQ ID NO: 18394 - DNA, 20 bp, synthetic construct
  misc_feature 1..20: note = chemically synthesized
  source 1..20: mol_type = other DNA
gcctcagcactggcgagtat

SEQ ID NO: 18395 - DNA, 20 bp, synthetic construct
  misc_feature 1..20: note = chemically synthesized
  source 1..20: mol_type = other DNA
cagcactggcgagtatcgga

SEQ ID NO: 18396 - DNA, 20 bp, synthetic construct
  misc_feature 1..20: note = chemically synthesized
  source 1..20: mol_type = other DNA
agcactggcgagtatcggat

SEQ ID NO: 18397 - DNA, 20 bp, synthetic construct
  misc_feature 1..20: note = chemically synthesized
  source 1..20: mol_type = other DNA
cactggcgagtatcggatgg

SEQ ID NO: 18398 - DNA, 20 bp, synthetic construct
  misc_feature 1..20: note = chemically synthesized
  source 1..20: mol_type = other DNA
ggatgggagctctgctcact

SEQ ID NO: 18399 - DNA, 20 bp, synthetic construct
  misc_feature 1..20: note = chemically synthesized
  source 1..20: mol_type = other DNA
gggagctctgctcacttggt

SEQ ID NO: 18400 - DNA, 20 bp, synthetic construct
  misc_feature 1..20: note = chemically synthesized
  source 1..20: mol_type = other DNA
cacttggtaagtccttctgc

SEQ ID NO: 18401 - DNA, 20 bp, synthetic construct
  misc_feature 1..20: note = chemically synthesized
  source 1..20: mol_type = other DNA
taagtccttctgctagaacc

SEQ ID NO: 18402 - DNA, 20 bp, synthetic construct
  misc_feature 1..20: note = chemically synthesized
  source 1..20: mol_type = other DNA
aagtccttctgctagaacca

SEQ ID NO: 18403 - DNA, 20 bp, synthetic construct
  misc_feature 1..20: note = chemically synthesized
  source 1..20: mol_type = other DNA
agtccttctgctagaaccaa

SEQ ID NO: 18404 - DNA, 20 bp, synthetic construct
  misc_feature 1..20: note = chemically synthesized
  source 1..20: mol_type = other DNA
tccttctgctagaaccaagg

SEQ ID NO: 18405 - DNA, 20 bp, synthetic construct
  misc_feature 1..20: note = chemically synthesized
  source 1..20: mol_type = other DNA
ccttctgctagaaccaaggg

SEQ ID NO: 18406 - DNA, 20 bp, synthetic construct
  misc_feature 1..20: note = chemically synthesized
  source 1..20: mol_type = other DNA
tagaaccaagggaggctgtt

SEQ ID NO: 18407 - DNA, 20 bp, synthetic construct
  misc_feature 1..20: note = chemically synthesized
  source 1..20: mol_type = other DNA
ggctgttcagatccatcaca

SEQ ID NO: 18408 - DNA, 20 bp, synthetic construct
  misc_feature 1..20: note = chemically synthesized
  source 1..20: mol_type = other DNA
tgttcagatccatcacaaag

SEQ ID NO: 18409 - DNA, 20 bp, synthetic construct
  misc_feature 1..20: note = chemically synthesized
  source 1..20: mol_type = other DNA
atccatcacaaagaagttgt

SEQ ID NO: 18410 - DNA, 20 bp, synthetic construct
  misc_feature 1..20: note = chemically synthesized
  source 1..20: mol_type = other DNA
aagaagttgtcggtcacatc

SEQ ID NO: 18411 - DNA, 20 bp, synthetic construct
  misc_feature 1..20: note = chemically synthesized
  source 1..20: mol_type = other DNA
agaagttgtcggtcacatcc

SEQ ID NO: 18412 - DNA, 20 bp, synthetic construct
  misc_feature 1..20: note = chemically synthesized
  source 1..20: mol_type = other DNA
tcacatccaggttgtcttct

SEQ ID NO: 18413 - DNA, 20 bp, synthetic construct
  misc_feature 1..20: note = chemically synthesized
  source 1..20: mol_type = other DNA
ccaggttgtcttctgagttt

SEQ ID NO: 18414 - DNA, 20 bp, synthetic construct
  misc_feature 1..20: note = chemically synthesized
  source 1..20: mol_type = other DNA
caggttgtcttctgagtttg

SEQ ID NO: 18415 - DNA, 20 bp, synthetic construct
  misc_feature 1..20: note = chemically synthesized
  source 1..20: mol_type = other DNA
gttgtcttctgagtttgagg

SEQ ID NO: 18416 - DNA, 20 bp, synthetic construct
  misc_feature 1..20: note = chemically synthesized
  source 1..20: mol_type = other DNA
ttgtcttctgagtttgaggt

SEQ ID NO: 18417 - DNA, 20 bp, synthetic construct
  misc_feature 1..20: note = chemically synthesized
  source 1..20: mol_type = other DNA
cttctgagtttgaggtggga

SEQ ID NO: 18418 - DNA, 20 bp, synthetic construct
  misc_feature 1..20: note = chemically synthesized
  source 1..20: mol_type = other DNA
tctgagtttgaggtgggatg

SEQ ID NO: 18419 - DNA, 20 bp, synthetic construct
  misc_feature 1..20: note = chemically synthesized
  source 1..20: mol_type = other DNA
ctgagtttgaggtgggatgg

SEQ ID NO: 18420 - DNA, 20 bp, synthetic construct
  misc_feature 1..20: note = chemically synthesized
  source 1..20: mol_type = other DNA
agtttgaggtgggatggagg

SEQ ID NO: 18421 - DNA, 20 bp, synthetic construct
  misc_feature 1..20: note = chemically synthesized
  source 1..20: mol_type = other DNA
gtgggatggaggtggctgct

SEQ ID NO: 18422 - DNA, 20 bp, synthetic construct
  misc_feature 1..20: note = chemically synthesized
  source 1..20: mol_type = other DNA
gtggctgctgagaatccatg

SEQ ID NO: 18423 - DNA, 20 bp, synthetic construct
  misc_feature 1..20: note = chemically synthesized
  source 1..20: mol_type = other DNA
tggctgctgagaatccatgt

SEQ ID NO: 18424 - DNA, 20 bp, synthetic construct
  misc_feature 1..20: note = chemically synthesized
  source 1..20: mol_type = other DNA
gctgagaatccatgtgggtc

SEQ ID NO: 18425 - DNA, 20 bp, synthetic construct
  misc_feature 1..20: note = chemically synthesized
  source 1..20: mol_type = other DNA
tgagaatccatgtgggtcaa

SEQ ID NO: 18426 - DNA, 20 bp, synthetic construct
  misc_feature 1..20: note = chemically synthesized
  source 1..20: mol_type = other DNA
catgtgggtcaagagctcca

SEQ ID NO: 18427 - DNA, 20 bp, synthetic construct
  misc_feature 1..20: note = chemically synthesized
  source 1..20: mol_type = other DNA
ttttacttcgcactctgtcc

SEQ ID NO: 18428 - DNA, 20 bp, synthetic construct
  misc_feature 1..20: note = chemically synthesized
  source 1..20: mol_type = other DNA
tttacttcgcactctgtccc

SEQ ID NO: 18429 - DNA, 20 bp, synthetic construct
  misc_feature 1..20: note = chemically synthesized
  source 1..20: mol_type = other DNA
ttacttcgcactctgtcccg

SEQ ID NO: 18430 - DNA, 20 bp, synthetic construct
  misc_feature 1..20: note = chemically synthesized
  source 1..20: mol_type = other DNA
tcgcactctgtcccggggca

SEQ ID NO: 18431 - DNA, 20 bp, synthetic construct
  misc_feature 1..20: note = chemically synthesized
  source 1..20: mol_type = other DNA
cggggcatggacgtcctcaa

SEQ ID NO: 18432 - DNA, 20 bp, synthetic construct
  misc_feature 1..20: note = chemically synthesized
  source 1..20: mol_type = other DNA
gggcatggacgtcctcaatg

SEQ ID NO: 18433 - DNA, 20 bp, synthetic construct
  misc_feature 1..20: note = chemically synthesized
  source 1..20: mol_type = other DNA
ggcatggacgtcctcaatgg

SEQ ID NO: 18434 - DNA, 20 bp, synthetic construct
  misc_feature 1..20: note = chemically synthesized
  source 1..20: mol_type = other DNA
gtcctcaatggaggtcatgc

SEQ ID NO: 18435 - DNA, 20 bp, synthetic construct
  misc_feature 1..20: note = chemically synthesized
  source 1..20: mol_type = other DNA
ttccccctcaccccttctct

SEQ ID NO: 18436 - DNA, 20 bp, synthetic construct
  misc_feature 1..20: note = chemically synthesized
  source 1..20: mol_type = other DNA
tcattgtctctacataccct

SEQ ID NO: 18437 - DNA, 20 bp, synthetic construct
  misc_feature 1..20: note = chemically synthesized
  source 1..20: mol_type = other DNA
cattgtctctacataccctt

SEQ ID NO: 18438 - DNA, 20 bp, synthetic construct
  misc_feature 1..20: note = chemically synthesized
  source 1..20: mol_type = other DNA
tctctacatacccttgggtc

SEQ ID NO: 18439 - DNA, 20 bp, synthetic construct
  misc_feature 1..20: note = chemically synthesized
  source 1..20: mol_type = other DNA
tctacatacccttgggtcaa

SEQ ID NO: 18440 - DNA, 20 bp, synthetic construct
  misc_feature 1..20: note = chemically synthesized
  source 1..20: mol_type = other DNA
atacccttgggtcaagagtg

SEQ ID NO: 18441 - DNA, 20 bp, synthetic construct
  misc_feature 1..20: note = chemically synthesized
  source 1..20: mol_type = other DNA
cccttgggtcaagagtgtag

SEQ ID NO: 18442 - DNA, 20 bp, synthetic construct
  misc_feature 1..20: note = chemically synthesized
  source 1..20: mol_type = other DNA
gtggttctcccttgtcaccc

SEQ ID NO: 18443 - DNA, 20 bp, synthetic construct
  misc_feature 1..20: note = chemically synthesized
  source 1..20: mol_type = other DNA
gttctcccttgtcaccctgg

SEQ ID NO: 18444 - DNA, 20 bp, synthetic construct
  misc_feature 1..20: note = chemically synthesized
  source 1..20: mol_type = other DNA
tctcccttgtcaccctggaa

SEQ ID NO: 18445 - DNA, 20 bp, synthetic construct
  misc_feature 1..20: note = chemically synthesized
  source 1..20: mol_type = other DNA
cccttgtcaccctggaagag

SEQ ID NO: 18446 - DNA, 20 bp, synthetic construct
  misc_feature 1..20: note = chemically synthesized
  source 1..20: mol_type = other DNA
caccctggaagagaagctct

SEQ ID NO: 18447 - DNA, 20 bp, synthetic construct
  misc_feature 1..20: note = chemically synthesized
  source 1..20: mol_type = other DNA
aagctcttagttttatttgc

SEQ ID NO: 18448 - DNA, 20 bp, synthetic construct
  misc_feature 1..20: note = chemically synthesized
  source 1..20: mol_type = other DNA
agctcttagttttatttgct

SEQ ID NO: 18449 - DNA, 20 bp, synthetic construct
  misc_feature 1..20: note = chemically synthesized
  source 1..20: mol_type = other DNA
gttttatttgctgggtctcc

SEQ ID NO: 18450 - DNA, 20 bp, synthetic construct
  misc_feature 1..20: note = chemically synthesized
  source 1..20: mol_type = other DNA
tctcctagactgaaatgata

SEQ ID NO: 18451 - DNA, 20 bp, synthetic construct
  misc_feature 1..20: note = chemically synthesized
  source 1..20: mol_type = other DNA
tgataaagctgaaatgataa

SEQ ID NO: 18452 - DNA, 20 bp, synthetic construct
  misc_feature 1..20: note = chemically synthesized
  source 1..20: mol_type = other DNA
gataaagctgaaatgataaa

SEQ ID NO: 18453 - DNA, 20 bp, synthetic construct
  misc_feature 1..20: note = chemically synthesized
  source 1..20: mol_type = other DNA
aaatgataaaaggcgtatca

SEQ ID NO: 18454 - DNA, 20 bp, synthetic construct
  misc_feature 1..20: note = chemically synthesized
  source 1..20: mol_type = other DNA
taaaaggcgtatcatggctt

SEQ ID NO: 18455 - DNA, 20 bp, synthetic construct
  misc_feature 1..20: note = chemically synthesized
  source 1..20: mol_type = other DNA
tttccctcgctcgcaccccc

SEQ ID NO: 18456 - DNA, 20 bp, synthetic construct
  misc_feature 1..20: note = chemically synthesized
  source 1..20: mol_type = other DNA
ccttctcttcccttgaaaat

SEQ ID NO: 18457 - DNA, 20 bp, synthetic construct
  misc_feature 1..20: note = chemically synthesized
  source 1..20: mol_type = other DNA
ccttgaaaatcagtgaaaat

SEQ ID NO: 18458 - DNA, 20 bp, synthetic construct
  misc_feature 1..20: note = chemically synthesized
  source 1..20: mol_type = other DNA
cttgaaaatcagtgaaaatc

SEQ ID NO: 18459 - DNA, 20 bp, synthetic construct
  misc_feature 1..20: note = chemically synthesized
  source 1..20: mol_type = other DNA
tcaggccacatctctgatga

SEQ ID NO: 18460 - DNA, 20 bp, synthetic construct
  misc_feature 1..20: note = chemically synthesized
  source 1..20: mol_type = other DNA
ttttctgtttctgccttcgt

SEQ ID NO: 18461 - DNA, 20 bp, synthetic construct
  misc_feature 1..20: note = chemically synthesized
  source 1..20: mol_type = other DNA
tttctgtttctgccttcgtt

SEQ ID NO: 18462 - DNA, 20 bp, synthetic construct
  misc_feature 1..20: note = chemically synthesized
  source 1..20: mol_type = other DNA
tgtttctgccttcgttaggt

SEQ ID NO: 18463 - DNA, 20 bp, synthetic construct
  misc_feature 1..20: note = chemically synthesized
  source 1..20: mol_type = other DNA
aagcacaaatttgatgtccc

SEQ ID NO: 18464 - DNA, 20 bp, synthetic construct
  misc_feature 1..20: note = chemically synthesized
  source 1..20: mol_type = other DNA
gcacaaatttgatgtcccaa

SEQ ID NO: 18465 - DNA, 20 bp, synthetic construct
  misc_feature 1..20: note = chemically synthesized
  source 1..20: mol_type = other DNA
cacaaatttgatgtcccaag

SEQ ID NO: 18466 - DNA, 20 bp, synthetic construct
  misc_feature 1..20: note = chemically synthesized
  source 1..20: mol_type = other DNA
aaatttgatgtcccaagagg

SEQ ID NO: 18467 - DNA, 20 bp, synthetic construct
  misc_feature 1..20: note = chemically synthesized
  source 1..20: mol_type = other DNA
aatttgatgtcccaagaggc

SEQ ID NO: 18468 - DNA, 20 bp, synthetic construct
  misc_feature 1..20: note = chemically synthesized
  source 1..20: mol_type = other DNA
tgatgtcccaagaggcaggc

SEQ ID NO: 18469 - DNA, 20 bp, synthetic construct
  misc_feature 1..20: note = chemically synthesized
  source 1..20: mol_type = other DNA
gaggcaggccggtgaccctt

SEQ ID NO: 18470 - DNA, 20 bp, synthetic construct
  misc_feature 1..20: note = chemically synthesized
  source 1..20: mol_type = other DNA
aggcaggccggtgacccttc

SEQ ID NO: 18471 - DNA, 20 bp, synthetic construct
  misc_feature 1..20: note = chemically synthesized
  source 1..20: mol_type = other DNA
ggccggtgacccttcaggcc

SEQ ID NO: 18472 - DNA, 20 bp, synthetic construct
  misc_feature 1..20: note = chemically synthesized
  source 1..20: mol_type = other DNA
gacccttcaggccaagtgcc

SEQ ID NO: 18473 - DNA, 20 bp, synthetic construct
  misc_feature 1..20: note = chemically synthesized
  source 1..20: mol_type = other DNA
tcaggccaagtgcctggatg

SEQ ID NO: 18474 - DNA, 20 bp, synthetic construct
  misc_feature 1..20: note = chemically synthesized
  source 1..20: mol_type = other DNA
ccaagtgcctggatgtggca

SEQ ID NO: 18475 - DNA, 20 bp, synthetic construct
  misc_feature 1..20: note = chemically synthesized
  source 1..20: mol_type = other DNA
aagctacaataaatatcgaa

SEQ ID NO: 18476 - DNA, 20 bp, synthetic construct
  misc_feature 1..20: note = chemically synthesized
  source 1..20: mol_type = other DNA
tacaataaatatcgaatggt

SEQ ID NO: 18477 - DNA, 20 bp, synthetic construct
  misc_feature 1..20: note = chemically synthesized
  source 1..20: mol_type = other DNA
caataaatatcgaatggtga

SEQ ID NO: 18478 - DNA, 20 bp, synthetic construct
  misc_feature 1..20: note = chemically synthesized
  source 1..20: mol_type = other DNA
atatcgaatggtgagagcaa

SEQ ID NO: 18479 - DNA, 20 bp, synthetic construct
  misc_feature 1..20: note = chemically synthesized
  source 1..20: mol_type = other DNA
tggtgagagcaatggaaatt

SEQ ID NO: 18480 - DNA, 20 bp, synthetic construct
  misc_feature 1..20: note = chemically synthesized
  source 1..20: mol_type = other DNA
agagcaatggaaatttagca

SEQ ID NO: 18481 - DNA, 20 bp, synthetic construct
  misc_feature 1..20: note = chemically synthesized
  source 1..20: mol_type = other DNA
aaatttagcaaagccataac

SEQ ID NO: 18482 - DNA, 20 bp, synthetic construct
  misc_feature 1..20: note = chemically synthesized
  source 1..20: mol_type = other DNA
aatttagcaaagccataacc

SEQ ID NO: 18483 - DNA, 20 bp, synthetic construct
  misc_feature 1..20: note = chemically synthesized
  source 1..20: mol_type = other DNA
atttagcaaagccataaccg

SEQ ID NO: 18484 - DNA, 20 bp, synthetic construct
  misc_feature 1..20: note = chemically synthesized
  source 1..20: mol_type = other DNA
ttagcaaagccataaccggg

SEQ ID NO: 18485 - DNA, 20 bp, synthetic construct
  misc_feature 1..20: note = chemically synthesized
  source 1..20: mol_type = other DNA
agccataaccggggagacct

SEQ ID NO: 18486 - DNA, 20 bp, synthetic construct
  misc_feature 1..20: note = chemically synthesized
  source 1..20: mol_type = other DNA
ccataaccggggagacctca

SEQ ID NO: 18487 - DNA, 20 bp, synthetic construct
  misc_feature 1..20: note = chemically synthesized
  source 1..20: mol_type = other DNA
cataaccggggagacctcag

SEQ ID NO: 18488 - DNA, 20 bp, synthetic construct
  misc_feature 1..20: note = chemically synthesized
  source 1..20: mol_type = other DNA
ataaccggggagacctcaga

SEQ ID NO: 18489 - DNA, 20 bp, synthetic construct
  misc_feature 1..20: note = chemically synthesized
  source 1..20: mol_type = other DNA
taaccggggagacctcagag

SEQ ID NO: 18490 - DNA, 20 bp, synthetic construct
  misc_feature 1..20: note = chemically synthesized
  source 1..20: mol_type = other DNA
ccggggagacctcagagggg

SEQ ID NO: 18491 - DNA, 20 bp, synthetic construct
  misc_feature 1..20: note = chemically synthesized
  source 1..20: mol_type = other DNA
gggagacctcagaggggcag

SEQ ID NO: 18492 - DNA, 20 bp, synthetic construct
  misc_feature 1..20: note = chemically synthesized
  source 1..20: mol_type = other DNA
acctcagaggggcagtggac

SEQ ID NO: 18493 - DNA, 20 bp, synthetic construct
  misc_feature 1..20: note = chemically synthesized
  source 1..20: mol_type = other DNA
agaggggcagtggactggtt

SEQ ID NO: 18494 - DNA, 20 bp, synthetic construct
  misc_feature 1..20: note = chemically synthesized
  source 1..20: mol_type = other DNA
aggggcagtggactggttaa

SEQ ID NO: 18495 - DNA, 20 bp, synthetic construct
  misc_feature 1..20: note = chemically synthesized
  source 1..20: mol_type = other DNA
ggggcagtggactggttaag

SEQ ID NO: 18496 - DNA, 20 bp, synthetic construct
  misc_feature 1..20: note = chemically synthesized
  source 1..20: mol_type = other DNA
tggactggttaagaggctgt

SEQ ID NO: 18497 - DNA, 20 bp, synthetic construct
  misc_feature 1..20: note = chemically synthesized
  source 1..20: mol_type = other DNA
tggttaagaggctgttggat

SEQ ID NO: 18498 - DNA, 20 bp, synthetic construct
  misc_feature 1..20: note = chemically synthesized
  source 1..20: mol_type = other DNA
taagaggctgttggatgagc

SEQ ID NO: 18499 - DNA, 20 bp, synthetic construct
  misc_feature 1..20: note = chemically synthesized
  source 1..20: mol_type = other DNA
aagaggctgttggatgagcc

SEQ ID NO: 18500 - DNA, 20 bp, synthetic construct
  misc_feature 1..20: note = chemically synthesized
  source 1..20: mol_type = other DNA
aggctgttggatgagccggg

SEQ ID NO: 18501 - DNA, 20 bp, synthetic construct
  misc_feature 1..20: note = chemically synthesized
  source 1..20: mol_type = other DNA
taaaaatcaatgctgttgac

SEQ ID NO: 18502 - DNA, 20 bp, synthetic construct
  misc_feature 1..20: note = chemically synthesized
  source 1..20: mol_type = other DNA
gtgataatttacaacgttcc

SEQ ID NO: 18503 - DNA, 20 bp, synthetic construct
  misc_feature 1..20: note = chemically synthesized
  source 1..20: mol_type = other DNA
tttacaacgttcctggtgct

SEQ ID NO: 18504 - DNA, 20 bp, synthetic construct
  misc_feature 1..20: note = chemically synthesized
  source 1..20: mol_type = other DNA
acaacgttcctggtgctaag

SEQ ID NO: 18505 - DNA, 20 bp, synthetic construct
  misc_feature 1..20: note = chemically synthesized
  source 1..20: mol_type = other DNA
tgctaagtagttccccgctt

SEQ ID NO: 18506 - DNA, 20 bp, synthetic construct
  misc_feature 1..20: note = chemically synthesized
  source 1..20: mol_type = other DNA
ttccccgcttaagaatgcgt

SEQ ID NO: 18507 - DNA, 20 bp, synthetic construct
  misc_feature 1..20: note = chemically synthesized
  source 1..20: mol_type = other DNA
ccgcttaagaatgcgttggc

SEQ ID NO: 18508 - DNA, 20 bp, synthetic construct
  misc_feature 1..20: note = chemically synthesized
  source 1..20: mol_type = other DNA
cgcttaagaatgcgttggct

SEQ ID NO: 18509 - DNA, 20 bp, synthetic construct
  misc_feature 1..20: note = chemically synthesized
  source 1..20: mol_type = other DNA
ttaagaatgcgttggctggg

SEQ ID NO: 18510 - DNA, 20 bp, synthetic construct
  misc_feature 1..20: note = chemically synthesized
  source 1..20: mol_type = other DNA
aagaatgcgttggctgggca

SEQ ID NO: 18511 - DNA, 20 bp, synthetic construct
  misc_feature 1..20: note = chemically synthesized
  source 1..20: mol_type = other DNA
tgcgttggctgggcagagat

SEQ ID NO: 18512 - DNA, 20 bp, synthetic construct
  misc_feature 1..20: note = chemically synthesized
  source 1..20: mol_type = other DNA
tggctgggcagagattagcg

SEQ ID NO: 18513 - DNA, 20 bp, synthetic construct
  misc_feature 1..20: note = chemically synthesized
  source 1..20: mol_type = other DNA
ggctgggcagagattagcgc

SEQ ID NO: 18514 - DNA, 20 bp, synthetic construct
  misc_feature 1..20: note = chemically synthesized
  source 1..20: mol_type = other DNA
gctgggcagagattagcgca

SEQ ID NO: 18515 - DNA, 20 bp, synthetic construct
  misc_feature 1..20: note = chemically synthesized
  source 1..20: mol_type = other DNA
tgggcagagattagcgcagg

SEQ ID NO: 18516 - DNA, 20 bp, synthetic construct
  misc_feature 1..20: note = chemically synthesized
  source 1..20: mol_type = other DNA
ttgtgtgtgtcacaatgaat

SEQ ID NO: 18517 - DNA, 20 bp, synthetic construct
  misc_feature 1..20: note = chemically synthesized
  source 1..20: mol_type = other DNA
acaatgaatcagacgcatta

SEQ ID NO: 18518 - DNA, 20 bp, synthetic construct
  misc_feature 1..20: note = chemically synthesized
  source 1..20: mol_type = other DNA
caatgaatcagacgcattat

SEQ ID NO: 18519 - DNA, 20 bp, synthetic construct
  misc_feature 1..20: note = chemically synthesized
  source 1..20: mol_type = other DNA
gaatcagacgcattataggt

SEQ ID NO: 18520 - DNA, 20 bp, synthetic construct
  misc_feature 1..20: note = chemically synthesized
  source 1..20: mol_type = other DNA
gtttcatcatgacttttaca

SEQ ID NO: 18521 - DNA, 20 bp, synthetic construct
  misc_feature 1..20: note = chemically synthesized
  source 1..20: mol_type = other DNA
cacagttgtcatgtaattta

SEQ ID NO: 18522 - DNA, 20 bp, synthetic construct
  misc_feature 1..20: note = chemically synthesized
  source 1..20: mol_type = other DNA
tctttaacaccctcctgaca

SEQ ID NO: 18523 - DNA, 20 bp, synthetic construct
  misc_feature 1..20: note = chemically synthesized
  source 1..20: mol_type = other DNA
acatagacacactgcacttg

SEQ ID NO: 18524 - DNA, 20 bp, synthetic construct
  misc_feature 1..20: note = chemically synthesized
  source 1..20: mol_type = other DNA
catagacacactgcacttga

SEQ ID NO: 18525 - DNA, 20 bp, synthetic construct
  misc_feature 1..20: note = chemically synthesized
  source 1..20: mol_type = other DNA
acacactgcacttgaaggct

SEQ ID NO: 18526 - DNA, 20 bp, synthetic construct
  misc_feature 1..20: note = chemically synthesized
  source 1..20: mol_type = other DNA
ttggtattgtttcataatcc

SEQ ID NO: 18527 - DNA, 20 bp, synthetic construct
  misc_feature 1..20: note = chemically synthesized
  source 1..20: mol_type = other DNA
ggtattgtttcataatccga

SEQ ID NO: 18528 - DNA, 20 bp, synthetic construct
  misc_feature 1..20: note = chemically synthesized
  source 1..20: mol_type = other DNA
gtattgtttcataatccgag

SEQ ID NO: 18529 - DNA, 20 bp, synthetic construct
  misc_feature 1..20: note = chemically synthesized
  source 1..20: mol_type = other DNA
attgtttcataatccgagag

SEQ ID NO: 18530 - DNA, 20 bp, synthetic construct
  misc_feature 1..20: note = chemically synthesized
  source 1..20: mol_type = other DNA
ttgtttcataatccgagagg

SEQ ID NO: 18531 - DNA, 20 bp, synthetic construct
  misc_feature 1..20: note = chemically synthesized
  source 1..20: mol_type = other DNA
ccatcaaattacactatctt

SEQ ID NO: 18532 - DNA, 20 bp, synthetic construct
  misc_feature 1..20: note = chemically synthesized
  source 1..20: mol_type = other DNA
catcaaattacactatcttt

SEQ ID NO: 18533 - DNA, 20 bp, synthetic construct
  misc_feature 1..20: note = chemically synthesized
  source 1..20: mol_type = other DNA
gggctaatctaaatgcgctg

SEQ ID NO: 18534 - DNA, 20 bp, synthetic construct
  misc_feature 1..20: note = chemically synthesized
  source 1..20: mol_type = other DNA
aatgcgctgcagattaaaat

SEQ ID NO: 18535 - DNA, 20 bp, synthetic construct
  misc_feature 1..20: note = chemically synthesized
  source 1..20: mol_type = other DNA
tgcgctgcagattaaaatca

SEQ ID NO: 18536 - DNA, 20 bp, synthetic construct
  misc_feature 1..20: note = chemically synthesized
  source 1..20: mol_type = other DNA
tgtccctgatgcaaattatt

SEQ ID NO: 18537 - DNA, 20 bp, synthetic construct
  misc_feature 1..20: note = chemically synthesized
  source 1..20: mol_type = other DNA
cccgacacatttttattttg

SEQ ID NO: 18538 - DNA, 20 bp, synthetic construct
  misc_feature 1..20: note = chemically synthesized
  source 1..20: mol_type = other DNA
tttattttgcggaccctttt

SEQ ID NO: 18539 - DNA, 20 bp, synthetic construct
  misc_feature 1..20: note = chemically synthesized
  source 1..20: mol_type = other DNA
gagcactgctgtctgcgatg

SEQ ID NO: 18540 - DNA, 20 bp, synthetic construct
  misc_feature 1..20: note = chemically synthesized
  source 1..20: mol_type = other DNA
gcactgctgtctgcgatgca

SEQ ID NO: 18541 - DNA, 20 bp, synthetic construct
  misc_feature 1..20: note = chemically synthesized
  source 1..20: mol_type = other DNA
cactgctgtctgcgatgcag

SEQ ID NO: 18542 - DNA, 20 bp, synthetic construct
  misc_feature 1..20: note = chemically synthesized
  source 1..20: mol_type = other DNA
actgctgtctgcgatgcaga

SEQ ID NO: 18543 - DNA, 20 bp, synthetic construct
  misc_feature 1..20: note = chemically synthesized
  source 1..20: mol_type = other DNA
ctgctgtctgcgatgcagag

SEQ ID NO: 18544 - DNA, 20 bp, synthetic construct
  misc_feature 1..20: note = chemically synthesized
  source 1..20: mol_type = other DNA
tgctgtctgcgatgcagagg

SEQ ID NO: 18545 - DNA, 20 bp, synthetic construct
  misc_feature 1..20: note = chemically synthesized
  source 1..20: mol_type = other DNA
tgtctgcgatgcagaggggg

SEQ ID NO: 18546 - DNA, 20 bp, synthetic construct
  misc_feature 1..20: note = chemically synthesized
  source 1..20: mol_type = other DNA
gtctgcgatgcagagggggt

SEQ ID NO: 18547 - DNA, 20 bp, synthetic construct
  misc_feature 1..20: note = chemically synthesized
  source 1..20: mol_type = other DNA
tctgcgatgcagagggggtg

SEQ ID NO: 18548 - DNA, 20 bp, synthetic construct
  misc_feature 1..20: note = chemically synthesized
  source 1..20: mol_type = other DNA
ctgcgatgcagagggggtgg

SEQ ID NO: 18549 - DNA, 20 bp, synthetic construct
  misc_feature 1..20: note = chemically synthesized
  source 1..20: mol_type = other DNA
tgcgatgcagagggggtggg

SEQ ID NO: 18550 - DNA, 20 bp, synthetic construct
  misc_feature 1..20: note = chemically synthesized
  source 1..20: mol_type = other DNA
cgatgcagagggggtggggg

SEQ ID NO: 18551 - DNA, 20 bp, synthetic construct
  misc_feature 1..20: note = chemically synthesized
  source 1..20: mol_type = other DNA
agggggtggggggagatgca

SEQ ID NO: 18552 - DNA, 20 bp, synthetic construct
  misc_feature 1..20: note = chemically synthesized
  source 1..20: mol_type = other DNA
gggggtggggggagatgcat

SEQ ID NO: 18553 - DNA, 20 bp, synthetic construct
  misc_feature 1..20: note = chemically synthesized
  source 1..20: mol_type = other DNA
gggtggggggagatgcatag

SEQ ID NO: 18554 - DNA, 20 bp, synthetic construct
  misc_feature 1..20: note = chemically synthesized
  source 1..20: mol_type = other DNA
gatgcataggagacaatctg

SEQ ID NO: 18555 - DNA, 20 bp, synthetic construct
  misc_feature 1..20: note = chemically synthesized
  source 1..20: mol_type = other DNA
attaatgtacacttcccaaa

SEQ ID NO: 18556 - DNA, 20 bp, synthetic construct
  misc_feature 1..20: note = chemically synthesized
  source 1..20: mol_type = other DNA
tgtacacttcccaaatggta

SEQ ID NO: 18557 - DNA, 20 bp, synthetic construct
  misc_feature 1..20: note = chemically synthesized
  source 1..20: mol_type = other DNA
gtacacttcccaaatggtaa

SEQ ID NO: 18558 - DNA, 20 bp, synthetic construct
  misc_feature 1..20: note = chemically synthesized
  source 1..20: mol_type = other DNA
tgtcttatttatttattgat

SEQ ID NO: 18559 - DNA, 20 bp, synthetic construct
  misc_feature 1..20: note = chemically synthesized
  source 1..20: mol_type = other DNA
ttatttattgattagatgta

SEQ ID NO: 18560 - DNA, 20 bp, synthetic construct
  misc_feature 1..20: note = chemically synthesized
  source 1..20: mol_type = other DNA
atttattgattagatgtata

SEQ ID NO: 18561 - DNA, 20 bp, synthetic construct
  misc_feature 1..20: note = chemically synthesized
  source 1..20: mol_type = other DNA
gattagatgtatagagactt

SEQ ID NO: 18562 - DNA, 20 bp, synthetic construct
  misc_feature 1..20: note = chemically synthesized
  source 1..20: mol_type = other DNA
gatgtatagagactttggcg

SEQ ID NO: 18563 - DNA, 20 bp, synthetic construct
  misc_feature 1..20: note = chemically synthesized
  source 1..20: mol_type = other DNA
atgtatagagactttggcgt

SEQ ID NO: 18564 - DNA, 20 bp, synthetic construct
  misc_feature 1..20: note = chemically synthesized
  source 1..20: mol_type = other DNA
tttggcgtgggcacaatctg

SEQ ID NO: 18565 - DNA, 20 bp, synthetic construct
  misc_feature 1..20: note = chemically synthesized
  source 1..20: mol_type = other DNA
ctgaagttgaaatcctttta

SEQ ID NO: 18566 - DNA, 20 bp, synthetic construct
  misc_feature 1..20: note = chemically synthesized
  source 1..20: mol_type = other DNA
aaaactatttaaaaatcttt

SEQ ID NO: 18567 - DNA, 20 bp, synthetic construct
  misc_feature 1..20: note = chemically synthesized
  source 1..20: mol_type = other DNA
aaactatttaaaaatctttt

SEQ ID NO: 18568 - DNA, 20 bp, synthetic construct
  misc_feature 1..20: note = chemically synthesized
  source 1..20: mol_type = other DNA
aactatttaaaaatcttttg

SEQ ID NO: 18569 - DNA, 20 bp, synthetic construct
  misc_feature 1..20: note = chemically synthesized
  source 1..20: mol_type = other DNA
tatttaaaaatcttttgggg

SEQ ID NO: 18570 - DNA, 20 bp, synthetic construct
  misc_feature 1..20: note = chemically synthesized
  source 1..20: mol_type = other DNA
taaaaatcttttggggaaga

SEQ ID NO: 18571 - DNA, 20 bp, synthetic construct
  misc_feature 1..20: note = chemically synthesized
  source 1..20: mol_type = other DNA
aaaatcttttggggaagaaa

SEQ ID NO: 18572 - DNA, 20 bp, synthetic construct
  misc_feature 1..20: note = chemically synthesized
  source 1..20: mol_type = other DNA
ggggaagaaagagcaaaata

SEQ ID NO: 18573 - DNA, 20 bp, synthetic construct
  misc_feature 1..20: note = chemically synthesized
  source 1..20: mol_type = other DNA
agcaaaatatagccaaccaa

SEQ ID NO: 18574 - DNA, 20 bp, synthetic construct
  misc_feature 1..20: note = chemically synthesized
  source 1..20: mol_type = other DNA
gccaaccaatagctttctgc

SEQ ID NO: 18575 - DNA, 20 bp, synthetic construct
  misc_feature 1..20: note = chemically synthesized
  source 1..20: mol_type = other DNA
gaacacatcatcccaaaata

SEQ ID NO: 18576 - DNA, 20 bp, synthetic construct
  misc_feature 1..20: note = chemically synthesized
  source 1..20: mol_type = other DNA
aacacatcatcccaaaatat

SEQ ID NO: 18577 - DNA, 20 bp, synthetic construct
  misc_feature 1..20: note = chemically synthesized
  source 1..20: mol_type = other DNA
tctgaatttgatcaaatcac

SEQ ID NO: 18578 - DNA, 20 bp, synthetic construct
  misc_feature 1..20: note = chemically synthesized
  source 1..20: mol_type = other DNA
tttctgaatttgatcaaatc

SEQ ID NO: 18579 - DNA, 20 bp, synthetic construct
  misc_feature 1..20: note = chemically synthesized
  source 1..20: mol_type = other DNA
ttgatcaaatctagattttg

SEQ ID NO: 18580 - DNA, 20 bp, synthetic construct
  misc_feature 1..20: note = chemically synthesized
  source 1..20: mol_type = other DNA
atcaaatctagattttgcag

SEQ ID NO: 18581 - DNA, 20 bp, synthetic construct
  misc_feature 1..20: note = chemically synthesized
  source 1..20: mol_type = other DNA
atctagattttgcagaagtt

SEQ ID NO: 18582 - DNA, 20 bp, synthetic construct
  misc_feature 1..20: note = chemically synthesized
  source 1..20: mol_type = other DNA
tctagattttgcagaagttc

SEQ ID NO: 18583 - DNA, 20 bp, synthetic construct
  misc_feature 1..20: note = chemically synthesized
  source 1..20: mol_type = other DNA
ctagattttgcagaagttca

SEQ ID NO: 18584 - DNA, 20 bp, synthetic construct
  misc_feature 1..20: note = chemically synthesized
  source 1..20: mol_type = other DNA
attttgcagaagttcagggt

SEQ ID NO: 18585 - DNA, 20 bp, synthetic construct
  misc_feature 1..20: note = chemically synthesized
  source 1..20: mol_type = other DNA
tttgcagaagttcagggtga

SEQ ID NO: 18586 - DNA, 20 bp, synthetic construct
  misc_feature 1..20: note = chemically synthesized
  source 1..20: mol_type = other DNA
aaccatgcctgttttatatc

SEQ ID NO: 18587 - DNA, 20 bp, synthetic construct
  misc_feature 1..20: note = chemically synthesized
  source 1..20: mol_type = other DNA
atgcctgttttatatctaga

SEQ ID NO: 18588 - DNA, 20 bp, synthetic construct
  misc_feature 1..20: note = chemically synthesized
  source 1..20: mol_type = other DNA
agaaagtgaaatcattgtta

SEQ ID NO: 18589 - DNA, 20 bp, synthetic construct
  misc_feature 1..20: note = chemically synthesized
  source 1..20: mol_type = other DNA
gttatagaaaaaacctactg

SEQ ID NO: 18590 - DNA, 20 bp, synthetic construct
  misc_feature 1..20: note = chemically synthesized
  source 1..20: mol_type = other DNA
tagaaaaaacctactgtggt

SEQ ID NO: 18591 - DNA, 20 bp, synthetic construct
  misc_feature 1..20: note = chemically synthesized
  source 1..20: mol_type = other DNA
aaaaccacattcttttttcc

SEQ ID NO: 18592 - DNA, 20 bp, synthetic construct
  misc_feature 1..20: note = chemically synthesized
  source 1..20: mol_type = other DNA
gccctgctgccatcctctac

SEQ ID NO: 18593 - DNA, 20 bp, synthetic construct
  misc_feature 1..20: note = chemically synthesized
  source 1..20: mol_type = other DNA
catcctctaccagaaaataa

SEQ ID NO: 18594 - DNA, 20 bp, synthetic construct
  misc_feature 1..20: note = chemically synthesized
  source 1..20: mol_type = other DNA
aaaataacagtatctgcctg

SEQ ID NO: 18595 - DNA, 20 bp, synthetic construct
  misc_feature 1..20: note = chemically synthesized
  source 1..20: mol_type = other DNA
cagtatctgcctgtagtatg

SEQ ID NO: 18596 - DNA, 20 bp, synthetic construct
  misc_feature 1..20: note = chemically synthesized
  source 1..20: mol_type = other DNA
agtatgaagaccttccaatt

SEQ ID NO: 18597 - DNA, 20 bp, synthetic construct
  misc_feature 1..20: note = chemically synthesized
  source 1..20: mol_type = other DNA
tatgaagaccttccaattga

SEQ ID NO: 18598 - DNA, 20 bp, synthetic construct
  misc_feature 1..20: note = chemically synthesized
  source 1..20: mol_type = other DNA
ttgattaccaaacacgaatg

SEQ ID NO: 18599 - DNA, 20 bp, synthetic construct
  misc_feature 1..20: note = chemically synthesized
  source 1..20: mol_type = other DNA
tgattaccaaacacgaatga

SEQ ID NO: 18600 - DNA, 20 bp, synthetic construct
  misc_feature 1..20: note = chemically synthesized
  source 1..20: mol_type = other DNA
ttaccaaacacgaatgaagg

SEQ ID NO: 18601 - DNA, 20 bp, synthetic construct
  misc_feature 1..20: note = chemically synthesized
  source 1..20: mol_type = other DNA
ccaaacacgaatgaaggaag

SEQ ID NO: 18602 - DNA, 20 bp, synthetic construct
  misc_feature 1..20: note = chemically synthesized
  source 1..20: mol_type = other DNA
gaagaagataacataaaaat

SEQ ID NO: 18603 - DNA, 20 bp, synthetic construct
  misc_feature 1..20: note = chemically synthesized
  source 1..20: mol_type = other DNA
agataacataaaaattagta

SEQ ID NO: 18604 - DNA, 20 bp, synthetic construct
  misc_feature 1..20: note = chemically synthesized
  source 1..20: mol_type = other DNA
gataacataaaaattagtaa

SEQ ID NO: 18605 - DNA, 20 bp, synthetic construct
  misc_feature 1..20: note = chemically synthesized
  source 1..20: mol_type = other DNA
aaaattagtaaaggccttcc

SEQ ID NO: 18606 - DNA, 20 bp, synthetic construct
  misc_feature 1..20: note = chemically synthesized
  source 1..20: mol_type = other DNA
attagtaaaggccttccaag

SEQ ID NO: 18607 - DNA, 20 bp, synthetic construct
  misc_feature 1..20: note = chemically synthesized
  source 1..20: mol_type = other DNA
agacatttacccttctgtga

SEQ ID NO: 18608 - DNA, 20 bp, synthetic construct
  misc_feature 1..20: note = chemically synthesized
  source 1..20: mol_type = other DNA
ttacccttctgtgaaagcca

SEQ ID NO: 18609 - DNA, 20 bp, synthetic construct
  misc_feature 1..20: note = chemically synthesized
  source 1..20: mol_type = other DNA
acccttctgtgaaagccatg

SEQ ID NO: 18610 - DNA, 20 bp, synthetic construct
  misc_feature 1..20: note = chemically synthesized
  source 1..20: mol_type = other DNA
aaagccatggagaaattacc

SEQ ID NO: 18611 - DNA, 20 bp, synthetic construct
  misc_feature 1..20: note = chemically synthesized
  source 1..20: mol_type = other DNA
catggagaaattaccaagac

SEQ ID NO: 18612 - DNA, 20 bp, synthetic construct
  misc_feature 1..20: note = chemically synthesized
  source 1..20: mol_type = other DNA
agaaattaccaagactggtt

SEQ ID NO: 18613 - DNA, 20 bp, synthetic construct
  misc_feature 1..20: note = chemically synthesized
  source 1..20: mol_type = other DNA
gaaattaccaagactggttt

SEQ ID NO: 18614 - DNA, 20 bp, synthetic construct
  misc_feature 1..20: note = chemically synthesized
  source 1..20: mol_type = other DNA
aaattaccaagactggtttg

SEQ ID NO: 18615 - DNA, 20 bp, synthetic construct
  misc_feature 1..20: note = chemically synthesized
  source 1..20: mol_type = other DNA
aattaccaagactggtttgg

SEQ ID NO: 18616 - DNA, 20 bp, synthetic construct
  misc_feature 1..20: note = chemically synthesized
  source 1..20: mol_type = other DNA
attaccaagactggtttggg

SEQ ID NO: 18617 - DNA, 20 bp, synthetic construct
  misc_feature 1..20: note = chemically synthesized
  source 1..20: mol_type = other DNA
taccaagactggtttggggg

SEQ ID NO: 18618 - DNA, 20 bp, synthetic construct
  misc_feature 1..20: note = chemically synthesized
  source 1..20: mol_type = other DNA
accaagactggtttgggggg

SEQ ID NO: 18619 - DNA, 20 bp, synthetic construct
  misc_feature 1..20: note = chemically synthesized
  source 1..20: mol_type = other DNA
ccaagactggtttgggggga

SEQ ID NO: 18620 - DNA, 20 bp, synthetic construct
  misc_feature 1..20: note = chemically synthesized
  source 1..20: mol_type = other DNA
ggtttggggggagggcattt

SEQ ID NO: 18621 - DNA, 20 bp, synthetic construct
  misc_feature 1..20: note = chemically synthesized
  source 1..20: mol_type = other DNA
gtttggggggagggcattta

SEQ ID NO: 18622 - DNA, 20 bp, synthetic construct
  misc_feature 1..20: note = chemically synthesized
  source 1..20: mol_type = other DNA
ggagggcatttaaggtcttt

SEQ ID NO: 18623 - DNA, 20 bp, synthetic construct
  misc_feature 1..20: note = chemically synthesized
  source 1..20: mol_type = other DNA
gagggcatttaaggtctttt

SEQ ID NO: 18624 - DNA, 20 bp, synthetic construct
  misc_feature 1..20: note = chemically synthesized
  source 1..20: mol_type = other DNA
ttaaggtcttttgggcatta

SEQ ID NO: 18625 - DNA, 20 bp, synthetic construct
  misc_feature 1..20: note = chemically synthesized
  source 1..20: mol_type = other DNA
tttgggcattacagattttc

SEQ ID NO: 18626 - DNA, 20 bp, synthetic construct
  misc_feature 1..20: note = chemically synthesized
  source 1..20: mol_type = other DNA
cagaaccaaactttgacttt

SEQ ID NO: 18627 - DNA, 20 bp, synthetic construct
  misc_feature 1..20: note = chemically synthesized
  source 1..20: mol_type = other DNA
actttgacttttagtgttaa

SEQ ID NO: 18628 - DNA, 20 bp, synthetic construct
  misc_feature 1..20: note = chemically synthesized
  source 1..20: mol_type = other DNA
tttgacttttagtgttaaca

SEQ ID NO: 18629 - DNA, 20 bp, synthetic construct
  misc_feature 1..20: note = chemically synthesized
  source 1..20: mol_type = other DNA
tgacttttagtgttaacaga

SEQ ID NO: 18630 - DNA, 20 bp, synthetic construct
  misc_feature 1..20: note = chemically synthesized
  source 1..20: mol_type = other DNA
agagacactgatctgaaaac

SEQ ID NO: 18631 - DNA, 20 bp, synthetic construct
  misc_feature 1..20: note = chemically synthesized
  source 1..20: mol_type = other DNA
gagacactgatctgaaaacc

SEQ ID NO: 18632 - DNA, 20 bp, synthetic construct
  misc_feature 1..20: note = chemically synthesized
  source 1..20: mol_type = other DNA
gatctgaaaaccaggacacc

SEQ ID NO: 18633 - DNA, 20 bp, synthetic construct
  misc_feature 1..20: note = chemically synthesized
  source 1..20: mol_type = other DNA
atctgaaaaccaggacacct

SEQ ID NO: 18634 - DNA, 20 bp, synthetic construct
  misc_feature 1..20: note = chemically synthesized
  source 1..20: mol_type = other DNA
cccttattgtatcatgctgt

SEQ ID NO: 18635 - DNA, 20 bp, synthetic construct
  misc_feature 1..20: note = chemically synthesized
  source 1..20: mol_type = other DNA
tgtatcatgctgtgagattt

SEQ ID NO: 18636 - DNA, 20 bp, synthetic construct
  misc_feature 1..20: note = chemically synthesized
  source 1..20: mol_type = other DNA
gtatcatgctgtgagatttt

SEQ ID NO: 18637 - DNA, 20 bp, synthetic construct
  misc_feature 1..20: note = chemically synthesized
  source 1..20: mol_type = other DNA
tttgggctcccttcacctgt

SEQ ID NO: 18638 - DNA, 20 bp, synthetic construct
  misc_feature 1..20: note = chemically synthesized
  source 1..20: mol_type = other DNA
atttgtttccttgtcttgta

SEQ ID NO: 18639 - DNA, 20 bp, synthetic construct
  misc_feature 1..20: note = chemically synthesized
  source 1..20: mol_type = other DNA
tgtttccttgtcttgtaaag

SEQ ID NO: 18640 - DNA, 20 bp, synthetic construct
  misc_feature 1..20: note = chemically synthesized
  source 1..20: mol_type = other DNA
gtttccttgtcttgtaaagt

SEQ ID NO: 18641 - DNA, 20 bp, synthetic construct
  misc_feature 1..20: note = chemically synthesized
  source 1..20: mol_type = other DNA
gtcttgtaaagtaggtaaaa

SEQ ID NO: 18642 - DNA, 20 bp, synthetic construct
  misc_feature 1..20: note = chemically synthesized
  source 1..20: mol_type = other DNA
tgtaaagtaggtaaaataga

SEQ ID NO: 18643 - DNA, 20 bp, synthetic construct
  misc_feature 1..20: note = chemically synthesized
  source 1..20: mol_type = other DNA
agtaggtaaaatagatagtt

SEQ ID NO: 18644 - DNA, 20 bp, synthetic construct
  misc_feature 1..20: note = chemically synthesized
  source 1..20: mol_type = other DNA
gtaaaatagatagtttggac

SEQ ID NO: 18645 - DNA, 20 bp, synthetic construct
  misc_feature 1..20: note = chemically synthesized
  source 1..20: mol_type = other DNA
taaaatagatagtttggact

SEQ ID NO: 18646 - DNA, 20 bp, synthetic construct
  misc_feature 1..20: note = chemically synthesized
  source 1..20: mol_type = other DNA
aatagatagtttggactggg

SEQ ID NO: 18647 - DNA, 20 bp, synthetic construct
  misc_feature 1..20: note = chemically synthesized
  source 1..20: mol_type = other DNA
atagatagtttggactgggt

SEQ ID NO: 18648 - DNA, 20 bp, synthetic construct
  misc_feature 1..20: note = chemically synthesized
  source 1..20: mol_type = other DNA
tttggactgggtgggtctct

SEQ ID NO: 18649 - DNA, 20 bp, synthetic construct
  misc_feature 1..20: note = chemically synthesized
  source 1..20: mol_type = other DNA
tctaagtccccatgatgttc

SEQ ID NO: 18650 - DNA, 20 bp, synthetic construct
  misc_feature 1..20: note = chemically synthesized
  source 1..20: mol_type = other DNA
gtccccatgatgttctagca

SEQ ID NO: 18651 - DNA, 20 bp, synthetic construct
  misc_feature 1..20: note = chemically synthesized
  source 1..20: mol_type = other DNA
atagtatgaacaccactgac

SEQ ID NO: 18652 - DNA, 20 bp, synthetic construct
  misc_feature 1..20: note = chemically synthesized
  source 1..20: mol_type = other DNA
gttttctccctgctattttt

SEQ ID NO: 18653 - DNA, 20 bp, synthetic construct
  misc_feature 1..20: note = chemically synthesized
  source 1..20: mol_type = other DNA
ccctgctattttttggaatc

SEQ ID NO: 18654 - DNA, 20 bp, synthetic construct
  misc_feature 1..20: note = chemically synthesized
  source 1..20: mol_type = other DNA
tttggaatctagttgctgaa

SEQ ID NO: 18655 - DNA, 20 bp, synthetic construct
  misc_feature 1..20: note = chemically synthesized
  source 1..20: mol_type = other DNA
ttggaatctagttgctgaat

SEQ ID NO: 18656 - DNA, 20 bp, synthetic construct
  misc_feature 1..20: note = chemically synthesized
  source 1..20: mol_type = other DNA
tggaatctagttgctgaatg

SEQ ID NO: 18657 - DNA, 20 bp, synthetic construct
  misc_feature 1..20: note = chemically synthesized
  source 1..20: mol_type = other DNA
ctgaatggggctcacctgca

SEQ ID NO: 18658 - DNA, 20 bp, synthetic construct
  misc_feature 1..20: note = chemically synthesized
  source 1..20: mol_type = other DNA
atggggctcacctgcaaaga

SEQ ID NO: 18659 - DNA, 20 bp, synthetic construct
  misc_feature 1..20: note = chemically synthesized
  source 1..20: mol_type = other DNA
gggctcacctgcaaagacag

SEQ ID NO: 18660 - DNA, 20 bp, synthetic construct
  misc_feature 1..20: note = chemically synthesized
  source 1..20: mol_type = other DNA
tattttcttgatttgcctca

SEQ ID NO: 18661 - DNA, 20 bp, synthetic construct
  misc_feature 1..20: note = chemically synthesized
  source 1..20: mol_type = other DNA
ttcttgatttgcctcaaaga

SEQ ID NO: 18662 - DNA, 20 bp, synthetic construct
  misc_feature 1..20: note = chemically synthesized
  source 1..20: mol_type = other DNA
ttgatttgcctcaaagatgg

SEQ ID NO: 18663 - DNA, 20 bp, synthetic construct
  misc_feature 1..20: note = chemically synthesized
  source 1..20: mol_type = other DNA
tgcctcaaagatggaagcta

SEQ ID NO: 18664 - DNA, 20 bp, synthetic construct
  misc_feature 1..20: note = chemically synthesized
  source 1..20: mol_type = other DNA
ctcaaagatggaagctatgg

SEQ ID NO: 18665 - DNA, 20 bp, synthetic construct
  misc_feature 1..20: note = chemically synthesized
  source 1..20: mol_type = other DNA
caaagatggaagctatggtg

SEQ ID NO: 18666 - DNA, 20 bp, synthetic construct
  misc_feature 1..20: note = chemically synthesized
  source 1..20: mol_type = other DNA
tggaagctatggtggagatt

SEQ ID NO: 18667 - DNA, 20 bp, synthetic construct
  misc_feature 1..20: note = chemically synthesized
  source 1..20: mol_type = other DNA
ggaagctatggtggagatta

SEQ ID NO: 18668 - DNA, 20 bp, synthetic construct
  misc_feature 1..20: note = chemically synthesized
  source 1..20: mol_type = other DNA
ctatggtggagattaaggct

SEQ ID NO: 18669 - DNA, 20 bp, synthetic construct
  misc_feature 1..20: note = chemically synthesized
  source 1..20: mol_type = other DNA
ttggattcgtgattccccaa

SEQ ID NO: 18670 - DNA, 20 bp, synthetic construct
  misc_feature 1..20: note = chemically synthesized
  source 1..20: mol_type = other DNA
attcgtgattccccaacaga

SEQ ID NO: 18671 - DNA, 20 bp, synthetic construct
  misc_feature 1..20: note = chemically synthesized
  source 1..20: mol_type = other DNA
attccccaacagaaagctta

SEQ ID NO: 18672 - DNA, 20 bp, synthetic construct
  misc_feature 1..20: note = chemically synthesized
  source 1..20: mol_type = other DNA
ttccccaacagaaagcttaa

SEQ ID NO: 18673 - DNA, 20 bp, synthetic construct
  misc_feature 1..20: note = chemically synthesized
  source 1..20: mol_type = other DNA
aaaggcatctttcaaattgc

SEQ ID NO: 18674 - DNA, 20 bp, synthetic construct
  misc_feature 1..20: note = chemically synthesized
  source 1..20: mol_type = other DNA
ggcatctttcaaattgctgg

SEQ ID NO: 18675 - DNA, 20 bp, synthetic construct
  misc_feature 1..20: note = chemically synthesized
  source 1..20: mol_type = other DNA
aattgctggaagcaaaattg

SEQ ID NO: 18676 - DNA, 20 bp, synthetic construct
  misc_feature 1..20: note = chemically synthesized
  source 1..20: mol_type = other DNA
ctggaagcaaaattgaagtg

SEQ ID NO: 18677 - DNA, 20 bp, synthetic construct
  misc_feature 1..20: note = chemically synthesized
  source 1..20: mol_type = other DNA
aaaattgaagtgcagtataa

SEQ ID NO: 18678 - DNA, 20 bp, synthetic construct
  misc_feature 1..20: note = chemically synthesized
  source 1..20: mol_type = other DNA
tgaagtgcagtataatggaa

SEQ ID NO: 18679 - DNA, 20 bp, synthetic construct
  misc_feature 1..20: note = chemically synthesized
  source 1..20: mol_type = other DNA
aatggaatggtgataattca

SEQ ID NO: 18680 - DNA, 20 bp, synthetic construct
  misc_feature 1..20: note = chemically synthesized
  source 1..20: mol_type = other DNA
ggaatggtgataattcacag

SEQ ID NO: 18681 - DNA, 20 bp, synthetic construct
  misc_feature 1..20: note = chemically synthesized
  source 1..20: mol_type = other DNA
tgataattcacagaagtttc

SEQ ID NO: 18682 - DNA, 20 bp, synthetic construct
  misc_feature 1..20: note = chemically synthesized
  source 1..20: mol_type = other DNA
acagaagtttccagccttat

SEQ ID NO: 18683 - DNA, 20 bp, synthetic construct
  misc_feature 1..20: note = chemically synthesized
  source 1..20: mol_type = other DNA
ctccatcttttaattgttgc

SEQ ID NO: 18684 - DNA, 20 bp, synthetic construct
  misc_feature 1..20: note = chemically synthesized
  source 1..20: mol_type = other DNA
gttttttttgaaaaactcca

SEQ ID NO: 18685 - DNA, 20 bp, synthetic construct
  misc_feature 1..20: note = chemically synthesized
  source 1..20: mol_type = other DNA
atgtaatgtgtattttctcc

SEQ ID NO: 18686 - DNA, 20 bp, synthetic construct
  misc_feature 1..20: note = chemically synthesized
  source 1..20: mol_type = other DNA
tttctccaagtttgcttttt

SEQ ID NO: 18687 - DNA, 20 bp, synthetic construct
  misc_feature 1..20: note = chemically synthesized
  source 1..20: mol_type = other DNA
ttctccaagtttgctttttt

SEQ ID NO: 18688 - DNA, 20 bp, synthetic construct
  misc_feature 1..20: note = chemically synthesized
  source 1..20: mol_type = other DNA
caaatgtaactacatcaaaa

SEQ ID NO: 18689 - DNA, 20 bp, synthetic construct
  misc_feature 1..20: note = chemically synthesized
  source 1..20: mol_type = other DNA
atgtaactacatcaaaatag

SEQ ID NO: 18690 - DNA, 20 bp, synthetic construct
  misc_feature 1..20: note = chemically synthesized
  source 1..20: mol_type = other DNA
atagaagtacgtttttgaaa

SEQ ID NO: 18691 - DNA, 20 bp, synthetic construct
  misc_feature 1..20: note = chemically synthesized
  source 1..20: mol_type = other DNA
gtacgtttttgaaaaagaaa

SEQ ID NO: 18692 - DNA, 20 bp, synthetic construct
  misc_feature 1..20: note = chemically synthesized
  source 1..20: mol_type = other DNA
aatagttgaattcaaacaac

SEQ ID NO: 18693 - DNA, 20 bp, synthetic construct
  misc_feature 1..20: note = chemically synthesized
  source 1..20: mol_type = other DNA
atagttgaattcaaacaacc

SEQ ID NO: 18694 - DNA, 20 bp, synthetic construct
  misc_feature 1..20: note = chemically synthesized
  source 1..20: mol_type = other DNA
ttcaattaactgactgaatt

SEQ ID NO: 18695 - DNA, 20 bp, synthetic construct
  misc_feature 1..20: note = chemically synthesized
  source 1..20: mol_type = other DNA
ttcctccttcctcctcccaa

SEQ ID NO: 18696 - DNA, 20 bp, synthetic construct
  misc_feature 1..20: note = chemically synthesized
  source 1..20: mol_type = other DNA
tccttcctcctcccaaaagc

SEQ ID NO: 18697 - DNA, 20 bp, synthetic construct
  misc_feature 1..20: note = chemically synthesized
  source 1..20: mol_type = other DNA
caaaagctggtttctctgta

SEQ ID NO: 18698 - DNA, 20 bp, synthetic construct
  misc_feature 1..20: note = chemically synthesized
  source 1..20: mol_type = other DNA
ctggtttctctgtatggaca

SEQ ID NO: 18699 - DNA, 20 bp, synthetic construct
  misc_feature 1..20: note = chemically synthesized
  source 1..20: mol_type = other DNA
ggacatagcctacatatgct

SEQ ID NO: 18700 - DNA, 20 bp, synthetic construct
  misc_feature 1..20: note = chemically synthesized
  source 1..20: mol_type = other DNA
gcctacatatgctgagtccc

SEQ ID NO: 18701 - DNA, 20 bp, synthetic construct
  misc_feature 1..20: note = chemically synthesized
  source 1..20: mol_type = other DNA
ctacatatgctgagtccctg

SEQ ID NO: 18702 - DNA, 20 bp, synthetic construct
  misc_feature 1..20: note = chemically synthesized
  source 1..20: mol_type = other DNA
atatgctgagtccctggagt

SEQ ID NO: 18703 - DNA, 20 bp, synthetic construct
  misc_feature 1..20: note = chemically synthesized
  source 1..20: mol_type = other DNA
tatgctgagtccctggagtt

SEQ ID NO: 18704 - DNA, 20 bp, synthetic construct
  misc_feature 1..20: note = chemically synthesized
  source 1..20: mol_type = other DNA
ttaggaatttttgcttgtta

SEQ ID NO: 18705 - DNA, 20 bp, synthetic construct
  misc_feature 1..20: note = chemically synthesized
  source 1..20: mol_type = other DNA
taggaatttttgcttgttaa

SEQ ID NO: 18706 - DNA, 20 bp, synthetic construct
  misc_feature 1..20: note = chemically synthesized
  source 1..20: mol_type = other DNA
ggcatccgatgcaacatgtt

SEQ ID NO: 18707 - DNA, 20 bp, synthetic construct
  misc_feature 1..20: note = chemically synthesized
  source 1..20: mol_type = other DNA
atccgatgcaacatgtttag

SEQ ID NO: 18708 - DNA, 20 bp, synthetic construct
  misc_feature 1..20: note = chemically synthesized
  source 1..20: mol_type = other DNA
tagaagaactctccctctgt

SEQ ID NO: 18709 - DNA, 20 bp, synthetic construct
  misc_feature 1..20: note = chemically synthesized
  source 1..20: mol_type = other DNA
ctctccctctgttagtgttg

SEQ ID NO: 18710 - DNA, 20 bp, synthetic construct
  misc_feature 1..20: note = chemically synthesized
  source 1..20: mol_type = other DNA
ccctctgttagtgttgaaga

SEQ ID NO: 18711 - DNA, 20 bp, synthetic construct
  misc_feature 1..20: note = chemically synthesized
  source 1..20: mol_type = other DNA
tgttgaagacagcataaatt

SEQ ID NO: 18712 - DNA, 20 bp, synthetic construct
  misc_feature 1..20: note = chemically synthesized
  source 1..20: mol_type = other DNA
gttgaagacagcataaattg

SEQ ID NO: 18713 - DNA, 20 bp, synthetic construct
  misc_feature 1..20: note = chemically synthesized
  source 1..20: mol_type = other DNA
ttgaagacagcataaattga

SEQ ID NO: 18714 - DNA, 20 bp, synthetic construct
  misc_feature 1..20: note = chemically synthesized
  source 1..20: mol_type = other DNA
ttctttttttattcatcatg

SEQ ID NO: 18715 - DNA, 20 bp, synthetic construct
  misc_feature 1..20: note = chemically synthesized
  source 1..20: mol_type = other DNA
tctttttttattcatcatgt

SEQ ID NO: 18716 - DNA, 20 bp, synthetic construct
  misc_feature 1..20: note = chemically synthesized
  source 1..20: mol_type = other DNA
tttattcatcatgtaggtaa

SEQ ID NO: 18717 - DNA, 20 bp, synthetic construct
  misc_feature 1..20: note = chemically synthesized
  source 1..20: mol_type = other DNA
atcatgtaggtaaaagcata

SEQ ID NO: 18718 - DNA, 20 bp, synthetic construct
  misc_feature 1..20: note = chemically synthesized
  source 1..20: mol_type = other DNA
taaaagcatatggcctgttc

SEQ ID NO: 18719 - DNA, 20 bp, synthetic construct
  misc_feature 1..20: note = chemically synthesized
  source 1..20: mol_type = other DNA
aaaagcatatggcctgttct

SEQ ID NO: 18720 - DNA, 20 bp, synthetic construct
  misc_feature 1..20: note = chemically synthesized
  source 1..20: mol_type = other DNA
tgcaatccattttttaaact

SEQ ID NO: 18721 - DNA, 20 bp, synthetic construct
  misc_feature 1..20: note = chemically synthesized
  source 1..20: mol_type = other DNA
ttaaacttggtgtttaccat

SEQ ID NO: 18722 - DNA, 20 bp, synthetic construct
  misc_feature 1..20: note = chemically synthesized
  source 1..20: mol_type = other DNA
tggtgtttaccattggcttt

SEQ ID NO: 18723 - DNA, 20 bp, synthetic construct
  misc_feature 1..20: note = chemically synthesized
  source 1..20: mol_type = other DNA
tttaccattggcttttagca

SEQ ID NO: 18724 - DNA, 20 bp, synthetic construct
  misc_feature 1..20: note = chemically synthesized
  source 1..20: mol_type = other DNA
tttctgttttccacactgtc

SEQ ID NO: 18725 - DNA, 20 bp, synthetic construct
  misc_feature 1..20: note = chemically synthesized
  source 1..20: mol_type = other DNA
cagcaaataccatttatatg

SEQ ID NO: 18726 - DNA, 20 bp, synthetic construct
  misc_feature 1..20: note = chemically synthesized
  source 1..20: mol_type = other DNA
atttatatgtggcattgaat

SEQ ID NO: 18727 - DNA, 20 bp, synthetic construct
  misc_feature 1..20: note = chemically synthesized
  source 1..20: mol_type = other DNA
aatgagatatgaaatgtttt

SEQ ID NO: 18728 - DNA, 20 bp, synthetic construct
  misc_feature 1..20: note = chemically synthesized
  source 1..20: mol_type = other DNA
gagatatgaaatgttttcag

SEQ ID NO: 18729 - DNA, 20 bp, synthetic construct
  misc_feature 1..20: note = chemically synthesized
  source 1..20: mol_type = other DNA
ttttcagaagcatgctgaaa

SEQ ID NO: 18730 - DNA, 20 bp, synthetic construct
  misc_feature 1..20: note = chemically synthesized
  source 1..20: mol_type = other DNA
tttcagaagcatgctgaaaa

SEQ ID NO: 18731 - DNA, 20 bp, synthetic construct
  misc_feature 1..20: note = chemically synthesized
  source 1..20: mol_type = other DNA
ttcagaagcatgctgaaaaa

SEQ ID NO: 18732 - DNA, 20 bp, synthetic construct
  misc_feature 1..20: note = chemically synthesized
  source 1..20: mol_type = other DNA
atgctgaaaaagggcattca

SEQ ID NO: 18733 - DNA, 20 bp, synthetic construct
  misc_feature 1..20: note = chemically synthesized
  source 1..20: mol_type = other DNA
gggcattcaaagttatcctt

SEQ ID NO: 18734 - DNA, 20 bp, synthetic construct
  misc_feature 1..20: note = chemically synthesized
  source 1..20: mol_type = other DNA
cttttattatcccatgtgct

SEQ ID NO: 18735 - DNA, 20 bp, synthetic construct
  misc_feature 1..20: note = chemically synthesized
  source 1..20: mol_type = other DNA
tttattatcccatgtgctca

SEQ ID NO: 18736 - DNA, 20 bp, synthetic construct
  misc_feature 1..20: note = chemically synthesized
  source 1..20: mol_type = other DNA
ttatcccatgtgctcagagt

SEQ ID NO: 18737 - DNA, 20 bp, synthetic construct
  misc_feature 1..20: note = chemically synthesized
  source 1..20: mol_type = other DNA
tatcccatgtgctcagagta

SEQ ID NO: 18738 - DNA, 20 bp, synthetic construct
  misc_feature 1..20: note = chemically synthesized
  source 1..20: mol_type = other DNA
atcccatgtgctcagagtaa

SEQ ID NO: 18739 - DNA, 20 bp, synthetic construct
  misc_feature 1..20: note = chemically synthesized
  source 1..20: mol_type = other DNA
tcccatgtgctcagagtaag

SEQ ID NO: 18740 - DNA, 20 bp, synthetic construct
  misc_feature 1..20: note = chemically synthesized
  source 1..20: mol_type = other DNA
agagtaaggggcaaatgaat

SEQ ID NO: 18741 - DNA, 20 bp, synthetic construct
  misc_feature 1..20: note = chemically synthesized
  source 1..20: mol_type = other DNA
tgtgaaatatgtgttccttg

SEQ ID NO: 18742 - DNA, 20 bp, synthetic construct
  misc_feature 1..20: note = chemically synthesized
  source 1..20: mol_type = other DNA
gtgaaatatgtgttccttgt

SEQ ID NO: 18743 - DNA, 20 bp, synthetic construct
  misc_feature 1..20: note = chemically synthesized
  source 1..20: mol_type = other DNA
tatgtgttccttgtaggaca

SEQ ID NO: 18744 - DNA, 20 bp, synthetic construct
  misc_feature 1..20: note = chemically synthesized
  source 1..20: mol_type = other DNA
atgtgttccttgtaggacac

SEQ ID NO: 18745 - DNA, 20 bp, synthetic construct
  misc_feature 1..20: note = chemically synthesized
  source 1..20: mol_type = other DNA
tgtaggacacaggcactctt

SEQ ID NO: 18746 - DNA, 20 bp, synthetic construct
  misc_feature 1..20: note = chemically synthesized
  source 1..20: mol_type = other DNA
acaggcactcttgagatcta

SEQ ID NO: 18747 - DNA, 20 bp, synthetic construct
  misc_feature 1..20: note = chemically synthesized
  source 1..20: mol_type = other DNA
agatctatagcttcaataaa

SEQ ID NO: 18748 - DNA, 20 bp, synthetic construct
  misc_feature 1..20: note = chemically synthesized
  source 1..20: mol_type = other DNA
gatctatagcttcaataaaa

SEQ ID NO: 18749 - DNA, 20 bp, synthetic construct
  misc_feature 1..20: note = chemically synthesized
  source 1..20: mol_type = other DNA
ctctttaatttataatgttt

SEQ ID NO: 18750 - DNA, 20 bp, synthetic construct
  misc_feature 1..20: note = chemically synthesized
  source 1..20: mol_type = other DNA
tctttaatttataatgtttt

SEQ ID NO: 18751 - DNA, 20 bp, synthetic construct
  misc_feature 1..20: note = chemically synthesized
  source 1..20: mol_type = other DNA
ctttaatttataatgttttg

SEQ ID NO: 18752 - DNA, 20 bp, synthetic construct
  misc_feature 1..20: note = chemically synthesized
  source 1..20: mol_type = other DNA
aatgttttggggatttttaa

SEQ ID NO: 18753 - DNA, 20 bp, synthetic construct
  misc_feature 1..20: note = chemically synthesized
  source 1..20: mol_type = other DNA
atgttttggggatttttaat

SEQ ID NO: 18754 - DNA, 20 bp, synthetic construct
  misc_feature 1..20: note = chemically synthesized
  source 1..20: mol_type = other DNA
ttttaataggcatgctctgt

SEQ ID NO: 18755 - DNA, 20 bp, synthetic construct
  misc_feature 1..20: note = chemically synthesized
  source 1..20: mol_type = other DNA
tttaataggcatgctctgta

SEQ ID NO: 18756 - DNA, 20 bp, synthetic construct
  misc_feature 1..20: note = chemically synthesized
  source 1..20: mol_type = other DNA
ttaataggcatgctctgtaa

SEQ ID NO: 18757 - DNA, 20 bp, synthetic construct
  misc_feature 1..20: note = chemically synthesized
  source 1..20: mol_type = other DNA
ggcatgctctgtaagggcac

SEQ ID NO: 18758 - DNA, 20 bp, synthetic construct
  misc_feature 1..20: note = chemically synthesized
  source 1..20: mol_type = other DNA
tctgtaagggcactggtaat

SEQ ID NO: 18759 - DNA, 20 bp, synthetic construct
  misc_feature 1..20: note = chemically synthesized
  source 1..20: mol_type = other DNA
tttgcatgctcttctatctc

SEQ ID NO: 18760 - DNA, 20 bp, synthetic construct
  misc_feature 1..20: note = chemically synthesized
  source 1..20: mol_type = other DNA
aaaataaaatcttaaaaaac

SEQ ID NO: 18761 - DNA, 20 bp, synthetic construct
  misc_feature 1..20: note = chemically synthesized
  source 1..20: mol_type = other DNA
aatcttaaaaaacaagaaaa

SEQ ID NO: 18762 - DNA, 20 bp, synthetic construct
  misc_feature 1..20: note = chemically synthesized
  source 1..20: mol_type = other DNA
aaaaaaacaaaaacaaaaac

SEQ ID NO: 18763 - DNA, 20 bp, synthetic construct
  misc_feature 1..20: note = chemically synthesized
  source 1..20: mol_type = other DNA
aaaaaacaaaaacaaaaaca

SEQ ID NO: 18764 - DNA, 20 bp, synthetic construct
  misc_feature 1..20: note = chemically synthesized
  source 1..20: mol_type = other DNA
aaacaaaaacaaggaacata

SEQ ID NO: 18765 - DNA, 20 bp, synthetic construct
  misc_feature 1..20: note = chemically synthesized
  source 1..20: mol_type = other DNA
aaaacaaggaacataaagtt

SEQ ID NO: 18766 - DNA, 20 bp, synthetic construct
  misc_feature 1..20: note = chemically synthesized
  source 1..20: mol_type = other DNA
ttagccctaacccaacccaa

SEQ ID NO: 18767 - DNA, 20 bp, synthetic construct
  misc_feature 1..20: note = chemically synthesized
  source 1..20: mol_type = other DNA
cccaacccaaaagcaaataa

SEQ ID NO: 18768 - DNA, 20 bp, synthetic construct
  misc_feature 1..20: note = chemically synthesized
  source 1..20: mol_type = other DNA
ccaacccaaaagcaaataac

SEQ ID NO: 18769 - DNA, 20 bp, synthetic construct
  misc_feature 1..20: note = chemically synthesized
  source 1..20: mol_type = other DNA
caaataacaggccgaatgaa

SEQ ID NO: 18770 - DNA, 20 bp, synthetic construct
  misc_feature 1..20: note = chemically synthesized
  source 1..20: mol_type = other DNA
ataacaggccgaatgaatgg

SEQ ID NO: 18771 - DNA, 20 bp, synthetic construct
  misc_feature 1..20: note = chemically synthesized
  source 1..20: mol_type = other DNA
ccgaatgaatggcagccccc

SEQ ID NO: 18772 - DNA, 20 bp, synthetic construct
  misc_feature 1..20: note = chemically synthesized
  source 1..20: mol_type = other DNA
gaatgaatggcagcccccca

SEQ ID NO: 18773 - DNA, 20 bp, synthetic construct
  misc_feature 1..20: note = chemically synthesized
  source 1..20: mol_type = other DNA
aatgaatggcagccccccag

SEQ ID NO: 18774 - DNA, 20 bp, synthetic construct
  misc_feature 1..20: note = chemically synthesized
  source 1..20: mol_type = other DNA
tccattattacctgaaataa

SEQ ID NO: 18775 - DNA, 20 bp, synthetic construct
  misc_feature 1..20: note = chemically synthesized
  source 1..20: mol_type = other DNA
aagcatgataacattcatgc

SEQ ID NO: 18776 - DNA, 20 bp, synthetic construct
  misc_feature 1..20: note = chemically synthesized
  source 1..20: mol_type = other DNA
gcatgataacattcatgcca

SEQ ID NO: 18777 - DNA, 20 bp, synthetic construct
  misc_feature 1..20: note = chemically synthesized
  source 1..20: mol_type = other DNA
gataacattcatgccagaga

SEQ ID NO: 18778 - DNA, 20 bp, synthetic construct
  misc_feature 1..20: note = chemically synthesized
  source 1..20: mol_type = other DNA
ataacattcatgccagagat

SEQ ID NO: 18779 - DNA, 20 bp, synthetic construct
  misc_feature 1..20: note = chemically synthesized
  source 1..20: mol_type = other DNA
aggtgacaaaattatgtatt

SEQ ID NO: 18780 - DNA, 20 bp, synthetic construct
  misc_feature 1..20: note = chemically synthesized
  source 1..20: mol_type = other DNA
aaattatgtattcagacatg

SEQ ID NO: 18781 - DNA, 20 bp, synthetic construct
  misc_feature 1..20: note = chemically synthesized
  source 1..20: mol_type = other DNA
atgtattcagacatgaagtt

SEQ ID NO: 18782 - DNA, 20 bp, synthetic construct
  misc_feature 1..20: note = chemically synthesized
  source 1..20: mol_type = other DNA
tgtattcagacatgaagttt

SEQ ID NO: 18783 - DNA, 20 bp, synthetic construct
  misc_feature 1..20: note = chemically synthesized
  source 1..20: mol_type = other DNA
acatgaagtttaggatttca

SEQ ID NO: 18784 - DNA, 20 bp, synthetic construct
  misc_feature 1..20: note = chemically synthesized
  source 1..20: mol_type = other DNA
attgtgttgtgcaaatgtat

SEQ ID NO: 18785 - DNA, 20 bp, synthetic construct
  misc_feature 1..20: note = chemically synthesized
  source 1..20: mol_type = other DNA
gttgtattgttaatgcatga

SEQ ID NO: 18786 - DNA, 20 bp, synthetic construct
  misc_feature 1..20: note = chemically synthesized
  source 1..20: mol_type = other DNA
ttgtattgttaatgcatgat

SEQ ID NO: 18787 - DNA, 20 bp, synthetic construct
  misc_feature 1..20: note = chemically synthesized
  source 1..20: mol_type = other DNA
tattgttaatgcatgatagg

SEQ ID NO: 18788 - DNA, 20 bp, synthetic construct
  misc_feature 1..20: note = chemically synthesized
  source 1..20: mol_type = other DNA
gcatgataggaagctgccgc

SEQ ID NO: 18789 - DNA, 20 bp, synthetic construct
  misc_feature 1..20: note = chemically synthesized
  source 1..20: mol_type = other DNA
catgataggaagctgccgct

SEQ ID NO: 18790 - DNA, 20 bp, synthetic construct
  misc_feature 1..20: note = chemically synthesized
  source 1..20: mol_type = other DNA
ataggaagctgccgctagga

SEQ ID NO: 18791 - DNA, 20 bp, synthetic construct
  misc_feature 1..20: note = chemically synthesized
  source 1..20: mol_type = other DNA
agctgccgctaggacagtct

SEQ ID NO: 18792 - DNA, 20 bp, synthetic construct
  misc_feature 1..20: note = chemically synthesized
  source 1..20: mol_type = other DNA
acagtcttggctcactaatg

SEQ ID NO: 18793 - DNA, 20 bp, synthetic construct
  misc_feature 1..20: note = chemically synthesized
  source 1..20: mol_type = other DNA
tcttggctcactaatgcggt

SEQ ID NO: 18794 - DNA, 20 bp, synthetic construct
  misc_feature 1..20: note = chemically synthesized
  source 1..20: mol_type = other DNA
ctgtgtcacaatgtgatata

SEQ ID NO: 18795 - DNA, 20 bp, synthetic construct
  misc_feature 1..20: note = chemically synthesized
  source 1..20: mol_type = other DNA
tatatagattatatttacca

SEQ ID NO: 18796 - DNA, 20 bp, synthetic construct
  misc_feature 1..20: note = chemically synthesized
  source 1..20: mol_type = other DNA
ggcatattttgtttgcgaaa

SEQ ID NO: 18797 - DNA, 20 bp, synthetic construct
  misc_feature 1..20: note = chemically synthesized
  source 1..20: mol_type = other DNA
gcatattttgtttgcgaaat

SEQ ID NO: 18798 - DNA, 20 bp, synthetic construct
  misc_feature 1..20: note = chemically synthesized
  source 1..20: mol_type = other DNA
atattttgtttgcgaaatgg

SEQ ID NO: 18799 - DNA, 20 bp, synthetic construct
  misc_feature 1..20: note = chemically synthesized
  source 1..20: mol_type = other DNA
ttttgtttgcgaaatgggag

SEQ ID NO: 18800 - DNA, 20 bp, synthetic construct
  misc_feature 1..20: note = chemically synthesized
  source 1..20: mol_type = other DNA
atgggagcggatgataaatg

SEQ ID NO: 18801 - DNA, 20 bp, synthetic construct
  misc_feature 1..20: note = chemically synthesized
  source 1..20: mol_type = other DNA
tgataaatgaagataccctc

SEQ ID NO: 18802 - DNA, 20 bp, synthetic construct
  misc_feature 1..20: note = chemically synthesized
  source 1..20: mol_type = other DNA
ataccctccagttttcacac

SEQ ID NO: 18803 - DNA, 20 bp, synthetic construct
  misc_feature 1..20: note = chemically synthesized
  source 1..20: mol_type = other DNA
agttttcacactagttcctg

SEQ ID NO: 18804 - DNA, 20 bp, synthetic construct
  misc_feature 1..20: note = chemically synthesized
  source 1..20: mol_type = other DNA
tcacactagttcctgtggtc

SEQ ID NO: 18805 - DNA, 20 bp, synthetic construct
  misc_feature 1..20: note = chemically synthesized
  source 1..20: mol_type = other DNA
acactagttcctgtggtccg

SEQ ID NO: 18806 - DNA, 20 bp, synthetic construct
  misc_feature 1..20: note = chemically synthesized
  source 1..20: mol_type = other DNA
ccggagtctctcaaacaata

SEQ ID NO: 18807 - DNA, 20 bp, synthetic construct
  misc_feature 1..20: note = chemically synthesized
  source 1..20: mol_type = other DNA
caataaagcacccctgataa

SEQ ID NO: 18808 - DNA, 20 bp, synthetic construct
  misc_feature 1..20: note = chemically synthesized
  source 1..20: mol_type = other DNA
ataaagcacccctgataatg

SEQ ID NO: 18809 - DNA, 20 bp, synthetic construct
  misc_feature 1..20: note = chemically synthesized
  source 1..20: mol_type = other DNA
aaagcacccctgataatgga

SEQ ID NO: 18810 - DNA, 20 bp, synthetic construct
  misc_feature 1..20: note = chemically synthesized
  source 1..20: mol_type = other DNA
aagcacccctgataatggag

SEQ ID NO: 18811 - DNA, 20 bp, synthetic construct
  misc_feature 1..20: note = chemically synthesized
  source 1..20: mol_type = other DNA
tgataatggagaggtattta

SEQ ID NO: 18812 - DNA, 20 bp, synthetic construct
  misc_feature 1..20: note = chemically synthesized
  source 1..20: mol_type = other DNA
gataatggagaggtatttat

SEQ ID NO: 18813 - DNA, 20 bp, synthetic construct
  misc_feature 1..20: note = chemically synthesized
  source 1..20: mol_type = other DNA
tgggaacataattgacttca

SEQ ID NO: 18814 - DNA, 20 bp, synthetic construct
  misc_feature 1..20: note = chemically synthesized
  source 1..20: mol_type = other DNA
cataattgacttcaaagttt

SEQ ID NO: 18815 - DNA, 20 bp, synthetic construct
  misc_feature 1..20: note = chemically synthesized
  source 1..20: mol_type = other DNA
acttcaaagttttagatctc

SEQ ID NO: 18816 - DNA, 20 bp, synthetic construct
  misc_feature 1..20: note = chemically synthesized
  source 1..20: mol_type = other DNA
aagttttagatctctggctg

SEQ ID NO: 18817 - DNA, 20 bp, synthetic construct
  misc_feature 1..20: note = chemically synthesized
  source 1..20: mol_type = other DNA
tagatctctggctgaagttt

SEQ ID NO: 18818 - DNA, 20 bp, synthetic construct
  misc_feature 1..20: note = chemically synthesized
  source 1..20: mol_type = other DNA
tctctggctgaagtttaaga

SEQ ID NO: 18819 - DNA, 20 bp, synthetic construct
  misc_feature 1..20: note = chemically synthesized
  source 1..20: mol_type = other DNA
ctctggctgaagtttaagat

SEQ ID NO: 18820 - DNA, 20 bp, synthetic construct
  misc_feature 1..20: note = chemically synthesized
  source 1..20: mol_type = other DNA
ggctgaagtttaagatggga

SEQ ID NO: 18821 - DNA, 20 bp, synthetic construct
  misc_feature 1..20: note = chemically synthesized
  source 1..20: mol_type = other DNA
tacattaatgtctgtgctta

SEQ ID NO: 18822 - DNA, 20 bp, synthetic construct
  misc_feature 1..20: note = chemically synthesized
  source 1..20: mol_type = other DNA
ctgtgcttaaagctcctatt

SEQ ID NO: 18823 - DNA, 20 bp, synthetic construct
  misc_feature 1..20: note = chemically synthesized
  source 1..20: mol_type = other DNA
tttggcttaaataaattatt

SEQ ID NO: 18824 - DNA, 20 bp, synthetic construct
  misc_feature 1..20: note = chemically synthesized
  source 1..20: mol_type = other DNA
ttggcttaaataaattattt

SEQ ID NO: 18825 - DNA, 20 bp, synthetic construct
  misc_feature 1..20: note = chemically synthesized
  source 1..20: mol_type = other DNA
tggcttaaataaattattta

SEQ ID NO: 18826 - DNA, 20 bp, synthetic construct
  misc_feature 1..20: note = chemically synthesized
  source 1..20: mol_type = other DNA
agggtttactgcttaaacct

SEQ ID NO: 18827 - DNA, 20 bp, synthetic construct
  misc_feature 1..20: note = chemically synthesized
  source 1..20: mol_type = other DNA
ttggtcaattcttgaacgtt

SEQ ID NO: 18828 - DNA, 20 bp, synthetic construct
  misc_feature 1..20: note = chemically synthesized
  source 1..20: mol_type = other DNA
tggtcaattcttgaacgttt

SEQ ID NO: 18829 - DNA, 20 bp, synthetic construct
  misc_feature 1..20: note = chemically synthesized
  source 1..20: mol_type = other DNA
caattcttgaacgtttgggc

SEQ ID NO: 18830 - DNA, 20 bp, synthetic construct
  misc_feature 1..20: note = chemically synthesized
  source 1..20: mol_type = other DNA
cttgaacgtttgggctagtt

SEQ ID NO: 18831 - DNA, 20 bp, synthetic construct
  misc_feature 1..20: note = chemically synthesized
  source 1..20: mol_type = other DNA
gggctagttaagtaattttc

SEQ ID NO: 18832 - DNA, 20 bp, synthetic construct
  misc_feature 1..20: note = chemically synthesized
  source 1..20: mol_type = other DNA
tccagtgactttctgtgcct

SEQ ID NO: 18833 - DNA, 20 bp, synthetic construct
  misc_feature 1..20: note = chemically synthesized
  source 1..20: mol_type = other DNA
ggtgattcatttacttgatt

SEQ ID NO: 18834 - DNA, 20 bp, synthetic construct
  misc_feature 1..20: note = chemically synthesized
  source 1..20: mol_type = other DNA
gatttctaaatgtatttctc

SEQ ID NO: 18835 - DNA, 20 bp, synthetic construct
  misc_feature 1..20: note = chemically synthesized
  source 1..20: mol_type = other DNA
tgtatttctcaagttttgcc

SEQ ID NO: 18836 - DNA, 20 bp, synthetic construct
  misc_feature 1..20: note = chemically synthesized
  source 1..20: mol_type = other DNA
caatgaatgattttgcttac

SEQ ID NO: 18837 - DNA, 20 bp, synthetic construct
  misc_feature 1..20: note = chemically synthesized
  source 1..20: mol_type = other DNA
atgaatgattttgcttactg

SEQ ID NO: 18838 - DNA, 20 bp, synthetic construct
  misc_feature 1..20: note = chemically synthesized
  source 1..20: mol_type = other DNA
ttgcttactggagtcttgtg

SEQ ID NO: 18839 - DNA, 20 bp, synthetic construct
  misc_feature 1..20: note = chemically synthesized
  source 1..20: mol_type = other DNA
cttgtgtggtacacctataa

SEQ ID NO: 18840 - DNA, 20 bp, synthetic construct
  misc_feature 1..20: note = chemically synthesized
  source 1..20: mol_type = other DNA
ttgtgtggtacacctataaa

SEQ ID NO: 18841 - DNA, 20 bp, synthetic construct
  misc_feature 1..20: note = chemically synthesized
  source 1..20: mol_type = other DNA
cacatcaacactgtcatcat

SEQ ID NO: 18842 - DNA, 20 bp, synthetic construct
  misc_feature 1..20: note = chemically synthesized
  source 1..20: mol_type = other DNA
aacactgtcatcataagata

SEQ ID NO: 18843 - DNA, 20 bp, synthetic construct
  misc_feature 1..20: note = chemically synthesized
  source 1..20: mol_type = other DNA
tgcatgtatgaatatatata

SEQ ID NO: 18844 - DNA, 20 bp, synthetic construct
  misc_feature 1..20: note = chemically synthesized
  source 1..20: mol_type = other DNA
gttgtgtgcctgtgtgtgtg

SEQ ID NO: 18845 - DNA, 20 bp, synthetic construct
  misc_feature 1..20: note = chemically synthesized
  source 1..20: mol_type = other DNA
tgtgcctgtgtgtgtgtaga

SEQ ID NO: 18846 - DNA, 20 bp, synthetic construct
  misc_feature 1..20: note = chemically synthesized
  source 1..20: mol_type = other DNA
gtgcctgtgtgtgtgtagaa

SEQ ID NO: 18847 - DNA, 20 bp, synthetic construct
  misc_feature 1..20: note = chemically synthesized
  source 1..20: mol_type = other DNA
tgcctgtgtgtgtgtagaaa

SEQ ID NO: 18848 - DNA, 20 bp, synthetic construct
  misc_feature 1..20: note = chemically synthesized
  source 1..20: mol_type = other DNA
cctgtgtgtgtgtagaaagg

SEQ ID NO: 18849 - DNA, 20 bp, synthetic construct
  misc_feature 1..20: note = chemically synthesized
  source 1..20: mol_type = other DNA
tgtgtgtgtgtagaaaggga

SEQ ID NO: 18850 - DNA, 20 bp, synthetic construct
  misc_feature 1..20: note = chemically synthesized
  source 1..20: mol_type = other DNA
tgtgtgtgtagaaagggaga

SEQ ID NO: 18851 - DNA, 20 bp, synthetic construct
  misc_feature 1..20: note = chemically synthesized
  source 1..20: mol_type = other DNA
tgtgtgtagaaagggagaga

SEQ ID NO: 18852 - DNA, 20 bp, synthetic construct
  misc_feature 1..20: note = chemically synthesized
  source 1..20: mol_type = other DNA
tgtgtagaaagggagagaga

SEQ ID NO: 18853 - DNA, 20 bp, synthetic construct
  misc_feature 1..20: note = chemically synthesized
  source 1..20: mol_type = other DNA
agaaagggagagagagagaa

SEQ ID NO: 18854 - DNA, 20 bp, synthetic construct
  misc_feature 1..20: note = chemically synthesized
  source 1..20: mol_type = other DNA
gaaagggagagagagagaat

SEQ ID NO: 18855 - DNA, 20 bp, synthetic construct
  misc_feature 1..20: note = chemically synthesized
  source 1..20: mol_type = other DNA
gggagagagagagaatagga

SEQ ID NO: 18856 - DNA, 20 bp, synthetic construct
  misc_feature 1..20: note = chemically synthesized
  source 1..20: mol_type = other DNA
agagagaataggaaagtctt

SEQ ID NO: 18857 - DNA, 20 bp, synthetic construct
  misc_feature 1..20: note = chemically synthesized
  source 1..20: mol_type = other DNA
atgattccatcaaatcaata

SEQ ID NO: 18858 - DNA, 20 bp, synthetic construct
  misc_feature 1..20: note = chemically synthesized
  source 1..20: mol_type = other DNA
attccatcaaatcaatatag

SEQ ID NO: 18859 - DNA, 20 bp, synthetic construct
  misc_feature 1..20: note = chemically synthesized
  source 1..20: mol_type = other DNA
atcaatatagaagtttttga

SEQ ID NO: 18860 - DNA, 20 bp, synthetic construct
  misc_feature 1..20: note = chemically synthesized
  source 1..20: mol_type = other DNA
gtttttgaaagctatccatg

SEQ ID NO: 18861 - DNA, 20 bp, synthetic construct
  misc_feature 1..20: note = chemically synthesized
  source 1..20: mol_type = other DNA
ttttcatcaaaatctgactt

SEQ ID NO: 18862 - DNA, 20 bp, synthetic construct
  misc_feature 1..20: note = chemically synthesized
  source 1..20: mol_type = other DNA
tctccatactatttatctga

SEQ ID NO: 18863 - DNA, 20 bp, synthetic construct
  misc_feature 1..20: note = chemically synthesized
  source 1..20: mol_type = other DNA
ctgaaagtctgttgttcaca

SEQ ID NO: 18864 - DNA, 20 bp, synthetic construct
  misc_feature 1..20: note = chemically synthesized
  source 1..20: mol_type = other DNA
gtctgttgttcacatagcgc

SEQ ID NO: 18865 - DNA, 20 bp, synthetic construct
  misc_feature 1..20: note = chemically synthesized
  source 1..20: mol_type = other DNA
tgttcacatagcgctggatt

SEQ ID NO: 18866 - DNA, 20 bp, synthetic construct
  misc_feature 1..20: note = chemically synthesized
  source 1..20: mol_type = other DNA
gttcacatagcgctggattg

SEQ ID NO: 18867 - DNA, 20 bp, synthetic construct
  misc_feature 1..20: note = chemically synthesized
  source 1..20: mol_type = other DNA
tagcgctggattgaggatca

SEQ ID NO: 18868 - DNA, 20 bp, synthetic construct
  misc_feature 1..20: note = chemically synthesized
  source 1..20: mol_type = other DNA
cgctggattgaggatcatag

SEQ ID NO: 18869 - DNA, 20 bp, synthetic construct
  misc_feature 1..20: note = chemically synthesized
  source 1..20: mol_type = other DNA
gaggatcatagtggcaaatt

SEQ ID NO: 18870 - DNA, 20 bp, synthetic construct
  misc_feature 1..20: note = chemically synthesized
  source 1..20: mol_type = other DNA
aggatcatagtggcaaattt

SEQ ID NO: 18871 - DNA, 20 bp, synthetic construct
  misc_feature 1..20: note = chemically synthesized
  source 1..20: mol_type = other DNA
gatcatagtggcaaatttag

SEQ ID NO: 18872 - DNA, 20 bp, synthetic construct
  misc_feature 1..20: note = chemically synthesized
  source 1..20: mol_type = other DNA
agtggcaaatttaggagcaa

SEQ ID NO: 18873 - DNA, 20 bp, synthetic construct
  misc_feature 1..20: note = chemically synthesized
  source 1..20: mol_type = other DNA
aatttaggagcaacagtccc

SEQ ID NO: 18874 - DNA, 20 bp, synthetic construct
  misc_feature 1..20: note = chemically synthesized
  source 1..20: mol_type = other DNA
ttaggagcaacagtcccaag

SEQ ID NO: 18875 - DNA, 20 bp, synthetic construct
  misc_feature 1..20: note = chemically synthesized
  source 1..20: mol_type = other DNA
taggagcaacagtcccaagc

SEQ ID NO: 18876 - DNA, 20 bp, synthetic construct
  misc_feature 1..20: note = chemically synthesized
  source 1..20: mol_type = other DNA
acagtcccaagcaggaatcc

SEQ ID NO: 18877 - DNA, 20 bp, synthetic construct
  misc_feature 1..20: note = chemically synthesized
  source 1..20: mol_type = other DNA
tcccaagcaggaatcctgga

SEQ ID NO: 18878 - DNA, 20 bp, synthetic construct
  misc_feature 1..20: note = chemically synthesized
  source 1..20: mol_type = other DNA
caagcaggaatcctggatgg

SEQ ID NO: 18879 - DNA, 20 bp, synthetic construct
  misc_feature 1..20: note = chemically synthesized
  source 1..20: mol_type = other DNA
aagcaggaatcctggatggc

SEQ ID NO: 18880 - DNA, 20 bp, synthetic construct
  misc_feature 1..20: note = chemically synthesized
  source 1..20: mol_type = other DNA
ctgtcctttgtgcctcccct

SEQ ID NO: 18881 - DNA, 20 bp, synthetic construct
  misc_feature 1..20: note = chemically synthesized
  source 1..20: mol_type = other DNA
ctttgtgcctcccctgagtt

SEQ ID NO: 18882 - DNA, 20 bp, synthetic construct
  misc_feature 1..20: note = chemically synthesized
  source 1..20: mol_type = other DNA
tgtgcctcccctgagttgag

SEQ ID NO: 18883 - DNA, 20 bp, synthetic construct
  misc_feature 1..20: note = chemically synthesized
  source 1..20: mol_type = other DNA
ctcccctgagttgagaagac

SEQ ID NO: 18884 - DNA, 20 bp, synthetic construct
  misc_feature 1..20: note = chemically synthesized
  source 1..20: mol_type = other DNA
actggtgtttattctttctc

SEQ ID NO: 18885 - DNA, 20 bp, synthetic construct
  misc_feature 1..20: note = chemically synthesized
  source 1..20: mol_type = other DNA
ctggtgtttattctttctct

SEQ ID NO: 18886 - DNA, 20 bp, synthetic construct
  misc_feature 1..20: note = chemically synthesized
  source 1..20: mol_type = other DNA
cttgaaatctcccttcttta

SEQ ID NO: 18887 - DNA, 20 bp, synthetic construct
  misc_feature 1..20: note = chemically synthesized
  source 1..20: mol_type = other DNA
cttctttacggttctgccat

SEQ ID NO: 18888 - DNA, 20 bp, synthetic construct
  misc_feature 1..20: note = chemically synthesized
  source 1..20: mol_type = other DNA
ctgtgacctgcctctgcatc

SEQ ID NO: 18889 - DNA, 20 bp, synthetic construct
  misc_feature 1..20: note = chemically synthesized
  source 1..20: mol_type = other DNA
tgcctctgcatctggttaaa

SEQ ID NO: 18890 - DNA, 20 bp, synthetic construct
  misc_feature 1..20: note = chemically synthesized
  source 1..20: mol_type = other DNA
gcatctggttaaatggactt

SEQ ID NO: 18891 - DNA, 20 bp, synthetic construct
  misc_feature 1..20: note = chemically synthesized
  source 1..20: mol_type = other DNA
ggacttcagtaatctgtaca

SEQ ID NO: 18892 - DNA, 20 bp, synthetic construct
  misc_feature 1..20: note = chemically synthesized
  source 1..20: mol_type = other DNA
ttacttattttatatcctga

SEQ ID NO: 18893 - DNA, 20 bp, synthetic construct
  misc_feature 1..20: note = chemically synthesized
  source 1..20: mol_type = other DNA
tttatatcctgaaagatatt

SEQ ID NO: 18894 - DNA, 20 bp, synthetic construct
  misc_feature 1..20: note = chemically synthesized
  source 1..20: mol_type = other DNA
tgaaagatattaagtccaac

SEQ ID NO: 18895 - DNA, 20 bp, synthetic construct
  misc_feature 1..20: note = chemically synthesized
  source 1..20: mol_type = other DNA
gtccaacaagcttttaccca

SEQ ID NO: 18896 - DNA, 20 bp, synthetic construct
  misc_feature 1..20: note = chemically synthesized
  source 1..20: mol_type = other DNA
ccaacaagcttttacccaca

SEQ ID NO: 18897 - DNA, 20 bp, synthetic construct
  misc_feature 1..20: note = chemically synthesized
  source 1..20: mol_type = other DNA
gcttttacccacagagtcta

SEQ ID NO: 18898 - DNA, 20 bp, synthetic construct
  misc_feature 1..20: note = chemically synthesized
  source 1..20: mol_type = other DNA
ttttacccacagagtctaca

SEQ ID NO: 18899 - DNA, 20 bp, synthetic construct
  misc_feature 1..20: note = chemically synthesized
  source 1..20: mol_type = other DNA
cacagagtctacagagaaaa

SEQ ID NO: 18900 - DNA, 20 bp, synthetic construct
  misc_feature 1..20: note = chemically synthesized
  source 1..20: mol_type = other DNA
gagtctacagagaaaacggc

SEQ ID NO: 18901 - DNA, 20 bp, synthetic construct
  misc_feature 1..20: note = chemically synthesized
  source 1..20: mol_type = other DNA
agtctacagagaaaacggcc

SEQ ID NO: 18902 - DNA, 20 bp, synthetic construct
  misc_feature 1..20: note = chemically synthesized
  source 1..20: mol_type = other DNA
tttcaatctctgtgtctctc

SEQ ID NO: 18903 - DNA, 20 bp, synthetic construct
  misc_feature 1..20: note = chemically synthesized
  source 1..20: mol_type = other DNA
tcaatctctgtgtctctctg

SEQ ID NO: 18904 - DNA, 20 bp, synthetic construct
  misc_feature 1..20: note = chemically synthesized
  source 1..20: mol_type = other DNA
tctgtgtctctctggagcac

SEQ ID NO: 18905 - DNA, 20 bp, synthetic construct
  misc_feature 1..20: note = chemically synthesized
  source 1..20: mol_type = other DNA
tctctctggagcactagttc

SEQ ID NO: 18906 - DNA, 20 bp, synthetic construct
  misc_feature 1..20: note = chemically synthesized
  source 1..20: mol_type = other DNA
tctctggagcactagttcca

SEQ ID NO: 18907 - DNA, 20 bp, synthetic construct
  misc_feature 1..20: note = chemically synthesized
  source 1..20: mol_type = other DNA
ctctggagcactagttccag

SEQ ID NO: 18908 - DNA, 20 bp, synthetic construct
  misc_feature 1..20: note = chemically synthesized
  source 1..20: mol_type = other DNA
tagttccagaggctgatcaa

SEQ ID NO: 18909 - DNA, 20 bp, synthetic construct
  misc_feature 1..20: note = chemically synthesized
  source 1..20: mol_type = other DNA
agttccagaggctgatcaat

SEQ ID NO: 18910 - DNA, 20 bp, synthetic construct
  misc_feature 1..20: note = chemically synthesized
  source 1..20: mol_type = other DNA
ctgatcaataggttttattg

SEQ ID NO: 18911 - DNA, 20 bp, synthetic construct
  misc_feature 1..20: note = chemically synthesized
  source 1..20: mol_type = other DNA
gtagacctcactgtctctaa

SEQ ID NO: 18912 - DNA, 20 bp, synthetic construct
  misc_feature 1..20: note = chemically synthesized
  source 1..20: mol_type = other DNA
gaccttatcctgtctaaaaa

SEQ ID NO: 18913 - DNA, 20 bp, synthetic construct
  misc_feature 1..20: note = chemically synthesized
  source 1..20: mol_type = other DNA
atagtatttgctcttgcctg

SEQ ID NO: 18914 - DNA, 20 bp, synthetic construct
  misc_feature 1..20: note = chemically synthesized
  source 1..20: mol_type = other DNA
ttgacctgtgaaaacccatt

SEQ ID NO: 18915 - DNA, 20 bp, synthetic construct
  misc_feature 1..20: note = chemically synthesized
  source 1..20: mol_type = other DNA
tggaacataactgacatatc

SEQ ID NO: 18916 - DNA, 20 bp, synthetic construct
  misc_feature 1..20: note = chemically synthesized
  source 1..20: mol_type = other DNA
acataactgacatatctagt

SEQ ID NO: 18917 - DNA, 20 bp, synthetic construct
  misc_feature 1..20: note = chemically synthesized
  source 1..20: mol_type = other DNA
atctagtcagctgtatatcc

SEQ ID NO: 18918 - DNA, 20 bp, synthetic construct
  misc_feature 1..20: note = chemically synthesized
  source 1..20: mol_type = other DNA
ctctgtgaatgaattctgtg

SEQ ID NO: 18919 - DNA, 20 bp, synthetic construct
  misc_feature 1..20: note = chemically synthesized
  source 1..20: mol_type = other DNA
gaattctgtgcagaaccgtc

SEQ ID NO: 18920 - DNA, 20 bp, synthetic construct
  misc_feature 1..20: note = chemically synthesized
  source 1..20: mol_type = other DNA
aattctgtgcagaaccgtcc

SEQ ID NO: 18921 - DNA, 20 bp, synthetic construct
  misc_feature 1..20: note = chemically synthesized
  source 1..20: mol_type = other DNA
ttctgtgcagaaccgtccag

SEQ ID NO: 18922 - DNA, 20 bp, synthetic construct
  misc_feature 1..20: note = chemically synthesized
  source 1..20: mol_type = other DNA
ccaggagaacactttcttcc

SEQ ID NO: 18923 - DNA, 20 bp, synthetic construct
  misc_feature 1..20: note = chemically synthesized
  source 1..20: mol_type = other DNA
cttccaagacaaatgaattc

SEQ ID NO: 18924 - DNA, 20 bp, synthetic construct
  misc_feature 1..20: note = chemically synthesized
  source 1..20: mol_type = other DNA
tgaattccagttctgaacac

SEQ ID NO: 18925 - DNA, 20 bp, synthetic construct
  misc_feature 1..20: note = chemically synthesized
  source 1..20: mol_type = other DNA
gaattccagttctgaacact

SEQ ID NO: 18926 - DNA, 20 bp, synthetic construct
  misc_feature 1..20: note = chemically synthesized
  source 1..20: mol_type = other DNA
attccagttctgaacactgg

SEQ ID NO: 18927 - DNA, 20 bp, synthetic construct
  misc_feature 1..20: note = chemically synthesized
  source 1..20: mol_type = other DNA
ctgggagtgcacctgcttgt

SEQ ID NO: 18928 - DNA, 20 bp, synthetic construct
  misc_feature 1..20: note = chemically synthesized
  source 1..20: mol_type = other DNA
gtgcacctgcttgtcggatg

SEQ ID NO: 18929 - DNA, 20 bp, synthetic construct
  misc_feature 1..20: note = chemically synthesized
  source 1..20: mol_type = other DNA
ctgcttgtcggatgtggtga

SEQ ID NO: 18930 - DNA, 20 bp, synthetic construct
  misc_feature 1..20: note = chemically synthesized
  source 1..20: mol_type = other DNA
tgcttgtcggatgtggtgat

SEQ ID NO: 18931 - DNA, 20 bp, synthetic construct
  misc_feature 1..20: note = chemically synthesized
  source 1..20: mol_type = other DNA
ggatgtggtgatgggccaca

SEQ ID NO: 18932 - DNA, 20 bp, synthetic construct
  misc_feature 1..20: note = chemically synthesized
  source 1..20: mol_type = other DNA
tgtggtgatgggccacatgg

SEQ ID NO: 18933 - DNA, 20 bp, synthetic construct
  misc_feature 1..20: note = chemically synthesized
  source 1..20: mol_type = other DNA
gtggtgatgggccacatggt

SEQ ID NO: 18934 - DNA, 20 bp, synthetic construct
  misc_feature 1..20: note = chemically synthesized
  source 1..20: mol_type = other DNA
tggtgatgggccacatggtg

SEQ ID NO: 18935 - DNA, 20 bp, synthetic construct
  misc_feature 1..20: note = chemically synthesized
  source 1..20: mol_type = other DNA
gtgatgggccacatggtggg

SEQ ID NO: 18936 - DNA, 20 bp, synthetic construct
  misc_feature 1..20: note = chemically synthesized
  source 1..20: mol_type = other DNA
tgggccacatggtggggagt

SEQ ID NO: 18937 - DNA, 20 bp, synthetic construct
  misc_feature 1..20: note = chemically synthesized
  source 1..20: mol_type = other DNA
gggccacatggtggggagtg

SEQ ID NO: 18938 - DNA, 20 bp, synthetic construct
  misc_feature 1..20: note = chemically synthesized
  source 1..20: mol_type = other DNA
ggccacatggtggggagtga

SEQ ID NO: 18939 - DNA, 20 bp, synthetic construct
  misc_feature 1..20: note = chemically synthesized
  source 1..20: mol_type = other DNA
ccacatggtggggagtgagg

SEQ ID NO: 18940 - DNA, 20 bp, synthetic construct
  misc_feature 1..20: note = chemically synthesized
  source 1..20: mol_type = other DNA
ggtggggagtgagggagact

SEQ ID NO: 18941 - DNA, 20 bp, synthetic construct
  misc_feature 1..20: note = chemically synthesized
  source 1..20: mol_type = other DNA
gtggggagtgagggagactc

SEQ ID NO: 18942 - DNA, 20 bp, synthetic construct
  misc_feature 1..20: note = chemically synthesized
  source 1..20: mol_type = other DNA
tggggagtgagggagactca

SEQ ID NO: 18943 - DNA, 20 bp, synthetic construct
  misc_feature 1..20: note = chemically synthesized
  source 1..20: mol_type = other DNA
tgagggagactcagggcctg

SEQ ID NO: 18944 - DNA, 20 bp, synthetic construct
  misc_feature 1..20: note = chemically synthesized
  source 1..20: mol_type = other DNA
gagggagactcagggcctgt

SEQ ID NO: 18945 - DNA, 20 bp, synthetic construct
  misc_feature 1..20: note = chemically synthesized
  source 1..20: mol_type = other DNA
agggagactcagggcctgtg

SEQ ID NO: 18946 - DNA, 20 bp, synthetic construct
  misc_feature 1..20: note = chemically synthesized
  source 1..20: mol_type = other DNA
gagactcagggcctgtgggg

SEQ ID NO: 18947 - DNA, 20 bp, synthetic construct
  misc_feature 1..20: note = chemically synthesized
  source 1..20: mol_type = other DNA
ggcctgtggggcagtcgatg

SEQ ID NO: 18948 - DNA, 20 bp, synthetic construct
  misc_feature 1..20: note = chemically synthesized
  source 1..20: mol_type = other DNA
gcctgtggggcagtcgatgt

SEQ ID NO: 18949 - DNA, 20 bp, synthetic construct
  misc_feature 1..20: note = chemically synthesized
  source 1..20: mol_type = other DNA
ctgtggggcagtcgatgtgg

SEQ ID NO: 18950 - DNA, 20 bp, synthetic construct
  misc_feature 1..20: note = chemically synthesized
  source 1..20: mol_type = other DNA
tgtggggcagtcgatgtggg

SEQ ID NO: 18951 - DNA, 20 bp, synthetic construct
  misc_feature 1..20: note = chemically synthesized
  source 1..20: mol_type = other DNA
tcgatgtgggaggactgtca

SEQ ID NO: 18952 - DNA, 20 bp, synthetic construct
  misc_feature 1..20: note = chemically synthesized
  source 1..20: mol_type = other DNA
gatgtgggaggactgtcaca

SEQ ID NO: 18953 - DNA, 20 bp, synthetic construct
  misc_feature 1..20: note = chemically synthesized
  source 1..20: mol_type = other DNA
aggactgtcacagagactct

SEQ ID NO: 18954 - DNA, 20 bp, synthetic construct
  misc_feature 1..20: note = chemically synthesized
  source 1..20: mol_type = other DNA
gactgtcacagagactctca

SEQ ID NO: 18955 - DNA, 20 bp, synthetic construct
  misc_feature 1..20: note = chemically synthesized
  source 1..20: mol_type = other DNA
actgtcacagagactctcag

SEQ ID NO: 18956 - DNA, 20 bp, synthetic construct
  misc_feature 1..20: note = chemically synthesized
  source 1..20: mol_type = other DNA
ctgtcacagagactctcaga

SEQ ID NO: 18957 - DNA, 20 bp, synthetic construct
  misc_feature 1..20: note = chemically synthesized
  source 1..20: mol_type = other DNA
agactctcagagggtgcatt

SEQ ID NO: 18958 - DNA, 20 bp, synthetic construct
  misc_feature 1..20: note = chemically synthesized
  source 1..20: mol_type = other DNA
agggtgcattcagccctgaa

SEQ ID NO: 18959 - DNA, 20 bp, synthetic construct
  misc_feature 1..20: note = chemically synthesized
  source 1..20: mol_type = other DNA
gggtgcattcagccctgaac

SEQ ID NO: 18960 - DNA, 20 bp, synthetic construct
  misc_feature 1..20: note = chemically synthesized
  source 1..20: mol_type = other DNA
ggtgcattcagccctgaaca

SEQ ID NO: 18961 - DNA, 20 bp, synthetic construct
  misc_feature 1..20: note = chemically synthesized
  source 1..20: mol_type = other DNA
attcagccctgaacagggca

SEQ ID NO: 18962 - DNA, 20 bp, synthetic construct
  misc_feature 1..20: note = chemically synthesized
  source 1..20: mol_type = other DNA
ttcagccctgaacagggcaa

SEQ ID NO: 18963 - DNA, 20 bp, synthetic construct
  misc_feature 1..20: note = chemically synthesized
  source 1..20: mol_type = other DNA
tgaacagggcaaaggactgc

SEQ ID NO: 18964 - DNA, 20 bp, synthetic construct
  misc_feature 1..20: note = chemically synthesized
  source 1..20: mol_type = other DNA
gaacagggcaaaggactgca

SEQ ID NO: 18965 - DNA, 20 bp, synthetic construct
  misc_feature 1..20: note = chemically synthesized
  source 1..20: mol_type = other DNA
aacagggcaaaggactgcaa

SEQ ID NO: 18966 - DNA, 20 bp, synthetic construct
  misc_feature 1..20: note = chemically synthesized
  source 1..20: mol_type = other DNA
acagggcaaaggactgcaag

SEQ ID NO: 18967 - DNA, 20 bp, synthetic construct
  misc_feature 1..20: note = chemically synthesized
  source 1..20: mol_type = other DNA
gggcaaaggactgcaagggg

SEQ ID NO: 18968 - DNA, 20 bp, synthetic construct
  misc_feature 1..20: note = chemically synthesized
  source 1..20: mol_type = other DNA
ggcaaaggactgcaaggggc

SEQ ID NO: 18969 - DNA, 20 bp, synthetic construct
  misc_feature 1..20: note = chemically synthesized
  source 1..20: mol_type = other DNA
caaaggactgcaaggggcag

SEQ ID NO: 18970 - DNA, 20 bp, synthetic construct
  misc_feature 1..20: note = chemically synthesized
  source 1..20: mol_type = other DNA
gactgcaaggggcaggagct

SEQ ID NO: 18971 - DNA, 20 bp, synthetic construct
  misc_feature 1..20: note = chemically synthesized
  source 1..20: mol_type = other DNA
actgcaaggggcaggagctt

SEQ ID NO: 18972 - DNA, 20 bp, synthetic construct
  misc_feature 1..20: note = chemically synthesized
  source 1..20: mol_type = other DNA
aggagcttgggctgacatgc

SEQ ID NO: 18973 - DNA, 20 bp, synthetic construct
  misc_feature 1..20: note = chemically synthesized
  source 1..20: mol_type = other DNA
ggagcttgggctgacatgca

SEQ ID NO: 18974 - DNA, 20 bp, synthetic construct
  misc_feature 1..20: note = chemically synthesized
  source 1..20: mol_type = other DNA
gcttgggctgacatgcaagg

SEQ ID NO: 18975 - DNA, 20 bp, synthetic construct
  misc_feature 1..20: note = chemically synthesized
  source 1..20: mol_type = other DNA
catgcaaggtggctttacac

SEQ ID NO: 18976 - DNA, 20 bp, synthetic construct
  misc_feature 1..20: note = chemically synthesized
  source 1..20: mol_type = other DNA
atgcaaggtggctttacaca

SEQ ID NO: 18977 - DNA, 20 bp, synthetic construct
  misc_feature 1..20: note = chemically synthesized
  source 1..20: mol_type = other DNA
gctttacacaaggccctttt

SEQ ID NO: 18978 - DNA, 20 bp, synthetic construct
  misc_feature 1..20: note = chemically synthesized
  source 1..20: mol_type = other DNA
tttacacaaggcccttttta

SEQ ID NO: 18979 - DNA, 20 bp, synthetic construct
  misc_feature 1..20: note = chemically synthesized
  source 1..20: mol_type = other DNA
tacacaaggccctttttaga

SEQ ID NO: 18980 - DNA, 20 bp, synthetic construct
  misc_feature 1..20: note = chemically synthesized
  source 1..20: mol_type = other DNA
ttagagagtgtgattctctg

SEQ ID NO: 18981 - DNA, 20 bp, synthetic construct
  misc_feature 1..20: note = chemically synthesized
  source 1..20: mol_type = other DNA
tgattctctgaagcttttct

SEQ ID NO: 18982 - DNA, 20 bp, synthetic construct
  misc_feature 1..20: note = chemically synthesized
  source 1..20: mol_type = other DNA
ttctctgaagcttttcttgg

SEQ ID NO: 18983 - DNA, 20 bp, synthetic construct
  misc_feature 1..20: note = chemically synthesized
  source 1..20: mol_type = other DNA
gaagcttttcttggcagctt

SEQ ID NO: 18984 - DNA, 20 bp, synthetic construct
  misc_feature 1..20: note = chemically synthesized
  source 1..20: mol_type = other DNA
gcttcagtcttgaacctcac

SEQ ID NO: 18985 - DNA, 20 bp, synthetic construct
  misc_feature 1..20: note = chemically synthesized
  source 1..20: mol_type = other DNA
tcagtcttgaacctcactgg

SEQ ID NO: 18986 - DNA, 20 bp, synthetic construct
  misc_feature 1..20: note = chemically synthesized
  source 1..20: mol_type = other DNA
cagtcttgaacctcactgga

SEQ ID NO: 18987 - DNA, 20 bp, synthetic construct
  misc_feature 1..20: note = chemically synthesized
  source 1..20: mol_type = other DNA
agtcttgaacctcactggaa

SEQ ID NO: 18988 - DNA, 20 bp, synthetic construct
  misc_feature 1..20: note = chemically synthesized
  source 1..20: mol_type = other DNA
ggatcctccaaaacatgacc

SEQ ID NO: 18989 - DNA, 20 bp, synthetic construct
  misc_feature 1..20: note = chemically synthesized
  source 1..20: mol_type = other DNA
cctccaaaacatgacccaga

SEQ ID NO: 18990 - DNA, 20 bp, synthetic construct
  misc_feature 1..20: note = chemically synthesized
  source 1..20: mol_type = other DNA
caaaacatgacccagatgga

SEQ ID NO: 18991 - DNA, 20 bp, synthetic construct
  misc_feature 1..20: note = chemically synthesized
  source 1..20: mol_type = other DNA
aacatgacccagatggaaag

SEQ ID NO: 18992 - DNA, 20 bp, synthetic construct
  misc_feature 1..20: note = chemically synthesized
  source 1..20: mol_type = other DNA
agatggaaagaagtatttct

SEQ ID NO: 18993 - DNA, 20 bp, synthetic construct
  misc_feature 1..20: note = chemically synthesized
  source 1..20: mol_type = other DNA
tttaaaataactcccctatt

SEQ ID NO: 18994 - DNA, 20 bp, synthetic construct
  misc_feature 1..20: note = chemically synthesized
  source 1..20: mol_type = other DNA
aactcccctatttggtaata

SEQ ID NO: 18995 - DNA, 20 bp, synthetic construct
  misc_feature 1..20: note = chemically synthesized
  source 1..20: mol_type = other DNA
actcccctatttggtaatac

SEQ ID NO: 18996 - DNA, 20 bp, synthetic construct
  misc_feature 1..20: note = chemically synthesized
  source 1..20: mol_type = other DNA
atttgtgactttattatttt

SEQ ID NO: 18997 - DNA, 20 bp, synthetic construct
  misc_feature 1..20: note = chemically synthesized
  source 1..20: mol_type = other DNA
tttgtgactttattattttt

SEQ ID NO: 18998 - DNA, 20 bp, synthetic construct
  misc_feature 1..20: note = chemically synthesized
  source 1..20: mol_type = other DNA
attatttttaggtgtgataa

SEQ ID NO: 18999 - DNA, 20 bp, synthetic construct
  misc_feature 1..20: note = chemically synthesized
  source 1..20: mol_type = other DNA
taggtgtgataatggttttg

SEQ ID NO: 19000 - DNA, 20 bp, synthetic construct
  misc_feature 1..20: note = chemically synthesized
  source 1..20: mol_type = other DNA
ggttttgcagttgtatttaa

SEQ ID NO: 19001 - DNA, 20 bp, synthetic construct
  misc_feature 1..20: note = chemically synthesized
  source 1..20: mol_type = other DNA
gtatttaaaagaaaaaaaac

SEQ ID NO: 19002 - DNA, 20 bp, synthetic construct
  misc_feature 1..20: note = chemically synthesized
  source 1..20: mol_type = other DNA
ctatgtttaaaaaatacata

SEQ ID NO: 19003 - DNA, 20 bp, synthetic construct
  misc_feature 1..20: note = chemically synthesized
  source 1..20: mol_type = other DNA
atgtttaaaaaatacataca

SEQ ID NO: 19004 - DNA, 20 bp, synthetic construct
  misc_feature 1..20: note = chemically synthesized
  source 1..20: mol_type = other DNA
tgtttaaaaaatacatacag

SEQ ID NO: 19005 - DNA, 20 bp, synthetic construct
  misc_feature 1..20: note = chemically synthesized
  source 1..20: mol_type = other DNA
tgatgaaatgatatgacgtc

SEQ ID NO: 19006 - DNA, 20 bp, synthetic construct
  misc_feature 1..20: note = chemically synthesized
  source 1..20: mol_type = other DNA
gatgaaatgatatgacgtct

SEQ ID NO: 19007 - DNA, 20 bp, synthetic construct
  misc_feature 1..20: note = chemically synthesized
  source 1..20: mol_type = other DNA
gatcaacttaaataataaaa

SEQ ID NO: 19008 - DNA, 20 bp, synthetic construct
  misc_feature 1..20: note = chemically synthesized
  source 1..20: mol_type = other DNA
atcaacttaaataataaaat

SEQ ID NO: 19009 - DNA, 20 bp, synthetic construct
  misc_feature 1..20: note = chemically synthesized
  source 1..20: mol_type = other DNA
acttaaataataaaatgggc

SEQ ID NO: 19010 - DNA, 20 bp, synthetic construct
  misc_feature 1..20: note = chemically synthesized
  source 1..20: mol_type = other DNA
cttaaataataaaatgggct

SEQ ID NO: 19011 - DNA, 20 bp, synthetic construct
  misc_feature 1..20: note = chemically synthesized
  source 1..20: mol_type = other DNA
ttaaataataaaatgggcta

SEQ ID NO: 19012 - DNA, 20 bp, synthetic construct
  misc_feature 1..20: note = chemically synthesized
  source 1..20: mol_type = other DNA
aaataataaaatgggctagg

SEQ ID NO: 19013 - DNA, 20 bp, synthetic construct
  misc_feature 1..20: note = chemically synthesized
  source 1..20: mol_type = other DNA
aataataaaatgggctaggg

SEQ ID NO: 19014 - DNA, 20 bp, synthetic construct
  misc_feature 1..20: note = chemically synthesized
  source 1..20: mol_type = other DNA
aaaatgggctagggaggcga

SEQ ID NO: 19015 - DNA, 20 bp, synthetic construct
  misc_feature 1..20: note = chemically synthesized
  source 1..20: mol_type = other DNA
aaatgggctagggaggcgat

SEQ ID NO: 19016 - DNA, 20 bp, synthetic construct
  misc_feature 1..20: note = chemically synthesized
  source 1..20: mol_type = other DNA
aatgggctagggaggcgata

SEQ ID NO: 19017 - DNA, 20 bp, synthetic construct
  misc_feature 1..20: note = chemically synthesized
  source 1..20: mol_type = other DNA
ctagggaggcgatagggtta

SEQ ID NO: 19018 - DNA, 20 bp, synthetic construct
  misc_feature 1..20: note = chemically synthesized
  source 1..20: mol_type = other DNA
gggaggcgatagggttacag

SEQ ID NO: 19019 - DNA, 20 bp, synthetic construct
  misc_feature 1..20: note = chemically synthesized
  source 1..20: mol_type = other DNA
gcgatagggttacagaagac

SEQ ID NO: 19020 - DNA, 20 bp, synthetic construct
  misc_feature 1..20: note = chemically synthesized
  source 1..20: mol_type = other DNA
cagaagacaagaatgactgt

SEQ ID NO: 19021 - DNA, 20 bp, synthetic construct
  misc_feature 1..20: note = chemically synthesized
  source 1..20: mol_type = other DNA
acaagaatgactgtgagctg

SEQ ID NO: 19022 - DNA, 20 bp, synthetic construct
  misc_feature 1..20: note = chemically synthesized
  source 1..20: mol_type = other DNA
agaatgactgtgagctgtgg

SEQ ID NO: 19023 - DNA, 20 bp, synthetic construct
  misc_feature 1..20: note = chemically synthesized
  source 1..20: mol_type = other DNA
tgactgtgagctgtggtggt

SEQ ID NO: 19024 - DNA, 20 bp, synthetic construct
  misc_feature 1..20: note = chemically synthesized
  source 1..20: mol_type = other DNA
actgtgagctgtggtggttg

SEQ ID NO: 19025 - DNA, 20 bp, synthetic construct
  misc_feature 1..20: note = chemically synthesized
  source 1..20: mol_type = other DNA
tgagctgtggtggttggagc

SEQ ID NO: 19026 - DNA, 20 bp, synthetic construct
  misc_feature 1..20: note = chemically synthesized
  source 1..20: mol_type = other DNA
gctgtggtggttggagctgg

SEQ ID NO: 19027 - DNA, 20 bp, synthetic construct
  misc_feature 1..20: note = chemically synthesized
  source 1..20: mol_type = other DNA
gtggttggagctggaagatg

SEQ ID NO: 19028 - DNA, 20 bp, synthetic construct
  misc_feature 1..20: note = chemically synthesized
  source 1..20: mol_type = other DNA
ggagctggaagatgtggact

SEQ ID NO: 19029 - DNA, 20 bp, synthetic construct
  misc_feature 1..20: note = chemically synthesized
  source 1..20: mol_type = other DNA
gagctggaagatgtggactt

SEQ ID NO: 19030 - DNA, 20 bp, synthetic construct
  misc_feature 1..20: note = chemically synthesized
  source 1..20: mol_type = other DNA
agctggaagatgtggacttg

SEQ ID NO: 19031 - DNA, 20 bp, synthetic construct
  misc_feature 1..20: note = chemically synthesized
  source 1..20: mol_type = other DNA
taacattctctctacttttg

SEQ ID NO: 19032 - DNA, 20 bp, synthetic construct
  misc_feature 1..20: note = chemically synthesized
  source 1..20: mol_type = other DNA
tctctacttttgtagtattt

SEQ ID NO: 19033 - DNA, 20 bp, synthetic construct
  misc_feature 1..20: note = chemically synthesized
  source 1..20: mol_type = other DNA
tgtagtatttgagatttttc

SEQ ID NO: 19034 - DNA, 20 bp, synthetic construct
  misc_feature 1..20: note = chemically synthesized
  source 1..20: mol_type = other DNA
tgagatttttccagaaaata

SEQ ID NO: 19035 - DNA, 20 bp, synthetic construct
  misc_feature 1..20: note = chemically synthesized
  source 1..20: mol_type = other DNA
gagatttttccagaaaataa

SEQ ID NO: 19036 - DNA, 20 bp, synthetic construct
  misc_feature 1..20: note = chemically synthesized
  source 1..20: mol_type = other DNA
aaataaaggtattgcctgac

SEQ ID NO: 19037 - DNA, 20 bp, synthetic construct
  misc_feature 1..20: note = chemically synthesized
  source 1..20: mol_type = other DNA
taaaggtattgcctgactgg

SEQ ID NO: 19038 - DNA, 20 bp, synthetic construct
  misc_feature 1..20: note = chemically synthesized
  source 1..20: mol_type = other DNA
aaggtattgcctgactggtg

SEQ ID NO: 19039 - DNA, 20 bp, synthetic construct
  misc_feature 1..20: note = chemically synthesized
  source 1..20: mol_type = other DNA
ggtattgcctgactggtgga

SEQ ID NO: 19040 - DNA, 20 bp, synthetic construct
  misc_feature 1..20: note = chemically synthesized
  source 1..20: mol_type = other DNA
attgcctgactggtggagag

SEQ ID NO: 19041 - DNA, 20 bp, synthetic construct
  misc_feature 1..20: note = chemically synthesized
  source 1..20: mol_type = other DNA
ctgactggtggagagcagta

SEQ ID NO: 19042 - DNA, 20 bp, synthetic construct
  misc_feature 1..20: note = chemically synthesized
  source 1..20: mol_type = other DNA
gagagcagtatggccttgtt

SEQ ID NO: 19043 - DNA, 20 bp, synthetic construct
  misc_feature 1..20: note = chemically synthesized
  source 1..20: mol_type = other DNA
gcagtatggccttgtttagt

SEQ ID NO: 19044 - DNA, 20 bp, synthetic construct
  misc_feature 1..20: note = chemically synthesized
  source 1..20: mol_type = other DNA
gtcggtgttgtttcttcacc

SEQ ID NO: 19045 - DNA, 20 bp, synthetic construct
  misc_feature 1..20: note = chemically synthesized
  source 1..20: mol_type = other DNA
tcggtgttgtttcttcacca

SEQ ID NO: 19046 - DNA, 20 bp, synthetic construct
  misc_feature 1..20: note = chemically synthesized
  source 1..20: mol_type = other DNA
cggtgttgtttcttcaccaa

SEQ ID NO: 19047 - DNA, 20 bp, synthetic construct
  misc_feature 1..20: note = chemically synthesized
  source 1..20: mol_type = other DNA
ttgtttcttcaccaagggtt

SEQ ID NO: 19048 - DNA, 20 bp, synthetic construct
  misc_feature 1..20: note = chemically synthesized
  source 1..20: mol_type = other DNA
tcttcaccaagggtttggct

SEQ ID NO: 19049 - DNA, 20 bp, synthetic construct
  misc_feature 1..20: note = chemically synthesized
  source 1..20: mol_type = other DNA
ttcaccaagggtttggctca

SEQ ID NO: 19050 - DNA, 20 bp, synthetic construct
  misc_feature 1..20: note = chemically synthesized
  source 1..20: mol_type = other DNA
tcaccaagggtttggctcag

SEQ ID NO: 19051 - DNA, 20 bp, synthetic construct
  misc_feature 1..20: note = chemically synthesized
  source 1..20: mol_type = other DNA
ccaagggtttggctcagagg

SEQ ID NO: 19052 - DNA, 20 bp, synthetic construct
  misc_feature 1..20: note = chemically synthesized
  source 1..20: mol_type = other DNA
gggtttggctcagaggtagc

SEQ ID NO: 19053 - DNA, 20 bp, synthetic construct
  misc_feature 1..20: note = chemically synthesized
  source 1..20: mol_type = other DNA
ggtttggctcagaggtagca

SEQ ID NO: 19054 - DNA, 20 bp, synthetic construct
  misc_feature 1..20: note = chemically synthesized
  source 1..20: mol_type = other DNA
gtttggctcagaggtagcaa

SEQ ID NO: 19055 - DNA, 20 bp, synthetic construct
  misc_feature 1..20: note = chemically synthesized
  source 1..20: mol_type = other DNA
tttggctcagaggtagcaag

SEQ ID NO: 19056 - DNA, 20 bp, synthetic construct
  misc_feature 1..20: note = chemically synthesized
  source 1..20: mol_type = other DNA
ctcagaggtagcaaggggac

SEQ ID NO: 19057 - DNA, 20 bp, synthetic construct
  misc_feature 1..20: note = chemically synthesized
  source 1..20: mol_type = other DNA
gcaaggggacaagtgtccta

SEQ ID NO: 19058 - DNA, 20 bp, synthetic construct
  misc_feature 1..20: note = chemically synthesized
  source 1..20: mol_type = other DNA
caaggggacaagtgtcctat

SEQ ID NO: 19059 - DNA, 20 bp, synthetic construct
  misc_feature 1..20: note = chemically synthesized
  source 1..20: mol_type = other DNA
gggacaagtgtcctatgggc

SEQ ID NO: 19060 - DNA, 20 bp, synthetic construct
  misc_feature 1..20: note = chemically synthesized
  source 1..20: mol_type = other DNA
caagtgtcctatgggcaaga

SEQ ID NO: 19061 - DNA, 20 bp, synthetic construct
  misc_feature 1..20: note = chemically synthesized
  source 1..20: mol_type = other DNA
atgggcaagaaagtacctgt

SEQ ID NO: 19062 - DNA, 20 bp, synthetic construct
  misc_feature 1..20: note = chemically synthesized
  source 1..20: mol_type = other DNA
aagaaagtacctgtgagctc

SEQ ID NO: 19063 - DNA, 20 bp, synthetic construct
  misc_feature 1..20: note = chemically synthesized
  source 1..20: mol_type = other DNA
gtgagctcaagtcttgtatc

SEQ ID NO: 19064 - DNA, 20 bp, synthetic construct
  misc_feature 1..20: note = chemically synthesized
  source 1..20: mol_type = other DNA
tgagctcaagtcttgtatct

SEQ ID NO: 19065 - DNA, 20 bp, synthetic construct
  misc_feature 1..20: note = chemically synthesized
  source 1..20: mol_type = other DNA
gctcaagtcttgtatctggg

SEQ ID NO: 19066 - DNA, 20 bp, synthetic construct
  misc_feature 1..20: note = chemically synthesized
  source 1..20: mol_type = other DNA
tatctgggaagttcattgtg

SEQ ID NO: 19067 - DNA, 20 bp, synthetic construct
  misc_feature 1..20: note = chemically synthesized
  source 1..20: mol_type = other DNA
atctgggaagttcattgtga

SEQ ID NO: 19068 - DNA, 20 bp, synthetic construct
  misc_feature 1..20: note = chemically synthesized
  source 1..20: mol_type = other DNA
tctgggaagttcattgtgaa

SEQ ID NO: 19069 - DNA, 20 bp, synthetic construct
  misc_feature 1..20: note = chemically synthesized
  source 1..20: mol_type = other DNA
ctgggaagttcattgtgaag

SEQ ID NO: 19070 - DNA, 20 bp, synthetic construct
  misc_feature 1..20: note = chemically synthesized
  source 1..20: mol_type = other DNA
tcattgtgaaggggtcattt

SEQ ID NO: 19071 - DNA, 20 bp, synthetic construct
  misc_feature 1..20: note = chemically synthesized
  source 1..20: mol_type = other DNA
cattgtgaaggggtcattta

SEQ ID NO: 19072 - DNA, 20 bp, synthetic construct
  misc_feature 1..20: note = chemically synthesized
  source 1..20: mol_type = other DNA
attgtgaaggggtcatttaa

SEQ ID NO: 19073 - DNA, 20 bp, synthetic construct
  misc_feature 1..20: note = chemically synthesized
  source 1..20: mol_type = other DNA
tgcactgtcccccattctcc

SEQ ID NO: 19074 - DNA, 20 bp, synthetic construct
  misc_feature 1..20: note = chemically synthesized
  source 1..20: mol_type = other DNA
actgtcccccattctcctgg

SEQ ID NO: 19075 - DNA, 20 bp, synthetic construct
  misc_feature 1..20: note = chemically synthesized
  source 1..20: mol_type = other DNA
cccccattctcctggaagaa

SEQ ID NO: 19076 - DNA, 20 bp, synthetic construct
  misc_feature 1..20: note = chemically synthesized
  source 1..20: mol_type = other DNA
cccattctcctggaagaaca

SEQ ID NO: 19077 - DNA, 20 bp, synthetic construct
  misc_feature 1..20: note = chemically synthesized
  source 1..20: mol_type = other DNA
cagagatcccttgtcttttt

SEQ ID NO: 19078 - DNA, 20 bp, synthetic construct
  misc_feature 1..20: note = chemically synthesized
  source 1..20: mol_type = other DNA
ccttgtctttttcagtgcat

SEQ ID NO: 19079 - DNA, 20 bp, synthetic construct
  misc_feature 1..20: note = chemically synthesized
  source 1..20: mol_type = other DNA
cttgtctttttcagtgcatg

SEQ ID NO: 19080 - DNA, 20 bp, synthetic construct
  misc_feature 1..20: note = chemically synthesized
  source 1..20: mol_type = other DNA
gtctttttcagtgcatgagg

SEQ ID NO: 19081 - DNA, 20 bp, synthetic construct
  misc_feature 1..20: note = chemically synthesized
  source 1..20: mol_type = other DNA
ctttttcagtgcatgaggca

SEQ ID NO: 19082 - DNA, 20 bp, synthetic construct
  misc_feature 1..20: note = chemically synthesized
  source 1..20: mol_type = other DNA
ttcagtgcatgaggcagagt

SEQ ID NO: 19083 - DNA, 20 bp, synthetic construct
  misc_feature 1..20: note = chemically synthesized
  source 1..20: mol_type = other DNA
gcatgaggcagagtcagatg

SEQ ID NO: 19084 - DNA, 20 bp, synthetic construct
  misc_feature 1..20: note = chemically synthesized
  source 1..20: mol_type = other DNA
gtcagatgtggcgtttgctt

SEQ ID NO: 19085 - DNA, 20 bp, synthetic construct
  misc_feature 1..20: note = chemically synthesized
  source 1..20: mol_type = other DNA
tgtggcgtttgcttgagttt

SEQ ID NO: 19086 - DNA, 20 bp, synthetic construct
  misc_feature 1..20: note = chemically synthesized
  source 1..20: mol_type = other DNA
cgtttgcttgagtttcagca

SEQ ID NO: 19087 - DNA, 20 bp, synthetic construct
  misc_feature 1..20: note = chemically synthesized
  source 1..20: mol_type = other DNA
gtttgcttgagtttcagcac

SEQ ID NO: 19088 - DNA, 20 bp, synthetic construct
  misc_feature 1..20: note = chemically synthesized
  source 1..20: mol_type = other DNA
acaggtgcctctgtgcctcg

SEQ ID NO: 19089 - DNA, 20 bp, synthetic construct
  misc_feature 1..20: note = chemically synthesized
  source 1..20: mol_type = other DNA
gtgcctctgtgcctcgtggt

SEQ ID NO: 19090 - DNA, 20 bp, synthetic construct
  misc_feature 1..20: note = chemically synthesized
  source 1..20: mol_type = other DNA
tgcctctgtgcctcgtggtg

SEQ ID NO: 19091 - DNA, 20 bp, synthetic construct
  misc_feature 1..20: note = chemically synthesized
  source 1..20: mol_type = other DNA
gcctctgtgcctcgtggtga

SEQ ID NO: 19092 - DNA, 20 bp, synthetic construct
  misc_feature 1..20: note = chemically synthesized
  source 1..20: mol_type = other DNA
ctgtgcctcgtggtgagggt

SEQ ID NO: 19093 - DNA, 20 bp, synthetic construct
  misc_feature 1..20: note = chemically synthesized
  source 1..20: mol_type = other DNA
tgtgcctcgtggtgagggtc

SEQ ID NO: 19094 - DNA, 20 bp, synthetic construct
  misc_feature 1..20: note = chemically synthesized
  source 1..20: mol_type = other DNA
gcctcgtggtgagggtcagg

SEQ ID NO: 19095 - DNA, 20 bp, synthetic construct
  misc_feature 1..20: note = chemically synthesized
  source 1..20: mol_type = other DNA
tcgtggtgagggtcaggaag

SEQ ID NO: 19096 - DNA, 20 bp, synthetic construct
  misc_feature 1..20: note = chemically synthesized
  source 1..20: mol_type = other DNA
tggtgagggtcaggaagaag

SEQ ID NO: 19097 - DNA, 20 bp, synthetic construct
  misc_feature 1..20: note = chemically synthesized
  source 1..20: mol_type = other DNA
gagggtcaggaagaagcagc

SEQ ID NO: 19098 - DNA, 20 bp, synthetic construct
  misc_feature 1..20: note = chemically synthesized
  source 1..20: mol_type = other DNA
agggtcaggaagaagcagct

SEQ ID NO: 19099 - DNA, 20 bp, synthetic construct
  misc_feature 1..20: note = chemically synthesized
  source 1..20: mol_type = other DNA
gcagctgggacgtgctcacg

SEQ ID NO: 19100 - DNA, 20 bp, synthetic construct
  misc_feature 1..20: note = chemically synthesized
  source 1..20: mol_type = other DNA
ctgggacgtgctcacgtggc

SEQ ID NO: 19101 - DNA, 20 bp, synthetic construct
  misc_feature 1..20: note = chemically synthesized
  source 1..20: mol_type = other DNA
ggacgtgctcacgtggctgg

SEQ ID NO: 19102 - DNA, 20 bp, synthetic construct
  misc_feature 1..20: note = chemically synthesized
  source 1..20: mol_type = other DNA
acgtggctggtagtgttatg

SEQ ID NO: 19103 - DNA, 20 bp, synthetic construct
  misc_feature 1..20: note = chemically synthesized
  source 1..20: mol_type = other DNA
gctggtagtgttatgaagac

SEQ ID NO: 19104 - DNA, 20 bp, synthetic construct
  misc_feature 1..20: note = chemically synthesized
  source 1..20: mol_type = other DNA
ctggtagtgttatgaagaca

SEQ ID NO: 19105 - DNA, 20 bp, synthetic construct
  misc_feature 1..20: note = chemically synthesized
  source 1..20: mol_type = other DNA
gtgttatgaagacaaggctt

SEQ ID NO: 19106 - DNA, 20 bp, synthetic construct
  misc_feature 1..20: note = chemically synthesized
  source 1..20: mol_type = other DNA
tgttatgaagacaaggcttt

SEQ ID NO: 19107 - DNA, 20 bp, synthetic construct
  misc_feature 1..20: note = chemically synthesized
  source 1..20: mol_type = other DNA
aaggctttgggacctttctt

SEQ ID NO: 19108 - DNA, 20 bp, synthetic construct
  misc_feature 1..20: note = chemically synthesized
  source 1..20: mol_type = other DNA
ggacctttctttggccattt

SEQ ID NO: 19109 - DNA, 20 bp, synthetic construct
  misc_feature 1..20: note = chemically synthesized
  source 1..20: mol_type = other DNA
ttctttggccatttgagccc

SEQ ID NO: 19110 - DNA, 20 bp, synthetic construct
  misc_feature 1..20: note = chemically synthesized
  source 1..20: mol_type = other DNA
gccatttgagccctggctat

SEQ ID NO: 19111 - DNA, 20 bp, synthetic construct
  misc_feature 1..20: note = chemically synthesized
  source 1..20: mol_type = other DNA
catttgagccctggctatta

SEQ ID NO: 19112 - DNA, 20 bp, synthetic construct
  misc_feature 1..20: note = chemically synthesized
  source 1..20: mol_type = other DNA
tgagccctggctattagaga

SEQ ID NO: 19113 - DNA, 20 bp, synthetic construct
  misc_feature 1..20: note = chemically synthesized
  source 1..20: mol_type = other DNA
tagagaaagatgatttgcct

SEQ ID NO: 19114 - DNA, 20 bp, synthetic construct
  misc_feature 1..20: note = chemically synthesized
  source 1..20: mol_type = other DNA
gagaaagatgatttgcctga

SEQ ID NO: 19115 - DNA, 20 bp, synthetic construct
  misc_feature 1..20: note = chemically synthesized
  source 1..20: mol_type = other DNA
agaaagatgatttgcctgag

SEQ ID NO: 19116 - DNA, 20 bp, synthetic construct
  misc_feature 1..20: note = chemically synthesized
  source 1..20: mol_type = other DNA
aaagatgatttgcctgagag

SEQ ID NO: 19117 - DNA, 20 bp, synthetic construct
  misc_feature 1..20: note = chemically synthesized
  source 1..20: mol_type = other DNA
gaggagattgaccacactct

SEQ ID NO: 19118 - DNA, 20 bp, synthetic construct
  misc_feature 1..20: note = chemically synthesized
  source 1..20: mol_type = other DNA
agattgaccacactctcaga

SEQ ID NO: 19119 - DNA, 20 bp, synthetic construct
  misc_feature 1..20: note = chemically synthesized
  source 1..20: mol_type = other DNA
ttgaccacactctcagaaag

SEQ ID NO: 19120 - DNA, 20 bp, synthetic construct
  misc_feature 1..20: note = chemically synthesized
  source 1..20: mol_type = other DNA
tgaccacactctcagaaaga

SEQ ID NO: 19121 - DNA, 20 bp, synthetic construct
  misc_feature 1..20: note = chemically synthesized
  source 1..20: mol_type = other DNA
gaccacactctcagaaagaa

SEQ ID NO: 19122 - DNA, 20 bp, synthetic construct
  misc_feature 1..20: note = chemically synthesized
  source 1..20: mol_type = other DNA
accacactctcagaaagaag

SEQ ID NO: 19123 - DNA, 20 bp, synthetic construct
  misc_feature 1..20: note = chemically synthesized
  source 1..20: mol_type = other DNA
ctctcagaaagaaggggaca

SEQ ID NO: 19124 - DNA, 20 bp, synthetic construct
  misc_feature 1..20: note = chemically synthesized
  source 1..20: mol_type = other DNA
aaggggacaaagaacacgtc

SEQ ID NO: 19125 - DNA, 20 bp, synthetic construct
  misc_feature 1..20: note = chemically synthesized
  source 1..20: mol_type = other DNA
aggggacaaagaacacgtca

SEQ ID NO: 19126 - DNA, 20 bp, synthetic construct
  misc_feature 1..20: note = chemically synthesized
  source 1..20: mol_type = other DNA
ggggacaaagaacacgtcaa

SEQ ID NO: 19127 - DNA, 20 bp, synthetic construct
  misc_feature 1..20: note = chemically synthesized
  source 1..20: mol_type = other DNA
caaagaacacgtcaagggtt

SEQ ID NO: 19128 - DNA, 20 bp, synthetic construct
  misc_feature 1..20: note = chemically synthesized
  source 1..20: mol_type = other DNA
agaacacgtcaagggttaag

SEQ ID NO: 19129 - DNA, 20 bp, synthetic construct
  misc_feature 1..20: note = chemically synthesized
  source 1..20: mol_type = other DNA
ggttaagcagccttcccttt

SEQ ID NO: 19130 - DNA, 20 bp, synthetic construct
  misc_feature 1..20: note = chemically synthesized
  source 1..20: mol_type = other DNA
gttaagcagccttcccttta

SEQ ID NO: 19131 - DNA, 20 bp, synthetic construct
  misc_feature 1..20: note = chemically synthesized
  source 1..20: mol_type = other DNA
ttaagcagccttccctttaa

SEQ ID NO: 19132 - DNA, 20 bp, synthetic construct
  misc_feature 1..20: note = chemically synthesized
  source 1..20: mol_type = other DNA
aagcagccttccctttaagg

SEQ ID NO: 19133 - DNA, 20 bp, synthetic construct
  misc_feature 1..20: note = chemically synthesized
  source 1..20: mol_type = other DNA
agcagccttccctttaaggg

SEQ ID NO: 19134 - DNA, 20 bp, synthetic construct
  misc_feature 1..20: note = chemically synthesized
  source 1..20: mol_type = other DNA
ccttccctttaagggaggac

SEQ ID NO: 19135 - DNA, 20 bp, synthetic construct
  misc_feature 1..20: note = chemically synthesized
  source 1..20: mol_type = other DNA
cttccctttaagggaggact

SEQ ID NO: 19136 - DNA, 20 bp, synthetic construct
  misc_feature 1..20: note = chemically synthesized
  source 1..20: mol_type = other DNA
ttccctttaagggaggactg

SEQ ID NO: 19137 - DNA, 20 bp, synthetic construct
  misc_feature 1..20: note = chemically synthesized
  source 1..20: mol_type = other DNA
ttaagggaggactggggcac

SEQ ID NO: 19138 - DNA, 20 bp, synthetic construct
  misc_feature 1..20: note = chemically synthesized
  source 1..20: mol_type = other DNA
gggaggactggggcacaaga

SEQ ID NO: 19139 - DNA, 20 bp, synthetic construct
  misc_feature 1..20: note = chemically synthesized
  source 1..20: mol_type = other DNA
aggactggggcacaagatgg

SEQ ID NO: 19140 - DNA, 20 bp, synthetic construct
  misc_feature 1..20: note = chemically synthesized
  source 1..20: mol_type = other DNA
gggcacaagatggaagatga

SEQ ID NO: 19141 - DNA, 20 bp, synthetic construct
  misc_feature 1..20: note = chemically synthesized
  source 1..20: mol_type = other DNA
ggcacaagatggaagatgaa

SEQ ID NO: 19142 - DNA, 20 bp, synthetic construct
  misc_feature 1..20: note = chemically synthesized
  source 1..20: mol_type = other DNA
gcacaagatggaagatgaaa

SEQ ID NO: 19143 - DNA, 20 bp, synthetic construct
  misc_feature 1..20: note = chemically synthesized
  source 1..20: mol_type = other DNA
acaagatggaagatgaaagg

SEQ ID NO: 19144 - DNA, 20 bp, synthetic construct
  misc_feature 1..20: note = chemically synthesized
  source 1..20: mol_type = other DNA
agatggaagatgaaagggag

SEQ ID NO: 19145 - DNA, 20 bp, synthetic construct
  misc_feature 1..20: note = chemically synthesized
  source 1..20: mol_type = other DNA
atggaagatgaaagggagca

SEQ ID NO: 19146 - DNA, 20 bp, synthetic construct
  misc_feature 1..20: note = chemically synthesized
  source 1..20: mol_type = other DNA
gaagatgaaagggagcagag

SEQ ID NO: 19147 - DNA, 20 bp, synthetic construct
  misc_feature 1..20: note = chemically synthesized
  source 1..20: mol_type = other DNA
agggagcagagtggcaattg

SEQ ID NO: 19148 - DNA, 20 bp, synthetic construct
  misc_feature 1..20: note = chemically synthesized
  source 1..20: mol_type = other DNA
ggagcagagtggcaattgca

SEQ ID NO: 19149 - DNA, 20 bp, synthetic construct
  misc_feature 1..20: note = chemically synthesized
  source 1..20: mol_type = other DNA
cagagtggcaattgcagagc

SEQ ID NO: 19150 - DNA, 20 bp, synthetic construct
  misc_feature 1..20: note = chemically synthesized
  source 1..20: mol_type = other DNA
gtggcaattgcagagctgga

SEQ ID NO: 19151 - DNA, 20 bp, synthetic construct
  misc_feature 1..20: note = chemically synthesized
  source 1..20: mol_type = other DNA
tggcaattgcagagctggaa

SEQ ID NO: 19152 - DNA, 20 bp, synthetic construct
  misc_feature 1..20: note = chemically synthesized
  source 1..20: mol_type = other DNA
ggcaattgcagagctggaaa

SEQ ID NO: 19153 - DNA, 20 bp, synthetic construct
  misc_feature 1..20: note = chemically synthesized
  source 1..20: mol_type = other DNA
gcaattgcagagctggaaag

SEQ ID NO: 19154 - DNA, 20 bp, synthetic construct
  misc_feature 1..20: note = chemically synthesized
  source 1..20: mol_type = other DNA
aaaggggaattttgttcttc

SEQ ID NO: 19155 - DNA, 20 bp, synthetic construct
  misc_feature 1..20: note = chemically synthesized
  source 1..20: mol_type = other DNA
gggaattttgttcttctaga

SEQ ID NO: 19156 - DNA, 20 bp, synthetic construct
  misc_feature 1..20: note = chemically synthesized
  source 1..20: mol_type = other DNA
tttgttcttctagatagcaa

SEQ ID NO: 19157 - DNA, 20 bp, synthetic construct
  misc_feature 1..20: note = chemically synthesized
  source 1..20: mol_type = other DNA
ttcttctagatagcaaaagc

SEQ ID NO: 19158 - DNA, 20 bp, synthetic construct
  misc_feature 1..20: note = chemically synthesized
  source 1..20: mol_type = other DNA
tcttctagatagcaaaagcc

SEQ ID NO: 19159 - DNA, 20 bp, synthetic construct
  misc_feature 1..20: note = chemically synthesized
  source 1..20: mol_type = other DNA
actgtcgctgtgtgacttga

SEQ ID NO: 19160 - DNA, 20 bp, synthetic construct
  misc_feature 1..20: note = chemically synthesized
  source 1..20: mol_type = other DNA
tcgctgtgtgacttgaaagc

SEQ ID NO: 19161 - DNA, 20 bp, synthetic construct
  misc_feature 1..20: note = chemically synthesized
  source 1..20: mol_type = other DNA
cgctgtgtgacttgaaagct

SEQ ID NO: 19162 - DNA, 20 bp, synthetic construct
  misc_feature 1..20: note = chemically synthesized
  source 1..20: mol_type = other DNA
tgacttgaaagctaggtcac

SEQ ID NO: 19163 - DNA, 20 bp, synthetic construct
  misc_feature 1..20: note = chemically synthesized
  source 1..20: mol_type = other DNA
cttgaaagctaggtcactgg

SEQ ID NO: 19164 - DNA, 20 bp, synthetic construct
  misc_feature 1..20: note = chemically synthesized
  source 1..20: mol_type = other DNA
ttgaaagctaggtcactggt

SEQ ID NO: 19165 - DNA, 20 bp, synthetic construct
  misc_feature 1..20: note = chemically synthesized
  source 1..20: mol_type = other DNA
ggtcactggtgggcttcgtg

SEQ ID NO: 19166 - DNA, 20 bp, synthetic construct
  misc_feature 1..20: note = chemically synthesized
  source 1..20: mol_type = other DNA
gggcttcgtgcagcccgtca

SEQ ID NO: 19167 - DNA, 20 bp, synthetic construct
  misc_feature 1..20: note = chemically synthesized
  source 1..20: mol_type = other DNA
ggcttcgtgcagcccgtcac

SEQ ID NO: 19168 - DNA, 20 bp, synthetic construct
  misc_feature 1..20: note = chemically synthesized
  source 1..20: mol_type = other DNA
gcttcgtgcagcccgtcaca

SEQ ID NO: 19169 - DNA, 20 bp, synthetic construct
  misc_feature 1..20: note = chemically synthesized
  source 1..20: mol_type = other DNA
cttcgtgcagcccgtcacag

SEQ ID NO: 19170 - DNA, 20 bp, synthetic construct
  misc_feature 1..20: note = chemically synthesized
  source 1..20: mol_type = other DNA
tcgtgcagcccgtcacaggg

SEQ ID NO: 19171 - DNA, 20 bp, synthetic construct
  misc_feature 1..20: note = chemically synthesized
  source 1..20: mol_type = other DNA
agcccgtcacaggggagcca

SEQ ID NO: 19172 - DNA, 20 bp, synthetic construct
  misc_feature 1..20: note = chemically synthesized
  source 1..20: mol_type = other DNA
ccgtcacaggggagccatgg

SEQ ID NO: 19173 - DNA, 20 bp, synthetic construct
  misc_feature 1..20: note = chemically synthesized
  source 1..20: mol_type = other DNA
cgtcacaggggagccatggt

SEQ ID NO: 19174 - DNA, 20 bp, synthetic construct
  misc_feature 1..20: note = chemically synthesized
  source 1..20: mol_type = other DNA
tctctgccgtatctgctgcc

SEQ ID NO: 19175 - DNA, 20 bp, synthetic construct
  misc_feature 1..20: note = chemically synthesized
  source 1..20: mol_type = other DNA
ctgccgtatctgctgcctgg

SEQ ID NO: 19176 - DNA, 20 bp, synthetic construct
  misc_feature 1..20: note = chemically synthesized
  source 1..20: mol_type = other DNA
gtatctgctgcctggaagct

SEQ ID NO: 19177 - DNA, 20 bp, synthetic construct
  misc_feature 1..20: note = chemically synthesized
  source 1..20: mol_type = other DNA
tgctgcctggaagctgagac

SEQ ID NO: 19178 - DNA, 20 bp, synthetic construct
  misc_feature 1..20: note = chemically synthesized
  source 1..20: mol_type = other DNA
taaccacatcacaccattcc

SEQ ID NO: 19179 - DNA, 20 bp, synthetic construct
  misc_feature 1..20: note = chemically synthesized
  source 1..20: mol_type = other DNA
catcacaccattcccagacc

SEQ ID NO: 19180 - DNA, 20 bp, synthetic construct
  misc_feature 1..20: note = chemically synthesized
  source 1..20: mol_type = other DNA
atcacaccattcccagaccc

SEQ ID NO: 19181 - DNA, 20 bp, synthetic construct
  misc_feature 1..20: note = chemically synthesized
  source 1..20: mol_type = other DNA
accattcccagacccaggcc

SEQ ID NO: 19182 - DNA, 20 bp, synthetic construct
  misc_feature 1..20: note = chemically synthesized
  source 1..20: mol_type = other DNA
ccattcccagacccaggccc

SEQ ID NO: 19183 - DNA, 20 bp, synthetic construct
  misc_feature 1..20: note = chemically synthesized
  source 1..20: mol_type = other DNA
cccagacccaggcccaggcc

SEQ ID NO: 19184 - DNA, 20 bp, synthetic construct
  misc_feature 1..20: note = chemically synthesized
  source 1..20: mol_type = other DNA
ccagacccaggcccaggccc

SEQ ID NO: 19185 - DNA, 20 bp, synthetic construct
  misc_feature 1..20: note = chemically synthesized
  source 1..20: mol_type = other DNA
cccaggcccaggcccaggcc

SEQ ID NO: 19186 - DNA, 20 bp, synthetic construct
  misc_feature 1..20: note = chemically synthesized
  source 1..20: mol_type = other DNA
ccaggcccaggcccaggccc

SEQ ID NO: 19187 - DNA, 20 bp, synthetic construct
  misc_feature 1..20: note = chemically synthesized
  source 1..20: mol_type = other DNA
ggcccaggcccgggtccctc

SEQ ID NO: 19188 - DNA, 20 bp, synthetic construct
  misc_feature 1..20: note = chemically synthesized
  source 1..20: mol_type = other DNA
ccgctctctctcgcttcaca

SEQ ID NO: 19189 - DNA, 20 bp, synthetic construct
  misc_feature 1..20: note = chemically synthesized
  source 1..20: mol_type = other DNA
gctctctctcgcttcacaca

SEQ ID NO: 19190 - DNA, 20 bp, synthetic construct
  misc_feature 1..20: note = chemically synthesized
  source 1..20: mol_type = other DNA
ctctctctcgcttcacacag

SEQ ID NO: 19191 - DNA, 20 bp, synthetic construct
  misc_feature 1..20: note = chemically synthesized
  source 1..20: mol_type = other DNA
cttcacacagaggctattat

SEQ ID NO: 19192 - DNA, 20 bp, synthetic construct
  misc_feature 1..20: note = chemically synthesized
  source 1..20: mol_type = other DNA
acacagaggctattattagc

SEQ ID NO: 19193 - DNA, 20 bp, synthetic construct
  misc_feature 1..20: note = chemically synthesized
  source 1..20: mol_type = other DNA
tattattagcaagtgtcact

SEQ ID NO: 19194 - DNA, 20 bp, synthetic construct
  misc_feature 1..20: note = chemically synthesized
  source 1..20: mol_type = other DNA
caagtgtcactcagttatct

SEQ ID NO: 19195 - DNA, 20 bp, synthetic construct
  misc_feature 1..20: note = chemically synthesized
  source 1..20: mol_type = other DNA
agtgtcactcagttatctga

SEQ ID NO: 19196 - DNA, 20 bp, synthetic construct
  misc_feature 1..20: note = chemically synthesized
  source 1..20: mol_type = other DNA
gtcactcagttatctgagag

SEQ ID NO: 19197 - DNA, 20 bp, synthetic construct
  misc_feature 1..20: note = chemically synthesized
  source 1..20: mol_type = other DNA
ttatctgagagtggcgcttt

SEQ ID NO: 19198 - DNA, 20 bp, synthetic construct
  misc_feature 1..20: note = chemically synthesized
  source 1..20: mol_type = other DNA
ggcgcttttagctgccatct

SEQ ID NO: 19199 - DNA, 20 bp, synthetic construct
  misc_feature 1..20: note = chemically synthesized
  source 1..20: mol_type = other DNA
ccatctaagtgcctgatact

SEQ ID NO: 19200 - DNA, 20 bp, synthetic construct
  misc_feature 1..20: note = chemically synthesized
  source 1..20: mol_type = other DNA
catctaagtgcctgatactt

SEQ ID NO: 19201 - DNA, 20 bp, synthetic construct
  misc_feature 1..20: note = chemically synthesized
  source 1..20: mol_type = other DNA
gtgcctgatacttgggttta

SEQ ID NO: 19202 - DNA, 20 bp, synthetic construct
  misc_feature 1..20: note = chemically synthesized
  source 1..20: mol_type = other DNA
cctgatacttgggtttacag

SEQ ID NO: 19203 - DNA, 20 bp, synthetic construct
  misc_feature 1..20: note = chemically synthesized
  source 1..20: mol_type = other DNA
cagcagattaaattaaattt

SEQ ID NO: 19204 - DNA, 20 bp, synthetic construct
  misc_feature 1..20: note = chemically synthesized
  source 1..20: mol_type = other DNA
agcagattaaattaaatttt

SEQ ID NO: 19205 - DNA, 20 bp, synthetic construct
  misc_feature 1..20: note = chemically synthesized
  source 1..20: mol_type = other DNA
gattaaattaaattttaggc

SEQ ID NO: 19206 - DNA, 20 bp, synthetic construct
  misc_feature 1..20: note = chemically synthesized
  source 1..20: mol_type = other DNA
aattaaattttaggctggtt

SEQ ID NO: 19207 - DNA, 20 bp, synthetic construct
  misc_feature 1..20: note = chemically synthesized
  source 1..20: mol_type = other DNA
ttaggctggtttggcttcac

SEQ ID NO: 19208 - DNA, 20 bp, synthetic construct
  misc_feature 1..20: note = chemically synthesized
  source 1..20: mol_type = other DNA
ggctggtttggcttcactgg

SEQ ID NO: 19209 - DNA, 20 bp, synthetic construct
  misc_feature 1..20: note = chemically synthesized
  source 1..20: mol_type = other DNA
tggtttggcttcactggcag

SEQ ID NO: 19210 - DNA, 20 bp, synthetic construct
  misc_feature 1..20: note = chemically synthesized
  source 1..20: mol_type = other DNA
gcttcactggcagtagacaa

SEQ ID NO: 19211 - DNA, 20 bp, synthetic construct
  misc_feature 1..20: note = chemically synthesized
  source 1..20: mol_type = other DNA
tcactggcagtagacaatgg

SEQ ID NO: 19212 - DNA, 20 bp, synthetic construct
  misc_feature 1..20: note = chemically synthesized
  source 1..20: mol_type = other DNA
cactggcagtagacaatgga

SEQ ID NO: 19213 - DNA, 20 bp, synthetic construct
  misc_feature 1..20: note = chemically synthesized
  source 1..20: mol_type = other DNA
tggcagtagacaatggaagg

SEQ ID NO: 19214 - DNA, 20 bp, synthetic construct
  misc_feature 1..20: note = chemically synthesized
  source 1..20: mol_type = other DNA
acaatggaaggcagctgttg

SEQ ID NO: 19215 - DNA, 20 bp, synthetic construct
  misc_feature 1..20: note = chemically synthesized
  source 1..20: mol_type = other DNA
gctgttgtagaaatgtaacc

SEQ ID NO: 19216 - DNA, 20 bp, synthetic construct
  misc_feature 1..20: note = chemically synthesized
  source 1..20: mol_type = other DNA
aaatgtaacctggcaccctc

SEQ ID NO: 19217 - DNA, 20 bp, synthetic construct
  misc_feature 1..20: note = chemically synthesized
  source 1..20: mol_type = other DNA
aatgtaacctggcaccctca

SEQ ID NO: 19218 - DNA, 20 bp, synthetic construct
  misc_feature 1..20: note = chemically synthesized
  source 1..20: mol_type = other DNA
gcaccctcaaggatttgtgt

SEQ ID NO: 19219 - DNA, 20 bp, synthetic construct
  misc_feature 1..20: note = chemically synthesized
  source 1..20: mol_type = other DNA
gtgtgtgtgtgtgtgtgtgt

SEQ ID NO: 19220 - DNA, 20 bp, synthetic construct
  misc_feature 1..20: note = chemically synthesized
  source 1..20: mol_type = other DNA
tgtgtgtgtgtgctgaccac

SEQ ID NO: 19221 - DNA, 20 bp, synthetic construct
  misc_feature 1..20: note = chemically synthesized
  source 1..20: mol_type = other DNA
gtgtgtgtgtgctgaccact

SEQ ID NO: 19222 - DNA, 20 bp, synthetic construct
  misc_feature 1..20: note = chemically synthesized
  source 1..20: mol_type = other DNA
ccatttcatccctttccaaa

SEQ ID NO: 19223 - DNA, 20 bp, synthetic construct
  misc_feature 1..20: note = chemically synthesized
  source 1..20: mol_type = other DNA
atccctttccaaaaagtgtt

SEQ ID NO: 19224 - DNA, 20 bp, synthetic construct
  misc_feature 1..20: note = chemically synthesized
  source 1..20: mol_type = other DNA
ccaaaaagtgtttagacaaa

SEQ ID NO: 19225 - DNA, 20 bp, synthetic construct
  misc_feature 1..20: note = chemically synthesized
  source 1..20: mol_type = other DNA
tgtttagacaaatagtttcc

SEQ ID NO: 19226 - DNA, 20 bp, synthetic construct
  misc_feature 1..20: note = chemically synthesized
  source 1..20: mol_type = other DNA
gacaaatagtttcccagact

SEQ ID NO: 19227 - DNA, 20 bp, synthetic construct
  misc_feature 1..20: note = chemically synthesized
  source 1..20: mol_type = other DNA
cagacttggttttatcatgc

SEQ ID NO: 19228 - DNA, 20 bp, synthetic construct
  misc_feature 1..20: note = chemically synthesized
  source 1..20: mol_type = other DNA
agacttggttttatcatgct

SEQ ID NO: 19229 - DNA, 20 bp, synthetic construct
  misc_feature 1..20: note = chemically synthesized
  source 1..20: mol_type = other DNA
tttatcatgctgggttgaca

SEQ ID NO: 19230 - DNA, 20 bp, synthetic construct
  misc_feature 1..20: note = chemically synthesized
  source 1..20: mol_type = other DNA
ttatcatgctgggttgacaa

SEQ ID NO: 19231 - DNA, 20 bp, synthetic construct
  misc_feature 1..20: note = chemically synthesized
  source 1..20: mol_type = other DNA
gggttgacaaaggttgtgta

SEQ ID NO: 19232 - DNA, 20 bp, synthetic construct
  misc_feature 1..20: note = chemically synthesized
  source 1..20: mol_type = other DNA
gttgacaaaggttgtgtaca

SEQ ID NO: 19233 - DNA, 20 bp, synthetic construct
  misc_feature 1..20: note = chemically synthesized
  source 1..20: mol_type = other DNA
acaaaggttgtgtacagagc

SEQ ID NO: 19234 - DNA, 20 bp, synthetic construct
  misc_feature 1..20: note = chemically synthesized
  source 1..20: mol_type = other DNA
ttttttcttctttctactgt

SEQ ID NO: 19235 - DNA, 20 bp, synthetic construct
  misc_feature 1..20: note = chemically synthesized
  source 1..20: mol_type = other DNA
tcaatatctttttttctgca

SEQ ID NO: 19236 - DNA, 20 bp, synthetic construct
  misc_feature 1..20: note = chemically synthesized
  source 1..20: mol_type = other DNA
atatctttttttctgcaaag

SEQ ID NO: 19237 - DNA, 20 bp, synthetic construct
  misc_feature 1..20: note = chemically synthesized
  source 1..20: mol_type = other DNA
tatctttttttctgcaaaga

SEQ ID NO: 19238 - DNA, 20 bp, synthetic construct
  misc_feature 1..20: note = chemically synthesized
  source 1..20: mol_type = other DNA
atctttttttctgcaaagaa

SEQ ID NO: 19239 - DNA, 20 bp, synthetic construct
  misc_feature 1..20: note = chemically synthesized
  source 1..20: mol_type = other DNA
tctttttttctgcaaagaag

SEQ ID NO: 19240 - DNA, 20 bp, synthetic construct
  misc_feature 1..20: note = chemically synthesized
  source 1..20: mol_type = other DNA
ttttctgcaaagaaggggct

SEQ ID NO: 19241 - DNA, 20 bp, synthetic construct
  misc_feature 1..20: note = chemically synthesized
  source 1..20: mol_type = other DNA
ctaagcttgcacgaaaacac

SEQ ID NO: 19242 - DNA, 20 bp, synthetic construct
  misc_feature 1..20: note = chemically synthesized
  source 1..20: mol_type = other DNA
agcttgcacgaaaacaccgg

SEQ ID NO: 19243 - DNA, 20 bp, synthetic construct
  misc_feature 1..20: note = chemically synthesized
  source 1..20: mol_type = other DNA
gcttgcacgaaaacaccggt

SEQ ID NO: 19244 - DNA, 20 bp, synthetic construct
  misc_feature 1..20: note = chemically synthesized
  source 1..20: mol_type = other DNA
aaacaccggtgggaacccac

SEQ ID NO: 19245 - DNA, 20 bp, synthetic construct
  misc_feature 1..20: note = chemically synthesized
  source 1..20: mol_type = other DNA
acaccggtgggaacccactg

SEQ ID NO: 19246 - DNA, 20 bp, synthetic construct
  misc_feature 1..20: note = chemically synthesized
  source 1..20: mol_type = other DNA
ccggtgggaacccactggag

SEQ ID NO: 19247 - DNA, 20 bp, synthetic construct
  misc_feature 1..20: note = chemically synthesized
  source 1..20: mol_type = other DNA
cggtgggaacccactggaga

SEQ ID NO: 19248 - DNA, 20 bp, synthetic construct
  misc_feature 1..20: note = chemically synthesized
  source 1..20: mol_type = other DNA
ggtgggaacccactggagaa

SEQ ID NO: 19249 - DNA, 20 bp, synthetic construct
  misc_feature 1..20: note = chemically synthesized
  source 1..20: mol_type = other DNA
gaacccactggagaagggca

SEQ ID NO: 19250 - DNA, 20 bp, synthetic construct
  misc_feature 1..20: note = chemically synthesized
  source 1..20: mol_type = other DNA
aacccactggagaagggcat

SEQ ID NO: 19251 - DNA, 20 bp, synthetic construct
  misc_feature 1..20: note = chemically synthesized
  source 1..20: mol_type = other DNA
ccactggagaagggcatggg

SEQ ID NO: 19252 - DNA, 20 bp, synthetic construct
  misc_feature 1..20: note = chemically synthesized
  source 1..20: mol_type = other DNA
agaagggcatgggtggtttt

SEQ ID NO: 19253 - DNA, 20 bp, synthetic construct
  misc_feature 1..20: note = chemically synthesized
  source 1..20: mol_type = other DNA
ggcatgggtggtttttggtt

SEQ ID NO: 19254 - DNA, 20 bp, synthetic construct
  misc_feature 1..20: note = chemically synthesized
  source 1..20: mol_type = other DNA
tgggtggtttttggttcggt

SEQ ID NO: 19255 - DNA, 20 bp, synthetic construct
  misc_feature 1..20: note = chemically synthesized
  source 1..20: mol_type = other DNA
gtggtttttggttcggttgg

SEQ ID NO: 19256 - DNA, 20 bp, synthetic construct
  misc_feature 1..20: note = chemically synthesized
  source 1..20: mol_type = other DNA
tcggttggtggctgatctga

SEQ ID NO: 19257 - DNA, 20 bp, synthetic construct
  misc_feature 1..20: note = chemically synthesized
  source 1..20: mol_type = other DNA
cggttggtggctgatctgat

SEQ ID NO: 19258 - DNA, 20 bp, synthetic construct
  misc_feature 1..20: note = chemically synthesized
  source 1..20: mol_type = other DNA
ttggtggctgatctgatggg

SEQ ID NO: 19259 - DNA, 20 bp, synthetic construct
  misc_feature 1..20: note = chemically synthesized
  source 1..20: mol_type = other DNA
ggctgatctgatgggtggta

SEQ ID NO: 19260 - DNA, 20 bp, synthetic construct
  misc_feature 1..20: note = chemically synthesized
  source 1..20: mol_type = other DNA
gctgatctgatgggtggtat

SEQ ID NO: 19261 - DNA, 20 bp, synthetic construct
  misc_feature 1..20: note = chemically synthesized
  source 1..20: mol_type = other DNA
gatctgatgggtggtatagg

SEQ ID NO: 19262 - DNA, 20 bp, synthetic construct
  misc_feature 1..20: note = chemically synthesized
  source 1..20: mol_type = other DNA
ggtggtataggcagaatgtc

SEQ ID NO: 19263 - DNA, 20 bp, synthetic construct
  misc_feature 1..20: note = chemically synthesized
  source 1..20: mol_type = other DNA
agaatgtctggctgcccctt

SEQ ID NO: 19264 - DNA, 20 bp, synthetic construct
  misc_feature 1..20: note = chemically synthesized
  source 1..20: mol_type = other DNA
gctgccccttcagattcctg

SEQ ID NO: 19265 - DNA, 20 bp, synthetic construct
  misc_feature 1..20: note = chemically synthesized
  source 1..20: mol_type = other DNA
tcagattcctgtagattccg

SEQ ID NO: 19266 - DNA, 20 bp, synthetic construct
  misc_feature 1..20: note = chemically synthesized
  source 1..20: mol_type = other DNA
cagattcctgtagattccgt

SEQ ID NO: 19267 - DNA, 20 bp, synthetic construct
  misc_feature 1..20: note = chemically synthesized
  source 1..20: mol_type = other DNA
gattccgtaggcgaccaaca

SEQ ID NO: 19268 - DNA, 20 bp, synthetic construct
  misc_feature 1..20: note = chemically synthesized
  source 1..20: mol_type = other DNA
attccgtaggcgaccaacat

SEQ ID NO: 19269 - DNA, 20 bp, synthetic construct
  misc_feature 1..20: note = chemically synthesized
  source 1..20: mol_type = other DNA
ttccgtaggcgaccaacatg

SEQ ID NO: 19270 - DNA, 20 bp, synthetic construct
  misc_feature 1..20: note = chemically synthesized
  source 1..20: mol_type = other DNA
cgtaggcgaccaacatgggg

SEQ ID NO: 19271 - DNA, 20 bp, synthetic construct
  misc_feature 1..20: note = chemically synthesized
  source 1..20: mol_type = other DNA
gtaggcgaccaacatggggt

SEQ ID NO: 19272 - DNA, 20 bp, synthetic construct
  misc_feature 1..20: note = chemically synthesized
  source 1..20: mol_type = other DNA
taggcgaccaacatggggtg

SEQ ID NO: 19273 - DNA, 20 bp, synthetic construct
  misc_feature 1..20: note = chemically synthesized
  source 1..20: mol_type = other DNA
aggcgaccaacatggggtgg

SEQ ID NO: 19274 - DNA, 20 bp, synthetic construct
  misc_feature 1..20: note = chemically synthesized
  source 1..20: mol_type = other DNA
cgaccaacatggggtggggg

SEQ ID NO: 19275 - DNA, 20 bp, synthetic construct
  misc_feature 1..20: note = chemically synthesized
  source 1..20: mol_type = other DNA
gaccaacatggggtgggggt

SEQ ID NO: 19276 - DNA, 20 bp, synthetic construct
  misc_feature 1..20: note = chemically synthesized
  source 1..20: mol_type = other DNA
accaacatggggtgggggtg

SEQ ID NO: 19277 - DNA, 20 bp, synthetic construct
  misc_feature 1..20: note = chemically synthesized
  source 1..20: mol_type = other DNA
ccaacatggggtgggggtgg

SEQ ID NO: 19278 - DNA, 20 bp, synthetic construct
  misc_feature 1..20: note = chemically synthesized
  source 1..20: mol_type = other DNA
gcaaatatcttcactctcct

SEQ ID NO: 19279 - DNA, 20 bp, synthetic construct
  misc_feature 1..20: note = chemically synthesized
  source 1..20: mol_type = other DNA
cactctccttggtgcttctg

SEQ ID NO: 19280 - DNA, 20 bp, synthetic construct
  misc_feature 1..20: note = chemically synthesized
  source 1..20: mol_type = other DNA
tgtggttgtgcctatgaatt

SEQ ID NO: 19281 - DNA, 20 bp, synthetic construct
  misc_feature 1..20: note = chemically synthesized
  source 1..20: mol_type = other DNA
gtggttgtgcctatgaattt

SEQ ID NO: 19282 - DNA, 20 bp, synthetic construct
  misc_feature 1..20: note = chemically synthesized
  source 1..20: mol_type = other DNA
atttaggaccttatgcctca

SEQ ID NO: 19283 - DNA, 20 bp, synthetic construct
  misc_feature 1..20: note = chemically synthesized
  source 1..20: mol_type = other DNA
accttatgcctcatagtgtt

SEQ ID NO: 19284 - DNA, 20 bp, synthetic construct
  misc_feature 1..20: note = chemically synthesized
  source 1..20: mol_type = other DNA
tatgcctcatagtgttgagt

SEQ ID NO: 19285 - DNA, 20 bp, synthetic construct
  misc_feature 1..20: note = chemically synthesized
  source 1..20: mol_type = other DNA
tgcctcatagtgttgagtca

SEQ ID NO: 19286 - DNA, 20 bp, synthetic construct
  misc_feature 1..20: note = chemically synthesized
  source 1..20: mol_type = other DNA
agtgttgagtcagagcaaaa

SEQ ID NO: 19287 - DNA, 20 bp, synthetic construct
  misc_feature 1..20: note = chemically synthesized
  source 1..20: mol_type = other DNA
gagcaaaacagtttacatca

SEQ ID NO: 19288 - DNA, 20 bp, synthetic construct
  misc_feature 1..20: note = chemically synthesized
  source 1..20: mol_type = other DNA
agcaaaacagtttacatcaa

SEQ ID NO: 19289 - DNA, 20 bp, synthetic construct
  misc_feature 1..20: note = chemically synthesized
  source 1..20: mol_type = other DNA
gccacttatttaattttcct

SEQ ID NO: 19290 - DNA, 20 bp, synthetic construct
  misc_feature 1..20: note = chemically synthesized
  source 1..20: mol_type = other DNA
ttttcctcagaaaactctgt

SEQ ID NO: 19291 - DNA, 20 bp, synthetic construct
  misc_feature 1..20: note = chemically synthesized
  source 1..20: mol_type = other DNA
tttcctcagaaaactctgtg

SEQ ID NO: 19292 - DNA, 20 bp, synthetic construct
  misc_feature 1..20: note = chemically synthesized
  source 1..20: mol_type = other DNA
taatttctccttcttataaa

SEQ ID NO: 19293 - DNA, 20 bp, synthetic construct
  misc_feature 1..20: note = chemically synthesized
  source 1..20: mol_type = other DNA
atgtgtacattatcccaccg

SEQ ID NO: 19294 - DNA, 20 bp, synthetic construct
  misc_feature 1..20: note = chemically synthesized
  source 1..20: mol_type = other DNA
tgtgtacattatcccaccga

SEQ ID NO: 19295 - DNA, 20 bp, synthetic construct
  misc_feature 1..20: note = chemically synthesized
  source 1..20: mol_type = other DNA
gtgtacattatcccaccgaa

SEQ ID NO: 19296 - DNA, 20 bp, synthetic construct
  misc_feature 1..20: note = chemically synthesized
  source 1..20: mol_type = other DNA
tgctctttacttttataatc

SEQ ID NO: 19297 - DNA, 20 bp, synthetic construct
  misc_feature 1..20: note = chemically synthesized
  source 1..20: mol_type = other DNA
aatctagattttaaaaaatt

SEQ ID NO: 19298 - DNA, 20 bp, synthetic construct
  misc_feature 1..20: note = chemically synthesized
  source 1..20: mol_type = other DNA
ctagattttaaaaaatttgg

SEQ ID NO: 19299 - DNA, 20 bp, synthetic construct
  misc_feature 1..20: note = chemically synthesized
  source 1..20: mol_type = other DNA
aatttggtggcacttgattt

SEQ ID NO: 19300 - DNA, 20 bp, synthetic construct
  misc_feature 1..20: note = chemically synthesized
  source 1..20: mol_type = other DNA
atttggtggcacttgatttc

SEQ ID NO: 19301 - DNA, 20 bp, synthetic construct
  misc_feature 1..20: note = chemically synthesized
  source 1..20: mol_type = other DNA
ggcacttgatttcaggtcct

SEQ ID NO: 19302 - DNA, 20 bp, synthetic construct
  misc_feature 1..20: note = chemically synthesized
  source 1..20: mol_type = other DNA
gatttcaggtcctcagactc

SEQ ID NO: 19303 - DNA, 20 bp, synthetic construct
  misc_feature 1..20: note = chemically synthesized
  source 1..20: mol_type = other DNA
cagaatttatactcactgat

SEQ ID NO: 19304 - DNA, 20 bp, synthetic construct
  misc_feature 1..20: note = chemically synthesized
  source 1..20: mol_type = other DNA
aatgcattatgcaaataatt

SEQ ID NO: 19305 - DNA, 20 bp, synthetic construct
  misc_feature 1..20: note = chemically synthesized
  source 1..20: mol_type = other DNA
acctcatgtcttgaaaaaaa

SEQ ID NO: 19306 - DNA, 20 bp, synthetic construct
  misc_feature 1..20: note = chemically synthesized
  source 1..20: mol_type = other DNA
ctcaaaataaacaaaacctg

SEQ ID NO: 19307 - DNA, 20 bp, synthetic construct
  misc_feature 1..20: note = chemically synthesized
  source 1..20: mol_type = other DNA
aaaataaacaaaacctgcag

SEQ ID NO: 19308 - DNA, 20 bp, synthetic construct
  misc_feature 1..20: note = chemically synthesized
  source 1..20: mol_type = other DNA
aataaacaaaacctgcagaa

SEQ ID NO: 19309 - DNA, 20 bp, synthetic construct
  misc_feature 1..20: note = chemically synthesized
  source 1..20: mol_type = other DNA
cctgcagaagagtttattgt

SEQ ID NO: 19310 - DNA, 20 bp, synthetic construct
  misc_feature 1..20: note = chemically synthesized
  source 1..20: mol_type = other DNA
ctgcagaagagtttattgta

SEQ ID NO: 19311 - DNA, 20 bp, synthetic construct
  misc_feature 1..20: note = chemically synthesized
  source 1..20: mol_type = other DNA
tgcagaagagtttattgtaa

SEQ ID NO: 19312 - DNA, 20 bp, synthetic construct
  misc_feature 1..20: note = chemically synthesized
  source 1..20: mol_type = other DNA
tattgtaagggtgaaaatta

SEQ ID NO: 19313 - DNA, 20 bp, synthetic construct
  misc_feature 1..20: note = chemically synthesized
  source 1..20: mol_type = other DNA
ttgtaagggtgaaaattaaa

SEQ ID NO: 19314 - DNA, 20 bp, synthetic construct
  misc_feature 1..20: note = chemically synthesized
  source 1..20: mol_type = other DNA
tgtaagggtgaaaattaaag

SEQ ID NO: 19315 - DNA, 20 bp, synthetic construct
  misc_feature 1..20: note = chemically synthesized
  source 1..20: mol_type = other DNA
taaagaggaacccatttgcc

SEQ ID NO: 19316 - DNA, 20 bp, synthetic construct
  misc_feature 1..20: note = chemically synthesized
  source 1..20: mol_type = other DNA
aaagaggaacccatttgcct

SEQ ID NO: 19317 - DNA, 20 bp, synthetic construct
  misc_feature 1..20: note = chemically synthesized
  source 1..20: mol_type = other DNA
ccatttgcctgggaactttt

SEQ ID NO: 19318 - DNA, 20 bp, synthetic construct
  misc_feature 1..20: note = chemically synthesized
  source 1..20: mol_type = other DNA
catttgcctgggaacttttg

SEQ ID NO: 19319 - DNA, 20 bp, synthetic construct
  misc_feature 1..20: note = chemically synthesized
  source 1..20: mol_type = other DNA
atcaatataccttgccacgc

SEQ ID NO: 19320 - DNA, 20 bp, synthetic construct
  misc_feature 1..20: note = chemically synthesized
  source 1..20: mol_type = other DNA
tcaatataccttgccacgca

SEQ ID NO: 19321 - DNA, 20 bp, synthetic construct
  misc_feature 1..20: note = chemically synthesized
  source 1..20: mol_type = other DNA
aaggtatattctattatctt

SEQ ID NO: 19322 - DNA, 20 bp, synthetic construct
  misc_feature 1..20: note = chemically synthesized
  source 1..20: mol_type = other DNA
tttctgaatttttcaatttt

SEQ ID NO: 19323 - DNA, 20 bp, synthetic construct
  misc_feature 1..20: note = chemically synthesized
  source 1..20: mol_type = other DNA
aatttttcaattttcagaaa

SEQ ID NO: 19324 - DNA, 20 bp, synthetic construct
  misc_feature 1..20: note = chemically synthesized
  source 1..20: mol_type = other DNA
ttttcaattttcagaaaaag

SEQ ID NO: 19325 - DNA, 20 bp, synthetic construct
  misc_feature 1..20: note = chemically synthesized
  source 1..20: mol_type = other DNA
cacatttgtgcataaataca

SEQ ID NO: 19326 - DNA, 20 bp, synthetic construct
  misc_feature 1..20: note = chemically synthesized
  source 1..20: mol_type = other DNA
acatttgtgcataaatacac

SEQ ID NO: 19327 - DNA, 20 bp, synthetic construct
  misc_feature 1..20: note = chemically synthesized
  source 1..20: mol_type = other DNA
cacaggcataaatgaaaatt

SEQ ID NO: 19328 - DNA, 20 bp, synthetic construct
  misc_feature 1..20: note = chemically synthesized
  source 1..20: mol_type = other DNA
acaggcataaatgaaaattt

SEQ ID NO: 19329 - DNA, 20 bp, synthetic construct
  misc_feature 1..20: note = chemically synthesized
  source 1..20: mol_type = other DNA
aatttaggccgaattatttg

SEQ ID NO: 19330 - DNA, 20 bp, synthetic construct
  misc_feature 1..20: note = chemically synthesized
  source 1..20: mol_type = other DNA
tttaggccgaattatttgaa

SEQ ID NO: 19331 - DNA, 20 bp, synthetic construct
  misc_feature 1..20: note = chemically synthesized
  source 1..20: mol_type = other DNA
ttaggccgaattatttgaag

SEQ ID NO: 19332 - DNA, 20 bp, synthetic construct
  misc_feature 1..20: note = chemically synthesized
  source 1..20: mol_type = other DNA
aggatacaataattgcttgc

SEQ ID NO: 19333 - DNA, 20 bp, synthetic construct
  misc_feature 1..20: note = chemically synthesized
  source 1..20: mol_type = other DNA
cagtgacatgattctcctgc

SEQ ID NO: 19334 - DNA, 20 bp, synthetic construct
  misc_feature 1..20: note = chemically synthesized
  source 1..20: mol_type = other DNA
gtgacatgattctcctgcca

SEQ ID NO: 19335 - DNA, 20 bp, synthetic construct
  misc_feature 1..20: note = chemically synthesized
  source 1..20: mol_type = other DNA
gacatgattctcctgccaga

SEQ ID NO: 19336 - DNA, 20 bp, synthetic construct
  misc_feature 1..20: note = chemically synthesized
  source 1..20: mol_type = other DNA
catgattctcctgccagaga

SEQ ID NO: 19337 - DNA, 20 bp, synthetic construct
  misc_feature 1..20: note = chemically synthesized
  source 1..20: mol_type = other DNA
atgattctcctgccagagag

SEQ ID NO: 19338 - DNA, 20 bp, synthetic construct
  misc_feature 1..20: note = chemically synthesized
  source 1..20: mol_type = other DNA
tgattctcctgccagagaga

SEQ ID NO: 19339 - DNA, 20 bp, synthetic construct
  misc_feature 1..20: note = chemically synthesized
  source 1..20: mol_type = other DNA
gattctcctgccagagagag

SEQ ID NO: 19340 - DNA, 20 bp, synthetic construct
  misc_feature 1..20: note = chemically synthesized
  source 1..20: mol_type = other DNA
ttctcctgccagagagaggg

SEQ ID NO: 19341 - DNA, 20 bp, synthetic construct
  misc_feature 1..20: note = chemically synthesized
  source 1..20: mol_type = other DNA
cagagagaggggagaataac

SEQ ID NO: 19342 - DNA, 20 bp, synthetic construct
  misc_feature 1..20: note = chemically synthesized
  source 1..20: mol_type = other DNA
agagagaggggagaataact

SEQ ID NO: 19343 - DNA, 20 bp, synthetic construct
  misc_feature 1..20: note = chemically synthesized
  source 1..20: mol_type = other DNA
gtgcaaacttttaacactcc

SEQ ID NO: 19344 - DNA, 20 bp, synthetic construct
  misc_feature 1..20: note = chemically synthesized
  source 1..20: mol_type = other DNA
aacttttaacactccaagtc

SEQ ID NO: 19345 - DNA, 20 bp, synthetic construct
  misc_feature 1..20: note = chemically synthesized
  source 1..20: mol_type = other DNA
cttttaacactccaagtcta

SEQ ID NO: 19346 - DNA, 20 bp, synthetic construct
  misc_feature 1..20: note = chemically synthesized
  source 1..20: mol_type = other DNA
tttaacactccaagtctaga

SEQ ID NO: 19347 - DNA, 20 bp, synthetic construct
  misc_feature 1..20: note = chemically synthesized
  source 1..20: mol_type = other DNA
aagtctagagagaattatcc

SEQ ID NO: 19348 - DNA, 20 bp, synthetic construct
  misc_feature 1..20: note = chemically synthesized
  source 1..20: mol_type = other DNA
tagagagaattatccaagca

SEQ ID NO: 19349 - DNA, 20 bp, synthetic construct
  misc_feature 1..20: note = chemically synthesized
  source 1..20: mol_type = other DNA
aagcatagccatgaattcct

SEQ ID NO: 19350 - DNA, 20 bp, synthetic construct
  misc_feature 1..20: note = chemically synthesized
  source 1..20: mol_type = other DNA
agccatgaattcctgagtta

SEQ ID NO: 19351 - DNA, 20 bp, synthetic construct
  misc_feature 1..20: note = chemically synthesized
  source 1..20: mol_type = other DNA
tgaattcctgagttatggat

SEQ ID NO: 19352 - DNA, 20 bp, synthetic construct
  misc_feature 1..20: note = chemically synthesized
  source 1..20: mol_type = other DNA
acgatctctttgtcttcact

SEQ ID NO: 19353 - DNA, 20 bp, synthetic construct
  misc_feature 1..20: note = chemically synthesized
  source 1..20: mol_type = other DNA
cactgagttttctttgtcat

SEQ ID NO: 19354 - DNA, 20 bp, synthetic construct
  misc_feature 1..20: note = chemically synthesized
  source 1..20: mol_type = other DNA
ctgagttttctttgtcattg

SEQ ID NO: 19355 - DNA, 20 bp, synthetic construct
  misc_feature 1..20: note = chemically synthesized
  source 1..20: mol_type = other DNA
tctttgtcattggagtaatt

SEQ ID NO: 19356 - DNA, 20 bp, synthetic construct
  misc_feature 1..20: note = chemically synthesized
  source 1..20: mol_type = other DNA
ctttgtcattggagtaattt

SEQ ID NO: 19357 - DNA, 20 bp, synthetic construct
  misc_feature 1..20: note = chemically synthesized
  source 1..20: mol_type = other DNA
ttgtcattggagtaatttag

SEQ ID NO: 19358 - DNA, 20 bp, synthetic construct
  misc_feature 1..20: note = chemically synthesized
  source 1..20: mol_type = other DNA
tggagtaatttaggagaata

SEQ ID NO: 19359 - DNA, 20 bp, synthetic construct
  misc_feature 1..20: note = chemically synthesized
  source 1..20: mol_type = other DNA
ggagtaatttaggagaatac

SEQ ID NO: 19360 - DNA, 20 bp, synthetic construct
  misc_feature 1..20: note = chemically synthesized
  source 1..20: mol_type = other DNA
aggagaatacaggatgtgac

SEQ ID NO: 19361 - DNA, 20 bp, synthetic construct
  misc_feature 1..20: note = chemically synthesized
  source 1..20: mol_type = other DNA
ggagaatacaggatgtgact

SEQ ID NO: 19362 - DNA, 20 bp, synthetic construct
  misc_feature 1..20: note = chemically synthesized
  source 1..20: mol_type = other DNA
agaatacaggatgtgactgg

SEQ ID NO: 19363 - DNA, 20 bp, synthetic construct
  misc_feature 1..20: note = chemically synthesized
  source 1..20: mol_type = other DNA
actgggagccctttctgaat

SEQ ID NO: 19364 - DNA, 20 bp, synthetic construct
  misc_feature 1..20: note = chemically synthesized
  source 1..20: mol_type = other DNA
gagccctttctgaataagca

SEQ ID NO: 19365 - DNA, 20 bp, synthetic construct
  misc_feature 1..20: note = chemically synthesized
  source 1..20: mol_type = other DNA
gcccacgtgaattcctaaac

SEQ ID NO: 19366 - DNA, 20 bp, synthetic construct
  misc_feature 1..20: note = chemically synthesized
  source 1..20: mol_type = other DNA
cacgtgaattcctaaaccag

SEQ ID NO: 19367 - DNA, 20 bp, synthetic construct
  misc_feature 1..20: note = chemically synthesized
  source 1..20: mol_type = other DNA
attcctaaaccagtggctcc

SEQ ID NO: 19368 - DNA, 20 bp, synthetic construct
  misc_feature 1..20: note = chemically synthesized
  source 1..20: mol_type = other DNA
tggctcccagctgcatgtgt

SEQ ID NO: 19369 - DNA, 20 bp, synthetic construct
  misc_feature 1..20: note = chemically synthesized
  source 1..20: mol_type = other DNA
cccagctgcatgtgtcagaa

SEQ ID NO: 19370 - DNA, 20 bp, synthetic construct
  misc_feature 1..20: note = chemically synthesized
  source 1..20: mol_type = other DNA
tgcatgtgtcagaacagaac

SEQ ID NO: 19371 - DNA, 20 bp, synthetic construct
  misc_feature 1..20: note = chemically synthesized
  source 1..20: mol_type = other DNA
tgtcagaacagaactggcct

SEQ ID NO: 19372 - DNA, 20 bp, synthetic construct
  misc_feature 1..20: note = chemically synthesized
  source 1..20: mol_type = other DNA
aactggcctcagaaatctac

SEQ ID NO: 19373 - DNA, 20 bp, synthetic construct
  misc_feature 1..20: note = chemically synthesized
  source 1..20: mol_type = other DNA
ctcagaaatctacaagattc

SEQ ID NO: 19374 - DNA, 20 bp, synthetic construct
  misc_feature 1..20: note = chemically synthesized
  source 1..20: mol_type = other DNA
agaaatctacaagattccag

SEQ ID NO: 19375 - DNA, 20 bp, synthetic construct
  misc_feature 1..20: note = chemically synthesized
  source 1..20: mol_type = other DNA
ctacaagattccagtggttc

SEQ ID NO: 19376 - DNA, 20 bp, synthetic construct
  misc_feature 1..20: note = chemically synthesized
  source 1..20: mol_type = other DNA
ggttccagcctcactttctc

SEQ ID NO: 19377 - DNA, 20 bp, synthetic construct
  misc_feature 1..20: note = chemically synthesized
  source 1..20: mol_type = other DNA
tccagcctcactttctccag

SEQ ID NO: 19378 - DNA, 20 bp, synthetic construct
  misc_feature 1..20: note = chemically synthesized
  source 1..20: mol_type = other DNA
gtcaacttactgctgttgca

SEQ ID NO: 19379 - DNA, 20 bp, synthetic construct
  misc_feature 1..20: note = chemically synthesized
  source 1..20: mol_type = other DNA
actgctgttgcaaagcacgt

SEQ ID NO: 19380 - DNA, 20 bp, synthetic construct
  misc_feature 1..20: note = chemically synthesized
  source 1..20: mol_type = other DNA
ttgcaaagcacgtcagattt

SEQ ID NO: 19381 - DNA, 20 bp, synthetic construct
  misc_feature 1..20: note = chemically synthesized
  source 1..20: mol_type = other DNA
tgcaaagcacgtcagatttc

SEQ ID NO: 19382 - DNA, 20 bp, synthetic construct
  misc_feature 1..20: note = chemically synthesized
  source 1..20: mol_type = other DNA
caaagcacgtcagatttcag

SEQ ID NO: 19383 - DNA, 20 bp, synthetic construct
  misc_feature 1..20: note = chemically synthesized
  source 1..20: mol_type = other DNA
tcaggagcgatttctcttgt

SEQ ID NO: 19384 - DNA, 20 bp, synthetic construct
  misc_feature 1..20: note = chemically synthesized
  source 1..20: mol_type = other DNA
caggagcgatttctcttgta

SEQ ID NO: 19385 - DNA, 20 bp, synthetic construct
  misc_feature 1..20: note = chemically synthesized
  source 1..20: mol_type = other DNA
agcgatttctcttgtaagga

SEQ ID NO: 19386 - DNA, 20 bp, synthetic construct
  misc_feature 1..20: note = chemically synthesized
  source 1..20: mol_type = other DNA
gatttctcttgtaaggaaag

SEQ ID NO: 19387 - DNA, 20 bp, synthetic construct
  misc_feature 1..20: note = chemically synthesized
  source 1..20: mol_type = other DNA
atttctcttgtaaggaaaga

SEQ ID NO: 19388 - DNA, 20 bp, synthetic construct
  misc_feature 1..20: note = chemically synthesized
  source 1..20: mol_type = other DNA
tctcttgtaaggaaagaagg

SEQ ID NO: 19389 - DNA, 20 bp, synthetic construct
  misc_feature 1..20: note = chemically synthesized
  source 1..20: mol_type = other DNA
ctcttgtaaggaaagaaggc

SEQ ID NO: 19390 - DNA, 20 bp, synthetic construct
  misc_feature 1..20: note = chemically synthesized
  source 1..20: mol_type = other DNA
ttgtaaggaaagaaggcagg

SEQ ID NO: 19391 - DNA, 20 bp, synthetic construct
  misc_feature 1..20: note = chemically synthesized
  source 1..20: mol_type = other DNA
tgtaaggaaagaaggcaggc

SEQ ID NO: 19392 - DNA, 20 bp, synthetic construct
  misc_feature 1..20: note = chemically synthesized
  source 1..20: mol_type = other DNA
aaggaaagaaggcaggcagg

SEQ ID NO: 19393 - DNA, 20 bp, synthetic construct
  misc_feature 1..20: note = chemically synthesized
  source 1..20: mol_type = other DNA
aggaaagaaggcaggcaggc

SEQ ID NO: 19394 - DNA, 20 bp, synthetic construct
  misc_feature 1..20: note = chemically synthesized
  source 1..20: mol_type = other DNA
aaagaaggcaggcaggcagg

SEQ ID NO: 19395 - DNA, 20 bp, synthetic construct
  misc_feature 1..20: note = chemically synthesized
  source 1..20: mol_type = other DNA
aagaaggcaggcaggcaggc

SEQ ID NO: 19396 - DNA, 20 bp, synthetic construct
  misc_feature 1..20: note = chemically synthesized
  source 1..20: mol_type = other DNA
aaggcaggcaggcaggcagg

SEQ ID NO: 19397 - DNA, 20 bp, synthetic construct
  misc_feature 1..20: note = chemically synthesized
  source 1..20: mol_type = other DNA
aggcaggcaggcaggcaggc

SEQ ID NO: 19398 - DNA, 20 bp, synthetic construct
  misc_feature 1..20: note = chemically synthesized
  source 1..20: mol_type = other DNA
caggcaggcaggcaggcagg

SEQ ID NO: 19399 - DNA, 20 bp, synthetic construct
  misc_feature 1..20: note = chemically synthesized
  source 1..20: mol_type = other DNA
aggcaggcaggcaggcaggc

SEQ ID NO: 19400 - DNA, 20 bp, synthetic construct
  misc_feature 1..20: note = chemically synthesized
  source 1..20: mol_type = other DNA
caggcaggcaggcaggcagg

SEQ ID NO: 19401 - DNA, 20 bp, synthetic construct
  misc_feature 1..20: note = chemically synthesized
  source 1..20: mol_type = other DNA
aggcaggcaggcaggcaggc

SEQ ID NO: 19402 - DNA, 20 bp, synthetic construct
  misc_feature 1..20: note = chemically synthesized
  source 1..20: mol_type = other DNA
caggcaggcaggcaggcagg

SEQ ID NO: 19403 - DNA, 20 bp, synthetic construct
  misc_feature 1..20: note = chemically synthesized
  source 1..20: mol_type = other DNA
aggcaggcaggcaggcaggc

SEQ ID NO: 19404 - DNA, 20 bp, synthetic construct
  misc_feature 1..20: note = chemically synthesized
  source 1..20: mol_type = other DNA
caggcaggcaggcaggcagg

SEQ ID NO: 19405 - DNA, 20 bp, synthetic construct
  misc_feature 1..20: note = chemically synthesized
  source 1..20: mol_type = other DNA
aggcaggcaggcaggcaggc

SEQ ID NO: 19406 - DNA, 20 bp, synthetic construct
  misc_feature 1..20: note = chemically synthesized
  source 1..20: mol_type = other DNA
caggcaggcaggcaggcagg

SEQ ID NO: 19407 - DNA, 20 bp, synthetic construct
  misc_feature 1..20: note = chemically synthesized
  source 1..20: mol_type = other DNA
aggcaggcaggcaggcaggc

SEQ ID NO: 19408 - DNA, 20 bp, synthetic construct
  misc_feature 1..20: note = chemically synthesized
  source 1..20: mol_type = other DNA
aggcaggcaggcaggcaggc

SEQ ID NO: 19409 - DNA, 20 bp, synthetic construct
  misc_feature 1..20: note = chemically synthesized
  source 1..20: mol_type = other DNA
aggcaggcaggcaggcaagt

SEQ ID NO: 19410 - DNA, 20 bp, synthetic construct
  misc_feature 1..20: note = chemically synthesized
  source 1..20: mol_type = other DNA
ggcaggcaggcaggcaagtg

SEQ ID NO: 19411 - DNA, 20 bp, synthetic construct
  misc_feature 1..20: note = chemically synthesized
  source 1..20: mol_type = other DNA
aggaccttattttttctctg

SEQ ID NO: 19412 - DNA, 20 bp, synthetic construct
  misc_feature 1..20: note = chemically synthesized
  source 1..20: mol_type = other DNA
ttattttttctctgcagcat

SEQ ID NO: 19413 - DNA, 20 bp, synthetic construct
  misc_feature 1..20: note = chemically synthesized
  source 1..20: mol_type = other DNA
ttttctctgcagcatgagtg

SEQ ID NO: 19414 - DNA, 20 bp, synthetic construct
  misc_feature 1..20: note = chemically synthesized
  source 1..20: mol_type = other DNA
tccacacccatctctcctta

SEQ ID NO: 19415 - DNA, 20 bp, synthetic construct
  misc_feature 1..20: note = chemically synthesized
  source 1..20: mol_type = other DNA
ccacacccatctctccttac

SEQ ID NO: 19416 - DNA, 20 bp, synthetic construct
  misc_feature 1..20: note = chemically synthesized
  source 1..20: mol_type = other DNA
ccatctctccttacaggtta

SEQ ID NO: 19417 - DNA, 20 bp, synthetic construct
  misc_feature 1..20: note = chemically synthesized
  source 1..20: mol_type = other DNA
acaggttatagacacatttt

SEQ ID NO: 19418 - DNA, 20 bp, synthetic construct
  misc_feature 1..20: note = chemically synthesized
  source 1..20: mol_type = other DNA
cacatttttggcactgcata

SEQ ID NO: 19419 - DNA, 20 bp, synthetic construct
  misc_feature 1..20: note = chemically synthesized
  source 1..20: mol_type = other DNA
tttttggcactgcataaagt

SEQ ID NO: 19420 - DNA, 20 bp, synthetic construct
  misc_feature 1..20: note = chemically synthesized
  source 1..20: mol_type = other DNA
ttaactttcacatcattaaa

SEQ ID NO: 19421 - DNA, 20 bp, synthetic construct
  misc_feature 1..20: note = chemically synthesized
  source 1..20: mol_type = other DNA
aaagctgatgtactgacttt

SEQ ID NO: 19422 - DNA, 20 bp, synthetic construct
  misc_feature 1..20: note = chemically synthesized
  source 1..20: mol_type = other DNA
tgtactgactttcagctgcc

SEQ ID NO: 19423 - DNA, 20 bp, synthetic construct
  misc_feature 1..20: note = chemically synthesized
  source 1..20: mol_type = other DNA
tactgactttcagctgcctg

SEQ ID NO: 19424 - DNA, 20 bp, synthetic construct
  misc_feature 1..20: note = chemically synthesized
  source 1..20: mol_type = other DNA
gactttcagctgcctggaga

SEQ ID NO: 19425 - DNA, 20 bp, synthetic construct
  misc_feature 1..20: note = chemically synthesized
  source 1..20: mol_type = other DNA
tcagctgcctggagatagtt

SEQ ID NO: 19426 - DNA, 20 bp, synthetic construct
  misc_feature 1..20: note = chemically synthesized
  source 1..20: mol_type = other DNA
cagctgcctggagatagttc

SEQ ID NO: 19427 - DNA, 20 bp, synthetic construct
  misc_feature 1..20: note = chemically synthesized
  source 1..20: mol_type = other DNA
agctgcctggagatagttca

SEQ ID NO: 19428 - DNA, 20 bp, synthetic construct
  misc_feature 1..20: note = chemically synthesized
  source 1..20: mol_type = other DNA
cctggagatagttcagggcc

SEQ ID NO: 19429 - DNA, 20 bp, synthetic construct
  misc_feature 1..20: note = chemically synthesized
  source 1..20: mol_type = other DNA
gttcagggcccagcacctga

SEQ ID NO: 19430 - DNA, 20 bp, synthetic construct
  misc_feature 1..20: note = chemically synthesized
  source 1..20: mol_type = other DNA
ttcagggcccagcacctgac

SEQ ID NO: 19431 - DNA, 20 bp, synthetic construct
  misc_feature 1..20: note = chemically synthesized
  source 1..20: mol_type = other DNA
gtgttttatgtctctcaata

SEQ ID NO: 19432 - DNA, 20 bp, synthetic construct
  misc_feature 1..20: note = chemically synthesized
  source 1..20: mol_type = other DNA
gttttatgtctctcaatatg

SEQ ID NO: 19433 - DNA, 20 bp, synthetic construct
  misc_feature 1..20: note = chemically synthesized
  source 1..20: mol_type = other DNA
ttttatgtctctcaatatgg

SEQ ID NO: 19434 - DNA, 20 bp, synthetic construct
  misc_feature 1..20: note = chemically synthesized
  source 1..20: mol_type = other DNA
gtctctcaatatggaggtta

SEQ ID NO: 19435 - DNA, 20 bp, synthetic construct
  misc_feature 1..20: note = chemically synthesized
  source 1..20: mol_type = other DNA
atggaggttatagaatcaaa

SEQ ID NO: 19436 - DNA, 20 bp, synthetic construct
  misc_feature 1..20: note = chemically synthesized
  source 1..20: mol_type = other DNA
aaagaccgcaaaatgcctta

SEQ ID NO: 19437 - DNA, 20 bp, synthetic construct
  misc_feature 1..20: note = chemically synthesized
  source 1..20: mol_type = other DNA
aagaccgcaaaatgccttaa

SEQ ID NO: 19438 - DNA, 20 bp, synthetic construct
  misc_feature 1..20: note = chemically synthesized
  source 1..20: mol_type = other DNA
cttaaaggtgttgataccca

SEQ ID NO: 19439 - DNA, 20 bp, synthetic construct
  misc_feature 1..20: note = chemically synthesized
  source 1..20: mol_type = other DNA
aaggtgttgatacccataga

SEQ ID NO: 19440 - DNA, 20 bp, synthetic construct
  misc_feature 1..20: note = chemically synthesized
  source 1..20: mol_type = other DNA
ggtgttgatacccatagaca

SEQ ID NO: 19441 - DNA, 20 bp, synthetic construct
  misc_feature 1..20: note = chemically synthesized
  source 1..20: mol_type = other DNA
acccatagacagagcatgca

SEQ ID NO: 19442 - DNA, 20 bp, synthetic construct
  misc_feature 1..20: note = chemically synthesized
  source 1..20: mol_type = other DNA
gacagagcatgcatagtcct

SEQ ID NO: 19443 - DNA, 20 bp, synthetic construct
  misc_feature 1..20: note = chemically synthesized
  source 1..20: mol_type = other DNA
acagagcatgcatagtcctc

SEQ ID NO: 19444 - DNA, 20 bp, synthetic construct
  misc_feature 1..20: note = chemically synthesized
  source 1..20: mol_type = other DNA
cacacctatttctttttttg

SEQ ID NO: 19445 - DNA, 20 bp, synthetic construct
  misc_feature 1..20: note = chemically synthesized
  source 1..20: mol_type = other DNA
tttgtagcgcctgtatttga

SEQ ID NO: 19446 - DNA, 20 bp, synthetic construct
  misc_feature 1..20: note = chemically synthesized
  source 1..20: mol_type = other DNA
ttgtagcgcctgtatttgaa

SEQ ID NO: 19447 - DNA, 20 bp, synthetic construct
  misc_feature 1..20: note = chemically synthesized
  source 1..20: mol_type = other DNA
tgtagcgcctgtatttgaaa

SEQ ID NO: 19448 - DNA, 20 bp, synthetic construct
  misc_feature 1..20: note = chemically synthesized
  source 1..20: mol_type = other DNA
gtagcgcctgtatttgaaag

SEQ ID NO: 19449 - DNA, 20 bp, synthetic construct
  misc_feature 1..20: note = chemically synthesized
  source 1..20: mol_type = other DNA
ctgtatttgaaaggggttcc

SEQ ID NO: 19450 - DNA, 20 bp, synthetic construct
  misc_feature 1..20: note = chemically synthesized
  source 1..20: mol_type = other DNA
aaaggggttcctggtgtact

SEQ ID NO: 19451 - DNA, 20 bp, synthetic construct
  misc_feature 1..20: note = chemically synthesized
  source 1..20: mol_type = other DNA
aaggggttcctggtgtactt

SEQ ID NO: 19452 - DNA, 20 bp, synthetic construct
  misc_feature 1..20: note = chemically synthesized
  source 1..20: mol_type = other DNA
ggggttcctggtgtacttgg

SEQ ID NO: 19453 - DNA, 20 bp, synthetic construct
  misc_feature 1..20: note = chemically synthesized
  source 1..20: mol_type = other DNA
tcctggtgtacttgggagaa

SEQ ID NO: 19454 - DNA, 20 bp, synthetic construct
  misc_feature 1..20: note = chemically synthesized
  source 1..20: mol_type = other DNA
tggtgtacttgggagaaaag

SEQ ID NO: 19455 - DNA, 20 bp, synthetic construct
  misc_feature 1..20: note = chemically synthesized
  source 1..20: mol_type = other DNA
ttgggagaaaagaagcttct

SEQ ID NO: 19456 - DNA, 20 bp, synthetic construct
  misc_feature 1..20: note = chemically synthesized
  source 1..20: mol_type = other DNA
agaaaagaagcttcttggtt

SEQ ID NO: 19457 - DNA, 20 bp, synthetic construct
  misc_feature 1..20: note = chemically synthesized
  source 1..20: mol_type = other DNA
aaagaagcttcttggtttgg

SEQ ID NO: 19458 - DNA, 20 bp, synthetic construct
  misc_feature 1..20: note = chemically synthesized
  source 1..20: mol_type = other DNA
cttggtttggtagtacctac

SEQ ID NO: 19459 - DNA, 20 bp, synthetic construct
  misc_feature 1..20: note = chemically synthesized
  source 1..20: mol_type = other DNA
tggtttggtagtacctacca

SEQ ID NO: 19460 - DNA, 20 bp, synthetic construct
  misc_feature 1..20: note = chemically synthesized
  source 1..20: mol_type = other DNA
agagactccctgtttcctgc

SEQ ID NO: 19461 - DNA, 20 bp, synthetic construct
  misc_feature 1..20: note = chemically synthesized
  source 1..20: mol_type = other DNA
tccctgtttcctgctggtat

SEQ ID NO: 19462 - DNA, 20 bp, synthetic construct
  misc_feature 1..20: note = chemically synthesized
  source 1..20: mol_type = other DNA
ccctgtttcctgctggtatc

SEQ ID NO: 19463 - DNA, 20 bp, synthetic construct
  misc_feature 1..20: note = chemically synthesized
  source 1..20: mol_type = other DNA
acttctgtccattttctctc

SEQ ID NO: 19464 - DNA, 20 bp, synthetic construct
  misc_feature 1..20: note = chemically synthesized
  source 1..20: mol_type = other DNA
ttctgtccattttctctcaa

SEQ ID NO: 19465 - DNA, 20 bp, synthetic construct
  misc_feature 1..20: note = chemically synthesized
  source 1..20: mol_type = other DNA
tccattttctctcaagagtt

SEQ ID NO: 19466 - DNA, 20 bp, synthetic construct
  misc_feature 1..20: note = chemically synthesized
  source 1..20: mol_type = other DNA
cattttctctcaagagttga

SEQ ID NO: 19467 - DNA, 20 bp, synthetic construct
  misc_feature 1..20: note = chemically synthesized
  source 1..20: mol_type = other DNA
tgtgtgccatcgctctttaa

SEQ ID NO: 19468 - DNA, 20 bp, synthetic construct
  misc_feature 1..20: note = chemically synthesized
  source 1..20: mol_type = other DNA
gtgccatcgctctttaaaag

SEQ ID NO: 19469 - DNA, 20 bp, synthetic construct
  misc_feature 1..20: note = chemically synthesized
  source 1..20: mol_type = other DNA
tgccatcgctctttaaaaga

SEQ ID NO: 19470 - DNA, 20 bp, synthetic construct
  misc_feature 1..20: note = chemically synthesized
  source 1..20: mol_type = other DNA
aaggaactctccttttgctg

SEQ ID NO: 19471 - DNA, 20 bp, synthetic construct
  misc_feature 1..20: note = chemically synthesized
  source 1..20: mol_type = other DNA
tctccttttgctgtggattg

SEQ ID NO: 19472 - DNA, 20 bp, synthetic construct
  misc_feature 1..20: note = chemically synthesized
  source 1..20: mol_type = other DNA
ctccttttgctgtggattgt

SEQ ID NO: 19473 - DNA, 20 bp, synthetic construct
  misc_feature 1..20: note = chemically synthesized
  source 1..20: mol_type = other DNA
tccttttgctgtggattgta

SEQ ID NO: 19474 - DNA, 20 bp, synthetic construct
  misc_feature 1..20: note = chemically synthesized
  source 1..20: mol_type = other DNA
cttttgctgtggattgtagg

SEQ ID NO: 19475 - DNA, 20 bp, synthetic construct
  misc_feature 1..20: note = chemically synthesized
  source 1..20: mol_type = other DNA
ttgctgtggattgtagggag

SEQ ID NO: 19476 - DNA, 20 bp, synthetic construct
  misc_feature 1..20: note = chemically synthesized
  source 1..20: mol_type = other DNA
tggattgtagggagcagatt

SEQ ID NO: 19477 - DNA, 20 bp, synthetic construct
  misc_feature 1..20: note = chemically synthesized
  source 1..20: mol_type = other DNA
agcagatttggtgcttactg

SEQ ID NO: 19478 - DNA, 20 bp, synthetic construct
  misc_feature 1..20: note = chemically synthesized
  source 1..20: mol_type = other DNA
tttggtgcttactgtggctt

SEQ ID NO: 19479 - DNA, 20 bp, synthetic construct
  misc_feature 1..20: note = chemically synthesized
  source 1..20: mol_type = other DNA
ttggtgcttactgtggcttc

SEQ ID NO: 19480 - DNA, 20 bp, synthetic construct
  misc_feature 1..20: note = chemically synthesized
  source 1..20: mol_type = other DNA
tcaggacccaccttgaatga

SEQ ID NO: 19481 - DNA, 20 bp, synthetic construct
  misc_feature 1..20: note = chemically synthesized
  source 1..20: mol_type = other DNA
caccttgaatgacagaatgt

SEQ ID NO: 19482 - DNA, 20 bp, synthetic construct
  misc_feature 1..20: note = chemically synthesized
  source 1..20: mol_type = other DNA
aatgacagaatgtcagtaac

SEQ ID NO: 19483 - DNA, 20 bp, synthetic construct
  misc_feature 1..20: note = chemically synthesized
  source 1..20: mol_type = other DNA
gacagaatgtcagtaacaag

SEQ ID NO: 19484 - DNA, 20 bp, synthetic construct
  misc_feature 1..20: note = chemically synthesized
  source 1..20: mol_type = other DNA
atgtcagtaacaagcagccc

SEQ ID NO: 19485 - DNA, 20 bp, synthetic construct
  misc_feature 1..20: note = chemically synthesized
  source 1..20: mol_type = other DNA
tgtcagtaacaagcagcccc

SEQ ID NO: 19486 - DNA, 20 bp, synthetic construct
  misc_feature 1..20: note = chemically synthesized
  source 1..20: mol_type = other DNA
acaagcagccccaggaaata

SEQ ID NO: 19487 - DNA, 20 bp, synthetic construct
  misc_feature 1..20: note = chemically synthesized
  source 1..20: mol_type = other DNA
gcagccccaggaaatacggc

SEQ ID NO: 19488 - DNA, 20 bp, synthetic construct
  misc_feature 1..20: note = chemically synthesized
  source 1..20: mol_type = other DNA
gccccaggaaatacggctgg

SEQ ID NO: 19489 - DNA, 20 bp, synthetic construct
  misc_feature 1..20: note = chemically synthesized
  source 1..20: mol_type = other DNA
cctcttgatctttgcccatc

SEQ ID NO: 19490 - DNA, 20 bp, synthetic construct
  misc_feature 1..20: note = chemically synthesized
  source 1..20: mol_type = other DNA
gcccatcgagcaacaccatg

SEQ ID NO: 19491 - DNA, 20 bp, synthetic construct
  misc_feature 1..20: note = chemically synthesized
  source 1..20: mol_type = other DNA
atcgagcaacaccatgtgga

SEQ ID NO: 19492 - DNA, 20 bp, synthetic construct
  misc_feature 1..20: note = chemically synthesized
  source 1..20: mol_type = other DNA
ccatgtggatggtgtccatc

SEQ ID NO: 19493 - DNA, 20 bp, synthetic construct
  misc_feature 1..20: note = chemically synthesized
  source 1..20: mol_type = other DNA
cagcttgacctgaacttgaa

SEQ ID NO: 19494 - DNA, 20 bp, synthetic construct
  misc_feature 1..20: note = chemically synthesized
  source 1..20: mol_type = other DNA
gaacttgaacagtaattgat

SEQ ID NO: 19495 - DNA, 20 bp, synthetic construct
  misc_feature 1..20: note = chemically synthesized
  source 1..20: mol_type = other DNA
gagtccttaaaatccacgcc

SEQ ID NO: 19496 - DNA, 20 bp, synthetic construct
  misc_feature 1..20: note = chemically synthesized
  source 1..20: mol_type = other DNA
taaaatccacgcccggcccc

SEQ ID NO: 19497 - DNA, 20 bp, synthetic construct
  misc_feature 1..20: note = chemically synthesized
  source 1..20: mol_type = other DNA
aaaatccacgcccggccccc

SEQ ID NO: 19498 - DNA, 20 bp, synthetic construct
  misc_feature 1..20: note = chemically synthesized
  source 1..20: mol_type = other DNA
cccggcccccaggaatgcct

SEQ ID NO: 19499 - DNA, 20 bp, synthetic construct
  misc_feature 1..20: note = chemically synthesized
  source 1..20: mol_type = other DNA
ccggcccccaggaatgcctt

SEQ ID NO: 19500 - DNA, 20 bp, synthetic construct
  misc_feature 1..20: note = chemically synthesized
  source 1..20: mol_type = other DNA
cggcccccaggaatgccttg

SEQ ID NO: 19501 - DNA, 20 bp, synthetic construct
  misc_feature 1..20: note = chemically synthesized
  source 1..20: mol_type = other DNA
cccatcccacgttctgattc

SEQ ID NO: 19502 - DNA, 20 bp, synthetic construct
  misc_feature 1..20: note = chemically synthesized
  source 1..20: mol_type = other DNA
tcccacgttctgattctgga

SEQ ID NO: 19503 - DNA, 20 bp, synthetic construct
  misc_feature 1..20: note = chemically synthesized
  source 1..20: mol_type = other DNA
ctgattctggatggactttt

SEQ ID NO: 19504 - DNA, 20 bp, synthetic construct
  misc_feature 1..20: note = chemically synthesized
  source 1..20: mol_type = other DNA
tttaagtgaactctgatgat

SEQ ID NO: 19505 - DNA, 20 bp, synthetic construct
  misc_feature 1..20: note = chemically synthesized
  source 1..20: mol_type = other DNA
aagtgaactctgatgatgag

SEQ ID NO: 19506 - DNA, 20 bp, synthetic construct
  misc_feature 1..20: note = chemically synthesized
  source 1..20: mol_type = other DNA
agtgaactctgatgatgagt

SEQ ID NO: 19507 - DNA, 20 bp, synthetic construct
  misc_feature 1..20: note = chemically synthesized
  source 1..20: mol_type = other DNA
tctttctcaacgttctctgc

SEQ ID NO: 19508 - DNA, 20 bp, synthetic construct
  misc_feature 1..20: note = chemically synthesized
  source 1..20: mol_type = other DNA
ctttctcaacgttctctgct

SEQ ID NO: 19509 - DNA, 20 bp, synthetic construct
  misc_feature 1..20: note = chemically synthesized
  source 1..20: mol_type = other DNA
gtcacctcccatgccctctc

SEQ ID NO: 19510 - DNA, 20 bp, synthetic construct
  misc_feature 1..20: note = chemically synthesized
  source 1..20: mol_type = other DNA
cccatgccctctctggtgtg

SEQ ID NO: 19511 - DNA, 20 bp, synthetic construct
  misc_feature 1..20: note = chemically synthesized
  source 1..20: mol_type = other DNA
ctctggtgtgtggtgattct

SEQ ID NO: 19512 - DNA, 20 bp, synthetic construct
  misc_feature 1..20: note = chemically synthesized
  source 1..20: mol_type = other DNA
tgtgtggtgattctcagatc

SEQ ID NO: 19513 - DNA, 20 bp, synthetic construct
  misc_feature 1..20: note = chemically synthesized
  source 1..20: mol_type = other DNA
tgtggtgattctcagatcta

SEQ ID NO: 19514 - DNA, 20 bp, synthetic construct
  misc_feature 1..20: note = chemically synthesized
  source 1..20: mol_type = other DNA
tccccccatgcctttgcgtg

SEQ ID NO: 19515 - DNA, 20 bp, synthetic construct
  misc_feature 1..20: note = chemically synthesized
  source 1..20: mol_type = other DNA
ccccccatgcctttgcgtgt

SEQ ID NO: 19516 - DNA, 20 bp, synthetic construct
  misc_feature 1..20: note = chemically synthesized
  source 1..20: mol_type = other DNA
cccatgcctttgcgtgtggg

SEQ ID NO: 19517 - DNA, 20 bp, synthetic construct
  misc_feature 1..20: note = chemically synthesized
  source 1..20: mol_type = other DNA
tcccatgtgccatttttacc

SEQ ID NO: 19518 - DNA, 20 bp, synthetic construct
  misc_feature 1..20: note = chemically synthesized
  source 1..20: mol_type = other DNA
tctttattcatatttaaatg

SEQ ID NO: 19519 - DNA, 20 bp, synthetic construct
  misc_feature 1..20: note = chemically synthesized
  source 1..20: mol_type = other DNA
ctttattcatatttaaatgc

SEQ ID NO: 19520 - DNA, 20 bp, synthetic construct
  misc_feature 1..20: note = chemically synthesized
  source 1..20: mol_type = other DNA
attcatatttaaatgcaggt

SEQ ID NO: 19521 - DNA, 20 bp, synthetic construct
  misc_feature 1..20: note = chemically synthesized
  source 1..20: mol_type = other DNA
atatttaaatgcaggtgagt

SEQ ID NO: 19522 - DNA, 20 bp, synthetic construct
  misc_feature 1..20: note = chemically synthesized
  source 1..20: mol_type = other DNA
tgagttggaatgtcatctta

SEQ ID NO: 19523 - DNA, 20 bp, synthetic construct
  misc_feature 1..20: note = chemically synthesized
  source 1..20: mol_type = other DNA
gagttggaatgtcatcttac

SEQ ID NO: 19524 - DNA, 20 bp, synthetic construct
  misc_feature 1..20: note = chemically synthesized
  source 1..20: mol_type = other DNA
atcctgaatctgctctatcg

SEQ ID NO: 19525 - DNA, 20 bp, synthetic construct
  misc_feature 1..20: note = chemically synthesized
  source 1..20: mol_type = other DNA
tttaaaactaaattaaatgt

SEQ ID NO: 19526 - DNA, 20 bp, synthetic construct
  misc_feature 1..20: note = chemically synthesized
  source 1..20: mol_type = other DNA
ctaaattaaatgttagtact

SEQ ID NO: 19527 - DNA, 20 bp, synthetic construct
  misc_feature 1..20: note = chemically synthesized
  source 1..20: mol_type = other DNA
aattaaatgttagtactaag

SEQ ID NO: 19528 - DNA, 20 bp, synthetic construct
  misc_feature 1..20: note = chemically synthesized
  source 1..20: mol_type = other DNA
taaatgttagtactaagtag

SEQ ID NO: 19529 - DNA, 20 bp, synthetic construct
  misc_feature 1..20: note = chemically synthesized
  source 1..20: mol_type = other DNA
aagtagtagccaaattctct

SEQ ID NO: 19530 - DNA, 20 bp, synthetic construct
  misc_feature 1..20: note = chemically synthesized
  source 1..20: mol_type = other DNA
tctctgagtctgcttcatga

SEQ ID NO: 19531 - DNA, 20 bp, synthetic construct
  misc_feature 1..20: note = chemically synthesized
  source 1..20: mol_type = other DNA
ctctgagtctgcttcatgac

SEQ ID NO: 19532 - DNA, 20 bp, synthetic construct
  misc_feature 1..20: note = chemically synthesized
  source 1..20: mol_type = other DNA
catgacaggctgtaacacac

SEQ ID NO: 19533 - DNA, 20 bp, synthetic construct
  misc_feature 1..20: note = chemically synthesized
  source 1..20: mol_type = other DNA
caggctgtaacacactggta

SEQ ID NO: 19534 - DNA, 20 bp, synthetic construct
  misc_feature 1..20: note = chemically synthesized
  source 1..20: mol_type = other DNA
tgtaacacactggtatggaa

SEQ ID NO: 19535 - DNA, 20 bp, synthetic construct
  misc_feature 1..20: note = chemically synthesized
  source 1..20: mol_type = other DNA
aacacactggtatggaacgg

SEQ ID NO: 19536 - DNA, 20 bp, synthetic construct
  misc_feature 1..20: note = chemically synthesized
  source 1..20: mol_type = other DNA
acacactggtatggaacggt

SEQ ID NO: 19537 - DNA, 20 bp, synthetic construct
  misc_feature 1..20: note = chemically synthesized
  source 1..20: mol_type = other DNA
tatgatgttttatgtattat

SEQ ID NO: 19538 - DNA, 20 bp, synthetic construct
  misc_feature 1..20: note = chemically synthesized
  source 1..20: mol_type = other DNA
tgatgttttatgtattatga

SEQ ID NO: 19539 - DNA, 20 bp, synthetic construct
  misc_feature 1..20: note = chemically synthesized
  source 1..20: mol_type = other DNA
ttttatgtattatgagagct

SEQ ID NO: 19540 - DNA, 20 bp, synthetic construct
  misc_feature 1..20: note = chemically synthesized
  source 1..20: mol_type = other DNA
tatgtattatgagagctcag

SEQ ID NO: 19541 - DNA, 20 bp, synthetic construct
  misc_feature 1..20: note = chemically synthesized
  source 1..20: mol_type = other DNA
gagagctcagcagatgttga

SEQ ID NO: 19542 - DNA, 20 bp, synthetic construct
  misc_feature 1..20: note = chemically synthesized
  source 1..20: mol_type = other DNA
gagctcagcagatgttgaca

SEQ ID NO: 19543 - DNA, 20 bp, synthetic construct
  misc_feature 1..20: note = chemically synthesized
  source 1..20: mol_type = other DNA
agctcagcagatgttgacag

SEQ ID NO: 19544 - DNA, 20 bp, synthetic construct
  misc_feature 1..20: note = chemically synthesized
  source 1..20: mol_type = other DNA
gctcagcagatgttgacaga

SEQ ID NO: 19545 - DNA, 20 bp, synthetic construct
  misc_feature 1..20: note = chemically synthesized
  source 1..20: mol_type = other DNA
cagatgttgacagagggaat

SEQ ID NO: 19546 - DNA, 20 bp, synthetic construct
  misc_feature 1..20: note = chemically synthesized
  source 1..20: mol_type = other DNA
gttgacagagggaatgagac

SEQ ID NO: 19547 - DNA, 20 bp, synthetic construct
  misc_feature 1..20: note = chemically synthesized
  source 1..20: mol_type = other DNA
ggaatgagacaagatgattt

SEQ ID NO: 19548 - DNA, 20 bp, synthetic construct
  misc_feature 1..20: note = chemically synthesized
  source 1..20: mol_type = other DNA
gaatgagacaagatgatttt

SEQ ID NO: 19549 - DNA, 20 bp, synthetic construct
  misc_feature 1..20: note = chemically synthesized
  source 1..20: mol_type = other DNA
agacaagatgattttaggtc

SEQ ID NO: 19550 - DNA, 20 bp, synthetic construct
  misc_feature 1..20: note = chemically synthesized
  source 1..20: mol_type = other DNA
gacaagatgattttaggtct

SEQ ID NO: 19551 - DNA, 20 bp, synthetic construct
  misc_feature 1..20: note = chemically synthesized
  source 1..20: mol_type = other DNA
gattttaggtctaggtttga

SEQ ID NO: 19552 - DNA, 20 bp, synthetic construct
  misc_feature 1..20: note = chemically synthesized
  source 1..20: mol_type = other DNA
aggtttgatagataaaaaac

SEQ ID NO: 19553 - DNA, 20 bp, synthetic construct
  misc_feature 1..20: note = chemically synthesized
  source 1..20: mol_type = other DNA
ggtttgatagataaaaaact

SEQ ID NO: 19554 - DNA, 20 bp, synthetic construct
  misc_feature 1..20: note = chemically synthesized
  source 1..20: mol_type = other DNA
aattttatattttctttgaa

SEQ ID NO: 19555 - DNA, 20 bp, synthetic construct
  misc_feature 1..20: note = chemically synthesized
  source 1..20: mol_type = other DNA
ttatattttctttgaaaaga

SEQ ID NO: 19556 - DNA, 20 bp, synthetic construct
  misc_feature 1..20: note = chemically synthesized
  source 1..20: mol_type = other DNA
ttgaaaagatagctaaatct

SEQ ID NO: 19557 - DNA, 20 bp, synthetic construct
  misc_feature 1..20: note = chemically synthesized
  source 1..20: mol_type = other DNA
attattttattttatttatt

SEQ ID NO: 19558 - DNA, 20 bp, synthetic construct
  misc_feature 1..20: note = chemically synthesized
  source 1..20: mol_type = other DNA
tttatttattaagctttttg

SEQ ID NO: 19559 - DNA, 20 bp, synthetic construct
  misc_feature 1..20: note = chemically synthesized
  source 1..20: mol_type = other DNA
tatttattaagctttttgta

SEQ ID NO: 19560 - DNA, 20 bp, synthetic construct
  misc_feature 1..20: note = chemically synthesized
  source 1..20: mol_type = other DNA
tattaagctttttgtagaga

SEQ ID NO: 19561 - DNA, 20 bp, synthetic construct
  misc_feature 1..20: note = chemically synthesized
  source 1..20: mol_type = other DNA
attaagctttttgtagagac

SEQ ID NO: 19562 - DNA, 20 bp, synthetic construct
  misc_feature 1..20: note = chemically synthesized
  source 1..20: mol_type = other DNA
ttaagctttttgtagagaca

SEQ ID NO: 19563 - DNA, 20 bp, synthetic construct
  misc_feature 1..20: note = chemically synthesized
  source 1..20: mol_type = other DNA
cagggttttgctatgttgcc

SEQ ID NO: 19564 - DNA, 20 bp, synthetic construct
  misc_feature 1..20: note = chemically synthesized
  source 1..20: mol_type = other DNA
agggttttgctatgttgccc

SEQ ID NO: 19565 - DNA, 20 bp, synthetic construct
  misc_feature 1..20: note = chemically synthesized
  source 1..20: mol_type = other DNA
ttttgctatgttgcccaggc

SEQ ID NO: 19566 - DNA, 20 bp, synthetic construct
  misc_feature 1..20: note = chemically synthesized
  source 1..20: mol_type = other DNA
ccaggctggtcttgaactcc

SEQ ID NO: 19567 - DNA, 20 bp, synthetic construct
  misc_feature 1..20: note = chemically synthesized
  source 1..20: mol_type = other DNA
ggtcttgaactcctagcttc

SEQ ID NO: 19568 - DNA, 20 bp, synthetic construct
  misc_feature 1..20: note = chemically synthesized
  source 1..20: mol_type = other DNA
ttcaagcaatcttccctctg

SEQ ID NO: 19569 - DNA, 20 bp, synthetic construct
  misc_feature 1..20: note = chemically synthesized
  source 1..20: mol_type = other DNA
ctgtggccttccaaatttct

SEQ ID NO: 19570 - DNA, 20 bp, synthetic construct
  misc_feature 1..20: note = chemically synthesized
  source 1..20: mol_type = other DNA
cttccaaatttctgagatta

SEQ ID NO: 19571 - DNA, 20 bp, synthetic construct
  misc_feature 1..20: note = chemically synthesized
  source 1..20: mol_type = other DNA
ttccaaatttctgagattat

SEQ ID NO: 19572 - DNA, 20 bp, synthetic construct
  misc_feature 1..20: note = chemically synthesized
  source 1..20: mol_type = other DNA
atttctgagattataggcat

SEQ ID NO: 19573 - DNA, 20 bp, synthetic construct
  misc_feature 1..20: note = chemically synthesized
  source 1..20: mol_type = other DNA
taggcataagcaaatgcctc

SEQ ID NO: 19574 - DNA, 20 bp, synthetic construct
  misc_feature 1..20: note = chemically synthesized
  source 1..20: mol_type = other DNA
agcaaatgcctctggccttc

SEQ ID NO: 19575 - DNA, 20 bp, synthetic construct
  misc_feature 1..20: note = chemically synthesized
  source 1..20: mol_type = other DNA
gccttcaagtaattaattta

SEQ ID NO: 19576 - DNA, 20 bp, synthetic construct
  misc_feature 1..20: note = chemically synthesized
  source 1..20: mol_type = other DNA
tttctctcctcccctaaaat

SEQ ID NO: 19577 - DNA, 20 bp, synthetic construct
  misc_feature 1..20: note = chemically synthesized
  source 1..20: mol_type = other DNA
ttctctcctcccctaaaatt

SEQ ID NO: 19578 - DNA, 20 bp, synthetic construct
  misc_feature 1..20: note = chemically synthesized
  source 1..20: mol_type = other DNA
cctcccctaaaattgggttt

SEQ ID NO: 19579 - DNA, 20 bp, synthetic construct
  misc_feature 1..20: note = chemically synthesized
  source 1..20: mol_type = other DNA
tcccctaaaattgggtttta

SEQ ID NO: 19580 - DNA, 20 bp, synthetic construct
  misc_feature 1..20: note = chemically synthesized
  source 1..20: mol_type = other DNA
ctaaaattgggttttagagt

SEQ ID NO: 19581 - DNA, 20 bp, synthetic construct
  misc_feature 1..20: note = chemically synthesized
  source 1..20: mol_type = other DNA
taaaattgggttttagagta

SEQ ID NO: 19582 - DNA, 20 bp, synthetic construct
  misc_feature 1..20: note = chemically synthesized
  source 1..20: mol_type = other DNA
gagtaaggttcttgttcctc

SEQ ID NO: 19583 - DNA, 20 bp, synthetic construct
  misc_feature 1..20: note = chemically synthesized
  source 1..20: mol_type = other DNA
ttcttgttcctctagtcgac

SEQ ID NO: 19584 - DNA, 20 bp, synthetic construct
  misc_feature 1..20: note = chemically synthesized
  source 1..20: mol_type = other DNA
cttgttcctctagtcgacaa

SEQ ID NO: 19585 - DNA, 20 bp, synthetic construct
  misc_feature 1..20: note = chemically synthesized
  source 1..20: mol_type = other DNA
tctagtcgacaagagtttct

SEQ ID NO: 19586 - DNA, 20 bp, synthetic construct
  misc_feature 1..20: note = chemically synthesized
  source 1..20: mol_type = other DNA
ctagtcgacaagagtttctg

SEQ ID NO: 19587 - DNA, 20 bp, synthetic construct
  misc_feature 1..20: note = chemically synthesized
  source 1..20: mol_type = other DNA
caagagtttctgaggaatca

SEQ ID NO: 19588 - DNA, 20 bp, synthetic construct
  misc_feature 1..20: note = chemically synthesized
  source 1..20: mol_type = other DNA
gagtttctgaggaatcatag

SEQ ID NO: 19589 - DNA, 20 bp, synthetic construct
  misc_feature 1..20: note = chemically synthesized
  source 1..20: mol_type = other DNA
ttctgaggaatcatagaaga

SEQ ID NO: 19590 - DNA, 20 bp, synthetic construct
  misc_feature 1..20: note = chemically synthesized
  source 1..20: mol_type = other DNA
aggaatcatagaagaaagca

SEQ ID NO: 19591 - DNA, 20 bp, synthetic construct
  misc_feature 1..20: note = chemically synthesized
  source 1..20: mol_type = other DNA
agaagaaagcacagctcttt

SEQ ID NO: 19592 - DNA, 20 bp, synthetic construct
  misc_feature 1..20: note = chemically synthesized
  source 1..20: mol_type = other DNA
aaagcacagctctttgagca

SEQ ID NO: 19593 - DNA, 20 bp, synthetic construct
  misc_feature 1..20: note = chemically synthesized
  source 1..20: mol_type = other DNA
cacagctctttgagcataga

SEQ ID NO: 19594 - DNA, 20 bp, synthetic construct
  misc_feature 1..20: note = chemically synthesized
  source 1..20: mol_type = other DNA
agcatagatagtttccttcg

SEQ ID NO: 19595 - DNA, 20 bp, synthetic construct
  misc_feature 1..20: note = chemically synthesized
  source 1..20: mol_type = other DNA
tagatagtttccttcgtgga

SEQ ID NO: 19596 - DNA, 20 bp, synthetic construct
  misc_feature 1..20: note = chemically synthesized
  source 1..20: mol_type = other DNA
gtttccttcgtggaaagcca

SEQ ID NO: 19597 - DNA, 20 bp, synthetic construct
  misc_feature 1..20: note = chemically synthesized
  source 1..20: mol_type = other DNA
agccaaagtgaatacttatt

SEQ ID NO: 19598 - DNA, 20 bp, synthetic construct
  misc_feature 1..20: note = chemically synthesized
  source 1..20: mol_type = other DNA
cttattgagcatcttctatg

SEQ ID NO: 19599 - DNA, 20 bp, synthetic construct
  misc_feature 1..20: note = chemically synthesized
  source 1..20: mol_type = other DNA
gagcatcttctatgtagaca

SEQ ID NO: 19600 - DNA, 20 bp, synthetic construct
  misc_feature 1..20: note = chemically synthesized
  source 1..20: mol_type = other DNA
tatgtagacatagacttgtg

SEQ ID NO: 19601 - DNA, 20 bp, synthetic construct
  misc_feature 1..20: note = chemically synthesized
  source 1..20: mol_type = other DNA
tcattaaccctgtcatttta

SEQ ID NO: 19602 - DNA, 20 bp, synthetic construct
  misc_feature 1..20: note = chemically synthesized
  source 1..20: mol_type = other DNA
aaccctgtcattttacagat

SEQ ID NO: 19603 - DNA, 20 bp, synthetic construct
  misc_feature 1..20: note = chemically synthesized
  source 1..20: mol_type = other DNA
ctgtcattttacagatgaga

SEQ ID NO: 19604 - DNA, 20 bp, synthetic construct
  misc_feature 1..20: note = chemically synthesized
  source 1..20: mol_type = other DNA
tgtcattttacagatgagaa

SEQ ID NO: 19605 - DNA, 20 bp, synthetic construct
  misc_feature 1..20: note = chemically synthesized
  source 1..20: mol_type = other DNA
ttttacagatgagaaaggtt

SEQ ID NO: 19606 - DNA, 20 bp, synthetic construct
  misc_feature 1..20: note = chemically synthesized
  source 1..20: mol_type = other DNA
tttacagatgagaaaggttg

SEQ ID NO: 19607 - DNA, 20 bp, synthetic construct
  misc_feature 1..20: note = chemically synthesized
  source 1..20: mol_type = other DNA
agatgagaaaggttgaggct

SEQ ID NO: 19608 - DNA, 20 bp, synthetic construct
  misc_feature 1..20: note = chemically synthesized
  source 1..20: mol_type = other DNA
atgagaaaggttgaggctaa

SEQ ID NO: 19609 - DNA, 20 bp, synthetic construct
  misc_feature 1..20: note = chemically synthesized
  source 1..20: mol_type = other DNA
tgagaaaggttgaggctaag

SEQ ID NO: 19610 - DNA, 20 bp, synthetic construct
  misc_feature 1..20: note = chemically synthesized
  source 1..20: mol_type = other DNA
gagaaaggttgaggctaaga

SEQ ID NO: 19611 - DNA, 20 bp, synthetic construct
  misc_feature 1..20: note = chemically synthesized
  source 1..20: mol_type = other DNA
agaaaggttgaggctaagag

SEQ ID NO: 19612 - DNA, 20 bp, synthetic construct
  misc_feature 1..20: note = chemically synthesized
  source 1..20: mol_type = other DNA
aaaggttgaggctaagaggg

SEQ ID NO: 19613 - DNA, 20 bp, synthetic construct
  misc_feature 1..20: note = chemically synthesized
  source 1..20: mol_type = other DNA
gttgaggctaagaggggagt

SEQ ID NO: 19614 - DNA, 20 bp, synthetic construct
  misc_feature 1..20: note = chemically synthesized
  source 1..20: mol_type = other DNA
gctaagaggggagtgagtgc

SEQ ID NO: 19615 - DNA, 20 bp, synthetic construct
  misc_feature 1..20: note = chemically synthesized
  source 1..20: mol_type = other DNA
taagaggggagtgagtgcca

SEQ ID NO: 19616 - DNA, 20 bp, synthetic construct
  misc_feature 1..20: note = chemically synthesized
  source 1..20: mol_type = other DNA
gagtgccagagtctacttgc

SEQ ID NO: 19617 - DNA, 20 bp, synthetic construct
  misc_feature 1..20: note = chemically synthesized
  source 1..20: mol_type = other DNA
agtgccagagtctacttgct

SEQ ID NO: 19618 - DNA, 20 bp, synthetic construct
  misc_feature 1..20: note = chemically synthesized
  source 1..20: mol_type = other DNA
gccagagtctacttgctagg

SEQ ID NO: 19619 - DNA, 20 bp, synthetic construct
  misc_feature 1..20: note = chemically synthesized
  source 1..20: mol_type = other DNA
agagtctacttgctaggcag

SEQ ID NO: 19620 - DNA, 20 bp, synthetic construct
  misc_feature 1..20: note = chemically synthesized
  source 1..20: mol_type = other DNA
gtctacttgctaggcagtgg

SEQ ID NO: 19621 - DNA, 20 bp, synthetic construct
  misc_feature 1..20: note = chemically synthesized
  source 1..20: mol_type = other DNA
ttgctaggcagtggtagact

SEQ ID NO: 19622 - DNA, 20 bp, synthetic construct
  misc_feature 1..20: note = chemically synthesized
  source 1..20: mol_type = other DNA
aggcagtggtagacttggcc

SEQ ID NO: 19623 - DNA, 20 bp, synthetic construct
  misc_feature 1..20: note = chemically synthesized
  source 1..20: mol_type = other DNA
gcagtggtagacttggccca

SEQ ID NO: 19624 - DNA, 20 bp, synthetic construct
  misc_feature 1..20: note = chemically synthesized
  source 1..20: mol_type = other DNA
ggtagacttggcccagagcc

SEQ ID NO: 19625 - DNA, 20 bp, synthetic construct
  misc_feature 1..20: note = chemically synthesized
  source 1..20: mol_type = other DNA
gtagacttggcccagagcct

SEQ ID NO: 19626 - DNA, 20 bp, synthetic construct
  misc_feature 1..20: note = chemically synthesized
  source 1..20: mol_type = other DNA
tagacttggcccagagcctg

SEQ ID NO: 19627 - DNA, 20 bp, synthetic construct
  misc_feature 1..20: note = chemically synthesized
  source 1..20: mol_type = other DNA
gggcttcccactttcattcc

SEQ ID NO: 19628 - DNA, 20 bp, synthetic construct
  misc_feature 1..20: note = chemically synthesized
  source 1..20: mol_type = other DNA
ctgactgtaccaatcgcaca

SEQ ID NO: 19629 - DNA, 20 bp, synthetic construct
  misc_feature 1..20: note = chemically synthesized
  source 1..20: mol_type = other DNA
aatcgcacatggcctctcca

SEQ ID NO: 19630 - DNA, 20 bp, synthetic construct
  misc_feature 1..20: note = chemically synthesized
  source 1..20: mol_type = other DNA
gcacatggcctctccatggc

SEQ ID NO: 19631 - DNA, 20 bp, synthetic construct
  misc_feature 1..20: note = chemically synthesized
  source 1..20: mol_type = other DNA
catggcctctccatggccag

SEQ ID NO: 19632 - DNA, 20 bp, synthetic construct
  misc_feature 1..20: note = chemically synthesized
  source 1..20: mol_type = other DNA
atggcctctccatggccagc

SEQ ID NO: 19633 - DNA, 20 bp, synthetic construct
  misc_feature 1..20: note = chemically synthesized
  source 1..20: mol_type = other DNA
ggcctctccatggccagcag

SEQ ID NO: 19634 - DNA, 20 bp, synthetic construct
  misc_feature 1..20: note = chemically synthesized
  source 1..20: mol_type = other DNA
tctccatggccagcaggagc

SEQ ID NO: 19635 - DNA, 20 bp, synthetic construct
  misc_feature 1..20: note = chemically synthesized
  source 1..20: mol_type = other DNA
tccatggccagcaggagcca

SEQ ID NO: 19636 - DNA, 20 bp, synthetic construct
  misc_feature 1..20: note = chemically synthesized
  source 1..20: mol_type = other DNA
ccatggccagcaggagccag

SEQ ID NO: 19637 - DNA, 20 bp, synthetic construct
  misc_feature 1..20: note = chemically synthesized
  source 1..20: mol_type = other DNA
tggccagcaggagccagagg

SEQ ID NO: 19638 - DNA, 20 bp, synthetic construct
  misc_feature 1..20: note = chemically synthesized
  source 1..20: mol_type = other DNA
ggtggcccgcatgtgctttg

SEQ ID NO: 19639 - DNA, 20 bp, synthetic construct
  misc_feature 1..20: note = chemically synthesized
  source 1..20: mol_type = other DNA
tggcccgcatgtgctttgca

SEQ ID NO: 19640 - DNA, 20 bp, synthetic construct
  misc_feature 1..20: note = chemically synthesized
  source 1..20: mol_type = other DNA
ggcccgcatgtgctttgcag

SEQ ID NO: 19641 - DNA, 20 bp, synthetic construct
  misc_feature 1..20: note = chemically synthesized
  source 1..20: mol_type = other DNA
acttgcacccacgcttttat

SEQ ID NO: 19642 - DNA, 20 bp, synthetic construct
  misc_feature 1..20: note = chemically synthesized
  source 1..20: mol_type = other DNA
acccacgcttttatcggtga

SEQ ID NO: 19643 - DNA, 20 bp, synthetic construct
  misc_feature 1..20: note = chemically synthesized
  source 1..20: mol_type = other DNA
acgcttttatcggtgatggc

SEQ ID NO: 19644 - DNA, 20 bp, synthetic construct
  misc_feature 1..20: note = chemically synthesized
  source 1..20: mol_type = other DNA
gctggaatgcttttcttaac

SEQ ID NO: 19645 - DNA, 20 bp, synthetic construct
  misc_feature 1..20: note = chemically synthesized
  source 1..20: mol_type = other DNA
tggaatgcttttcttaactg

SEQ ID NO: 19646 - DNA, 20 bp, synthetic construct
  misc_feature 1..20: note = chemically synthesized
  source 1..20: mol_type = other DNA
tcttaactggagctttgttg

SEQ ID NO: 19647 - DNA, 20 bp, synthetic construct
  misc_feature 1..20: note = chemically synthesized
  source 1..20: mol_type = other DNA
ttaactggagctttgttgaa

SEQ ID NO: 19648 - DNA, 20 bp, synthetic construct
  misc_feature 1..20: note = chemically synthesized
  source 1..20: mol_type = other DNA
tggagctttgttgaagagcc

SEQ ID NO: 19649 - DNA, 20 bp, synthetic construct
  misc_feature 1..20: note = chemically synthesized
  source 1..20: mol_type = other DNA
tgaagagcctggtgcttttg

SEQ ID NO: 19650 - DNA, 20 bp, synthetic construct
  misc_feature 1..20: note = chemically synthesized
  source 1..20: mol_type = other DNA
agagcctggtgcttttgtgg

SEQ ID NO: 19651 - DNA, 20 bp, synthetic construct
  misc_feature 1..20: note = chemically synthesized
  source 1..20: mol_type = other DNA
cttttgtggcagtgctaacc

SEQ ID NO: 19652 - DNA, 20 bp, synthetic construct
  misc_feature 1..20: note = chemically synthesized
  source 1..20: mol_type = other DNA
ttttgtggcagtgctaacct

SEQ ID NO: 19653 - DNA, 20 bp, synthetic construct
  misc_feature 1..20: note = chemically synthesized
  source 1..20: mol_type = other DNA
tttgtggcagtgctaacctg

SEQ ID NO: 19654 - DNA, 20 bp, synthetic construct
  misc_feature 1..20: note = chemically synthesized
  source 1..20: mol_type = other DNA
tgtggcagtgctaacctggg

SEQ ID NO: 19655 - DNA, 20 bp, synthetic construct
  misc_feature 1..20: note = chemically synthesized
  source 1..20: mol_type = other DNA
gtgctaacctggggagccca

SEQ ID NO: 19656 - DNA, 20 bp, synthetic construct
  misc_feature 1..20: note = chemically synthesized
  source 1..20: mol_type = other DNA
gggagcccatggtaaaaccc

SEQ ID NO: 19657 - DNA, 20 bp, synthetic construct
  misc_feature 1..20: note = chemically synthesized
  source 1..20: mol_type = other DNA
cccaatcacctgtgctgttg

SEQ ID NO: 19658 - DNA, 20 bp, synthetic construct
  misc_feature 1..20: note = chemically synthesized
  source 1..20: mol_type = other DNA
caatcacctgtgctgttgca

SEQ ID NO: 19659 - DNA, 20 bp, synthetic construct
  misc_feature 1..20: note = chemically synthesized
  source 1..20: mol_type = other DNA
acctgtgctgttgcagagaa

SEQ ID NO: 19660 - DNA, 20 bp, synthetic construct
  misc_feature 1..20: note = chemically synthesized
  source 1..20: mol_type = other DNA
ctgttttctctgcccttttt

SEQ ID NO: 19661 - DNA, 20 bp, synthetic construct
  misc_feature 1..20: note = chemically synthesized
  source 1..20: mol_type = other DNA
tgttttctctgccctttttc

SEQ ID NO: 19662 - DNA, 20 bp, synthetic construct
  misc_feature 1..20: note = chemically synthesized
  source 1..20: mol_type = other DNA
gttttctctgccctttttcg

SEQ ID NO: 19663 - DNA, 20 bp, synthetic construct
  misc_feature 1..20: note = chemically synthesized
  source 1..20: mol_type = other DNA
tctctgccctttttcggggc

SEQ ID NO: 19664 - DNA, 20 bp, synthetic construct
  misc_feature 1..20: note = chemically synthesized
  source 1..20: mol_type = other DNA
cttcctaccacctttcctgc

SEQ ID NO: 19665 - DNA, 20 bp, synthetic construct
  misc_feature 1..20: note = chemically synthesized
  source 1..20: mol_type = other DNA
ttcctaccacctttcctgct

SEQ ID NO: 19666 - DNA, 20 bp, synthetic construct
  misc_feature 1..20: note = chemically synthesized
  source 1..20: mol_type = other DNA
tcctaccacctttcctgcta

SEQ ID NO: 19667 - DNA, 20 bp, synthetic construct
  misc_feature 1..20: note = chemically synthesized
  source 1..20: mol_type = other DNA
ctttcctgctagggctccca

SEQ ID NO: 19668 - DNA, 20 bp, synthetic construct
  misc_feature 1..20: note = chemically synthesized
  source 1..20: mol_type = other DNA
ctgctagggctcccaaagtg

SEQ ID NO: 19669 - DNA, 20 bp, synthetic construct
  misc_feature 1..20: note = chemically synthesized
  source 1..20: mol_type = other DNA
ctcccaaagtgtggcccttc

SEQ ID NO: 19670 - DNA, 20 bp, synthetic construct
  misc_feature 1..20: note = chemically synthesized
  source 1..20: mol_type = other DNA
tcccaaagtgtggcccttct

SEQ ID NO: 19671 - DNA, 20 bp, synthetic construct
  misc_feature 1..20: note = chemically synthesized
  source 1..20: mol_type = other DNA
cccaaagtgtggcccttctg

SEQ ID NO: 19672 - DNA, 20 bp, synthetic construct
  misc_feature 1..20: note = chemically synthesized
  source 1..20: mol_type = other DNA
tggcccttctggggtttaca

SEQ ID NO: 19673 - DNA, 20 bp, synthetic construct
  misc_feature 1..20: note = chemically synthesized
  source 1..20: mol_type = other DNA
tggggtttacatggtgtgcc

SEQ ID NO: 19674 - DNA, 20 bp, synthetic construct
  misc_feature 1..20: note = chemically synthesized
  source 1..20: mol_type = other DNA
ggggtttacatggtgtgccc

SEQ ID NO: 19675 - DNA, 20 bp, synthetic construct
  misc_feature 1..20: note = chemically synthesized
  source 1..20: mol_type = other DNA
gggtttacatggtgtgccca

SEQ ID NO: 19676 - DNA, 20 bp, synthetic construct
  misc_feature 1..20: note = chemically synthesized
  source 1..20: mol_type = other DNA
tacatggtgtgcccagggaa

SEQ ID NO: 19677 - DNA, 20 bp, synthetic construct
  misc_feature 1..20: note = chemically synthesized
  source 1..20: mol_type = other DNA
ggtgtgcccagggaatagct

SEQ ID NO: 19678 - DNA, 20 bp, synthetic construct
  misc_feature 1..20: note = chemically synthesized
  source 1..20: mol_type = other DNA
aatagcttggcttttttatt

SEQ ID NO: 19679 - DNA, 20 bp, synthetic construct
  misc_feature 1..20: note = chemically synthesized
  source 1..20: mol_type = other DNA
ggcttttttattcagataac

SEQ ID NO: 19680 - DNA, 20 bp, synthetic construct
  misc_feature 1..20: note = chemically synthesized
  source 1..20: mol_type = other DNA
cttttttattcagataactg

SEQ ID NO: 19681 - DNA, 20 bp, synthetic construct
  misc_feature 1..20: note = chemically synthesized
  source 1..20: mol_type = other DNA
attcagataactggagataa

SEQ ID NO: 19682 - DNA, 20 bp, synthetic construct
  misc_feature 1..20: note = chemically synthesized
  source 1..20: mol_type = other DNA
tcagataactggagataatg

SEQ ID NO: 19683 - DNA, 20 bp, synthetic construct
  misc_feature 1..20: note = chemically synthesized
  source 1..20: mol_type = other DNA
gataactggagataatggag

SEQ ID NO: 19684 - DNA, 20 bp, synthetic construct
  misc_feature 1..20: note = chemically synthesized
  source 1..20: mol_type = other DNA
actggagataatggagtaga

SEQ ID NO: 19685 - DNA, 20 bp, synthetic construct
  misc_feature 1..20: note = chemically synthesized
  source 1..20: mol_type = other DNA
tggagataatggagtagatg

SEQ ID NO: 19686 - DNA, 20 bp, synthetic construct
  misc_feature 1..20: note = chemically synthesized
  source 1..20: mol_type = other DNA
gataatggagtagatggagt

SEQ ID NO: 19687 - DNA, 20 bp, synthetic construct
  misc_feature 1..20: note = chemically synthesized
  source 1..20: mol_type = other DNA
ataatggagtagatggagtt

SEQ ID NO: 19688 - DNA, 20 bp, synthetic construct
  misc_feature 1..20: note = chemically synthesized
  source 1..20: mol_type = other DNA
taatggagtagatggagttg

SEQ ID NO: 19689 - DNA, 20 bp, synthetic construct
  misc_feature 1..20: note = chemically synthesized
  source 1..20: mol_type = other DNA
tggagtagatggagttgggg

SEQ ID NO: 19690 - DNA, 20 bp, synthetic construct
  misc_feature 1..20: note = chemically synthesized
  source 1..20: mol_type = other DNA
tagatggagttggggtggtg

SEQ ID NO: 19691 - DNA, 20 bp, synthetic construct
  misc_feature 1..20: note = chemically synthesized
  source 1..20: mol_type = other DNA
agatggagttggggtggtga

SEQ ID NO: 19692 - DNA, 20 bp, synthetic construct
  misc_feature 1..20: note = chemically synthesized
  source 1..20: mol_type = other DNA
tgaaggaacgtgtaccctct

SEQ ID NO: 19693 - DNA, 20 bp, synthetic construct
  misc_feature 1..20: note = chemically synthesized
  source 1..20: mol_type = other DNA
gaaggaacgtgtaccctctc

SEQ ID NO: 19694 - DNA, 20 bp, synthetic construct
  misc_feature 1..20: note = chemically synthesized
  source 1..20: mol_type = other DNA
aaggaacgtgtaccctctca

SEQ ID NO: 19695 - DNA, 20 bp, synthetic construct
  misc_feature 1..20: note = chemically synthesized
  source 1..20: mol_type = other DNA
aggaacgtgtaccctctcag

SEQ ID NO: 19696 - DNA, 20 bp, synthetic construct
  misc_feature 1..20: note = chemically synthesized
  source 1..20: mol_type = other DNA
aacgtgtaccctctcagggg

SEQ ID NO: 19697 - DNA, 20 bp, synthetic construct
  misc_feature 1..20: note = chemically synthesized
  source 1..20: mol_type = other DNA
tgtaccctctcaggggcaga

SEQ ID NO: 19698 - DNA, 20 bp, synthetic construct
  misc_feature 1..20: note = chemically synthesized
  source 1..20: mol_type = other DNA
ctcaggggcagatggccctc

SEQ ID NO: 19699 - DNA, 20 bp, synthetic construct
  misc_feature 1..20: note = chemically synthesized
  source 1..20: mol_type = other DNA
ggcagatggccctccagaat

SEQ ID NO: 19700 - DNA, 20 bp, synthetic construct
  misc_feature 1..20: note = chemically synthesized
  source 1..20: mol_type = other DNA
gatggccctccagaattggc

SEQ ID NO: 19701 - DNA, 20 bp, synthetic construct
  misc_feature 1..20: note = chemically synthesized
  source 1..20: mol_type = other DNA
caacctcttcctcaccaccc

SEQ ID NO: 19702 - DNA, 20 bp, synthetic construct
  misc_feature 1..20: note = chemically synthesized
  source 1..20: mol_type = other DNA
ccaccctagttctattttta

SEQ ID NO: 19703 - DNA, 20 bp, synthetic construct
  misc_feature 1..20: note = chemically synthesized
  source 1..20: mol_type = other DNA
ttaaagacacctctcaatcg

SEQ ID NO: 19704 - DNA, 20 bp, synthetic construct
  misc_feature 1..20: note = chemically synthesized
  source 1..20: mol_type = other DNA
taaagacacctctcaatcgc

SEQ ID NO: 19705 - DNA, 20 bp, synthetic construct
  misc_feature 1..20: note = chemically synthesized
  source 1..20: mol_type = other DNA
aacccatttcctcttcattc

SEQ ID NO: 19706 - DNA, 20 bp, synthetic construct
  misc_feature 1..20: note = chemically synthesized
  source 1..20: mol_type = other DNA
cccatttcctcttcattcca

SEQ ID NO: 19707 - DNA, 20 bp, synthetic construct
  misc_feature 1..20: note = chemically synthesized
  source 1..20: mol_type = other DNA
tcttcattccagagacgaca

SEQ ID NO: 19708 - DNA, 20 bp, synthetic construct
  misc_feature 1..20: note = chemically synthesized
  source 1..20: mol_type = other DNA
acgacaaagtatctcatcac

SEQ ID NO: 19709 - DNA, 20 bp, synthetic construct
  misc_feature 1..20: note = chemically synthesized
  source 1..20: mol_type = other DNA
aagtatctcatcaccagctt

SEQ ID NO: 19710 - DNA, 20 bp, synthetic construct
  misc_feature 1..20: note = chemically synthesized
  source 1..20: mol_type = other DNA
agtatctcatcaccagcttt

SEQ ID NO: 19711 - DNA, 20 bp, synthetic construct
  misc_feature 1..20: note = chemically synthesized
  source 1..20: mol_type = other DNA
ctttcctgaacctgaactca

SEQ ID NO: 19712 - DNA, 20 bp, synthetic construct
  misc_feature 1..20: note = chemically synthesized
  source 1..20: mol_type = other DNA
attgtttctatgcctctctt

SEQ ID NO: 19713 - DNA, 20 bp, synthetic construct
  misc_feature 1..20: note = chemically synthesized
  source 1..20: mol_type = other DNA
tgcctctctttagaatctgc

SEQ ID NO: 19714 - DNA, 20 bp, synthetic construct
  misc_feature 1..20: note = chemically synthesized
  source 1..20: mol_type = other DNA
tttagaatctgctggttttc

SEQ ID NO: 19715 - DNA, 20 bp, synthetic construct
  misc_feature 1..20: note = chemically synthesized
  source 1..20: mol_type = other DNA
cagctcttttactcaaacat

SEQ ID NO: 19716 - DNA, 20 bp, synthetic construct
  misc_feature 1..20: note = chemically synthesized
  source 1..20: mol_type = other DNA
aaacattagtctgataacta

SEQ ID NO: 19717 - DNA, 20 bp, synthetic construct
  misc_feature 1..20: note = chemically synthesized
  source 1..20: mol_type = other DNA
acattagtctgataactaca

SEQ ID NO: 19718 - DNA, 20 bp, synthetic construct
  misc_feature 1..20: note = chemically synthesized
  source 1..20: mol_type = other DNA
ctgataactacagagtccaa

SEQ ID NO: 19719 - DNA, 20 bp, synthetic construct
  misc_feature 1..20: note = chemically synthesized
  source 1..20: mol_type = other DNA
taactacagagtccaatggc

SEQ ID NO: 19720 - DNA, 20 bp, synthetic construct
  misc_feature 1..20: note = chemically synthesized
  source 1..20: mol_type = other DNA
agtccaatggcaagatatct

SEQ ID NO: 19721 - DNA, 20 bp, synthetic construct
  misc_feature 1..20: note = chemically synthesized
  source 1..20: mol_type = other DNA
ttagtgttttccacattctt

SEQ ID NO: 19722 - DNA, 20 bp, synthetic construct
  misc_feature 1..20: note = chemically synthesized
  source 1..20: mol_type = other DNA
ctgcttgcttttttaaaaac

SEQ ID NO: 19723 - DNA, 20 bp, synthetic construct
  misc_feature 1..20: note = chemically synthesized
  source 1..20: mol_type = other DNA
cttcattgatgactcatgct

SEQ ID NO: 19724 - DNA, 20 bp, synthetic construct
  misc_feature 1..20: note = chemically synthesized
  source 1..20: mol_type = other DNA
ttgatgactcatgctcagct

SEQ ID NO: 19725 - DNA, 20 bp, synthetic construct
  misc_feature 1..20: note = chemically synthesized
  source 1..20: mol_type = other DNA
atgctcagcttggtgtccac

SEQ ID NO: 19726 - DNA, 20 bp, synthetic construct
  misc_feature 1..20: note = chemically synthesized
  source 1..20: mol_type = other DNA
tgctcagcttggtgtccact

SEQ ID NO: 19727 - DNA, 20 bp, synthetic construct
  misc_feature 1..20: note = chemically synthesized
  source 1..20: mol_type = other DNA
ttggtgtccactaggaatgc

SEQ ID NO: 19728 - DNA, 20 bp, synthetic construct
  misc_feature 1..20: note = chemically synthesized
  source 1..20: mol_type = other DNA
taggaatgctagatctttgt

SEQ ID NO: 19729 - DNA, 20 bp, synthetic construct
  misc_feature 1..20: note = chemically synthesized
  source 1..20: mol_type = other DNA
gatctttgtcagccatcttt

SEQ ID NO: 19730 - DNA, 20 bp, synthetic construct
  misc_feature 1..20: note = chemically synthesized
  source 1..20: mol_type = other DNA
atctttgtcagccatctttg

SEQ ID NO: 19731 - DNA, 20 bp, synthetic construct
  misc_feature 1..20: note = chemically synthesized
  source 1..20: mol_type = other DNA
tctttgtcagccatctttga

SEQ ID NO: 19732 - DNA, 20 bp, synthetic construct
  misc_feature 1..20: note = chemically synthesized
  source 1..20: mol_type = other DNA
ttgtcagccatctttgaggg

SEQ ID NO: 19733 - DNA, 20 bp, synthetic construct
  misc_feature 1..20: note = chemically synthesized
  source 1..20: mol_type = other DNA
ggcagttaaactttcactcc

SEQ ID NO: 19734 - DNA, 20 bp, synthetic construct
  misc_feature 1..20: note = chemically synthesized
  source 1..20: mol_type = other DNA
atgccacatttctcccatcc

SEQ ID NO: 19735 - DNA, 20 bp, synthetic construct
  misc_feature 1..20: note = chemically synthesized
  source 1..20: mol_type = other DNA
tgccacatttctcccatccc

SEQ ID NO: 19736 - DNA, 20 bp, synthetic construct
  misc_feature 1..20: note = chemically synthesized
  source 1..20: mol_type = other DNA
tctctgtccttgtccatatt

SEQ ID NO: 19737 - DNA, 20 bp, synthetic construct
  misc_feature 1..20: note = chemically synthesized
  source 1..20: mol_type = other DNA
gtccttgtccatattgagct

SEQ ID NO: 19738 - DNA, 20 bp, synthetic construct
  misc_feature 1..20: note = chemically synthesized
  source 1..20: mol_type = other DNA
tagctctccactcctgacac

SEQ ID NO: 19739 - DNA, 20 bp, synthetic construct
  misc_feature 1..20: note = chemically synthesized
  source 1..20: mol_type = other DNA
tgacttcctctccacttccc

SEQ ID NO: 19740 - DNA, 20 bp, synthetic construct
  misc_feature 1..20: note = chemically synthesized
  source 1..20: mol_type = other DNA
ctctccacttccccggatga

SEQ ID NO: 19741 - DNA, 20 bp, synthetic construct
  misc_feature 1..20: note = chemically synthesized
  source 1..20: mol_type = other DNA
ccacttccccggatgacggt

SEQ ID NO: 19742 - DNA, 20 bp, synthetic construct
  misc_feature 1..20: note = chemically synthesized
  source 1..20: mol_type = other DNA
gagttacgatcttgtctcct

SEQ ID NO: 19743 - DNA, 20 bp, synthetic construct
  misc_feature 1..20: note = chemically synthesized
  source 1..20: mol_type = other DNA
agttacgatcttgtctccta

SEQ ID NO: 19744 - DNA, 20 bp, synthetic construct
  misc_feature 1..20: note = chemically synthesized
  source 1..20: mol_type = other DNA
ctaaggtgccccctccctct

SEQ ID NO: 19745 - DNA, 20 bp, synthetic construct
  misc_feature 1..20: note = chemically synthesized
  source 1..20: mol_type = other DNA
ctccctcttggctcctctcc

SEQ ID NO: 19746 - DNA, 20 bp, synthetic construct
  misc_feature 1..20: note = chemically synthesized
  source 1..20: mol_type = other DNA
ctctcccagtgacgacttca

SEQ ID NO: 19747 - DNA, 20 bp, synthetic construct
  misc_feature 1..20: note = chemically synthesized
  source 1..20: mol_type = other DNA
ctcccagtgacgacttcatg

SEQ ID NO: 19748 - DNA, 20 bp, synthetic construct
  misc_feature 1..20: note = chemically synthesized
  source 1..20: mol_type = other DNA
tcccagtgacgacttcatgg

SEQ ID NO: 19749 - DNA, 20 bp, synthetic construct
  misc_feature 1..20: note = chemically synthesized
  source 1..20: mol_type = other DNA
gtgacgacttcatggaggct

SEQ ID NO: 19750 - DNA, 20 bp, synthetic construct
  misc_feature 1..20: note = chemically synthesized
  source 1..20: mol_type = other DNA
ttcatggaggctgagaaata

SEQ ID NO: 19751 - DNA, 20 bp, synthetic construct
  misc_feature 1..20: note = chemically synthesized
  source 1..20: mol_type = other DNA
tggaggctgagaaatatagt

SEQ ID NO: 19752 - DNA, 20 bp, synthetic construct
  misc_feature 1..20: note = chemically synthesized
  source 1..20: mol_type = other DNA
aggctgagaaatatagtgag

SEQ ID NO: 19753 - DNA, 20 bp, synthetic construct
  misc_feature 1..20: note = chemically synthesized
  source 1..20: mol_type = other DNA
ttcttgcctcacttactgct

SEQ ID NO: 19754 - DNA, 20 bp, synthetic construct
  misc_feature 1..20: note = chemically synthesized
  source 1..20: mol_type = other DNA
tgcctcacttactgctcggt

SEQ ID NO: 19755 - DNA, 20 bp, synthetic construct
  misc_feature 1..20: note = chemically synthesized
  source 1..20: mol_type = other DNA
tcacttactgctcggtaagt

SEQ ID NO: 19756 - DNA, 20 bp, synthetic construct
  misc_feature 1..20: note = chemically synthesized
  source 1..20: mol_type = other DNA
tactgctcggtaagttagct

SEQ ID NO: 19757 - DNA, 20 bp, synthetic construct
  misc_feature 1..20: note = chemically synthesized
  source 1..20: mol_type = other DNA
actgctcggtaagttagctc

SEQ ID NO: 19758 - DNA, 20 bp, synthetic construct
  misc_feature 1..20: note = chemically synthesized
  source 1..20: mol_type = other DNA
ctgctcggtaagttagctca

SEQ ID NO: 19759 - DNA, 20 bp, synthetic construct
  misc_feature 1..20: note = chemically synthesized
  source 1..20: mol_type = other DNA
tgctcggtaagttagctcag

SEQ ID NO: 19760 - DNA, 20 bp, synthetic construct
  misc_feature 1..20: note = chemically synthesized
  source 1..20: mol_type = other DNA
gctcggtaagttagctcagg

SEQ ID NO: 19761 - DNA, 20 bp, synthetic construct
  misc_feature 1..20: note = chemically synthesized
  source 1..20: mol_type = other DNA
tcggtaagttagctcagggg

SEQ ID NO: 19762 - DNA, 20 bp, synthetic construct
  misc_feature 1..20: note = chemically synthesized
  source 1..20: mol_type = other DNA
ggtaagttagctcaggggga

SEQ ID NO: 19763 - DNA, 20 bp, synthetic construct
  misc_feature 1..20: note = chemically synthesized
  source 1..20: mol_type = other DNA
cataactttgcactgacatc

SEQ ID NO: 19764 - DNA, 20 bp, synthetic construct
  misc_feature 1..20: note = chemically synthesized
  source 1..20: mol_type = other DNA
taactttgcactgacatctg

SEQ ID NO: 19765 - DNA, 20 bp, synthetic construct
  misc_feature 1..20: note = chemically synthesized
  source 1..20: mol_type = other DNA
gcactgacatctggagaaca

SEQ ID NO: 19766 - DNA, 20 bp, synthetic construct
  misc_feature 1..20: note = chemically synthesized
  source 1..20: mol_type = other DNA
cactgacatctggagaacaa

SEQ ID NO: 19767 - DNA, 20 bp, synthetic construct
  misc_feature 1..20: note = chemically synthesized
  source 1..20: mol_type = other DNA
catctggagaacaaaggttt

SEQ ID NO: 19768 - DNA, 20 bp, synthetic construct
  misc_feature 1..20: note = chemically synthesized
  source 1..20: mol_type = other DNA
ctggagaacaaaggttttgg

SEQ ID NO: 19769 - DNA, 20 bp, synthetic construct
  misc_feature 1..20: note = chemically synthesized
  source 1..20: mol_type = other DNA
ggagaacaaaggttttggaa

SEQ ID NO: 19770 - DNA, 20 bp, synthetic construct
  misc_feature 1..20: note = chemically synthesized
  source 1..20: mol_type = other DNA
gaacaaaggttttggaagag

SEQ ID NO: 19771 - DNA, 20 bp, synthetic construct
  misc_feature 1..20: note = chemically synthesized
  source 1..20: mol_type = other DNA
acaaaggttttggaagagcg

SEQ ID NO: 19772 - DNA, 20 bp, synthetic construct
  misc_feature 1..20: note = chemically synthesized
  source 1..20: mol_type = other DNA
ggttttggaagagcggagcc

SEQ ID NO: 19773 - DNA, 20 bp, synthetic construct
  misc_feature 1..20: note = chemically synthesized
  source 1..20: mol_type = other DNA
gcggagcccagattccctgt

SEQ ID NO: 19774 - DNA, 20 bp, synthetic construct
  misc_feature 1..20: note = chemically synthesized
  source 1..20: mol_type = other DNA
agcccagattccctgtgagc

SEQ ID NO: 19775 - DNA, 20 bp, synthetic construct
  misc_feature 1..20: note = chemically synthesized
  source 1..20: mol_type = other DNA
ccagattccctgtgagccag

SEQ ID NO: 19776 - DNA, 20 bp, synthetic construct
  misc_feature 1..20: note = chemically synthesized
  source 1..20: mol_type = other DNA
agattccctgtgagccagca

SEQ ID NO: 19777 - DNA, 20 bp, synthetic construct
  misc_feature 1..20: note = chemically synthesized
  source 1..20: mol_type = other DNA
ccctgtgagccagcagagcc

SEQ ID NO: 19778 - DNA, 20 bp, synthetic construct
  misc_feature 1..20: note = chemically synthesized
  source 1..20: mol_type = other DNA
agcagagccaagtctttttt

SEQ ID NO: 19779 - DNA, 20 bp, synthetic construct
  misc_feature 1..20: note = chemically synthesized
  source 1..20: mol_type = other DNA
ccaagtcttttttgagtttc

SEQ ID NO: 19780 - DNA, 20 bp, synthetic construct
  misc_feature 1..20: note = chemically synthesized
  source 1..20: mol_type = other DNA
caaaacctgtgttttaataa

SEQ ID NO: 19781 - DNA, 20 bp, synthetic construct
  misc_feature 1..20: note = chemically synthesized
  source 1..20: mol_type = other DNA
aaaacctgtgttttaataat

SEQ ID NO: 19782 - DNA, 20 bp, synthetic construct
  misc_feature 1..20: note = chemically synthesized
  source 1..20: mol_type = other DNA
aacctgtgttttaataatag

SEQ ID NO: 19783 - DNA, 20 bp, synthetic construct
  misc_feature 1..20: note = chemically synthesized
  source 1..20: mol_type = other DNA
ctgtgttttaataataggag

SEQ ID NO: 19784 - DNA, 20 bp, synthetic construct
  misc_feature 1..20: note = chemically synthesized
  source 1..20: mol_type = other DNA
tgtgttttaataataggagt

SEQ ID NO: 19785 - DNA, 20 bp, synthetic construct
  misc_feature 1..20: note = chemically synthesized
  source 1..20: mol_type = other DNA
gagtgggtcattgtgtttaa

SEQ ID NO: 19786 - DNA, 20 bp, synthetic construct
  misc_feature 1..20: note = chemically synthesized
  source 1..20: mol_type = other DNA
ttaatagtacaacaaaacct

SEQ ID NO: 19787 - DNA, 20 bp, synthetic construct
  misc_feature 1..20: note = chemically synthesized
  source 1..20: mol_type = other DNA
aaaacctaagtgcacataat

SEQ ID NO: 19788 - DNA, 20 bp, synthetic construct
  misc_feature 1..20: note = chemically synthesized
  source 1..20: mol_type = other DNA
agcacatcttttctgtgtgc

SEQ ID NO: 19789 - DNA, 20 bp, synthetic construct
  misc_feature 1..20: note = chemically synthesized
  source 1..20: mol_type = other DNA
gcacatcttttctgtgtgct

SEQ ID NO: 19790 - DNA, 20 bp, synthetic construct
  misc_feature 1..20: note = chemically synthesized
  source 1..20: mol_type = other DNA
cacatcttttctgtgtgctg

SEQ ID NO: 19791 - DNA, 20 bp, synthetic construct
  misc_feature 1..20: note = chemically synthesized
  source 1..20: mol_type = other DNA
tcttttctgtgtgctggggt

SEQ ID NO: 19792 - DNA, 20 bp, synthetic construct
  misc_feature 1..20: note = chemically synthesized
  source 1..20: mol_type = other DNA
cttttctgtgtgctggggtg

SEQ ID NO: 19793 - DNA, 20 bp, synthetic construct
  misc_feature 1..20: note = chemically synthesized
  source 1..20: mol_type = other DNA
tttctgtgtgctggggtgag

SEQ ID NO: 19794 - DNA, 20 bp, synthetic construct
  misc_feature 1..20: note = chemically synthesized
  source 1..20: mol_type = other DNA
tctgtgtgctggggtgagga

SEQ ID NO: 19795 - DNA, 20 bp, synthetic construct
  misc_feature 1..20: note = chemically synthesized
  source 1..20: mol_type = other DNA
ctgtgtgctggggtgaggag

SEQ ID NO: 19796 - DNA, 20 bp, synthetic construct
  misc_feature 1..20: note = chemically synthesized
  source 1..20: mol_type = other DNA
gctggggtgaggagaggtga

SEQ ID NO: 19797 - DNA, 20 bp, synthetic construct
  misc_feature 1..20: note = chemically synthesized
  source 1..20: mol_type = other DNA
gggtgaggagaggtgacagt

SEQ ID NO: 19798 - DNA, 20 bp, synthetic construct
  misc_feature 1..20: note = chemically synthesized
  source 1..20: mol_type = other DNA
gagaggtgacagtgagtgtg

SEQ ID NO: 19799 - DNA, 20 bp, synthetic construct
  misc_feature 1..20: note = chemically synthesized
  source 1..20: mol_type = other DNA
agaggtgacagtgagtgtgt

SEQ ID NO: 19800 - DNA, 20 bp, synthetic construct
  misc_feature 1..20: note = chemically synthesized
  source 1..20: mol_type = other DNA
agtgtgtaggatgatatgaa

SEQ ID NO: 19801 - DNA, 20 bp, synthetic construct
  misc_feature 1..20: note = chemically synthesized
  source 1..20: mol_type = other DNA
ggatgatatgaaaagcatta

SEQ ID NO: 19802 - DNA, 20 bp, synthetic construct
  misc_feature 1..20: note = chemically synthesized
  source 1..20: mol_type = other DNA
tatgaaaagcattacagaca

SEQ ID NO: 19803 - DNA, 20 bp, synthetic construct
  misc_feature 1..20: note = chemically synthesized
  source 1..20: mol_type = other DNA
atgaaaagcattacagacat

SEQ ID NO: 19804 - DNA, 20 bp, synthetic construct
  misc_feature 1..20: note = chemically synthesized
  source 1..20: mol_type = other DNA
aaagcattacagacatggga

SEQ ID NO: 19805 - DNA, 20 bp, synthetic construct
  misc_feature 1..20: note = chemically synthesized
  source 1..20: mol_type = other DNA
acagacatgggaaagcatct

SEQ ID NO: 19806 - DNA, 20 bp, synthetic construct
  misc_feature 1..20: note = chemically synthesized
  source 1..20: mol_type = other DNA
agacatgggaaagcatctta

SEQ ID NO: 19807 - DNA, 20 bp, synthetic construct
  misc_feature 1..20: note = chemically synthesized
  source 1..20: mol_type = other DNA
aaagcatcttagagcaccca

SEQ ID NO: 19808 - DNA, 20 bp, synthetic construct
  misc_feature 1..20: note = chemically synthesized
  source 1..20: mol_type = other DNA
catcttagagcacccaaagc

SEQ ID NO: 19809 - DNA, 20 bp, synthetic construct
  misc_feature 1..20: note = chemically synthesized
  source 1..20: mol_type = other DNA
agagcacccaaagctggcat

SEQ ID NO: 19810 - DNA, 20 bp, synthetic construct
  misc_feature 1..20: note = chemically synthesized
  source 1..20: mol_type = other DNA
aaagctggcatgagtcatca

SEQ ID NO: 19811 - DNA, 20 bp, synthetic construct
  misc_feature 1..20: note = chemically synthesized
  source 1..20: mol_type = other DNA
aagctggcatgagtcatcac

SEQ ID NO: 19812 - DNA, 20 bp, synthetic construct
  misc_feature 1..20: note = chemically synthesized
  source 1..20: mol_type = other DNA
catgagtcatcacaggctta

SEQ ID NO: 19813 - DNA, 20 bp, synthetic construct
  misc_feature 1..20: note = chemically synthesized
  source 1..20: mol_type = other DNA
catcacaggcttatggccac

SEQ ID NO: 19814 - DNA, 20 bp, synthetic construct
  misc_feature 1..20: note = chemically synthesized
  source 1..20: mol_type = other DNA
atcacaggcttatggccaca

SEQ ID NO: 19815 - DNA, 20 bp, synthetic construct
  misc_feature 1..20: note = chemically synthesized
  source 1..20: mol_type = other DNA
caggcttatggccacaaggc

SEQ ID NO: 19816 - DNA, 20 bp, synthetic construct
  misc_feature 1..20: note = chemically synthesized
  source 1..20: mol_type = other DNA
tgcttccctttttcataacc

SEQ ID NO: 19817 - DNA, 20 bp, synthetic construct
  misc_feature 1..20: note = chemically synthesized
  source 1..20: mol_type = other DNA
tttcataacccagttcaatg

SEQ ID NO: 19818 - DNA, 20 bp, synthetic construct
  misc_feature 1..20: note = chemically synthesized
  source 1..20: mol_type = other DNA
gttcaatgaagacataattg

SEQ ID NO: 19819 - DNA, 20 bp, synthetic construct
  misc_feature 1..20: note = chemically synthesized
  source 1..20: mol_type = other DNA
caatgaagacataattgaag

SEQ ID NO: 19820 - DNA, 20 bp, synthetic construct
  misc_feature 1..20: note = chemically synthesized
  source 1..20: mol_type = other DNA
gaagacataattgaagtggt

SEQ ID NO: 19821 - DNA, 20 bp, synthetic construct
  misc_feature 1..20: note = chemically synthesized
  source 1..20: mol_type = other DNA
gacataattgaagtggtgag

SEQ ID NO: 19822 - DNA, 20 bp, synthetic construct
  misc_feature 1..20: note = chemically synthesized
  source 1..20: mol_type = other DNA
cataattgaagtggtgagaa

SEQ ID NO: 19823 - DNA, 20 bp, synthetic construct
  misc_feature 1..20: note = chemically synthesized
  source 1..20: mol_type = other DNA
ataattgaagtggtgagaag

SEQ ID NO: 19824 - DNA, 20 bp, synthetic construct
  misc_feature 1..20: note = chemically synthesized
  source 1..20: mol_type = other DNA
taattgaagtggtgagaaga

SEQ ID NO: 19825 - DNA, 20 bp, synthetic construct
  misc_feature 1..20: note = chemically synthesized
  source 1..20: mol_type = other DNA
aattgaagtggtgagaagag

SEQ ID NO: 19826 - DNA, 20 bp, synthetic construct
  misc_feature 1..20: note = chemically synthesized
  source 1..20: mol_type = other DNA
gaagaggggccaccgccctt

SEQ ID NO: 19827 - DNA, 20 bp, synthetic construct
  misc_feature 1..20: note = chemically synthesized
  source 1..20: mol_type = other DNA
ggccaccgcccttcagactc

SEQ ID NO: 19828 - DNA, 20 bp, synthetic construct
  misc_feature 1..20: note = chemically synthesized
  source 1..20: mol_type = other DNA
gccaccgcccttcagactcc

SEQ ID NO: 19829 - DNA, 20 bp, synthetic construct
  misc_feature 1..20: note = chemically synthesized
  source 1..20: mol_type = other DNA
ccaccgcccttcagactcca

SEQ ID NO: 19830 - DNA, 20 bp, synthetic construct
  misc_feature 1..20: note = chemically synthesized
  source 1..20: mol_type = other DNA
actccagggtatttgtattc

SEQ ID NO: 19831 - DNA, 20 bp, synthetic construct
  misc_feature 1..20: note = chemically synthesized
  source 1..20: mol_type = other DNA
ctccagggtatttgtattcc

SEQ ID NO: 19832 - DNA, 20 bp, synthetic construct
  misc_feature 1..20: note = chemically synthesized
  source 1..20: mol_type = other DNA
tgtattccaggacccctccg

SEQ ID NO: 19833 - DNA, 20 bp, synthetic construct
  misc_feature 1..20: note = chemically synthesized
  source 1..20: mol_type = other DNA
gtattccaggacccctccgt

SEQ ID NO: 19834 - DNA, 20 bp, synthetic construct
  misc_feature 1..20: note = chemically synthesized
  source 1..20: mol_type = other DNA
caggacccctccgtgggtgt

SEQ ID NO: 19835 - DNA, 20 bp, synthetic construct
  misc_feature 1..20: note = chemically synthesized
  source 1..20: mol_type = other DNA
cccctccgtgggtgttggcc

SEQ ID NO: 19836 - DNA, 20 bp, synthetic construct
  misc_feature 1..20: note = chemically synthesized
  source 1..20: mol_type = other DNA
ctccgtgggtgttggcccag

SEQ ID NO: 19837 - DNA, 20 bp, synthetic construct
  misc_feature 1..20: note = chemically synthesized
  source 1..20: mol_type = other DNA
ggtgttggcccagcggtgcc

SEQ ID NO: 19838 - DNA, 20 bp, synthetic construct
  misc_feature 1..20: note = chemically synthesized
  source 1..20: mol_type = other DNA
tgttggcccagcggtgccca

SEQ ID NO: 19839 - DNA, 20 bp, synthetic construct
  misc_feature 1..20: note = chemically synthesized
  source 1..20: mol_type = other DNA
cccagagaatattcccttat

SEQ ID NO: 19840 - DNA, 20 bp, synthetic construct
  misc_feature 1..20: note = chemically synthesized
  source 1..20: mol_type = other DNA
tgacttgttcacttcctgtt

SEQ ID NO: 19841 - DNA, 20 bp, synthetic construct
  misc_feature 1..20: note = chemically synthesized
  source 1..20: mol_type = other DNA
tgttcacttcctgttcagcg

SEQ ID NO: 19842 - DNA, 20 bp, synthetic construct
  misc_feature 1..20: note = chemically synthesized
  source 1..20: mol_type = other DNA
acttcctgttcagcgcagcc

SEQ ID NO: 19843 - DNA, 20 bp, synthetic construct
  misc_feature 1..20: note = chemically synthesized
  source 1..20: mol_type = other DNA
tcctgttcagcgcagcctgg

SEQ ID NO: 19844 - DNA, 20 bp, synthetic construct
  misc_feature 1..20: note = chemically synthesized
  source 1..20: mol_type = other DNA
agcgcagcctggtggtgact

SEQ ID NO: 19845 - DNA, 20 bp, synthetic construct
  misc_feature 1..20: note = chemically synthesized
  source 1..20: mol_type = other DNA
tggtgactcggtaatcccca

SEQ ID NO: 19846 - DNA, 20 bp, synthetic construct
  misc_feature 1..20: note = chemically synthesized
  source 1..20: mol_type = other DNA
gactcggtaatccccacagt

SEQ ID NO: 19847 - DNA, 20 bp, synthetic construct
  misc_feature 1..20: note = chemically synthesized
  source 1..20: mol_type = other DNA
atccccacagtaagacctca

SEQ ID NO: 19848 - DNA, 20 bp, synthetic construct
  misc_feature 1..20: note = chemically synthesized
  source 1..20: mol_type = other DNA
cccacagtaagacctcacag

SEQ ID NO: 19849 - DNA, 20 bp, synthetic construct
  misc_feature 1..20: note = chemically synthesized
  source 1..20: mol_type = other DNA
ccacagtaagacctcacagt

SEQ ID NO: 19850 - DNA, 20 bp, synthetic construct
  misc_feature 1..20: note = chemically synthesized
  source 1..20: mol_type = other DNA
gtaagacctcacagtgggtt

SEQ ID NO: 19851 - DNA, 20 bp, synthetic construct
  misc_feature 1..20: note = chemically synthesized
  source 1..20: mol_type = other DNA
agacctcacagtgggttgag

SEQ ID NO: 19852 - DNA, 20 bp, synthetic construct
  misc_feature 1..20: note = chemically synthesized
  source 1..20: mol_type = other DNA
tcacagtgggttgagtggcc

SEQ ID NO: 19853 - DNA, 20 bp, synthetic construct
  misc_feature 1..20: note = chemically synthesized
  source 1..20: mol_type = other DNA
cacagtgggttgagtggcct

SEQ ID NO: 19854 - DNA, 20 bp, synthetic construct
  misc_feature 1..20: note = chemically synthesized
  source 1..20: mol_type = other DNA
cagtgggttgagtggcctgg

SEQ ID NO: 19855 - DNA, 20 bp, synthetic construct
  misc_feature 1..20: note = chemically synthesized
  source 1..20: mol_type = other DNA
gttgagtggcctgggagctc

SEQ ID NO: 19856 - DNA, 20 bp, synthetic construct
  misc_feature 1..20: note = chemically synthesized
  source 1..20: mol_type = other DNA
agtggcctgggagctcaagt

SEQ ID NO: 19857 - DNA, 20 bp, synthetic construct
  misc_feature 1..20: note = chemically synthesized
  source 1..20: mol_type = other DNA
gtggcctgggagctcaagtc

SEQ ID NO: 19858 - DNA, 20 bp, synthetic construct
  misc_feature 1..20: note = chemically synthesized
  source 1..20: mol_type = other DNA
tggcctgggagctcaagtca

SEQ ID NO: 19859 - DNA, 20 bp, synthetic construct
  misc_feature 1..20: note = chemically synthesized
  source 1..20: mol_type = other DNA
ggcctgggagctcaagtcag

SEQ ID NO: 19860 - DNA, 20 bp, synthetic construct
  misc_feature 1..20: note = chemically synthesized
  source 1..20: mol_type = other DNA
ctgggagctcaagtcagggg

SEQ ID NO: 19861 - DNA, 20 bp, synthetic construct
  misc_feature 1..20: note = chemically synthesized
  source 1..20: mol_type = other DNA
gctcaagtcaggggcagaaa

SEQ ID NO: 19862 - DNA, 20 bp, synthetic construct
  misc_feature 1..20: note = chemically synthesized
  source 1..20: mol_type = other DNA
ctcaagtcaggggcagaaat

SEQ ID NO: 19863 - DNA, 20 bp, synthetic construct
  misc_feature 1..20: note = chemically synthesized
  source 1..20: mol_type = other DNA
tcaagtcaggggcagaaatg

SEQ ID NO: 19864 - DNA, 20 bp, synthetic construct
  misc_feature 1..20: note = chemically synthesized
  source 1..20: mol_type = other DNA
agtcaggggcagaaatgggg

SEQ ID NO: 19865 - DNA, 20 bp, synthetic construct
  misc_feature 1..20: note = chemically synthesized
  source 1..20: mol_type = other DNA
aggggcagaaatggggaagc

SEQ ID NO: 19866 - DNA, 20 bp, synthetic construct
  misc_feature 1..20: note = chemically synthesized
  source 1..20: mol_type = other DNA
gcagaaatggggaagctgga

SEQ ID NO: 19867 - DNA, 20 bp, synthetic construct
  misc_feature 1..20: note = chemically synthesized
  source 1..20: mol_type = other DNA
aaatggggaagctggaaagt

SEQ ID NO: 19868 - DNA, 20 bp, synthetic construct
  misc_feature 1..20: note = chemically synthesized
  source 1..20: mol_type = other DNA
aatggggaagctggaaagtt

SEQ ID NO: 19869 - DNA, 20 bp, synthetic construct
  misc_feature 1..20: note = chemically synthesized
  source 1..20: mol_type = other DNA
agctggaaagttgggtgatc

SEQ ID NO: 19870 - DNA, 20 bp, synthetic construct
  misc_feature 1..20: note = chemically synthesized
  source 1..20: mol_type = other DNA
ctggaaagttgggtgatcaa

SEQ ID NO: 19871 - DNA, 20 bp, synthetic construct
  misc_feature 1..20: note = chemically synthesized
  source 1..20: mol_type = other DNA
ttgggtgatcaagagtcatt

SEQ ID NO: 19872 - DNA, 20 bp, synthetic construct
  misc_feature 1..20: note = chemically synthesized
  source 1..20: mol_type = other DNA
ggtgatcaagagtcatttgg

SEQ ID NO: 19873 - DNA, 20 bp, synthetic construct
  misc_feature 1..20: note = chemically synthesized
  source 1..20: mol_type = other DNA
ggaagcccccatgtctgtgt

SEQ ID NO: 19874 - DNA, 20 bp, synthetic construct
  misc_feature 1..20: note = chemically synthesized
  source 1..20: mol_type = other DNA
accactttctccctgcctga

SEQ ID NO: 19875 - DNA, 20 bp, synthetic construct
  misc_feature 1..20: note = chemically synthesized
  source 1..20: mol_type = other DNA
ttctccctgcctgaaagcac

SEQ ID NO: 19876 - DNA, 20 bp, synthetic construct
  misc_feature 1..20: note = chemically synthesized
  source 1..20: mol_type = other DNA
tctccctgcctgaaagcact

SEQ ID NO: 19877 - DNA, 20 bp, synthetic construct
  misc_feature 1..20: note = chemically synthesized
  source 1..20: mol_type = other DNA
gaaagcactgggctgtgttt

SEQ ID NO: 19878 - DNA, 20 bp, synthetic construct
  misc_feature 1..20: note = chemically synthesized
  source 1..20: mol_type = other DNA
aagcactgggctgtgtttca

SEQ ID NO: 19879 - DNA, 20 bp, synthetic construct
  misc_feature 1..20: note = chemically synthesized
  source 1..20: mol_type = other DNA
gcactgggctgtgtttcaga

SEQ ID NO: 19880 - DNA, 20 bp, synthetic construct
  misc_feature 1..20: note = chemically synthesized
  source 1..20: mol_type = other DNA
cactgggctgtgtttcagag

SEQ ID NO: 19881 - DNA, 20 bp, synthetic construct
  misc_feature 1..20: note = chemically synthesized
  source 1..20: mol_type = other DNA
tgggctgtgtttcagagagg

SEQ ID NO: 19882 - DNA, 20 bp, synthetic construct
  misc_feature 1..20: note = chemically synthesized
  source 1..20: mol_type = other DNA
ctgtgtttcagagaggtagc

SEQ ID NO: 19883 - DNA, 20 bp, synthetic construct
  misc_feature 1..20: note = chemically synthesized
  source 1..20: mol_type = other DNA
tgtgtttcagagaggtagct

SEQ ID NO: 19884 - DNA, 20 bp, synthetic construct
  misc_feature 1..20: note = chemically synthesized
  source 1..20: mol_type = other DNA
agagaggtagctgggtccca

SEQ ID NO: 19885 - DNA, 20 bp, synthetic construct
  misc_feature 1..20: note = chemically synthesized
  source 1..20: mol_type = other DNA
ctgggtcccacagatattta

SEQ ID NO: 19886 - DNA, 20 bp, synthetic construct
  misc_feature 1..20: note = chemically synthesized
  source 1..20: mol_type = other DNA
gggtcccacagatatttatg

SEQ ID NO: 19887 - DNA, 20 bp, synthetic construct
  misc_feature 1..20: note = chemically synthesized
  source 1..20: mol_type = other DNA
ggtcccacagatatttatgg

SEQ ID NO: 19888 - DNA, 20 bp, synthetic construct
  misc_feature 1..20: note = chemically synthesized
  source 1..20: mol_type = other DNA
gtcccacagatatttatgga

SEQ ID NO: 19889 - DNA, 20 bp, synthetic construct
  misc_feature 1..20: note = chemically synthesized
  source 1..20: mol_type = other DNA
cttgtttctgtatctccttc

SEQ ID NO: 19890 - DNA, 20 bp, synthetic construct
  misc_feature 1..20: note = chemically synthesized
  source 1..20: mol_type = other DNA
gtttctgtatctccttctag

SEQ ID NO: 19891 - DNA, 20 bp, synthetic construct
  misc_feature 1..20: note = chemically synthesized
  source 1..20: mol_type = other DNA
tttctgtatctccttctagt

SEQ ID NO: 19892 - DNA, 20 bp, synthetic construct
  misc_feature 1..20: note = chemically synthesized
  source 1..20: mol_type = other DNA
tgtatctccttctagtgggc

SEQ ID NO: 19893 - DNA, 20 bp, synthetic construct
  misc_feature 1..20: note = chemically synthesized
  source 1..20: mol_type = other DNA
tctagtgggctggacctccc

SEQ ID NO: 19894 - DNA, 20 bp, synthetic construct
  misc_feature 1..20: note = chemically synthesized
  source 1..20: mol_type = other DNA
ctagtgggctggacctcccc

SEQ ID NO: 19895 - DNA, 20 bp, synthetic construct
  misc_feature 1..20: note = chemically synthesized
  source 1..20: mol_type = other DNA
acctccccaggccatttttc

SEQ ID NO: 19896 - DNA, 20 bp, synthetic construct
  misc_feature 1..20: note = chemically synthesized
  source 1..20: mol_type = other DNA
cctccccaggccatttttct

SEQ ID NO: 19897 - DNA, 20 bp, synthetic construct
  misc_feature 1..20: note = chemically synthesized
  source 1..20: mol_type = other DNA
aggccatttttctaggtaac

SEQ ID NO: 19898 - DNA, 20 bp, synthetic construct
  misc_feature 1..20: note = chemically synthesized
  source 1..20: mol_type = other DNA
ggccatttttctaggtaact

SEQ ID NO: 19899 - DNA, 20 bp, synthetic construct
  misc_feature 1..20: note = chemically synthesized
  source 1..20: mol_type = other DNA
catttttctaggtaactagg

SEQ ID NO: 19900 - DNA, 20 bp, synthetic construct
  misc_feature 1..20: note = chemically synthesized
  source 1..20: mol_type = other DNA
atttttctaggtaactagga

SEQ ID NO: 19901 - DNA, 20 bp, synthetic construct
  misc_feature 1..20: note = chemically synthesized
  source 1..20: mol_type = other DNA
ctaggaaggcctgactctgt

SEQ ID NO: 19902 - DNA, 20 bp, synthetic construct
  misc_feature 1..20: note = chemically synthesized
  source 1..20: mol_type = other DNA
gcctgactctgtcagcaact

SEQ ID NO: 19903 - DNA, 20 bp, synthetic construct
  misc_feature 1..20: note = chemically synthesized
  source 1..20: mol_type = other DNA
gtcagcaacttggctttctt

SEQ ID NO: 19904 - DNA, 20 bp, synthetic construct
  misc_feature 1..20: note = chemically synthesized
  source 1..20: mol_type = other DNA
cagcaacttggctttctttg

SEQ ID NO: 19905 - DNA, 20 bp, synthetic construct
  misc_feature 1..20: note = chemically synthesized
  source 1..20: mol_type = other DNA
agcaacttggctttctttgg

SEQ ID NO: 19906 - DNA, 20 bp, synthetic construct
  misc_feature 1..20: note = chemically synthesized
  source 1..20: mol_type = other DNA
caacttggctttctttggag

SEQ ID NO: 19907 - DNA, 20 bp, synthetic construct
  misc_feature 1..20: note = chemically synthesized
  source 1..20: mol_type = other DNA
aacttggctttctttggagg

SEQ ID NO: 19908 - DNA, 20 bp, synthetic construct
  misc_feature 1..20: note = chemically synthesized
  source 1..20: mol_type = other DNA
ctttggaggaggtgtcactc

SEQ ID NO: 19909 - DNA, 20 bp, synthetic construct
  misc_feature 1..20: note = chemically synthesized
  source 1..20: mol_type = other DNA
tttggaggaggtgtcactct

SEQ ID NO: 19910 - DNA, 20 bp, synthetic construct
  misc_feature 1..20: note = chemically synthesized
  source 1..20: mol_type = other DNA
aggaggtgtcactctgggat

SEQ ID NO: 19911 - DNA, 20 bp, synthetic construct
  misc_feature 1..20: note = chemically synthesized
  source 1..20: mol_type = other DNA
gtcactctgggattagttaa

SEQ ID NO: 19912 - DNA, 20 bp, synthetic construct
  misc_feature 1..20: note = chemically synthesized
  source 1..20: mol_type = other DNA
tcactctgggattagttaaa

SEQ ID NO: 19913 - DNA, 20 bp, synthetic construct
  misc_feature 1..20: note = chemically synthesized
  source 1..20: mol_type = other DNA
cactctgggattagttaaaa

SEQ ID NO: 19914 - DNA, 20 bp, synthetic construct
  misc_feature 1..20: note = chemically synthesized
  source 1..20: mol_type = other DNA
actctgggattagttaaaag

SEQ ID NO: 19915 - DNA, 20 bp, synthetic construct
  misc_feature 1..20: note = chemically synthesized
  source 1..20: mol_type = other DNA
gggattagttaaaaggggat

SEQ ID NO: 19916 - DNA, 20 bp, synthetic construct
  misc_feature 1..20: note = chemically synthesized
  source 1..20: mol_type = other DNA
attagttaaaaggggatcag

SEQ ID NO: 19917 - DNA, 20 bp, synthetic construct
  misc_feature 1..20: note = chemically synthesized
  source 1..20: mol_type = other DNA
gggatcagtggtattcacat

SEQ ID NO: 19918 - DNA, 20 bp, synthetic construct
  misc_feature 1..20: note = chemically synthesized
  source 1..20: mol_type = other DNA
gtggtattcacattggctcg

SEQ ID NO: 19919 - DNA, 20 bp, synthetic construct
  misc_feature 1..20: note = chemically synthesized
  source 1..20: mol_type = other DNA
tggtattcacattggctcgt

SEQ ID NO: 19920 - DNA, 20 bp, synthetic construct
  misc_feature 1..20: note = chemically synthesized
  source 1..20: mol_type = other DNA
ctcctcaaattataaccttt

SEQ ID NO: 19921 - DNA, 20 bp, synthetic construct
  misc_feature 1..20: note = chemically synthesized
  source 1..20: mol_type = other DNA
cctcaaattataaccttttg

SEQ ID NO: 19922 - DNA, 20 bp, synthetic construct
  misc_feature 1..20: note = chemically synthesized
  source 1..20: mol_type = other DNA
ctcaaattataaccttttgg

SEQ ID NO: 19923 - DNA, 20 bp, synthetic construct
  misc_feature 1..20: note = chemically synthesized
  source 1..20: mol_type = other DNA
tcaaattataaccttttgga

SEQ ID NO: 19924 - DNA, 20 bp, synthetic construct
  misc_feature 1..20: note = chemically synthesized
  source 1..20: mol_type = other DNA
aattataaccttttggaggg

SEQ ID NO: 19925 - DNA, 20 bp, synthetic construct
  misc_feature 1..20: note = chemically synthesized
  source 1..20: mol_type = other DNA
attataaccttttggagggc

SEQ ID NO: 19926 - DNA, 20 bp, synthetic construct
  misc_feature 1..20: note = chemically synthesized
  source 1..20: mol_type = other DNA
tataaccttttggagggcag

SEQ ID NO: 19927 - DNA, 20 bp, synthetic construct
  misc_feature 1..20: note = chemically synthesized
  source 1..20: mol_type = other DNA
ttttattttttgtgccttct

SEQ ID NO: 19928 - DNA, 20 bp, synthetic construct
  misc_feature 1..20: note = chemically synthesized
  source 1..20: mol_type = other DNA
cttggtgcctaacataatgc

SEQ ID NO: 19929 - DNA, 20 bp, synthetic construct
  misc_feature 1..20: note = chemically synthesized
  source 1..20: mol_type = other DNA
acataatgctggttcatatg

SEQ ID NO: 19930 - DNA, 20 bp, synthetic construct
  misc_feature 1..20: note = chemically synthesized
  source 1..20: mol_type = other DNA
gctcacgctgcttgattgaa

SEQ ID NO: 19931 - DNA, 20 bp, synthetic construct
  misc_feature 1..20: note = chemically synthesized
  source 1..20: mol_type = other DNA
tcacgctgcttgattgaaca

SEQ ID NO: 19932 - DNA, 20 bp, synthetic construct
  misc_feature 1..20: note = chemically synthesized
  source 1..20: mol_type = other DNA
gctgcttgattgaacagaga

SEQ ID NO: 19933 - DNA, 20 bp, synthetic construct
  misc_feature 1..20: note = chemically synthesized
  source 1..20: mol_type = other DNA
ttgattgaacagagaaagac

SEQ ID NO: 19934 - DNA, 20 bp, synthetic construct
  misc_feature 1..20: note = chemically synthesized
  source 1..20: mol_type = other DNA
tgattgaacagagaaagacc

SEQ ID NO: 19935 - DNA, 20 bp, synthetic construct
  misc_feature 1..20: note = chemically synthesized
  source 1..20: mol_type = other DNA
gagaaagaccgggctttgaa

SEQ ID NO: 19936 - DNA, 20 bp, synthetic construct
  misc_feature 1..20: note = chemically synthesized
  source 1..20: mol_type = other DNA
ccgggctttgaatggatccc

SEQ ID NO: 19937 - DNA, 20 bp, synthetic construct
  misc_feature 1..20: note = chemically synthesized
  source 1..20: mol_type = other DNA
tggatccccagctccctgtc

SEQ ID NO: 19938 - DNA, 20 bp, synthetic construct
  misc_feature 1..20: note = chemically synthesized
  source 1..20: mol_type = other DNA
ggatccccagctccctgtcc

SEQ ID NO: 19939 - DNA, 20 bp, synthetic construct
  misc_feature 1..20: note = chemically synthesized
  source 1..20: mol_type = other DNA
gatccccagctccctgtcca

SEQ ID NO: 19940 - DNA, 20 bp, synthetic construct
  misc_feature 1..20: note = chemically synthesized
  source 1..20: mol_type = other DNA
ccccagctccctgtccaggg

SEQ ID NO: 19941 - DNA, 20 bp, synthetic construct
  misc_feature 1..20: note = chemically synthesized
  source 1..20: mol_type = other DNA
cccagctccctgtccaggga

SEQ ID NO: 19942 - DNA, 20 bp, synthetic construct
  misc_feature 1..20: note = chemically synthesized
  source 1..20: mol_type = other DNA
tccctgtccagggaaggtgt

SEQ ID NO: 19943 - DNA, 20 bp, synthetic construct
  misc_feature 1..20: note = chemically synthesized
  source 1..20: mol_type = other DNA
ccctgtccagggaaggtgtg

SEQ ID NO: 19944 - DNA, 20 bp, synthetic construct
  misc_feature 1..20: note = chemically synthesized
  source 1..20: mol_type = other DNA
gtccagggaaggtgtgaggc

SEQ ID NO: 19945 - DNA, 20 bp, synthetic construct
  misc_feature 1..20: note = chemically synthesized
  source 1..20: mol_type = other DNA
tccagggaaggtgtgaggct

SEQ ID NO: 19946 - DNA, 20 bp, synthetic construct
  misc_feature 1..20: note = chemically synthesized
  source 1..20: mol_type = other DNA
gggaaggtgtgaggctgggc

SEQ ID NO: 19947 - DNA, 20 bp, synthetic construct
  misc_feature 1..20: note = chemically synthesized
  source 1..20: mol_type = other DNA
tttatttcccccttcctccc

SEQ ID NO: 19948 - DNA, 20 bp, synthetic construct
  misc_feature 1..20: note = chemically synthesized
  source 1..20: mol_type = other DNA
ttatttcccccttcctccct

SEQ ID NO: 19949 - DNA, 20 bp, synthetic construct
  misc_feature 1..20: note = chemically synthesized
  source 1..20: mol_type = other DNA
tatttcccccttcctccctg

SEQ ID NO: 19950 - DNA, 20 bp, synthetic construct
  misc_feature 1..20: note = chemically synthesized
  source 1..20: mol_type = other DNA
tttcccccttcctccctggg

SEQ ID NO: 19951 - DNA, 20 bp, synthetic construct
  misc_feature 1..20: note = chemically synthesized
  source 1..20: mol_type = other DNA
ccccttcctccctggggaga

SEQ ID NO: 19952 - DNA, 20 bp, synthetic construct
  misc_feature 1..20: note = chemically synthesized
  source 1..20: mol_type = other DNA
tccctggggagaaagtgaaa

SEQ ID NO: 19953 - DNA, 20 bp, synthetic construct
  misc_feature 1..20: note = chemically synthesized
  source 1..20: mol_type = other DNA
gggagaaagtgaaaaagtga

SEQ ID NO: 19954 - DNA, 20 bp, synthetic construct
  misc_feature 1..20: note = chemically synthesized
  source 1..20: mol_type = other DNA
aagtgaaaaagtgaaagtgc

SEQ ID NO: 19955 - DNA, 20 bp, synthetic construct
  misc_feature 1..20: note = chemically synthesized
  source 1..20: mol_type = other DNA
agtgaaaaagtgaaagtgct

SEQ ID NO: 19956 - DNA, 20 bp, synthetic construct
  misc_feature 1..20: note = chemically synthesized
  source 1..20: mol_type = other DNA
gtgaaaaagtgaaagtgctg

SEQ ID NO: 19957 - DNA, 20 bp, synthetic construct
  misc_feature 1..20: note = chemically synthesized
  source 1..20: mol_type = other DNA
aaaagtgaaagtgctggggt

SEQ ID NO: 19958 - DNA, 20 bp, synthetic construct
  misc_feature 1..20: note = chemically synthesized
  source 1..20: mol_type = other DNA
aaagtgaaagtgctggggtt

SEQ ID NO: 19959 - DNA, 20 bp, synthetic construct
  misc_feature 1..20: note = chemically synthesized
  source 1..20: mol_type = other DNA
tgaaagtgctggggttggga

SEQ ID NO: 19960 - DNA, 20 bp, synthetic construct
  misc_feature 1..20: note = chemically synthesized
  source 1..20: mol_type = other DNA
agtgctggggttgggatagc

SEQ ID NO: 19961 - DNA, 20 bp, synthetic construct
  misc_feature 1..20: note = chemically synthesized
  source 1..20: mol_type = other DNA
gctggggttgggatagctgg

SEQ ID NO: 19962 - DNA, 20 bp, synthetic construct
  misc_feature 1..20: note = chemically synthesized
  source 1..20: mol_type = other DNA
gatagctggtggtgtctttg

SEQ ID NO: 19963 - DNA, 20 bp, synthetic construct
  misc_feature 1..20: note = chemically synthesized
  source 1..20: mol_type = other DNA
tctttgtggctttcacccca

SEQ ID NO: 19964 - DNA, 20 bp, synthetic construct
  misc_feature 1..20: note = chemically synthesized
  source 1..20: mol_type = other DNA
gtggctttcaccccatggtc

SEQ ID NO: 19965 - DNA, 20 bp, synthetic construct
  misc_feature 1..20: note = chemically synthesized
  source 1..20: mol_type = other DNA
gctttcaccccatggtcaag

SEQ ID NO: 19966 - DNA, 20 bp, synthetic construct
  misc_feature 1..20: note = chemically synthesized
  source 1..20: mol_type = other DNA
caagcagtgaactctgcttg

SEQ ID NO: 19967 - DNA, 20 bp, synthetic construct
  misc_feature 1..20: note = chemically synthesized
  source 1..20: mol_type = other DNA
cagattctgtctcgctcacc

SEQ ID NO: 19968 - DNA, 20 bp, synthetic construct
  misc_feature 1..20: note = chemically synthesized
  source 1..20: mol_type = other DNA
attctgtctcgctcacctgg

SEQ ID NO: 19969 - DNA, 20 bp, synthetic construct
  misc_feature 1..20: note = chemically synthesized
  source 1..20: mol_type = other DNA
tgtctcgctcacctggaagc

SEQ ID NO: 19970 - DNA, 20 bp, synthetic construct
  misc_feature 1..20: note = chemically synthesized
  source 1..20: mol_type = other DNA
gctcacctggaagccagtgt

SEQ ID NO: 19971 - DNA, 20 bp, synthetic construct
  misc_feature 1..20: note = chemically synthesized
  source 1..20: mol_type = other DNA
ctcacctggaagccagtgtt

SEQ ID NO: 19972 - DNA, 20 bp, synthetic construct
  misc_feature 1..20: note = chemically synthesized
  source 1..20: mol_type = other DNA
tcacctggaagccagtgttg

SEQ ID NO: 19973 - DNA, 20 bp, synthetic construct
  misc_feature 1..20: note = chemically synthesized
  source 1..20: mol_type = other DNA
cctggaagccagtgttgggg

SEQ ID NO: 19974 - DNA, 20 bp, synthetic construct
  misc_feature 1..20: note = chemically synthesized
  source 1..20: mol_type = other DNA
ctggaagccagtgttgggga

SEQ ID NO: 19975 - DNA, 20 bp, synthetic construct
  misc_feature 1..20: note = chemically synthesized
  source 1..20: mol_type = other DNA
ggaagccagtgttggggaag

SEQ ID NO: 19976 - DNA, 20 bp, synthetic construct
  misc_feature 1..20: note = chemically synthesized
  source 1..20: mol_type = other DNA
agtgttggggaaggagcacg

SEQ ID NO: 19977 - DNA, 20 bp, synthetic construct
  misc_feature 1..20: note = chemically synthesized
  source 1..20: mol_type = other DNA
gtgttggggaaggagcacgt

SEQ ID NO: 19978 - DNA, 20 bp, synthetic construct
  misc_feature 1..20: note = chemically synthesized
  source 1..20: mol_type = other DNA
tgttggggaaggagcacgtg

SEQ ID NO: 19979 - DNA, 20 bp, synthetic construct
  misc_feature 1..20: note = chemically synthesized
  source 1..20: mol_type = other DNA
gttggggaaggagcacgtgg

SEQ ID NO: 19980 - DNA, 20 bp, synthetic construct
  misc_feature 1..20: note = chemically synthesized
  source 1..20: mol_type = other DNA
tggggaaggagcacgtgggg

SEQ ID NO: 19981 - DNA, 20 bp, synthetic construct
  misc_feature 1..20: note = chemically synthesized
  source 1..20: mol_type = other DNA
ggggaaggagcacgtggggg

SEQ ID NO: 19982 - DNA, 20 bp, synthetic construct
  misc_feature 1..20: note = chemically synthesized
  source 1..20: mol_type = other DNA
agcacgtgggggaggatcct

SEQ ID NO: 19983 - DNA, 20 bp, synthetic construct
  misc_feature 1..20: note = chemically synthesized
  source 1..20: mol_type = other DNA
gcacgtgggggaggatcctt

SEQ ID NO: 19984 - DNA, 20 bp, synthetic construct
  misc_feature 1..20: note = chemically synthesized
  source 1..20: mol_type = other DNA
tgggggaggatccttaggtc

SEQ ID NO: 19985 - DNA, 20 bp, synthetic construct
  misc_feature 1..20: note = chemically synthesized
  source 1..20: mol_type = other DNA
gggggaggatccttaggtct

SEQ ID NO: 19986 - DNA, 20 bp, synthetic construct
  misc_feature 1..20: note = chemically synthesized
  source 1..20: mol_type = other DNA
cttaggtctgggcaacactt

SEQ ID NO: 19987 - DNA, 20 bp, synthetic construct
  misc_feature 1..20: note = chemically synthesized
  source 1..20: mol_type = other DNA
taggtctgggcaacactttg

SEQ ID NO: 19988 - DNA, 20 bp, synthetic construct
  misc_feature 1..20: note = chemically synthesized
  source 1..20: mol_type = other DNA
tctgggcaacactttggagt

SEQ ID NO: 19989 - DNA, 20 bp, synthetic construct
  misc_feature 1..20: note = chemically synthesized
  source 1..20: mol_type = other DNA
ctgggcaacactttggagtt

SEQ ID NO: 19990 - DNA, 20 bp, synthetic construct
  misc_feature 1..20: note = chemically synthesized
  source 1..20: mol_type = other DNA
tgggcaacactttggagtta

SEQ ID NO: 19991 - DNA, 20 bp, synthetic construct
  misc_feature 1..20: note = chemically synthesized
  source 1..20: mol_type = other DNA
gggcaacactttggagttag

SEQ ID NO: 19992 - DNA, 20 bp, synthetic construct
  misc_feature 1..20: note = chemically synthesized
  source 1..20: mol_type = other DNA
ggcaacactttggagttagg

SEQ ID NO: 19993 - DNA, 20 bp, synthetic construct
  misc_feature 1..20: note = chemically synthesized
  source 1..20: mol_type = other DNA
tttggagttagggggtcccc

SEQ ID NO: 19994 - DNA, 20 bp, synthetic construct
  misc_feature 1..20: note = chemically synthesized
  source 1..20: mol_type = other DNA
tggagttagggggtcccctg

SEQ ID NO: 19995 - DNA, 20 bp, synthetic construct
  misc_feature 1..20: note = chemically synthesized
  source 1..20: mol_type = other DNA
ggagttagggggtcccctgg

SEQ ID NO: 19996 - DNA, 20 bp, synthetic construct
  misc_feature 1..20: note = chemically synthesized
  source 1..20: mol_type = other DNA
tagggggtcccctggaggtg

SEQ ID NO: 19997 - DNA, 20 bp, synthetic construct
  misc_feature 1..20: note = chemically synthesized
  source 1..20: mol_type = other DNA
agggggtcccctggaggtgt

SEQ ID NO: 19998 - DNA, 20 bp, synthetic construct
  misc_feature 1..20: note = chemically synthesized
  source 1..20: mol_type = other DNA
gggtcccctggaggtgtggg

SEQ ID NO: 19999 - DNA, 20 bp, synthetic construct
  misc_feature 1..20: note = chemically synthesized
  source 1..20: mol_type = other DNA
cccctggaggtgtgggaagc

SEQ ID NO: 20000 - DNA, 20 bp, synthetic construct
  misc_feature 1..20: note = chemically synthesized
  source 1..20: mol_type = other DNA
ctggaggtgtgggaagctgg

SEQ ID NO: 20001 - DNA, 20 bp, synthetic construct
  misc_feature 1..20: note = chemically synthesized
  source 1..20: mol_type = other DNA
gaggtgtgggaagctggtag

SEQ ID NO: 20002 - DNA, 20 bp, synthetic construct
  misc_feature 1..20: note = chemically synthesized
  source 1..20: mol_type = other DNA
ggaagctggtagtggcattc

SEQ ID NO: 20003 - DNA, 20 bp, synthetic construct
  misc_feature 1..20: note = chemically synthesized
  source 1..20: mol_type = other DNA
ggtagtggcattctggaaac

SEQ ID NO: 20004 - DNA, 20 bp, synthetic construct
  misc_feature 1..20: note = chemically synthesized
  source 1..20: mol_type = other DNA
gtggcattctggaaacaagc

SEQ ID NO: 20005 - DNA, 20 bp, synthetic construct
  misc_feature 1..20: note = chemically synthesized
  source 1..20: mol_type = other DNA
ggcattctggaaacaagcta

SEQ ID NO: 20006 - DNA, 20 bp, synthetic construct
  misc_feature 1..20: note = chemically synthesized
  source 1..20: mol_type = other DNA
caagctagagcctgtctcac

SEQ ID NO: 20007 - DNA, 20 bp, synthetic construct
  misc_feature 1..20: note = chemically synthesized
  source 1..20: mol_type = other DNA
agctagagcctgtctcacca

SEQ ID NO: 20008 - DNA, 20 bp, synthetic construct
  misc_feature 1..20: note = chemically synthesized
  source 1..20: mol_type = other DNA
gctagagcctgtctcaccag

SEQ ID NO: 20009 - DNA, 20 bp, synthetic construct
  misc_feature 1..20: note = chemically synthesized
  source 1..20: mol_type = other DNA
ctagagcctgtctcaccaga

SEQ ID NO: 20010 - DNA, 20 bp, synthetic construct
  misc_feature 1..20: note = chemically synthesized
  source 1..20: mol_type = other DNA
agagcctgtctcaccagagg

SEQ ID NO: 20011 - DNA, 20 bp, synthetic construct
  misc_feature 1..20: note = chemically synthesized
  source 1..20: mol_type = other DNA
ctgtctcaccagagggagaa

SEQ ID NO: 20012 - DNA, 20 bp, synthetic construct
  misc_feature 1..20: note = chemically synthesized
  source 1..20: mol_type = other DNA
tcaccagagggagaacggct

SEQ ID NO: 20013 - DNA, 20 bp, synthetic construct
  misc_feature 1..20: note = chemically synthesized
  source 1..20: mol_type = other DNA
agagggagaacggctgagtt

SEQ ID NO: 20014 - DNA, 20 bp, synthetic construct
  misc_feature 1..20: note = chemically synthesized
  source 1..20: mol_type = other DNA
gggagaacggctgagttcgg

SEQ ID NO: 20015 - DNA, 20 bp, synthetic construct
  misc_feature 1..20: note = chemically synthesized
  source 1..20: mol_type = other DNA
ggagaacggctgagttcgga

SEQ ID NO: 20016 - DNA, 20 bp, synthetic construct
  misc_feature 1..20: note = chemically synthesized
  source 1..20: mol_type = other DNA
gagaacggctgagttcggaa

SEQ ID NO: 20017 - DNA, 20 bp, synthetic construct
  misc_feature 1..20: note = chemically synthesized
  source 1..20: mol_type = other DNA
cggctgagttcggaagggac

SEQ ID NO: 20018 - DNA, 20 bp, synthetic construct
  misc_feature 1..20: note = chemically synthesized
  source 1..20: mol_type = other DNA
ggctgagttcggaagggact

SEQ ID NO: 20019 - DNA, 20 bp, synthetic construct
  misc_feature 1..20: note = chemically synthesized
  source 1..20: mol_type = other DNA
gctgagttcggaagggactg

SEQ ID NO: 20020 - DNA, 20 bp, synthetic construct
  misc_feature 1..20: note = chemically synthesized
  source 1..20: mol_type = other DNA
gactggggcctgctttcctt

SEQ ID NO: 20021 - DNA, 20 bp, synthetic construct
  misc_feature 1..20: note = chemically synthesized
  source 1..20: mol_type = other DNA
actggggcctgctttccttt

SEQ ID NO: 20022 - DNA, 20 bp, synthetic construct
  misc_feature 1..20: note = chemically synthesized
  source 1..20: mol_type = other DNA
ggggcctgctttcctttggg

SEQ ID NO: 20023 - DNA, 20 bp, synthetic construct
  misc_feature 1..20: note = chemically synthesized
  source 1..20: mol_type = other DNA
ttcctttgggtggctttgac

SEQ ID NO: 20024 - DNA, 20 bp, synthetic construct
  misc_feature 1..20: note = chemically synthesized
  source 1..20: mol_type = other DNA
gggtggctttgactggctct

SEQ ID NO: 20025 - DNA, 20 bp, synthetic construct
  misc_feature 1..20: note = chemically synthesized
  source 1..20: mol_type = other DNA
gctttgactggctcttggat

SEQ ID NO: 20026 - DNA, 20 bp, synthetic construct
  misc_feature 1..20: note = chemically synthesized
  source 1..20: mol_type = other DNA
tggctcttggatgagtttaa

SEQ ID NO: 20027 - DNA, 20 bp, synthetic construct
  misc_feature 1..20: note = chemically synthesized
  source 1..20: mol_type = other DNA
ggctcttggatgagtttaaa

SEQ ID NO: 20028 - DNA, 20 bp, synthetic construct
  misc_feature 1..20: note = chemically synthesized
  source 1..20: mol_type = other DNA
tttttttcttttttctgttt

SEQ ID NO: 20029 - DNA, 20 bp, synthetic construct
  misc_feature 1..20: note = chemically synthesized
  source 1..20: mol_type = other DNA
gttttagtgtatgtgtatgc

SEQ ID NO: 20030 - DNA, 20 bp, synthetic construct
  misc_feature 1..20: note = chemically synthesized
  source 1..20: mol_type = other DNA
atgcaagacctttgatattt

SEQ ID NO: 20031 - DNA, 20 bp, synthetic construct
  misc_feature 1..20: note = chemically synthesized
  source 1..20: mol_type = other DNA
caagacctttgatatttgag

SEQ ID NO: 20032 - DNA, 20 bp, synthetic construct
  misc_feature 1..20: note = chemically synthesized
  source 1..20: mol_type = other DNA
aagacctttgatatttgagt

SEQ ID NO: 20033 - DNA, 20 bp, synthetic construct
  misc_feature 1..20: note = chemically synthesized
  source 1..20: mol_type = other DNA
agacctttgatatttgagta

SEQ ID NO: 20034 - DNA, 20 bp, synthetic construct
  misc_feature 1..20: note = chemically synthesized
  source 1..20: mol_type = other DNA
gggaaatcctctcttatcaa

SEQ ID NO: 20035 - DNA, 20 bp, synthetic construct
  misc_feature 1..20: note = chemically synthesized
  source 1..20: mol_type = other DNA
tctcttatcaatggaattca

SEQ ID NO: 20036 - DNA, 20 bp, synthetic construct
  misc_feature 1..20: note = chemically synthesized
  source 1..20: mol_type = other DNA
atggaattcacagcctctta

SEQ ID NO: 20037 - DNA, 20 bp, synthetic construct
  misc_feature 1..20: note = chemically synthesized
  source 1..20: mol_type = other DNA
taccctttcattgtgttgta

SEQ ID NO: 20038 - DNA, 20 bp, synthetic construct
  misc_feature 1..20: note = chemically synthesized
  source 1..20: mol_type = other DNA
ctttcattgtgttgtaaaga

SEQ ID NO: 20039 - DNA, 20 bp, synthetic construct
  misc_feature 1..20: note = chemically synthesized
  source 1..20: mol_type = other DNA
cattgtgttgtaaagacagt

SEQ ID NO: 20040 - DNA, 20 bp, synthetic construct
  misc_feature 1..20: note = chemically synthesized
  source 1..20: mol_type = other DNA
gtaaagacagtcagaccaac

SEQ ID NO: 20041 - DNA, 20 bp, synthetic construct
  misc_feature 1..20: note = chemically synthesized
  source 1..20: mol_type = other DNA
acaactctgatttttttcct

SEQ ID NO: 20042 - DNA, 20 bp, synthetic construct
  misc_feature 1..20: note = chemically synthesized
  source 1..20: mol_type = other DNA
tttaattttttttttttttt

SEQ ID NO: 20043 - DNA, 20 bp, synthetic construct
  misc_feature 1..20: note = chemically synthesized
  source 1..20: mol_type = other DNA
atttttttttttttttgaga

SEQ ID NO: 20044 - DNA, 20 bp, synthetic construct
  misc_feature 1..20: note = chemically synthesized
  source 1..20: mol_type = other DNA
ttttttttttttttgagatg

SEQ ID NO: 20045 - DNA, 20 bp, synthetic construct
  misc_feature 1..20: note = chemically synthesized
  source 1..20: mol_type = other DNA
tggagtctcgctctgtcgcc

SEQ ID NO: 20046 - DNA, 20 bp, synthetic construct
  misc_feature 1..20: note = chemically synthesized
  source 1..20: mol_type = other DNA
ggagtctcgctctgtcgccc

SEQ ID NO: 20047 - DNA, 20 bp, synthetic construct
  misc_feature 1..20: note = chemically synthesized
  source 1..20: mol_type = other DNA
tctcgctctgtcgcccaggc

SEQ ID NO: 20048 - DNA, 20 bp, synthetic construct
  misc_feature 1..20: note = chemically synthesized
  source 1..20: mol_type = other DNA
tcgctctgtcgcccaggctg

SEQ ID NO: 20049 - DNA, 20 bp, synthetic construct
  misc_feature 1..20: note = chemically synthesized
  source 1..20: mol_type = other DNA
ctgtcgcccaggctggagtg

SEQ ID NO: 20050 - DNA, 20 bp, synthetic construct
  misc_feature 1..20: note = chemically synthesized
  source 1..20: mol_type = other DNA
ggagtgcagtgctacgatct

SEQ ID NO: 20051 - DNA, 20 bp, synthetic construct
  misc_feature 1..20: note = chemically synthesized
  source 1..20: mol_type = other DNA
gctacgatctcggctcattg

SEQ ID NO: 20052 - DNA, 20 bp, synthetic construct
  misc_feature 1..20: note = chemically synthesized
  source 1..20: mol_type = other DNA
tcattgcagcctccgcctcc

SEQ ID NO: 20053 - DNA, 20 bp, synthetic construct
  misc_feature 1..20: note = chemically synthesized
  source 1..20: mol_type = other DNA
cattgcagcctccgcctccc

SEQ ID NO: 20054 - DNA, 20 bp, synthetic construct
  misc_feature 1..20: note = chemically synthesized
  source 1..20: mol_type = other DNA
agcctccgcctcccaggttc

SEQ ID NO: 20055 - DNA, 20 bp, synthetic construct
  misc_feature 1..20: note = chemically synthesized
  source 1..20: mol_type = other DNA
ttcaagtgattctcctgcct

SEQ ID NO: 20056 - DNA, 20 bp, synthetic construct
  misc_feature 1..20: note = chemically synthesized
  source 1..20: mol_type = other DNA
ttctcctgcctcagcctccc

SEQ ID NO: 20057 - DNA, 20 bp, synthetic construct
  misc_feature 1..20: note = chemically synthesized
  source 1..20: mol_type = other DNA
tcctgcctcagcctcccaag

SEQ ID NO: 20058 - DNA, 20 bp, synthetic construct
  misc_feature 1..20: note = chemically synthesized
  source 1..20: mol_type = other DNA
gcctcagcctcccaagtagc

SEQ ID NO: 20059 - DNA, 20 bp, synthetic construct
  misc_feature 1..20: note = chemically synthesized
  source 1..20: mol_type = other DNA
cctcagcctcccaagtagct

SEQ ID NO: 20060 - DNA, 20 bp, synthetic construct
  misc_feature 1..20: note = chemically synthesized
  source 1..20: mol_type = other DNA
ctcccaagtagctgggatta

SEQ ID NO: 20061 - DNA, 20 bp, synthetic construct
  misc_feature 1..20: note = chemically synthesized
  source 1..20: mol_type = other DNA
tcccaagtagctgggattat

SEQ ID NO: 20062 - DNA, 20 bp, synthetic construct
  misc_feature 1..20: note = chemically synthesized
  source 1..20: mol_type = other DNA
taggtgcatgccatcacacc

SEQ ID NO: 20063 - DNA, 20 bp, synthetic construct
  misc_feature 1..20: note = chemically synthesized
  source 1..20: mol_type = other DNA
tttttttttttttttttttt

SEQ ID NO: 20064 - DNA, 20 bp, synthetic construct
  misc_feature 1..20: note = chemically synthesized
  source 1..20: mol_type = other DNA
tttttttttttttttttaag

SEQ ID NO: 20065 - DNA, 20 bp, synthetic construct
  misc_feature 1..20: note = chemically synthesized
  source 1..20: mol_type = other DNA
tttttttttttttttaagta

SEQ ID NO: 20066 - DNA, 20 bp, synthetic construct
  misc_feature 1..20: note = chemically synthesized
  source 1..20: mol_type = other DNA
tttttttttttaagtagaga

SEQ ID NO: 20067 - DNA, 20 bp, synthetic construct
  misc_feature 1..20: note = chemically synthesized
  source 1..20: mol_type = other DNA
ttttttttttaagtagagat

SEQ ID NO: 20068 - DNA, 20 bp, synthetic construct
  misc_feature 1..20: note = chemically synthesized
  source 1..20: mol_type = other DNA
tttttttttaagtagagatg

SEQ ID NO: 20069 - DNA, 20 bp, synthetic construct
  misc_feature 1..20: note = chemically synthesized
  source 1..20: mol_type = other DNA
gagatggggtttcaccatgt

SEQ ID NO: 20070 - DNA, 20 bp, synthetic construct
  misc_feature 1..20: note = chemically synthesized
  source 1..20: mol_type = other DNA
tggggtttcaccatgttggc

SEQ ID NO: 20071 - DNA, 20 bp, synthetic construct
  misc_feature 1..20: note = chemically synthesized
  source 1..20: mol_type = other DNA
ggggtttcaccatgttggct

SEQ ID NO: 20072 - DNA, 20 bp, synthetic construct
  misc_feature 1..20: note = chemically synthesized
  source 1..20: mol_type = other DNA
tttcaccatgttggctaggc

SEQ ID NO: 20073 - DNA, 20 bp, synthetic construct
  misc_feature 1..20: note = chemically synthesized
  source 1..20: mol_type = other DNA
tggtcttgaactcctgacct

SEQ ID NO: 20074 - DNA, 20 bp, synthetic construct
  misc_feature 1..20: note = chemically synthesized
  source 1..20: mol_type = other DNA
ggtcttgaactcctgacctc

SEQ ID NO: 20075 - DNA, 20 bp, synthetic construct
  misc_feature 1..20: note = chemically synthesized
  source 1..20: mol_type = other DNA
ctcaggtgacccacacgcct

SEQ ID NO: 20076 - DNA, 20 bp, synthetic construct
  misc_feature 1..20: note = chemically synthesized
  source 1..20: mol_type = other DNA
cctcggcctcccaaaatgct

SEQ ID NO: 20077 - DNA, 20 bp, synthetic construct
  misc_feature 1..20: note = chemically synthesized
  source 1..20: mol_type = other DNA
ctcccaaaatgctgagatta

SEQ ID NO: 20078 - DNA, 20 bp, synthetic construct
  misc_feature 1..20: note = chemically synthesized
  source 1..20: mol_type = other DNA
tcccaaaatgctgagattac

SEQ ID NO: 20079 - DNA, 20 bp, synthetic construct
  misc_feature 1..20: note = chemically synthesized
  source 1..20: mol_type = other DNA
aatgctgagattacaggtgt

SEQ ID NO: 20080 - DNA, 20 bp, synthetic construct
  misc_feature 1..20: note = chemically synthesized
  source 1..20: mol_type = other DNA
caggtgtgagccaccgcacc

SEQ ID NO: 20081 - DNA, 20 bp, synthetic construct
  misc_feature 1..20: note = chemically synthesized
  source 1..20: mol_type = other DNA
tggctatttaattctatttt

SEQ ID NO: 20082 - DNA, 20 bp, synthetic construct
  misc_feature 1..20: note = chemically synthesized
  source 1..20: mol_type = other DNA
tatttaattctattttcaga

SEQ ID NO: 20083 - DNA, 20 bp, synthetic construct
  misc_feature 1..20: note = chemically synthesized
  source 1..20: mol_type = other DNA
tttcagatggcttgttctcc

SEQ ID NO: 20084 - DNA, 20 bp, synthetic construct
  misc_feature 1..20: note = chemically synthesized
  source 1..20: mol_type = other DNA
atggcttgttctccaagtct

SEQ ID NO: 20085 - DNA, 20 bp, synthetic construct
  misc_feature 1..20: note = chemically synthesized
  source 1..20: mol_type = other DNA
tggcttgttctccaagtctt

SEQ ID NO: 20086 - DNA, 20 bp, synthetic construct
  misc_feature 1..20: note = chemically synthesized
  source 1..20: mol_type = other DNA
ctccaagtcttgggactgcc

SEQ ID NO: 20087 - DNA, 20 bp, synthetic construct
  misc_feature 1..20: note = chemically synthesized
  source 1..20: mol_type = other DNA
gtcttgggactgcccagaaa

SEQ ID NO: 20088 - DNA, 20 bp, synthetic construct
  misc_feature 1..20: note = chemically synthesized
  source 1..20: mol_type = other DNA
tcttgggactgcccagaaat

SEQ ID NO: 20089 - DNA, 20 bp, synthetic construct
  misc_feature 1..20: note = chemically synthesized
  source 1..20: mol_type = other DNA
ctgcccagaaatgggttgcc

SEQ ID NO: 20090 - DNA, 20 bp, synthetic construct
  misc_feature 1..20: note = chemically synthesized
  source 1..20: mol_type = other DNA
cccagaaatgggttgcctgg

SEQ ID NO: 20091 - DNA, 20 bp, synthetic construct
  misc_feature 1..20: note = chemically synthesized
  source 1..20: mol_type = other DNA
ccagaaatgggttgcctggt

SEQ ID NO: 20092 - DNA, 20 bp, synthetic construct
  misc_feature 1..20: note = chemically synthesized
  source 1..20: mol_type = other DNA
cagaaatgggttgcctggta

SEQ ID NO: 20093 - DNA, 20 bp, synthetic construct
  misc_feature 1..20: note = chemically synthesized
  source 1..20: mol_type = other DNA
gggttgcctggtagggctca

SEQ ID NO: 20094 - DNA, 20 bp, synthetic construct
  misc_feature 1..20: note = chemically synthesized
  source 1..20: mol_type = other DNA
gcctggtagggctcatggct

SEQ ID NO: 20095 - DNA, 20 bp, synthetic construct
  misc_feature 1..20: note = chemically synthesized
  source 1..20: mol_type = other DNA
gctcagcactgcgatcccac

SEQ ID NO: 20096 - DNA, 20 bp, synthetic construct
  misc_feature 1..20: note = chemically synthesized
  source 1..20: mol_type = other DNA
cagcactgcgatcccaccag

SEQ ID NO: 20097 - DNA, 20 bp, synthetic construct
  misc_feature 1..20: note = chemically synthesized
  source 1..20: mol_type = other DNA
actgcgatcccaccagtggc

SEQ ID NO: 20098 - DNA, 20 bp, synthetic construct
  misc_feature 1..20: note = chemically synthesized
  source 1..20: mol_type = other DNA
ctgcgatcccaccagtggcc

SEQ ID NO: 20099 - DNA, 20 bp, synthetic construct
  misc_feature 1..20: note = chemically synthesized
  source 1..20: mol_type = other DNA
tgcgatcccaccagtggccg

SEQ ID NO: 20100 - DNA, 20 bp, synthetic construct
  misc_feature 1..20: note = chemically synthesized
  source 1..20: mol_type = other DNA
ccagtggccggggtgttcct

SEQ ID NO: 20101 - DNA, 20 bp, synthetic construct
  misc_feature 1..20: note = chemically synthesized
  source 1..20: mol_type = other DNA
cggggtgttccttagccttc

SEQ ID NO: 20102 - DNA, 20 bp, synthetic construct
  misc_feature 1..20: note = chemically synthesized
  source 1..20: mol_type = other DNA
tgttccttagccttctagtt

SEQ ID NO: 20103 - DNA, 20 bp, synthetic construct
  misc_feature 1..20: note = chemically synthesized
  source 1..20: mol_type = other DNA
ttagccttctagttcagttg

SEQ ID NO: 20104 - DNA, 20 bp, synthetic construct
  misc_feature 1..20: note = chemically synthesized
  source 1..20: mol_type = other DNA
tagttcagttgtggcccttc

SEQ ID NO: 20105 - DNA, 20 bp, synthetic construct
  misc_feature 1..20: note = chemically synthesized
  source 1..20: mol_type = other DNA
agttcagttgtggcccttct

SEQ ID NO: 20106 - DNA, 20 bp, synthetic construct
  misc_feature 1..20: note = chemically synthesized
  source 1..20: mol_type = other DNA
ttctgggcttcctttgctac

SEQ ID NO: 20107 - DNA, 20 bp, synthetic construct
  misc_feature 1..20: note = chemically synthesized
  source 1..20: mol_type = other DNA
tgctaccagtttccaccaca

SEQ ID NO: 20108 - DNA, 20 bp, synthetic construct
  misc_feature 1..20: note = chemically synthesized
  source 1..20: mol_type = other DNA
accagtttccaccacatggc

SEQ ID NO: 20109 - DNA, 20 bp, synthetic construct
  misc_feature 1..20: note = chemically synthesized
  source 1..20: mol_type = other DNA
cagtttccaccacatggctg

SEQ ID NO: 20110 - DNA, 20 bp, synthetic construct
  misc_feature 1..20: note = chemically synthesized
  source 1..20: mol_type = other DNA
agtttccaccacatggctgg

SEQ ID NO: 20111 - DNA, 20 bp, synthetic construct
  misc_feature 1..20: note = chemically synthesized
  source 1..20: mol_type = other DNA
ttccaccacatggctggagg

SEQ ID NO: 20112 - DNA, 20 bp, synthetic construct
  misc_feature 1..20: note = chemically synthesized
  source 1..20: mol_type = other DNA
ccacatggctggaggtagcc

SEQ ID NO: 20113 - DNA, 20 bp, synthetic construct
  misc_feature 1..20: note = chemically synthesized
  source 1..20: mol_type = other DNA
tggctggaggtagcccagcc

SEQ ID NO: 20114 - DNA, 20 bp, synthetic construct
  misc_feature 1..20: note = chemically synthesized
  source 1..20: mol_type = other DNA
ctggaggtagcccagcctgg

SEQ ID NO: 20115 - DNA, 20 bp, synthetic construct
  misc_feature 1..20: note = chemically synthesized
  source 1..20: mol_type = other DNA
agcccagcctggaagcctct

SEQ ID NO: 20116 - DNA, 20 bp, synthetic construct
  misc_feature 1..20: note = chemically synthesized
  source 1..20: mol_type = other DNA
cccagcctggaagcctctca

SEQ ID NO: 20117 - DNA, 20 bp, synthetic construct
  misc_feature 1..20: note = chemically synthesized
  source 1..20: mol_type = other DNA
ctggaagcctctcagagctc

SEQ ID NO: 20118 - DNA, 20 bp, synthetic construct
  misc_feature 1..20: note = chemically synthesized
  source 1..20: mol_type = other DNA
agcctctcagagctccagcc

SEQ ID NO: 20119 - DNA, 20 bp, synthetic construct
  misc_feature 1..20: note = chemically synthesized
  source 1..20: mol_type = other DNA
ctctcagagctccagcctgg

SEQ ID NO: 20120 - DNA, 20 bp, synthetic construct
  misc_feature 1..20: note = chemically synthesized
  source 1..20: mol_type = other DNA
gctccagcctggaagcctct

SEQ ID NO: 20121 - DNA, 20 bp, synthetic construct
  misc_feature 1..20: note = chemically synthesized
  source 1..20: mol_type = other DNA
tccagcctggaagcctctca

SEQ ID NO: 20122 - DNA, 20 bp, synthetic construct
  misc_feature 1..20: note = chemically synthesized
  source 1..20: mol_type = other DNA
cagcctggaagcctctcaga

SEQ ID NO: 20123 - DNA, 20 bp, synthetic construct
  misc_feature 1..20: note = chemically synthesized
  source 1..20: mol_type = other DNA
gaagcctctcagagagtgct

SEQ ID NO: 20124 - DNA, 20 bp, synthetic construct
  misc_feature 1..20: note = chemically synthesized
  source 1..20: mol_type = other DNA
agcctctcagagagtgcttg

SEQ ID NO: 20125 - DNA, 20 bp, synthetic construct
  misc_feature 1..20: note = chemically synthesized
  source 1..20: mol_type = other DNA
gagagtgcttggagcactgc

SEQ ID NO: 20126 - DNA, 20 bp, synthetic construct
  misc_feature 1..20: note = chemically synthesized
  source 1..20: mol_type = other DNA
ctgctagctgcacgtgctct

SEQ ID NO: 20127 - DNA, 20 bp, synthetic construct
  misc_feature 1..20: note = chemically synthesized
  source 1..20: mol_type = other DNA
tgctagctgcacgtgctctc

SEQ ID NO: 20128 - DNA, 20 bp, synthetic construct
  misc_feature 1..20: note = chemically synthesized
  source 1..20: mol_type = other DNA
agctgcacgtgctctcagga

SEQ ID NO: 20129 - DNA, 20 bp, synthetic construct
  misc_feature 1..20: note = chemically synthesized
  source 1..20: mol_type = other DNA
gtgctctcaggaaagtccac

SEQ ID NO: 20130 - DNA, 20 bp, synthetic construct
  misc_feature 1..20: note = chemically synthesized
  source 1..20: mol_type = other DNA
tgctctcaggaaagtccaca

SEQ ID NO: 20131 - DNA, 20 bp, synthetic construct
  misc_feature 1..20: note = chemically synthesized
  source 1..20: mol_type = other DNA
ctctcaggaaagtccacaag

SEQ ID NO: 20132 - DNA, 20 bp, synthetic construct
  misc_feature 1..20: note = chemically synthesized
  source 1..20: mol_type = other DNA
caggaaagtccacaaggaga

SEQ ID NO: 20133 - DNA, 20 bp, synthetic construct
  misc_feature 1..20: note = chemically synthesized
  source 1..20: mol_type = other DNA
aaagtccacaaggagatggc

SEQ ID NO: 20134 - DNA, 20 bp, synthetic construct
  misc_feature 1..20: note = chemically synthesized
  source 1..20: mol_type = other DNA
ccacaaggagatggctggtg

SEQ ID NO: 20135 - DNA, 20 bp, synthetic construct
  misc_feature 1..20: note = chemically synthesized
  source 1..20: mol_type = other DNA
aggagatggctggtgtggct

SEQ ID NO: 20136 - DNA, 20 bp, synthetic construct
  misc_feature 1..20: note = chemically synthesized
  source 1..20: mol_type = other DNA
gagatggctggtgtggctca

SEQ ID NO: 20137 - DNA, 20 bp, synthetic construct
  misc_feature 1..20: note = chemically synthesized
  source 1..20: mol_type = other DNA
agagtccttgtgtgctgcct

SEQ ID NO: 20138 - DNA, 20 bp, synthetic construct
  misc_feature 1..20: note = chemically synthesized
  source 1..20: mol_type = other DNA
tgtgctgcctcagcccatgc

SEQ ID NO: 20139 - DNA, 20 bp, synthetic construct
  misc_feature 1..20: note = chemically synthesized
  source 1..20: mol_type = other DNA
gtgctgcctcagcccatgcc

SEQ ID NO: 20140 - DNA, 20 bp, synthetic construct
  misc_feature 1..20: note = chemically synthesized
  source 1..20: mol_type = other DNA
agcccatgccaggccacctg

SEQ ID NO: 20141 - DNA, 20 bp, synthetic construct
  misc_feature 1..20: note = chemically synthesized
  source 1..20: mol_type = other DNA
acctgtggctgtctgccctc

SEQ ID NO: 20142 - DNA, 20 bp, synthetic construct
  misc_feature 1..20: note = chemically synthesized
  source 1..20: mol_type = other DNA
cctcaagtctgtccttctct

SEQ ID NO: 20143 - DNA, 20 bp, synthetic construct
  misc_feature 1..20: note = chemically synthesized
  source 1..20: mol_type = other DNA
ctcaagtctgtccttctctg

SEQ ID NO: 20144 - DNA, 20 bp, synthetic construct
  misc_feature 1..20: note = chemically synthesized
  source 1..20: mol_type = other DNA
tctgtccttctctgaggatt

SEQ ID NO: 20145 - DNA, 20 bp, synthetic construct
  misc_feature 1..20: note = chemically synthesized
  source 1..20: mol_type = other DNA
ctgtccttctctgaggattt

SEQ ID NO: 20146 - DNA, 20 bp, synthetic construct
  misc_feature 1..20: note = chemically synthesized
  source 1..20: mol_type = other DNA
aggatttaggactgtgaacc

SEQ ID NO: 20147 - DNA, 20 bp, synthetic construct
  misc_feature 1..20: note = chemically synthesized
  source 1..20: mol_type = other DNA
gatttaggactgtgaaccta

SEQ ID NO: 20148 - DNA, 20 bp, synthetic construct
  misc_feature 1..20: note = chemically synthesized
  source 1..20: mol_type = other DNA
ctgtgaacctagagaattca

SEQ ID NO: 20149 - DNA, 20 bp, synthetic construct
  misc_feature 1..20: note = chemically synthesized
  source 1..20: mol_type = other DNA
tgaacctagagaattcaaag

SEQ ID NO: 20150 - DNA, 20 bp, synthetic construct
  misc_feature 1..20: note = chemically synthesized
  source 1..20: mol_type = other DNA
acctagagaattcaaagtag

SEQ ID NO: 20151 - DNA, 20 bp, synthetic construct
  misc_feature 1..20: note = chemically synthesized
  source 1..20: mol_type = other DNA
agaattcaaagtagtggaac

SEQ ID NO: 20152 - DNA, 20 bp, synthetic construct
  misc_feature 1..20: note = chemically synthesized
  source 1..20: mol_type = other DNA
aaagtagtggaactagaatc

SEQ ID NO: 20153 - DNA, 20 bp, synthetic construct
  misc_feature 1..20: note = chemically synthesized
  source 1..20: mol_type = other DNA
aagtagtggaactagaatcc

SEQ ID NO: 20154 - DNA, 20 bp, synthetic construct
  misc_feature 1..20: note = chemically synthesized
  source 1..20: mol_type = other DNA
atccaggtctcgactcaatc

SEQ ID NO: 20155 - DNA, 20 bp, synthetic construct
  misc_feature 1..20: note = chemically synthesized
  source 1..20: mol_type = other DNA
tccaggtctcgactcaatcc

SEQ ID NO: 20156 - DNA, 20 bp, synthetic construct
  misc_feature 1..20: note = chemically synthesized
  source 1..20: mol_type = other DNA
ccaggtctcgactcaatcca

SEQ ID NO: 20157 - DNA, 20 bp, synthetic construct
  misc_feature 1..20: note = chemically synthesized
  source 1..20: mol_type = other DNA
aggtctcgactcaatccagg

SEQ ID NO: 20158 - DNA, 20 bp, synthetic construct
  misc_feature 1..20: note = chemically synthesized
  source 1..20: mol_type = other DNA
cagggagttttgctcaccac

SEQ ID NO: 20159 - DNA, 20 bp, synthetic construct
  misc_feature 1..20: note = chemically synthesized
  source 1..20: mol_type = other DNA
gagttttgctcaccacaagc

SEQ ID NO: 20160 - DNA, 20 bp, synthetic construct
  misc_feature 1..20: note = chemically synthesized
  source 1..20: mol_type = other DNA
agttttgctcaccacaagcc

SEQ ID NO: 20161 - DNA, 20 bp, synthetic construct
  misc_feature 1..20: note = chemically synthesized
  source 1..20: mol_type = other DNA
tgctcaccacaagccaggaa

SEQ ID NO: 20162 - DNA, 20 bp, synthetic construct
  misc_feature 1..20: note = chemically synthesized
  source 1..20: mol_type = other DNA
ccaggaacagcttctcttca

SEQ ID NO: 20163 - DNA, 20 bp, synthetic construct
  misc_feature 1..20: note = chemically synthesized
  source 1..20: mol_type = other DNA
aggaacagcttctcttcatg

SEQ ID NO: 20164 - DNA, 20 bp, synthetic construct
  misc_feature 1..20: note = chemically synthesized
  source 1..20: mol_type = other DNA
ggaacagcttctcttcatgg

SEQ ID NO: 20165 - DNA, 20 bp, synthetic construct
  misc_feature 1..20: note = chemically synthesized
  source 1..20: mol_type = other DNA
tcttcatggaggtgcctgtc

SEQ ID NO: 20166 - DNA, 20 bp, synthetic construct
  misc_feature 1..20: note = chemically synthesized
  source 1..20: mol_type = other DNA
tcatggaggtgcctgtctgg

SEQ ID NO: 20167 - DNA, 20 bp, synthetic construct
  misc_feature 1..20: note = chemically synthesized
  source 1..20: mol_type = other DNA
catggaggtgcctgtctgga

SEQ ID NO: 20168 - DNA, 20 bp, synthetic construct
  misc_feature 1..20: note = chemically synthesized
  source 1..20: mol_type = other DNA
ggaggtgcctgtctggaagg

SEQ ID NO: 20169 - DNA, 20 bp, synthetic construct
  misc_feature 1..20: note = chemically synthesized
  source 1..20: mol_type = other DNA
aggtgcctgtctggaaggca

SEQ ID NO: 20170 - DNA, 20 bp, synthetic construct
  misc_feature 1..20: note = chemically synthesized
  source 1..20: mol_type = other DNA
tctggaaggcagagaatctc

SEQ ID NO: 20171 - DNA, 20 bp, synthetic construct
  misc_feature 1..20: note = chemically synthesized
  source 1..20: mol_type = other DNA
cagagaatctctggcttgtt

SEQ ID NO: 20172 - DNA, 20 bp, synthetic construct
  misc_feature 1..20: note = chemically synthesized
  source 1..20: mol_type = other DNA
agaatctctggcttgttgag

SEQ ID NO: 20173 - DNA, 20 bp, synthetic construct
  misc_feature 1..20: note = chemically synthesized
  source 1..20: mol_type = other DNA
aatctctggcttgttgagaa

SEQ ID NO: 20174 - DNA, 20 bp, synthetic construct
  misc_feature 1..20: note = chemically synthesized
  source 1..20: mol_type = other DNA
tctctggcttgttgagaaga

SEQ ID NO: 20175 - DNA, 20 bp, synthetic construct
  misc_feature 1..20: note = chemically synthesized
  source 1..20: mol_type = other DNA
tctggcttgttgagaagaga

SEQ ID NO: 20176 - DNA, 20 bp, synthetic construct
  misc_feature 1..20: note = chemically synthesized
  source 1..20: mol_type = other DNA
agaagagagagtctgccctt

SEQ ID NO: 20177 - DNA, 20 bp, synthetic construct
  misc_feature 1..20: note = chemically synthesized
  source 1..20: mol_type = other DNA
gagtctgcccttcagactgc

SEQ ID NO: 20178 - DNA, 20 bp, synthetic construct
  misc_feature 1..20: note = chemically synthesized
  source 1..20: mol_type = other DNA
agtctgcccttcagactgca

SEQ ID NO: 20179 - DNA, 20 bp, synthetic construct
  misc_feature 1..20: note = chemically synthesized
  source 1..20: mol_type = other DNA
actgcaaggtgttcactgca

SEQ ID NO: 20180 - DNA, 20 bp, synthetic construct
  misc_feature 1..20: note = chemically synthesized
  source 1..20: mol_type = other DNA
ctgcaaggtgttcactgcat

SEQ ID NO: 20181 - DNA, 20 bp, synthetic construct
  misc_feature 1..20: note = chemically synthesized
  source 1..20: mol_type = other DNA
tcactgcataggacccttcg

SEQ ID NO: 20182 - DNA, 20 bp, synthetic construct
  misc_feature 1..20: note = chemically synthesized
  source 1..20: mol_type = other DNA
cactgcataggacccttcgt

SEQ ID NO: 20183 - DNA, 20 bp, synthetic construct
  misc_feature 1..20: note = chemically synthesized
  source 1..20: mol_type = other DNA
acccttcgtaggtgctgacc

SEQ ID NO: 20184 - DNA, 20 bp, synthetic construct
  misc_feature 1..20: note = chemically synthesized
  source 1..20: mol_type = other DNA
ggtgctgacccagctgtgcc

SEQ ID NO: 20185 - DNA, 20 bp, synthetic construct
  misc_feature 1..20: note = chemically synthesized
  source 1..20: mol_type = other DNA
gacccagctgtgcccagtgc

SEQ ID NO: 20186 - DNA, 20 bp, synthetic construct
  misc_feature 1..20: note = chemically synthesized
  source 1..20: mol_type = other DNA
cccagctgtgcccagtgcta

SEQ ID NO: 20187 - DNA, 20 bp, synthetic construct
  misc_feature 1..20: note = chemically synthesized
  source 1..20: mol_type = other DNA
gctgtgcccagtgctagagc

SEQ ID NO: 20188 - DNA, 20 bp, synthetic construct
  misc_feature 1..20: note = chemically synthesized
  source 1..20: mol_type = other DNA
ctgtgcccagtgctagagct

SEQ ID NO: 20189 - DNA, 20 bp, synthetic construct
  misc_feature 1..20: note = chemically synthesized
  source 1..20: mol_type = other DNA
ccagtgctagagctaggact

SEQ ID NO: 20190 - DNA, 20 bp, synthetic construct
  misc_feature 1..20: note = chemically synthesized
  source 1..20: mol_type = other DNA
aggactcagttctattttcc

SEQ ID NO: 20191 - DNA, 20 bp, synthetic construct
  misc_feature 1..20: note = chemically synthesized
  source 1..20: mol_type = other DNA
gactcagttctattttccca

SEQ ID NO: 20192 - DNA, 20 bp, synthetic construct
  misc_feature 1..20: note = chemically synthesized
  source 1..20: mol_type = other DNA
ctcagttctattttcccaga

SEQ ID NO: 20193 - DNA, 20 bp, synthetic construct
  misc_feature 1..20: note = chemically synthesized
  source 1..20: mol_type = other DNA
agttctattttcccagagag

SEQ ID NO: 20194 - DNA, 20 bp, synthetic construct
  misc_feature 1..20: note = chemically synthesized
  source 1..20: mol_type = other DNA
tttcccagagagtggtgtga

SEQ ID NO: 20195 - DNA, 20 bp, synthetic construct
  misc_feature 1..20: note = chemically synthesized
  source 1..20: mol_type = other DNA
ttcccagagagtggtgtgat

SEQ ID NO: 20196 - DNA, 20 bp, synthetic construct
  misc_feature 1..20: note = chemically synthesized
  source 1..20: mol_type = other DNA
cccagagagtggtgtgatgg

SEQ ID NO: 20197 - DNA, 20 bp, synthetic construct
  misc_feature 1..20: note = chemically synthesized
  source 1..20: mol_type = other DNA
ccagagagtggtgtgatggg

SEQ ID NO: 20198 - DNA, 20 bp, synthetic construct
  misc_feature 1..20: note = chemically synthesized
  source 1..20: mol_type = other DNA
gctatttctttttctttttt

SEQ ID NO: 20199 - DNA, 20 bp, synthetic construct
  misc_feature 1..20: note = chemically synthesized
  source 1..20: mol_type = other DNA
tttcttttttcagtcctgat

SEQ ID NO: 20200 - DNA, 20 bp, synthetic construct
  misc_feature 1..20: note = chemically synthesized
  source 1..20: mol_type = other DNA
ttcttttttcagtcctgatc

SEQ ID NO: 20201 - DNA, 20 bp, synthetic construct
  misc_feature 1..20: note = chemically synthesized
  source 1..20: mol_type = other DNA
tcttttttcagtcctgatca

SEQ ID NO: 20202 - DNA, 20 bp, synthetic construct
  misc_feature 1..20: note = chemically synthesized
  source 1..20: mol_type = other DNA
tttcagtcctgatcagggat

SEQ ID NO: 20203 - DNA, 20 bp, synthetic construct
  misc_feature 1..20: note = chemically synthesized
  source 1..20: mol_type = other DNA
cagggatgagtccgtgctgt

SEQ ID NO: 20204 - DNA, 20 bp, synthetic construct
  misc_feature 1..20: note = chemically synthesized
  source 1..20: mol_type = other DNA
agggatgagtccgtgctgtt

SEQ ID NO: 20205 - DNA, 20 bp, synthetic construct
  misc_feature 1..20: note = chemically synthesized
  source 1..20: mol_type = other DNA
ttgggtttattcatttactt

SEQ ID NO: 20206 - DNA, 20 bp, synthetic construct
  misc_feature 1..20: note = chemically synthesized
  source 1..20: mol_type = other DNA
attcatttactttagcgtgt

SEQ ID NO: 20207 - DNA, 20 bp, synthetic construct
  misc_feature 1..20: note = chemically synthesized
  source 1..20: mol_type = other DNA
catttactttagcgtgtgag

SEQ ID NO: 20208 - DNA, 20 bp, synthetic construct
  misc_feature 1..20: note = chemically synthesized
  source 1..20: mol_type = other DNA
atttactttagcgtgtgagt

SEQ ID NO: 20209 - DNA, 20 bp, synthetic construct
  misc_feature 1..20: note = chemically synthesized
  source 1..20: mol_type = other DNA
tttactttagcgtgtgagtg

SEQ ID NO: 20210 - DNA, 20 bp, synthetic construct
  misc_feature 1..20: note = chemically synthesized
  source 1..20: mol_type = other DNA
tactttagcgtgtgagtggg

SEQ ID NO: 20211 - DNA, 20 bp, synthetic construct
  misc_feature 1..20: note = chemically synthesized
  source 1..20: mol_type = other DNA
ttagcgtgtgagtggggaga

SEQ ID NO: 20212 - DNA, 20 bp, synthetic construct
  misc_feature 1..20: note = chemically synthesized
  source 1..20: mol_type = other DNA
gtgtgagtggggagatggat

SEQ ID NO: 20213 - DNA, 20 bp, synthetic construct
  misc_feature 1..20: note = chemically synthesized
  source 1..20: mol_type = other DNA
tgtgagtggggagatggatt

SEQ ID NO: 20214 - DNA, 20 bp, synthetic construct
  misc_feature 1..20: note = chemically synthesized
  source 1..20: mol_type = other DNA
gagtggggagatggattagg

SEQ ID NO: 20215 - DNA, 20 bp, synthetic construct
  misc_feature 1..20: note = chemically synthesized
  source 1..20: mol_type = other DNA
tggggagatggattaggcag

SEQ ID NO: 20216 - DNA, 20 bp, synthetic construct
  misc_feature 1..20: note = chemically synthesized
  source 1..20: mol_type = other DNA
ggggagatggattaggcagc

SEQ ID NO: 20217 - DNA, 20 bp, synthetic construct
  misc_feature 1..20: note = chemically synthesized
  source 1..20: mol_type = other DNA
tggattaggcagcaggccct

SEQ ID NO: 20218 - DNA, 20 bp, synthetic construct
  misc_feature 1..20: note = chemically synthesized
  source 1..20: mol_type = other DNA
attaggcagcaggcccttgg

SEQ ID NO: 20219 - DNA, 20 bp, synthetic construct
  misc_feature 1..20: note = chemically synthesized
  source 1..20: mol_type = other DNA
ttaggcagcaggcccttgga

SEQ ID NO: 20220 - DNA, 20 bp, synthetic construct
  misc_feature 1..20: note = chemically synthesized
  source 1..20: mol_type = other DNA
taggcagcaggcccttggaa

SEQ ID NO: 20221 - DNA, 20 bp, synthetic construct
  misc_feature 1..20: note = chemically synthesized
  source 1..20: mol_type = other DNA
gcagcaggcccttggaaggg

SEQ ID NO: 20222 - DNA, 20 bp, synthetic construct
  misc_feature 1..20: note = chemically synthesized
  source 1..20: mol_type = other DNA
cagcaggcccttggaagggt

SEQ ID NO: 20223 - DNA, 20 bp, synthetic construct
  misc_feature 1..20: note = chemically synthesized
  source 1..20: mol_type = other DNA
caggcccttggaagggtggg

SEQ ID NO: 20224 - DNA, 20 bp, synthetic construct
  misc_feature 1..20: note = chemically synthesized
  source 1..20: mol_type = other DNA
cttggaagggtgggaagatt

SEQ ID NO: 20225 - DNA, 20 bp, synthetic construct
  misc_feature 1..20: note = chemically synthesized
  source 1..20: mol_type = other DNA
ggaagggtgggaagattcag

SEQ ID NO: 20226 - DNA, 20 bp, synthetic construct
  misc_feature 1..20: note = chemically synthesized
  source 1..20: mol_type = other DNA
aagggtgggaagattcagaa

SEQ ID NO: 20227 - DNA, 20 bp, synthetic construct
  misc_feature 1..20: note = chemically synthesized
  source 1..20: mol_type = other DNA
gggtgggaagattcagaaga

SEQ ID NO: 20228 - DNA, 20 bp, synthetic construct
  misc_feature 1..20: note = chemically synthesized
  source 1..20: mol_type = other DNA
gtgggaagattcagaagaga

SEQ ID NO: 20229 - DNA, 20 bp, synthetic construct
  misc_feature 1..20: note = chemically synthesized
  source 1..20: mol_type = other DNA
tgggaagattcagaagagag

SEQ ID NO: 20230 - DNA, 20 bp, synthetic construct
  misc_feature 1..20: note = chemically synthesized
  source 1..20: mol_type = other DNA
gggaagattcagaagagaga

SEQ ID NO: 20231 - DNA, 20 bp, synthetic construct
  misc_feature 1..20: note = chemically synthesized
  source 1..20: mol_type = other DNA
aagattcagaagagagaggg

SEQ ID NO: 20232 - DNA, 20 bp, synthetic construct
  misc_feature 1..20: note = chemically synthesized
  source 1..20: mol_type = other DNA
agattcagaagagagagggc

SEQ ID NO: 20233 - DNA, 20 bp, synthetic construct
  misc_feature 1..20: note = chemically synthesized
  source 1..20: mol_type = other DNA
cagaagagagagggcaggac

SEQ ID NO: 20234 - DNA, 20 bp, synthetic construct
  misc_feature 1..20: note = chemically synthesized
  source 1..20: mol_type = other DNA
agaagagagagggcaggact

SEQ ID NO: 20235 - DNA, 20 bp, synthetic construct
  misc_feature 1..20: note = chemically synthesized
  source 1..20: mol_type = other DNA
agagagagggcaggactggg

SEQ ID NO: 20236 - DNA, 20 bp, synthetic construct
  misc_feature 1..20: note = chemically synthesized
  source 1..20: mol_type = other DNA
agggcaggactgggaagatc

SEQ ID NO: 20237 - DNA, 20 bp, synthetic construct
  misc_feature 1..20: note = chemically synthesized
  source 1..20: mol_type = other DNA
caggactgggaagatccaga

SEQ ID NO: 20238 - DNA, 20 bp, synthetic construct
  misc_feature 1..20: note = chemically synthesized
  source 1..20: mol_type = other DNA
aggactgggaagatccagac

SEQ ID NO: 20239 - DNA, 20 bp, synthetic construct
  misc_feature 1..20: note = chemically synthesized
  source 1..20: mol_type = other DNA
gaagatccagacaggacatg

SEQ ID NO: 20240 - DNA, 20 bp, synthetic construct
  misc_feature 1..20: note = chemically synthesized
  source 1..20: mol_type = other DNA
acatgaagatttgctccaca

SEQ ID NO: 20241 - DNA, 20 bp, synthetic construct
  misc_feature 1..20: note = chemically synthesized
  source 1..20: mol_type = other DNA
atgaagatttgctccacaaa

SEQ ID NO: 20242 - DNA, 20 bp, synthetic construct
  misc_feature 1..20: note = chemically synthesized
  source 1..20: mol_type = other DNA
gaagatttgctccacaaaga

SEQ ID NO: 20243 - DNA, 20 bp, synthetic construct
  misc_feature 1..20: note = chemically synthesized
  source 1..20: mol_type = other DNA
gatttgctccacaaagagag

SEQ ID NO: 20244 - DNA, 20 bp, synthetic construct
  misc_feature 1..20: note = chemically synthesized
  source 1..20: mol_type = other DNA
ttgctccacaaagagagaag

SEQ ID NO: 20245 - DNA, 20 bp, synthetic construct
  misc_feature 1..20: note = chemically synthesized
  source 1..20: mol_type = other DNA
ctccacaaagagagaagcag

SEQ ID NO: 20246 - DNA, 20 bp, synthetic construct
  misc_feature 1..20: note = chemically synthesized
  source 1..20: mol_type = other DNA
tccacaaagagagaagcagc

SEQ ID NO: 20247 - DNA, 20 bp, synthetic construct
  misc_feature 1..20: note = chemically synthesized
  source 1..20: mol_type = other DNA
cacaaagagagaagcagcag

SEQ ID NO: 20248 - DNA, 20 bp, synthetic construct
  misc_feature 1..20: note = chemically synthesized
  source 1..20: mol_type = other DNA
gagagaagcagcaggagttc

SEQ ID NO: 20249 - DNA, 20 bp, synthetic construct
  misc_feature 1..20: note = chemically synthesized
  source 1..20: mol_type = other DNA
gaagcagcaggagttctggc

SEQ ID NO: 20250 - DNA, 20 bp, synthetic construct
  misc_feature 1..20: note = chemically synthesized
  source 1..20: mol_type = other DNA
agcagcaggagttctggcta

SEQ ID NO: 20251 - DNA, 20 bp, synthetic construct
  misc_feature 1..20: note = chemically synthesized
  source 1..20: mol_type = other DNA
gcagcaggagttctggctag

SEQ ID NO: 20252 - DNA, 20 bp, synthetic construct
  misc_feature 1..20: note = chemically synthesized
  source 1..20: mol_type = other DNA
cccaacacccacacctgcca

SEQ ID NO: 20253 - DNA, 20 bp, synthetic construct
  misc_feature 1..20: note = chemically synthesized
  source 1..20: mol_type = other DNA
ccaacacccacacctgccaa

SEQ ID NO: 20254 - DNA, 20 bp, synthetic construct
  misc_feature 1..20: note = chemically synthesized
  source 1..20: mol_type = other DNA
caacacccacacctgccaaa

SEQ ID NO: 20255 - DNA, 20 bp, synthetic construct
  misc_feature 1..20: note = chemically synthesized
  source 1..20: mol_type = other DNA
aacacccacacctgccaaag

SEQ ID NO: 20256 - DNA, 20 bp, synthetic construct
  misc_feature 1..20: note = chemically synthesized
  source 1..20: mol_type = other DNA
acctgccaaaggggttccca

SEQ ID NO: 20257 - DNA, 20 bp, synthetic construct
  misc_feature 1..20: note = chemically synthesized
  source 1..20: mol_type = other DNA
cctgccaaaggggttcccat

SEQ ID NO: 20258 - DNA, 20 bp, synthetic construct
  misc_feature 1..20: note = chemically synthesized
  source 1..20: mol_type = other DNA
ctgccaaaggggttcccatg

SEQ ID NO: 20259 - DNA, 20 bp, synthetic construct
  misc_feature 1..20: note = chemically synthesized
  source 1..20: mol_type = other DNA
ccaaaggggttcccatgggg

SEQ ID NO: 20260 - DNA, 20 bp, synthetic construct
  misc_feature 1..20: note = chemically synthesized
  source 1..20: mol_type = other DNA
aggggttcccatggggtggc

SEQ ID NO: 20261 - DNA, 20 bp, synthetic construct
  misc_feature 1..20: note = chemically synthesized
  source 1..20: mol_type = other DNA
tcccatggggtggctggctt

SEQ ID NO: 20262 - DNA, 20 bp, synthetic construct
  misc_feature 1..20: note = chemically synthesized
  source 1..20: mol_type = other DNA
cccatggggtggctggcttg

SEQ ID NO: 20263 - DNA, 20 bp, synthetic construct
  misc_feature 1..20: note = chemically synthesized
  source 1..20: mol_type = other DNA
ccatggggtggctggcttga

SEQ ID NO: 20264 - DNA, 20 bp, synthetic construct
  misc_feature 1..20: note = chemically synthesized
  source 1..20: mol_type = other DNA
catggggtggctggcttgag

SEQ ID NO: 20265 - DNA, 20 bp, synthetic construct
  misc_feature 1..20: note = chemically synthesized
  source 1..20: mol_type = other DNA
gtggctggcttgaggggatc

SEQ ID NO: 20266 - DNA, 20 bp, synthetic construct
  misc_feature 1..20: note = chemically synthesized
  source 1..20: mol_type = other DNA
tggctggcttgaggggatct

SEQ ID NO: 20267 - DNA, 20 bp, synthetic construct
  misc_feature 1..20: note = chemically synthesized
  source 1..20: mol_type = other DNA
gcttgaggggatctgggcgc

SEQ ID NO: 20268 - DNA, 20 bp, synthetic construct
  misc_feature 1..20: note = chemically synthesized
  source 1..20: mol_type = other DNA
ctgggcgctggtttctgctg

SEQ ID NO: 20269 - DNA, 20 bp, synthetic construct
  misc_feature 1..20: note = chemically synthesized
  source 1..20: mol_type = other DNA
gcgctggtttctgctgtgga

SEQ ID NO: 20270 - DNA, 20 bp, synthetic construct
  misc_feature 1..20: note = chemically synthesized
  source 1..20: mol_type = other DNA
tttctgctgtggacagcctc

SEQ ID NO: 20271 - DNA, 20 bp, synthetic construct
  misc_feature 1..20: note = chemically synthesized
  source 1..20: mol_type = other DNA
ctgctgtggacagcctcaag

SEQ ID NO: 20272 - DNA, 20 bp, synthetic construct
  misc_feature 1..20: note = chemically synthesized
  source 1..20: mol_type = other DNA
tgctgtggacagcctcaagt

SEQ ID NO: 20273 - DNA, 20 bp, synthetic construct
  misc_feature 1..20: note = chemically synthesized
  source 1..20: mol_type = other DNA
gctgtggacagcctcaagtg

SEQ ID NO: 20274 - DNA, 20 bp, synthetic construct
  misc_feature 1..20: note = chemically synthesized
  source 1..20: mol_type = other DNA
ggacagcctcaagtggggcg

SEQ ID NO: 20275 - DNA, 20 bp, synthetic construct
  misc_feature 1..20: note = chemically synthesized
  source 1..20: mol_type = other DNA
acagcctcaagtggggcgtg

SEQ ID NO: 20276 - DNA, 20 bp, synthetic construct
  misc_feature 1..20: note = chemically synthesized
  source 1..20: mol_type = other DNA
cagcctcaagtggggcgtgg

SEQ ID NO: 20277 - DNA, 20 bp, synthetic construct
  misc_feature 1..20: note = chemically synthesized
  source 1..20: mol_type = other DNA
cctcaagtggggcgtggagg

SEQ ID NO: 20278 - DNA, 20 bp, synthetic construct
  misc_feature 1..20: note = chemically synthesized
  source 1..20: mol_type = other DNA
gggcgtggaggcagcatctc

SEQ ID NO: 20279 - DNA, 20 bp, synthetic construct
  misc_feature 1..20: note = chemically synthesized
  source 1..20: mol_type = other DNA
cgtggaggcagcatctccag

SEQ ID NO: 20280 - DNA, 20 bp, synthetic construct
  misc_feature 1..20: note = chemically synthesized
  source 1..20: mol_type = other DNA
gcagcatctccagaagcacc

SEQ ID NO: 20281 - DNA, 20 bp, synthetic construct
  misc_feature 1..20: note = chemically synthesized
  source 1..20: mol_type = other DNA
gcatctccagaagcacccgg

SEQ ID NO: 20282 - DNA, 20 bp, synthetic construct
  misc_feature 1..20: note = chemically synthesized
  source 1..20: mol_type = other DNA
ctccagaagcacccggcaga

SEQ ID NO: 20283 - DNA, 20 bp, synthetic construct
  misc_feature 1..20: note = chemically synthesized
  source 1..20: mol_type = other DNA
gcacccggcagatggctcct

SEQ ID NO: 20284 - DNA, 20 bp, synthetic construct
  misc_feature 1..20: note = chemically synthesized
  source 1..20: mol_type = other DNA
cacccggcagatggctcctg

SEQ ID NO: 20285 - DNA, 20 bp, synthetic construct
  misc_feature 1..20: note = chemically synthesized
  source 1..20: mol_type = other DNA
acccggcagatggctcctga

SEQ ID NO: 20286 - DNA, 20 bp, synthetic construct
  misc_feature 1..20: note = chemically synthesized
  source 1..20: mol_type = other DNA
ccggcagatggctcctgagg

SEQ ID NO: 20287 - DNA, 20 bp, synthetic construct
  misc_feature 1..20: note = chemically synthesized
  source 1..20: mol_type = other DNA
gcagatggctcctgagggag

SEQ ID NO: 20288 - DNA, 20 bp, synthetic construct
  misc_feature 1..20: note = chemically synthesized
  source 1..20: mol_type = other DNA
cagatggctcctgagggagc

SEQ ID NO: 20289 - DNA, 20 bp, synthetic construct
  misc_feature 1..20: note = chemically synthesized
  source 1..20: mol_type = other DNA
agatggctcctgagggagca

SEQ ID NO: 20290 - DNA, 20 bp, synthetic construct
  misc_feature 1..20: note = chemically synthesized
  source 1..20: mol_type = other DNA
gagggagcagggactccttc

SEQ ID NO: 20291 - DNA, 20 bp, synthetic construct
  misc_feature 1..20: note = chemically synthesized
  source 1..20: mol_type = other DNA
actccttctagtgccactcc

SEQ ID NO: 20292 - DNA, 20 bp, synthetic construct
  misc_feature 1..20: note = chemically synthesized
  source 1..20: mol_type = other DNA
ctccttctagtgccactcct

SEQ ID NO: 20293 - DNA, 20 bp, synthetic construct
  misc_feature 1..20: note = chemically synthesized
  source 1..20: mol_type = other DNA
tcccctccttgtctcatatt

SEQ ID NO: 20294 - DNA, 20 bp, synthetic construct
  misc_feature 1..20: note = chemically synthesized
  source 1..20: mol_type = other DNA
ttgtctcatatttagcatct

SEQ ID NO: 20295 - DNA, 20 bp, synthetic construct
  misc_feature 1..20: note = chemically synthesized
  source 1..20: mol_type = other DNA
gtctcatatttagcatcttg

SEQ ID NO: 20296 - DNA, 20 bp, synthetic construct
  misc_feature 1..20: note = chemically synthesized
  source 1..20: mol_type = other DNA
ttagcatcttggagccgtgt

SEQ ID NO: 20297 - DNA, 20 bp, synthetic construct
  misc_feature 1..20: note = chemically synthesized
  source 1..20: mol_type = other DNA
tcttggagccgtgtcagctg

SEQ ID NO: 20298 - DNA, 20 bp, synthetic construct
  misc_feature 1..20: note = chemically synthesized
  source 1..20: mol_type = other DNA
ttggagccgtgtcagctgca

SEQ ID NO: 20299 - DNA, 20 bp, synthetic construct
  misc_feature 1..20: note = chemically synthesized
  source 1..20: mol_type = other DNA
gccgtgtcagctgcagagac

SEQ ID NO: 20300 - DNA, 20 bp, synthetic construct
  misc_feature 1..20: note = chemically synthesized
  source 1..20: mol_type = other DNA
cgtgtcagctgcagagactg

SEQ ID NO: 20301 - DNA, 20 bp, synthetic construct
  misc_feature 1..20: note = chemically synthesized
  source 1..20: mol_type = other DNA
cagctgcagagactggagtc

SEQ ID NO: 20302 - DNA, 20 bp, synthetic construct
  misc_feature 1..20: note = chemically synthesized
  source 1..20: mol_type = other DNA
agctgcagagactggagtcc

SEQ ID NO: 20303 - DNA, 20 bp, synthetic construct
  misc_feature 1..20: note = chemically synthesized
  source 1..20: mol_type = other DNA
gctgcagagactggagtccg

SEQ ID NO: 20304 - DNA, 20 bp, synthetic construct
  misc_feature 1..20: note = chemically synthesized
  source 1..20: mol_type = other DNA
gactggagtccggggcatga

SEQ ID NO: 20305 - DNA, 20 bp, synthetic construct
  misc_feature 1..20: note = chemically synthesized
  source 1..20: mol_type = other DNA
actggagtccggggcatgat

SEQ ID NO: 20306 - DNA, 20 bp, synthetic construct
  misc_feature 1..20: note = chemically synthesized
  source 1..20: mol_type = other DNA
ctggagtccggggcatgatg

SEQ ID NO: 20307 - DNA, 20 bp, synthetic construct
  misc_feature 1..20: note = chemically synthesized
  source 1..20: mol_type = other DNA
atggggatgtacctgaaacc

SEQ ID NO: 20308 - DNA, 20 bp, synthetic construct
  misc_feature 1..20: note = chemically synthesized
  source 1..20: mol_type = other DNA
ggatgtacctgaaacctagt

SEQ ID NO: 20309 - DNA, 20 bp, synthetic construct
  misc_feature 1..20: note = chemically synthesized
  source 1..20: mol_type = other DNA
atgtacctgaaacctagtga

SEQ ID NO: 20310 - DNA, 20 bp, synthetic construct
  misc_feature 1..20: note = chemically synthesized
  source 1..20: mol_type = other DNA
agtgagagtcatcctgactc

SEQ ID NO: 20311 - DNA, 20 bp, synthetic construct
  misc_feature 1..20: note = chemically synthesized
  source 1..20: mol_type = other DNA
gtgagagtcatcctgactct

SEQ ID NO: 20312 - DNA, 20 bp, synthetic construct
  misc_feature 1..20: note = chemically synthesized
  source 1..20: mol_type = other DNA
tgagagtcatcctgactctg

SEQ ID NO: 20313 - DNA, 20 bp, synthetic construct
  misc_feature 1..20: note = chemically synthesized
  source 1..20: mol_type = other DNA
gagtcatcctgactctgggg

SEQ ID NO: 20314 - DNA, 20 bp, synthetic construct
  misc_feature 1..20: note = chemically synthesized
  source 1..20: mol_type = other DNA
gtcatcctgactctggggaa

SEQ ID NO: 20315 - DNA, 20 bp, synthetic construct
  misc_feature 1..20: note = chemically synthesized
  source 1..20: mol_type = other DNA
ctctggggaagagccgctca

SEQ ID NO: 20316 - DNA, 20 bp, synthetic construct
  misc_feature 1..20: note = chemically synthesized
  source 1..20: mol_type = other DNA
gggaagagccgctcaaagat

SEQ ID NO: 20317 - DNA, 20 bp, synthetic construct
  misc_feature 1..20: note = chemically synthesized
  source 1..20: mol_type = other DNA
agagccgctcaaagatgaga

SEQ ID NO: 20318 - DNA, 20 bp, synthetic construct
  misc_feature 1..20: note = chemically synthesized
  source 1..20: mol_type = other DNA
gctcaaagatgagaaagata

SEQ ID NO: 20319 - DNA, 20 bp, synthetic construct
  misc_feature 1..20: note = chemically synthesized
  source 1..20: mol_type = other DNA
ttgccacccccaacccctca

SEQ ID NO: 20320 - DNA, 20 bp, synthetic construct
  misc_feature 1..20: note = chemically synthesized
  source 1..20: mol_type = other DNA
tgccacccccaacccctcac

SEQ ID NO: 20321 - DNA, 20 bp, synthetic construct
  misc_feature 1..20: note = chemically synthesized
  source 1..20: mol_type = other DNA
acccccaacccctcacaggc

SEQ ID NO: 20322 - DNA, 20 bp, synthetic construct
  misc_feature 1..20: note = chemically synthesized
  source 1..20: mol_type = other DNA
ctcacaggctagactatcca

SEQ ID NO: 20323 - DNA, 20 bp, synthetic construct
  misc_feature 1..20: note = chemically synthesized
  source 1..20: mol_type = other DNA
gctagactatccatggattt

SEQ ID NO: 20324 - DNA, 20 bp, synthetic construct
  misc_feature 1..20: note = chemically synthesized
  source 1..20: mol_type = other DNA
agactatccatggatttcag

SEQ ID NO: 20325 - DNA, 20 bp, synthetic construct
  misc_feature 1..20: note = chemically synthesized
  source 1..20: mol_type = other DNA
gactatccatggatttcagt

SEQ ID NO: 20326 - DNA, 20 bp, synthetic construct
  misc_feature 1..20: note = chemically synthesized
  source 1..20: mol_type = other DNA
actatccatggatttcagtg

SEQ ID NO: 20327 - DNA, 20 bp, synthetic construct
  misc_feature 1..20: note = chemically synthesized
  source 1..20: mol_type = other DNA
atccatggatttcagtgggg

SEQ ID NO: 20328 - DNA, 20 bp, synthetic construct
  misc_feature 1..20: note = chemically synthesized
  source 1..20: mol_type = other DNA
atggatttcagtggggtggt

SEQ ID NO: 20329 - DNA, 20 bp, synthetic construct
  misc_feature 1..20: note = chemically synthesized
  source 1..20: mol_type = other DNA
tccctgaacctctcctcaaa

SEQ ID NO: 20330 - DNA, 20 bp, synthetic construct
  misc_feature 1..20: note = chemically synthesized
  source 1..20: mol_type = other DNA
tcctcaaatggtgactgttc

SEQ ID NO: 20331 - DNA, 20 bp, synthetic construct
  misc_feature 1..20: note = chemically synthesized
  source 1..20: mol_type = other DNA
cctcaaatggtgactgttct

SEQ ID NO: 20332 - DNA, 20 bp, synthetic construct
  misc_feature 1..20: note = chemically synthesized
  source 1..20: mol_type = other DNA
ctcaaatggtgactgttctg

SEQ ID NO: 20333 - DNA, 20 bp, synthetic construct
  misc_feature 1..20: note = chemically synthesized
  source 1..20: mol_type = other DNA
tcaaatggtgactgttctgg

SEQ ID NO: 20334 - DNA, 20 bp, synthetic construct
  misc_feature 1..20: note = chemically synthesized
  source 1..20: mol_type = other DNA
ggtcctttctctgcctttct

SEQ ID NO: 20335 - DNA, 20 bp, synthetic construct
  misc_feature 1..20: note = chemically synthesized
  source 1..20: mol_type = other DNA
gtcctttctctgcctttctc

SEQ ID NO: 20336 - DNA, 20 bp, synthetic construct
  misc_feature 1..20: note = chemically synthesized
  source 1..20: mol_type = other DNA
tcctttctctgcctttctca

SEQ ID NO: 20337 - DNA, 20 bp, synthetic construct
  misc_feature 1..20: note = chemically synthesized
  source 1..20: mol_type = other DNA
cctttctctgcctttctcag

SEQ ID NO: 20338 - DNA, 20 bp, synthetic construct
  misc_feature 1..20: note = chemically synthesized
  source 1..20: mol_type = other DNA
ctttctctgcctttctcagg

SEQ ID NO: 20339 - DNA, 20 bp, synthetic construct
  misc_feature 1..20: note = chemically synthesized
  source 1..20: mol_type = other DNA
tgcctttctcagggggtaac

SEQ ID NO: 20340 - DNA, 20 bp, synthetic construct
  misc_feature 1..20: note = chemically synthesized
  source 1..20: mol_type = other DNA
cctttctcagggggtaacca

SEQ ID NO: 20341 - DNA, 20 bp, synthetic construct
  misc_feature 1..20: note = chemically synthesized
  source 1..20: mol_type = other DNA
ctttctcagggggtaaccag

SEQ ID NO: 20342 - DNA, 20 bp, synthetic construct
  misc_feature 1..20: note = chemically synthesized
  source 1..20: mol_type = other DNA
tctcagggggtaaccagagg

SEQ ID NO: 20343 - DNA, 20 bp, synthetic construct
  misc_feature 1..20: note = chemically synthesized
  source 1..20: mol_type = other DNA
cagggggtaaccagaggtgg

SEQ ID NO: 20344 - DNA, 20 bp, synthetic construct
  misc_feature 1..20: note = chemically synthesized
  source 1..20: mol_type = other DNA
ggtaaccagaggtggtggtg

SEQ ID NO: 20345 - DNA, 20 bp, synthetic construct
  misc_feature 1..20: note = chemically synthesized
  source 1..20: mol_type = other DNA
tgtggtccactgtgactcgt

SEQ ID NO: 20346 - DNA, 20 bp, synthetic construct
  misc_feature 1..20: note = chemically synthesized
  source 1..20: mol_type = other DNA
tgctctgtgtgttcattttt

SEQ ID NO: 20347 - DNA, 20 bp, synthetic construct
  misc_feature 1..20: note = chemically synthesized
  source 1..20: mol_type = other DNA
ttgagaaaatgttaatctct

SEQ ID NO: 20348 - DNA, 20 bp, synthetic construct
  misc_feature 1..20: note = chemically synthesized
  source 1..20: mol_type = other DNA
tgttaatctctgagacgtct

SEQ ID NO: 20349 - DNA, 20 bp, synthetic construct
  misc_feature 1..20: note = chemically synthesized
  source 1..20: mol_type = other DNA
ttaatctctgagacgtctaa

SEQ ID NO: 20350 - DNA, 20 bp, synthetic construct
  misc_feature 1..20: note = chemically synthesized
  source 1..20: mol_type = other DNA
taatctctgagacgtctaag

SEQ ID NO: 20351 - DNA, 20 bp, synthetic construct
  misc_feature 1..20: note = chemically synthesized
  source 1..20: mol_type = other DNA
ttctctgtgtctcctccaaa

SEQ ID NO: 20352 - DNA, 20 bp, synthetic construct
  misc_feature 1..20: note = chemically synthesized
  source 1..20: mol_type = other DNA
tcctccaaatggatgccatg

SEQ ID NO: 20353 - DNA, 20 bp, synthetic construct
  misc_feature 1..20: note = chemically synthesized
  source 1..20: mol_type = other DNA
cctccaaatggatgccatgt

SEQ ID NO: 20354 - DNA, 20 bp, synthetic construct
  misc_feature 1..20: note = chemically synthesized
  source 1..20: mol_type = other DNA
ccaaatggatgccatgtggg

SEQ ID NO: 20355 - DNA, 20 bp, synthetic construct
  misc_feature 1..20: note = chemically synthesized
  source 1..20: mol_type = other DNA
caaatggatgccatgtgggt

SEQ ID NO: 20356 - DNA, 20 bp, synthetic construct
  misc_feature 1..20: note = chemically synthesized
  source 1..20: mol_type = other DNA
ggatgccatgtgggtgggca

SEQ ID NO: 20357 - DNA, 20 bp, synthetic construct
  misc_feature 1..20: note = chemically synthesized
  source 1..20: mol_type = other DNA
tgccatgtgggtgggcaaag

SEQ ID NO: 20358 - DNA, 20 bp, synthetic construct
  misc_feature 1..20: note = chemically synthesized
  source 1..20: mol_type = other DNA
atgtgggtgggcaaagtggt

SEQ ID NO: 20359 - DNA, 20 bp, synthetic construct
  misc_feature 1..20: note = chemically synthesized
  source 1..20: mol_type = other DNA
tgtgggtgggcaaagtggtt

SEQ ID NO: 20360 - DNA, 20 bp, synthetic construct
  misc_feature 1..20: note = chemically synthesized
  source 1..20: mol_type = other DNA
ttgggtttattcatttactt

SEQ ID NO: 20361 - DNA, 20 bp, synthetic construct
  misc_feature 1..20: note = chemically synthesized
  source 1..20: mol_type = other DNA
tgggtttattcatttacttt

SEQ ID NO: 20362 - DNA, 20 bp, synthetic construct
  misc_feature 1..20: note = chemically synthesized
  source 1..20: mol_type = other DNA
tttactttaggtgtgtattg

SEQ ID NO: 20363 - DNA, 20 bp, synthetic construct
  misc_feature 1..20: note = chemically synthesized
  source 1..20: mol_type = other DNA
cttgttctcctatccgtcat

SEQ ID NO: 20364 - DNA, 20 bp, synthetic construct
  misc_feature 1..20: note = chemically synthesized
  source 1..20: mol_type = other DNA
tgttctcctatccgtcatca

SEQ ID NO: 20365 - DNA, 20 bp, synthetic construct
  misc_feature 1..20: note = chemically synthesized
  source 1..20: mol_type = other DNA
gttctcctatccgtcatcag

SEQ ID NO: 20366 - DNA, 20 bp, synthetic construct
  misc_feature 1..20: note = chemically synthesized
  source 1..20: mol_type = other DNA
atcagaggtgactcatactt

SEQ ID NO: 20367 - DNA, 20 bp, synthetic construct
  misc_feature 1..20: note = chemically synthesized
  source 1..20: mol_type = other DNA
actcatacttgagacactaa

SEQ ID NO: 20368 - DNA, 20 bp, synthetic construct
  misc_feature 1..20: note = chemically synthesized
  source 1..20: mol_type = other DNA
tcatacttgagacactaaaa

SEQ ID NO: 20369 - DNA, 20 bp, synthetic construct
  misc_feature 1..20: note = chemically synthesized
  source 1..20: mol_type = other DNA
agagaataaactgtcttcat

SEQ ID NO: 20370 - DNA, 20 bp, synthetic construct
  misc_feature 1..20: note = chemically synthesized
  source 1..20: mol_type = other DNA
gagaataaactgtcttcata

SEQ ID NO: 20371 - DNA, 20 bp, synthetic construct
  misc_feature 1..20: note = chemically synthesized
  source 1..20: mol_type = other DNA
cataaggctgtgaacgtcgc

SEQ ID NO: 20372 - DNA, 20 bp, synthetic construct
  misc_feature 1..20: note = chemically synthesized
  source 1..20: mol_type = other DNA
ccagattatgaaccaacttc

SEQ ID NO: 20373 - DNA, 20 bp, synthetic construct
  misc_feature 1..20: note = chemically synthesized
  source 1..20: mol_type = other DNA
tgaaccaacttcaagtaacg

SEQ ID NO: 20374 - DNA, 20 bp, synthetic construct
  misc_feature 1..20: note = chemically synthesized
  source 1..20: mol_type = other DNA
gaaccaacttcaagtaacgt

SEQ ID NO: 20375 - DNA, 20 bp, synthetic construct
  misc_feature 1..20: note = chemically synthesized
  source 1..20: mol_type = other DNA
aaccaacttcaagtaacgta

SEQ ID NO: 20376 - DNA, 20 bp, synthetic construct
  misc_feature 1..20: note = chemically synthesized
  source 1..20: mol_type = other DNA
ttattgaaaccatctccaat

SEQ ID NO: 20377 - DNA, 20 bp, synthetic construct
  misc_feature 1..20: note = chemically synthesized
  source 1..20: mol_type = other DNA
ctccaattagatatgcaaaa

SEQ ID NO: 20378 - DNA, 20 bp, synthetic construct
  misc_feature 1..20: note = chemically synthesized
  source 1..20: mol_type = other DNA
ccaattagatatgcaaaatg

SEQ ID NO: 20379 - DNA, 20 bp, synthetic construct
  misc_feature 1..20: note = chemically synthesized
  source 1..20: mol_type = other DNA
gatatgcaaaatggagttgc

SEQ ID NO: 20380 - DNA, 20 bp, synthetic construct
  misc_feature 1..20: note = chemically synthesized
  source 1..20: mol_type = other DNA
atatgcaaaatggagttgct

SEQ ID NO: 20381 - DNA, 20 bp, synthetic construct
  misc_feature 1..20: note = chemically synthesized
  source 1..20: mol_type = other DNA
tatgcaaaatggagttgctg

SEQ ID NO: 20382 - DNA, 20 bp, synthetic construct
  misc_feature 1..20: note = chemically synthesized
  source 1..20: mol_type = other DNA
atgcaaaatggagttgctgg

SEQ ID NO: 20383 - DNA, 20 bp, synthetic construct
  misc_feature 1..20: note = chemically synthesized
  source 1..20: mol_type = other DNA
aatggagttgctgggggctt

SEQ ID NO: 20384 - DNA, 20 bp, synthetic construct
  misc_feature 1..20: note = chemically synthesized
  source 1..20: mol_type = other DNA
ctgggggcttcagttttctt

SEQ ID NO: 20385 - DNA, 20 bp, synthetic construct
  misc_feature 1..20: note = chemically synthesized
  source 1..20: mol_type = other DNA
tttctttagaccaaataatt

SEQ ID NO: 20386 - DNA, 20 bp, synthetic construct
  misc_feature 1..20: note = chemically synthesized
  source 1..20: mol_type = other DNA
tctttagaccaaataattta

SEQ ID NO: 20387 - DNA, 20 bp, synthetic construct
  misc_feature 1..20: note = chemically synthesized
  source 1..20: mol_type = other DNA
agaccaaataatttagagct

SEQ ID NO: 20388 - DNA, 20 bp, synthetic construct
  misc_feature 1..20: note = chemically synthesized
  source 1..20: mol_type = other DNA
accaaataatttagagctga

SEQ ID NO: 20389 - DNA, 20 bp, synthetic construct
  misc_feature 1..20: note = chemically synthesized
  source 1..20: mol_type = other DNA
ccaaataatttagagctgag

SEQ ID NO: 20390 - DNA, 20 bp, synthetic construct
  misc_feature 1..20: note = chemically synthesized
  source 1..20: mol_type = other DNA
aaataatttagagctgagag

SEQ ID NO: 20391 - DNA, 20 bp, synthetic construct
  misc_feature 1..20: note = chemically synthesized
  source 1..20: mol_type = other DNA
ataatttagagctgagagga

SEQ ID NO: 20392 - DNA, 20 bp, synthetic construct
  misc_feature 1..20: note = chemically synthesized
  source 1..20: mol_type = other DNA
taatttagagctgagaggag

SEQ ID NO: 20393 - DNA, 20 bp, synthetic construct
  misc_feature 1..20: note = chemically synthesized
  source 1..20: mol_type = other DNA
tttagagctgagaggagagg

SEQ ID NO: 20394 - DNA, 20 bp, synthetic construct
  misc_feature 1..20: note = chemically synthesized
  source 1..20: mol_type = other DNA
gaggagaggcagataccatc

SEQ ID NO: 20395 - DNA, 20 bp, synthetic construct
  misc_feature 1..20: note = chemically synthesized
  source 1..20: mol_type = other DNA
tagtctcactttttacaatt

SEQ ID NO: 20396 - DNA, 20 bp, synthetic construct
  misc_feature 1..20: note = chemically synthesized
  source 1..20: mol_type = other DNA
cactttttacaatttagcat

SEQ ID NO: 20397 - DNA, 20 bp, synthetic construct
  misc_feature 1..20: note = chemically synthesized
  source 1..20: mol_type = other DNA
aatttagcattggatttgtt

SEQ ID NO: 20398 - DNA, 20 bp, synthetic construct
  misc_feature 1..20: note = chemically synthesized
  source 1..20: mol_type = other DNA
tgttgagcatgtactctctg

SEQ ID NO: 20399 - DNA, 20 bp, synthetic construct
  misc_feature 1..20: note = chemically synthesized
  source 1..20: mol_type = other DNA
ttgagcatgtactctctgca

SEQ ID NO: 20400 - DNA, 20 bp, synthetic construct
  misc_feature 1..20: note = chemically synthesized
  source 1..20: mol_type = other DNA
ctctctgcagagcattgtga

SEQ ID NO: 20401 - DNA, 20 bp, synthetic construct
  misc_feature 1..20: note = chemically synthesized
  source 1..20: mol_type = other DNA
tctctgcagagcattgtgat

SEQ ID NO: 20402 - DNA, 20 bp, synthetic construct
  misc_feature 1..20: note = chemically synthesized
  source 1..20: mol_type = other DNA
cagagcattgtgataggttc

SEQ ID NO: 20403 - DNA, 20 bp, synthetic construct
  misc_feature 1..20: note = chemically synthesized
  source 1..20: mol_type = other DNA
agagcattgtgataggttct

SEQ ID NO: 20404 - DNA, 20 bp, synthetic construct
  misc_feature 1..20: note = chemically synthesized
  source 1..20: mol_type = other DNA
cattgtgataggttctgggt

SEQ ID NO: 20405 - DNA, 20 bp, synthetic construct
  misc_feature 1..20: note = chemically synthesized
  source 1..20: mol_type = other DNA
attgtgataggttctgggtt

SEQ ID NO: 20406 - DNA, 20 bp, synthetic construct
  misc_feature 1..20: note = chemically synthesized
  source 1..20: mol_type = other DNA
tgtgataggttctgggttgg

SEQ ID NO: 20407 - DNA, 20 bp, synthetic construct
  misc_feature 1..20: note = chemically synthesized
  source 1..20: mol_type = other DNA
gtgataggttctgggttggg

SEQ ID NO: 20408 - DNA, 20 bp, synthetic construct
  misc_feature 1..20: note = chemically synthesized
  source 1..20: mol_type = other DNA
tgataggttctgggttggga

SEQ ID NO: 20409 - DNA, 20 bp, synthetic construct
  misc_feature 1..20: note = chemically synthesized
  source 1..20: mol_type = other DNA
gataggttctgggttgggag

SEQ ID NO: 20410 - DNA, 20 bp, synthetic construct
  misc_feature 1..20: note = chemically synthesized
  source 1..20: mol_type = other DNA
taggttctgggttgggaggg

SEQ ID NO: 20411 - DNA, 20 bp, synthetic construct
  misc_feature 1..20: note = chemically synthesized
  source 1..20: mol_type = other DNA
ttctgggttgggaggggagc

SEQ ID NO: 20412 - DNA, 20 bp, synthetic construct
  misc_feature 1..20: note = chemically synthesized
  source 1..20: mol_type = other DNA
tctgggttgggaggggagcc

SEQ ID NO: 20413 - DNA, 20 bp, synthetic construct
  misc_feature 1..20: note = chemically synthesized
  source 1..20: mol_type = other DNA
gggttgggaggggagccggg

SEQ ID NO: 20414 - DNA, 20 bp, synthetic construct
  misc_feature 1..20: note = chemically synthesized
  source 1..20: mol_type = other DNA
ggttgggaggggagccggga

SEQ ID NO: 20415 - DNA, 20 bp, synthetic construct
  misc_feature 1..20: note = chemically synthesized
  source 1..20: mol_type = other DNA
gggaggggagccgggaaggc

SEQ ID NO: 20416 - DNA, 20 bp, synthetic construct
  misc_feature 1..20: note = chemically synthesized
  source 1..20: mol_type = other DNA
aaggcaagcatcctctctca

SEQ ID NO: 20417 - DNA, 20 bp, synthetic construct
  misc_feature 1..20: note = chemically synthesized
  source 1..20: mol_type = other DNA
caaagctgcctttctcattt

SEQ ID NO: 20418 - DNA, 20 bp, synthetic construct
  misc_feature 1..20: note = chemically synthesized
  source 1..20: mol_type = other DNA
aagctgcctttctcatttga

SEQ ID NO: 20419 - DNA, 20 bp, synthetic construct
  misc_feature 1..20: note = chemically synthesized
  source 1..20: mol_type = other DNA
agctgcctttctcatttgag

SEQ ID NO: 20420 - DNA, 20 bp, synthetic construct
  misc_feature 1..20: note = chemically synthesized
  source 1..20: mol_type = other DNA
gcctttctcatttgagaggc

SEQ ID NO: 20421 - DNA, 20 bp, synthetic construct
  misc_feature 1..20: note = chemically synthesized
  source 1..20: mol_type = other DNA
atttgagaggcgagtgtgtg

SEQ ID NO: 20422 - DNA, 20 bp, synthetic construct
  misc_feature 1..20: note = chemically synthesized
  source 1..20: mol_type = other DNA
agaggcgagtgtgtgtggca

SEQ ID NO: 20423 - DNA, 20 bp, synthetic construct
  misc_feature 1..20: note = chemically synthesized
  source 1..20: mol_type = other DNA
gaggcgagtgtgtgtggcac

SEQ ID NO: 20424 - DNA, 20 bp, synthetic construct
  misc_feature 1..20: note = chemically synthesized
  source 1..20: mol_type = other DNA
aggcgagtgtgtgtggcaca

SEQ ID NO: 20425 - DNA, 20 bp, synthetic construct
  misc_feature 1..20: note = chemically synthesized
  source 1..20: mol_type = other DNA
ggcgagtgtgtgtggcacag

SEQ ID NO: 20426 - DNA, 20 bp, synthetic construct
  misc_feature 1..20: note = chemically synthesized
  source 1..20: mol_type = other DNA
gagtgtgtgtggcacagggg

SEQ ID NO: 20427 - DNA, 20 bp, synthetic construct
  misc_feature 1..20: note = chemically synthesized
  source 1..20: mol_type = other DNA
agtgtgtgtggcacaggggc

SEQ ID NO: 20428 - DNA, 20 bp, synthetic construct
  misc_feature 1..20: note = chemically synthesized
  source 1..20: mol_type = other DNA
gtgtgtggcacaggggcagg

SEQ ID NO: 20429 - DNA, 20 bp, synthetic construct
  misc_feature 1..20: note = chemically synthesized
  source 1..20: mol_type = other DNA
tgtggcacaggggcaggtag

SEQ ID NO: 20430 - DNA, 20 bp, synthetic construct
  misc_feature 1..20: note = chemically synthesized
  source 1..20: mol_type = other DNA
gtggcacaggggcaggtaga

SEQ ID NO: 20431 - DNA, 20 bp, synthetic construct
  misc_feature 1..20: note = chemically synthesized
  source 1..20: mol_type = other DNA
ggcacaggggcaggtagaag

SEQ ID NO: 20432 - DNA, 20 bp, synthetic construct
  misc_feature 1..20: note = chemically synthesized
  source 1..20: mol_type = other DNA
caggggcaggtagaaggaga

SEQ ID NO: 20433 - DNA, 20 bp, synthetic construct
  misc_feature 1..20: note = chemically synthesized
  source 1..20: mol_type = other DNA
gagacagatcctttatacct

SEQ ID NO: 20434 - DNA, 20 bp, synthetic construct
  misc_feature 1..20: note = chemically synthesized
  source 1..20: mol_type = other DNA
gacagatcctttatacctga

SEQ ID NO: 20435 - DNA, 20 bp, synthetic construct
  misc_feature 1..20: note = chemically synthesized
  source 1..20: mol_type = other DNA
gatcctttatacctgagagc

SEQ ID NO: 20436 - DNA, 20 bp, synthetic construct
  misc_feature 1..20: note = chemically synthesized
  source 1..20: mol_type = other DNA
atacctgagagcaagatgtg

SEQ ID NO: 20437 - DNA, 20 bp, synthetic construct
  misc_feature 1..20: note = chemically synthesized
  source 1..20: mol_type = other DNA
ctgagagcaagatgtgcagc

SEQ ID NO: 20438 - DNA, 20 bp, synthetic construct
  misc_feature 1..20: note = chemically synthesized
  source 1..20: mol_type = other DNA
tgagagcaagatgtgcagcc

SEQ ID NO: 20439 - DNA, 20 bp, synthetic construct
  misc_feature 1..20: note = chemically synthesized
  source 1..20: mol_type = other DNA
agcaagatgtgcagccagga

SEQ ID NO: 20440 - DNA, 20 bp, synthetic construct
  misc_feature 1..20: note = chemically synthesized
  source 1..20: mol_type = other DNA
atgtgcagccaggaaagctc

SEQ ID NO: 20441 - DNA, 20 bp, synthetic construct
  misc_feature 1..20: note = chemically synthesized
  source 1..20: mol_type = other DNA
tgtgcagccaggaaagctca

SEQ ID NO: 20442 - DNA, 20 bp, synthetic construct
  misc_feature 1..20: note = chemically synthesized
  source 1..20: mol_type = other DNA
gccaggaaagctcaaggaca

SEQ ID NO: 20443 - DNA, 20 bp, synthetic construct
  misc_feature 1..20: note = chemically synthesized
  source 1..20: mol_type = other DNA
ccaggaaagctcaaggacac

SEQ ID NO: 20444 - DNA, 20 bp, synthetic construct
  misc_feature 1..20: note = chemically synthesized
  source 1..20: mol_type = other DNA
aaagctcaaggacacaggcc

SEQ ID NO: 20445 - DNA, 20 bp, synthetic construct
  misc_feature 1..20: note = chemically synthesized
  source 1..20: mol_type = other DNA
aagctcaaggacacaggcca

SEQ ID NO: 20446 - DNA, 20 bp, synthetic construct
  misc_feature 1..20: note = chemically synthesized
  source 1..20: mol_type = other DNA
agctcaaggacacaggccaa

SEQ ID NO: 20447 - DNA, 20 bp, synthetic construct
  misc_feature 1..20: note = chemically synthesized
  source 1..20: mol_type = other DNA
ctcaaggacacaggccaagg

SEQ ID NO: 20448 - DNA, 20 bp, synthetic construct
  misc_feature 1..20: note = chemically synthesized
  source 1..20: mol_type = other DNA
tcaaggacacaggccaaggg

SEQ ID NO: 20449 - DNA, 20 bp, synthetic construct
  misc_feature 1..20: note = chemically synthesized
  source 1..20: mol_type = other DNA
gacacaggccaagggaggtg

SEQ ID NO: 20450 - DNA, 20 bp, synthetic construct
  misc_feature 1..20: note = chemically synthesized
  source 1..20: mol_type = other DNA
gggaggtgaagtgacttgcc

SEQ ID NO: 20451 - DNA, 20 bp, synthetic construct
  misc_feature 1..20: note = chemically synthesized
  source 1..20: mol_type = other DNA
ggaggtgaagtgacttgccc

SEQ ID NO: 20452 - DNA, 20 bp, synthetic construct
  misc_feature 1..20: note = chemically synthesized
  source 1..20: mol_type = other DNA
agtgacttgcccaggccacc

SEQ ID NO: 20453 - DNA, 20 bp, synthetic construct
  misc_feature 1..20: note = chemically synthesized
  source 1..20: mol_type = other DNA
gcccaggccacccagttacc

SEQ ID NO: 20454 - DNA, 20 bp, synthetic construct
  misc_feature 1..20: note = chemically synthesized
  source 1..20: mol_type = other DNA
ggccacccagttacctagca

SEQ ID NO: 20455 - DNA, 20 bp, synthetic construct
  misc_feature 1..20: note = chemically synthesized
  source 1..20: mol_type = other DNA
cccagttacctagcacagct

SEQ ID NO: 20456 - DNA, 20 bp, synthetic construct
  misc_feature 1..20: note = chemically synthesized
  source 1..20: mol_type = other DNA
acctagcacagctcagccac

SEQ ID NO: 20457 - DNA, 20 bp, synthetic construct
  misc_feature 1..20: note = chemically synthesized
  source 1..20: mol_type = other DNA
aagcccaaatgaatgattct

SEQ ID NO: 20458 - DNA, 20 bp, synthetic construct
  misc_feature 1..20: note = chemically synthesized
  source 1..20: mol_type = other DNA
aatgattctgagttccacat

SEQ ID NO: 20459 - DNA, 20 bp, synthetic construct
  misc_feature 1..20: note = chemically synthesized
  source 1..20: mol_type = other DNA
tgagttccacatcagcgcat

SEQ ID NO: 20460 - DNA, 20 bp, synthetic construct
  misc_feature 1..20: note = chemically synthesized
  source 1..20: mol_type = other DNA
gagttccacatcagcgcatc

SEQ ID NO: 20461 - DNA, 20 bp, synthetic construct
  misc_feature 1..20: note = chemically synthesized
  source 1..20: mol_type = other DNA
ttccacatcagcgcatcggg

SEQ ID NO: 20462 - DNA, 20 bp, synthetic construct
  misc_feature 1..20: note = chemically synthesized
  source 1..20: mol_type = other DNA
gcgcatcgggcagccaccat

SEQ ID NO: 20463 - DNA, 20 bp, synthetic construct
  misc_feature 1..20: note = chemically synthesized
  source 1..20: mol_type = other DNA
catcgggcagccaccatgag

SEQ ID NO: 20464 - DNA, 20 bp, synthetic construct
  misc_feature 1..20: note = chemically synthesized
  source 1..20: mol_type = other DNA
agccaccatgagcagttcca

SEQ ID NO: 20465 - DNA, 20 bp, synthetic construct
  misc_feature 1..20: note = chemically synthesized
  source 1..20: mol_type = other DNA
catgagcagttccacagtga

SEQ ID NO: 20466 - DNA, 20 bp, synthetic construct
  misc_feature 1..20: note = chemically synthesized
  source 1..20: mol_type = other DNA
atgagcagttccacagtgac

SEQ ID NO: 20467 - DNA, 20 bp, synthetic construct
  misc_feature 1..20: note = chemically synthesized
  source 1..20: mol_type = other DNA
agcagttccacagtgacagg

SEQ ID NO: 20468 - DNA, 20 bp, synthetic construct
  misc_feature 1..20: note = chemically synthesized
  source 1..20: mol_type = other DNA
gcagttccacagtgacaggt

SEQ ID NO: 20469 - DNA, 20 bp, synthetic construct
  misc_feature 1..20: note = chemically synthesized
  source 1..20: mol_type = other DNA
cagttccacagtgacaggtg

SEQ ID NO: 20470 - DNA, 20 bp, synthetic construct
  misc_feature 1..20: note = chemically synthesized
  source 1..20: mol_type = other DNA
cacagtgacaggtggggctc

SEQ ID NO: 20471 - DNA, 20 bp, synthetic construct
  misc_feature 1..20: note = chemically synthesized
  source 1..20: mol_type = other DNA
acagtgacaggtggggctct

SEQ ID NO: 20472 - DNA, 20 bp, synthetic construct
  misc_feature 1..20: note = chemically synthesized
  source 1..20: mol_type = other DNA
gtgacaggtggggctctagg

SEQ ID NO: 20473 - DNA, 20 bp, synthetic construct
  misc_feature 1..20: note = chemically synthesized
  source 1..20: mol_type = other DNA
tggcttcctttaaaacatct

SEQ ID NO: 20474 - DNA, 20 bp, synthetic construct
  misc_feature 1..20: note = chemically synthesized
  source 1..20: mol_type = other DNA
ggcttcctttaaaacatctg

SEQ ID NO: 20475 - DNA, 20 bp, synthetic construct
  misc_feature 1..20: note = chemically synthesized
  source 1..20: mol_type = other DNA
tcctttaaaacatctgagga

SEQ ID NO: 20476 - DNA, 20 bp, synthetic construct
  misc_feature 1..20: note = chemically synthesized
  source 1..20: mol_type = other DNA
tttaaaacatctgaggaaag

SEQ ID NO: 20477 - DNA, 20 bp, synthetic construct
  misc_feature 1..20: note = chemically synthesized
  source 1..20: mol_type = other DNA
ttaaaacatctgaggaaagc

SEQ ID NO: 20478 - DNA, 20 bp, synthetic construct
  misc_feature 1..20: note = chemically synthesized
  source 1..20: mol_type = other DNA
cttcctctctgactgctctc

SEQ ID NO: 20479 - DNA, 20 bp, synthetic construct
  misc_feature 1..20: note = chemically synthesized
  source 1..20: mol_type = other DNA
ttcctctctgactgctctcc

SEQ ID NO: 20480 - DNA, 20 bp, synthetic construct
  misc_feature 1..20: note = chemically synthesized
  source 1..20: mol_type = other DNA
tcctctctgactgctctcca

SEQ ID NO: 20481 - DNA, 20 bp, synthetic construct
  misc_feature 1..20: note = chemically synthesized
  source 1..20: mol_type = other DNA
cctctctgactgctctccag

SEQ ID NO: 20482 - DNA, 20 bp, synthetic construct
  misc_feature 1..20: note = chemically synthesized
  source 1..20: mol_type = other DNA
ctctgactgctctccagggg

SEQ ID NO: 20483 - DNA, 20 bp, synthetic construct
  misc_feature 1..20: note = chemically synthesized
  source 1..20: mol_type = other DNA
gactgctctccaggggtggt

SEQ ID NO: 20484 - DNA, 20 bp, synthetic construct
  misc_feature 1..20: note = chemically synthesized
  source 1..20: mol_type = other DNA
ctctccaggggtggtgagca

SEQ ID NO: 20485 - DNA, 20 bp, synthetic construct
  misc_feature 1..20: note = chemically synthesized
  source 1..20: mol_type = other DNA
tctccaggggtggtgagcac

SEQ ID NO: 20486 - DNA, 20 bp, synthetic construct
  misc_feature 1..20: note = chemically synthesized
  source 1..20: mol_type = other DNA
ctccaggggtggtgagcaca

SEQ ID NO: 20487 - DNA, 20 bp, synthetic construct
  misc_feature 1..20: note = chemically synthesized
  source 1..20: mol_type = other DNA
tccaggggtggtgagcacag

SEQ ID NO: 20488 - DNA, 20 bp, synthetic construct
  misc_feature 1..20: note = chemically synthesized
  source 1..20: mol_type = other DNA
tgagcacaggggttcatctg

SEQ ID NO: 20489 - DNA, 20 bp, synthetic construct
  misc_feature 1..20: note = chemically synthesized
  source 1..20: mol_type = other DNA
ggggttcatctgcagctccc

SEQ ID NO: 20490 - DNA, 20 bp, synthetic construct
  misc_feature 1..20: note = chemically synthesized
  source 1..20: mol_type = other DNA
catctgcagctccccagctc

SEQ ID NO: 20491 - DNA, 20 bp, synthetic construct
  misc_feature 1..20: note = chemically synthesized
  source 1..20: mol_type = other DNA
tccccagctccagtgctcct

SEQ ID NO: 20492 - DNA, 20 bp, synthetic construct
  misc_feature 1..20: note = chemically synthesized
  source 1..20: mol_type = other DNA
ccagtgctccttagccttcc

SEQ ID NO: 20493 - DNA, 20 bp, synthetic construct
  misc_feature 1..20: note = chemically synthesized
  source 1..20: mol_type = other DNA
ccttccaagttgtttgaatt

SEQ ID NO: 20494 - DNA, 20 bp, synthetic construct
  misc_feature 1..20: note = chemically synthesized
  source 1..20: mol_type = other DNA
agttgtttgaattaagttgc

SEQ ID NO: 20495 - DNA, 20 bp, synthetic construct
  misc_feature 1..20: note = chemically synthesized
  source 1..20: mol_type = other DNA
tttgaattaagttgcaagcc

SEQ ID NO: 20496 - DNA, 20 bp, synthetic construct
  misc_feature 1..20: note = chemically synthesized
  source 1..20: mol_type = other DNA
ttgaattaagttgcaagccc

SEQ ID NO: 20497 - DNA, 20 bp, synthetic construct
  misc_feature 1..20: note = chemically synthesized
  source 1..20: mol_type = other DNA
aattaagttgcaagcccagg

SEQ ID NO: 20498 - DNA, 20 bp, synthetic construct
  misc_feature 1..20: note = chemically synthesized
  source 1..20: mol_type = other DNA
ggctgcacacatattcattt

SEQ ID NO: 20499 - DNA, 20 bp, synthetic construct
  misc_feature 1..20: note = chemically synthesized
  source 1..20: mol_type = other DNA
ctgcacacatattcattttg

SEQ ID NO: 20500 - DNA, 20 bp, synthetic construct
  misc_feature 1..20: note = chemically synthesized
  source 1..20: mol_type = other DNA
actgtgacacttgtatttcc

SEQ ID NO: 20501 - DNA, 20 bp, synthetic construct
  misc_feature 1..20: note = chemically synthesized
  source 1..20: mol_type = other DNA
ctgtgacacttgtatttcct

SEQ ID NO: 20502 - DNA, 20 bp, synthetic construct
  misc_feature 1..20: note = chemically synthesized
  source 1..20: mol_type = other DNA
tgacacttgtatttcctggg

SEQ ID NO: 20503 - DNA, 20 bp, synthetic construct
  misc_feature 1..20: note = chemically synthesized
  source 1..20: mol_type = other DNA
gggaagcgttactatgtctt

SEQ ID NO: 20504 - DNA, 20 bp, synthetic construct
  misc_feature 1..20: note = chemically synthesized
  source 1..20: mol_type = other DNA
gcgttactatgtctttggcc

SEQ ID NO: 20505 - DNA, 20 bp, synthetic construct
  misc_feature 1..20: note = chemically synthesized
  source 1..20: mol_type = other DNA
tactatgtctttggccgagc

SEQ ID NO: 20506 - DNA, 20 bp, synthetic construct
  misc_feature 1..20: note = chemically synthesized
  source 1..20: mol_type = other DNA
ccgagcaagtattacgccat

SEQ ID NO: 20507 - DNA, 20 bp, synthetic construct
  misc_feature 1..20: note = chemically synthesized
  source 1..20: mol_type = other DNA
gcaagtattacgccatgagc

SEQ ID NO: 20508 - DNA, 20 bp, synthetic construct
  misc_feature 1..20: note = chemically synthesized
  source 1..20: mol_type = other DNA
cctttgaacacctacattgc

SEQ ID NO: 20509 - DNA, 20 bp, synthetic construct
  misc_feature 1..20: note = chemically synthesized
  source 1..20: mol_type = other DNA
ctttgaacacctacattgct

SEQ ID NO: 20510 - DNA, 20 bp, synthetic construct
  misc_feature 1..20: note = chemically synthesized
  source 1..20: mol_type = other DNA
ttgaacacctacattgctgg

SEQ ID NO: 20511 - DNA, 20 bp, synthetic construct
  misc_feature 1..20: note = chemically synthesized
  source 1..20: mol_type = other DNA
tgaacacctacattgctggg

SEQ ID NO: 20512 - DNA, 20 bp, synthetic construct
  misc_feature 1..20: note = chemically synthesized
  source 1..20: mol_type = other DNA
acattgctgggaggatacct

SEQ ID NO: 20513 - DNA, 20 bp, synthetic construct
  misc_feature 1..20: note = chemically synthesized
  source 1..20: mol_type = other DNA
tgctgggaggataccttagt

SEQ ID NO: 20514 - DNA, 20 bp, synthetic construct
  misc_feature 1..20: note = chemically synthesized
  source 1..20: mol_type = other DNA
ctgggaggataccttagtga

SEQ ID NO: 20515 - DNA, 20 bp, synthetic construct
  misc_feature 1..20: note = chemically synthesized
  source 1..20: mol_type = other DNA
gataccttagtgagagtgcc

SEQ ID NO: 20516 - DNA, 20 bp, synthetic construct
  misc_feature 1..20: note = chemically synthesized
  source 1..20: mol_type = other DNA
ataccttagtgagagtgcct

SEQ ID NO: 20517 - DNA, 20 bp, synthetic construct
  misc_feature 1..20: note = chemically synthesized
  source 1..20: mol_type = other DNA
agtgagagtgcctgggccac

SEQ ID NO: 20518 - DNA, 20 bp, synthetic construct
  misc_feature 1..20: note = chemically synthesized
  source 1..20: mol_type = other DNA
gtgagagtgcctgggccact

SEQ ID NO: 20519 - DNA, 20 bp, synthetic construct
  misc_feature 1..20: note = chemically synthesized
  source 1..20: mol_type = other DNA
agtgcctgggccactgggcg

SEQ ID NO: 20520 - DNA, 20 bp, synthetic construct
  misc_feature 1..20: note = chemically synthesized
  source 1..20: mol_type = other DNA
gcctgggccactgggcgtag

SEQ ID NO: 20521 - DNA, 20 bp, synthetic construct
  misc_feature 1..20: note = chemically synthesized
  source 1..20: mol_type = other DNA
ctgggccactgggcgtagca

SEQ ID NO: 20522 - DNA, 20 bp, synthetic construct
  misc_feature 1..20: note = chemically synthesized
  source 1..20: mol_type = other DNA
tgggccactgggcgtagcag

SEQ ID NO: 20523 - DNA, 20 bp, synthetic construct
  misc_feature 1..20: note = chemically synthesized
  source 1..20: mol_type = other DNA
gccactgggcgtagcagagg

SEQ ID NO: 20524 - DNA, 20 bp, synthetic construct
  misc_feature 1..20: note = chemically synthesized
  source 1..20: mol_type = other DNA
cattttactgatttatttga

SEQ ID NO: 20525 - DNA, 20 bp, synthetic construct
  misc_feature 1..20: note = chemically synthesized
  source 1..20: mol_type = other DNA
ctgatttatttgaaagaaaa

SEQ ID NO: 20526 - DNA, 20 bp, synthetic construct
  misc_feature 1..20: note = chemically synthesized
  source 1..20: mol_type = other DNA
ccctccaacccttgccttca

SEQ ID NO: 20527 - DNA, 20 bp, synthetic construct
  misc_feature 1..20: note = chemically synthesized
  source 1..20: mol_type = other DNA
aacccttgccttcatagaaa

SEQ ID NO: 20528 - DNA, 20 bp, synthetic construct
  misc_feature 1..20: note = chemically synthesized
  source 1..20: mol_type = other DNA
cccttgccttcatagaaaca

SEQ ID NO: 20529 - DNA, 20 bp, synthetic construct
  misc_feature 1..20: note = chemically synthesized
  source 1..20: mol_type = other DNA
tcatagaaacagagtgttga

SEQ ID NO: 20530 - DNA, 20 bp, synthetic construct
  misc_feature 1..20: note = chemically synthesized
  source 1..20: mol_type = other DNA
gaaacagagtgttgaaagct

SEQ ID NO: 20531 - DNA, 20 bp, synthetic construct
  misc_feature 1..20: note = chemically synthesized
  source 1..20: mol_type = other DNA
aacagagtgttgaaagcttg

SEQ ID NO: 20532 - DNA, 20 bp, synthetic construct
  misc_feature 1..20: note = chemically synthesized
  source 1..20: mol_type = other DNA
agagtgttgaaagcttggag

SEQ ID NO: 20533 - DNA, 20 bp, synthetic construct
  misc_feature 1..20: note = chemically synthesized
  source 1..20: mol_type = other DNA
ttaatgactcccctgcccct

SEQ ID NO: 20534 - DNA, 20 bp, synthetic construct
  misc_feature 1..20: note = chemically synthesized
  source 1..20: mol_type = other DNA
cccttagtgtcttacatgac

SEQ ID NO: 20535 - DNA, 20 bp, synthetic construct
  misc_feature 1..20: note = chemically synthesized
  source 1..20: mol_type = other DNA
ttatttcaacttattttctg

SEQ ID NO: 20536 - DNA, 20 bp, synthetic construct
  misc_feature 1..20: note = chemically synthesized
  source 1..20: mol_type = other DNA
tcaacttattttctgtggct

SEQ ID NO: 20537 - DNA, 20 bp, synthetic construct
  misc_feature 1..20: note = chemically synthesized
  source 1..20: mol_type = other DNA
gcttggaaaatacgttgact

SEQ ID NO: 20538 - DNA, 20 bp, synthetic construct
  misc_feature 1..20: note = chemically synthesized
  source 1..20: mol_type = other DNA
tgatgattgttttcatgaaa

SEQ ID NO: 20539 - DNA, 20 bp, synthetic construct
  misc_feature 1..20: note = chemically synthesized
  source 1..20: mol_type = other DNA
atgaaatggtgcaacatgta

SEQ ID NO: 20540 - DNA, 20 bp, synthetic construct
  misc_feature 1..20: note = chemically synthesized
  source 1..20: mol_type = other DNA
tggtgcaacatgtaaagcaa

SEQ ID NO: 20541 - DNA, 20 bp, synthetic construct
  misc_feature 1..20: note = chemically synthesized
  source 1..20: mol_type = other DNA
aaagcaatggttgtcattaa

SEQ ID NO: 20542 - DNA, 20 bp, synthetic construct
  misc_feature 1..20: note = chemically synthesized
  source 1..20: mol_type = other DNA
aatggttgtcattaatagtg

SEQ ID NO: 20543 - DNA, 20 bp, synthetic construct
  misc_feature 1..20: note = chemically synthesized
  source 1..20: mol_type = other DNA
tcattaatagtgcagttatg

SEQ ID NO: 20544 - DNA, 20 bp, synthetic construct
  misc_feature 1..20: note = chemically synthesized
  source 1..20: mol_type = other DNA
attaatagtgcagttatgta

SEQ ID NO: 20545 - DNA, 20 bp, synthetic construct
  misc_feature 1..20: note = chemically synthesized
  source 1..20: mol_type = other DNA
tagtgcagttatgtagagtg

SEQ ID NO: 20546 - DNA, 20 bp, synthetic construct
  misc_feature 1..20: note = chemically synthesized
  source 1..20: mol_type = other DNA
tatgtagagtgtagctcttt

SEQ ID NO: 20547 - DNA, 20 bp, synthetic construct
  misc_feature 1..20: note = chemically synthesized
  source 1..20: mol_type = other DNA
agtgtagctctttgagtctt

SEQ ID NO: 20548 - DNA, 20 bp, synthetic construct
  misc_feature 1..20: note = chemically synthesized
  source 1..20: mol_type = other DNA
ttgagtcttcagttttgaat

SEQ ID NO: 20549 - DNA, 20 bp, synthetic construct
  misc_feature 1..20: note = chemically synthesized
  source 1..20: mol_type = other DNA
tcttcagttttgaatcagat

SEQ ID NO: 20550 - DNA, 20 bp, synthetic construct
  misc_feature 1..20: note = chemically synthesized
  source 1..20: mol_type = other DNA
agcgctctgttaacttaaaa

SEQ ID NO: 20551 - DNA, 20 bp, synthetic construct
  misc_feature 1..20: note = chemically synthesized
  source 1..20: mol_type = other DNA
aacttaaaatagccccaaaa

SEQ ID NO: 20552 - DNA, 20 bp, synthetic construct
  misc_feature 1..20: note = chemically synthesized
  source 1..20: mol_type = other DNA
ttaaaatagccccaaaaaag

SEQ ID NO: 20553 - DNA, 20 bp, synthetic construct
  misc_feature 1..20: note = chemically synthesized
  source 1..20: mol_type = other DNA
aaatagccccaaaaaagaag

SEQ ID NO: 20554 - DNA, 20 bp, synthetic construct
  misc_feature 1..20: note = chemically synthesized
  source 1..20: mol_type = other DNA
aatagccccaaaaaagaaga

SEQ ID NO: 20555 - DNA, 20 bp, synthetic construct
  misc_feature 1..20: note = chemically synthesized
  source 1..20: mol_type = other DNA
aaaaagaagaaggaaaaaaa

SEQ ID NO: 20556 - DNA, 20 bp, synthetic construct
  misc_feature 1..20: note = chemically synthesized
  source 1..20: mol_type = other DNA
aaggaaaaaaaaagaactgt

SEQ ID NO: 20557 - DNA, 20 bp, synthetic construct
  misc_feature 1..20: note = chemically synthesized
  source 1..20: mol_type = other DNA
aaaaaagaactgtcagaaat

SEQ ID NO: 20558 - DNA, 20 bp, synthetic construct
  misc_feature 1..20: note = chemically synthesized
  source 1..20: mol_type = other DNA
aaaagaactgtcagaaatca

SEQ ID NO: 20559 - DNA, 20 bp, synthetic construct
  misc_feature 1..20: note = chemically synthesized
  source 1..20: mol_type = other DNA
aaagaactgtcagaaatcag

SEQ ID NO: 20560 - DNA, 20 bp, synthetic construct
  misc_feature 1..20: note = chemically synthesized
  source 1..20: mol_type = other DNA
aagaactgtcagaaatcaga

SEQ ID NO: 20561 - DNA, 20 bp, synthetic construct
  misc_feature 1..20: note = chemically synthesized
  source 1..20: mol_type = other DNA
cagaaatcagagggaaatat

SEQ ID NO: 20562 - DNA, 20 bp, synthetic construct
  misc_feature 1..20: note = chemically synthesized
  source 1..20: mol_type = other DNA
aatattagcattatgaaaca

SEQ ID NO: 20563 - DNA, 20 bp, synthetic construct
  misc_feature 1..20: note = chemically synthesized
  source 1..20: mol_type = other DNA
gcattatgaaacatggtaac

SEQ ID NO: 20564 - DNA, 20 bp, synthetic construct
  misc_feature 1..20: note = chemically synthesized
  source 1..20: mol_type = other DNA
ttatgaaacatggtaacaag

SEQ ID NO: 20565 - DNA, 20 bp, synthetic construct
  misc_feature 1..20: note = chemically synthesized
  source 1..20: mol_type = other DNA
acatggtaacaagtggccat

SEQ ID NO: 20566 - DNA, 20 bp, synthetic construct
  misc_feature 1..20: note = chemically synthesized
  source 1..20: mol_type = other DNA
gcactttatgtctgcatgaa

SEQ ID NO: 20567 - DNA, 20 bp, synthetic construct
  misc_feature 1..20: note = chemically synthesized
  source 1..20: mol_type = other DNA
tctgcatgaatagcatcttt

SEQ ID NO: 20568 - DNA, 20 bp, synthetic construct
  misc_feature 1..20: note = chemically synthesized
  source 1..20: mol_type = other DNA
agcatctttaagtgttttat

SEQ ID NO: 20569 - DNA, 20 bp, synthetic construct
  misc_feature 1..20: note = chemically synthesized
  source 1..20: mol_type = other DNA
tttaagtgttttattggtaa

SEQ ID NO: 20570 - DNA, 20 bp, synthetic construct
  misc_feature 1..20: note = chemically synthesized
  source 1..20: mol_type = other DNA
gtgttttattggtaacggaa

SEQ ID NO: 20571 - DNA, 20 bp, synthetic construct
  misc_feature 1..20: note = chemically synthesized
  source 1..20: mol_type = other DNA
gttttattggtaacggaaaa

SEQ ID NO: 20572 - DNA, 20 bp, synthetic construct
  misc_feature 1..20: note = chemically synthesized
  source 1..20: mol_type = other DNA
ttattggtaacggaaaagag

SEQ ID NO: 20573 - DNA, 20 bp, synthetic construct
  misc_feature 1..20: note = chemically synthesized
  source 1..20: mol_type = other DNA
attggtaacggaaaagagtg

SEQ ID NO: 20574 - DNA, 20 bp, synthetic construct
  misc_feature 1..20: note = chemically synthesized
  source 1..20: mol_type = other DNA
cggaaaagagtggagtcaca

SEQ ID NO: 20575 - DNA, 20 bp, synthetic construct
  misc_feature 1..20: note = chemically synthesized
  source 1..20: mol_type = other DNA
aatgacattacttcccaaat

SEQ ID NO: 20576 - DNA, 20 bp, synthetic construct
  misc_feature 1..20: note = chemically synthesized
  source 1..20: mol_type = other DNA
acattacttcccaaattggc

SEQ ID NO: 20577 - DNA, 20 bp, synthetic construct
  misc_feature 1..20: note = chemically synthesized
  source 1..20: mol_type = other DNA
attggcgagttcttttaatt

SEQ ID NO: 20578 - DNA, 20 bp, synthetic construct
  misc_feature 1..20: note = chemically synthesized
  source 1..20: mol_type = other DNA
ttctccttgttattgcctac

SEQ ID NO: 20579 - DNA, 20 bp, synthetic construct
  misc_feature 1..20: note = chemically synthesized
  source 1..20: mol_type = other DNA
tctccttgttattgcctact

SEQ ID NO: 20580 - DNA, 20 bp, synthetic construct
  misc_feature 1..20: note = chemically synthesized
  source 1..20: mol_type = other DNA
ctccttgttattgcctactg

SEQ ID NO: 20581 - DNA, 20 bp, synthetic construct
  misc_feature 1..20: note = chemically synthesized
  source 1..20: mol_type = other DNA
ccttgttattgcctactggg

SEQ ID NO: 20582 - DNA, 20 bp, synthetic construct
  misc_feature 1..20: note = chemically synthesized
  source 1..20: mol_type = other DNA
tcacctgtcaaattgtatgc

SEQ ID NO: 20583 - DNA, 20 bp, synthetic construct
  misc_feature 1..20: note = chemically synthesized
  source 1..20: mol_type = other DNA
cacctgtcaaattgtatgct

SEQ ID NO: 20584 - DNA, 20 bp, synthetic construct
  misc_feature 1..20: note = chemically synthesized
  source 1..20: mol_type = other DNA
acctgtcaaattgtatgcta

SEQ ID NO: 20585 - DNA, 20 bp, synthetic construct
  misc_feature 1..20: note = chemically synthesized
  source 1..20: mol_type = other DNA
tgtcaaattgtatgctaggg

SEQ ID NO: 20586 - DNA, 20 bp, synthetic construct
  misc_feature 1..20: note = chemically synthesized
  source 1..20: mol_type = other DNA
gtcaaattgtatgctagggt

SEQ ID NO: 20587 - DNA, 20 bp, synthetic construct
  misc_feature 1..20: note = chemically synthesized
  source 1..20: mol_type = other DNA
aattgtatgctagggtggga

SEQ ID NO: 20588 - DNA, 20 bp, synthetic construct
  misc_feature 1..20: note = chemically synthesized
  source 1..20: mol_type = other DNA
attgtatgctagggtgggaa

SEQ ID NO: 20589 - DNA, 20 bp, synthetic construct
  misc_feature 1..20: note = chemically synthesized
  source 1..20: mol_type = other DNA
ttgtatgctagggtgggaaa

SEQ ID NO: 20590 - DNA, 20 bp, synthetic construct
  misc_feature 1..20: note = chemically synthesized
  source 1..20: mol_type = other DNA
tagggtgggaaagggtattt

SEQ ID NO: 20591 - DNA, 20 bp, synthetic construct
  misc_feature 1..20: note = chemically synthesized
  source 1..20: mol_type = other DNA
aaagggtattttagcttttc

SEQ ID NO: 20592 - DNA, 20 bp, synthetic construct
  misc_feature 1..20: note = chemically synthesized
  source 1..20: mol_type = other DNA
tagcttttctggctgcatcc

SEQ ID NO: 20593 - DNA, 20 bp, synthetic construct
  misc_feature 1..20: note = chemically synthesized
  source 1..20: mol_type = other DNA
agcttttctggctgcatccc

SEQ ID NO: 20594 - DNA, 20 bp, synthetic construct
  misc_feature 1..20: note = chemically synthesized
  source 1..20: mol_type = other DNA
ctggctgcatcccgggctct

SEQ ID NO: 20595 - DNA, 20 bp, synthetic construct
  misc_feature 1..20: note = chemically synthesized
  source 1..20: mol_type = other DNA
tggctgcatcccgggctctc

SEQ ID NO: 20596 - DNA, 20 bp, synthetic construct
  misc_feature 1..20: note = chemically synthesized
  source 1..20: mol_type = other DNA
ctgcatcccgggctctcagg

SEQ ID NO: 20597 - DNA, 20 bp, synthetic construct
  misc_feature 1..20: note = chemically synthesized
  source 1..20: mol_type = other DNA
catcccgggctctcaggtag

SEQ ID NO: 20598 - DNA, 20 bp, synthetic construct
  misc_feature 1..20: note = chemically synthesized
  source 1..20: mol_type = other DNA
atcccgggctctcaggtaga

SEQ ID NO: 20599 - DNA, 20 bp, synthetic construct
  misc_feature 1..20: note = chemically synthesized
  source 1..20: mol_type = other DNA
tcccgggctctcaggtagaa

SEQ ID NO: 20600 - DNA, 20 bp, synthetic construct
  misc_feature 1..20: note = chemically synthesized
  source 1..20: mol_type = other DNA
agggatttgtccctttgcca

SEQ ID NO: 20601 - DNA, 20 bp, synthetic construct
  misc_feature 1..20: note = chemically synthesized
  source 1..20: mol_type = other DNA
tccttctctcctgccctccc

SEQ ID NO: 20602 - DNA, 20 bp, synthetic construct
  misc_feature 1..20: note = chemically synthesized
  source 1..20: mol_type = other DNA
gccctccccagtgcccctgc

SEQ ID NO: 20603 - DNA, 20 bp, synthetic construct
  misc_feature 1..20: note = chemically synthesized
  source 1..20: mol_type = other DNA
ccctccccagtgcccctgcc

SEQ ID NO: 20604 - DNA, 20 bp, synthetic construct
  misc_feature 1..20: note = chemically synthesized
  source 1..20: mol_type = other DNA
ctccccagtgcccctgccag

SEQ ID NO: 20605 - DNA, 20 bp, synthetic construct
  misc_feature 1..20: note = chemically synthesized
  source 1..20: mol_type = other DNA
tccccagtgcccctgccagg

SEQ ID NO: 20606 - DNA, 20 bp, synthetic construct
  misc_feature 1..20: note = chemically synthesized
  source 1..20: mol_type = other DNA
cccagtgcccctgccaggag

SEQ ID NO: 20607 - DNA, 20 bp, synthetic construct
  misc_feature 1..20: note = chemically synthesized
  source 1..20: mol_type = other DNA
ccagtgcccctgccaggagg

SEQ ID NO: 20608 - DNA, 20 bp, synthetic construct
  misc_feature 1..20: note = chemically synthesized
  source 1..20: mol_type = other DNA
cagtgcccctgccaggagga

SEQ ID NO: 20609 - DNA, 20 bp, synthetic construct
  misc_feature 1..20: note = chemically synthesized
  source 1..20: mol_type = other DNA
gtgcccctgccaggaggagg

SEQ ID NO: 20610 - DNA, 20 bp, synthetic construct
  misc_feature 1..20: note = chemically synthesized
  source 1..20: mol_type = other DNA
caggaggagggagaatctga

SEQ ID NO: 20611 - DNA, 20 bp, synthetic construct
  misc_feature 1..20: note = chemically synthesized
  source 1..20: mol_type = other DNA
aggagggagaatctgaaagc

SEQ ID NO: 20612 - DNA, 20 bp, synthetic construct
  misc_feature 1..20: note = chemically synthesized
  source 1..20: mol_type = other DNA
ggagaatctgaaagcaagaa

SEQ ID NO: 20613 - DNA, 20 bp, synthetic construct
  misc_feature 1..20: note = chemically synthesized
  source 1..20: mol_type = other DNA
agaatctgaaagcaagaatg

SEQ ID NO: 20614 - DNA, 20 bp, synthetic construct
  misc_feature 1..20: note = chemically synthesized
  source 1..20: mol_type = other DNA
gaatctgaaagcaagaatgg

SEQ ID NO: 20615 - DNA, 20 bp, synthetic construct
  misc_feature 1..20: note = chemically synthesized
  source 1..20: mol_type = other DNA
aatctgaaagcaagaatgga

SEQ ID NO: 20616 - DNA, 20 bp, synthetic construct
  misc_feature 1..20: note = chemically synthesized
  source 1..20: mol_type = other DNA
tctgaaagcaagaatggagg

SEQ ID NO: 20617 - DNA, 20 bp, synthetic construct
  misc_feature 1..20: note = chemically synthesized
  source 1..20: mol_type = other DNA
tgaaagcaagaatggaggga

SEQ ID NO: 20618 - DNA, 20 bp, synthetic construct
  misc_feature 1..20: note = chemically synthesized
  source 1..20: mol_type = other DNA
atggagggagagtaatgccg

SEQ ID NO: 20619 - DNA, 20 bp, synthetic construct
  misc_feature 1..20: note = chemically synthesized
  source 1..20: mol_type = other DNA
ggagggagagtaatgccgtg

SEQ ID NO: 20620 - DNA, 20 bp, synthetic construct
  misc_feature 1..20: note = chemically synthesized
  source 1..20: mol_type = other DNA
gagggagagtaatgccgtgg

SEQ ID NO: 20621 - DNA, 20 bp, synthetic construct
  misc_feature 1..20: note = chemically synthesized
  source 1..20: mol_type = other DNA
ggagagtaatgccgtggagg

SEQ ID NO: 20622 - DNA, 20 bp, synthetic construct
  misc_feature 1..20: note = chemically synthesized
  source 1..20: mol_type = other DNA
agtaatgccgtggaggcagc

SEQ ID NO: 20623 - DNA, 20 bp, synthetic construct
  misc_feature 1..20: note = chemically synthesized
  source 1..20: mol_type = other DNA
gtaatgccgtggaggcagct

SEQ ID NO: 20624 - DNA, 20 bp, synthetic construct
  misc_feature 1..20: note = chemically synthesized
  source 1..20: mol_type = other DNA
aggcagctgggatttgtgcc

SEQ ID NO: 20625 - DNA, 20 bp, synthetic construct
  misc_feature 1..20: note = chemically synthesized
  source 1..20: mol_type = other DNA
agctgggatttgtgcctggc

SEQ ID NO: 20626 - DNA, 20 bp, synthetic construct
  misc_feature 1..20: note = chemically synthesized
  source 1..20: mol_type = other DNA
gcctggccagtgcccctgca

SEQ ID NO: 20627 - DNA, 20 bp, synthetic construct
  misc_feature 1..20: note = chemically synthesized
  source 1..20: mol_type = other DNA
ccagtgcccctgcacagtat

SEQ ID NO: 20628 - DNA, 20 bp, synthetic construct
  misc_feature 1..20: note = chemically synthesized
  source 1..20: mol_type = other DNA
ccctgcacagtattggatat

SEQ ID NO: 20629 - DNA, 20 bp, synthetic construct
  misc_feature 1..20: note = chemically synthesized
  source 1..20: mol_type = other DNA
cacagtattggatatgagta

SEQ ID NO: 20630 - DNA, 20 bp, synthetic construct
  misc_feature 1..20: note = chemically synthesized
  source 1..20: mol_type = other DNA
acagtattggatatgagtat

SEQ ID NO: 20631 - DNA, 20 bp, synthetic construct
  misc_feature 1..20: note = chemically synthesized
  source 1..20: mol_type = other DNA
ggatatgagtatgggcatct

SEQ ID NO: 20632 - DNA, 20 bp, synthetic construct
  misc_feature 1..20: note = chemically synthesized
  source 1..20: mol_type = other DNA
tatgggcatctcagtgtgcc

SEQ ID NO: 20633 - DNA, 20 bp, synthetic construct
  misc_feature 1..20: note = chemically synthesized
  source 1..20: mol_type = other DNA
tctcagtgtgcctggaaacg

SEQ ID NO: 20634 - DNA, 20 bp, synthetic construct
  misc_feature 1..20: note = chemically synthesized
  source 1..20: mol_type = other DNA
agtgtgcctggaaacgcagt

SEQ ID NO: 20635 - DNA, 20 bp, synthetic construct
  misc_feature 1..20: note = chemically synthesized
  source 1..20: mol_type = other DNA
tggaaacgcagttggctgca

SEQ ID NO: 20636 - DNA, 20 bp, synthetic construct
  misc_feature 1..20: note = chemically synthesized
  source 1..20: mol_type = other DNA
cgcagttggctgcacagccc

SEQ ID NO: 20637 - DNA, 20 bp, synthetic construct
  misc_feature 1..20: note = chemically synthesized
  source 1..20: mol_type = other DNA
agttggctgcacagccccag

SEQ ID NO: 20638 - DNA, 20 bp, synthetic construct
  misc_feature 1..20: note = chemically synthesized
  source 1..20: mol_type = other DNA
gttggctgcacagccccagt

SEQ ID NO: 20639 - DNA, 20 bp, synthetic construct
  misc_feature 1..20: note = chemically synthesized
  source 1..20: mol_type = other DNA
ggctgcacagccccagtggg

SEQ ID NO: 20640 - DNA, 20 bp, synthetic construct
  misc_feature 1..20: note = chemically synthesized
  source 1..20: mol_type = other DNA
gccccagtgggaagaactct

SEQ ID NO: 20641 - DNA, 20 bp, synthetic construct
  misc_feature 1..20: note = chemically synthesized
  source 1..20: mol_type = other DNA
ccccagtgggaagaactctg

SEQ ID NO: 20642 - DNA, 20 bp, synthetic construct
  misc_feature 1..20: note = chemically synthesized
  source 1..20: mol_type = other DNA
gaagaactctgaggaactgc

SEQ ID NO: 20643 - DNA, 20 bp, synthetic construct
  misc_feature 1..20: note = chemically synthesized
  source 1..20: mol_type = other DNA
gaactctgaggaactgctgg

SEQ ID NO: 20644 - DNA, 20 bp, synthetic construct
  misc_feature 1..20: note = chemically synthesized
  source 1..20: mol_type = other DNA
tctgaggaactgctggtggt

SEQ ID NO: 20645 - DNA, 20 bp, synthetic construct
  misc_feature 1..20: note = chemically synthesized
  source 1..20: mol_type = other DNA
gctggtggttggctcttccc

SEQ ID NO: 20646 - DNA, 20 bp, synthetic construct
  misc_feature 1..20: note = chemically synthesized
  source 1..20: mol_type = other DNA
ctggtggttggctcttcccc

SEQ ID NO: 20647 - DNA, 20 bp, synthetic construct
  misc_feature 1..20: note = chemically synthesized
  source 1..20: mol_type = other DNA
ttggctcttccccaggctct

SEQ ID NO: 20648 - DNA, 20 bp, synthetic construct
  misc_feature 1..20: note = chemically synthesized
  source 1..20: mol_type = other DNA
aggctctcagcccctctttc

SEQ ID NO: 20649 - DNA, 20 bp, synthetic construct
  misc_feature 1..20: note = chemically synthesized
  source 1..20: mol_type = other DNA
gctctcagcccctctttcta

SEQ ID NO: 20650 - DNA, 20 bp, synthetic construct
  misc_feature 1..20: note = chemically synthesized
  source 1..20: mol_type = other DNA
ctctcagcccctctttctag

SEQ ID NO: 20651 - DNA, 20 bp, synthetic construct
  misc_feature 1..20: note = chemically synthesized
  source 1..20: mol_type = other DNA
tctttctagaggctccacct

SEQ ID NO: 20652 - DNA, 20 bp, synthetic construct
  misc_feature 1..20: note = chemically synthesized
  source 1..20: mol_type = other DNA
tagaggctccacctaagcct

SEQ ID NO: 20653 - DNA, 20 bp, synthetic construct
  misc_feature 1..20: note = chemically synthesized
  source 1..20: mol_type = other DNA
agaggctccacctaagcctt

SEQ ID NO: 20654 - DNA, 20 bp, synthetic construct
  misc_feature 1..20: note = chemically synthesized
  source 1..20: mol_type = other DNA
gctccacctaagccttagga

SEQ ID NO: 20655 - DNA, 20 bp, synthetic construct
  misc_feature 1..20: note = chemically synthesized
  source 1..20: mol_type = other DNA
ccttaggaaagactttcgtt

SEQ ID NO: 20656 - DNA, 20 bp, synthetic construct
  misc_feature 1..20: note = chemically synthesized
  source 1..20: mol_type = other DNA
gactttcgtttggttttaac

SEQ ID NO: 20657 - DNA, 20 bp, synthetic construct
  misc_feature 1..20: note = chemically synthesized
  source 1..20: mol_type = other DNA
ggttttaactggctcctgtc

SEQ ID NO: 20658 - DNA, 20 bp, synthetic construct
  misc_feature 1..20: note = chemically synthesized
  source 1..20: mol_type = other DNA
gttttaactggctcctgtca

SEQ ID NO: 20659 - DNA, 20 bp, synthetic construct
  misc_feature 1..20: note = chemically synthesized
  source 1..20: mol_type = other DNA
ttttaactggctcctgtcaa

SEQ ID NO: 20660 - DNA, 20 bp, synthetic construct
  misc_feature 1..20: note = chemically synthesized
  source 1..20: mol_type = other DNA
tgtcaagggttcccccaaac

SEQ ID NO: 20661 - DNA, 20 bp, synthetic construct
  misc_feature 1..20: note = chemically synthesized
  source 1..20: mol_type = other DNA
ccatttacattataatgcaa

SEQ ID NO: 20662 - DNA, 20 bp, synthetic construct
  misc_feature 1..20: note = chemically synthesized
  source 1..20: mol_type = other DNA
aatgcaaaagctcttccctg

SEQ ID NO: 20663 - DNA, 20 bp, synthetic construct
  misc_feature 1..20: note = chemically synthesized
  source 1..20: mol_type = other DNA
atgcaaaagctcttccctgt

SEQ ID NO: 20664 - DNA, 20 bp, synthetic construct
  misc_feature 1..20: note = chemically synthesized
  source 1..20: mol_type = other DNA
aagctcttccctgtgggtct

SEQ ID NO: 20665 - DNA, 20 bp, synthetic construct
  misc_feature 1..20: note = chemically synthesized
  source 1..20: mol_type = other DNA
agctcttccctgtgggtctc

SEQ ID NO: 20666 - DNA, 20 bp, synthetic construct
  misc_feature 1..20: note = chemically synthesized
  source 1..20: mol_type = other DNA
gctcttccctgtgggtctca

SEQ ID NO: 20667 - DNA, 20 bp, synthetic construct
  misc_feature 1..20: note = chemically synthesized
  source 1..20: mol_type = other DNA
cctgtgggtctcagggcctg

SEQ ID NO: 20668 - DNA, 20 bp, synthetic construct
  misc_feature 1..20: note = chemically synthesized
  source 1..20: mol_type = other DNA
ctgtgggtctcagggcctgt

SEQ ID NO: 20669 - DNA, 20 bp, synthetic construct
  misc_feature 1..20: note = chemically synthesized
  source 1..20: mol_type = other DNA
tgtgggtctcagggcctgtg

SEQ ID NO: 20670 - DNA, 20 bp, synthetic construct
  misc_feature 1..20: note = chemically synthesized
  source 1..20: mol_type = other DNA
ctcagggcctgtggggaaaa

SEQ ID NO: 20671 - DNA, 20 bp, synthetic construct
  misc_feature 1..20: note = chemically synthesized
  source 1..20: mol_type = other DNA
cctgtggggaaaatggaatc

SEQ ID NO: 20672 - DNA, 20 bp, synthetic construct
  misc_feature 1..20: note = chemically synthesized
  source 1..20: mol_type = other DNA
atggaatctggctcaaaccc

SEQ ID NO: 20673 - DNA, 20 bp, synthetic construct
  misc_feature 1..20: note = chemically synthesized
  source 1..20: mol_type = other DNA
tggctcaaacccaagatcca

SEQ ID NO: 20674 - DNA, 20 bp, synthetic construct
  misc_feature 1..20: note = chemically synthesized
  source 1..20: mol_type = other DNA
aaacccaagatccaaagcta

SEQ ID NO: 20675 - DNA, 20 bp, synthetic construct
  misc_feature 1..20: note = chemically synthesized
  source 1..20: mol_type = other DNA
atccaaagctaaagtgcccc

SEQ ID NO: 20676 - DNA, 20 bp, synthetic construct
  misc_feature 1..20: note = chemically synthesized
  source 1..20: mol_type = other DNA
tccaaagctaaagtgccccc

SEQ ID NO: 20677 - DNA, 20 bp, synthetic construct
  misc_feature 1..20: note = chemically synthesized
  source 1..20: mol_type = other DNA
aagctaaagtgcccccaggt

SEQ ID NO: 20678 - DNA, 20 bp, synthetic construct
  misc_feature 1..20: note = chemically synthesized
  source 1..20: mol_type = other DNA
agctaaagtgcccccaggtt

SEQ ID NO: 20679 - DNA, 20 bp, synthetic construct
  misc_feature 1..20: note = chemically synthesized
  source 1..20: mol_type = other DNA
ccccaggttgggctgcctga

SEQ ID NO: 20680 - DNA, 20 bp, synthetic construct
  misc_feature 1..20: note = chemically synthesized
  source 1..20: mol_type = other DNA
tgggctgcctgacagtttta

SEQ ID NO: 20681 - DNA, 20 bp, synthetic construct
  misc_feature 1..20: note = chemically synthesized
  source 1..20: mol_type = other DNA
gcctgacagttttatagata

SEQ ID NO: 20682 - DNA, 20 bp, synthetic construct
  misc_feature 1..20: note = chemically synthesized
  source 1..20: mol_type = other DNA
agttttatagatatggcatt

SEQ ID NO: 20683 - DNA, 20 bp, synthetic construct
  misc_feature 1..20: note = chemically synthesized
  source 1..20: mol_type = other DNA
tttatagatatggcattgag

SEQ ID NO: 20684 - DNA, 20 bp, synthetic construct
  misc_feature 1..20: note = chemically synthesized
  source 1..20: mol_type = other DNA
tatggcattgagtggcctcc

SEQ ID NO: 20685 - DNA, 20 bp, synthetic construct
  misc_feature 1..20: note = chemically synthesized
  source 1..20: mol_type = other DNA
ggcattgagtggcctcctgg

SEQ ID NO: 20686 - DNA, 20 bp, synthetic construct
  misc_feature 1..20: note = chemically synthesized
  source 1..20: mol_type = other DNA
tgagtggcctcctggcagtt

SEQ ID NO: 20687 - DNA, 20 bp, synthetic construct
  misc_feature 1..20: note = chemically synthesized
  source 1..20: mol_type = other DNA
cctggcagtttggaattgtg

SEQ ID NO: 20688 - DNA, 20 bp, synthetic construct
  misc_feature 1..20: note = chemically synthesized
  source 1..20: mol_type = other DNA
ctggcagtttggaattgtga

SEQ ID NO: 20689 - DNA, 20 bp, synthetic construct
  misc_feature 1..20: note = chemically synthesized
  source 1..20: mol_type = other DNA
tttgaacacctgccacatgc

SEQ ID NO: 20690 - DNA, 20 bp, synthetic construct
  misc_feature 1..20: note = chemically synthesized
  source 1..20: mol_type = other DNA
ttgaacacctgccacatgct

SEQ ID NO: 20691 - DNA, 20 bp, synthetic construct
  misc_feature 1..20: note = chemically synthesized
  source 1..20: mol_type = other DNA
cacctgccacatgctgggaa

SEQ ID NO: 20692 - DNA, 20 bp, synthetic construct
  misc_feature 1..20: note = chemically synthesized
  source 1..20: mol_type = other DNA
cacatgctgggaacggttct

SEQ ID NO: 20693 - DNA, 20 bp, synthetic construct
  misc_feature 1..20: note = chemically synthesized
  source 1..20: mol_type = other DNA
ctgggaacggttcttggtgt

SEQ ID NO: 20694 - DNA, 20 bp, synthetic construct
  misc_feature 1..20: note = chemically synthesized
  source 1..20: mol_type = other DNA
tgggaacggttcttggtgtt

SEQ ID NO: 20695 - DNA, 20 bp, synthetic construct
  misc_feature 1..20: note = chemically synthesized
  source 1..20: mol_type = other DNA
acggttcttggtgttgggca

SEQ ID NO: 20696 - DNA, 20 bp, synthetic construct
  misc_feature 1..20: note = chemically synthesized
  source 1..20: mol_type = other DNA
ttcttggtgttgggcataga

SEQ ID NO: 20697 - DNA, 20 bp, synthetic construct
  misc_feature 1..20: note = chemically synthesized
  source 1..20: mol_type = other DNA
ttaaaaactccctgctcttg

SEQ ID NO: 20698 - DNA, 20 bp, synthetic construct
  misc_feature 1..20: note = chemically synthesized
  source 1..20: mol_type = other DNA
ctcttgtggcaccccctttc

SEQ ID NO: 20699 - DNA, 20 bp, synthetic construct
  misc_feature 1..20: note = chemically synthesized
  source 1..20: mol_type = other DNA
tgtggcaccccctttctagc

SEQ ID NO: 20700 - DNA, 20 bp, synthetic construct
  misc_feature 1..20: note = chemically synthesized
  source 1..20: mol_type = other DNA
gtggcaccccctttctagct

SEQ ID NO: 20701 - DNA, 20 bp, synthetic construct
  misc_feature 1..20: note = chemically synthesized
  source 1..20: mol_type = other DNA
tggcaccccctttctagctg

SEQ ID NO: 20702 - DNA, 20 bp, synthetic construct
  misc_feature 1..20: note = chemically synthesized
  source 1..20: mol_type = other DNA
gcaccccctttctagctggg

SEQ ID NO: 20703 - DNA, 20 bp, synthetic construct
  misc_feature 1..20: note = chemically synthesized
  source 1..20: mol_type = other DNA
accccctttctagctgggga

SEQ ID NO: 20704 - DNA, 20 bp, synthetic construct
  misc_feature 1..20: note = chemically synthesized
  source 1..20: mol_type = other DNA
cctttctagctggggagaga

SEQ ID NO: 20705 - DNA, 20 bp, synthetic construct
  misc_feature 1..20: note = chemically synthesized
  source 1..20: mol_type = other DNA
ttctagctggggagagacag

SEQ ID NO: 20706 - DNA, 20 bp, synthetic construct
  misc_feature 1..20: note = chemically synthesized
  source 1..20: mol_type = other DNA
caataaatatgtgaattata

SEQ ID NO: 20707 - DNA, 20 bp, synthetic construct
  misc_feature 1..20: note = chemically synthesized
  source 1..20: mol_type = other DNA
aatatgtgaattatatagta

SEQ ID NO: 20708 - DNA, 20 bp, synthetic construct
  misc_feature 1..20: note = chemically synthesized
  source 1..20: mol_type = other DNA
tgtgaattatatagtatggc

SEQ ID NO: 20709 - DNA, 20 bp, synthetic construct
  misc_feature 1..20: note = chemically synthesized
  source 1..20: mol_type = other DNA
tgaattatatagtatggcaa

SEQ ID NO: 20710 - DNA, 20 bp, synthetic construct
  misc_feature 1..20: note = chemically synthesized
  source 1..20: mol_type = other DNA
attatatagtatggcaagag

SEQ ID NO: 20711 - DNA, 20 bp, synthetic construct
  misc_feature 1..20: note = chemically synthesized
  source 1..20: mol_type = other DNA
caaactgcctgcacgaaaat

SEQ ID NO: 20712 - DNA, 20 bp, synthetic construct
  misc_feature 1..20: note = chemically synthesized
  source 1..20: mol_type = other DNA
aaactgcctgcacgaaaata

SEQ ID NO: 20713 - DNA, 20 bp, synthetic construct
  misc_feature 1..20: note = chemically synthesized
  source 1..20: mol_type = other DNA
ctgcctgcacgaaaataagg

SEQ ID NO: 20714 - DNA, 20 bp, synthetic construct
  misc_feature 1..20: note = chemically synthesized
  source 1..20: mol_type = other DNA
tgcctgcacgaaaataaggt

SEQ ID NO: 20715 - DNA, 20 bp, synthetic construct
  misc_feature 1..20: note = chemically synthesized
  source 1..20: mol_type = other DNA
gcctgcacgaaaataaggtg

SEQ ID NO: 20716 - DNA, 20 bp, synthetic construct
  misc_feature 1..20: note = chemically synthesized
  source 1..20: mol_type = other DNA
tgcacgaaaataaggtgggg

SEQ ID NO: 20717 - DNA, 20 bp, synthetic construct
  misc_feature 1..20: note = chemically synthesized
  source 1..20: mol_type = other DNA
cacgaaaataaggtggggaa

SEQ ID NO: 20718 - DNA, 20 bp, synthetic construct
  misc_feature 1..20: note = chemically synthesized
  source 1..20: mol_type = other DNA
acgaaaataaggtggggaag

SEQ ID NO: 20719 - DNA, 20 bp, synthetic construct
  misc_feature 1..20: note = chemically synthesized
  source 1..20: mol_type = other DNA
cgaaaataaggtggggaaga

SEQ ID NO: 20720 - DNA, 20 bp, synthetic construct
  misc_feature 1..20: note = chemically synthesized
  source 1..20: mol_type = other DNA
gaaaataaggtggggaagag

SEQ ID NO: 20721 - DNA, 20 bp, synthetic construct
  misc_feature 1..20: note = chemically synthesized
  source 1..20: mol_type = other DNA
ataaggtggggaagaggggt

SEQ ID NO: 20722 - DNA, 20 bp, synthetic construct
  misc_feature 1..20: note = chemically synthesized
  source 1..20: mol_type = other DNA
taaggtggggaagaggggta

SEQ ID NO: 20723 - DNA, 20 bp, synthetic construct
  misc_feature 1..20: note = chemically synthesized
  source 1..20: mol_type = other DNA
aaggtggggaagaggggtaa

SEQ ID NO: 20724 - DNA, 20 bp, synthetic construct
  misc_feature 1..20: note = chemically synthesized
  source 1..20: mol_type = other DNA
aggtggggaagaggggtaag

SEQ ID NO: 20725 - DNA, 20 bp, synthetic construct
  misc_feature 1..20: note = chemically synthesized
  source 1..20: mol_type = other DNA
gaagaggggtaaggggtgca

SEQ ID NO: 20726 - DNA, 20 bp, synthetic construct
  misc_feature 1..20: note = chemically synthesized
  source 1..20: mol_type = other DNA
ggtaaggggtgcatggtgac

SEQ ID NO: 20727 - DNA, 20 bp, synthetic construct
  misc_feature 1..20: note = chemically synthesized
  source 1..20: mol_type = other DNA
gtaaggggtgcatggtgacc

SEQ ID NO: 20728 - DNA, 20 bp, synthetic construct
  misc_feature 1..20: note = chemically synthesized
  source 1..20: mol_type = other DNA
atggtgaccaggcttttaaa

SEQ ID NO: 20729 - DNA, 20 bp, synthetic construct
  misc_feature 1..20: note = chemically synthesized
  source 1..20: mol_type = other DNA
tggtgaccaggcttttaaat

SEQ ID NO: 20730 - DNA, 20 bp, synthetic construct
  misc_feature 1..20: note = chemically synthesized
  source 1..20: mol_type = other DNA
aggcttttaaataggataat

SEQ ID NO: 20731 - DNA, 20 bp, synthetic construct
  misc_feature 1..20: note = chemically synthesized
  source 1..20: mol_type = other DNA
ggcttttaaataggataatt

SEQ ID NO: 20732 - DNA, 20 bp, synthetic construct
  misc_feature 1..20: note = chemically synthesized
  source 1..20: mol_type = other DNA
gcttttaaataggataatta

SEQ ID NO: 20733 - DNA, 20 bp, synthetic construct
  misc_feature 1..20: note = chemically synthesized
  source 1..20: mol_type = other DNA
tttaaataggataattaggg

SEQ ID NO: 20734 - DNA, 20 bp, synthetic construct
  misc_feature 1..20: note = chemically synthesized
  source 1..20: mol_type = other DNA
ttaaataggataattaggga

SEQ ID NO: 20735 - DNA, 20 bp, synthetic construct
  misc_feature 1..20: note = chemically synthesized
  source 1..20: mol_type = other DNA
ataattagggaaggcccaat

SEQ ID NO: 20736 - DNA, 20 bp, synthetic construct
  misc_feature 1..20: note = chemically synthesized
  source 1..20: mol_type = other DNA
attagggaaggcccaatgag

SEQ ID NO: 20737 - DNA, 20 bp, synthetic construct
  misc_feature 1..20: note = chemically synthesized
  source 1..20: mol_type = other DNA
ggaaggcccaatgagaagca

SEQ ID NO: 20738 - DNA, 20 bp, synthetic construct
  misc_feature 1..20: note = chemically synthesized
  source 1..20: mol_type = other DNA
gaaggcccaatgagaagcaa

SEQ ID NO: 20739 - DNA, 20 bp, synthetic construct
  misc_feature 1..20: note = chemically synthesized
  source 1..20: mol_type = other DNA
aatgagaagcaaaggctcca

SEQ ID NO: 20740 - DNA, 20 bp, synthetic construct
  misc_feature 1..20: note = chemically synthesized
  source 1..20: mol_type = other DNA
tgagaagcaaaggctccaaa

SEQ ID NO: 20741 - DNA, 20 bp, synthetic construct
  misc_feature 1..20: note = chemically synthesized
  source 1..20: mol_type = other DNA
gagaagcaaaggctccaaag

SEQ ID NO: 20742 - DNA, 20 bp, synthetic construct
  misc_feature 1..20: note = chemically synthesized
  source 1..20: mol_type = other DNA
agcaaaggctccaaagaggt

SEQ ID NO: 20743 - DNA, 20 bp, synthetic construct
  misc_feature 1..20: note = chemically synthesized
  source 1..20: mol_type = other DNA
gcaaaggctccaaagaggtg

SEQ ID NO: 20744 - DNA, 20 bp, synthetic construct
  misc_feature 1..20: note = chemically synthesized
  source 1..20: mol_type = other DNA
aaggctccaaagaggtgagg

SEQ ID NO: 20745 - DNA, 20 bp, synthetic construct
  misc_feature 1..20: note = chemically synthesized
  source 1..20: mol_type = other DNA
ctccaaagaggtgaggaagt

SEQ ID NO: 20746 - DNA, 20 bp, synthetic construct
  misc_feature 1..20: note = chemically synthesized
  source 1..20: mol_type = other DNA
gaggtgaggaagttggccat

SEQ ID NO: 20747 - DNA, 20 bp, synthetic construct
  misc_feature 1..20: note = chemically synthesized
  source 1..20: mol_type = other DNA
aagttggccatgagaatttt

SEQ ID NO: 20748 - DNA, 20 bp, synthetic construct
  misc_feature 1..20: note = chemically synthesized
  source 1..20: mol_type = other DNA
ttggccatgagaattttgag

SEQ ID NO: 20749 - DNA, 20 bp, synthetic construct
  misc_feature 1..20: note = chemically synthesized
  source 1..20: mol_type = other DNA
ccatgagaattttgagaaga

SEQ ID NO: 20750 - DNA, 20 bp, synthetic construct
  misc_feature 1..20: note = chemically synthesized
  source 1..20: mol_type = other DNA
gaattttgagaagatggttc

SEQ ID NO: 20751 - DNA, 20 bp, synthetic construct
  misc_feature 1..20: note = chemically synthesized
  source 1..20: mol_type = other DNA
aattttgagaagatggttcc

SEQ ID NO: 20752 - DNA, 20 bp, synthetic construct
  misc_feature 1..20: note = chemically synthesized
  source 1..20: mol_type = other DNA
tttgagaagatggttccagg

SEQ ID NO: 20753 - DNA, 20 bp, synthetic construct
  misc_feature 1..20: note = chemically synthesized
  source 1..20: mol_type = other DNA
tgagaagatggttccaggaa

SEQ ID NO: 20754 - DNA, 20 bp, synthetic construct
  misc_feature 1..20: note = chemically synthesized
  source 1..20: mol_type = other DNA
atggttccaggaagagtgtg

SEQ ID NO: 20755 - DNA, 20 bp, synthetic construct
  misc_feature 1..20: note = chemically synthesized
  source 1..20: mol_type = other DNA
ggttccaggaagagtgtgta

SEQ ID NO: 20756 - DNA, 20 bp, synthetic construct
  misc_feature 1..20: note = chemically synthesized
  source 1..20: mol_type = other DNA
ttccaggaagagtgtgtaga

SEQ ID NO: 20757 - DNA, 20 bp, synthetic construct
  misc_feature 1..20: note = chemically synthesized
  source 1..20: mol_type = other DNA
caggaagagtgtgtagagag

SEQ ID NO: 20758 - DNA, 20 bp, synthetic construct
  misc_feature 1..20: note = chemically synthesized
  source 1..20: mol_type = other DNA
ggaagagtgtgtagagagca

SEQ ID NO: 20759 - DNA, 20 bp, synthetic construct
  misc_feature 1..20: note = chemically synthesized
  source 1..20: mol_type = other DNA
gaccttgtgtgtaatacgcc

SEQ ID NO: 20760 - DNA, 20 bp, synthetic construct
  misc_feature 1..20: note = chemically synthesized
  source 1..20: mol_type = other DNA
tgtgtaatacgcctggctac

SEQ ID NO: 20761 - DNA, 20 bp, synthetic construct
  misc_feature 1..20: note = chemically synthesized
  source 1..20: mol_type = other DNA
tgtaatacgcctggctactg

SEQ ID NO: 20762 - DNA, 20 bp, synthetic construct
  misc_feature 1..20: note = chemically synthesized
  source 1..20: mol_type = other DNA
gtaatacgcctggctactgg

SEQ ID NO: 20763 - DNA, 20 bp, synthetic construct
  misc_feature 1..20: note = chemically synthesized
  source 1..20: mol_type = other DNA
aatacgcctggctactggag

SEQ ID NO: 20764 - DNA, 20 bp, synthetic construct
  misc_feature 1..20: note = chemically synthesized
  source 1..20: mol_type = other DNA
atacgcctggctactggagg

SEQ ID NO: 20765 - DNA, 20 bp, synthetic construct
  misc_feature 1..20: note = chemically synthesized
  source 1..20: mol_type = other DNA
acgcctggctactggaggag

SEQ ID NO: 20766 - DNA, 20 bp, synthetic construct
  misc_feature 1..20: note = chemically synthesized
  source 1..20: mol_type = other DNA
ctggctactggaggaggagc

SEQ ID NO: 20767 - DNA, 20 bp, synthetic construct
  misc_feature 1..20: note = chemically synthesized
  source 1..20: mol_type = other DNA
tggctactggaggaggagca

SEQ ID NO: 20768 - DNA, 20 bp, synthetic construct
  misc_feature 1..20: note = chemically synthesized
  source 1..20: mol_type = other DNA
ggctactggaggaggagcaa

SEQ ID NO: 20769 - DNA, 20 bp, synthetic construct
  misc_feature 1..20: note = chemically synthesized
  source 1..20: mol_type = other DNA
gctactggaggaggagcaag

SEQ ID NO: 20770 - DNA, 20 bp, synthetic construct
  misc_feature 1..20: note = chemically synthesized
  source 1..20: mol_type = other DNA
gaggaggagcaaggggccct

SEQ ID NO: 20771 - DNA, 20 bp, synthetic construct
  misc_feature 1..20: note = chemically synthesized
  source 1..20: mol_type = other DNA
aggaggagcaaggggccctg

SEQ ID NO: 20772 - DNA, 20 bp, synthetic construct
  misc_feature 1..20: note = chemically synthesized
  source 1..20: mol_type = other DNA
ggagcaaggggccctgaggt

SEQ ID NO: 20773 - DNA, 20 bp, synthetic construct
  misc_feature 1..20: note = chemically synthesized
  source 1..20: mol_type = other DNA
agcaaggggccctgaggtca

SEQ ID NO: 20774 - DNA, 20 bp, synthetic construct
  misc_feature 1..20: note = chemically synthesized
  source 1..20: mol_type = other DNA
aaggggccctgaggtcagag

SEQ ID NO: 20775 - DNA, 20 bp, synthetic construct
  misc_feature 1..20: note = chemically synthesized
  source 1..20: mol_type = other DNA
ggccctgaggtcagagtgga

SEQ ID NO: 20776 - DNA, 20 bp, synthetic construct
  misc_feature 1..20: note = chemically synthesized
  source 1..20: mol_type = other DNA
ccctgaggtcagagtggaaa

SEQ ID NO: 20777 - DNA, 20 bp, synthetic construct
  misc_feature 1..20: note = chemically synthesized
  source 1..20: mol_type = other DNA
aggtcagagtggaaagagtg

SEQ ID NO: 20778 - DNA, 20 bp, synthetic construct
  misc_feature 1..20: note = chemically synthesized
  source 1..20: mol_type = other DNA
ggtcagagtggaaagagtgc

SEQ ID NO: 20779 - DNA, 20 bp, synthetic construct
  misc_feature 1..20: note = chemically synthesized
  source 1..20: mol_type = other DNA
tcagagtggaaagagtgcag

SEQ ID NO: 20780 - DNA, 20 bp, synthetic construct
  misc_feature 1..20: note = chemically synthesized
  source 1..20: mol_type = other DNA
cagagtggaaagagtgcagg

SEQ ID NO: 20781 - DNA, 20 bp, synthetic construct
  misc_feature 1..20: note = chemically synthesized
  source 1..20: mol_type = other DNA
gagtggaaagagtgcaggag

SEQ ID NO: 20782 - DNA, 20 bp, synthetic construct
  misc_feature 1..20: note = chemically synthesized
  source 1..20: mol_type = other DNA
agtggaaagagtgcaggagg

SEQ ID NO: 20783 - DNA, 20 bp, synthetic construct
  misc_feature 1..20: note = chemically synthesized
  source 1..20: mol_type = other DNA
tggaaagagtgcaggaggag

SEQ ID NO: 20784 - DNA, 20 bp, synthetic construct
  misc_feature 1..20: note = chemically synthesized
  source 1..20: mol_type = other DNA
ggaaagagtgcaggaggagg

SEQ ID NO: 20785 - DNA, 20 bp, synthetic construct
  misc_feature 1..20: note = chemically synthesized
  source 1..20: mol_type = other DNA
aaagagtgcaggaggaggag

SEQ ID NO: 20786 - DNA, 20 bp, synthetic construct
  misc_feature 1..20: note = chemically synthesized
  source 1..20: mol_type = other DNA
agagtgcaggaggaggagga

SEQ ID NO: 20787 - DNA, 20 bp, synthetic construct
  misc_feature 1..20: note = chemically synthesized
  source 1..20: mol_type = other DNA
gagtgcaggaggaggaggag

SEQ ID NO: 20788 - DNA, 20 bp, synthetic construct
  misc_feature 1..20: note = chemically synthesized
  source 1..20: mol_type = other DNA
gtgcaggaggaggaggagag

SEQ ID NO: 20789 - DNA, 20 bp, synthetic construct
  misc_feature 1..20: note = chemically synthesized
  source 1..20: mol_type = other DNA
ggaggaggaggagaggagac

SEQ ID NO: 20790 - DNA, 20 bp, synthetic construct
  misc_feature 1..20: note = chemically synthesized
  source 1..20: mol_type = other DNA
gaggaggagaggagaccagc

SEQ ID NO: 20791 - DNA, 20 bp, synthetic construct
  misc_feature 1..20: note = chemically synthesized
  source 1..20: mol_type = other DNA
ggagaccagctggctccttg

SEQ ID NO: 20792 - DNA, 20 bp, synthetic construct
  misc_feature 1..20: note = chemically synthesized
  source 1..20: mol_type = other DNA
gagaccagctggctccttga

SEQ ID NO: 20793 - DNA, 20 bp, synthetic construct
  misc_feature 1..20: note = chemically synthesized
  source 1..20: mol_type = other DNA
agctggctccttgaaggacg

SEQ ID NO: 20794 - DNA, 20 bp, synthetic construct
  misc_feature 1..20: note = chemically synthesized
  source 1..20: mol_type = other DNA
ctggctccttgaaggacgta

SEQ ID NO: 20795 - DNA, 20 bp, synthetic construct
  misc_feature 1..20: note = chemically synthesized
  source 1..20: mol_type = other DNA
gctccttgaaggacgtagag

SEQ ID NO: 20796 - DNA, 20 bp, synthetic construct
  misc_feature 1..20: note = chemically synthesized
  source 1..20: mol_type = other DNA
ctccttgaaggacgtagagc

SEQ ID NO: 20797 - DNA, 20 bp, synthetic construct
  misc_feature 1..20: note = chemically synthesized
  source 1..20: mol_type = other DNA
tccttgaaggacgtagagca

SEQ ID NO: 20798 - DNA, 20 bp, synthetic construct
  misc_feature 1..20: note = chemically synthesized
  source 1..20: mol_type = other DNA
ggacgtagagcagggatttt

SEQ ID NO: 20799 - DNA, 20 bp, synthetic construct
  misc_feature 1..20: note = chemically synthesized
  source 1..20: mol_type = other DNA
ggatttttggctctgactcc

SEQ ID NO: 20800 - DNA, 20 bp, synthetic construct
  misc_feature 1..20: note = chemically synthesized
  source 1..20: mol_type = other DNA
gatttttggctctgactcca

SEQ ID NO: 20801 - DNA, 20 bp, synthetic construct
  misc_feature 1..20: note = chemically synthesized
  source 1..20: mol_type = other DNA
atttttggctctgactccaa

SEQ ID NO: 20802 - DNA, 20 bp, synthetic construct
  misc_feature 1..20: note = chemically synthesized
  source 1..20: mol_type = other DNA
ttttggctctgactccaagg

SEQ ID NO: 20803 - DNA, 20 bp, synthetic construct
  misc_feature 1..20: note = chemically synthesized
  source 1..20: mol_type = other DNA
ggctctgactccaagggaga

SEQ ID NO: 20804 - DNA, 20 bp, synthetic construct
  misc_feature 1..20: note = chemically synthesized
  source 1..20: mol_type = other DNA
tctgactccaagggagatgg

SEQ ID NO: 20805 - DNA, 20 bp, synthetic construct
  misc_feature 1..20: note = chemically synthesized
  source 1..20: mol_type = other DNA
ccaagggagatggaagccac

SEQ ID NO: 20806 - DNA, 20 bp, synthetic construct
  misc_feature 1..20: note = chemically synthesized
  source 1..20: mol_type = other DNA
aagggagatggaagccactg

SEQ ID NO: 20807 - DNA, 20 bp, synthetic construct
  misc_feature 1..20: note = chemically synthesized
  source 1..20: mol_type = other DNA
agggagatggaagccactgg

SEQ ID NO: 20808 - DNA, 20 bp, synthetic construct
  misc_feature 1..20: note = chemically synthesized
  source 1..20: mol_type = other DNA
ggagatggaagccactggag

SEQ ID NO: 20809 - DNA, 20 bp, synthetic construct
  misc_feature 1..20: note = chemically synthesized
  source 1..20: mol_type = other DNA
tgtcatatgacttgcgcttc

SEQ ID NO: 20810 - DNA, 20 bp, synthetic construct
  misc_feature 1..20: note = chemically synthesized
  source 1..20: mol_type = other DNA
tcatatgacttgcgcttcca

SEQ ID NO: 20811 - DNA, 20 bp, synthetic construct
  misc_feature 1..20: note = chemically synthesized
  source 1..20: mol_type = other DNA
atatgacttgcgcttccaga

SEQ ID NO: 20812 - DNA, 20 bp, synthetic construct
  misc_feature 1..20: note = chemically synthesized
  source 1..20: mol_type = other DNA
tgcgcttccagagagtctct

SEQ ID NO: 20813 - DNA, 20 bp, synthetic construct
  misc_feature 1..20: note = chemically synthesized
  source 1..20: mol_type = other DNA
gcgcttccagagagtctctt

SEQ ID NO: 20814 - DNA, 20 bp, synthetic construct
  misc_feature 1..20: note = chemically synthesized
  source 1..20: mol_type = other DNA
agtctcttgggccgcatttt

SEQ ID NO: 20815 - DNA, 20 bp, synthetic construct
  misc_feature 1..20: note = chemically synthesized
  source 1..20: mol_type = other DNA
tgggccgcattttgagactc

SEQ ID NO: 20816 - DNA, 20 bp, synthetic construct
  misc_feature 1..20: note = chemically synthesized
  source 1..20: mol_type = other DNA
cgcattttgagactcaagca

SEQ ID NO: 20817 - DNA, 20 bp, synthetic construct
  misc_feature 1..20: note = chemically synthesized
  source 1..20: mol_type = other DNA
gcattttgagactcaagcat

SEQ ID NO: 20818 - DNA, 20 bp, synthetic construct
  misc_feature 1..20: note = chemically synthesized
  source 1..20: mol_type = other DNA
tttgagactcaagcatggga

SEQ ID NO: 20819 - DNA, 20 bp, synthetic construct
  misc_feature 1..20: note = chemically synthesized
  source 1..20: mol_type = other DNA
agactcaagcatgggaaagt

SEQ ID NO: 20820 - DNA, 20 bp, synthetic construct
  misc_feature 1..20: note = chemically synthesized
  source 1..20: mol_type = other DNA
gactcaagcatgggaaagtg

SEQ ID NO: 20821 - DNA, 20 bp, synthetic construct
  misc_feature 1..20: note = chemically synthesized
  source 1..20: mol_type = other DNA
tcaagcatgggaaagtgagg

SEQ ID NO: 20822 - DNA, 20 bp, synthetic construct
  misc_feature 1..20: note = chemically synthesized
  source 1..20: mol_type = other DNA
agcatgggaaagtgaggcag

SEQ ID NO: 20823 - DNA, 20 bp, synthetic construct
  misc_feature 1..20: note = chemically synthesized
  source 1..20: mol_type = other DNA
atgggaaagtgaggcagaag

SEQ ID NO: 20824 - DNA, 20 bp, synthetic construct
  misc_feature 1..20: note = chemically synthesized
  source 1..20: mol_type = other DNA
gaaagtgaggcagaagcagt

SEQ ID NO: 20825 - DNA, 20 bp, synthetic construct
  misc_feature 1..20: note = chemically synthesized
  source 1..20: mol_type = other DNA
agtgaggcagaagcagtcag

SEQ ID NO: 20826 - DNA, 20 bp, synthetic construct
  misc_feature 1..20: note = chemically synthesized
  source 1..20: mol_type = other DNA
gtgaggcagaagcagtcaga

SEQ ID NO: 20827 - DNA, 20 bp, synthetic construct
  misc_feature 1..20: note = chemically synthesized
  source 1..20: mol_type = other DNA
agcagtcagaaggcaaattt

SEQ ID NO: 20828 - DNA, 20 bp, synthetic construct
  misc_feature 1..20: note = chemically synthesized
  source 1..20: mol_type = other DNA
gcagtcagaaggcaaatttt

SEQ ID NO: 20829 - DNA, 20 bp, synthetic construct
  misc_feature 1..20: note = chemically synthesized
  source 1..20: mol_type = other DNA
tcagaaggcaaattttaggc

SEQ ID NO: 20830 - DNA, 20 bp, synthetic construct
  misc_feature 1..20: note = chemically synthesized
  source 1..20: mol_type = other DNA
ggcaaattttaggcaagtga

SEQ ID NO: 20831 - DNA, 20 bp, synthetic construct
  misc_feature 1..20: note = chemically synthesized
  source 1..20: mol_type = other DNA
aaattttaggcaagtgatgg

SEQ ID NO: 20832 - DNA, 20 bp, synthetic construct
  misc_feature 1..20: note = chemically synthesized
  source 1..20: mol_type = other DNA
ttaggcaagtgatggtggcg

SEQ ID NO: 20833 - DNA, 20 bp, synthetic construct
  misc_feature 1..20: note = chemically synthesized
  source 1..20: mol_type = other DNA
caagtgatggtggcgtggac

SEQ ID NO: 20834 - DNA, 20 bp, synthetic construct
  misc_feature 1..20: note = chemically synthesized
  source 1..20: mol_type = other DNA
aagtgatggtggcgtggacc

SEQ ID NO: 20835 - DNA, 20 bp, synthetic construct
  misc_feature 1..20: note = chemically synthesized
  source 1..20: mol_type = other DNA
agtgatggtggcgtggacca

SEQ ID NO: 20836 - DNA, 20 bp, synthetic construct
  misc_feature 1..20: note = chemically synthesized
  source 1..20: mol_type = other DNA
gatggtggcgtggaccaggg

SEQ ID NO: 20837 - DNA, 20 bp, synthetic construct
  misc_feature 1..20: note = chemically synthesized
  source 1..20: mol_type = other DNA
ggtggcgtggaccagggtgg

SEQ ID NO: 20838 - DNA, 20 bp, synthetic construct
  misc_feature 1..20: note = chemically synthesized
  source 1..20: mol_type = other DNA
gtggcgtggaccagggtggt

SEQ ID NO: 20839 - DNA, 20 bp, synthetic construct
  misc_feature 1..20: note = chemically synthesized
  source 1..20: mol_type = other DNA
tggcgtggaccagggtggtg

SEQ ID NO: 20840 - DNA, 20 bp, synthetic construct
  misc_feature 1..20: note = chemically synthesized
  source 1..20: mol_type = other DNA
gaccagggtggtggggacgt

SEQ ID NO: 20841 - DNA, 20 bp, synthetic construct
  misc_feature 1..20: note = chemically synthesized
  source 1..20: mol_type = other DNA
cagggtggtggggacgtgag

SEQ ID NO: 20842 - DNA, 20 bp, synthetic construct
  misc_feature 1..20: note = chemically synthesized
  source 1..20: mol_type = other DNA
agggtggtggggacgtgaga

SEQ ID NO: 20843 - DNA, 20 bp, synthetic construct
  misc_feature 1..20: note = chemically synthesized
  source 1..20: mol_type = other DNA
gggtggtggggacgtgagaa

SEQ ID NO: 20844 - DNA, 20 bp, synthetic construct
  misc_feature 1..20: note = chemically synthesized
  source 1..20: mol_type = other DNA
ggtggtggggacgtgagaag

SEQ ID NO: 20845 - DNA, 20 bp, synthetic construct
  misc_feature 1..20: note = chemically synthesized
  source 1..20: mol_type = other DNA
gtggggacgtgagaaggggc

SEQ ID NO: 20846 - DNA, 20 bp, synthetic construct
  misc_feature 1..20: note = chemically synthesized
  source 1..20: mol_type = other DNA
cgtgagaaggggctggattc

SEQ ID NO: 20847 - DNA, 20 bp, synthetic construct
  misc_feature 1..20: note = chemically synthesized
  source 1..20: mol_type = other DNA
tggattctggacatacttcg

SEQ ID NO: 20848 - DNA, 20 bp, synthetic construct
  misc_feature 1..20: note = chemically synthesized
  source 1..20: mol_type = other DNA
ggattctggacatacttcga

SEQ ID NO: 20849 - DNA, 20 bp, synthetic construct
  misc_feature 1..20: note = chemically synthesized
  source 1..20: mol_type = other DNA
gattctggacatacttcgaa

SEQ ID NO: 20850 - DNA, 20 bp, synthetic construct
  misc_feature 1..20: note = chemically synthesized
  source 1..20: mol_type = other DNA
acatacttcgaagggaaaac

SEQ ID NO: 20851 - DNA, 20 bp, synthetic construct
  misc_feature 1..20: note = chemically synthesized
  source 1..20: mol_type = other DNA
tacttcgaagggaaaaccgg

SEQ ID NO: 20852 - DNA, 20 bp, synthetic construct
  misc_feature 1..20: note = chemically synthesized
  source 1..20: mol_type = other DNA
acttcgaagggaaaaccggc

SEQ ID NO: 20853 - DNA, 20 bp, synthetic construct
  misc_feature 1..20: note = chemically synthesized
  source 1..20: mol_type = other DNA
aaccggcaggatttgctgac

SEQ ID NO: 20854 - DNA, 20 bp, synthetic construct
  misc_feature 1..20: note = chemically synthesized
  source 1..20: mol_type = other DNA
cggcaggatttgctgactgg

SEQ ID NO: 20855 - DNA, 20 bp, synthetic construct
  misc_feature 1..20: note = chemically synthesized
  source 1..20: mol_type = other DNA
ggcaggatttgctgactggt

SEQ ID NO: 20856 - DNA, 20 bp, synthetic construct
  misc_feature 1..20: note = chemically synthesized
  source 1..20: mol_type = other DNA
ggatttgctgactggtggga

SEQ ID NO: 20857 - DNA, 20 bp, synthetic construct
  misc_feature 1..20: note = chemically synthesized
  source 1..20: mol_type = other DNA
gatttgctgactggtgggat

SEQ ID NO: 20858 - DNA, 20 bp, synthetic construct
  misc_feature 1..20: note = chemically synthesized
  source 1..20: mol_type = other DNA
tggtgggatgggttgtatga

SEQ ID NO: 20859 - DNA, 20 bp, synthetic construct
  misc_feature 1..20: note = chemically synthesized
  source 1..20: mol_type = other DNA
ggtgggatgggttgtatgaa

SEQ ID NO: 20860 - DNA, 20 bp, synthetic construct
  misc_feature 1..20: note = chemically synthesized
  source 1..20: mol_type = other DNA
gggatgggttgtatgaaagg

SEQ ID NO: 20861 - DNA, 20 bp, synthetic construct
  misc_feature 1..20: note = chemically synthesized
  source 1..20: mol_type = other DNA
ggatgggttgtatgaaagga

SEQ ID NO: 20862 - DNA, 20 bp, synthetic construct
  misc_feature 1..20: note = chemically synthesized
  source 1..20: mol_type = other DNA
gatgggttgtatgaaaggaa

SEQ ID NO: 20863 - DNA, 20 bp, synthetic construct
  misc_feature 1..20: note = chemically synthesized
  source 1..20: mol_type = other DNA
tgggttgtatgaaaggaagg

SEQ ID NO: 20864 - DNA, 20 bp, synthetic construct
  misc_feature 1..20: note = chemically synthesized
  source 1..20: mol_type = other DNA
gggttgtatgaaaggaaggg

SEQ ID NO: 20865 - DNA, 20 bp, synthetic construct
  misc_feature 1..20: note = chemically synthesized
  source 1..20: mol_type = other DNA
gttgtatgaaaggaagggag

SEQ ID NO: 20866 - DNA, 20 bp, synthetic construct
  misc_feature 1..20: note = chemically synthesized
  source 1..20: mol_type = other DNA
atgaaaggaagggaggagtc

SEQ ID NO: 20867 - DNA, 20 bp, synthetic construct
  misc_feature 1..20: note = chemically synthesized
  source 1..20: mol_type = other DNA
aaggaagggaggagtcaaga

SEQ ID NO: 20868 - DNA, 20 bp, synthetic construct
  misc_feature 1..20: note = chemically synthesized
  source 1..20: mol_type = other DNA
aagatggaccccaaaatgtg

SEQ ID NO: 20869 - DNA, 20 bp, synthetic construct
  misc_feature 1..20: note = chemically synthesized
  source 1..20: mol_type = other DNA
ggaccccaaaatgtgtggct

SEQ ID NO: 20870 - DNA, 20 bp, synthetic construct
  misc_feature 1..20: note = chemically synthesized
  source 1..20: mol_type = other DNA
aaaatgtgtggctcggtgac

SEQ ID NO: 20871 - DNA, 20 bp, synthetic construct
  misc_feature 1..20: note = chemically synthesized
  source 1..20: mol_type = other DNA
aaatgtgtggctcggtgact

SEQ ID NO: 20872 - DNA, 20 bp, synthetic construct
  misc_feature 1..20: note = chemically synthesized
  source 1..20: mol_type = other DNA
atgtgtggctcggtgactgg

SEQ ID NO: 20873 - DNA, 20 bp, synthetic construct
  misc_feature 1..20: note = chemically synthesized
  source 1..20: mol_type = other DNA
tggctcggtgactgggagaa

SEQ ID NO: 20874 - DNA, 20 bp, synthetic construct
  misc_feature 1..20: note = chemically synthesized
  source 1..20: mol_type = other DNA
agaatagaattgctgtttat

SEQ ID NO: 20875 - DNA, 20 bp, synthetic construct
  misc_feature 1..20: note = chemically synthesized
  source 1..20: mol_type = other DNA
gaatagaattgctgtttatt

SEQ ID NO: 20876 - DNA, 20 bp, synthetic construct
  misc_feature 1..20: note = chemically synthesized
  source 1..20: mol_type = other DNA
agaattgctgtttattggga

SEQ ID NO: 20877 - DNA, 20 bp, synthetic construct
  misc_feature 1..20: note = chemically synthesized
  source 1..20: mol_type = other DNA
gaattgctgtttattgggat

SEQ ID NO: 20878 - DNA, 20 bp, synthetic construct
  misc_feature 1..20: note = chemically synthesized
  source 1..20: mol_type = other DNA
tgctgtttattgggatgggc

SEQ ID NO: 20879 - DNA, 20 bp, synthetic construct
  misc_feature 1..20: note = chemically synthesized
  source 1..20: mol_type = other DNA
gtttattgggatgggccaga

SEQ ID NO: 20880 - DNA, 20 bp, synthetic construct
  misc_feature 1..20: note = chemically synthesized
  source 1..20: mol_type = other DNA
tttattgggatgggccagaa

SEQ ID NO: 20881 - DNA, 20 bp, synthetic construct
  misc_feature 1..20: note = chemically synthesized
  source 1..20: mol_type = other DNA
gggatgggccagaaaggctg

SEQ ID NO: 20882 - DNA, 20 bp, synthetic construct
  misc_feature 1..20: note = chemically synthesized
  source 1..20: mol_type = other DNA
gatgggccagaaaggctgtg

SEQ ID NO: 20883 - DNA, 20 bp, synthetic construct
  misc_feature 1..20: note = chemically synthesized
  source 1..20: mol_type = other DNA
atgggccagaaaggctgtgg

SEQ ID NO: 20884 - DNA, 20 bp, synthetic construct
  misc_feature 1..20: note = chemically synthesized
  source 1..20: mol_type = other DNA
agaaaggctgtggaggtgct

SEQ ID NO: 20885 - DNA, 20 bp, synthetic construct
  misc_feature 1..20: note = chemically synthesized
  source 1..20: mol_type = other DNA
aaaggctgtggaggtgctca

SEQ ID NO: 20886 - DNA, 20 bp, synthetic construct
  misc_feature 1..20: note = chemically synthesized
  source 1..20: mol_type = other DNA
aaggctgtggaggtgctcag

SEQ ID NO: 20887 - DNA, 20 bp, synthetic construct
  misc_feature 1..20: note = chemically synthesized
  source 1..20: mol_type = other DNA
ctgtggaggtgctcagagga

SEQ ID NO: 20888 - DNA, 20 bp, synthetic construct
  misc_feature 1..20: note = chemically synthesized
  source 1..20: mol_type = other DNA
tgtggaggtgctcagaggat

SEQ ID NO: 20889 - DNA, 20 bp, synthetic construct
  misc_feature 1..20: note = chemically synthesized
  source 1..20: mol_type = other DNA
gctcagaggatgggtgtgtc

SEQ ID NO: 20890 - DNA, 20 bp, synthetic construct
  misc_feature 1..20: note = chemically synthesized
  source 1..20: mol_type = other DNA
ctcagaggatgggtgtgtct

SEQ ID NO: 20891 - DNA, 20 bp, synthetic construct
  misc_feature 1..20: note = chemically synthesized
  source 1..20: mol_type = other DNA
tcagaggatgggtgtgtctg

SEQ ID NO: 20892 - DNA, 20 bp, synthetic construct
  misc_feature 1..20: note = chemically synthesized
  source 1..20: mol_type = other DNA
ctggggctccttcaccactt

SEQ ID NO: 20893 - DNA, 20 bp, synthetic construct
  misc_feature 1..20: note = chemically synthesized
  source 1..20: mol_type = other DNA
tggggctccttcaccacttc

SEQ ID NO: 20894 - DNA, 20 bp, synthetic construct
  misc_feature 1..20: note = chemically synthesized
  source 1..20: mol_type = other DNA
ccttcaccacttcaggactt

SEQ ID NO: 20895 - DNA, 20 bp, synthetic construct
  misc_feature 1..20: note = chemically synthesized
  source 1..20: mol_type = other DNA
tcaccacttcaggacttcag

SEQ ID NO: 20896 - DNA, 20 bp, synthetic construct
  misc_feature 1..20: note = chemically synthesized
  source 1..20: mol_type = other DNA
ttcaggacttcagtggatgc

SEQ ID NO: 20897 - DNA, 20 bp, synthetic construct
  misc_feature 1..20: note = chemically synthesized
  source 1..20: mol_type = other DNA
tgctagactactgccctgtt

SEQ ID NO: 20898 - DNA, 20 bp, synthetic construct
  misc_feature 1..20: note = chemically synthesized
  source 1..20: mol_type = other DNA
gctagactactgccctgttc

SEQ ID NO: 20899 - DNA, 20 bp, synthetic construct
  misc_feature 1..20: note = chemically synthesized
  source 1..20: mol_type = other DNA
agactactgccctgttcagg

SEQ ID NO: 20900 - DNA, 20 bp, synthetic construct
  misc_feature 1..20: note = chemically synthesized
  source 1..20: mol_type = other DNA
gccctgttcaggaagatcgt

SEQ ID NO: 20901 - DNA, 20 bp, synthetic construct
  misc_feature 1..20: note = chemically synthesized
  source 1..20: mol_type = other DNA
ccctgttcaggaagatcgtg

SEQ ID NO: 20902 - DNA, 20 bp, synthetic construct
  misc_feature 1..20: note = chemically synthesized
  source 1..20: mol_type = other DNA
cctgttcaggaagatcgtga

SEQ ID NO: 20903 - DNA, 20 bp, synthetic construct
  misc_feature 1..20: note = chemically synthesized
  source 1..20: mol_type = other DNA
ctgttcaggaagatcgtgag

SEQ ID NO: 20904 - DNA, 20 bp, synthetic construct
  misc_feature 1..20: note = chemically synthesized
  source 1..20: mol_type = other DNA
tcaggaagatcgtgagggga

SEQ ID NO: 20905 - DNA, 20 bp, synthetic construct
  misc_feature 1..20: note = chemically synthesized
  source 1..20: mol_type = other DNA
aggaagatcgtgaggggaaa

SEQ ID NO: 20906 - DNA, 20 bp, synthetic construct
  misc_feature 1..20: note = chemically synthesized
  source 1..20: mol_type = other DNA
gaagatcgtgaggggaaaga

SEQ ID NO: 20907 - DNA, 20 bp, synthetic construct
  misc_feature 1..20: note = chemically synthesized
  source 1..20: mol_type = other DNA
gatcgtgaggggaaagagag

SEQ ID NO: 20908 - DNA, 20 bp, synthetic construct
  misc_feature 1..20: note = chemically synthesized
  source 1..20: mol_type = other DNA
agagagtagccccccgattg

SEQ ID NO: 20909 - DNA, 20 bp, synthetic construct
  misc_feature 1..20: note = chemically synthesized
  source 1..20: mol_type = other DNA
gccccccgattgtggctgtt

SEQ ID NO: 20910 - DNA, 20 bp, synthetic construct
  misc_feature 1..20: note = chemically synthesized
  source 1..20: mol_type = other DNA
cccccgattgtggctgttcg

SEQ ID NO: 20911 - DNA, 20 bp, synthetic construct
  misc_feature 1..20: note = chemically synthesized
  source 1..20: mol_type = other DNA
cccgattgtggctgttcgga

SEQ ID NO: 20912 - DNA, 20 bp, synthetic construct
  misc_feature 1..20: note = chemically synthesized
  source 1..20: mol_type = other DNA
tgtggctgttcggagagccc

SEQ ID NO: 20913 - DNA, 20 bp, synthetic construct
  misc_feature 1..20: note = chemically synthesized
  source 1..20: mol_type = other DNA
gagccccagttgactgccta

SEQ ID NO: 20914 - DNA, 20 bp, synthetic construct
  misc_feature 1..20: note = chemically synthesized
  source 1..20: mol_type = other DNA
ccagttgactgcctatagct

SEQ ID NO: 20915 - DNA, 20 bp, synthetic construct
  misc_feature 1..20: note = chemically synthesized
  source 1..20: mol_type = other DNA
gcctatagctgagatgattt

SEQ ID NO: 20916 - DNA, 20 bp, synthetic construct
  misc_feature 1..20: note = chemically synthesized
  source 1..20: mol_type = other DNA
tagctgagatgatttaagtc

SEQ ID NO: 20917 - DNA, 20 bp, synthetic construct
  misc_feature 1..20: note = chemically synthesized
  source 1..20: mol_type = other DNA
atgatttaagtcgagttctt

SEQ ID NO: 20918 - DNA, 20 bp, synthetic construct
  misc_feature 1..20: note = chemically synthesized
  source 1..20: mol_type = other DNA
tgatttaagtcgagttcttt

SEQ ID NO: 20919 - DNA, 20 bp, synthetic construct
  misc_feature 1..20: note = chemically synthesized
  source 1..20: mol_type = other DNA
gatttaagtcgagttctttg

SEQ ID NO: 20920 - DNA, 20 bp, synthetic construct
  misc_feature 1..20: note = chemically synthesized
  source 1..20: mol_type = other DNA
tttaagtcgagttctttggg

SEQ ID NO: 20921 - DNA, 20 bp, synthetic construct
  misc_feature 1..20: note = chemically synthesized
  source 1..20: mol_type = other DNA
ttaagtcgagttctttgggg

SEQ ID NO: 20922 - DNA, 20 bp, synthetic construct
  misc_feature 1..20: note = chemically synthesized
  source 1..20: mol_type = other DNA
taagtcgagttctttgggga

SEQ ID NO: 20923 - DNA, 20 bp, synthetic construct
  misc_feature 1..20: note = chemically synthesized
  source 1..20: mol_type = other DNA
tcgagttctttggggagggc

SEQ ID NO: 20924 - DNA, 20 bp, synthetic construct
  misc_feature 1..20: note = chemically synthesized
  source 1..20: mol_type = other DNA
cgagttctttggggagggcc

SEQ ID NO: 20925 - DNA, 20 bp, synthetic construct
  misc_feature 1..20: note = chemically synthesized
  source 1..20: mol_type = other DNA
tttccttctctgttgttctt

SEQ ID NO: 20926 - DNA, 20 bp, synthetic construct
  misc_feature 1..20: note = chemically synthesized
  source 1..20: mol_type = other DNA
ctgttgttctttagctacca

SEQ ID NO: 20927 - DNA, 20 bp, synthetic construct
  misc_feature 1..20: note = chemically synthesized
  source 1..20: mol_type = other DNA
gacaacttgatcttttgatc

SEQ ID NO: 20928 - DNA, 20 bp, synthetic construct
  misc_feature 1..20: note = chemically synthesized
  source 1..20: mol_type = other DNA
acttgatcttttgatccaga

SEQ ID NO: 20929 - DNA, 20 bp, synthetic construct
  misc_feature 1..20: note = chemically synthesized
  source 1..20: mol_type = other DNA
tttcccttcgtttgttttct

SEQ ID NO: 20930 - DNA, 20 bp, synthetic construct
  misc_feature 1..20: note = chemically synthesized
  source 1..20: mol_type = other DNA
ttcccttcgtttgttttctc

SEQ ID NO: 20931 - DNA, 20 bp, synthetic construct
  misc_feature 1..20: note = chemically synthesized
  source 1..20: mol_type = other DNA
tcgtttgttttctcaggtct

SEQ ID NO: 20932 - DNA, 20 bp, synthetic construct
  misc_feature 1..20: note = chemically synthesized
  source 1..20: mol_type = other DNA
cgtttgttttctcaggtctc

SEQ ID NO: 20933 - DNA, 20 bp, synthetic construct
  misc_feature 1..20: note = chemically synthesized
  source 1..20: mol_type = other DNA
ttgttttctcaggtctcagg

SEQ ID NO: 20934 - DNA, 20 bp, synthetic construct
  misc_feature 1..20: note = chemically synthesized
  source 1..20: mol_type = other DNA
caggtctcaggtagaccatc

SEQ ID NO: 20935 - DNA, 20 bp, synthetic construct
  misc_feature 1..20: note = chemically synthesized
  source 1..20: mol_type = other DNA
accatcgagctgctgttaat

SEQ ID NO: 20936 - DNA, 20 bp, synthetic construct
  misc_feature 1..20: note = chemically synthesized
  source 1..20: mol_type = other DNA
tgctgttaattggtgatatt

SEQ ID NO: 20937 - DNA, 20 bp, synthetic construct
  misc_feature 1..20: note = chemically synthesized
  source 1..20: mol_type = other DNA
gctgttaattggtgatattt

SEQ ID NO: 20938 - DNA, 20 bp, synthetic construct
  misc_feature 1..20: note = chemically synthesized
  source 1..20: mol_type = other DNA
taattggtgatatttaggaa

SEQ ID NO: 20939 - DNA, 20 bp, synthetic construct
  misc_feature 1..20: note = chemically synthesized
  source 1..20: mol_type = other DNA
aattggtgatatttaggaat

SEQ ID NO: 20940 - DNA, 20 bp, synthetic construct
  misc_feature 1..20: note = chemically synthesized
  source 1..20: mol_type = other DNA
ggtgatatttaggaatgggt

SEQ ID NO: 20941 - DNA, 20 bp, synthetic construct
  misc_feature 1..20: note = chemically synthesized
  source 1..20: mol_type = other DNA
gatatttaggaatgggttgg

SEQ ID NO: 20942 - DNA, 20 bp, synthetic construct
  misc_feature 1..20: note = chemically synthesized
  source 1..20: mol_type = other DNA
ttggaagctgcatcttttcc

SEQ ID NO: 20943 - DNA, 20 bp, synthetic construct
  misc_feature 1..20: note = chemically synthesized
  source 1..20: mol_type = other DNA
gcatcttttcctggacttct

SEQ ID NO: 20944 - DNA, 20 bp, synthetic construct
  misc_feature 1..20: note = chemically synthesized
  source 1..20: mol_type = other DNA
catcttttcctggacttctc

SEQ ID NO: 20945 - DNA, 20 bp, synthetic construct
  misc_feature 1..20: note = chemically synthesized
  source 1..20: mol_type = other DNA
ccacgtgtcttgtgcttcca

SEQ ID NO: 20946 - DNA, 20 bp, synthetic construct
  misc_feature 1..20: note = chemically synthesized
  source 1..20: mol_type = other DNA
cttccacagaaccgttttct

SEQ ID NO: 20947 - DNA, 20 bp, synthetic construct
  misc_feature 1..20: note = chemically synthesized
  source 1..20: mol_type = other DNA
cgttttctgagacgtccgtg

SEQ ID NO: 20948 - DNA, 20 bp, synthetic construct
  misc_feature 1..20: note = chemically synthesized
  source 1..20: mol_type = other DNA
ccgtgtggctctgctgtgct

SEQ ID NO: 20949 - DNA, 20 bp, synthetic construct
  misc_feature 1..20: note = chemically synthesized
  source 1..20: mol_type = other DNA
cgtgtggctctgctgtgctc

SEQ ID NO: 20950 - DNA, 20 bp, synthetic construct
  misc_feature 1..20: note = chemically synthesized
  source 1..20: mol_type = other DNA
ctctgctgtgctcaggtcca

SEQ ID NO: 20951 - DNA, 20 bp, synthetic construct
  misc_feature 1..20: note = chemically synthesized
  source 1..20: mol_type = other DNA
gctgtgctcaggtccacggt

SEQ ID NO: 20952 - DNA, 20 bp, synthetic construct
  misc_feature 1..20: note = chemically synthesized
  source 1..20: mol_type = other DNA
tcaggtccacggttagcccc

SEQ ID NO: 20953 - DNA, 20 bp, synthetic construct
  misc_feature 1..20: note = chemically synthesized
  source 1..20: mol_type = other DNA
tccacggttagcccctggct

SEQ ID NO: 20954 - DNA, 20 bp, synthetic construct
  misc_feature 1..20: note = chemically synthesized
  source 1..20: mol_type = other DNA
ccctggcttggaatttcttc

SEQ ID NO: 20955 - DNA, 20 bp, synthetic construct
  misc_feature 1..20: note = chemically synthesized
  source 1..20: mol_type = other DNA
atccgttgtcctcttttcca

SEQ ID NO: 20956 - DNA, 20 bp, synthetic construct
  misc_feature 1..20: note = chemically synthesized
  source 1..20: mol_type = other DNA
tccgttgtcctcttttccac

SEQ ID NO: 20957 - DNA, 20 bp, synthetic construct
  misc_feature 1..20: note = chemically synthesized
  source 1..20: mol_type = other DNA
ctcctccctttccccatttc

SEQ ID NO: 20958 - DNA, 20 bp, synthetic construct
  misc_feature 1..20: note = chemically synthesized
  source 1..20: mol_type = other DNA
tccctttccccatttctgga

SEQ ID NO: 20959 - DNA, 20 bp, synthetic construct
  misc_feature 1..20: note = chemically synthesized
  source 1..20: mol_type = other DNA
ctttccccatttctggaaag

SEQ ID NO: 20960 - DNA, 20 bp, synthetic construct
  misc_feature 1..20: note = chemically synthesized
  source 1..20: mol_type = other DNA
tccccatttctggaaagaag

SEQ ID NO: 20961 - DNA, 20 bp, synthetic construct
  misc_feature 1..20: note = chemically synthesized
  source 1..20: mol_type = other DNA
ccccatttctggaaagaagt

SEQ ID NO: 20962 - DNA, 20 bp, synthetic construct
  misc_feature 1..20: note = chemically synthesized
  source 1..20: mol_type = other DNA
atttctggaaagaagtgggc

SEQ ID NO: 20963 - DNA, 20 bp, synthetic construct
  misc_feature 1..20: note = chemically synthesized
  source 1..20: mol_type = other DNA
gaaagaagtgggctggcaca

SEQ ID NO: 20964 - DNA, 20 bp, synthetic construct
  misc_feature 1..20: note = chemically synthesized
  source 1..20: mol_type = other DNA
aagaagtgggctggcacata

SEQ ID NO: 20965 - DNA, 20 bp, synthetic construct
  misc_feature 1..20: note = chemically synthesized
  source 1..20: mol_type = other DNA
catagagcctttttccttga

SEQ ID NO: 20966 - DNA, 20 bp, synthetic construct
  misc_feature 1..20: note = chemically synthesized
  source 1..20: mol_type = other DNA
atagagcctttttccttgaa

SEQ ID NO: 20967 - DNA, 20 bp, synthetic construct
  misc_feature 1..20: note = chemically synthesized
  source 1..20: mol_type = other DNA
agagcctttttccttgaaag

SEQ ID NO: 20968 - DNA, 20 bp, synthetic construct
  misc_feature 1..20: note = chemically synthesized
  source 1..20: mol_type = other DNA
agcctttttccttgaaagga

SEQ ID NO: 20969 - DNA, 20 bp, synthetic construct
  misc_feature 1..20: note = chemically synthesized
  source 1..20: mol_type = other DNA
ttttccttgaaaggagagtg

SEQ ID NO: 20970 - DNA, 20 bp, synthetic construct
  misc_feature 1..20: note = chemically synthesized
  source 1..20: mol_type = other DNA
ttccttgaaaggagagtgca

SEQ ID NO: 20971 - DNA, 20 bp, synthetic construct
  misc_feature 1..20: note = chemically synthesized
  source 1..20: mol_type = other DNA
gagagtgcagagccctctaa

SEQ ID NO: 20972 - DNA, 20 bp, synthetic construct
  misc_feature 1..20: note = chemically synthesized
  source 1..20: mol_type = other DNA
tgcagagccctctaatggaa

SEQ ID NO: 20973 - DNA, 20 bp, synthetic construct
  misc_feature 1..20: note = chemically synthesized
  source 1..20: mol_type = other DNA
tggaaaagtaaaaaaattct

SEQ ID NO: 20974 - DNA, 20 bp, synthetic construct
  misc_feature 1..20: note = chemically synthesized
  source 1..20: mol_type = other DNA
ttggaatcctcataacatcc

SEQ ID NO: 20975 - DNA, 20 bp, synthetic construct
  misc_feature 1..20: note = chemically synthesized
  source 1..20: mol_type = other DNA
aatcctcataacatccaagc

SEQ ID NO: 20976 - DNA, 20 bp, synthetic construct
  misc_feature 1..20: note = chemically synthesized
  source 1..20: mol_type = other DNA
cataacatccaagccagcca

SEQ ID NO: 20977 - DNA, 20 bp, synthetic construct
  misc_feature 1..20: note = chemically synthesized
  source 1..20: mol_type = other DNA
catccaagccagccaaagct

SEQ ID NO: 20978 - DNA, 20 bp, synthetic construct
  misc_feature 1..20: note = chemically synthesized
  source 1..20: mol_type = other DNA
agccagccaaagctgagacc

SEQ ID NO: 20979 - DNA, 20 bp, synthetic construct
  misc_feature 1..20: note = chemically synthesized
  source 1..20: mol_type = other DNA
gctgagaccaagtaaattat

SEQ ID NO: 20980 - DNA, 20 bp, synthetic construct
  misc_feature 1..20: note = chemically synthesized
  source 1..20: mol_type = other DNA
ctgagaccaagtaaattatt

SEQ ID NO: 20981 - DNA, 20 bp, synthetic construct
  misc_feature 1..20: note = chemically synthesized
  source 1..20: mol_type = other DNA
tgagaccaagtaaattattg

SEQ ID NO: 20982 - DNA, 20 bp, synthetic construct
  misc_feature 1..20: note = chemically synthesized
  source 1..20: mol_type = other DNA
gagaccaagtaaattattgg

SEQ ID NO: 20983 - DNA, 20 bp, synthetic construct
  misc_feature 1..20: note = chemically synthesized
  source 1..20: mol_type = other DNA
agaccaagtaaattattggg

SEQ ID NO: 20984 - DNA, 20 bp, synthetic construct
  misc_feature 1..20: note = chemically synthesized
  source 1..20: mol_type = other DNA
attattggggggtaatttgc

SEQ ID NO: 20985 - DNA, 20 bp, synthetic construct
  misc_feature 1..20: note = chemically synthesized
  source 1..20: mol_type = other DNA
ttattggggggtaatttgca

SEQ ID NO: 20986 - DNA, 20 bp, synthetic construct
  misc_feature 1..20: note = chemically synthesized
  source 1..20: mol_type = other DNA
tattggggggtaatttgcaa

SEQ ID NO: 20987 - DNA, 20 bp, synthetic construct
  misc_feature 1..20: note = chemically synthesized
  source 1..20: mol_type = other DNA
caaattgctttcttgtttct

SEQ ID NO: 20988 - DNA, 20 bp, synthetic construct
  misc_feature 1..20: note = chemically synthesized
  source 1..20: mol_type = other DNA
tgtttctcagcttgaatctt

SEQ ID NO: 20989 - DNA, 20 bp, synthetic construct
  misc_feature 1..20: note = chemically synthesized
  source 1..20: mol_type = other DNA
ctcagcttgaatctttagac

SEQ ID NO: 20990 - DNA, 20 bp, synthetic construct
  misc_feature 1..20: note = chemically synthesized
  source 1..20: mol_type = other DNA
agcttgaatctttagaccag

SEQ ID NO: 20991 - DNA, 20 bp, synthetic construct
  misc_feature 1..20: note = chemically synthesized
  source 1..20: mol_type = other DNA
agaccagaagcctgtgattt

SEQ ID NO: 20992 - DNA, 20 bp, synthetic construct
  misc_feature 1..20: note = chemically synthesized
  source 1..20: mol_type = other DNA
accagaagcctgtgatttcg

SEQ ID NO: 20993 - DNA, 20 bp, synthetic construct
  misc_feature 1..20: note = chemically synthesized
  source 1..20: mol_type = other DNA
ctgtgatttcggagtctgat

SEQ ID NO: 20994 - DNA, 20 bp, synthetic construct
  misc_feature 1..20: note = chemically synthesized
  source 1..20: mol_type = other DNA
ttcggagtctgatgagaaat

SEQ ID NO: 20995 - DNA, 20 bp, synthetic construct
  misc_feature 1..20: note = chemically synthesized
  source 1..20: mol_type = other DNA
cggagtctgatgagaaataa

SEQ ID NO: 20996 - DNA, 20 bp, synthetic construct
  misc_feature 1..20: note = chemically synthesized
  source 1..20: mol_type = other DNA
gtctgatgagaaataagagt

SEQ ID NO: 20997 - DNA, 20 bp, synthetic construct
  misc_feature 1..20: note = chemically synthesized
  source 1..20: mol_type = other DNA
aagagtcagtgtttctgtct

SEQ ID NO: 20998 - DNA, 20 bp, synthetic construct
  misc_feature 1..20: note = chemically synthesized
  source 1..20: mol_type = other DNA
ctgtctgagccacttttctt

SEQ ID NO: 20999 - DNA, 20 bp, synthetic construct
  misc_feature 1..20: note = chemically synthesized
  source 1..20: mol_type = other DNA
gtctgagccacttttctttg

SEQ ID NO: 21000 - DNA, 20 bp, synthetic construct
  misc_feature 1..20: note = chemically synthesized
  source 1..20: mol_type = other DNA
tctgagccacttttctttgg

SEQ ID NO: 21001 - DNA, 20 bp, synthetic construct
  misc_feature 1..20: note = chemically synthesized
  source 1..20: mol_type = other DNA
tgagccacttttctttggag

SEQ ID NO: 21002 - DNA, 20 bp, synthetic construct
  misc_feature 1..20: note = chemically synthesized
  source 1..20: mol_type = other DNA
gagccacttttctttggagg

SEQ ID NO: 21003 - DNA, 20 bp, synthetic construct
  misc_feature 1..20: note = chemically synthesized
  source 1..20: mol_type = other DNA
tttctttggaggaggtcctc

SEQ ID NO: 21004 - DNA, 20 bp, synthetic construct
  misc_feature 1..20: note = chemically synthesized
  source 1..20: mol_type = other DNA
ttctttggaggaggtcctct

SEQ ID NO: 21005 - DNA, 20 bp, synthetic construct
  misc_feature 1..20: note = chemically synthesized
  source 1..20: mol_type = other DNA
ggaggaggtcctctaggctt

SEQ ID NO: 21006 - DNA, 20 bp, synthetic construct
  misc_feature 1..20: note = chemically synthesized
  source 1..20: mol_type = other DNA
cctctaggctttagcaatca

SEQ ID NO: 21007 - DNA, 20 bp, synthetic construct
  misc_feature 1..20: note = chemically synthesized
  source 1..20: mol_type = other DNA
ctaggctttagcaatcacag

SEQ ID NO: 21008 - DNA, 20 bp, synthetic construct
  misc_feature 1..20: note = chemically synthesized
  source 1..20: mol_type = other DNA
tttagcaatcacagaagaac

SEQ ID NO: 21009 - DNA, 20 bp, synthetic construct
  misc_feature 1..20: note = chemically synthesized
  source 1..20: mol_type = other DNA
aatcacagaagaaccagtga

SEQ ID NO: 21010 - DNA, 20 bp, synthetic construct
  misc_feature 1..20: note = chemically synthesized
  source 1..20: mol_type = other DNA
atcacagaagaaccagtgac

SEQ ID NO: 21011 - DNA, 20 bp, synthetic construct
  misc_feature 1..20: note = chemically synthesized
  source 1..20: mol_type = other DNA
cagtgacaggttccttgtca

SEQ ID NO: 21012 - DNA, 20 bp, synthetic construct
  misc_feature 1..20: note = chemically synthesized
  source 1..20: mol_type = other DNA
agtgacaggttccttgtcat

SEQ ID NO: 21013 - DNA, 20 bp, synthetic construct
  misc_feature 1..20: note = chemically synthesized
  source 1..20: mol_type = other DNA
tgacaggttccttgtcatag

SEQ ID NO: 21014 - DNA, 20 bp, synthetic construct
  misc_feature 1..20: note = chemically synthesized
  source 1..20: mol_type = other DNA
acaggttccttgtcatagga

SEQ ID NO: 21015 - DNA, 20 bp, synthetic construct
  misc_feature 1..20: note = chemically synthesized
  source 1..20: mol_type = other DNA
cttgtcataggagagctcct

SEQ ID NO: 21016 - DNA, 20 bp, synthetic construct
  misc_feature 1..20: note = chemically synthesized
  source 1..20: mol_type = other DNA
taggagagctccttggtcct

SEQ ID NO: 21017 - DNA, 20 bp, synthetic construct
  misc_feature 1..20: note = chemically synthesized
  source 1..20: mol_type = other DNA
aggagagctccttggtcctc

SEQ ID NO: 21018 - DNA, 20 bp, synthetic construct
  misc_feature 1..20: note = chemically synthesized
  source 1..20: mol_type = other DNA
ccttggtcctcaggattcaa

SEQ ID NO: 21019 - DNA, 20 bp, synthetic construct
  misc_feature 1..20: note = chemically synthesized
  source 1..20: mol_type = other DNA
caggattcaaaagacacctt

SEQ ID NO: 21020 - DNA, 20 bp, synthetic construct
  misc_feature 1..20: note = chemically synthesized
  source 1..20: mol_type = other DNA
gattcaaaagacaccttaag

SEQ ID NO: 21021 - DNA, 20 bp, synthetic construct
  misc_feature 1..20: note = chemically synthesized
  source 1..20: mol_type = other DNA
tcaaaagacaccttaagtag

SEQ ID NO: 21022 - DNA, 20 bp, synthetic construct
  misc_feature 1..20: note = chemically synthesized
  source 1..20: mol_type = other DNA
aaagacaccttaagtagcag

SEQ ID NO: 21023 - DNA, 20 bp, synthetic construct
  misc_feature 1..20: note = chemically synthesized
  source 1..20: mol_type = other DNA
aagacaccttaagtagcagt

SEQ ID NO: 21024 - DNA, 20 bp, synthetic construct
  misc_feature 1..20: note = chemically synthesized
  source 1..20: mol_type = other DNA
acaccttaagtagcagtggg

SEQ ID NO: 21025 - DNA, 20 bp, synthetic construct
  misc_feature 1..20: note = chemically synthesized
  source 1..20: mol_type = other DNA
caccttaagtagcagtgggt

SEQ ID NO: 21026 - DNA, 20 bp, synthetic construct
  misc_feature 1..20: note = chemically synthesized
  source 1..20: mol_type = other DNA
accttaagtagcagtgggta

SEQ ID NO: 21027 - DNA, 20 bp, synthetic construct
  misc_feature 1..20: note = chemically synthesized
  source 1..20: mol_type = other DNA
agtagcagtgggtagggcgt

SEQ ID NO: 21028 - DNA, 20 bp, synthetic construct
  misc_feature 1..20: note = chemically synthesized
  source 1..20: mol_type = other DNA
gcgtaagtttaacatccctc

SEQ ID NO: 21029 - DNA, 20 bp, synthetic construct
  misc_feature 1..20: note = chemically synthesized
  source 1..20: mol_type = other DNA
cgtaagtttaacatccctca

SEQ ID NO: 21030 - DNA, 20 bp, synthetic construct
  misc_feature 1..20: note = chemically synthesized
  source 1..20: mol_type = other DNA
aagtttaacatccctcaagg

SEQ ID NO: 21031 - DNA, 20 bp, synthetic construct
  misc_feature 1..20: note = chemically synthesized
  source 1..20: mol_type = other DNA
agtttaacatccctcaaggt

SEQ ID NO: 21032 - DNA, 20 bp, synthetic construct
  misc_feature 1..20: note = chemically synthesized
  source 1..20: mol_type = other DNA
acatccctcaaggtaggcct

SEQ ID NO: 21033 - DNA, 20 bp, synthetic construct
  misc_feature 1..20: note = chemically synthesized
  source 1..20: mol_type = other DNA
catccctcaaggtaggcctt

SEQ ID NO: 21034 - DNA, 20 bp, synthetic construct
  misc_feature 1..20: note = chemically synthesized
  source 1..20: mol_type = other DNA
gtttccctctgtcccctcta

SEQ ID NO: 21035 - DNA, 20 bp, synthetic construct
  misc_feature 1..20: note = chemically synthesized
  source 1..20: mol_type = other DNA
ctctgtcccctctatggtgc

SEQ ID NO: 21036 - DNA, 20 bp, synthetic construct
  misc_feature 1..20: note = chemically synthesized
  source 1..20: mol_type = other DNA
ggtgctggctttgccacatg

SEQ ID NO: 21037 - DNA, 20 bp, synthetic construct
  misc_feature 1..20: note = chemically synthesized
  source 1..20: mol_type = other DNA
acatgtagaacaaactcttc

SEQ ID NO: 21038 - DNA, 20 bp, synthetic construct
  misc_feature 1..20: note = chemically synthesized
  source 1..20: mol_type = other DNA
aacaaactcttctggaatca

SEQ ID NO: 21039 - DNA, 20 bp, synthetic construct
  misc_feature 1..20: note = chemically synthesized
  source 1..20: mol_type = other DNA
acaaactcttctggaatcat

SEQ ID NO: 21040 - DNA, 20 bp, synthetic construct
  misc_feature 1..20: note = chemically synthesized
  source 1..20: mol_type = other DNA
tctggaatcataggtaaccc

SEQ ID NO: 21041 - DNA, 20 bp, synthetic construct
  misc_feature 1..20: note = chemically synthesized
  source 1..20: mol_type = other DNA
ctggaatcataggtaaccca

SEQ ID NO: 21042 - DNA, 20 bp, synthetic construct
  misc_feature 1..20: note = chemically synthesized
  source 1..20: mol_type = other DNA
tggaatcataggtaacccaa

SEQ ID NO: 21043 - DNA, 20 bp, synthetic construct
  misc_feature 1..20: note = chemically synthesized
  source 1..20: mol_type = other DNA
ggaatcataggtaacccaag

SEQ ID NO: 21044 - DNA, 20 bp, synthetic construct
  misc_feature 1..20: note = chemically synthesized
  source 1..20: mol_type = other DNA
gaatcataggtaacccaagg

SEQ ID NO: 21045 - DNA, 20 bp, synthetic construct
  misc_feature 1..20: note = chemically synthesized
  source 1..20: mol_type = other DNA
atcataggtaacccaagggg

SEQ ID NO: 21046 - DNA, 20 bp, synthetic construct
  misc_feature 1..20: note = chemically synthesized
  source 1..20: mol_type = other DNA
aggtaacccaagggggagct

SEQ ID NO: 21047 - DNA, 20 bp, synthetic construct
  misc_feature 1..20: note = chemically synthesized
  source 1..20: mol_type = other DNA
gtaacccaagggggagctca

SEQ ID NO: 21048 - DNA, 20 bp, synthetic construct
  misc_feature 1..20: note = chemically synthesized
  source 1..20: mol_type = other DNA
acccaagggggagctcagag

SEQ ID NO: 21049 - DNA, 20 bp, synthetic construct
  misc_feature 1..20: note = chemically synthesized
  source 1..20: mol_type = other DNA
ccaagggggagctcagagaa

SEQ ID NO: 21050 - DNA, 20 bp, synthetic construct
  misc_feature 1..20: note = chemically synthesized
  source 1..20: mol_type = other DNA
ggggagctcagagaagagtc

SEQ ID NO: 21051 - DNA, 20 bp, synthetic construct
  misc_feature 1..20: note = chemically synthesized
  source 1..20: mol_type = other DNA
gggagctcagagaagagtcc

SEQ ID NO: 21052 - DNA, 20 bp, synthetic construct
  misc_feature 1..20: note = chemically synthesized
  source 1..20: mol_type = other DNA
cagagaagagtccaggctgc

SEQ ID NO: 21053 - DNA, 20 bp, synthetic construct
  misc_feature 1..20: note = chemically synthesized
  source 1..20: mol_type = other DNA
gagtccaggctgccagtgca

SEQ ID NO: 21054 - DNA, 20 bp, synthetic construct
  misc_feature 1..20: note = chemically synthesized
  source 1..20: mol_type = other DNA
agtccaggctgccagtgcaa

SEQ ID NO: 21055 - DNA, 20 bp, synthetic construct
  misc_feature 1..20: note = chemically synthesized
  source 1..20: mol_type = other DNA
aggctgccagtgcaaaggtc

SEQ ID NO: 21056 - DNA, 20 bp, synthetic construct
  misc_feature 1..20: note = chemically synthesized
  source 1..20: mol_type = other DNA
aaaggtccagccctgtcgcc

SEQ ID NO: 21057 - DNA, 20 bp, synthetic construct
  misc_feature 1..20: note = chemically synthesized
  source 1..20: mol_type = other DNA
aaggtccagccctgtcgcca

SEQ ID NO: 21058 - DNA, 20 bp, synthetic construct
  misc_feature 1..20: note = chemically synthesized
  source 1..20: mol_type = other DNA
ggtccagccctgtcgccaag

SEQ ID NO: 21059 - DNA, 20 bp, synthetic construct
  misc_feature 1..20: note = chemically synthesized
  source 1..20: mol_type = other DNA
cctgtcgccaaggagaccct

SEQ ID NO: 21060 - DNA, 20 bp, synthetic construct
  misc_feature 1..20: note = chemically synthesized
  source 1..20: mol_type = other DNA
ctgtcgccaaggagaccctc

SEQ ID NO: 21061 - DNA, 20 bp, synthetic construct
  misc_feature 1..20: note = chemically synthesized
  source 1..20: mol_type = other DNA
tgtcgccaaggagaccctca

SEQ ID NO: 21062 - DNA, 20 bp, synthetic construct
  misc_feature 1..20: note = chemically synthesized
  source 1..20: mol_type = other DNA
gagaccctcagggaaatgca

SEQ ID NO: 21063 - DNA, 20 bp, synthetic construct
  misc_feature 1..20: note = chemically synthesized
  source 1..20: mol_type = other DNA
agaccctcagggaaatgcac

SEQ ID NO: 21064 - DNA, 20 bp, synthetic construct
  misc_feature 1..20: note = chemically synthesized
  source 1..20: mol_type = other DNA
cagggaaatgcacaggcctc

SEQ ID NO: 21065 - DNA, 20 bp, synthetic construct
  misc_feature 1..20: note = chemically synthesized
  source 1..20: mol_type = other DNA
caggcctccagctattccca

SEQ ID NO: 21066 - DNA, 20 bp, synthetic construct
  misc_feature 1..20: note = chemically synthesized
  source 1..20: mol_type = other DNA
agctattcccacggcccctg

SEQ ID NO: 21067 - DNA, 20 bp, synthetic construct
  misc_feature 1..20: note = chemically synthesized
  source 1..20: mol_type = other DNA
ttcccacggcccctgtagct

SEQ ID NO: 21068 - DNA, 20 bp, synthetic construct
  misc_feature 1..20: note = chemically synthesized
  source 1..20: mol_type = other DNA
cggcccctgtagctgagcgc

SEQ ID NO: 21069 - DNA, 20 bp, synthetic construct
  misc_feature 1..20: note = chemically synthesized
  source 1..20: mol_type = other DNA
gctgagcgccagcttcttcc

SEQ ID NO: 21070 - DNA, 20 bp, synthetic construct
  misc_feature 1..20: note = chemically synthesized
  source 1..20: mol_type = other DNA
ctgagcgccagcttcttcct

SEQ ID NO: 21071 - DNA, 20 bp, synthetic construct
  misc_feature 1..20: note = chemically synthesized
  source 1..20: mol_type = other DNA
cgccagcttcttcctgggcc

SEQ ID NO: 21072 - DNA, 20 bp, synthetic construct
  misc_feature 1..20: note = chemically synthesized
  source 1..20: mol_type = other DNA
gcttcttcctgggccaagct

SEQ ID NO: 21073 - DNA, 20 bp, synthetic construct
  misc_feature 1..20: note = chemically synthesized
  source 1..20: mol_type = other DNA
cttcttcctgggccaagctg

SEQ ID NO: 21074 - DNA, 20 bp, synthetic construct
  misc_feature 1..20: note = chemically synthesized
  source 1..20: mol_type = other DNA
tcctgccgtgtccattctcc

SEQ ID NO: 21075 - DNA, 20 bp, synthetic construct
  misc_feature 1..20: note = chemically synthesized
  source 1..20: mol_type = other DNA
ctcctagcaacgcttctctt

SEQ ID NO: 21076 - DNA, 20 bp, synthetic construct
  misc_feature 1..20: note = chemically synthesized
  source 1..20: mol_type = other DNA
tagcaacgcttctctttggc

SEQ ID NO: 21077 - DNA, 20 bp, synthetic construct
  misc_feature 1..20: note = chemically synthesized
  source 1..20: mol_type = other DNA
tctctttggccagtttgcca

SEQ ID NO: 21078 - DNA, 20 bp, synthetic construct
  misc_feature 1..20: note = chemically synthesized
  source 1..20: mol_type = other DNA
gccagtttgccatagtacct

SEQ ID NO: 21079 - DNA, 20 bp, synthetic construct
  misc_feature 1..20: note = chemically synthesized
  source 1..20: mol_type = other DNA
ccagtttgccatagtacctg

SEQ ID NO: 21080 - DNA, 20 bp, synthetic construct
  misc_feature 1..20: note = chemically synthesized
  source 1..20: mol_type = other DNA
tttgccatagtacctgaggt

SEQ ID NO: 21081 - DNA, 20 bp, synthetic construct
  misc_feature 1..20: note = chemically synthesized
  source 1..20: mol_type = other DNA
ctgccaaatgctttacatcc

SEQ ID NO: 21082 - DNA, 20 bp, synthetic construct
  misc_feature 1..20: note = chemically synthesized
  source 1..20: mol_type = other DNA
gccaaatgctttacatcccg

SEQ ID NO: 21083 - DNA, 20 bp, synthetic construct
  misc_feature 1..20: note = chemically synthesized
  source 1..20: mol_type = other DNA
ccaaatgctttacatcccgg

SEQ ID NO: 21084 - DNA, 20 bp, synthetic construct
  misc_feature 1..20: note = chemically synthesized
  source 1..20: mol_type = other DNA
atgctttacatcccggagga

SEQ ID NO: 21085 - DNA, 20 bp, synthetic construct
  misc_feature 1..20: note = chemically synthesized
  source 1..20: mol_type = other DNA
ttacatcccggaggaaagca

SEQ ID NO: 21086 - DNA, 20 bp, synthetic construct
  misc_feature 1..20: note = chemically synthesized
  source 1..20: mol_type = other DNA
gaggaaagcaaagtcctctt

SEQ ID NO: 21087 - DNA, 20 bp, synthetic construct
  misc_feature 1..20: note = chemically synthesized
  source 1..20: mol_type = other DNA
aagcaaagtcctcttcagaa

SEQ ID NO: 21088 - DNA, 20 bp, synthetic construct
  misc_feature 1..20: note = chemically synthesized
  source 1..20: mol_type = other DNA
agcaaagtcctcttcagaac

SEQ ID NO: 21089 - DNA, 20 bp, synthetic construct
  misc_feature 1..20: note = chemically synthesized
  source 1..20: mol_type = other DNA
agtcctcttcagaacaggaa

SEQ ID NO: 21090 - DNA, 20 bp, synthetic construct
  misc_feature 1..20: note = chemically synthesized
  source 1..20: mol_type = other DNA
tcttcagaacaggaaaagtc

SEQ ID NO: 21091 - DNA, 20 bp, synthetic construct
  misc_feature 1..20: note = chemically synthesized
  source 1..20: mol_type = other DNA
agaacaggaaaagtccagtg

SEQ ID NO: 21092 - DNA, 20 bp, synthetic construct
  misc_feature 1..20: note = chemically synthesized
  source 1..20: mol_type = other DNA
agttccacactgtgctattc

SEQ ID NO: 21093 - DNA, 20 bp, synthetic construct
  misc_feature 1..20: note = chemically synthesized
  source 1..20: mol_type = other DNA
tgtgctattccagaacctcc

SEQ ID NO: 21094 - DNA, 20 bp, synthetic construct
  misc_feature 1..20: note = chemically synthesized
  source 1..20: mol_type = other DNA
agttgcattcctttgccaac

SEQ ID NO: 21095 - DNA, 20 bp, synthetic construct
  misc_feature 1..20: note = chemically synthesized
  source 1..20: mol_type = other DNA
gttgcattcctttgccaact

SEQ ID NO: 21096 - DNA, 20 bp, synthetic construct
  misc_feature 1..20: note = chemically synthesized
  source 1..20: mol_type = other DNA
ttgccaactaggtaatgtgc

SEQ ID NO: 21097 - DNA, 20 bp, synthetic construct
  misc_feature 1..20: note = chemically synthesized
  source 1..20: mol_type = other DNA
tgccaactaggtaatgtgct

SEQ ID NO: 21098 - DNA, 20 bp, synthetic construct
  misc_feature 1..20: note = chemically synthesized
  source 1..20: mol_type = other DNA
gccaactaggtaatgtgcta

SEQ ID NO: 21099 - DNA, 20 bp, synthetic construct
  misc_feature 1..20: note = chemically synthesized
  source 1..20: mol_type = other DNA
tgctagggatatttgtctcg

SEQ ID NO: 21100 - DNA, 20 bp, synthetic construct
  misc_feature 1..20: note = chemically synthesized
  source 1..20: mol_type = other DNA
gatatttgtctcgcagcaac

SEQ ID NO: 21101 - DNA, 20 bp, synthetic construct
  misc_feature 1..20: note = chemically synthesized
  source 1..20: mol_type = other DNA
gcaactggcaaccccctgtt

SEQ ID NO: 21102 - DNA, 20 bp, synthetic construct
  misc_feature 1..20: note = chemically synthesized
  source 1..20: mol_type = other DNA
caactggcaaccccctgttt

SEQ ID NO: 21103 - DNA, 20 bp, synthetic construct
  misc_feature 1..20: note = chemically synthesized
  source 1..20: mol_type = other DNA
gcaaccccctgtttgggtaa

SEQ ID NO: 21104 - DNA, 20 bp, synthetic construct
  misc_feature 1..20: note = chemically synthesized
  source 1..20: mol_type = other DNA
ccccctgtttgggtaaaagt

SEQ ID NO: 21105 - DNA, 20 bp, synthetic construct
  misc_feature 1..20: note = chemically synthesized
  source 1..20: mol_type = other DNA
gtttgggtaaaagtcagact

SEQ ID NO: 21106 - DNA, 20 bp, synthetic construct
  misc_feature 1..20: note = chemically synthesized
  source 1..20: mol_type = other DNA
tttgggtaaaagtcagactc

SEQ ID NO: 21107 - DNA, 20 bp, synthetic construct
  misc_feature 1..20: note = chemically synthesized
  source 1..20: mol_type = other DNA
ttgggtaaaagtcagactca

SEQ ID NO: 21108 - DNA, 20 bp, synthetic construct
  misc_feature 1..20: note = chemically synthesized
  source 1..20: mol_type = other DNA
aaaagtcagactcagggacc

SEQ ID NO: 21109 - DNA, 20 bp, synthetic construct
  misc_feature 1..20: note = chemically synthesized
  source 1..20: mol_type = other DNA
cagactcagggacccggctg

SEQ ID NO: 21110 - DNA, 20 bp, synthetic construct
  misc_feature 1..20: note = chemically synthesized
  source 1..20: mol_type = other DNA
ggctgcagtgcttgctcctg

SEQ ID NO: 21111 - DNA, 20 bp, synthetic construct
  misc_feature 1..20: note = chemically synthesized
  source 1..20: mol_type = other DNA
gcttgctcctgtggcccctg

SEQ ID NO: 21112 - DNA, 20 bp, synthetic construct
  misc_feature 1..20: note = chemically synthesized
  source 1..20: mol_type = other DNA
cttgctcctgtggcccctgc

SEQ ID NO: 21113 - DNA, 20 bp, synthetic construct
  misc_feature 1..20: note = chemically synthesized
  source 1..20: mol_type = other DNA
ttgctcctgtggcccctgca

SEQ ID NO: 21114 - DNA, 20 bp, synthetic construct
  misc_feature 1..20: note = chemically synthesized
  source 1..20: mol_type = other DNA
gctcctgtggcccctgcagg

SEQ ID NO: 21115 - DNA, 20 bp, synthetic construct
  misc_feature 1..20: note = chemically synthesized
  source 1..20: mol_type = other DNA
tgtggcccctgcagggagtg

SEQ ID NO: 21116 - DNA, 20 bp, synthetic construct
  misc_feature 1..20: note = chemically synthesized
  source 1..20: mol_type = other DNA
cccctgcagggagtgtggcc

SEQ ID NO: 21117 - DNA, 20 bp, synthetic construct
  misc_feature 1..20: note = chemically synthesized
  source 1..20: mol_type = other DNA
ccctgcagggagtgtggcct

SEQ ID NO: 21118 - DNA, 20 bp, synthetic construct
  misc_feature 1..20: note = chemically synthesized
  source 1..20: mol_type = other DNA
cctgcagggagtgtggcctg

SEQ ID NO: 21119 - DNA, 20 bp, synthetic construct
  misc_feature 1..20: note = chemically synthesized
  source 1..20: mol_type = other DNA
ggggtgtaattctgcacacc

SEQ ID NO: 21120 - DNA, 20 bp, synthetic construct
  misc_feature 1..20: note = chemically synthesized
  source 1..20: mol_type = other DNA
gggtgtaattctgcacaccc

SEQ ID NO: 21121 - DNA, 20 bp, synthetic construct
  misc_feature 1..20: note = chemically synthesized
  source 1..20: mol_type = other DNA
tgtaattctgcacacccagg

SEQ ID NO: 21122 - DNA, 20 bp, synthetic construct
  misc_feature 1..20: note = chemically synthesized
  source 1..20: mol_type = other DNA
ctctgtctcctctttcacat

SEQ ID NO: 21123 - DNA, 20 bp, synthetic construct
  misc_feature 1..20: note = chemically synthesized
  source 1..20: mol_type = other DNA
tctgtctcctctttcacatc

SEQ ID NO: 21124 - DNA, 20 bp, synthetic construct
  misc_feature 1..20: note = chemically synthesized
  source 1..20: mol_type = other DNA
ccttccctgtgtcctgaacc

SEQ ID NO: 21125 - DNA, 20 bp, synthetic construct
  misc_feature 1..20: note = chemically synthesized
  source 1..20: mol_type = other DNA
cctgtgtcctgaaccaagtg

SEQ ID NO: 21126 - DNA, 20 bp, synthetic construct
  misc_feature 1..20: note = chemically synthesized
  source 1..20: mol_type = other DNA
gtcctgaaccaagtgtggat

SEQ ID NO: 21127 - DNA, 20 bp, synthetic construct
  misc_feature 1..20: note = chemically synthesized
  source 1..20: mol_type = other DNA
aaccaagtgtggatgagttt

SEQ ID NO: 21128 - DNA, 20 bp, synthetic construct
  misc_feature 1..20: note = chemically synthesized
  source 1..20: mol_type = other DNA
gatgagtttgagcttcctcc

SEQ ID NO: 21129 - DNA, 20 bp, synthetic construct
  misc_feature 1..20: note = chemically synthesized
  source 1..20: mol_type = other DNA
ttgttgttgttgttgttgtt

SEQ ID NO: 21130 - DNA, 20 bp, synthetic construct
  misc_feature 1..20: note = chemically synthesized
  source 1..20: mol_type = other DNA
tgttgttgttgttgttgttt

SEQ ID NO: 21131 - DNA, 20 bp, synthetic construct
  misc_feature 1..20: note = chemically synthesized
  source 1..20: mol_type = other DNA
gttgttgttgttgttgtttg

SEQ ID NO: 21132 - DNA, 20 bp, synthetic construct
  misc_feature 1..20: note = chemically synthesized
  source 1..20: mol_type = other DNA
ttgttgttgttgttgtttgg

SEQ ID NO: 21133 - DNA, 20 bp, synthetic construct
  misc_feature 1..20: note = chemically synthesized
  source 1..20: mol_type = other DNA
ttgttgttgttgtttggggg

SEQ ID NO: 21134 - DNA, 20 bp, synthetic construct
  misc_feature 1..20: note = chemically synthesized
  source 1..20: mol_type = other DNA
tgttgttgttgtttgggggt

SEQ ID NO: 21135 - DNA, 20 bp, synthetic construct
  misc_feature 1..20: note = chemically synthesized
  source 1..20: mol_type = other DNA
gttgttgttgtttgggggtg

SEQ ID NO: 21136 - DNA, 20 bp, synthetic construct
  misc_feature 1..20: note = chemically synthesized
  source 1..20: mol_type = other DNA
ttgttgttgtttgggggtgg

SEQ ID NO: 21137 - DNA, 20 bp, synthetic construct
  misc_feature 1..20: note = chemically synthesized
  source 1..20: mol_type = other DNA
ttgttgtttgggggtggggg

SEQ ID NO: 21138 - DNA, 20 bp, synthetic construct
  misc_feature 1..20: note = chemically synthesized
  source 1..20: mol_type = other DNA
tgtttgggggtgggggtaga

SEQ ID NO: 21139 - DNA, 20 bp, synthetic construct
  misc_feature 1..20: note = chemically synthesized
  source 1..20: mol_type = other DNA
ggggtgggggtagacagtgc

SEQ ID NO: 21140 - DNA, 20 bp, synthetic construct
  misc_feature 1..20: note = chemically synthesized
  source 1..20: mol_type = other DNA
gggtgggggtagacagtgct

SEQ ID NO: 21141 - DNA, 20 bp, synthetic construct
  misc_feature 1..20: note = chemically synthesized
  source 1..20: mol_type = other DNA
gtagacagtgctgggcctgt

SEQ ID NO: 21142 - DNA, 20 bp, synthetic construct
  misc_feature 1..20: note = chemically synthesized
  source 1..20: mol_type = other DNA
tgctgggcctgtcagaattt

SEQ ID NO: 21143 - DNA, 20 bp, synthetic construct
  misc_feature 1..20: note = chemically synthesized
  source 1..20: mol_type = other DNA
gctgggcctgtcagaatttt

SEQ ID NO: 21144 - DNA, 20 bp, synthetic construct
  misc_feature 1..20: note = chemically synthesized
  source 1..20: mol_type = other DNA
ggcctgtcagaattttaggt

SEQ ID NO: 21145 - DNA, 20 bp, synthetic construct
  misc_feature 1..20: note = chemically synthesized
  source 1..20: mol_type = other DNA
gaattttaggttggttcttt

SEQ ID NO: 21146 - DNA, 20 bp, synthetic construct
  misc_feature 1..20: note = chemically synthesized
  source 1..20: mol_type = other DNA
ctttgagatgaataactact

SEQ ID NO: 21147 - DNA, 20 bp, synthetic construct
  misc_feature 1..20: note = chemically synthesized
  source 1..20: mol_type = other DNA
tcaactacttttgtttgtga

SEQ ID NO: 21148 - DNA, 20 bp, synthetic construct
  misc_feature 1..20: note = chemically synthesized
  source 1..20: mol_type = other DNA
ctacttttgtttgtgaaaga

SEQ ID NO: 21149 - DNA, 20 bp, synthetic construct
  misc_feature 1..20: note = chemically synthesized
  source 1..20: mol_type = other DNA
tacttttgtttgtgaaagaa

SEQ ID NO: 21150 - DNA, 20 bp, synthetic construct
  misc_feature 1..20: note = chemically synthesized
  source 1..20: mol_type = other DNA
acttttgtttgtgaaagaaa

SEQ ID NO: 21151 - DNA, 20 bp, synthetic construct
  misc_feature 1..20: note = chemically synthesized
  source 1..20: mol_type = other DNA
tttgtttgtgaaagaaaggg

SEQ ID NO: 21152 - DNA, 20 bp, synthetic construct
  misc_feature 1..20: note = chemically synthesized
  source 1..20: mol_type = other DNA
tttgtgaaagaaagggcagt

SEQ ID NO: 21153 - DNA, 20 bp, synthetic construct
  misc_feature 1..20: note = chemically synthesized
  source 1..20: mol_type = other DNA
ggcagtaagcaccatgacat

SEQ ID NO: 21154 - DNA, 20 bp, synthetic construct
  misc_feature 1..20: note = chemically synthesized
  source 1..20: mol_type = other DNA
cagtaagcaccatgacatga

SEQ ID NO: 21155 - DNA, 20 bp, synthetic construct
  misc_feature 1..20: note = chemically synthesized
  source 1..20: mol_type = other DNA
accatgacatgagagaattt

SEQ ID NO: 21156 - DNA, 20 bp, synthetic construct
  misc_feature 1..20: note = chemically synthesized
  source 1..20: mol_type = other DNA
ccatgacatgagagaatttc

SEQ ID NO: 21157 - DNA, 20 bp, synthetic construct
  misc_feature 1..20: note = chemically synthesized
  source 1..20: mol_type = other DNA
gtgtttgcatctgtcgtgct

SEQ ID NO: 21158 - DNA, 20 bp, synthetic construct
  misc_feature 1..20: note = chemically synthesized
  source 1..20: mol_type = other DNA
ttgcatctgtcgtgctcagt

SEQ ID NO: 21159 - DNA, 20 bp, synthetic construct
  misc_feature 1..20: note = chemically synthesized
  source 1..20: mol_type = other DNA
tgcatctgtcgtgctcagtt

SEQ ID NO: 21160 - DNA, 20 bp, synthetic construct
  misc_feature 1..20: note = chemically synthesized
  source 1..20: mol_type = other DNA
gcatctgtcgtgctcagtta

SEQ ID NO: 21161 - DNA, 20 bp, synthetic construct
  misc_feature 1..20: note = chemically synthesized
  source 1..20: mol_type = other DNA
gggcattatccgtaacccca

SEQ ID NO: 21162 - DNA, 20 bp, synthetic construct
  misc_feature 1..20: note = chemically synthesized
  source 1..20: mol_type = other DNA
ggcattatccgtaaccccat

SEQ ID NO: 21163 - DNA, 20 bp, synthetic construct
  misc_feature 1..20: note = chemically synthesized
  source 1..20: mol_type = other DNA
ccccataggaaccaacaccg

SEQ ID NO: 21164 - DNA, 20 bp, synthetic construct
  misc_feature 1..20: note = chemically synthesized
  source 1..20: mol_type = other DNA
ccgaagaccatatgatttta

SEQ ID NO: 21165 - DNA, 20 bp, synthetic construct
  misc_feature 1..20: note = chemically synthesized
  source 1..20: mol_type = other DNA
accatatgattttaaagctt

SEQ ID NO: 21166 - DNA, 20 bp, synthetic construct
  misc_feature 1..20: note = chemically synthesized
  source 1..20: mol_type = other DNA
ttttttttgttcttttgctt

SEQ ID NO: 21167 - DNA, 20 bp, synthetic construct
  misc_feature 1..20: note = chemically synthesized
  source 1..20: mol_type = other DNA
gaaactgtaataataatcca

SEQ ID NO: 21168 - DNA, 20 bp, synthetic construct
  misc_feature 1..20: note = chemically synthesized
  source 1..20: mol_type = other DNA
aatccatagtaattatccca

SEQ ID NO: 21169 - DNA, 20 bp, synthetic construct
  misc_feature 1..20: note = chemically synthesized
  source 1..20: mol_type = other DNA
tagtatgctgtcctttgtta

SEQ ID NO: 21170 - DNA, 20 bp, synthetic construct
  misc_feature 1..20: note = chemically synthesized
  source 1..20: mol_type = other DNA
agtatgctgtcctttgttac

SEQ ID NO: 21171 - DNA, 20 bp, synthetic construct
  misc_feature 1..20: note = chemically synthesized
  source 1..20: mol_type = other DNA
tatgctgtcctttgttacag

SEQ ID NO: 21172 - DNA, 20 bp, synthetic construct
  misc_feature 1..20: note = chemically synthesized
  source 1..20: mol_type = other DNA
gtcctttgttacaggagcat

SEQ ID NO: 21173 - DNA, 20 bp, synthetic construct
  misc_feature 1..20: note = chemically synthesized
  source 1..20: mol_type = other DNA
aggagcattggattactgtg

SEQ ID NO: 21174 - DNA, 20 bp, synthetic construct
  misc_feature 1..20: note = chemically synthesized
  source 1..20: mol_type = other DNA
gtgaagacgtgtcctgtata

SEQ ID NO: 21175 - DNA, 20 bp, synthetic construct
  misc_feature 1..20: note = chemically synthesized
  source 1..20: mol_type = other DNA
tgtcctgtatacagtttcaa

SEQ ID NO: 21176 - DNA, 20 bp, synthetic construct
  misc_feature 1..20: note = chemically synthesized
  source 1..20: mol_type = other DNA
gctttctgtcttgtgctgtt

SEQ ID NO: 21177 - DNA, 20 bp, synthetic construct
  misc_feature 1..20: note = chemically synthesized
  source 1..20: mol_type = other DNA
ttctgtcttgtgctgtttgg

SEQ ID NO: 21178 - DNA, 20 bp, synthetic construct
  misc_feature 1..20: note = chemically synthesized
  source 1..20: mol_type = other DNA
cacatttctgccatatgtct

SEQ ID NO: 21179 - DNA, 20 bp, synthetic construct
  misc_feature 1..20: note = chemically synthesized
  source 1..20: mol_type = other DNA
ttctgccatatgtcttagaa

SEQ ID NO: 21180 - DNA, 20 bp, synthetic construct
  misc_feature 1..20: note = chemically synthesized
  source 1..20: mol_type = other DNA
gccatatgtcttagaaaagc

SEQ ID NO: 21181 - DNA, 20 bp, synthetic construct
  misc_feature 1..20: note = chemically synthesized
  source 1..20: mol_type = other DNA
ccatatgtcttagaaaagct

SEQ ID NO: 21182 - DNA, 20 bp, synthetic construct
  misc_feature 1..20: note = chemically synthesized
  source 1..20: mol_type = other DNA
catatgtcttagaaaagctg

SEQ ID NO: 21183 - DNA, 20 bp, synthetic construct
  misc_feature 1..20: note = chemically synthesized
  source 1..20: mol_type = other DNA
tcttagaaaagctggggact

SEQ ID NO: 21184 - DNA, 20 bp, synthetic construct
  misc_feature 1..20: note = chemically synthesized
  source 1..20: mol_type = other DNA
tagaaaagctggggacttag

SEQ ID NO: 21185 - DNA, 20 bp, synthetic construct
  misc_feature 1..20: note = chemically synthesized
  source 1..20: mol_type = other DNA
aaaagctggggacttagaag

SEQ ID NO: 21186 - DNA, 20 bp, synthetic construct
  misc_feature 1..20: note = chemically synthesized
  source 1..20: mol_type = other DNA
agctggggacttagaagcag

SEQ ID NO: 21187 - DNA, 20 bp, synthetic construct
  misc_feature 1..20: note = chemically synthesized
  source 1..20: mol_type = other DNA
cttagaagcagtagccgact

SEQ ID NO: 21188 - DNA, 20 bp, synthetic construct
  misc_feature 1..20: note = chemically synthesized
  source 1..20: mol_type = other DNA
ttagaagcagtagccgactt

SEQ ID NO: 21189 - DNA, 20 bp, synthetic construct
  misc_feature 1..20: note = chemically synthesized
  source 1..20: mol_type = other DNA
aagcagtagccgacttagga

SEQ ID NO: 21190 - DNA, 20 bp, synthetic construct
  misc_feature 1..20: note = chemically synthesized
  source 1..20: mol_type = other DNA
agtagccgacttaggacagc

SEQ ID NO: 21191 - DNA, 20 bp, synthetic construct
  misc_feature 1..20: note = chemically synthesized
  source 1..20: mol_type = other DNA
ccgacttaggacagcaagct

SEQ ID NO: 21192 - DNA, 20 bp, synthetic construct
  misc_feature 1..20: note = chemically synthesized
  source 1..20: mol_type = other DNA
ttaggacagcaagctcagct

SEQ ID NO: 21193 - DNA, 20 bp, synthetic construct
  misc_feature 1..20: note = chemically synthesized
  source 1..20: mol_type = other DNA
taggacagcaagctcagctc

SEQ ID NO: 21194 - DNA, 20 bp, synthetic construct
  misc_feature 1..20: note = chemically synthesized
  source 1..20: mol_type = other DNA
cagcaagctcagctcaggtg

SEQ ID NO: 21195 - DNA, 20 bp, synthetic construct
  misc_feature 1..20: note = chemically synthesized
  source 1..20: mol_type = other DNA
gcaagctcagctcaggtgcg

SEQ ID NO: 21196 - DNA, 20 bp, synthetic construct
  misc_feature 1..20: note = chemically synthesized
  source 1..20: mol_type = other DNA
caagctcagctcaggtgcgg

SEQ ID NO: 21197 - DNA, 20 bp, synthetic construct
  misc_feature 1..20: note = chemically synthesized
  source 1..20: mol_type = other DNA
gctcagctcaggtgcggagg

SEQ ID NO: 21198 - DNA, 20 bp, synthetic construct
  misc_feature 1..20: note = chemically synthesized
  source 1..20: mol_type = other DNA
gtgcggaggcagccctgtgt

SEQ ID NO: 21199 - DNA, 20 bp, synthetic construct
  misc_feature 1..20: note = chemically synthesized
  source 1..20: mol_type = other DNA
gcggaggcagccctgtgtaa

SEQ ID NO: 21200 - DNA, 20 bp, synthetic construct
  misc_feature 1..20: note = chemically synthesized
  source 1..20: mol_type = other DNA
gtgtaagagactctgttatg

SEQ ID NO: 21201 - DNA, 20 bp, synthetic construct
  misc_feature 1..20: note = chemically synthesized
  source 1..20: mol_type = other DNA
aagagactctgttatgcagt

SEQ ID NO: 21202 - DNA, 20 bp, synthetic construct
  misc_feature 1..20: note = chemically synthesized
  source 1..20: mol_type = other DNA
tatgcagtgagctgttgaaa

SEQ ID NO: 21203 - DNA, 20 bp, synthetic construct
  misc_feature 1..20: note = chemically synthesized
  source 1..20: mol_type = other DNA
gctgttgaaacagctgcatg

SEQ ID NO: 21204 - DNA, 20 bp, synthetic construct
  misc_feature 1..20: note = chemically synthesized
  source 1..20: mol_type = other DNA
gaaacagctgcatgtggaaa

SEQ ID NO: 21205 - DNA, 20 bp, synthetic construct
  misc_feature 1..20: note = chemically synthesized
  source 1..20: mol_type = other DNA
cttgcctgtcctcatttctt

SEQ ID NO: 21206 - DNA, 20 bp, synthetic construct
  misc_feature 1..20: note = chemically synthesized
  source 1..20: mol_type = other DNA
tgcctgtcctcatttcttga

SEQ ID NO: 21207 - DNA, 20 bp, synthetic construct
  misc_feature 1..20: note = chemically synthesized
  source 1..20: mol_type = other DNA
caaaacatctgaaaatgtaa

SEQ ID NO: 21208 - DNA, 20 bp, synthetic construct
  misc_feature 1..20: note = chemically synthesized
  source 1..20: mol_type = other DNA
aaaatgtaaaagcacttcac

SEQ ID NO: 21209 - DNA, 20 bp, synthetic construct
  misc_feature 1..20: note = chemically synthesized
  source 1..20: mol_type = other DNA
aaatgtaaaagcacttcaca

SEQ ID NO: 21210 - DNA, 20 bp, synthetic construct
  misc_feature 1..20: note = chemically synthesized
  source 1..20: mol_type = other DNA
tcacaaggttttaacttttc

SEQ ID NO: 21211 - DNA, 20 bp, synthetic construct
  misc_feature 1..20: note = chemically synthesized
  source 1..20: mol_type = other DNA
tttaacttttctggcttgaa

SEQ ID NO: 21212 - DNA, 20 bp, synthetic construct
  misc_feature 1..20: note = chemically synthesized
  source 1..20: mol_type = other DNA
aacttttctggcttgaacgg

SEQ ID NO: 21213 - DNA, 20 bp, synthetic construct
  misc_feature 1..20: note = chemically synthesized
  source 1..20: mol_type = other DNA
ttttctggcttgaacggaag

SEQ ID NO: 21214 - DNA, 20 bp, synthetic construct
  misc_feature 1..20: note = chemically synthesized
  source 1..20: mol_type = other DNA
gcttgaacggaagcagcttc

SEQ ID NO: 21215 - DNA, 20 bp, synthetic construct
  misc_feature 1..20: note = chemically synthesized
  source 1..20: mol_type = other DNA
ggaagcagcttcaagtcaac

SEQ ID NO: 21216 - DNA, 20 bp, synthetic construct
  misc_feature 1..20: note = chemically synthesized
  source 1..20: mol_type = other DNA
aagcagcttcaagtcaacaa

SEQ ID NO: 21217 - DNA, 20 bp, synthetic construct
  misc_feature 1..20: note = chemically synthesized
  source 1..20: mol_type = other DNA
tcaagtcaacaagagcacaa

SEQ ID NO: 21218 - DNA, 20 bp, synthetic construct
  misc_feature 1..20: note = chemically synthesized
  source 1..20: mol_type = other DNA
caagagcacaatagtctttg

SEQ ID NO: 21219 - DNA, 20 bp, synthetic construct
  misc_feature 1..20: note = chemically synthesized
  source 1..20: mol_type = other DNA
aagagcacaatagtctttgt

SEQ ID NO: 21220 - DNA, 20 bp, synthetic construct
  misc_feature 1..20: note = chemically synthesized
  source 1..20: mol_type = other DNA
acaatagtctttgtaggttt

SEQ ID NO: 21221 - DNA, 20 bp, synthetic construct
  misc_feature 1..20: note = chemically synthesized
  source 1..20: mol_type = other DNA
gtctttgtaggttttggaca

SEQ ID NO: 21222 - DNA, 20 bp, synthetic construct
  misc_feature 1..20: note = chemically synthesized
  source 1..20: mol_type = other DNA
aggttttggacacagttttc

SEQ ID NO: 21223 - DNA, 20 bp, synthetic construct
  misc_feature 1..20: note = chemically synthesized
  source 1..20: mol_type = other DNA
acacagttttctagcttttc

SEQ ID NO: 21224 - DNA, 20 bp, synthetic construct
  misc_feature 1..20: note = chemically synthesized
  source 1..20: mol_type = other DNA
agttttctagcttttcaaga

SEQ ID NO: 21225 - DNA, 20 bp, synthetic construct
  misc_feature 1..20: note = chemically synthesized
  source 1..20: mol_type = other DNA
gttttctagcttttcaagaa

SEQ ID NO: 21226 - DNA, 20 bp, synthetic construct
  misc_feature 1..20: note = chemically synthesized
  source 1..20: mol_type = other DNA
tctagcttttcaagaaaggc

SEQ ID NO: 21227 - DNA, 20 bp, synthetic construct
  misc_feature 1..20: note = chemically synthesized
  source 1..20: mol_type = other DNA
ctagcttttcaagaaaggca

SEQ ID NO: 21228 - DNA, 20 bp, synthetic construct
  misc_feature 1..20: note = chemically synthesized
  source 1..20: mol_type = other DNA
tagcttttcaagaaaggcaa

SEQ ID NO: 21229 - DNA, 20 bp, synthetic construct
  misc_feature 1..20: note = chemically synthesized
  source 1..20: mol_type = other DNA
ttgtcttgctttgcattctg

SEQ ID NO: 21230 - DNA, 20 bp, synthetic construct
  misc_feature 1..20: note = chemically synthesized
  source 1..20: mol_type = other DNA
gtcttgctttgcattctgca

SEQ ID NO: 21231 - DNA, 20 bp, synthetic construct
  misc_feature 1..20: note = chemically synthesized
  source 1..20: mol_type = other DNA
tgctttgcattctgcagagc

SEQ ID NO: 21232 - DNA, 20 bp, synthetic construct
  misc_feature 1..20: note = chemically synthesized
  source 1..20: mol_type = other DNA
tttgcattctgcagagctag

SEQ ID NO: 21233 - DNA, 20 bp, synthetic construct
  misc_feature 1..20: note = chemically synthesized
  source 1..20: mol_type = other DNA
tgcattctgcagagctagaa

SEQ ID NO: 21234 - DNA, 20 bp, synthetic construct
  misc_feature 1..20: note = chemically synthesized
  source 1..20: mol_type = other DNA
ctagaagagcatttaatcct

SEQ ID NO: 21235 - DNA, 20 bp, synthetic construct
  misc_feature 1..20: note = chemically synthesized
  source 1..20: mol_type = other DNA
atccttggccctctgtctgt

SEQ ID NO: 21236 - DNA, 20 bp, synthetic construct
  misc_feature 1..20: note = chemically synthesized
  source 1..20: mol_type = other DNA
tccttggccctctgtctgtt

SEQ ID NO: 21237 - DNA, 20 bp, synthetic construct
  misc_feature 1..20: note = chemically synthesized
  source 1..20: mol_type = other DNA
gggatattatgtttttttaa

SEQ ID NO: 21238 - DNA, 20 bp, synthetic construct
  misc_feature 1..20: note = chemically synthesized
  source 1..20: mol_type = other DNA
aatagtgcttgtttatgact

SEQ ID NO: 21239 - DNA, 20 bp, synthetic construct
  misc_feature 1..20: note = chemically synthesized
  source 1..20: mol_type = other DNA
atagtgcttgtttatgacta

SEQ ID NO: 21240 - DNA, 20 bp, synthetic construct
  misc_feature 1..20: note = chemically synthesized
  source 1..20: mol_type = other DNA
cttgtttatgactaaggtca

SEQ ID NO: 21241 - DNA, 20 bp, synthetic construct
  misc_feature 1..20: note = chemically synthesized
  source 1..20: mol_type = other DNA
tttatgactaaggtcaaaga

SEQ ID NO: 21242 - DNA, 20 bp, synthetic construct
  misc_feature 1..20: note = chemically synthesized
  source 1..20: mol_type = other DNA
taaggtcaaagacagtattt

SEQ ID NO: 21243 - DNA, 20 bp, synthetic construct
  misc_feature 1..20: note = chemically synthesized
  source 1..20: mol_type = other DNA
cagtatttcagaacaaaaat

SEQ ID NO: 21244 - DNA, 20 bp, synthetic construct
  misc_feature 1..20: note = chemically synthesized
  source 1..20: mol_type = other DNA
gtatttcagaacaaaaatta

SEQ ID NO: 21245 - DNA, 20 bp, synthetic construct
  misc_feature 1..20: note = chemically synthesized
  source 1..20: mol_type = other DNA
ttcagaacaaaaattagagt

SEQ ID NO: 21246 - DNA, 20 bp, synthetic construct
  misc_feature 1..20: note = chemically synthesized
  source 1..20: mol_type = other DNA
attagagttagttcataatt

SEQ ID NO: 21247 - DNA, 20 bp, synthetic construct
  misc_feature 1..20: note = chemically synthesized
  source 1..20: mol_type = other DNA
tacgttactgtttattttta

SEQ ID NO: 21248 - DNA, 20 bp, synthetic construct
  misc_feature 1..20: note = chemically synthesized
  source 1..20: mol_type = other DNA
tttgctaatttatttttaaa

SEQ ID NO: 21249 - DNA, 20 bp, synthetic construct
  misc_feature 1..20: note = chemically synthesized
  source 1..20: mol_type = other DNA
taatttatttttaaacagct

SEQ ID NO: 21250 - DNA, 20 bp, synthetic construct
  misc_feature 1..20: note = chemically synthesized
  source 1..20: mol_type = other DNA
cagttacgccaacatgttta

SEQ ID NO: 21251 - DNA, 20 bp, synthetic construct
  misc_feature 1..20: note = chemically synthesized
  source 1..20: mol_type = other DNA
ctgttcatcacatgccttac

SEQ ID NO: 21252 - DNA, 20 bp, synthetic construct
  misc_feature 1..20: note = chemically synthesized
  source 1..20: mol_type = other DNA
tcatcacatgccttaccagt

SEQ ID NO: 21253 - DNA, 20 bp, synthetic construct
  misc_feature 1..20: note = chemically synthesized
  source 1..20: mol_type = other DNA
catcacatgccttaccagtc

SEQ ID NO: 21254 - DNA, 20 bp, synthetic construct
  misc_feature 1..20: note = chemically synthesized
  source 1..20: mol_type = other DNA
atcacatgccttaccagtca

SEQ ID NO: 21255 - DNA, 20 bp, synthetic construct
  misc_feature 1..20: note = chemically synthesized
  source 1..20: mol_type = other DNA
cttaccagtcagggtgttaa

SEQ ID NO: 21256 - DNA, 20 bp, synthetic construct
  misc_feature 1..20: note = chemically synthesized
  source 1..20: mol_type = other DNA
ttaccagtcagggtgttaaa

SEQ ID NO: 21257 - DNA, 20 bp, synthetic construct
  misc_feature 1..20: note = chemically synthesized
  source 1..20: mol_type = other DNA
aaaaggcacatgcttttcaa

SEQ ID NO: 21258 - DNA, 20 bp, synthetic construct
  misc_feature 1..20: note = chemically synthesized
  source 1..20: mol_type = other DNA
gcacatgcttttcaatagtt

SEQ ID NO: 21259 - DNA, 20 bp, synthetic construct
  misc_feature 1..20: note = chemically synthesized
  source 1..20: mol_type = other DNA
ttttcaatagtttggatccc

SEQ ID NO: 21260 - DNA, 20 bp, synthetic construct
  misc_feature 1..20: note = chemically synthesized
  source 1..20: mol_type = other DNA
gtttggatcccaagttaaat

SEQ ID NO: 21261 - DNA, 20 bp, synthetic construct
  misc_feature 1..20: note = chemically synthesized
  source 1..20: mol_type = other DNA
gttaaattagataatgccat

SEQ ID NO: 21262 - DNA, 20 bp, synthetic construct
  misc_feature 1..20: note = chemically synthesized
  source 1..20: mol_type = other DNA
ttaaattagataatgccatc

SEQ ID NO: 21263 - DNA, 20 bp, synthetic construct
  misc_feature 1..20: note = chemically synthesized
  source 1..20: mol_type = other DNA
aattagataatgccatcagg

SEQ ID NO: 21264 - DNA, 20 bp, synthetic construct
  misc_feature 1..20: note = chemically synthesized
  source 1..20: mol_type = other DNA
aattacattaattgaatgtt

SEQ ID NO: 21265 - DNA, 20 bp, synthetic construct
  misc_feature 1..20: note = chemically synthesized
  source 1..20: mol_type = other DNA
attacattaattgaatgttt

SEQ ID NO: 21266 - DNA, 20 bp, synthetic construct
  misc_feature 1..20: note = chemically synthesized
  source 1..20: mol_type = other DNA
acattaattgaatgtttagg

SEQ ID NO: 21267 - DNA, 20 bp, synthetic construct
  misc_feature 1..20: note = chemically synthesized
  source 1..20: mol_type = other DNA
taattgaatgtttaggcgga

SEQ ID NO: 21268 - DNA, 20 bp, synthetic construct
  misc_feature 1..20: note = chemically synthesized
  source 1..20: mol_type = other DNA
aattgaatgtttaggcggaa

SEQ ID NO: 21269 - DNA, 20 bp, synthetic construct
  misc_feature 1..20: note = chemically synthesized
  source 1..20: mol_type = other DNA
tgaatgtttaggcggaaagg

SEQ ID NO: 21270 - DNA, 20 bp, synthetic construct
  misc_feature 1..20: note = chemically synthesized
  source 1..20: mol_type = other DNA
taggcggaaaggtagttttg

SEQ ID NO: 21271 - DNA, 20 bp, synthetic construct
  misc_feature 1..20: note = chemically synthesized
  source 1..20: mol_type = other DNA
ggcggaaaggtagttttgca

SEQ ID NO: 21272 - DNA, 20 bp, synthetic construct
  misc_feature 1..20: note = chemically synthesized
  source 1..20: mol_type = other DNA
gcggaaaggtagttttgcag

SEQ ID NO: 21273 - DNA, 20 bp, synthetic construct
  misc_feature 1..20: note = chemically synthesized
  source 1..20: mol_type = other DNA
tataatgaaatcacatttat

SEQ ID NO: 21274 - DNA, 20 bp, synthetic construct
  misc_feature 1..20: note = chemically synthesized
  source 1..20: mol_type = other DNA
aagtacccatgtataaatct

SEQ ID NO: 21275 - DNA, 20 bp, synthetic construct
  misc_feature 1..20: note = chemically synthesized
  source 1..20: mol_type = other DNA
atgtataaatctcagcatta

SEQ ID NO: 21276 - DNA, 20 bp, synthetic construct
  misc_feature 1..20: note = chemically synthesized
  source 1..20: mol_type = other DNA
cagcattatagacattattt

SEQ ID NO: 21277 - DNA, 20 bp, synthetic construct
  misc_feature 1..20: note = chemically synthesized
  source 1..20: mol_type = other DNA
agcattatagacattatttg

SEQ ID NO: 21278 - DNA, 20 bp, synthetic construct
  misc_feature 1..20: note = chemically synthesized
  source 1..20: mol_type = other DNA
acattatttgaggttgctga

SEQ ID NO: 21279 - DNA, 20 bp, synthetic construct
  misc_feature 1..20: note = chemically synthesized
  source 1..20: mol_type = other DNA
tgaggttgctgacagaaaaa

SEQ ID NO: 21280 - DNA, 20 bp, synthetic construct
  misc_feature 1..20: note = chemically synthesized
  source 1..20: mol_type = other DNA
acagaaaaatggatatatat

SEQ ID NO: 21281 - DNA, 20 bp, synthetic construct
  misc_feature 1..20: note = chemically synthesized
  source 1..20: mol_type = other DNA
cagaaaaatggatatatatc

SEQ ID NO: 21282 - DNA, 20 bp, synthetic construct
  misc_feature 1..20: note = chemically synthesized
  source 1..20: mol_type = other DNA
atggatatatatcaggcgtt

SEQ ID NO: 21283 - DNA, 20 bp, synthetic construct
  misc_feature 1..20: note = chemically synthesized
  source 1..20: mol_type = other DNA
tggatatatatcaggcgttt

SEQ ID NO: 21284 - DNA, 20 bp, synthetic construct
  misc_feature 1..20: note = chemically synthesized
  source 1..20: mol_type = other DNA
gatatatatcaggcgtttag

SEQ ID NO: 21285 - DNA, 20 bp, synthetic construct
  misc_feature 1..20: note = chemically synthesized
  source 1..20: mol_type = other DNA
atatatatcaggcgtttagg

SEQ ID NO: 21286 - DNA, 20 bp, synthetic construct
  misc_feature 1..20: note = chemically synthesized
  source 1..20: mol_type = other DNA
ggcgtttaggaggaaacatg

SEQ ID NO: 21287 - DNA, 20 bp, synthetic construct
  misc_feature 1..20: note = chemically synthesized
  source 1..20: mol_type = other DNA
gcgtttaggaggaaacatgc

SEQ ID NO: 21288 - DNA, 20 bp, synthetic construct
  misc_feature 1..20: note = chemically synthesized
  source 1..20: mol_type = other DNA
cgtttaggaggaaacatgcg

SEQ ID NO: 21289 - DNA, 20 bp, synthetic construct
  misc_feature 1..20: note = chemically synthesized
  source 1..20: mol_type = other DNA
gtttaggaggaaacatgcgg

SEQ ID NO: 21290 - DNA, 20 bp, synthetic construct
  misc_feature 1..20: note = chemically synthesized
  source 1..20: mol_type = other DNA
tttaggaggaaacatgcggg

SEQ ID NO: 21291 - DNA, 20 bp, synthetic construct
  misc_feature 1..20: note = chemically synthesized
  source 1..20: mol_type = other DNA
aacatgcggggggctgtcat

SEQ ID NO: 21292 - DNA, 20 bp, synthetic construct
  misc_feature 1..20: note = chemically synthesized
  source 1..20: mol_type = other DNA
atgcggggggctgtcatcag

SEQ ID NO: 21293 - DNA, 20 bp, synthetic construct
  misc_feature 1..20: note = chemically synthesized
  source 1..20: mol_type = other DNA
taaatgctgccttcgccatt

SEQ ID NO: 21294 - DNA, 20 bp, synthetic construct
  misc_feature 1..20: note = chemically synthesized
  source 1..20: mol_type = other DNA
aaatgctgccttcgccattt

SEQ ID NO: 21295 - DNA, 20 bp, synthetic construct
  misc_feature 1..20: note = chemically synthesized
  source 1..20: mol_type = other DNA
atgctgccttcgccatttag

SEQ ID NO: 21296 - DNA, 20 bp, synthetic construct
  misc_feature 1..20: note = chemically synthesized
  source 1..20: mol_type = other DNA
ttcgccatttaggagactgc

SEQ ID NO: 21297 - DNA, 20 bp, synthetic construct
  misc_feature 1..20: note = chemically synthesized
  source 1..20: mol_type = other DNA
tcgccatttaggagactgct

SEQ ID NO: 21298 - DNA, 20 bp, synthetic construct
  misc_feature 1..20: note = chemically synthesized
  source 1..20: mol_type = other DNA
atttaggagactgctgggca

SEQ ID NO: 21299 - DNA, 20 bp, synthetic construct
  misc_feature 1..20: note = chemically synthesized
  source 1..20: mol_type = other DNA
gctgggcacggtcgttttct

SEQ ID NO: 21300 - DNA, 20 bp, synthetic construct
  misc_feature 1..20: note = chemically synthesized
  source 1..20: mol_type = other DNA
ggcacggtcgttttcttagt

SEQ ID NO: 21301 - DNA, 20 bp, synthetic construct
  misc_feature 1..20: note = chemically synthesized
  source 1..20: mol_type = other DNA
tagtgagctgcctttatcat

SEQ ID NO: 21302 - DNA, 20 bp, synthetic construct
  misc_feature 1..20: note = chemically synthesized
  source 1..20: mol_type = other DNA
gcctttatcattagccctct

SEQ ID NO: 21303 - DNA, 20 bp, synthetic construct
  misc_feature 1..20: note = chemically synthesized
  source 1..20: mol_type = other DNA
tttatcattagccctctaag

SEQ ID NO: 21304 - DNA, 20 bp, synthetic construct
  misc_feature 1..20: note = chemically synthesized
  source 1..20: mol_type = other DNA
cctctaagcagccatgcaca

SEQ ID NO: 21305 - DNA, 20 bp, synthetic construct
  misc_feature 1..20: note = chemically synthesized
  source 1..20: mol_type = other DNA
ctctaagcagccatgcacaa

SEQ ID NO: 21306 - DNA, 20 bp, synthetic construct
  misc_feature 1..20: note = chemically synthesized
  source 1..20: mol_type = other DNA
cagccatgcacaaaggcacg

SEQ ID NO: 21307 - DNA, 20 bp, synthetic construct
  misc_feature 1..20: note = chemically synthesized
  source 1..20: mol_type = other DNA
agccatgcacaaaggcacgt

SEQ ID NO: 21308 - DNA, 20 bp, synthetic construct
  misc_feature 1..20: note = chemically synthesized
  source 1..20: mol_type = other DNA
cgtgggtgctgtgttttgta

SEQ ID NO: 21309 - DNA, 20 bp, synthetic construct
  misc_feature 1..20: note = chemically synthesized
  source 1..20: mol_type = other DNA
ggtgctgtgttttgtatagc

SEQ ID NO: 21310 - DNA, 20 bp, synthetic construct
  misc_feature 1..20: note = chemically synthesized
  source 1..20: mol_type = other DNA
gtgctgtgttttgtatagcc

SEQ ID NO: 21311 - DNA, 20 bp, synthetic construct
  misc_feature 1..20: note = chemically synthesized
  source 1..20: mol_type = other DNA
tgctgtgttttgtatagcca

SEQ ID NO: 21312 - DNA, 20 bp, synthetic construct
  misc_feature 1..20: note = chemically synthesized
  source 1..20: mol_type = other DNA
ttgtatagccagggctttcc

SEQ ID NO: 21313 - DNA, 20 bp, synthetic construct
  misc_feature 1..20: note = chemically synthesized
  source 1..20: mol_type = other DNA
agccagggctttcctggact

SEQ ID NO: 21314 - DNA, 20 bp, synthetic construct
  misc_feature 1..20: note = chemically synthesized
  source 1..20: mol_type = other DNA
ctttcctggactcagcatgc

SEQ ID NO: 21315 - DNA, 20 bp, synthetic construct
  misc_feature 1..20: note = chemically synthesized
  source 1..20: mol_type = other DNA
cctggactcagcatgccagc

SEQ ID NO: 21316 - DNA, 20 bp, synthetic construct
  misc_feature 1..20: note = chemically synthesized
  source 1..20: mol_type = other DNA
ctggactcagcatgccagct

SEQ ID NO: 21317 - DNA, 20 bp, synthetic construct
  misc_feature 1..20: note = chemically synthesized
  source 1..20: mol_type = other DNA
tggactcagcatgccagctg

SEQ ID NO: 21318 - DNA, 20 bp, synthetic construct
  misc_feature 1..20: note = chemically synthesized
  source 1..20: mol_type = other DNA
ctcagcatgccagctggggc

SEQ ID NO: 21319 - DNA, 20 bp, synthetic construct
  misc_feature 1..20: note = chemically synthesized
  source 1..20: mol_type = other DNA
ccagctggggccggctcact

SEQ ID NO: 21320 - DNA, 20 bp, synthetic construct
  misc_feature 1..20: note = chemically synthesized
  source 1..20: mol_type = other DNA
cagctggggccggctcactg

SEQ ID NO: 21321 - DNA, 20 bp, synthetic construct
  misc_feature 1..20: note = chemically synthesized
  source 1..20: mol_type = other DNA
tggggccggctcactgaggc

SEQ ID NO: 21322 - DNA, 20 bp, synthetic construct
  misc_feature 1..20: note = chemically synthesized
  source 1..20: mol_type = other DNA
ctcactgaggctggaaaaat

SEQ ID NO: 21323 - DNA, 20 bp, synthetic construct
  misc_feature 1..20: note = chemically synthesized
  source 1..20: mol_type = other DNA
gaggctggaaaaatgagata

SEQ ID NO: 21324 - DNA, 20 bp, synthetic construct
  misc_feature 1..20: note = chemically synthesized
  source 1..20: mol_type = other DNA
tggaaaaatgagatacagtc

SEQ ID NO: 21325 - DNA, 20 bp, synthetic construct
  misc_feature 1..20: note = chemically synthesized
  source 1..20: mol_type = other DNA
aaaatgagatacagtctagt

SEQ ID NO: 21326 - DNA, 20 bp, synthetic construct
  misc_feature 1..20: note = chemically synthesized
  source 1..20: mol_type = other DNA
aaatgagatacagtctagtg

SEQ ID NO: 21327 - DNA, 20 bp, synthetic construct
  misc_feature 1..20: note = chemically synthesized
  source 1..20: mol_type = other DNA
tagtgaggtctttgtcacct

SEQ ID NO: 21328 - DNA, 20 bp, synthetic construct
  misc_feature 1..20: note = chemically synthesized
  source 1..20: mol_type = other DNA
gtgaggtctttgtcaccttg

SEQ ID NO: 21329 - DNA, 20 bp, synthetic construct
  misc_feature 1..20: note = chemically synthesized
  source 1..20: mol_type = other DNA
tgaggtctttgtcaccttgg

SEQ ID NO: 21330 - DNA, 20 bp, synthetic construct
  misc_feature 1..20: note = chemically synthesized
  source 1..20: mol_type = other DNA
gaggtctttgtcaccttgga

SEQ ID NO: 21331 - DNA, 20 bp, synthetic construct
  misc_feature 1..20: note = chemically synthesized
  source 1..20: mol_type = other DNA
tttgtcaccttggagggtct

SEQ ID NO: 21332 - DNA, 20 bp, synthetic construct
  misc_feature 1..20: note = chemically synthesized
  source 1..20: mol_type = other DNA
ttgtcaccttggagggtctg

SEQ ID NO: 21333 - DNA, 20 bp, synthetic construct
  misc_feature 1..20: note = chemically synthesized
  source 1..20: mol_type = other DNA
accttggagggtctgaggac

SEQ ID NO: 21334 - DNA, 20 bp, synthetic construct
  misc_feature 1..20: note = chemically synthesized
  source 1..20: mol_type = other DNA
ggtctgaggactggtgcgct

SEQ ID NO: 21335 - DNA, 20 bp, synthetic construct
  misc_feature 1..20: note = chemically synthesized
  source 1..20: mol_type = other DNA
gtctgaggactggtgcgctc

SEQ ID NO: 21336 - DNA, 20 bp, synthetic construct
  misc_feature 1..20: note = chemically synthesized
  source 1..20: mol_type = other DNA
tgcgctcgggttgacccatg

SEQ ID NO: 21337 - DNA, 20 bp, synthetic construct
  misc_feature 1..20: note = chemically synthesized
  source 1..20: mol_type = other DNA
gttgacccatgtggcgtcct

SEQ ID NO: 21338 - DNA, 20 bp, synthetic construct
  misc_feature 1..20: note = chemically synthesized
  source 1..20: mol_type = other DNA
acccatgtggcgtcctgagc

SEQ ID NO: 21339 - DNA, 20 bp, synthetic construct
  misc_feature 1..20: note = chemically synthesized
  source 1..20: mol_type = other DNA
gtcctgagccagctctgtcc

SEQ ID NO: 21340 - DNA, 20 bp, synthetic construct
  misc_feature 1..20: note = chemically synthesized
  source 1..20: mol_type = other DNA
gccagctctgtcctggatct

SEQ ID NO: 21341 - DNA, 20 bp, synthetic construct
  misc_feature 1..20: note = chemically synthesized
  source 1..20: mol_type = other DNA
ccagctctgtcctggatctg

SEQ ID NO: 21342 - DNA, 20 bp, synthetic construct
  misc_feature 1..20: note = chemically synthesized
  source 1..20: mol_type = other DNA
gatctgaggaacactgtctg

SEQ ID NO: 21343 - DNA, 20 bp, synthetic construct
  misc_feature 1..20: note = chemically synthesized
  source 1..20: mol_type = other DNA
gaacactgtctgaagttttc

SEQ ID NO: 21344 - DNA, 20 bp, synthetic construct
  misc_feature 1..20: note = chemically synthesized
  source 1..20: mol_type = other DNA
aacactgtctgaagttttcc

SEQ ID NO: 21345 - DNA, 20 bp, synthetic construct
  misc_feature 1..20: note = chemically synthesized
  source 1..20: mol_type = other DNA
acactgtctgaagttttcca

SEQ ID NO: 21346 - DNA, 20 bp, synthetic construct
  misc_feature 1..20: note = chemically synthesized
  source 1..20: mol_type = other DNA
cactgtctgaagttttccag

SEQ ID NO: 21347 - DNA, 20 bp, synthetic construct
  misc_feature 1..20: note = chemically synthesized
  source 1..20: mol_type = other DNA
gaagttttccaggggtttga

SEQ ID NO: 21348 - DNA, 20 bp, synthetic construct
  misc_feature 1..20: note = chemically synthesized
  source 1..20: mol_type = other DNA
tttccaggggtttgacagac

SEQ ID NO: 21349 - DNA, 20 bp, synthetic construct
  misc_feature 1..20: note = chemically synthesized
  source 1..20: mol_type = other DNA
aggggtttgacagaccagaa

SEQ ID NO: 21350 - DNA, 20 bp, synthetic construct
  misc_feature 1..20: note = chemically synthesized
  source 1..20: mol_type = other DNA
ggggtttgacagaccagaat

SEQ ID NO: 21351 - DNA, 20 bp, synthetic construct
  misc_feature 1..20: note = chemically synthesized
  source 1..20: mol_type = other DNA
gggtttgacagaccagaatg

SEQ ID NO: 21352 - DNA, 20 bp, synthetic construct
  misc_feature 1..20: note = chemically synthesized
  source 1..20: mol_type = other DNA
ggtttgacagaccagaatgg

SEQ ID NO: 21353 - DNA, 20 bp, synthetic construct
  misc_feature 1..20: note = chemically synthesized
  source 1..20: mol_type = other DNA
cagaccagaatgggggccgc

SEQ ID NO: 21354 - DNA, 20 bp, synthetic construct
  misc_feature 1..20: note = chemically synthesized
  source 1..20: mol_type = other DNA
accagaatgggggccgctgg

SEQ ID NO: 21355 - DNA, 20 bp, synthetic construct
  misc_feature 1..20: note = chemically synthesized
  source 1..20: mol_type = other DNA
ccagaatgggggccgctggc

SEQ ID NO: 21356 - DNA, 20 bp, synthetic construct
  misc_feature 1..20: note = chemically synthesized
  source 1..20: mol_type = other DNA
cagaatgggggccgctggca

SEQ ID NO: 21357 - DNA, 20 bp, synthetic construct
  misc_feature 1..20: note = chemically synthesized
  source 1..20: mol_type = other DNA
tgggggccgctggcagggcc

SEQ ID NO: 21358 - DNA, 20 bp, synthetic construct
  misc_feature 1..20: note = chemically synthesized
  source 1..20: mol_type = other DNA
gggccgctggcagggcctgg

SEQ ID NO: 21359 - DNA, 20 bp, synthetic construct
  misc_feature 1..20: note = chemically synthesized
  source 1..20: mol_type = other DNA
ctggcagggcctggtggcat

SEQ ID NO: 21360 - DNA, 20 bp, synthetic construct
  misc_feature 1..20: note = chemically synthesized
  source 1..20: mol_type = other DNA
gggcctggtggcattagatg

SEQ ID NO: 21361 - DNA, 20 bp, synthetic construct
  misc_feature 1..20: note = chemically synthesized
  source 1..20: mol_type = other DNA
ctggtggcattagatgtggc

SEQ ID NO: 21362 - DNA, 20 bp, synthetic construct
  misc_feature 1..20: note = chemically synthesized
  source 1..20: mol_type = other DNA
tggcattagatgtggcaagt

SEQ ID NO: 21363 - DNA, 20 bp, synthetic construct
  misc_feature 1..20: note = chemically synthesized
  source 1..20: mol_type = other DNA
agatgtggcaagtcagacca

SEQ ID NO: 21364 - DNA, 20 bp, synthetic construct
  misc_feature 1..20: note = chemically synthesized
  source 1..20: mol_type = other DNA
gtggcaagtcagaccacagc

SEQ ID NO: 21365 - DNA, 20 bp, synthetic construct
  misc_feature 1..20: note = chemically synthesized
  source 1..20: mol_type = other DNA
cagaccacagctggcctgtg

SEQ ID NO: 21366 - DNA, 20 bp, synthetic construct
  misc_feature 1..20: note = chemically synthesized
  source 1..20: mol_type = other DNA
agaccacagctggcctgtga

SEQ ID NO: 21367 - DNA, 20 bp, synthetic construct
  misc_feature 1..20: note = chemically synthesized
  source 1..20: mol_type = other DNA
aggtgactcttcctctgatg

SEQ ID NO: 21368 - DNA, 20 bp, synthetic construct
  misc_feature 1..20: note = chemically synthesized
  source 1..20: mol_type = other DNA
gtgactcttcctctgatgca

SEQ ID NO: 21369 - DNA, 20 bp, synthetic construct
  misc_feature 1..20: note = chemically synthesized
  source 1..20: mol_type = other DNA
gactcttcctctgatgcaga

SEQ ID NO: 21370 - DNA, 20 bp, synthetic construct
  misc_feature 1..20: note = chemically synthesized
  source 1..20: mol_type = other DNA
tgatgcagagagaattaaat

SEQ ID NO: 21371 - DNA, 20 bp, synthetic construct
  misc_feature 1..20: note = chemically synthesized
  source 1..20: mol_type = other DNA
gatgcagagagaattaaatg

SEQ ID NO: 21372 - DNA, 20 bp, synthetic construct
  misc_feature 1..20: note = chemically synthesized
  source 1..20: mol_type = other DNA
tgcagagagaattaaatgag

SEQ ID NO: 21373 - DNA, 20 bp, synthetic construct
  misc_feature 1..20: note = chemically synthesized
  source 1..20: mol_type = other DNA
gcagagagaattaaatgagg

SEQ ID NO: 21374 - DNA, 20 bp, synthetic construct
  misc_feature 1..20: note = chemically synthesized
  source 1..20: mol_type = other DNA
agagaattaaatgaggaggc

SEQ ID NO: 21375 - DNA, 20 bp, synthetic construct
  misc_feature 1..20: note = chemically synthesized
  source 1..20: mol_type = other DNA
agaattaaatgaggaggcca

SEQ ID NO: 21376 - DNA, 20 bp, synthetic construct
  misc_feature 1..20: note = chemically synthesized
  source 1..20: mol_type = other DNA
aaatgaggaggccagagccc

SEQ ID NO: 21377 - DNA, 20 bp, synthetic construct
  misc_feature 1..20: note = chemically synthesized
  source 1..20: mol_type = other DNA
ctgcctcccctccatgccct

SEQ ID NO: 21378 - DNA, 20 bp, synthetic construct
  misc_feature 1..20: note = chemically synthesized
  source 1..20: mol_type = other DNA
gcctcccctccatgccctca

SEQ ID NO: 21379 - DNA, 20 bp, synthetic construct
  misc_feature 1..20: note = chemically synthesized
  source 1..20: mol_type = other DNA
cccctccatgccctcagaga

SEQ ID NO: 21380 - DNA, 20 bp, synthetic construct
  misc_feature 1..20: note = chemically synthesized
  source 1..20: mol_type = other DNA
ctccatgccctcagagaaag

SEQ ID NO: 21381 - DNA, 20 bp, synthetic construct
  misc_feature 1..20: note = chemically synthesized
  source 1..20: mol_type = other DNA
tccatgccctcagagaaagt

SEQ ID NO: 21382 - DNA, 20 bp, synthetic construct
  misc_feature 1..20: note = chemically synthesized
  source 1..20: mol_type = other DNA
catgccctcagagaaagtgg

SEQ ID NO: 21383 - DNA, 20 bp, synthetic construct
  misc_feature 1..20: note = chemically synthesized
  source 1..20: mol_type = other DNA
ctcagagaaagtgggagtgc

SEQ ID NO: 21384 - DNA, 20 bp, synthetic construct
  misc_feature 1..20: note = chemically synthesized
  source 1..20: mol_type = other DNA
aaagtgggagtgctggcatt

SEQ ID NO: 21385 - DNA, 20 bp, synthetic construct
  misc_feature 1..20: note = chemically synthesized
  source 1..20: mol_type = other DNA
gagtgctggcatttggctaa

SEQ ID NO: 21386 - DNA, 20 bp, synthetic construct
  misc_feature 1..20: note = chemically synthesized
  source 1..20: mol_type = other DNA
agtgctggcatttggctaac

SEQ ID NO: 21387 - DNA, 20 bp, synthetic construct
  misc_feature 1..20: note = chemically synthesized
  source 1..20: mol_type = other DNA
ctggcatttggctaacagga

SEQ ID NO: 21388 - DNA, 20 bp, synthetic construct
  misc_feature 1..20: note = chemically synthesized
  source 1..20: mol_type = other DNA
tggcatttggctaacaggac

SEQ ID NO: 21389 - DNA, 20 bp, synthetic construct
  misc_feature 1..20: note = chemically synthesized
  source 1..20: mol_type = other DNA
gctaacaggacaggctattt

SEQ ID NO: 21390 - DNA, 20 bp, synthetic construct
  misc_feature 1..20: note = chemically synthesized
  source 1..20: mol_type = other DNA
ctaacaggacaggctatttt

SEQ ID NO: 21391 - DNA, 20 bp, synthetic construct
  misc_feature 1..20: note = chemically synthesized
  source 1..20: mol_type = other DNA
aggacaggctattttgggcc

SEQ ID NO: 21392 - DNA, 20 bp, synthetic construct
  misc_feature 1..20: note = chemically synthesized
  source 1..20: mol_type = other DNA
ggacaggctattttgggccc

SEQ ID NO: 21393 - DNA, 20 bp, synthetic construct
  misc_feature 1..20: note = chemically synthesized
  source 1..20: mol_type = other DNA
tgacctctctgtgatttcta

SEQ ID NO: 21394 - DNA, 20 bp, synthetic construct
  misc_feature 1..20: note = chemically synthesized
  source 1..20: mol_type = other DNA
cctctctgtgatttctatgg

SEQ ID NO: 21395 - DNA, 20 bp, synthetic construct
  misc_feature 1..20: note = chemically synthesized
  source 1..20: mol_type = other DNA
ctctctgtgatttctatggt

SEQ ID NO: 21396 - DNA, 20 bp, synthetic construct
  misc_feature 1..20: note = chemically synthesized
  source 1..20: mol_type = other DNA
gatttctatggtgggtgtca

SEQ ID NO: 21397 - DNA, 20 bp, synthetic construct
  misc_feature 1..20: note = chemically synthesized
  source 1..20: mol_type = other DNA
atttctatggtgggtgtcaa

SEQ ID NO: 21398 - DNA, 20 bp, synthetic construct
  misc_feature 1..20: note = chemically synthesized
  source 1..20: mol_type = other DNA
ctatggtgggtgtcaaagga

SEQ ID NO: 21399 - DNA, 20 bp, synthetic construct
  misc_feature 1..20: note = chemically synthesized
  source 1..20: mol_type = other DNA
ggtgggtgtcaaaggatggc

SEQ ID NO: 21400 - DNA, 20 bp, synthetic construct
  misc_feature 1..20: note = chemically synthesized
  source 1..20: mol_type = other DNA
gtgggtgtcaaaggatggct

SEQ ID NO: 21401 - DNA, 20 bp, synthetic construct
  misc_feature 1..20: note = chemically synthesized
  source 1..20: mol_type = other DNA
gtgtcaaaggatggctggga

SEQ ID NO: 21402 - DNA, 20 bp, synthetic construct
  misc_feature 1..20: note = chemically synthesized
  source 1..20: mol_type = other DNA
tgtcaaaggatggctgggaa

SEQ ID NO: 21403 - DNA, 20 bp, synthetic construct
  misc_feature 1..20: note = chemically synthesized
  source 1..20: mol_type = other DNA
gtcaaaggatggctgggaaa

SEQ ID NO: 21404 - DNA, 20 bp, synthetic construct
  misc_feature 1..20: note = chemically synthesized
  source 1..20: mol_type = other DNA
tcaaaggatggctgggaaag

SEQ ID NO: 21405 - DNA, 20 bp, synthetic construct
  misc_feature 1..20: note = chemically synthesized
  source 1..20: mol_type = other DNA
tggctgggaaaggggatttt

SEQ ID NO: 21406 - DNA, 20 bp, synthetic construct
  misc_feature 1..20: note = chemically synthesized
  source 1..20: mol_type = other DNA
ggctgggaaaggggattttt

SEQ ID NO: 21407 - DNA, 20 bp, synthetic construct
  misc_feature 1..20: note = chemically synthesized
  source 1..20: mol_type = other DNA
tgctaacatcccttgcctat

SEQ ID NO: 21408 - DNA, 20 bp, synthetic construct
  misc_feature 1..20: note = chemically synthesized
  source 1..20: mol_type = other DNA
cactatcttctcgcaccatc

SEQ ID NO: 21409 - DNA, 20 bp, synthetic construct
  misc_feature 1..20: note = chemically synthesized
  source 1..20: mol_type = other DNA
tcgcaccatctggtttcacc

SEQ ID NO: 21410 - DNA, 20 bp, synthetic construct
  misc_feature 1..20: note = chemically synthesized
  source 1..20: mol_type = other DNA
cgcaccatctggtttcaccc

SEQ ID NO: 21411 - DNA, 20 bp, synthetic construct
  misc_feature 1..20: note = chemically synthesized
  source 1..20: mol_type = other DNA
ctggtttcacccgggctgca

SEQ ID NO: 21412 - DNA, 20 bp, synthetic construct
  misc_feature 1..20: note = chemically synthesized
  source 1..20: mol_type = other DNA
ttcacccgggctgcaaagcc

SEQ ID NO: 21413 - DNA, 20 bp, synthetic construct
  misc_feature 1..20: note = chemically synthesized
  source 1..20: mol_type = other DNA
ccgggctgcaaagcctagtg

SEQ ID NO: 21414 - DNA, 20 bp, synthetic construct
  misc_feature 1..20: note = chemically synthesized
  source 1..20: mol_type = other DNA
gtggtgtcccataccctgca

SEQ ID NO: 21415 - DNA, 20 bp, synthetic construct
  misc_feature 1..20: note = chemically synthesized
  source 1..20: mol_type = other DNA
ataccctgcaaagccctatt

SEQ ID NO: 21416 - DNA, 20 bp, synthetic construct
  misc_feature 1..20: note = chemically synthesized
  source 1..20: mol_type = other DNA
taccctgcaaagccctattt

SEQ ID NO: 21417 - DNA, 20 bp, synthetic construct
  misc_feature 1..20: note = chemically synthesized
  source 1..20: mol_type = other DNA
atgccaccatgccatctcca

SEQ ID NO: 21418 - DNA, 20 bp, synthetic construct
  misc_feature 1..20: note = chemically synthesized
  source 1..20: mol_type = other DNA
catgccatctccacagcatc

SEQ ID NO: 21419 - DNA, 20 bp, synthetic construct
  misc_feature 1..20: note = chemically synthesized
  source 1..20: mol_type = other DNA
gccatctccacagcatctgg

SEQ ID NO: 21420 - DNA, 20 bp, synthetic construct
  misc_feature 1..20: note = chemically synthesized
  source 1..20: mol_type = other DNA
acagcatctggcagacgaac

SEQ ID NO: 21421 - DNA, 20 bp, synthetic construct
  misc_feature 1..20: note = chemically synthesized
  source 1..20: mol_type = other DNA
cagcatctggcagacgaacc

SEQ ID NO: 21422 - DNA, 20 bp, synthetic construct
  misc_feature 1..20: note = chemically synthesized
  source 1..20: mol_type = other DNA
catctggcagacgaaccagg

SEQ ID NO: 21423 - DNA, 20 bp, synthetic construct
  misc_feature 1..20: note = chemically synthesized
  source 1..20: mol_type = other DNA
atctggcagacgaaccaggt

SEQ ID NO: 21424 - DNA, 20 bp, synthetic construct
  misc_feature 1..20: note = chemically synthesized
  source 1..20: mol_type = other DNA
tctggcagacgaaccaggtg

SEQ ID NO: 21425 - DNA, 20 bp, synthetic construct
  misc_feature 1..20: note = chemically synthesized
  source 1..20: mol_type = other DNA
ggtggggctgctattgcttc

SEQ ID NO: 21426 - DNA, 20 bp, synthetic construct
  misc_feature 1..20: note = chemically synthesized
  source 1..20: mol_type = other DNA
gtggggctgctattgcttct

SEQ ID NO: 21427 - DNA, 20 bp, synthetic construct
  misc_feature 1..20: note = chemically synthesized
  source 1..20: mol_type = other DNA
ctattgcttctgggtattta

SEQ ID NO: 21428 - DNA, 20 bp, synthetic construct
  misc_feature 1..20: note = chemically synthesized
  source 1..20: mol_type = other DNA
tattgcttctgggtatttac

SEQ ID NO: 21429 - DNA, 20 bp, synthetic construct
  misc_feature 1..20: note = chemically synthesized
  source 1..20: mol_type = other DNA
ttctgggtatttacgggatg

SEQ ID NO: 21430 - DNA, 20 bp, synthetic construct
  misc_feature 1..20: note = chemically synthesized
  source 1..20: mol_type = other DNA
ttttctgcccaccgttgttt

SEQ ID NO: 21431 - DNA, 20 bp, synthetic construct
  misc_feature 1..20: note = chemically synthesized
  source 1..20: mol_type = other DNA
tttctgcccaccgttgtttt

SEQ ID NO: 21432 - DNA, 20 bp, synthetic construct
  misc_feature 1..20: note = chemically synthesized
  source 1..20: mol_type = other DNA
tctgcccaccgttgttttgg

SEQ ID NO: 21433 - DNA, 20 bp, synthetic construct
  misc_feature 1..20: note = chemically synthesized
  source 1..20: mol_type = other DNA
ctgcccaccgttgttttggg

SEQ ID NO: 21434 - DNA, 20 bp, synthetic construct
  misc_feature 1..20: note = chemically synthesized
  source 1..20: mol_type = other DNA
tgcccaccgttgttttggga

SEQ ID NO: 21435 - DNA, 20 bp, synthetic construct
  misc_feature 1..20: note = chemically synthesized
  source 1..20: mol_type = other DNA
ggagggatttccccctccct

SEQ ID NO: 21436 - DNA, 20 bp, synthetic construct
  misc_feature 1..20: note = chemically synthesized
  source 1..20: mol_type = other DNA
gagggatttccccctccctc

SEQ ID NO: 21437 - DNA, 20 bp, synthetic construct
  misc_feature 1..20: note = chemically synthesized
  source 1..20: mol_type = other DNA
ggatttccccctccctcagg

SEQ ID NO: 21438 - DNA, 20 bp, synthetic construct
  misc_feature 1..20: note = chemically synthesized
  source 1..20: mol_type = other DNA
atttccccctccctcaggta

SEQ ID NO: 21439 - DNA, 20 bp, synthetic construct
  misc_feature 1..20: note = chemically synthesized
  source 1..20: mol_type = other DNA
ccctcaggtagagttgttct

SEQ ID NO: 21440 - DNA, 20 bp, synthetic construct
  misc_feature 1..20: note = chemically synthesized
  source 1..20: mol_type = other DNA
ctcaggtagagttgttctca

SEQ ID NO: 21441 - DNA, 20 bp, synthetic construct
  misc_feature 1..20: note = chemically synthesized
  source 1..20: mol_type = other DNA
ttctcagagatatctgtaat

SEQ ID NO: 21442 - DNA, 20 bp, synthetic construct
  misc_feature 1..20: note = chemically synthesized
  source 1..20: mol_type = other DNA
gtaattggcccttcccattt

SEQ ID NO: 21443 - DNA, 20 bp, synthetic construct
  misc_feature 1..20: note = chemically synthesized
  source 1..20: mol_type = other DNA
aattggcccttcccatttaa

SEQ ID NO: 21444 - DNA, 20 bp, synthetic construct
  misc_feature 1..20: note = chemically synthesized
  source 1..20: mol_type = other DNA
ggcccttcccatttaagagt

SEQ ID NO: 21445 - DNA, 20 bp, synthetic construct
  misc_feature 1..20: note = chemically synthesized
  source 1..20: mol_type = other DNA
aatgatttattctaaaatga

SEQ ID NO: 21446 - DNA, 20 bp, synthetic construct
  misc_feature 1..20: note = chemically synthesized
  source 1..20: mol_type = other DNA
ttattctaaaatgatagacc

SEQ ID NO: 21447 - DNA, 20 bp, synthetic construct
  misc_feature 1..20: note = chemically synthesized
  source 1..20: mol_type = other DNA
tattctaaaatgatagaccc

SEQ ID NO: 21448 - DNA, 20 bp, synthetic construct
  misc_feature 1..20: note = chemically synthesized
  source 1..20: mol_type = other DNA
tctaaaatgatagacccagg

SEQ ID NO: 21449 - DNA, 20 bp, synthetic construct
  misc_feature 1..20: note = chemically synthesized
  source 1..20: mol_type = other DNA
taaaatgatagacccaggta

SEQ ID NO: 21450 - DNA, 20 bp, synthetic construct
  misc_feature 1..20: note = chemically synthesized
  source 1..20: mol_type = other DNA
aaatgatagacccaggtaga

SEQ ID NO: 21451 - DNA, 20 bp, synthetic construct
  misc_feature 1..20: note = chemically synthesized
  source 1..20: mol_type = other DNA
aatgatagacccaggtagag

SEQ ID NO: 21452 - DNA, 20 bp, synthetic construct
  misc_feature 1..20: note = chemically synthesized
  source 1..20: mol_type = other DNA
aggttacccaccctccgtca

SEQ ID NO: 21453 - DNA, 20 bp, synthetic construct
  misc_feature 1..20: note = chemically synthesized
  source 1..20: mol_type = other DNA
gttacccaccctccgtcaca

SEQ ID NO: 21454 - DNA, 20 bp, synthetic construct
  misc_feature 1..20: note = chemically synthesized
  source 1..20: mol_type = other DNA
acccaccctccgtcacagag

SEQ ID NO: 21455 - DNA, 20 bp, synthetic construct
  misc_feature 1..20: note = chemically synthesized
  source 1..20: mol_type = other DNA
accctccgtcacagagtggc

SEQ ID NO: 21456 - DNA, 20 bp, synthetic construct
  misc_feature 1..20: note = chemically synthesized
  source 1..20: mol_type = other DNA
ccagctgtgtcccctgcttc

SEQ ID NO: 21457 - DNA, 20 bp, synthetic construct
  misc_feature 1..20: note = chemically synthesized
  source 1..20: mol_type = other DNA
cagctgtgtcccctgcttcc

SEQ ID NO: 21458 - DNA, 20 bp, synthetic construct
  misc_feature 1..20: note = chemically synthesized
  source 1..20: mol_type = other DNA
gctgtgtcccctgcttccgg

SEQ ID NO: 21459 - DNA, 20 bp, synthetic construct
  misc_feature 1..20: note = chemically synthesized
  source 1..20: mol_type = other DNA
ctgtgtcccctgcttccggg

SEQ ID NO: 21460 - DNA, 20 bp, synthetic construct
  misc_feature 1..20: note = chemically synthesized
  source 1..20: mol_type = other DNA
tgtcccctgcttccgggagg

SEQ ID NO: 21461 - DNA, 20 bp, synthetic construct
  misc_feature 1..20: note = chemically synthesized
  source 1..20: mol_type = other DNA
gtcccctgcttccgggaggt

SEQ ID NO: 21462 - DNA, 20 bp, synthetic construct
  misc_feature 1..20: note = chemically synthesized
  source 1..20: mol_type = other DNA
ccgggaggtgggaatgcatg

SEQ ID NO: 21463 - DNA, 20 bp, synthetic construct
  misc_feature 1..20: note = chemically synthesized
  source 1..20: mol_type = other DNA
gggaggtgggaatgcatgtg

SEQ ID NO: 21464 - DNA, 20 bp, synthetic construct
  misc_feature 1..20: note = chemically synthesized
  source 1..20: mol_type = other DNA
ggaggtgggaatgcatgtgg

SEQ ID NO: 21465 - DNA, 20 bp, synthetic construct
  misc_feature 1..20: note = chemically synthesized
  source 1..20: mol_type = other DNA
gaggtgggaatgcatgtgga

SEQ ID NO: 21466 - DNA, 20 bp, synthetic construct
  misc_feature 1..20: note = chemically synthesized
  source 1..20: mol_type = other DNA
aggtgggaatgcatgtggag

SEQ ID NO: 21467 - DNA, 20 bp, synthetic construct
  misc_feature 1..20: note = chemically synthesized
  source 1..20: mol_type = other DNA
atttcctaactctcttgctc

SEQ ID NO: 21468 - DNA, 20 bp, synthetic construct
  misc_feature 1..20: note = chemically synthesized
  source 1..20: mol_type = other DNA
tcctaactctcttgctctgg

SEQ ID NO: 21469 - DNA, 20 bp, synthetic construct
  misc_feature 1..20: note = chemically synthesized
  source 1..20: mol_type = other DNA
tctcttgctctggcagcctg

SEQ ID NO: 21470 - DNA, 20 bp, synthetic construct
  misc_feature 1..20: note = chemically synthesized
  source 1..20: mol_type = other DNA
tcttgctctggcagcctgaa

SEQ ID NO: 21471 - DNA, 20 bp, synthetic construct
  misc_feature 1..20: note = chemically synthesized
  source 1..20: mol_type = other DNA
gctgtctgtgccctgaacaa

SEQ ID NO: 21472 - DNA, 20 bp, synthetic construct
  misc_feature 1..20: note = chemically synthesized
  source 1..20: mol_type = other DNA
ctgtgccctgaacaacagct

SEQ ID NO: 21473 - DNA, 20 bp, synthetic construct
  misc_feature 1..20: note = chemically synthesized
  source 1..20: mol_type = other DNA
tgtgccctgaacaacagctt

SEQ ID NO: 21474 - DNA, 20 bp, synthetic construct
  misc_feature 1..20: note = chemically synthesized
  source 1..20: mol_type = other DNA
gtgccctgaacaacagctta

SEQ ID NO: 21475 - DNA, 20 bp, synthetic construct
  misc_feature 1..20: note = chemically synthesized
  source 1..20: mol_type = other DNA
gccctgaacaacagcttagg

SEQ ID NO: 21476 - DNA, 20 bp, synthetic construct
  misc_feature 1..20: note = chemically synthesized
  source 1..20: mol_type = other DNA
tgaacaacagcttagggagc

SEQ ID NO: 21477 - DNA, 20 bp, synthetic construct
  misc_feature 1..20: note = chemically synthesized
  source 1..20: mol_type = other DNA
aacaacagcttagggagctg

SEQ ID NO: 21478 - DNA, 20 bp, synthetic construct
  misc_feature 1..20: note = chemically synthesized
  source 1..20: mol_type = other DNA
acaacagcttagggagctgg

SEQ ID NO: 21479 - DNA, 20 bp, synthetic construct
  misc_feature 1..20: note = chemically synthesized
  source 1..20: mol_type = other DNA
cagcttagggagctggagga

SEQ ID NO: 21480 - DNA, 20 bp, synthetic construct
  misc_feature 1..20: note = chemically synthesized
  source 1..20: mol_type = other DNA
gcttagggagctggaggaaa

SEQ ID NO: 21481 - DNA, 20 bp, synthetic construct
  misc_feature 1..20: note = chemically synthesized
  source 1..20: mol_type = other DNA
tagggagctggaggaaagag

SEQ ID NO: 21482 - DNA, 20 bp, synthetic construct
  misc_feature 1..20: note = chemically synthesized
  source 1..20: mol_type = other DNA
agggagctggaggaaagaga

SEQ ID NO: 21483 - DNA, 20 bp, synthetic construct
  misc_feature 1..20: note = chemically synthesized
  source 1..20: mol_type = other DNA
ggagctggaggaaagagaag

SEQ ID NO: 21484 - DNA, 20 bp, synthetic construct
  misc_feature 1..20: note = chemically synthesized
  source 1..20: mol_type = other DNA
gagctggaggaaagagaagg

SEQ ID NO: 21485 - DNA, 20 bp, synthetic construct
  misc_feature 1..20: note = chemically synthesized
  source 1..20: mol_type = other DNA
agagaaggaggtatgcattt

SEQ ID NO: 21486 - DNA, 20 bp, synthetic construct
  misc_feature 1..20: note = chemically synthesized
  source 1..20: mol_type = other DNA
gagaaggaggtatgcatttg

SEQ ID NO: 21487 - DNA, 20 bp, synthetic construct
  misc_feature 1..20: note = chemically synthesized
  source 1..20: mol_type = other DNA
agaaggaggtatgcatttga

SEQ ID NO: 21488 - DNA, 20 bp, synthetic construct
  misc_feature 1..20: note = chemically synthesized
  source 1..20: mol_type = other DNA
aaggaggtatgcatttgagg

SEQ ID NO: 21489 - DNA, 20 bp, synthetic construct
  misc_feature 1..20: note = chemically synthesized
  source 1..20: mol_type = other DNA
ggaggtatgcatttgaggga

SEQ ID NO: 21490 - DNA, 20 bp, synthetic construct
  misc_feature 1..20: note = chemically synthesized
  source 1..20: mol_type = other DNA
aggtatgcatttgagggaga

SEQ ID NO: 21491 - DNA, 20 bp, synthetic construct
  misc_feature 1..20: note = chemically synthesized
  source 1..20: mol_type = other DNA
ggtatgcatttgagggagag

SEQ ID NO: 21492 - DNA, 20 bp, synthetic construct
  misc_feature 1..20: note = chemically synthesized
  source 1..20: mol_type = other DNA
tttgagggagagaggcccac

SEQ ID NO: 21493 - DNA, 20 bp, synthetic construct
  misc_feature 1..20: note = chemically synthesized
  source 1..20: mol_type = other DNA
ttgagggagagaggcccact

SEQ ID NO: 21494 - DNA, 20 bp, synthetic construct
  misc_feature 1..20: note = chemically synthesized
  source 1..20: mol_type = other DNA
gggagagaggcccactgggt

SEQ ID NO: 21495 - DNA, 20 bp, synthetic construct
  misc_feature 1..20: note = chemically synthesized
  source 1..20: mol_type = other DNA
agaggcccactgggttggac

SEQ ID NO: 21496 - DNA, 20 bp, synthetic construct
  misc_feature 1..20: note = chemically synthesized
  source 1..20: mol_type = other DNA
ggcccactgggttggacaag

SEQ ID NO: 21497 - DNA, 20 bp, synthetic construct
  misc_feature 1..20: note = chemically synthesized
  source 1..20: mol_type = other DNA
gcccactgggttggacaaga

SEQ ID NO: 21498 - DNA, 20 bp, synthetic construct
  misc_feature 1..20: note = chemically synthesized
  source 1..20: mol_type = other DNA
tgggttggacaagaaggtaa

SEQ ID NO: 21499 - DNA, 20 bp, synthetic construct
  misc_feature 1..20: note = chemically synthesized
  source 1..20: mol_type = other DNA
ggttggacaagaaggtaaaa

SEQ ID NO: 21500 - DNA, 20 bp, synthetic construct
  misc_feature 1..20: note = chemically synthesized
  source 1..20: mol_type = other DNA
gttggacaagaaggtaaaag

SEQ ID NO: 21501 - DNA, 20 bp, synthetic construct
  misc_feature 1..20: note = chemically synthesized
  source 1..20: mol_type = other DNA
ttggacaagaaggtaaaaga

SEQ ID NO: 21502 - DNA, 20 bp, synthetic construct
  misc_feature 1..20: note = chemically synthesized
  source 1..20: mol_type = other DNA
acaagaaggtaaaagagggc

SEQ ID NO: 21503 - DNA, 20 bp, synthetic construct
  misc_feature 1..20: note = chemically synthesized
  source 1..20: mol_type = other DNA
aaggtaaaagagggctggtt

SEQ ID NO: 21504 - DNA, 20 bp, synthetic construct
  misc_feature 1..20: note = chemically synthesized
  source 1..20: mol_type = other DNA
agagggctggtttggcccct

SEQ ID NO: 21505 - DNA, 20 bp, synthetic construct
  misc_feature 1..20: note = chemically synthesized
  source 1..20: mol_type = other DNA
gagggctggtttggccccta

SEQ ID NO: 21506 - DNA, 20 bp, synthetic construct
  misc_feature 1..20: note = chemically synthesized
  source 1..20: mol_type = other DNA
agggctggtttggcccctaa

SEQ ID NO: 21507 - DNA, 20 bp, synthetic construct
  misc_feature 1..20: note = chemically synthesized
  source 1..20: mol_type = other DNA
gctggtttggcccctaaggg

SEQ ID NO: 21508 - DNA, 20 bp, synthetic construct
  misc_feature 1..20: note = chemically synthesized
  source 1..20: mol_type = other DNA
ctggtttggcccctaaggga

SEQ ID NO: 21509 - DNA, 20 bp, synthetic construct
  misc_feature 1..20: note = chemically synthesized
  source 1..20: mol_type = other DNA
tttggcccctaagggaagga

SEQ ID NO: 21510 - DNA, 20 bp, synthetic construct
  misc_feature 1..20: note = chemically synthesized
  source 1..20: mol_type = other DNA
ttggcccctaagggaaggac

SEQ ID NO: 21511 - DNA, 20 bp, synthetic construct
  misc_feature 1..20: note = chemically synthesized
  source 1..20: mol_type = other DNA
cccctaagggaaggacagga

SEQ ID NO: 21512 - DNA, 20 bp, synthetic construct
  misc_feature 1..20: note = chemically synthesized
  source 1..20: mol_type = other DNA
gcacccgcttgttccctgtg

SEQ ID NO: 21513 - DNA, 20 bp, synthetic construct
  misc_feature 1..20: note = chemically synthesized
  source 1..20: mol_type = other DNA
gcttgttccctgtgtggatg

SEQ ID NO: 21514 - DNA, 20 bp, synthetic construct
  misc_feature 1..20: note = chemically synthesized
  source 1..20: mol_type = other DNA
gtgtggatgcagtgtttgtc

SEQ ID NO: 21515 - DNA, 20 bp, synthetic construct
  misc_feature 1..20: note = chemically synthesized
  source 1..20: mol_type = other DNA
atgcagtgtttgtccagctg

SEQ ID NO: 21516 - DNA, 20 bp, synthetic construct
  misc_feature 1..20: note = chemically synthesized
  source 1..20: mol_type = other DNA
tgcagtgtttgtccagctga

SEQ ID NO: 21517 - DNA, 20 bp, synthetic construct
  misc_feature 1..20: note = chemically synthesized
  source 1..20: mol_type = other DNA
agtgtttgtccagctgaagg

SEQ ID NO: 21518 - DNA, 20 bp, synthetic construct
  misc_feature 1..20: note = chemically synthesized
  source 1..20: mol_type = other DNA
cagctgaaggcagcctcact

SEQ ID NO: 21519 - DNA, 20 bp, synthetic construct
  misc_feature 1..20: note = chemically synthesized
  source 1..20: mol_type = other DNA
cactcggctgactacctgat

SEQ ID NO: 21520 - DNA, 20 bp, synthetic construct
  misc_feature 1..20: note = chemically synthesized
  source 1..20: mol_type = other DNA
cctgatgagtgattttcccc

SEQ ID NO: 21521 - DNA, 20 bp, synthetic construct
  misc_feature 1..20: note = chemically synthesized
  source 1..20: mol_type = other DNA
agtgattttccccaagctga

SEQ ID NO: 21522 - DNA, 20 bp, synthetic construct
  misc_feature 1..20: note = chemically synthesized
  source 1..20: mol_type = other DNA
ctccaacacatttcacctac

SEQ ID NO: 21523 - DNA, 20 bp, synthetic construct
  misc_feature 1..20: note = chemically synthesized
  source 1..20: mol_type = other DNA
ttcacctacaagtcctgaca

SEQ ID NO: 21524 - DNA, 20 bp, synthetic construct
  misc_feature 1..20: note = chemically synthesized
  source 1..20: mol_type = other DNA
acctacaagtcctgacaaag

SEQ ID NO: 21525 - DNA, 20 bp, synthetic construct
  misc_feature 1..20: note = chemically synthesized
  source 1..20: mol_type = other DNA
gacaaagtggtgtgttcttt

SEQ ID NO: 21526 - DNA, 20 bp, synthetic construct
  misc_feature 1..20: note = chemically synthesized
  source 1..20: mol_type = other DNA
acaaagtggtgtgttctttt

SEQ ID NO: 21527 - DNA, 20 bp, synthetic construct
  misc_feature 1..20: note = chemically synthesized
  source 1..20: mol_type = other DNA
caaagtggtgtgttcttttg

SEQ ID NO: 21528 - DNA, 20 bp, synthetic construct
  misc_feature 1..20: note = chemically synthesized
  source 1..20: mol_type = other DNA
ttttggggctgttattactg

SEQ ID NO: 21529 - DNA, 20 bp, synthetic construct
  misc_feature 1..20: note = chemically synthesized
  source 1..20: mol_type = other DNA
tggggctgttattactgcag

SEQ ID NO: 21530 - DNA, 20 bp, synthetic construct
  misc_feature 1..20: note = chemically synthesized
  source 1..20: mol_type = other DNA
ggggctgttattactgcagc

SEQ ID NO: 21531 - DNA, 20 bp, synthetic construct
  misc_feature 1..20: note = chemically synthesized
  source 1..20: mol_type = other DNA
ttattactgcagcaggcatt

SEQ ID NO: 21532 - DNA, 20 bp, synthetic construct
  misc_feature 1..20: note = chemically synthesized
  source 1..20: mol_type = other DNA
agcaggcatttggaacaatc

SEQ ID NO: 21533 - DNA, 20 bp, synthetic construct
  misc_feature 1..20: note = chemically synthesized
  source 1..20: mol_type = other DNA
aggcatttggaacaatctgg

SEQ ID NO: 21534 - DNA, 20 bp, synthetic construct
  misc_feature 1..20: note = chemically synthesized
  source 1..20: mol_type = other DNA
tttggaacaatctggaagaa

SEQ ID NO: 21535 - DNA, 20 bp, synthetic construct
  misc_feature 1..20: note = chemically synthesized
  source 1..20: mol_type = other DNA
ttggaacaatctggaagaat

SEQ ID NO: 21536 - DNA, 20 bp, synthetic construct
  misc_feature 1..20: note = chemically synthesized
  source 1..20: mol_type = other DNA
tggaacaatctggaagaatg

SEQ ID NO: 21537 - DNA, 20 bp, synthetic construct
  misc_feature 1..20: note = chemically synthesized
  source 1..20: mol_type = other DNA
tctggaagaatggggtgcca

SEQ ID NO: 21538 - DNA, 20 bp, synthetic construct
  misc_feature 1..20: note = chemically synthesized
  source 1..20: mol_type = other DNA
ctggaagaatggggtgccaa

SEQ ID NO: 21539 - DNA, 20 bp, synthetic construct
  misc_feature 1..20: note = chemically synthesized
  source 1..20: mol_type = other DNA
ggtgccaaaggacacccttg

SEQ ID NO: 21540 - DNA, 20 bp, synthetic construct
  misc_feature 1..20: note = chemically synthesized
  source 1..20: mol_type = other DNA
acacccttgaagccgtttct

SEQ ID NO: 21541 - DNA, 20 bp, synthetic construct
  misc_feature 1..20: note = chemically synthesized
  source 1..20: mol_type = other DNA
ttcttttctctccgatcctc

SEQ ID NO: 21542 - DNA, 20 bp, synthetic construct
  misc_feature 1..20: note = chemically synthesized
  source 1..20: mol_type = other DNA
ctccgatcctctagcttttt

SEQ ID NO: 21543 - DNA, 20 bp, synthetic construct
  misc_feature 1..20: note = chemically synthesized
  source 1..20: mol_type = other DNA
ttttttggcttatgaaaaat

SEQ ID NO: 21544 - DNA, 20 bp, synthetic construct
  misc_feature 1..20: note = chemically synthesized
  source 1..20: mol_type = other DNA
tttttggcttatgaaaaatt

SEQ ID NO: 21545 - DNA, 20 bp, synthetic construct
  misc_feature 1..20: note = chemically synthesized
  source 1..20: mol_type = other DNA
tcgaatgtccattgtgctgt

SEQ ID NO: 21546 - DNA, 20 bp, synthetic construct
  misc_feature 1..20: note = chemically synthesized
  source 1..20: mol_type = other DNA
tccattgtgctgttagtaat

SEQ ID NO: 21547 - DNA, 20 bp, synthetic construct
  misc_feature 1..20: note = chemically synthesized
  source 1..20: mol_type = other DNA
ccattgtgctgttagtaatg

SEQ ID NO: 21548 - DNA, 20 bp, synthetic construct
  misc_feature 1..20: note = chemically synthesized
  source 1..20: mol_type = other DNA
tgctgttagtaatgaggata

SEQ ID NO: 21549 - DNA, 20 bp, synthetic construct
  misc_feature 1..20: note = chemically synthesized
  source 1..20: mol_type = other DNA
taaaatcacatttttttttt

SEQ ID NO: 21550 - DNA, 20 bp, synthetic construct
  misc_feature 1..20: note = chemically synthesized
  source 1..20: mol_type = other DNA
atcacattttttttttgagt

SEQ ID NO: 21551 - DNA, 20 bp, synthetic construct
  misc_feature 1..20: note = chemically synthesized
  source 1..20: mol_type = other DNA
tttttttgagtaagcccttt

SEQ ID NO: 21552 - DNA, 20 bp, synthetic construct
  misc_feature 1..20: note = chemically synthesized
  source 1..20: mol_type = other DNA
ttttttgagtaagccctttg

SEQ ID NO: 21553 - DNA, 20 bp, synthetic construct
  misc_feature 1..20: note = chemically synthesized
  source 1..20: mol_type = other DNA
ttttgagtaagccctttgag

SEQ ID NO: 21554 - DNA, 20 bp, synthetic construct
  misc_feature 1..20: note = chemically synthesized
  source 1..20: mol_type = other DNA
ttgaggagtattgtcaaatt

SEQ ID NO: 21555 - DNA, 20 bp, synthetic construct
  misc_feature 1..20: note = chemically synthesized
  source 1..20: mol_type = other DNA
caaattgagactcacctcat

SEQ ID NO: 21556 - DNA, 20 bp, synthetic construct
  misc_feature 1..20: note = chemically synthesized
  source 1..20: mol_type = other DNA
acctcatgagtaaccctgtg

SEQ ID NO: 21557 - DNA, 20 bp, synthetic construct
  misc_feature 1..20: note = chemically synthesized
  source 1..20: mol_type = other DNA
ctcatgagtaaccctgtgaa

SEQ ID NO: 21558 - DNA, 20 bp, synthetic construct
  misc_feature 1..20: note = chemically synthesized
  source 1..20: mol_type = other DNA
tcatgagtaaccctgtgaag

SEQ ID NO: 21559 - DNA, 20 bp, synthetic construct
  misc_feature 1..20: note = chemically synthesized
  source 1..20: mol_type = other DNA
tgagtaaccctgtgaagagg

SEQ ID NO: 21560 - DNA, 20 bp, synthetic construct
  misc_feature 1..20: note = chemically synthesized
  source 1..20: mol_type = other DNA
gagtaaccctgtgaagaggc

SEQ ID NO: 21561 - DNA, 20 bp, synthetic construct
  misc_feature 1..20: note = chemically synthesized
  source 1..20: mol_type = other DNA
gtaaccctgtgaagaggcag

SEQ ID NO: 21562 - DNA, 20 bp, synthetic construct
  misc_feature 1..20: note = chemically synthesized
  source 1..20: mol_type = other DNA
ccctgtgaagaggcaggaga

SEQ ID NO: 21563 - DNA, 20 bp, synthetic construct
  misc_feature 1..20: note = chemically synthesized
  source 1..20: mol_type = other DNA
cctgtgaagaggcaggagaa

SEQ ID NO: 21564 - DNA, 20 bp, synthetic construct
  misc_feature 1..20: note = chemically synthesized
  source 1..20: mol_type = other DNA
ctgtgaagaggcaggagaaa

SEQ ID NO: 21565 - DNA, 20 bp, synthetic construct
  misc_feature 1..20: note = chemically synthesized
  source 1..20: mol_type = other DNA
tgaagaggcaggagaaaggg

SEQ ID NO: 21566 - DNA, 20 bp, synthetic construct
  misc_feature 1..20: note = chemically synthesized
  source 1..20: mol_type = other DNA
ggcaggagaaagggtagttg

SEQ ID NO: 21567 - DNA, 20 bp, synthetic construct
  misc_feature 1..20: note = chemically synthesized
  source 1..20: mol_type = other DNA
gagaaagggtagttgaagct

SEQ ID NO: 21568 - DNA, 20 bp, synthetic construct
  misc_feature 1..20: note = chemically synthesized
  source 1..20: mol_type = other DNA
gaaagggtagttgaagctta

SEQ ID NO: 21569 - DNA, 20 bp, synthetic construct
  misc_feature 1..20: note = chemically synthesized
  source 1..20: mol_type = other DNA
aagggtagttgaagcttaga

SEQ ID NO: 21570 - DNA, 20 bp, synthetic construct
  misc_feature 1..20: note = chemically synthesized
  source 1..20: mol_type = other DNA
agggtagttgaagcttagag

SEQ ID NO: 21571 - DNA, 20 bp, synthetic construct
  misc_feature 1..20: note = chemically synthesized
  source 1..20: mol_type = other DNA
tgaagcttagagaggttaaa

SEQ ID NO: 21572 - DNA, 20 bp, synthetic construct
  misc_feature 1..20: note = chemically synthesized
  source 1..20: mol_type = other DNA
agcttagagaggttaaatgg

SEQ ID NO: 21573 - DNA, 20 bp, synthetic construct
  misc_feature 1..20: note = chemically synthesized
  source 1..20: mol_type = other DNA
gcttagagaggttaaatggc

SEQ ID NO: 21574 - DNA, 20 bp, synthetic construct
  misc_feature 1..20: note = chemically synthesized
  source 1..20: mol_type = other DNA
gagaggttaaatggcaggtc

SEQ ID NO: 21575 - DNA, 20 bp, synthetic construct
  misc_feature 1..20: note = chemically synthesized
  source 1..20: mol_type = other DNA
atggcaggtctggtctcatg

SEQ ID NO: 21576 - DNA, 20 bp, synthetic construct
  misc_feature 1..20: note = chemically synthesized
  source 1..20: mol_type = other DNA
ggtctggtctcatgcagccg

SEQ ID NO: 21577 - DNA, 20 bp, synthetic construct
  misc_feature 1..20: note = chemically synthesized
  source 1..20: mol_type = other DNA
gtctggtctcatgcagccgc

SEQ ID NO: 21578 - DNA, 20 bp, synthetic construct
  misc_feature 1..20: note = chemically synthesized
  source 1..20: mol_type = other DNA
tctggtctcatgcagccgca

SEQ ID NO: 21579 - DNA, 20 bp, synthetic construct
  misc_feature 1..20: note = chemically synthesized
  source 1..20: mol_type = other DNA
ctggtctcatgcagccgcag

SEQ ID NO: 21580 - DNA, 20 bp, synthetic construct
  misc_feature 1..20: note = chemically synthesized
  source 1..20: mol_type = other DNA
gtctcatgcagccgcagggg

SEQ ID NO: 21581 - DNA, 20 bp, synthetic construct
  misc_feature 1..20: note = chemically synthesized
  source 1..20: mol_type = other DNA
atgcagccgcaggggtagac

SEQ ID NO: 21582 - DNA, 20 bp, synthetic construct
  misc_feature 1..20: note = chemically synthesized
  source 1..20: mol_type = other DNA
tgcagccgcaggggtagact

SEQ ID NO: 21583 - DNA, 20 bp, synthetic construct
  misc_feature 1..20: note = chemically synthesized
  source 1..20: mol_type = other DNA
gcagccgcaggggtagacta

SEQ ID NO: 21584 - DNA, 20 bp, synthetic construct
  misc_feature 1..20: note = chemically synthesized
  source 1..20: mol_type = other DNA
gtagactagggattctgatc

SEQ ID NO: 21585 - DNA, 20 bp, synthetic construct
  misc_feature 1..20: note = chemically synthesized
  source 1..20: mol_type = other DNA
tccagaactccttatacttc

SEQ ID NO: 21586 - DNA, 20 bp, synthetic construct
  misc_feature 1..20: note = chemically synthesized
  source 1..20: mol_type = other DNA
ccagaactccttatacttct

SEQ ID NO: 21587 - DNA, 20 bp, synthetic construct
  misc_feature 1..20: note = chemically synthesized
  source 1..20: mol_type = other DNA
gggtccaccccacgcttcca

SEQ ID NO: 21588 - DNA, 20 bp, synthetic construct
  misc_feature 1..20: note = chemically synthesized
  source 1..20: mol_type = other DNA
acgcttccacagcctgcaca

SEQ ID NO: 21589 - DNA, 20 bp, synthetic construct
  misc_feature 1..20: note = chemically synthesized
  source 1..20: mol_type = other DNA
cgcttccacagcctgcacac

SEQ ID NO: 21590 - DNA, 20 bp, synthetic construct
  misc_feature 1..20: note = chemically synthesized
  source 1..20: mol_type = other DNA
gcttccacagcctgcacaca

SEQ ID NO: 21591 - DNA, 20 bp, synthetic construct
  misc_feature 1..20: note = chemically synthesized
  source 1..20: mol_type = other DNA
tccacagcctgcacacaggg

SEQ ID NO: 21592 - DNA, 20 bp, synthetic construct
  misc_feature 1..20: note = chemically synthesized
  source 1..20: mol_type = other DNA
ccacagcctgcacacagggt

SEQ ID NO: 21593 - DNA, 20 bp, synthetic construct
  misc_feature 1..20: note = chemically synthesized
  source 1..20: mol_type = other DNA
cacagcctgcacacagggta

SEQ ID NO: 21594 - DNA, 20 bp, synthetic construct
  misc_feature 1..20: note = chemically synthesized
  source 1..20: mol_type = other DNA
agcctgcacacagggtaggg

SEQ ID NO: 21595 - DNA, 20 bp, synthetic construct
  misc_feature 1..20: note = chemically synthesized
  source 1..20: mol_type = other DNA
cacacagggtagggaagttg

SEQ ID NO: 21596 - DNA, 20 bp, synthetic construct
  misc_feature 1..20: note = chemically synthesized
  source 1..20: mol_type = other DNA
ggtagggaagttgtggcttg

SEQ ID NO: 21597 - DNA, 20 bp, synthetic construct
  misc_feature 1..20: note = chemically synthesized
  source 1..20: mol_type = other DNA
agggaagttgtggcttgcag

SEQ ID NO: 21598 - DNA, 20 bp, synthetic construct
  misc_feature 1..20: note = chemically synthesized
  source 1..20: mol_type = other DNA
gggaagttgtggcttgcaga

SEQ ID NO: 21599 - DNA, 20 bp, synthetic construct
  misc_feature 1..20: note = chemically synthesized
  source 1..20: mol_type = other DNA
cttgcagaaggctgtttttt

SEQ ID NO: 21600 - DNA, 20 bp, synthetic construct
  misc_feature 1..20: note = chemically synthesized
  source 1..20: mol_type = other DNA
ttgcagaaggctgttttttt

SEQ ID NO: 21601 - DNA, 20 bp, synthetic construct
  misc_feature 1..20: note = chemically synthesized
  source 1..20: mol_type = other DNA
tgcagaaggctgtttttttg

SEQ ID NO: 21602 - DNA, 20 bp, synthetic construct
  misc_feature 1..20: note = chemically synthesized
  source 1..20: mol_type = other DNA
gcagaaggctgtttttttgg

SEQ ID NO: 21603 - DNA, 20 bp, synthetic construct
  misc_feature 1..20: note = chemically synthesized
  source 1..20: mol_type = other DNA
cagaaggctgtttttttggg

SEQ ID NO: 21604 - DNA, 20 bp, synthetic construct
  misc_feature 1..20: note = chemically synthesized
  source 1..20: mol_type = other DNA
ggggggacgctctgttttaa

SEQ ID NO: 21605 - DNA, 20 bp, synthetic construct
  misc_feature 1..20: note = chemically synthesized
  source 1..20: mol_type = other DNA
gacgctctgttttaatagtt

SEQ ID NO: 21606 - DNA, 20 bp, synthetic construct
  misc_feature 1..20: note = chemically synthesized
  source 1..20: mol_type = other DNA
cgctctgttttaatagtttg

SEQ ID NO: 21607 - DNA, 20 bp, synthetic construct
  misc_feature 1..20: note = chemically synthesized
  source 1..20: mol_type = other DNA
ctgttttaatagtttggagc

SEQ ID NO: 21608 - DNA, 20 bp, synthetic construct
  misc_feature 1..20: note = chemically synthesized
  source 1..20: mol_type = other DNA
tgttttaatagtttggagca

SEQ ID NO: 21609 - DNA, 20 bp, synthetic construct
  misc_feature 1..20: note = chemically synthesized
  source 1..20: mol_type = other DNA
tttaatagtttggagcaagg

SEQ ID NO: 21610 - DNA, 20 bp, synthetic construct
  misc_feature 1..20: note = chemically synthesized
  source 1..20: mol_type = other DNA
atagtttggagcaaggaagc

SEQ ID NO: 21611 - DNA, 20 bp, synthetic construct
  misc_feature 1..20: note = chemically synthesized
  source 1..20: mol_type = other DNA
gtttggagcaaggaagctag

SEQ ID NO: 21612 - DNA, 20 bp, synthetic construct
  misc_feature 1..20: note = chemically synthesized
  source 1..20: mol_type = other DNA
tggagcaaggaagctagtgg

SEQ ID NO: 21613 - DNA, 20 bp, synthetic construct
  misc_feature 1..20: note = chemically synthesized
  source 1..20: mol_type = other DNA
ggagcaaggaagctagtggt

SEQ ID NO: 21614 - DNA, 20 bp, synthetic construct
  misc_feature 1..20: note = chemically synthesized
  source 1..20: mol_type = other DNA
agctagtggtgggcgctcac

SEQ ID NO: 21615 - DNA, 20 bp, synthetic construct
  misc_feature 1..20: note = chemically synthesized
  source 1..20: mol_type = other DNA
tagtggtgggcgctcactgg

SEQ ID NO: 21616 - DNA, 20 bp, synthetic construct
  misc_feature 1..20: note = chemically synthesized
  source 1..20: mol_type = other DNA
agtggtgggcgctcactggt

SEQ ID NO: 21617 - DNA, 20 bp, synthetic construct
  misc_feature 1..20: note = chemically synthesized
  source 1..20: mol_type = other DNA
gtggtgggcgctcactggta

SEQ ID NO: 21618 - DNA, 20 bp, synthetic construct
  misc_feature 1..20: note = chemically synthesized
  source 1..20: mol_type = other DNA
tggtgggcgctcactggtag

SEQ ID NO: 21619 - DNA, 20 bp, synthetic construct
  misc_feature 1..20: note = chemically synthesized
  source 1..20: mol_type = other DNA
gtgggcgctcactggtaggg

SEQ ID NO: 21620 - DNA, 20 bp, synthetic construct
  misc_feature 1..20: note = chemically synthesized
  source 1..20: mol_type = other DNA
tgggcgctcactggtagggg

SEQ ID NO: 21621 - DNA, 20 bp, synthetic construct
  misc_feature 1..20: note = chemically synthesized
  source 1..20: mol_type = other DNA
ctggtaggggaggcatgtga

SEQ ID NO: 21622 - DNA, 20 bp, synthetic construct
  misc_feature 1..20: note = chemically synthesized
  source 1..20: mol_type = other DNA
tggtaggggaggcatgtgat

SEQ ID NO: 21623 - DNA, 20 bp, synthetic construct
  misc_feature 1..20: note = chemically synthesized
  source 1..20: mol_type = other DNA
gggaggcatgtgataggaat

SEQ ID NO: 21624 - DNA, 20 bp, synthetic construct
  misc_feature 1..20: note = chemically synthesized
  source 1..20: mol_type = other DNA
aggaatcagtttgatctttt

SEQ ID NO: 21625 - DNA, 20 bp, synthetic construct
  misc_feature 1..20: note = chemically synthesized
  source 1..20: mol_type = other DNA
tttgatcttttaagcatttt

SEQ ID NO: 21626 - DNA, 20 bp, synthetic construct
  misc_feature 1..20: note = chemically synthesized
  source 1..20: mol_type = other DNA
ttgatcttttaagcattttc

SEQ ID NO: 21627 - DNA, 20 bp, synthetic construct
  misc_feature 1..20: note = chemically synthesized
  source 1..20: mol_type = other DNA
tgatcttttaagcattttca

SEQ ID NO: 21628 - DNA, 20 bp, synthetic construct
  misc_feature 1..20: note = chemically synthesized
  source 1..20: mol_type = other DNA
cttttaagcattttcaggga

SEQ ID NO: 21629 - DNA, 20 bp, synthetic construct
  misc_feature 1..20: note = chemically synthesized
  source 1..20: mol_type = other DNA
ccacctctctatataatttc

SEQ ID NO: 21630 - DNA, 20 bp, synthetic construct
  misc_feature 1..20: note = chemically synthesized
  source 1..20: mol_type = other DNA
atataatttcaagacttgat

SEQ ID NO: 21631 - DNA, 20 bp, synthetic construct
  misc_feature 1..20: note = chemically synthesized
  source 1..20: mol_type = other DNA
acttgattggcattgtccct

SEQ ID NO: 21632 - DNA, 20 bp, synthetic construct
  misc_feature 1..20: note = chemically synthesized
  source 1..20: mol_type = other DNA
ttggcattgtccctaagcac

SEQ ID NO: 21633 - DNA, 20 bp, synthetic construct
  misc_feature 1..20: note = chemically synthesized
  source 1..20: mol_type = other DNA
gcattgtccctaagcaccag

SEQ ID NO: 21634 - DNA, 20 bp, synthetic construct
  misc_feature 1..20: note = chemically synthesized
  source 1..20: mol_type = other DNA
tgtccctaagcaccagtaga

SEQ ID NO: 21635 - DNA, 20 bp, synthetic construct
  misc_feature 1..20: note = chemically synthesized
  source 1..20: mol_type = other DNA
aagcaccagtagaaagcttg

SEQ ID NO: 21636 - DNA, 20 bp, synthetic construct
  misc_feature 1..20: note = chemically synthesized
  source 1..20: mol_type = other DNA
caccagtagaaagcttgaag

SEQ ID NO: 21637 - DNA, 20 bp, synthetic construct
  misc_feature 1..20: note = chemically synthesized
  source 1..20: mol_type = other DNA
gaaagcttgaagaagcttct

SEQ ID NO: 21638 - DNA, 20 bp, synthetic construct
  misc_feature 1..20: note = chemically synthesized
  source 1..20: mol_type = other DNA
aagcttctcagtaaatacat

SEQ ID NO: 21639 - DNA, 20 bp, synthetic construct
  misc_feature 1..20: note = chemically synthesized
  source 1..20: mol_type = other DNA
aaatacatcagctgtatttc

SEQ ID NO: 21640 - DNA, 20 bp, synthetic construct
  misc_feature 1..20: note = chemically synthesized
  source 1..20: mol_type = other DNA
aatacatcagctgtatttcc

SEQ ID NO: 21641 - DNA, 20 bp, synthetic construct
  misc_feature 1..20: note = chemically synthesized
  source 1..20: mol_type = other DNA
catcagctgtatttccaggt

SEQ ID NO: 21642 - DNA, 20 bp, synthetic construct
  misc_feature 1..20: note = chemically synthesized
  source 1..20: mol_type = other DNA
cagctgtatttccaggtgag

SEQ ID NO: 21643 - DNA, 20 bp, synthetic construct
  misc_feature 1..20: note = chemically synthesized
  source 1..20: mol_type = other DNA
gcagtacctgctgaaatgct

SEQ ID NO: 21644 - DNA, 20 bp, synthetic construct
  misc_feature 1..20: note = chemically synthesized
  source 1..20: mol_type = other DNA
agtacctgctgaaatgctga

SEQ ID NO: 21645 - DNA, 20 bp, synthetic construct
  misc_feature 1..20: note = chemically synthesized
  source 1..20: mol_type = other DNA
tgctgagagaacgttctgac

SEQ ID NO: 21646 - DNA, 20 bp, synthetic construct
  misc_feature 1..20: note = chemically synthesized
  source 1..20: mol_type = other DNA
gctgagagaacgttctgact

SEQ ID NO: 21647 - DNA, 20 bp, synthetic construct
  misc_feature 1..20: note = chemically synthesized
  source 1..20: mol_type = other DNA
tgagagaacgttctgactag

SEQ ID NO: 21648 - DNA, 20 bp, synthetic construct
  misc_feature 1..20: note = chemically synthesized
  source 1..20: mol_type = other DNA
gagagaacgttctgactagg

SEQ ID NO: 21649 - DNA, 20 bp, synthetic construct
  misc_feature 1..20: note = chemically synthesized
  source 1..20: mol_type = other DNA
agagaacgttctgactagga

SEQ ID NO: 21650 - DNA, 20 bp, synthetic construct
  misc_feature 1..20: note = chemically synthesized
  source 1..20: mol_type = other DNA
acgttctgactaggagggct

SEQ ID NO: 21651 - DNA, 20 bp, synthetic construct
  misc_feature 1..20: note = chemically synthesized
  source 1..20: mol_type = other DNA
cgttctgactaggagggctt

SEQ ID NO: 21652 - DNA, 20 bp, synthetic construct
  misc_feature 1..20: note = chemically synthesized
  source 1..20: mol_type = other DNA
gttctgactaggagggcttg

SEQ ID NO: 21653 - DNA, 20 bp, synthetic construct
  misc_feature 1..20: note = chemically synthesized
  source 1..20: mol_type = other DNA
ttctgactaggagggcttgg

SEQ ID NO: 21654 - DNA, 20 bp, synthetic construct
  misc_feature 1..20: note = chemically synthesized
  source 1..20: mol_type = other DNA
ctgactaggagggcttgggg

SEQ ID NO: 21655 - DNA, 20 bp, synthetic construct
  misc_feature 1..20: note = chemically synthesized
  source 1..20: mol_type = other DNA
ctaggagggcttgggggaga

SEQ ID NO: 21656 - DNA, 20 bp, synthetic construct
  misc_feature 1..20: note = chemically synthesized
  source 1..20: mol_type = other DNA
aggagggcttgggggagaca

SEQ ID NO: 21657 - DNA, 20 bp, synthetic construct
  misc_feature 1..20: note = chemically synthesized
  source 1..20: mol_type = other DNA
gggcttgggggagacagaga

SEQ ID NO: 21658 - DNA, 20 bp, synthetic construct
  misc_feature 1..20: note = chemically synthesized
  source 1..20: mol_type = other DNA
gcttgggggagacagagaca

SEQ ID NO: 21659 - DNA, 20 bp, synthetic construct
  misc_feature 1..20: note = chemically synthesized
  source 1..20: mol_type = other DNA
gggggagacagagacagagt

SEQ ID NO: 21660 - DNA, 20 bp, synthetic construct
  misc_feature 1..20: note = chemically synthesized
  source 1..20: mol_type = other DNA
agagacagagttggctgttt

SEQ ID NO: 21661 - DNA, 20 bp, synthetic construct
  misc_feature 1..20: note = chemically synthesized
  source 1..20: mol_type = other DNA
gacagagttggctgtttcag

SEQ ID NO: 21662 - DNA, 20 bp, synthetic construct
  misc_feature 1..20: note = chemically synthesized
  source 1..20: mol_type = other DNA
ctgctatttgctttttgcct

SEQ ID NO: 21663 - DNA, 20 bp, synthetic construct
  misc_feature 1..20: note = chemically synthesized
  source 1..20: mol_type = other DNA
gctatttgctttttgccttg

SEQ ID NO: 21664 - DNA, 20 bp, synthetic construct
  misc_feature 1..20: note = chemically synthesized
  source 1..20: mol_type = other DNA
gccttggagattattttttc

SEQ ID NO: 21665 - DNA, 20 bp, synthetic construct
  misc_feature 1..20: note = chemically synthesized
  source 1..20: mol_type = other DNA
ccttggagattattttttct

SEQ ID NO: 21666 - DNA, 20 bp, synthetic construct
  misc_feature 1..20: note = chemically synthesized
  source 1..20: mol_type = other DNA
tttctgggtgtcccgatgct

SEQ ID NO: 21667 - DNA, 20 bp, synthetic construct
  misc_feature 1..20: note = chemically synthesized
  source 1..20: mol_type = other DNA
cgatgctgagctcccacttc

SEQ ID NO: 21668 - DNA, 20 bp, synthetic construct
  misc_feature 1..20: note = chemically synthesized
  source 1..20: mol_type = other DNA
tgctgagctcccacttcaag

SEQ ID NO: 21669 - DNA, 20 bp, synthetic construct
  misc_feature 1..20: note = chemically synthesized
  source 1..20: mol_type = other DNA
tcccacttcaagaagaacat

SEQ ID NO: 21670 - DNA, 20 bp, synthetic construct
  misc_feature 1..20: note = chemically synthesized
  source 1..20: mol_type = other DNA
attggtataaatttacaaac

SEQ ID NO: 21671 - DNA, 20 bp, synthetic construct
  misc_feature 1..20: note = chemically synthesized
  source 1..20: mol_type = other DNA
ggtataaatttacaaaccag

SEQ ID NO: 21672 - DNA, 20 bp, synthetic construct
  misc_feature 1..20: note = chemically synthesized
  source 1..20: mol_type = other DNA
ataaatttacaaaccagaag

SEQ ID NO: 21673 - DNA, 20 bp, synthetic construct
  misc_feature 1..20: note = chemically synthesized
  source 1..20: mol_type = other DNA
atttacaaaccagaagtagt

SEQ ID NO: 21674 - DNA, 20 bp, synthetic construct
  misc_feature 1..20: note = chemically synthesized
  source 1..20: mol_type = other DNA
ttacaaaccagaagtagtca

SEQ ID NO: 21675 - DNA, 20 bp, synthetic construct
  misc_feature 1..20: note = chemically synthesized
  source 1..20: mol_type = other DNA
tacaaaccagaagtagtcag

(The sequence listing continues in the following parts.)

1.-93. (canceled)

94. A method of preparing a population of ribonucleoproteins (RNPs), the method comprising combining a weight of a single-molecule guide ribonucleic acid (sgRNA) comprising the nucleic acid sequence of SEQ ID NO: 71,959 and a weight of Streptococcus pyogenes Cas9 endonuclease protein, wherein the weight ratio of sgRNA to Streptococcus pyogenes Cas9 endonuclease protein is 1:1.

95. The method of claim 94, wherein the Streptococcus pyogenes Cas9 endonuclease comprises, at the N-terminus, the C-terminus, or both the N-terminus and C-terminus, one or more nuclear localization signals (NLSs).

96. The method of claim 95, wherein at least one of the one or more NLSs is a SV40 NLS.

97. The method of claim 94, wherein the Streptococcus pyogenes Cas9 endonuclease proteins comprise a N-terminus SV40 NLS and a C-terminus SV40 NLS.

98. A population of ribonucleoproteins (RNPs) produced by the method of claim 94.

99. A population of ribonucleoproteins (RNPs) produced by the method of claim 97.

100. A method comprising introducing into a human cell the population of ribonucleoproteins (RNPs) of claim 98, wherein introducing the RNPs effects a double-strand break (DSB) within or near the B-cell lymphoma 11A (BCL11A) gene in the cell to edit the BCL11A gene.

101. The method of claim 100, comprising introducing the population of RNPs to the human cell by electroporation.

102. The method of claim 100, wherein the human cell is a CD34+ hematopoietic stem or progenitor cell (HSPC).

103. A CD34+ hematopoietic stem or progenitor cell (HSPC) produced by the method of claim 102.

104. An ex vivo method for treating a patient with a hemoglobinopathy comprising:
(a) isolating CD34⁺ HSPCs from the patient;
(b) editing the BCL11A gene of a plurality of the CD34⁺ HSPCs by introducing into the cell the population of ribonucleoproteins (RNPs) of claim 98, wherein introducing the RNPs effects a double-strand break (DSB) within or near the BCL11A gene in the cell to edit the BCL11A gene; and
(c) implanting edited CD34⁺ HSPCs of step (b) into the patient.

105. The method of claim 104, wherein the method further comprises treating the patient with granulocyte colony stimulating factor (GCSF) prior to the isolating step (a).

106. The method of claim 105, wherein the treating is performed in combination with plerixafor.

107. The method of claim 104, wherein the implanting step (c) comprises implanting edited CD34+ HSPCs of step (b) into the patient by transplantation, local injection, systemic infusion, or combinations thereof.

108. The method of claim 104, wherein step (c) comprises implanting at least 1×10⁴ edited CD34+ HSPCs of step (b) into the patient.

109. The method of claim 104, wherein the hemoglobinopathy is selected from a group consisting of sickle cell disease and thalassemia.

110. The method of claim 109, wherein the hemoglobinopathy is a thalassemia and the thalassemia is selected from the group consisting of α, β, δ, γ, and combinations thereof.

111. An ex vivo method for treating a patient with a hemoglobinopathy comprising:
(a) isolating CD34⁺ HSPCs from the patient;
(b) editing the BCL11A gene of a plurality of the CD34⁺ HSPCs by introducing into the human cell the population of ribonucleoproteins (RNPs) of claim 99, wherein introducing the RNPs effects a double-strand break (DSB) within or near the BCL11A gene in the cell to edit the BCL11A gene; and
(c) implanting edited CD34⁺ HSPCs of step (b) into the patient.
